United States Patent Application Publication US 2008/0034453 A1 - sequence listing, part 19

SEQ ID NO: 156743 - DNA, 239 bp, Glycine max
gacaaaatttagcagagttcaaaacaccaaccaagtaaagtaaagaagggaagatgtcactgataccaagtttcttcggtggtcgaaggagcaatgttttcgaccctttctcgctcgacgtatgggaccccttcaaggatttgtctttcccttctgctgaagattcagctttcttgaaaacacgagtggattggaaggagaccccagaagcgcacgtgttcaaggctgatattccgggg

SEQ ID NO: 156744 - DNA, 238 bp, Glycine max
ctttgaaacgcacagcttcaatcaccgaccacaccacccatcaacgacatgcttcctctttcccttctcaagactgcccaaggccaccctatgttggtggaactgaaaaatggggagacatataacgggcatttggttaattgcgacacatggatgaacatccatctgcgagaagtcatttgtacatctaaagacggagatagattttggaggatgcctgaatgctacatacgaggca

SEQ ID NO: 156745 - DNA, 239 bp, Glycine max
atgcaagtgaaattggatttagtcatggatctgtgtcatctcaatctaacatggatgctgatgacaaaatcaccccacaagtttttaagggacacaggaattgtgagacagtgaagggtgttaacttttttggacctaaatgtgagtatgtggtgagtgggtctgattgtggtcggttttcatatggaaaaagaaaggtggtcagcttattcgtgtcatggaagcagataagcatgttg

SEQ ID NO: 156746 - DNA, 243 bp, Glycine max
aggatggatgtaagtatatttgcatctgagaatagggtacatgagggtacgagaagcgcaatttgcatcggctacatcgcgggatatagagtggcagcaatcgctcaggcttgaactcccacttatgctttggtgagggaatccacactctctgactgctccaaggcacaactcgtccacaatgttgaggctttgggcgttaatttggtccgcggggatctgtacgatcatgagaagttggtg

SEQ ID NO: 156747 - DNA, 272 bp, Glycine max
attttcgcagcgatctttcgctcgttgttgtacgaggcatgcggtcggatagtgaacccgatttacgggtctgtcgggctattatggtccgggagctggcagctgtgtcaagccgccgtgaaaacgtcttgaaaggcgcgccgattacgccgatcacgtctgaagccgcggcatagcggcggtgcccaccgctcaagggttacgacatacgccacgtgttcaaagacgagaactccgccgccgcgtccaacggaactcagcaccaacgagtc

SEQ ID NO: 156748 - DNA, 275 bp, Glycine max
tggacctactgaagctgataagccaatcataatagagcttgctgttgcagccatggaggagctcattggaatggcgcaaatgggtgagcctctttggttgactaccctggatggcaccactggctcaacgatgatgagtacatcaggtcttttcctcgagggattggtcctagacccgttggtctcaagtgtgaagcttctagggagactgctggtttgatcatgaaccatggtaaccttgttgagatcctcatggacgtgaatcaatggtccac

SEQ ID NO: 156749 - DNA, 278 bp, Glycine max
aagaagcattagcaaaagcaagaagaactagtctaagcagaaatggcctcttcagtgatggcatctgtggccctcaaacctgcccctttcactgttgagaagtcctcagttagaggccttcctccctctcaaggaactcctcttcattcagagttgtggccagtggtggcaagaagatcaagactgacaagccttatggaattaatggtggcatggctttgagggaaggagttgatgcatctggcaggaaaggaaagggaaagggcgtttaccagttt

SEQ ID NO: 156750 - DNA, 273 bp, Glycine max
ctgagctcagcactcgaatcgagtttaaagctgaaaatgagggaaaattccactcattccacccagttgcgaccatccttagttacctgaccaaggcccctctggttccaccgggtacccagtggtgaatgcgttgtcaaagcagcgagctatgctggaaaacatcctgagggcttgtgttggattagctcctgagaacaacatgatcctagagtacaagtgaagttcaaagtcttaagagtaacggtttgggatagtgtagttgaatgtgat

SEQ ID NO: 156751 - DNA, 270 bp, Glycine max
cgcagccggcgcacctcttcctcgacgagctcggcgtggcgtacgacgagcaagaggactacgttgtcataaagcacgcggctttgttcacgtccaccatcatgagcaggatcctcggaggcccaacgtgaagctcttcaacgcggtggcggcggaggacttgatcgtgaaggaagggagggttgccggggttgtgaccaattgggctctggtttcgatgaaccatgacacgcatcatgcatggaccccaacgtgatggaggcgaaggtt

SEQ ID NO: 156752 - DNA, 270 bp, Glycine max
tgaaggttttggctggaattgacaccaacttcactgttacatccaaggcagcagatgatgaagaatttggagaattatacacctttaagtggactactctcctgattcctccaaccacatcttaataatcaacattgttggggttgttgctggaatctcagatgccataaacaacgggtaccaatcttggggacctctatttggaaaactattcttttcattttgggtgattgtccatctatatccattccttaaaggtttgatgggtcg

SEQ ID NO: 156753 - DNA, 273 bp, Glycine max
ccgacgaccagatagcggataatgttattggcgtcattttcgcagctcgtgacaccaccgccagtgtgctgacgtggatcgtcaagtacctcggtgaaaaccccagtgtcctagaagtgttaatgaggagcaagagtgcatattgaagagcaaggaagaaaggggagaagataagggtctaaattgggaagatgccaaaaagatgccaataacttcaagggtcattcaggagactctaagagttgcttcaattttgtcttttactttcagaga

SEQ ID NO: 156754 - DNA, 276 bp, Glycine max
acagaaggaggagagccgcggcaacgaggaccacgtctccgtcatccgcgactaccgatccaagatcgagtccgagctctccaacatctgcgacggtattctcaagctcctcgactctccctcattccctccgcttcctccggcgattccaaggtcttctacctcaagatgaagggagattaccacaggtacctcgccgagttcaagaccggcgccgagcgtaaggaggctgccgagagcactctctctgcatacaaagccgctcaggacattgca

SEQ ID NO: 156755 - DNA, 271 bp, Glycine max
gccatgcttctgtggctacctcaaaaaccctagcttgaagcagtatgttaactctcctaatgccaaaaaaaccgttagttcttgtggtattgcctatccaacttgttaagcacctttatatatatatataaaatgtgtgaacaatatatatatattgattaaaaaatatagtttaatttatatacacactttgatcctataaaaacatcttgacacaagcattcaatagaatttcaccactttatcatgacattttactataatgatgtgg

SEQ ID NO: 156756 - DNA, 270 bp, Glycine max
cacaaggcagaaagcaagctcatcctagagttttaaaaatggcagcagcctcctccatggctctctcttccccatccttggctggcaaggccgtgaagctgggcccatcagccccgaagtcgggagggtcagcatgaggaagaccgtcaccaagcaggcctcctccggaagcccatggtacggcccagaccgcgtcaagtacttgggcccattctctggcgagcccccgtcctacctcactggcgagttcccaggtgactacggctggga

SEQ ID NO: 156757 - DNA, 252 bp, Glycine max
gtaaaacctcagtctctcactcgcagatctttcactcacccaaaaccaagctagtccgaggaagtcctctattcagaaccagatatggagacaaaacccaccgagatcagcagcggaagatgttcggaggctacaacaagaggttcagacatttcagccctaccctcggctgctccatgaacttccacatctacttccctcagtctccttctccctctcacaaattcccagtcttgtactttctctctggcc

SEQ ID NO: 156758 - DNA, 269 bp, Glycine max
aaggaactgaacatggatctctttaggaagtgtatggagccggtggagaaatgtttgagggatgctaaaatggacaaaagaagtgttgatgatgttgtccttgttggtggttctccagaattcccaaggttcaacaactgctgcaggacttctttaatggaaaggagctgttcaagagcatcaatcctgatgaagctgttgcatatggtgctgctgttcaggctgcaattttaagtggtgagggcaatgagaaggttcaggatcttctc

SEQ ID NO: 156759 - DNA, 267 bp, Glycine max
atttcagagtttcaatctagagtcaccagagataaacagcaacatgtgtattattaatcaggaagctatcaagcagttgcagtcccttatggaaaacttggatgagcaacagaaaacacattccagattatgcaccggggctatccaacagaaacattagtacggtttctcaaagcaagggatgggaatgttgtcaaagcacataaaatgttaattgattgtttacaatggagagtggaaaatgagattgataatgttttatcgaag

SEQ ID NO: 156760 - DNA, 269 bp, Glycine max
tcccttcacaccattctcacaaaacaactttcaaactctgagaaagaatggctgccaacacattgatgagtactgctatctcagccttcccatctctcctttcttcctcaaaatccgatttgccaccgcagttcctcttgctagctttggtgtcaccaatgcctcttcttctcgcttttctatgagtgctgactggatgccaggccagcctagacctccttaccgtgatggttcagcacctggtgactttggattcgacactcttcgtc

SEQ ID NO: 156761 - DNA, 265 bp, Glycine max
aaggatgtcaagaataatgtgtcaaaagggaagaaacgaaagcatgatgcgggagttgagaagggcagcgggactgttgaaaagcttgtcaagattcaaattcctgcaacataaagaaacaacttgttgatgattgggactctgttactcagcaagataagcttgtaaaacttccccgttcaccaactgttgatgaaattctgacaaagtaccttgaatacaaatcaaagaaggatggcattgctcctgattcaataggagaaat

SEQ ID NO: 156762 - DNA, 262 bp, Glycine max
agaaaagagaacaaggtagttggtgttctttgggctaataagagggacagtggactatggtttgcacctcctgagtggagagaatgtaggcttggcattcaactcttaccgtactgcctatctctgaggtcttgttttccaatgttgattttgtgaaggagcttgtggagtggacattgcctgctttgaatagggaaggtgttggagaaggatggaaggggtttgtctatgctctgcagggtatttatgacaatgaaggtgc

SEQ ID NO: 156763 - DNA, 137 bp, Glycine max
acccttctcagctatgctcaggaaaaagtgggattttcagttcctcacaggcacttcttgtgaagccattgaagaggcagatgatggggaagatcaagggattgagaattgcagccaatccaccagcatttccgctg

SEQ ID NO: 156764 - DNA, 264 bp, Glycine max
agtggggctgcttttgggttcccaccatcaatagatctaaacaactgaacattccatgtctcatgatcttctagaaatgttactggccgatgttcagttgtgtagatctatgatggtggggctgcttttgggttcccagagactcctgaagatgctgccagagctggtcttattagtgggaaggataatatcattgatcgtagttctcaagatgcttatattaatgctattcgacgtgcagagaactgcatctatattgaaaat

SEQ ID NO: 156765 - DNA, 266 bp, Glycine max
atcaactcactcatcaatctcgtttgttctcactaactattacttcatcatgtcgtcgaacaaggttggtcaagtcatcaaatgcaaagctgcggtttcatgggaggcagggaagccacttgtgattgaagaagtagaggtggcaccaccacaagctggtgaagtgcgtttgaagatcctctacacctctctttgccacactgatgtttacttctgggaagccaaggggcaaactccattgtttcctcgtatatttggtcatgaag

SEQ ID NO: 156766 - DNA, 251 bp, Glycine max
tttggttaagtcttcaagtctactagggtttgcctcagggacagcccgtggaggtgttccatcagcacgcattgctatatacaaagtatgttggatcaaaataggttgtcctcagctgaaacccttgcagcatttgatgaagcaattgctgatggagttgatataatttccatttcaaccggacttactagtatagtgtacattccgtatttccaaagcgcatttgatataggaagtttccacgcaatgta

SEQ ID NO: 156767 - DNA, 269 bp, Glycine max
cagcaggatgaaggaaattgctttcaagaagcaagcagagctcgaagagatatttgtctgtgctcatatagaagtagatccagatgctgcccgggagaagattatggccttgatgattcaggaaacattgaaccaactgaattactggctgacatggacaatcagatagcaacagcaaaagaagaagctttaagccgaaaagatatattggacaaggttgagaaatggatgtcagcatgtgaagaagaaagttggcttgaagattataa

SEQ ID NO: 156768 - DNA, 265 bp, Glycine max
attcaaagggtatctgggctctggtatgtctacatagaaggacccttgtctgattggtgaaattgactccacaatgatggattgttgcttgatgtgattgtagagttgttatggaaggcgtgattgaaggagaaacaatttccaatgtttcctaatgcatgatgtttggaagacttggaatcttcttttctgcagaagtgtgggagggatgcatagtccattaccttcagtaattcctccgtcccacaaccttgcagcacctgga

SEQ ID NO: 156769 - DNA, 264 bp, Glycine max
cagcccagaagtatcgtgtggagaatttgtatgagggtccccttgatgatcaatatgcttcggctatcagaaactgtgatcctgagggtcctctgatgctctatgtctcaagatgattccagcatctgacaagggcagattttttgcttttggtcgtgtattctctggcagagtttcaactggtttgaaggtgaggattatgggaccaaattatgtccctggggagaagaaggatttgtatgttaaaagtgttcaaagaactgt

SEQ ID NO: 156770 - DNA, 263 bp, Glycine max
ctccgtcggtcatcatcatcagacccaaacaaattctctacgcagatcgaatcaaagctcctccatccaattccgagatgagcactggcgaccttctcagcatcgaaccctcgaacttaagttcttctttgagctcaagaagcagatatcatgctctcttatattgtcaaataagaccgatagctatatagctttcaaggtgaaaacaaccaatcccaagaagtattgtgttcgtccaaacaccggagtagtcatgccacaat

SEQ ID NO: 156771 - DNA, 264 bp, Glycine max
cccggcgccacctggatcccccacccgggttaactgctgaagagttcgaggacctcaaaccctccgtgctggagcaccacacctactccgtcacacccacccgccaaactcctccctcctcgcgcaggctatccacgcgccaccacacgcggtgtggtccgtcgtgcgctgcttcgacaacccacaggcctacaagcacttcatcaagagctgccacgtcaaggagggcttccagctcgccgtggggtccacccgcgatgtcca

SEQ ID NO: 156772 - DNA, 259 bp, Glycine max
cgtcttcataaacgcctttcttctccgtttccgtttcctcgttcgaattcgctttttgatctgcgaaaatgagagagtgcatctcgatccacattggtcaggctggtaccaggtcggaaatgcttgctgggagctctactgcctcgagcacggcatcgggcccgatgggcaaatgccaagtgacaagacagttggcggtggtgatgatgctttcaatactttcttcagcgagactggtgctggaaagcacgtgccacgt

SEQ ID NO: 156773 - DNA, 263 bp, Glycine max
gtggaatgtgccattctgatctccaccagattaaaaatgatcttggcatgtccaactatcccatggtcccaggacatgaagtggttggtgaggtactggaggtgggataaacgttagcaggttcagagtgggagagttggtgggagttggactcctcgtaggttgctgcaaaaactgccagtcatgccaacaagacattgagaattactgcagcaagaagatctggtcttacaatgatgtttatgtcgatggaaaacccacac

SEQ ID NO: 156774 - DNA, 260 bp, Glycine max
gctgtatgagatctgtgatgacaatagcatttgaatttgcatttgaaagccatatgcaagagcatgtagcatctatggcacgccaatatgttcggagcattatatcacagtccaaagggtagcattagcactttctccttctcatttgagttcacatgcagggcttaggtcaccattgggtactcctgaagcgcaaacccttgctcattggatctgcaacagttataggtgctacttgggtgtggagctacttaaatcta

SEQ ID NO: 156775 - DNA, 265 bp, Glycine max
gatggttctaacatagatgccaaagaaagtgctctagtttggaattacgagtatgcagaccgggactttggttcatgccaagctaaagagctttttgatcatctggaaatgttcttgccaatgagcctgtttctgttaagagtagtccaaacattgtggaagtaaaacctcagggtgtgagtaagggaatcgtagcagaacgtcttctcttaacaatgcaacaaaggggagtgattccagattttgttctatgcattggagatga

SEQ ID NO: 156776 - DNA, 264 bp, Glycine max
gaagaaagtggtgaatggtggagatcctcgtcttcggggttgcatcggaactctggaagcacgcagcttgatcaatgggctcaaagattatgcactgaccagtgccctcgggaccggagatttccacccatacaggctaaagagctgccgcttttggagtgtacagtgtctcttcttactgactatgaagctgctaaccattaccttgactgggagatagaaaagcatggtataattattgaattttctgatcctgtctataac

SEQ ID NO: 156777 - DNA, 263 bp, Glycine max
agcaagtgaaggcaaagcaggttaccttccacaggaagaagaatttgcagtattatgagatttcagcgaagagcaactacaatttcgagaagcctttcctctatttggcaggaaacttgcaggtgatcctaacttgcactttgtggaatctcctgcattggctccaccagaagttcaaattgatttagctgcacagcaacaacacgaagctgagcttcttgcagctgctagtcagccccttcctgacgatgatgatgaatctt

SEQ ID NO: 156778 - DNA, 260 bp, Glycine max
gagaaaggagggcaatttagcttgcacatactcaagcattccaccattgtggcaaagccaaggtcattttagactccaccacatgatcatgatcatatgatcaatcccttaattttttcttttttcttttcccttttctttactctgtattgtatcaatgcttgaaaatggggttgttccaaaaatgtcatatatatttggcctgctaatgggtattgtaaatctctgaacttgaagtgatgcacggttttgagatggtt

SEQ ID NO: 156779 - DNA, 258 bp, Glycine max
aagagaatggctcccaagggtttaatctttttggctgtgttatgcttctcagcactgtcactgagtcattgtcttgcggtggataatggacttgtgatgaacttcacaaggaatcatgccctcaggctgaagacatcatcaaagaacaagtcaagcttctctacaagcgccacaagaacactgctttctcctggctcagaaacatcttccatgactgtgctgttcagaggtgtgatgcttcactggtgctggactcca

SEQ ID NO: 156780 - DNA, 256 bp, Glycine max
cgagaacaataatggcacttatcagtgggttgtcaagcccaaaactgtcaaatatgaatttaaaaccaacacccatgtccctaaactaggggtaatgcttgtagggggggtggaaacaatggctcaaccctcactggtggtgttattgctaaccgagagggtatttcatgggcaacatagtacaagattcaacaagccaattactttgggtcactgaccaggcatcagctatcagagtggggtctgtccaagggga

SEQ ID NO: 156781 - DNA, 266 bp, Glycine max
actcgagccgaatcggctcgagttcgaacatgttattgagaaggatactaggaatattcatgacactgcaggagatgtataatcaatggcctttctttagggtcactattatttagtggaaatggtgtttgccaaaggagacccggggatcgctgctctttatgataggctccttgtttcagaggatctgtggtcatttggagagcagttgaggaccaagtatgaagaaaccaaggaattcctccttcaggtggctggccataggg

SEQ ID NO: 156782 - DNA, 261 bp, Glycine max
attgtttgttgttgtaactcgttcttcttcttttgttgttctgtgtttgtgtttgttttttctctcacctgaaaatgtcttgctgcggtggtaactgtggttgcggagctcctgcaagtgcggcaacggctgcggaggctgcaagatgtacccagacttgagctacactgagtcaaccaccaccgagaccttggtcatgggagtggcacctgttaaggctcaatttgagggtgctgaaatgggtgtgcccgctgagaacga

SEQ ID NO: 156783 - DNA, 262 bp, Glycine max
tggcgcaggtccaactccctcttgatgatgctgagaatgatgcccgccactatgatgatgaccgccctgacattggtggctttggctgtgccaatggcaaggtccagatcatccagcagatcaaccatgagggtgaggttaacagggctcgctacatgccccagaaccccttcatcattgccaccaagaccgttagtgctgaggtttatgtcttcgattatagcaagcatccctctaagccccctcttgatggtgcctgtaa

SEQ ID NO: 156784 - DNA, 256 bp, Glycine max
gttttcgatgtagataaggatgttgatgaccttttgccagttgaagttaaagaacagcgcctcagcaatctgctgcaggcattgatggttgcagcttgtgttgctgctatgcctctcttgaagaagataccaacctcagtgctttggggttactttgctttcatggcaattgaaagcttgcccggaaaccagttttgggagagaatactatatcttttcactgctccaagtcgaagatacaaagtgatggaggaac

SEQ ID NO: 156785 - DNA, 250 bp, Glycine max
caagactcatgctatgtgcattctaaccgtcaatttttccgtgaatgcaacatttacggcactgtagacttcatatttggcaatgctgccgtggttttccaaagtgcaacatttatgctcgtaagcctatggctcaacagaagaacaccatcacggcccaaaatagaaaagacccaaatcagaatacgggtatatccttgcacaattgtcggatcctacccgccccggatcttgccccggttaagggcag

SEQ ID NO: 156786 - DNA, 256 bp, Glycine max
agaataatcgagacacagatcatagtgatcattttttaatttctcagatttatccgacgtcgctgcagatccaccaaccgttatggctgccttcagcggtgataaacggcaccgtttttcggcttccttggcgccgcagctgccctcgtcttctcctgtatgggagctgcctatggcacagcgaagagtggcgtgggcgtggcttccatgggtgtaatgagacctgagctggtgatgaagtcgattgttcctgttg

SEQ ID NO: 156787 - DNA, 274 bp, Glycine max
tcgcatgcacgcgaatgcagctcgagggccttctcttcctccttctttctaagcatcatacttcttctctccattgtttcatttttatttccaattcttcaagtgaaaggaatataggaacttgaagtgatgaaaacaacagaatgttaaaggaagctttgatgtgaggtgaggtgaggaaatcacaagaggaatttgaaaatgagtacagcaagattcatcaagtgtgttactgtgggagatggagccgtgggaaagacatgtatgctcatct

SEQ ID NO: 156788 - DNA, 243 bp, Glycine max
gtagccgtcgcactttgcgttttctgcgtcatctccgattccccgacaatggccacccaaatgagcaagaagagaaagttcgtagctgatggagtgttcttcgctgaactgaacgaggttctgacaagggagttagccgaggacggatactccggcgtggaagttagggttacgccgatgcgcaccgaaatcatcatcagagccaccagaacccaagccgttctcggtgagaagggaaggaga

SEQ ID NO: 156789 - DNA, 241 bp, Glycine max
tggaaaaggaagttatggaacagcatacaaggctgttttggaggagggaacaacagtggtagttaaaaggttgaaggaagttgtggtaggaaagaaggagtttgagcagcagttgcagattgtggggagaattggaaaccaccccaatgtgatgccactaagggcttattactattccaaagatgagaaacttctggtttacaactacatgccaggtggcagcttgtttttcttgttgcat

SEQ ID NO: 156790 - DNA, 241 bp, Glycine max; identical to SEQ ID NO: 120754

SEQ ID NO: 156791 - DNA, 239 bp, Glycine max
gatatcttagttatctaattacctcaattaatcccttaattgcaagcatcatggctgaggagaaacaccaccaccacttccaccaccacaagggcgatgatgtgcctggcgaggttgattataagaaggaggagaagcaccacaagcatcttgagcaccttggggaacttggtgctgcggctgccggtgcttatgccttgcatgagaagcatgaggccaagaaagacccagagcatgct

SEQ ID NO: 156792 - DNA, 240 bp, Glycine max
gctgctatgatcttggcactcattgccatttccatgcttcaaacagtggttatggctgctaatgagcaaggaggccacttgtatgacaacaagagcaaatatggaagtgggagtgtcaagagataccaatgcccatcacaatgctcgaggagatgtagccagacccaataccacaagccctgcatgtttttctgtcagaagtgctgcaggaaatgcctgtgtgtgcccccggggtattat

SEQ ID NO: 156793 - DNA, 246 bp, Glycine max
cttcgagtttcacagccaagtcgtaaaagggtttcaagggatgcgaaaacatgcagagcttctggcaattgggtgatgaactccgtgggcactcaaaagcatcggaggatcacaagtggttaatggttgcctcgaaactggccgaacagacaagattgaagggggagcgtgtgaacaaccttgatctttcaaagggacccattgaaacaaggtcaagggataaatttgggttccaggaagagaaca

SEQ ID NO: 156794 - DNA, 239 bp, Glycine max
cctcgagcgaatcggctcaggattctgcttatgagagtgatgagaacagcactgacactgattcttatcctgctccaaaggctcacagcaacaggacaacctcagtgtccagaaggggaagaagaagaagaaattgaagtcaaagaaaagcaaggcacatgagtgtccaatttgcaacaagattttcaggtcaggccaagccttggggggtcacaaaaggtcccattttgttggaggtt

SEQ ID NO: 156795 - DNA, 240 bp, Glycine max
caaaaccacttccaaaaagcctaagattaccacatagtcacattcacattgaagttaaacttgcattgaaaatggagggaagagatgaggatgtaagagtaggagccaataggtatggagagaggcaaccaataggaacagctgcacagacacaagatgccaaagactacagagaggcaccaccagctccattgtttgagcctagagagttaacatcatggtctttctacagagcaggca

SEQ ID NO: 156796 - DNA, 236 bp, Glycine max
gaagaagccacataaccctaagcttcaaacgggtaagtgtcgctgggacttcaatggcagtgaccgaagctcaaaatcctcttcttggagaaaacacatgtggttccttgttaaaaaagcttcaggaaatatgggatgaggttggtgagagcgatgagcaacgagacaagatgcttcttcagttagaacaggagtgcttggatgtgtacaagagaaaggttgagcaggctgcaaag

SEQ ID NO: 156797 - DNA, 235 bp, Glycine max
gcactcttcatcaagctccgctccaacacaggggaaaatgagggagatccttcacgtgcagggagggcaatgcgggaaccagatcggttccaagttctgggaagtggtgtgcgacgagcacggcatagatccgacggggaagtacgtcggaaactcagatctgcaactcgagcgcgtgaacgtctactacaatgaagcctcgtgcgggcgcttcgtgccacgcgcggtgctgatg

SEQ ID NO: 156798 - DNA, 234 bp, Glycine max
ggcggcgaaggaagcgggggtggagcgcgtggtggcgacttcgtcgatctcatccattatgccaagccctaactggccagctgataagattaaggcagaagagtgttggacagaccttgaatactgcaaacagaaggggttgtactatcccattgcaaagactctagcagagaaagcgggttgggaatttgcaaaggagacaggttttgatgttgtcatgataaaccctggtac

SEQ ID NO: 156799 - DNA, 236 bp, Glycine max
ctcgctccttccttctctcatcaacaacatgcagatcttcgtcaagactttgaccggcaagaccatcaccctcgaggtcgagagcagcgacaccatcgacaacgtcaaggccaagatccaggacaaggaaggtatccctcctgaccagcagaggttgatttttgctggtaagcagctggaagatggtcgcactcttgctgattataacatacaaaaggaatcaacacttcacttgg

SEQ ID NO: 156800 - DNA, 238 bp, Glycine max
tgcttttctttctgcgcgcttttcccaattaagtagttcttccttttctcaaagcaaaaaaaatgttcatcgagagtttcaaggttgagagtcctaacgtgaagtacacagagactgagattcagtccgtgtacaactatgaaaccactgaacttgttcacgagaacaataatggcacttatcagtgggttgtcaagcccaaaactgtcaaatatgaatttaaaaccaacacccatgt

SEQ ID NO: 156801 - DNA, 246 bp, Glycine max
gtaagtatcaatggcttccgaagaatcccagaacaagccccccagcgagcagtccactaccgaactcatcacgagcgcgaagctggtggcggaggcggcgcagtcggctctgaagagcgacagcgtcaaagtggacaaggccaaggtggctgacgctgccggcgatcttctcgacgcggcggggaagtatggaaaacttgatgacaaacaaggcatagggcaatatgttgacaaggctgctgatta

SEQ ID NO: 156802 - DNA, 240 bp, Glycine max
gataaaactgattggggaagtgagataggatggatttatggttctgtcacagaagatattcttaccggatttaagatgcatgcccggggttggcggtctatatactgcatgcctaagcgcccagcgtttaaaggttctgctcccatcaatctttcggatcgtctaaaccaagtgcttcgatgggctttaggttccgtggaaattcttttcagccgacactgtcccatctggtatggttat

SEQ ID NO: 156803 - DNA, 232 bp, Glycine max
agaaacccaaaaatcaaggtttatggagtggaaccagttgaaagtgcagtcttgagtggaggccagccaggagggcatctgattcagggaattggtgctggtattgttcctgctgtgctggatgtgaatctgcttgatgaaattcttcaggtatcaagtgaggaagctatagaaactgctaagctgttagccctgaaagaaggtttgctggtagggatttcatctggagcag

SEQ ID NO: 156804 - DNA, 242 bp, Glycine max
cgcattgcttcgcctcacaacagcagctgcagcagcaatggctcccaaacgaggtggaaaggctccggctcttgccgctaagaagaagcctgagaaggtcacgaatccgttgttcgagaagcgtccgaagcagttcggaatcggaggggcgttgcctccgaagagagacttgactaggttcgtgaagtggccaaagaatgttcaaattcagaggaagaagaggattctgaagcagaggttga

SEQ ID NO: 156805 - DNA, 238 bp, Glycine max
aacccttctgctgagggtggaggagaagatgagggagttgatgatgcagctgttaaggttgttgacattgttgacacattcagacttcaggagcaacccgcattcgataagaagcagtttgttaccttcatgaagaggtttatcaagaatttgactcccaagctcgatgcagagcaacaggagttgtttaagaagcacatcgagggagcaactaaatacctgctctctaagattaaag

SEQ ID NO: 156806 - DNA, 233 bp, Glycine max
ccaccggctacatcgactacgaccgcttggaagaaaaagccctagacttcaggccaaaactcataatctgcggtggcagcgcgtaccctcgcgattgggactacaaacgtttcagggaagtcgctgataagtgcggacattgcttctctgcgacatggcgcacactagcggccttgtggcccgcaggaagtgaacagccccttcgagtattgcgacattgtgaccaccacgac

SEQ ID NO: 156807 - DNA, 235 bp, Glycine max
gttttctcttcctcgttcgtttcatttcgtttcgttgaagagcaacttttctctctctgtctctgtacaattctcccttttcttccctcgtagatcgaaagggaatattcttccatggcctccaagcggattctgaaggagctcaaggacctacagaaagaccctccaacctcttgcagtgccggtcccgtagcagaagatatgtttcattggcaagcaactataatgggtcccc

SEQ ID NO: 156808 - DNA, 231 bp, Glycine max
attacctccaccccgatctcaaacgagggaagctcacaccccaagaagaacacctcgtcatggaccttcattccaaatggggaaataggtttgagaaccatgcagaaataattaaactataagctacctaccttccaatcatcatcactcataattttaattaattttttcctaccatacagtactattagtattaattagttctttgtcttatgtttttgttttttaata

SEQ ID NO: 156809 - DNA, 232 bp, Glycine max
cttggaggataaggcggtgccatcactcgccgctaagtggaagggtaaaacttcagaggagttagttcacaccctccacttctacagggatatcatttcagggccgtttgaaaagctaattagagggtcgaagattctgccattggctggcgctgaatactcaaagaaggtgatggaaaactgcgtggcacacatgaagtctgttgggacttacggtgatgctgaagccgca

SEQ ID NO: 156810 - DNA, 230 bp, Glycine max
gaaactatgcgtttttgggatttgcgtgctccttggttagaacctctaaggggtccgaatggtttagacttgagtagactgaaaaaagatatacagccttggcaagaacgccgttctgcggaatatatgacttatgctcctttaggttccttaaattccgtgggtggcgtactacagagattaatgcagtcaattatgtttctcctagaagttggttagctacttctcat

SEQ ID NO: 156811 - DNA, 230 bp, Glycine max
tcgagccgaatcggctcgagtggagaaaacagtggtgggctatcccaatgacgatgaaccctttggtaacttcccatcatgcaacaaatcctagtaatcctagtaataatactaataataatgaaaacacaaactgtctcttcattcccaactgcagtaacagttctggaactccttctatcatgctccacaacaacaacactgatgatgataacaacaaaaccagcact

SEQ ID NO: 156812 - DNA, 235 bp, Glycine max
tcccctctttcgaatttcgatactttgatcagatccacaacacttcttcatccatgacgcttggttcttcaggatccagtgtcgtggttccaaggaacttcagattgctggaggagcttgagaagggagaaaaaggaataggagatggcacagttagttatggaatggatgatggtgatgacatttacatgcgctcttggactggaaccattattggtccctataatactgtaca

SEQ ID NO: 156813 - DNA, 244 bp, Glycine max
tgctcttcaatgtttcacgcgtagagactcatgactggctggctacctgaacaaagcaaaacgaaatccggaaggttcagatttcaatgtgctttgttcaggtagccagccagtcatggtgctcttcaatgtttcacgcgtagagaccactcccttcgatggccagaagcctggaacctctggtctcgcgcaagaaggtgaaagtgttcgtgccacctcattacctccataactttgttcagtc

SEQ ID NO: 156814 - DNA, 234 bp, Glycine max
ctttccaatacaataatcactaactgaatattcgatcggagatgtctgccgccgccgaagaagctaacgctcccgccgtcgaaaagccggttgaggaggtgaaggcgccgaaccccgcgaaggagaagaaacctaaggctccgaaggaaaagaagccaaaacaggccaaaacagcttcacatcctccatattttcagatgattaaggaggctttgatcgctttgaacgagaaag

SEQ ID NO: 156815 - DNA, 234 bp, Glycine max
tctacactggtaattatgatcaatatgttcagacacgttctgagctagaagagaaccagatgaaacagtacaagtgggagcaggagcagattgcctcaatgaaggaatacattgcccggtttggccatggttctgcaaaactagctcgccaggcacagagtaaggagaaaacgctggcaaaaatggaacgtggtggacttgcagagaaggtggtcagagacaaagttttggtat

SEQ ID NO: 156816 - DNA, 231 bp, Glycine max
gatggccgctgttgctgccctgtgcgtgcaatacgaagctgatttcagaccaaacatgagcatcgtagttaaagctcttcaacctttgttgaacgcaagacacgggcctgctggtgaaactccaaactaatctctgtctatatgtatcaacgagtatgtgcataagtctaagtctgcacccgagatataagaaagtgactgcttcagaagcggatggaaaattgcttgaac

SEQ ID NO: 156817 - DNA, 231 bp, Glycine max
ccatctcgcaggtcgcggcgatcgcggcccacgaccagggggtgaaggtggagctggcggagtcctccagggccggtgttaaggccagcagtgactgggtgatggagagcatgaacaagggcactgacagctacggcgtcaccaccgggttcggtgctacctcccaccggagaaccaaacagggcggtgccttgcagaaggagctaattaggtttttgaatgctggaatat

SEQ ID NO: 156818 - DNA, 231 bp, Glycine max
cccacttccaaatcttctcctctcgctatgggttgcggctcctcccttccagataggggctcaaggcagttgggtcgacccaattcagagaatggtggagggcaggacgccaagaatctgagggtcaagcttgttctcttaggtgattctggtgttggtaaaagctgtattgttctacgatttgttcgtggtcagtttgatccaacatctaaggtaactgttggagcttct

SEQ ID NO: 156819 - DNA, 237 bp, Glycine max
gtagaatcaacaacagattttcctcagaagttcttctactgcttttggtggggtttgcgcaatttaagttctcttggacaaaatctcaagactagtactgatgtctcagaaatagcctttgcaatcttcattgccatctttggattggtcttattctcgttacttattggaaacatgcagaaatatctgcaatctacaactgttagagtggaggagatgagagtgaagagacaggac

SEQ ID NO: 156820 - DNA, 236 bp, Glycine max
gtgaagtagcaaataccaagttgtttcaagttaagccttattacagttagtaccaaatatgggacacacatggttgggttcattagtgatttttatgacaatttcggccgtacaagcccaactcaaaactgggttttactcctcttcgtgcccaaacgcagaagccacagttcgatccactgttgaatcctacttcaataaagatcctacaattgctcctggcctgctccgacttc

SEQ ID NO: 156821 - DNA, 232 bp, Glycine max
ttggctttgtggcaaatgaggaaaccttatatgatggaaaaagacaaaatgaacaacaacattaagagcaagctaaggaagggattgtggtcacctgaggaagatgaaaaactcctaaggtacatgatcactaagggacaagggtgttggagtgacattgctaggaatgctggccttcaaaggtgcggcaagagttgccggcttcgttggattaactacttgagacctgatc

SEQ ID NO: 156822 - DNA, 230 bp, Glycine max
ggccatccaagctgtcctctccctatatgcaagtggtcgcacaactggtattgttttggactctggcgatggtgttagtcacactgtgccaatctatgagggctatgcactccctcatgccattcttcgtttggatcttgctggccgtgatctgactgactctttgatgaagatcctcactgagagagggtacatgttcaccacctctgccgagcgggaaattgttcgtg

SEQ ID NO: 156823 - DNA, 225 bp, Glycine max
gatcttacctacctctaatttgaggattttcactgttgccgagttgaaggctgcaactaggaatttcaaagctgatacagtgcttggggacggaggtttttgaaaagtcttcaagggttggcttgaagagaaggccacttcaaagggtggaagcggaacagtcattgccgtcaaaaaagtcaactctgaaagcttacaaggacttgaggagtggcagtccgaagt

SEQ ID NO: 156824 - DNA, 227 bp, Glycine max
ctgctacttactactatagtgtctgactcacaggccagagggcaaagattttgagcacaatggcctcgacacaatgctttttgcaccaccacgccctcaccactccagctagagcttcaacacagcgcctagttgtgagcaccaaaccaaaccacattgtttgcaaggcagcacagaagcaggttactgtccaagagggtgaggacactactactggccttgtctct

SEQ ID NO: 156825 - DNA, 227 bp, Glycine max
cttgctgattttttacaagttttctgagatcagggtccctatggtctccaaagctttctagttgtctttataatggcaggctagagatattgccttctaaggactgggaactagagtctattcatagctcggaagttttggatatgataagggaacacataactactgtaactggcttgagagcaaaatctagtgtaactgagtgttgggcaacaacccaagttaga

SEQ ID NO: 156826 - DNA, 255 bp, Glycine max
caatcagcatactcttcctggaggtgttggtccaatccaagtgcgatatgctgatggtgaacgggaacgcctcggtgctgttgagtacaaattatttgtgggctctctgaacaaacaggctaccgtaaaggaagttgaggaaattttctcaaaatatggccgggttgaagatgtttatcctatgcgtgatgagaagaaacaaagtcgtggatgtggttttgttaaatactcacacagagatatggctctggcagc

SEQ ID NO: 156827 - DNA, 246 bp, Glycine max
tggccaaggtggaacatttgcgctttattccttgctttgccgacatgcaaagataaaaaccattcctaaccagcatcgaactgatgaagagctaacgacgtatagttcggtctacgttgcatgaaaggtcgtttgcggcaaaaaccagaagtggtttgggaacaagaatcttcgagagagcattttattctggccttgttagcaccgcatggttattagaaacggattcttacccggctatatcgt

SEQ ID NO: 156828 - DNA, 256 bp, Glycine max
ggaaaaggctgaaaatgctattctctctggctgttcagctggaggactgactacaatattacactgtgatcgctttaaaaatctgttgccttctgaagctaatgtgaaatgtgttccagatgctggttattttgtcaatgtagaggatatctcaggaacacatttcatcgaaaagttctacagtgaagttgtttcaactcatggctcagcaaagaatttgccctcatcctgcacttcaaaattcagcccagaacta

SEQ ID NO: 156829 - DNA, 251 bp, Glycine max
gtgattgttgtgactcgttcttcttcgtcgttatcttcttcttttgttgtttgtgtgtttgtgttttctctcacctgaaaatgtcttgctgcggtggtaactgtggttgcggaagcgcctgcaagtgcggcaacggctgcggaggctgcaagatgtacccagacttgagctacaccgagtcaaccaccaccgagaccttggtcatgggagtggcaccagttaaggctcaattcgagagtgctgaaatgggt

SEQ ID NO: 156830 - DNA, 252 bp, Glycine max
attttctaaccagttgttcacggccagtggacataaatatgacaccaccaagatcttaacccctgagtatgtccttaatgttgatgcatacaacaagtacagcaagttataccttagccctctgtttgcattatctattggatcaggttttgcaagatttacggcaaccctcactcatgtagcactctttaatggaagagacatttggagacagagtagatcagcaatgagtaacgcaaaattggatatcca

SEQ ID NO: 156831 - DNA, 253 bp, Glycine max
gggtactgttacatcaatggagcctaatgaaggcacttttattcttcacaacgagaaaacaaggaagggcaagataaaacctgttcatgttgttgatgttcctgggcattctcggcttcgacccaaactggatgagtacttgcctcaagcagctgggatagtttttgtggtagatgctttggactttttaccaaactgccgtgctgcttcagagtacctttatgatctattgactaaaggaagtgttgtgagg

SEQ ID NO: 156832 - DNA, 253 bp, Glycine max
tctttggcaccgacggaaacctactagccaagcaccgcaagatacatctttttgatattgacatccctgggaagattacttttattgaatcaaaaactcttactgctggggagactccgacaattgtggacacagaggttggacgcattggcataggcatctgttctgacattcgatttccagaactagctatgctatatgctgctagaggtgctcacttactctgctatcctggggccatgaacatgacaac

SEQ ID NO: 156833 - DNA, 255 bp, Glycine max
agtgagagatagagatcgcagacacagagcagaatggcttctacccaatgtttcttgcaccaccatgctcttaccacccctgccagtgccagatccccatcactacgcatcttggttagcaccaagcctaaccagcttgtttgcaaggcacagagacaacaaacaccacaagaggatattgatgtcagcccaatctacccccgtttagctctaactgtgctcattggtgctgctgctgttggctccaaagtccaa

SEQ ID NO: 156834 - DNA, 255 bp, Glycine max
ctggaaaatattggaagagagataccacttctcttgccaattcacagctgatctatttgccatgaaccacacagatttcattatcaccagtaccttccaggagattgctggaagcaaggacactgttggacagtacgaatctcacacagccttcacccttcctggactctaccgcgttgtgcatggtattgatgtctttgatccaaaattcaacattgtctcccctggagctgatcaaaccatttacttccccca

SEQ ID NO: 156835 - DNA, 259 bp, Glycine max
tgggtgacaaactcattgggcttgtgacttcaagagaagatattccagatctgctcaaggcaagtaaaattcctaaaatttattagtctgaaatgattttccactaatcatactttgccacagcttgatgacgtgatagatcttgtggtccccagaggcagtaataagcttgtctctcaaatcaagggtacaacaaagattcctgttcttggtcatgctgatggaatatgtcatgtatatgtagacaaaacagctaata

SEQ ID NO: 156836 - DNA, 254 bp, Glycine max
gttcttcgtccccttcccaatcttcaactttagggttcctttaatctcgttattcctcttcactcccaaactccgttcactccaacaacactctgatttagaaatggatggaccggctggtcgaggtggtgctggactggacatgtttctgccaaattataaattgggaaaaacacttgggattggatcttttggcaaggtcaaaattgcagaacatgtattgactggccataaggttgcgatcaagattctta

SEQ ID NO: 156837 - DNA, 253 bp, Glycine max
cggctcgagctgctgttagatctgtacccgcctagccattgatttggaaaagtccaacttcaaggatgagtaagcttcagagtgatgctctaagagaagctatctcaggaatcatggctgattccaaggaaaagaacaggaaatttgtggagaccattgaactccaaattgggttgaaaaattatgatccccagaaggacaagcgtttcagtggctctgttaagttgcctcatattcctcgccccaagatgaa

SEQ ID NO: 156838 - DNA, 252 bp, Glycine max
ctgggctcaacgtgatgcgaattatcaacgagcctaccgcggctgccattgcttatgggctcgacaaaaaggccactagctctggggagaagaatgttctcatttttgatctcggtggtgggacttttgatgtctctcttctcaccatcgaggagggtattttcgaggtgaaggccactgctggtgatactcacttgggaggtgaagattttgataacagaatggtgaaccattttgttcaggaattcaaga

SEQ ID NO: 156839 - DNA, 253 bp, Glycine max
gtatgatcctaactgtgaccctccagatgggccatgtaagggtgttgaagtgcttgagtgacactgatcctctttgttggcccctctgtatgatcctaactgtgaccctccagccgtcattccaattgatcttgacattgatgaggatctaggggaagagatgataagggacatgatgtggaaagaaatgcttcattaccatcctgaatctgctatggagagtgcagggttgtgctaatgatatttacttcct

SEQ ID NO: 156840 - DNA, 252 bp, Glycine max
gagaaaggagggcaatttagcttgcacatactcaagcattccaccattgtggcaaagccaaggtcattttagactccaccacatgatcatgatcatatgatcaatccccttaattttttcttttttcttgtcccttttctttactctgtattgtatcaatgcttgaaaatggggttgttccaaaaatgtcatatatatttggcctgctaatgggtattgtaaatctctgaacttgaagtgatgcacggtttt

SEQ ID NO: 156841 - DNA, 247 bp, Glycine max
gttcatcgtcccactttcttctccttttagggtttcctttttgtttctcctttccagatctgcatcttccattttttaggattaagcggtgagattcgtgaatctgagaaatgtcggattcttctcgggaggagaatgtttacatggcgaaattggcggagcaggccgagcgttacgaggagatggttgagttcatggagaaggtagcaaagactgtggaggttgaggagttgacggtggaggagac

SEQ ID NO: 156842 - DNA, 237 bp, Glycine max
ccaaaatttctcattctccctttcctctccgaaccctcgatcactctcacgcgctcctatattcgctcctccaccgtcgctctctcgaacaaccacaacaccatcttcatcacatggcaaacgcagcatctggtatggcagtccatgatgactgcaagttgaggtttttggagctgaaggcaaaaaggacacgcggtttcatagtttttaagattgaggagcagcagaagcaggtca

SEQ ID NO: 156843 - DNA, 253 bp, Glycine max
caaaacactcataacacaaagcacaaagcaaagctcatccttgagttaaaaaatggcagcagcttcttccatggctctctcatccccatccttggctggcaaggccgtgaagctgggcccatcagccccagaagtgggaagggtgagcatgaggaagaccgtcaccaagcaggtctcctcaggaagcccatggtacggcccagaccgagtcaagtacttgggcccattctctggcgagcccccgtcctaccta

SEQ ID NO: 156844 - DNA, 254 bp, Glycine max
cttgtgggagttaactaccacaagaattccctggcaaggtttgaacccaatgcaggttgttggagctgttggatttcaaaataaccggcttgaaattccagaagatgtcaatccagtagtagcacagataatacgtgattgctggcaaacggagccacacttgcggccatcattctcacaactgatgtctcgtctttaccgtcttcaaaatttgattgtcccaaaaacgggtgcaacacattaaaccaagttgt

SEQ ID NO: 156845 - DNA, 251 bp, Glycine max
gttcaggcaatattggactggcagaagagaacaatggagatgatgtacaaggacattattcaggcactcagagctaagggaatcgatgaagatcctcgaaactatttgacattcttctgccttggcaaccgggaagtgaagaaaccaggagaatatgagccttctgagcaaccagatcctgattcagattatcagagagcccaagaggcccgacgattcatgatttatgttcataccaagatgatgatagt

SEQ ID NO: 156846 - DNA, 252 bp, Glycine max
atcatgcctacagactcctgaagatgtagacaagttgcgtagaattggagtgaaaactatattttgcttacaacaagattcagaccttgaatattttggagttgatattaatgccatacgagaatatgccaagacatgcaatgacattcaacacttgcgtgctgagataagggactttgatgcatttgatctacggaggcggcttccagctgtagttagcaaattatacaaggcaataaattccaatggagg

SEQ ID NO: 156847 - DNA, 254 bp, Glycine max
ctcgagccgattcggctcgaggccgcctcggctagggttcggaaacgaagacgggttctgacctcttttcgcgatgagggacaagtggaagaagaagcgtatgaggaggctgaagaggaagcgccgaaagatgagacagagatccaagtagtgcgttaaacctagtttgtttccgttgcttttacaattgcttatgttgtcaaataggacacccagttgttagtggcactggtctctcctttttgatgttttga

SEQ ID NO: 156848 - DNA, 251 bp, Glycine max
gaggtgttcacctcttgtaatgatgtgctgcggaagaagcaattctgttacatgcttgcacgtcatggaattacttttgagcttgatgagaagatggtttcagacgatgaggacagagaattgttgcaggaaatcataaacaattctaagttaagtgaaggatatctcacccttgctcgtgatattgaggtcatggagcccaagtcccctgaggatatatacaaggcacacttgcttgatggccgggctag

SEQ ID NO: 156849 - DNA, 250 bp, Glycine max
gcaatttgagatgacaggtttggaccctgagtataatagattgttcaatgagggcatggtgtgcactgctagggttgtgtccaaggctgtgatcactgggtacaaagatgggttcaaccagattaagtccttggttgatgttggaggtggcattggagggtctctttctgagattgttagggcttatcctcacatcaatgccatcaactttgacttgcctcatgtggttgccactgctcctaagtatgat

SEQ ID NO: 156850 - DNA, 250 bp, Glycine max
gaaacagtgtgatgaaaatgaaggtccttgttttcttcgttgctacaattttggtagcatggcaatgccatgcgtacgatatgttccctctccgaatgaacactggctatggtgcccgtactccggaggtgaaatgcgcaagttggaggcttgctgacgaagcacacaacatctttggctttgagcccattcctgaagagtgcgttgaagcaacaaaggaatacatccatggcgaacaatatagatcaga

SEQ ID NO: 156851 - DNA, 250 bp, Glycine max
cagtgttggtcgaacccattgtgtgaagttggtgcaccgtttgtacccagagattgatccagctctgaaccctgaccacgtccctcacattctgaagaagtgccctgatgccattccagaccctaaggcggtgcagtacgtgagaaacgaccgtggcactcccatgattctagacaacaactactacagagacatattagaacccaagggtctcttgatagtggatcaccaactagccaatgacaagagg

SEQ ID NO: 156852 - DNA, 267 bp, Glycine max
ctgcgcaaagcgggtggtggtggacgcgcgccaccacatgctgggtcgtctagcctccatcgtggcgaaggagcttctgaacggccagaaagtggtggtcgttcgctgtgaagagatttgcatctcgggcgggctggtgaggcagaagatgaaatactgtgaggtctcctgtcgcagaacgcatggaacacgcaaagccctatccatgtgccccataccacttaccgtgtccccctaccagagatacttctaggcgcaccgattcgt

SEQ ID NO: 156853 - DNA, 251 bp, Glycine max
tggtgaatgcgtagaaaaggaaaataaagaaattagcgtgaaaaatgttgggtgtgttcagcagctccatagtgtcgccgccggaggagctcgttgccgccggcagccgtacaccgtcgccgaagatgacggcggcggcgctgcggaagtggttcgaggagaagaacccctccgcagtgtcggtggaggtcggagagcatgtccagctcgcttatacccaccagaacgagtcgccgtttcagcccagatcc

SEQ ID NO: 156854 - DNA, 249 bp, Glycine max
aagatggccgaaccttggcagattacaacatccagaaagaatctaccctccacttggtgctccgtcttcgcggtggtatgcaaatctttgtgaagactcttactgggaagaccattactttggaggtagagagctctgacacaattgacaatgtgaaggccaagatccaagacaaggagggtattcctccagaccagcaaaggttgatttttgctgggaagcagcttgaagatggacgcacgctggcag

SEQ ID NO: 156855 - DNA, 239 bp, Glycine max
aagatggagaaagcttcgtacttcaaccgcgtgcggtggcacacctcgctggcgaactcgcagtgtggtccttcgtattcctgggcgcgatcttgatctttttcctccggtcgccggcgtcgtcgccggttccggcggacctctcccggcggtctctgcggacctacaactggggcggacccgtctgggagaaacgggtccggcctccgccagatccgttccgatacgggttcgcgttt

SEQ ID NO: 156856 - DNA, 250 bp, Glycine max
ccttttgacctctttgacacaaggaagaagcctaacaatattaagctttatgtccgccgtgtctttatcatggacaactgtgaggagttgattcctgagtatttgggctttgtcaagggtattgtggattccgaagatctaccactcaacatttcaagagaaatgttgcaacagaacaagatcttgaaggtcatcagaaagaacttggttaagaagtgccttgagctcttctttgaaattgcagagaaca

SEQ ID NO: 156857 - DNA, 250 bp, Glycine max
atcttcccaagcttgttgaaggtcttaagcggttggctaagtcagatcctatggttgtttgtaccattgaggagtctggtgaacacattgttgctggtgcaggagagcttcatcttgagatctgtttgaaggacttgcaggatgatttcatgggtggagctgagattatcaaatctgaccctgttgtgtcattcagggagactgttttggagagatcatgccgcaccgtgatgagcaaatcacccaacaa

SEQ ID NO: 156858 - DNA, 249 bp, Glycine max
gtcctggaagctgatattgttgtcgttggtgttggaggaaggcctcaaacagccttagtcaaagggcaggttgaagaggagaagggtggaatcaagaccgatgctttcttcaaaactaatctttccgatgtatatgctgttggtgatgttgctactttccctttgaaattatacggtgaattgagaagagttgaacatgttgatcattctcgcaaatcagctgaacaggctgtgaaggccatcaaggca

SEQ ID NO: 156859 - DNA, 249 bp, Glycine max
gagttgtttttgcttaatggggtgtataacattggggactttattccttggattgatttcttggacttgcagggttacataaagaggatgaagactttgagcaagaagtttgatatgttcatggagcacgtcctggatgaacatattgagaggaagaaagggattaaggattacgtggcaaaggacatggttgatgttcttttgcaacttgccgaggatcctactcttgaggtcaagctcgagaggcat

SEQ ID NO: 156860 - DNA, 251 bp, Glycine max
ctcatcactcatctatggctacctttccctcccctccttcaccatcttcttcttcttcaattccgtctccaagatctagaatgttttactatgctggaagtgaagaccactatgaggagcctcacttcctccaagcttgttttctttgcagaaaaccactaggccaaaatcgtgacatcttcatgtacagagggaacacaccattttgtagcaaagagtgcagacaggagcaaatagagattgatgaggca

SEQ ID NO: 156861 - DNA, 276 bp, Glycine max
gcggcacccacacacacagttcgtcggaatgggaagggtgattcgcgctcagcgtaagggtgctgggtcggtgttcaagtctcacactcaccaccgcaagggtccggcgaggttccgcagcctcgacttcggcgagcgcaacggctacctcaagggcgtcgtcaccgacatcatccacgaccccggtcgcggcgcccctctcgccaaggtggcattccgccaccccttccgctacaagaagcaaacggagctcttcgtcgccgccgagggcctcta

SEQ ID NO: 156862 - DNA, 263 bp, Glycine max
cggctcgaggttatgacagtgccatcagcaatggaaacaactttgttccactagagatggacggttggaaacaaacaatggtggcaatttctagcaaaaacctaaagcatatccttattgcatgtgccaaagccatttcagacgatgatttgctaatggcacagtggctgatggatgaattaagacagatggtgtcagtttctggcgatccgtttcagcggttgggagcatacatgttggaaggacttgttgcgcgattggct

SEQ ID NO: 156863 - DNA, 263 bp, Glycine max
tgatcttgataaccctttggccaaggaattaatggaagtctatgagtccatgggcgacacattagcctttcaatatgggggttctgcggcacacaataagatattttctgagagaagaggtcaatggaaggcagcagcccaatcccaggaatttattcgaacactacagcgttattacaacaacacatatttagatggtgataagcaaaaagcaattaacttactcttggggcattttcagccccaacagggaaaaccagcac

SEQ ID NO: 156864 - DNA, 230 bp, Glycine max
ggcctctgccccttgaattctattgaggttacaaggctgcttaaaggtctaggtgctccaaaaaatgcaagaatttattgggctggaggacaaccactgggtggaaaggaggtcttacagccattaatcaatgaatttccacatctttacagtaaagaagatcttgctttgcatggagagctggaaccatttgcaaataaagcttctctaatggctgcccatgattacat

SEQ ID NO: 156865 - DNA, 254 bp, Glycine max
ggcaattgcaggaattattactgaaagagattacttaagaaagatcatcgtgcagggaagatcatccaagtctactaaggttggagatattatgactgaagagaacaaacttatcacagtcacccctgataccaaagttctgcaggctatgcaactgatgactgacaatagaatcaggcacatccccgtgattgatgaaaaagggatgattggcatggtgtccattggagatgtggttcgtgctgtggtgcgtg

SEQ ID NO: 156866 - DNA, 263 bp, Glycine max
caagtagttgagaactaagaaggagaagcaaatggcttcctcaatgatctcttccccagctgttaccactgtcaaccgtgccggtgccggcatggttgctccattcactggcctcaagtccatggctggcttccccaccagaaagaccaacaatgacattacctccattgctagcaacggtggaagagtgcaatgcatgcaggtgtggccaccagttggcaaggtgaagtttgagactctttcctacctgccagaccttgatg

SEQ ID NO: 156867 - DNA, 260 bp, Glycine max
cgaagacaaccaactgcgttttagcctcttgccaggctgctttggaagccccaagggttctgagtcttaattccagtaaatatttctctggaccatatggtgaagatgtcatttttgttgccaatgattggcacactgcccttatcccctgctacttgaaaagtatgtaccagtcaaggggcatctatacgaatgcccgggttgttttttgtatccacaacattgcttaccaaggaagatttgcattcgccgacttctca

SEQ ID NO: 156868 - DNA, 258 bp, Glycine max
actcgttagagagagtttgtgtgtgtttttgtgtgtcaccttggtgcatacaagacaagatggaggaccaagatggtagtggtaagttgagccaagggcttcgcaaggtgaagccttaccttgctatattgtcccttcagtttggctactcagggatgtatatcatcactatggtttctttcaagcatggcatgagtcattggatactctcagtgtaccgtcatgtagttgctgctattaaaatagtcccttttgcac

SEQ ID NO: 156869 - DNA, 278 bp, Glycine max
ggaattctgctcgagtgtttttctagcgatctgaatactgtttctaagaatgatgatgatcattacatgtatgagactcaatttagttttaacaataatattactagtttcattgattgttgcattgagagtttcactttaggtgatattgacaaattcaatgatatttatttttatagttacatttttttgaagggcagaaattgtagtgaaagcgataattctagtactagtataattactagtacgcatgatacaaatgatagtgattccactct

SEQ ID NO: 156870 - DNA, 265 bp, Glycine max
ggattcccttattgctgttcagttgaccgttgaccttaagccaaatcttccaagggaagaagagaggatcaagcttcgtagaggaagggttttttcccttcagaatgaacctgatgtggctcgagtttggctgcctaactctgatttccctggtcttgctatggctcgggcatttggagatttttgccttaaggactttggattgattgctgttccagatatctcatatcaccgccttaccgagaaggatgaatttgttgtgtta

SEQ ID NO: 156871 - DNA, 261 bp, Glycine max
gtgcggacagcaacagcaacagaagcatcgttcaagtatgacagtgtgactaggattccttctagcttggactggaggaaaagaggtgctgttactccaatcaaggaccaaggaacatgtcgaagttgttgggcattttcaactgtggctacaattgagggtctccatcaaataactaaaggtgaattagtgtctctatcagagcatgaactagttgattgtgttaaaggtgacagcgaaggatgctatggtggatatgtg

SEQ ID NO: 156872 - DNA, 260 bp, Glycine max
agaagcatgagttttgtgttgatgctgttcttaacgagaatgttaccaatgatgaagtatatcgagttaccgtagaaccaattattcccacaatttttgagattatcaaagctacttgttttgcttatggtcagacaggaagtggcaaaacatacacaatgcaaccgttgccgctcagagctgcagaagaccttgttagacaattgcatcgaccagtatatcgaaatcagagatttaaattgtggcttagttactttgag

SEQ ID NO: 156873 - DNA, 260 bp, Glycine max
tacctctcaagtttttgaagtatagagatggcagagacattcctatttacctcagagtcagtgaacgagggacaccctgacaagctctgtgaccaaatctctgatgctgtcctcgacgcttgcctcgaacaggacccagacagcaaggttgcctgcgaaacatgcaccaaaaccaacttggtcatggtcttcggagaaatcacgaccaaggccaatgttgactacgagaagatagtgcgtgacacctgcaggaacatcgg

SEQ ID NO: 156874 - DNA, 262 bp, Glycine max
gtcactttcaatttatggttagctgcttgtgcctcacagaatgatgttgaaactgcagaaagagttctgcttgagttaaagaaggcaaaaatagatccggactgggtaacatacagtacattgaccaatttatacataaaaaatgctagccttgaaaaagctggagctactgttaaagaaatggagaacagaacctcgaggaaaactcgagttgcatattcctctcttcttagcttgcatacaaacatggggaacaaagatg

SEQ ID NO: 156875 - DNA, 261 bp, Glycine max
aacccaatcaactaatatggcctaatttgaaaatcaagtattttcagagagagctgaggcaatacttggtgtatttcattgtggcactgactatattcttctacatgattccaattacatttatatctgcattaactactttggataatttggtgaaatatctcccattcataaagccaattgttaatataaaggcattgaaaacagtgttggaagcttacctccctcaactcgcactgattattttcttggctttgttgc

SEQ ID NO: 156876 - DNA, 265 bp, Glycine max
caagttatacagatcatcaaaaaacaccaatcagcggatactgtttgatattgacccttctggaaagtatcttggtacaggtggccaggatggtttagtacatatatataatctccaaactgggcagtgggtgtcaagtttcgaggctgctttagacacagttaatggtttctcattccatccatttctaccccatgctgtatcatcctcaggccaccgaagatttgtaattccagatgatggcaatgaagaattttgcttgact

SEQ ID NO: 156877 - DNA, 268 bp, Glycine max
gttgcacaaaatgggagtcctaaccctccatctattgtttgtttgagaaacaccaacgctataccaaaatacatgcctaatctaccacaaatcaaggcaattctccaagtttactctccagtcatgtccttgcaccctgatgaagaattctttccatcttctgtggagtggtttttctccaatggagcacttctatataagaaaggacaagagtcaaagcctgtgtcaatatcaccaaatggggctaaccttcctcaggatcctaaca

SEQ ID NO: 156878 - DNA, 260 bp, Glycine max
ggcagatgactgaggtcttggaggccttgctgcctgagggtatgattattccttctgcttttgagactgttggtcatatagcacacctgaatttgagagacgaacatttaccatacaagaggctaatagcaaaggttgtgctggataagaataagccaaggatacaaaccgttgtgaacaagattgattcaattcaaaatgagtacaggaccatgcagcttgaggttttagctggaaaccactctcttgtgactacagta

SEQ ID NO: 156879 - DNA, 258 bp, Glycine max
tgtagatccatccactccctcgcacaggcatcaggtgagtttgttgtgatttgaatggagggaagtggaggtggcggtggcagtggcggtggttcaccttctgcacctgtgaagcaatacttgcaggaattctcgaagctttttcagtactatctggataaatccactccccatgccctctacagatggattgggactttcgtgattgcatccatctacgttctgcgtgttgtttatttgcaggggttttacattgtc

SEQ ID NO: 156880 - DNA, 261 bp, Glycine max
gagtgggagaaagccttagagagaatttttttcaaaaaagaaaaatattccttcttaattctacgtacgtgaggtgttagaagacacaacaatgaatttggcaaagggtgttggcggaaacattgacaaatcccaagttctgtccgctgttgaaaagtacgagaagtatcatgcttcttatggaggtcaggaggaggagaggaaagctaattatgttgatatggttaataaattctatgatcttgctactagcttttatga

SEQ ID NO: 156881 - DNA, 263 bp, Glycine max
cagacttaacaacagcacaaagcgggttactgtctgttcaagctaccatctctctctctctttcttagtgcctccttgccagaagttaaaatggcccaagagactttcctattcacatctgaatcagtgaacgaggggcaccctgacaagctctgtgaccagatctccgatgctgtgctcgatgcatgcttggagcaggaccctgacagcaaggttgcctgtgaaacctgcaccaagaccaacatggtgatggttttcggaga

SEQ ID NO: 156882 - DNA, 264 bp, Glycine max
tcgcactctccctcatggcaaggttgagaggctctatggtctcgcccctgttgctaagtacttggtcaggaacgaagatggtgtctccattgctgctctcaacctcatgaaccaggacaaaatcctcatggaaagctggtactatttgaaagatgcagtccttgaagggggtattccatttaacaaagcatatggaatgacagcctttgataccatggaacggatccaagggttaacaaggttttcaacaaggggatggctgat

SEQ ID NO: 156883 - DNA, 265 bp, Glycine max
taggcattggctcagagtcggcatcattccttatcagtgctttcacaaccttcttgatgcttccctgtataggcgtagccatgaagctcatggatgtttcaggcagaaggcagttgttacttactacaatccccgtgctgattgggtcactcattattttggtcattggaagcctggtaaattttggcaatgtcgcccatgcagcaatctcaacagtatgcgttgtggtttatttctgctgctttgtgatgggttatggaccaat

SEQ ID NO: 156884 - DNA, 257 bp, Glycine max
ttccattctctctgtgtatttccctacctctcccttcaagatgcagatcttcgtcaagaccctcaccggcaagaccatcacccttgaggtggaaagctctgacaccatcgacaacgtcaaggccaagatccaggacaaggaaggaatccccccggaccagcaacgtctcattttcgccggaaagcaacttgaggacggccgtacccttgctgactacaacattcagaaggagagtactcttcacctcgtcctccgtc

SEQ ID NO: 156885 - DNA, 256 bp, Glycine max
gttccgcaaagctcctgagggttctctcaggaaaaatgcagctcagaaacaagttttggaagcaatgtctcatagaatgcatgtagacaacagtgtaaaacttattgggaagcttttatttggtattgaaaagggtccagaagtactcaacgctgttagaccggcaggatcggcacttgttgatgattggtactgccttaaaaccatggtgaggacttttgagacacattgtggatccttgtctcagtatggcatg

SEQ ID NO: 156886 - DNA, 257 bp, Glycine max
caagaaattcagatctgctgcttactctaactgttctcgcaaaccatcctgatacacatccggattgatagttcgttgcatgcaaccatagttttattaggattttttcttctttgttttcaattaggtttttttgttgctctccttcaaactccatctttccaaatcctctctttgcgattgtgttttgatctgcttcctactgcgatagtttctctactgttacatggccatggcggtttccgcaattggttttg

SEQ ID NO: 156887 - DNA, 127 bp, Glycine max
cgagcagtggctcgtgaagcacgggaaggtgtacaacgcgctcggcgagaaggagaagcgcttccagatcttcaaggacaacctgcgattcatcgacgaccacaactccgcggaggaccgaacctat

SEQ ID NO: 156888 - DNA, 259 bp, Glycine max
aagaaggcgtcttcataaacgcctttcttctccgtttccgtttcctcgttcgaattcgctttttgatctgcgaaaatgagagagtgcatctcgatccacattggtcaggctggtatccaggtcggaaatgcttgctgggagctctactgcctcgagcacggcatcgggcccgatgggcaaatgccaagtgacaagacagttggcggtggtgatgatgctttcaatactttcttcagcgagactggtgctggaaagcacg

SEQ ID NO: 156889 - DNA, 263 bp, Glycine max
gagagaaagttctctctgcttctctctcttagactcaaaaccctattgcgagctttgcaatcgaccccgattatggccaacagtaaactcactcgaagaatcatcaaggaaacgcagcgtttgctcagtgagccagcacctggaattagtgcgtccccttcggaagacaatatgcggtatttcaatgtgatgatccttggcgcaactcagtcgccttatgaagggggagttttcaagttggaattatttttgccagaagaaca

SEQ ID NO: 156890 - DNA, 262 bp, Glycine max
gtcgtctcttggggtaaacgtatatcgattttctatttcatggacaaggattctaccaagagggatatatggggacataaatccaaatgggataatgttctacaacaagattatagacaatctgctgcttagaggtgaagtaacaatgtcaatgtccacttggttctctataatgctactttgtcttgaccatagtcacatatataattcgctcaacttagtggagaaccgtgaattaatttgcgtgtaccaattcacggtt

SEQ ID NO: 156891 - DNA, 253 bp, Glycine max
acactcattaattgcaagaatggcacttcgttgcttggtgatgtccctttctgttctcttcactcttggtcttgcgagagaaagccatgccagagacgaagatttttggcatgctgtttggccaaacactcccattccaagttcattgcgagatcttctaaagcctggccctgcaagtgttgaaatcgatgatcaccctatgcaaattgaagaaacacagtacccgaaaaccttcttctataaagaagacctt

SEQ ID NO: 156892 - DNA, 256 bp, Glycine max
caagcaaccatggcaatggcaacccaagcctctctcttaaccccacccctctccggtctcaaagccagcgaccgcgcctccgtgccatggaagcaaaactccagcctctccttctccagcccgaagcccctcaagttctccagaacaatcagagcagcagccgccgacgagaccacagaggcaccagcaaaagtagaggctgcaccggtcgggttcaccccaccagaacttgacccaaacaccccttccccgatct

SEQ ID NO: 156893 - DNA, 255 bp, Glycine max
cggcggcgggcctaaccctcagtacccgcccaacaaggtcatgatctgggacgaccaccagggccactgcatcggcgagctctccttccgcgccgcctgtgcgcgcgtccgcctccgccgcgaccgcatcattgtcgtcgtcgaacagaagatctttgtctacaactttgcggacctcaagctcgtgcatcagattgagaccgttccaaaccctaatgggctctatgcggtttcgcagctgtccgttactctcgt

SEQ ID NO: 156894 - DNA, 256 bp, Glycine max
gggttgtggcggtgcattctcagtgtggctgccagtgtttgtgtcttgttttacagcaatagcattggctgggactgggtgcgataaggcaccggtggtgttcgtgttcggcgattcgaactcggacacgggtggactcgcttccggtctgggtttccctatcaatcttcccaatggccgcaatttctttcacagatccactggccgcttgtccgatggacgcctcgtcatcgacctactctgccaaagtttgaat

SEQ ID NO: 156895 - DNA, 258 bp, Glycine max
aaaagggccaccccttcttcttcttcccttctcaacttgtactacaatttctggattgaattatcttcaaaatgagagaaatccttcatgttcaagctggtcaatgtggaaaccaaattggaggcaagttttgggaggtgatgtgtgatgaacatgggattgatgccactgggaattacgtaggtaactttcatcttcaacttgagagggttaacgtgtactacaatgaagcaagtgggggacggtatgttcctcgag

SEQ ID NO: 156896 - DNA, 260 bp, Glycine max
gcacaaagcattatcattactactataagcttatagttgaaatctttgagcatagaaaaaagatgccgatttctagaattgccattggaaatccttcagagtttggccaagcggatgcgcttaaggctgctcttgctgagttcatctcaatgctaatatttgtctttgcaggagaaggctctggcatggcatataacaaactcacagacaatggttcggcaacaccagctggggtggtggcagcatccctgtctcatgca

SEQ ID NO: 156897 - DNA, 260 bp, Glycine max
cctagtcctcccccagaatatacaacctgtttgggtgacttgtacagtgttgcttggatggaagacagtgacagacacaatttgcgaacagaaactctgcaccaacaatataaattggttaaagagaggactatatctggagattcatactatggctctcacgtgatgcagtatggtgatgtagggcttagcagagatgttctcttccattatttgggtacagatcctgctaatgataatttcacttttgtggatgaaaa

SEQ ID NO: 156898 - DNA, 262 bp, Glycine max
gcttcttcgagtttcacagccaagtcgtaaaagggtttcaagggatggaaaacatgcagagcttctggcaattgggtgatgaactccgtgggcactcaaaagcatcggaggatcacaagtggttaatggttgcctcgaaactggccgaacagacaagattgaagggggagcgtgtgaacaaccttgatcggcaaagggacccattgaaacaaggtccagggccaagggttggctccatgaagagaacggagttgattctctt

SEQ ID NO: 156899 - DNA, 252 bp, Glycine max
gaaccaggtgatttgaaagagaagaaggaggcgctcggggaggtgctgaatggggaccgtttggttagcgcgccatacaagctggagttccagcgcgacaaggagttggtttccgtgtgcgacaggaagctctccaaacaggacgtggctcggttcagatccgcggtgaggaaggactactacttccagatgtactacgacgaccttcctatttggggcttcatagggaaggttgacaaggaagggaaggac

SEQ ID NO: 156900 - DNA, 251 bp, Glycine max
ggctaacatttgtcttcatgttatgagggtatcctatattcctattttttatgatactggacacctagtatctatatacacctatagagagaaatgtaaatgtcacaggtctggtccatttggagatgaagtttccagagtgtttggtggtggtcttgtaccaggctcattgactttaattggtggtgatcctggtgttgggaagagtactttgttgttgcagatagctgcaattattgcaaaaggtgaca

SEQ ID NO: 156901 - DNA, 253 bp, Glycine max
cgatcatcaacatcgacaagctgtggtccctcctcccccaggaggccaaagacaaggccaccgccgacaaggcacccttgctcgatgtcacccagttcggttactttaaggttttgggtaaaggggttttgcctcagaaccagcctcttgtcgtcaaggccaagcttatttccaagatcgctgagaagaagatcaaggaggccggtggagccgtcgttctcaccgcttgattttttagggtatttttattttt

SEQ ID NO: 156902 - DNA, 255 bp, Glycine max
cttcgccggaaagcagctcgaggacggccgtaccctcgccgactacaacatccagaaggagtcaacccttcaccttgtccttcgtctccgtggtggcatgcagatcttcgtcaagactctcactggcaaaaccataaccctagaggtcgaaagctctgacaccattgacaacgtcaaggccaagatccaggacaaggagggaatccccccagaccagcaacgtctcatcttcgccggaaagcaacttgaggacgg

SEQ ID NO: 156903 - DNA, 255 bp, Glycine max
cttgaaggtgactttaatgaggaagtagacgatgattggacaagagagcactttgaaagccacgaagtaaaggaacgtgggggaaaaggccacttctaactggagatttgcaggttagcctaaaggaaggagtaggaacctttggtgatcttactttcacggacaattctagctggataagaagcagaaaattccggcttggggttaaggtggcttgtggttattgtgaggagattcgtattcgtgagggaaaaa

SEQ ID NO: 156904 - DNA, 256 bp, Glycine max
ctgatgcatcgtgtttttgtgtgcaggttatcaacgaccgtgagactggaaggtccagaggattcggatttgtgaccttcgcctcagagcagtcaatgaaagatgcgatcgcaggaatgaacggccaggaccttgacggtcgtaacatcactgtcaacgaagctcagacccgcgccagccgtggtggtggtggaggcggtggtttcggaagtggtggtggatacaaccgcggtagcgtggatatggtggtggtggt

SEQ ID NO: 156905 - DNA, 272 bp, Glycine max
gatctgctcaacactttatttatattgaaaaccaatacttcattggatcatcgtatgcatggccagcttataaagatgcaggggctgataatctcatcccaatggaattggcactgaaaattgctagtaaaattagagctaaggagagatttgctgtctacattgttttaccaatgtggccagaaggtgatcctaaaactggggctatgcaagaaatcctcttttggcagggccaaacgatgcaaatgatgtatgatgcagttgctagagaa

SEQ ID NO: 156906 - DNA, 274 bp, Glycine max
gaacctcttaactggtccaattccatggtcatttgggtgcttgaagaaagtggagcagcttaacctagctaggaacttcttgtacggacaggttccggaagtggtgtgtgcgttggggaatttggcgaacttttcgttgtcttataattattttactaaagtgggaccattgtgtaagatgctgattcaaaggggtgttcttgatgtgaggaagaactgcattttcgggcttccggatcagagatcggtgagggagtgcatggcattctttttg

SEQ ID NO: 156907 - DNA, 278 bp, Glycine max
tggaaaaaaaaaaactcttgatcattattaatggcctctcattccccaaagagagaaggcccttattatcttaatattgtactattccttaccattctcatctccatcatcaacccttcacaccaagacccttcttcccctctccccccaataaacccaagactcaccaaagcctacacagcactccaagcatggaaacacaagatcacctcagaccccaaaaacttcaccttaaactggtgtggccccaatgtttgcaactacactggcatatactg

SEQ ID NO: 156908 - DNA, 275 bp, Glycine max
agaaactgcacagcagattcttgttactggaatcaaggttgttgacctgcttgcaccatatcaaagaggaggaaagattgggttgtttggtggtgctggtgtaggaaaaactgtgcttattatggaacttattaacaatgttgcaaaagctcatggtggtttctctgtgtttcctggtgttggagaacgaacccgagagggtaatgacttgtacagagaaatgattgagagtggtgtcattaagcttgatgataagcagagtgaaagcaagtgtg

SEQ ID NO: 156909 - DNA, 273 bp, Glycine max
ccacgtttttcttctccatctcagcctctgtcccaacaccattctcatggctgctctagctctagcactgcttcttctggctttcactggcacttcaagtgctacatggtgcgtttgcaaggatggaagcgacgcgatcctgcagaaaaccttggactatgcttgtggagctggtgctgactgtaatcctctccaccaaaacgggccttgtttccagcccaacaccgttagggcccactgtaactacgccgtgaacagctacttccaaaggaa

SEQ ID NO: 156910 - DNA, 275 bp, Glycine max
gttaagaagtagcaaagatgtttccattcgggcacaagggtcaaaagataaaggggactatggtggttatgcagaagaatgtgttggatatcaacagcatcaccagtgttgacgggatcgtcggcaccggcttagacttcttaggcagtgcactcgatacagttacttttttagcctcctccatctccatccaacttattagtgctaccaaggctgatggtgggaaaggaaaagttggaaaggctacaaatttgagaggaaagataacattacca

SEQ ID NO: 156911 - DNA, 273 bp, Glycine max
gttagttaatcacaaaggggaggtgaagattactgattttggtgttagcgccatgctagcaagctcaatgggccaaagggatacatttgttggaacttacaattacatgtcgccagaaagaatcagtgggagtacttatgattatagcagtgacatctggagtttgggtatggtagtgcttgagtgtgccataggacggtttccttatatacagtccgaagatcagcaaagctggcctagtttttatgagcttctggcagcaattgtggaaag

SEQ ID NO: 156912 - DNA, 273 bp, Glycine max
agaatatcctcagccattttctgcgtagccaaacactctgagattctcaggtatgtcgtgacaagcgtatgtggatgatcaactactgagtgaaatcgaaggtaaccacctcactcacgccgctatcatcggccaagacggaagcgtttgggctcacagctccaacttccctcagttcaaacctgacgaaataactgccatcaataatgactttaatgagcctggatcacttgctccaactggattgtatatcggtggcaccatatacatggt

SEQ ID NO: 156913 - DNA, 263 bp, Glycine max
tgcgggatgaagctgttcttcccgaacgtgctgaagtggatcggacgcgccggggtgaagctccacgcgcgcctggcggaggagattcgctccgccgtgagatgcgccggcggggagatcaccatggcggcgatggagaacatgccgctgatgaagtcggtggtgtacgaggcgttccgcatcgacccgccggtgccgttgcagttcgggagggcgaagagggacttgatcatcgagagccacgaccacgcatttcaggtgaa

SEQ ID NO: 156914 - DNA, 269 bp, Glycine max
taagagagaaaatagaggcaatagcaaagtcatatggagccagtggtgttgagtactcagaacaggctgagaagcagattgagatgtatagcaagcaaggattttcaggtcttccaatatgcatggctaagactcagtattctttctcagacaatgctgcagcaaacggagctccaagtgggtttgtcttacccataagggatgtaagagctagtataggcgctggaactattaatccagttgttgtatcctgactcgagccgctcgag

SEQ ID NO: 156915 - DNA, 272 bp, Glycine max
attccccttatctttctctcttctctctccccgcccaaaccctaactccctaccctattccgctttctctcatccatcatgaaaggaggaaagtccaagaccgaatctaagagagccgatgccaaatgagctgtgaataagaagggcgccgccaccaagactaggaaacccgccggaaaggggaaggcagcgaaagatcctaacaagccaaagaggcctccaagtgctttcttcgttttcatggaggaattcaggaaggtgttcaacaagga

SEQ ID NO: 156916 - DNA, 273 bp, Glycine max
gaattttctagagcaagagatttcggcgtaatgggtccaaacgctgcggcggcgaaacaagcggaaaagctccgaattgacggcaacacttacttcaaaaaagaccgtttcggtgccgccatcgacgcttacaccgaggcgattacgctgtgccctaatgttccggtttattggacgaatcgcgcgctgtgccatctcaagcgcaatgattgggagagagtagaggaagattctcggaaggcaattcagttggacagcaattcagttaaggcc

SEQ ID NO: 156917 - DNA, 273 bp, Glycine max
tgttagctgctcctattatcttggacttggtccttcttgctgagcttagcactcgaatcgagtttaaagctgaaaatgagggaaagttccactcattccacccagttgcgaccatcctcagttacctgaccaaggcccctctggttccaccgagtacgccagtggttaatgcactgtcaaagcagcgagctatgctggaaaacatcctaagggcttgtgttggattagctcctgagaacaacatgatcctggagtacaagtgaagttcaaagt

SEQ ID NO: 156918 - DNA, 273 bp, Glycine max
tttttggttgtgagagtgaaagagaacaatggaaggcataacagagggtgtgaacaacatcaacattaacatctccgattcgtataagaagaatcgcattcaggtctctaacaccaagaagcccctcttcttctacgttaatctcgccaagagatatatgcaacagcatgatgaggtcgagctctcagctctaggaatggctattgccacagtagtaactgttgctgaaattttgaaaaacaacggacttgctgttgaaaagaaaatcacgac

SEQ ID NO: 156919 - DNA, 271 bp, Glycine max
caacagataatggattacagcctcctcctaggtgttcattatcgagctccccagcagctgcatccatacaaccaaaatagaactgcagatggagtgccaattcttgcagaggaagaccctctagaggatgaaggatccaactatccacaaggccttgttctggtccctcggggtacagatgatgatagtgttgttgtagggtcacacattaggggtagcagattgcgagcttcggctgctggggatgaggaggtggatctacttctacccg

SEQ ID NO: 156920 - DNA, 255 bp, Glycine max
cttcaggcttgacttcgctgtgagtcgagagcaaacaaacgagaaaggggagaagatgtacatccaaacccgaatggctcaatacgcagaagagctttgggaattactgaagaaggataacacttttgtgtacatgtgtggactaaaaggaatggaaaagggaattgatgacattatggtgtcattggctgccaaagatggcattgattggactgagtacaagaggcaattgaagaaagcagagccatggaatgt

SEQ ID NO: 156921 - DNA, 269 bp, Glycine max
gacatttgggctcttcttggctcgcaaggtgtctttgattagagcaataatgtacatggtggctcagtgcttgggagccatatgtggagttgggttggttaaggccttccaaaaggcttactacaacaggtatggtggtggggccaatgagctcagtgaagggtacagcacgggtgttggattgggtgctgagatcattggaacctttgttttggtttacactgtgttctctgcaactgatcccaagaggaatgctagagattctcatg

SEQ ID NO: 156922 - DNA, 269 bp, Glycine max
aagaagagtaattggcaaattgattttggcttgctcggcaacacggtgggagcattcttcacttgtccttggttttggaacgacgacagccgagctatctctcattccattttcatccatcaatggctccagtagcagcagcatcttcagattcaatcaagccaagagatgtttgcattgttggtgttgcacgtacaccaatgggtggatttcttggtaccctgtcatctctatctgccaccaagctaggctctatagctattggagct

SEQ ID NO: 156923 - DNA, 273 bp, Glycine max
ctcttcaaaagggagaagaaaaggaaagaaaactctcaaaaaactattatagcaatggcagaacaaaaccaaaaccaaacaactgaagctggaaggcaccaagaggttggtcacaagagccttctccagagtgatgctctttaccagtatattctggagacaagtgtctacccaagagaacctgaatccatgaaagaactgagagagttgacagcaaaacacccatggaacatcatgacaacctctgcagacgaagggcagttcttgaacatg

SEQ ID NO: 156924 - DNA, 272 bp, Glycine max
agatgatggtgcattttcagaactcaaagcaggttactttaactccctaggagataggcaacaaaaagcactgatacagtatcatgttcttcccgtttatgtgtccagctccaactttgatgctctgagcaaccctgtgctgacattggccagtgacagccccacagggtatcagataaacgtgacagcatatggtaacagtgtgaacatatcaactggggtggtgaatgccacactcacaggcattgtgtacactgataagacacttgcca

SEQ ID NO: 156925 - DNA, 269 bp, Glycine max
cccagccattgatgtgtgcaagggccttttgggagacaaggccaagttgagcatatatgatcctcaggtcactgaggatcaaatcatgagggatttagcaatgaagaagtttgattgggaccaccctgctcatcttcaaccactgagtccaacttccaacaaacaagtatctgtggtttgggatgcctatgaggcaatcaaggatgcacatggcatctgcgttatgactgactgggatgagttcaagtaccttgattaccaggaggttt

SEQ ID NO: 156926 - DNA, 271 bp, Glycine max
aaagcacaacactaaagttcagcaatcagtactctcaagaagaaaattacaagatcatcatcacaataacaatatgagttcaggaattagagcatggagtgtggcaactagcgttggagttgtggaggccttaaaagaccaaggtatatgtaggtggaatcatgctttaagatcagctcaacaccatctcaaaaaccatgttggttcattctctcaggctaacaagctttcttcttctgctatgagctccacaacactaaaacatgggaag

SEQ ID NO: 156927 - DNA, 270 bp, Glycine max
gtggcagcgacacgtatcaacttcaataatcgcatcgcagaagcagtttccggtgcatctcatcgtctccgaaaatgaacgacgcagatgtctcgaagcaaatccagcagatggtgcggttcatccgccaggaagctgaggaaaaggccaacgagatctctgtctccgccgaagaggaattcaatatcgagaagctgcagttggtcgaagccgacaagaagaagatcaggcaagaatacgaacgcaaagagcgccaagttgaaattcgca

SEQ ID NO: 156928 - DNA, 266 bp, Glycine max
acgcatcggtgacagtccagaattgggaaggaaggggttattcagtcgtgaatgttcagtgcaaagatcgaaccaagctattatttgacattgtatgcaatttgacagacatggaatatgttgtattccatgcaactattaacactgatggtgaccgagcttacttggaattttatataagacacaaggatgggactccaattagttcagaaccagaacgtcaacgtgtaattcaatgcttaaaagctgctgtagagagaagggca

SEQ ID NO: 156929 - DNA, 269 bp, Glycine max
attctattcattcaagattcagcaagtgcgttttggaagcagagaccgaaatacttcgagatggcccgtacaaagcaaactgctcgtaagtcaactggaggaaaagctcccaggaagcagcttgcaaccaaggctgcacgtaagtctgcaccaacaactggtggtgtgaagaagcctcatcgttatcgccctggaactgttgctcttcgtgagattaggaaataccagaagagcactgagctcctaatcaggaagcttcctttccagag

SEQ ID NO: 156930 - DNA, 266 bp, Glycine max
gaatctacaatgtagaaggttctatgtgactataaatgaggcgacgatttctgctagtccacagcatctagctagttaattcacaaacttgagttggattttggtgatcttgtgaattgatctgcgatgtcggacgaggtagttctgttggatacatgggctagcatgtatggtatgagggctaggattgcattggctgaaaagggtgttaggtatgaatacaaggaagagaatctcatgaacaggagtcctttgcttttgcagat

SEQ ID NO: 156931 - DNA, 270 bp, Glycine max
cacaaggcagaaagcaagctcatcctagagttttaaaaatggcagcagcctcctccatggctctctcttccccatccttggctggcaaggccgtgaagctgggcccatcagcccccgaagtcgggagggtcagcatgaggaagaccgtcaccaagcaggcctcctccggaagcccatggtacggcccagaccgcgtcaagtacttgggcccattctctggcgagcccccgtcctacctcactggcgagttcccaggtgactacggctggg

SEQ ID NO: 156932 - DNA, 270 bp, Glycine max
aagaaagaagccattgagggagaagagaagttttgtgcaaaatccttgggaacagtaattggttttgccatttcaaagctgggaaagaacattcaagtactttcaagttcctttgtcaataagcaagaccaatacactgtggaaggagtgcagaatcttggagacaaagcagtgatgtgtcataggctaaatttcagaactgcagtattttactgccatgaagtccgtgaaacaacagctttcatggttccattggtggctggtgatgga

SEQ ID NO: 156933 - DNA, 272 bp, Glycine max
tgcaatagcaagtcggtcgctcagacacgcacagatctgatctgatctgatctatctgaagccgaaaacgccgacggggatgatgaagatgtgggtgttcacgttgctcctgcttcctcttcctcatcctcttagtggcgctcttcccctcgtcgctctccgagatccgcttctccgagatccgaaacgacgatcgccgcatcatccccttcgatcagtttggagtcacccacaagggtcgccttgagctcagcgtttccaaaatctcactc

SEQ ID NO: 156934 - DNA, 269 bp, Glycine max
acgagttgcaactcgagcgagtcaacgtctattacaatgaagcgagttgcggaaggttcgtgccgagggcggtgctcatggatctagagccagggaccatggacagcgtcagatctggtccctacggtcagattttccgacctgataacttcgtcttcggccagtccggcgccggaaacaactgggccaaaggtcactacaccgaaggcgctgagttgattgactctgttctcgatgttgtcaggaaggaggcagaaaactgtgactgc

SEQ ID NO: 156935 - DNA, 266 bp, Glycine max
caaccaataaggttccaaggggaatcccaaggcgacttttcagtccaaatccatggtctcctggtgcatactcaaattggactgtaattaaggaaatgttgaatgtgcctctcatctatattattggagcatttataccggcaactatgattgccgtgctttactactttgatcatagtgttgcatcacaacttgcccagcagaaggagttcaatctaagaaaaccctcatcttatcattatgaccttcttctcttgggcttcttg

SEQ ID NO: 156936 - DNA, 266 bp, Glycine max
tcatttgataagtctgttgctcatgtttttaaggagtttgggtatggtatggaggatgttgttaaggggaatttggaggttaagcatccctgcttgcaaatcgggtacaaggagaggtattcgtgctcacattgttcttctgctgtgaagaaaggaggggagagtctgatggttgagggaaatgggaatgtggtggggaagaaggagggaggatcaaggactgtggtgacgcttgttggcgccccaaattggttgaagtgtagcac

SEQ ID NO: 156937 - DNA, 268 bp, Glycine max
ctttctctttctcttcactctaaagtctaagcatccatggccatggcgtctgcaaagctcaacaccttgtcttcccagtggatcgcccacaattccttctctcctcgccgtggatcctcttctcgccgagtctctcttccgatccgcgcttcttcttaccaacacgaactcgtccaaaccgccaaatctattgcatctcccggtcgtggaattcttgcaattgatgaatcaaatgccacatgtgggaagcgtttagcatccattggat

SEQ ID NO: 156938 - DNA, 267 bp, Glycine max
tgagaattggagtggatggtttcttccgttcggtggtgctgttccttaccggcctgtggaagatcttgcatttgccgtggcacgatttttccagcgaggaggaacatttcaaaattactatatgtaccatggagggaccaactttgaccgaacttctggtggacctttcattgctacaagttatgattatgatgcaccaattgatgagtatggaattattagacagcctaagtggggccacgtcatagaagttcataaggccataaa

SEQ ID NO: 156939 - DNA, 264 bp, Glycine max
tcctcacggtgatgctggtctcaccggccgcaagatcatcatcgatacttacggaggatggggtgctcatggtggtggtgccttctccgggaaggatcccaccaaggttgataggagtggtgcttacattgtgagacaggctgctaagagcattgtggcaagtggactagccagaaggtgcattgtgcaagtgtcttatgccattggtgtgcccgagcctttgtctgtctttgttgacacctatggcaccgggaagatccatga

SEQ ID NO: 156940 - DNA, 248 bp, Glycine max
tagcgttctcggcgcgttgcatgcgttgatgcacgcgcttcgttccgagtccgagctgactctgcacgatccagcgctcgcgctgtatcatttgtcacttatacagagtaacagattgacattggttaaactcagggctgtccccacgctcctctcgatggtgcccgctaggaatatggcctgccggttgatgctgatgctctgcaacctcgccgagtgcttcgtcgcgcgcacttcgatgctggacg

SEQ ID NO: 156941 - DNA, 265 bp, Glycine max
ggactgggcatagattacgacggttccaaatcgtgtgactctgatatttccgttgagtacagtctcgaggattatgcagtcgcggttgttcacgcggttcagtgtgtgtgcgaccgaaggtccgtgaaacacccagttatctgcagcgagagtgggagagccatcgtgtctcatcattcggtcttgattttcgaggcggttggcaccagcagcaccaccgggggaggagcttcccctgcattgtccgctcaatatctggcggagg

SEQ ID NO: 156942 - DNA, 268 bp, Glycine max
cgaaggaacattttccatgtttggaagcaaaaagatgcactcgcagcagaacgactttctattacacaattggctggttgatattcatggaagatagccctgtgaaatttaaatcttcaatggatccactccagcaggtttttctcagtttggaatcaactcctgatgcagtatttcgaacagatgctgtaaggtatgcacttgttggtttgatgagggaccttagaggaattgcaatggccacaaacagccgtcgaacgtatggatt

SEQ ID NO: 156943 - DNA, 266 bp, Glycine max
ttagtttccaacctgcatctctatgatattgcgaatgtcaagggagttgccgctgatatcagtcactgcaacacaccctcacaggtcagggatttcactggagcttctgagttgccgaattgtttgaaggatgtgaatgttgttgtcatacccgccggtgttccaaggaagcctggcatgactcgtgacgaccttttcaacatcaatgctggcattgtcagggacttggtttctgctgttgcggattactgccctgatgcttttgt

SEQ ID NO: 156944 - DNA, 260 bp, Glycine max
ctcgttcttcttcttttgttgttctgtgtttgtgtttgttttttctctcacctgaaaatgtcttgctgcggtggtaactgtggttgcggaagctcctgcaagtgcggcaacggctgcggaggctgcaagatgtacccagacttgagctacactgagtcaaccaccaccgagaccttggtcatgggagtggcacctgttaaggctcaatttgagggtgctgaaatgggtgtgcccgctgagaacgatggctgcaaatgtgg

SEQ ID NO: 156945 - DNA, 266 bp, Glycine max
cactgatctccattcccattccatggcttccactgaatcatcccctttcaagaaaattcagattcaaagggatgacactacatttgacgcatatgtggttggaaaagaggatgctcctggaattgttgtgattcaggagtggtggggtgtggattacgaaattaagaaccatgccgtgaagatttctcagcttggtagtgggtttaaagctcttattccagatttatacagaggaaaggttggtctggatgttgctgaagctcagc

SEQ ID NO: 156946 - DNA, 262 bp, Glycine max
ggtgctagtgtcatttatgctgatacggtaggagatcttggctttgcatctgagcttggaaactatgctgaatacagtggtgcacccaaagaagaggaggtcttgcagtacgccagagttgtaattgattgtgcaactgcaaaccctgatgaccagaagagagctcttgtgataggaggaggcatagccaactttactgatgttgctgccacatttagtggtataattcgggcattgaaggagaaggagtcaaaattgaaag

SEQ ID NO: 156947 - DNA, 261 bp, Glycine max
tgcagatcttcgtcaagaccctcaccggcaagaccatcacccttgaggtggaaagctctgacaccatcgacaacgtcaaggccaagatccaagacaaggaaggaatccccccggaccagcaacgtctcattttcgccggaaagcaacttgaggacgggcgtacccttgctgagtacaacattcagaaggagtgtactcttcacatcgtaatccgtctccgaggtggcatgcaggtcatcggtaagacactcaacggcaaga

SEQ ID NO: 156948 - DNA, 267 bp, Glycine max
tctcgagccgaatcggctcgagggtgacttattaaggagttctctgctctttgttccttgttttcttcactctccgagagcattttgtgcactactgggttgaaaatgtatttggtggagagcaaaggaggtgccataacatgcatgttcttggctcttttcttcttggggacatggcctgctcttttgactatgttagaaaggcgtggtcgtcttcctcagcatacctaccttgattactcaatcaccaatttcttgtctgcttta

SEQ ID NO: 156949 - DNA, 266 bp, Glycine max
ctataacacagctaacagggatggctatgaaccagttgcacagatgtttgctcggaactcgtgcaaaattatattacccggcatggacctttcggatgcaaaccaaccagaggaaaaccattcaagccctgagttgctacttgcacaagttatggcagcttgcaaaaagtatgaggtgaaggtttcaggtcaaaattcttctgagtctggtgttccaggtggttttgaacaaataaagaagaatctatctggagataatgtattgg

SEQ ID NO: 156950 - DNA, 270 bp, Glycine max
cgccgcctacaccgccgtcctcaacccccacgaccgcatcatggggctagatctcccctccggcggccacctcacccacggctactacacctccggcggaaagaagatctccgccacctccatttacttcgagagtctcccttacaaggtaaactccaccaccggctacatcgactacgaccgcttggaagaaaaagccctagacttcaggccaaaactcataatctgcggtggcagcgcgtaccctcgcgattgggactacaaacgttt

SEQ ID NO: 156951 - DNA, 263 bp, Glycine max
cagaaacctgtctcaaacaaaccttaatgcccttgcaaaggttcttcccggtctgcttggtggcagtgcagatcttgcttcttccaacatgaccttgctcaaaatgttcggggacttccaaaaggatactccagcagagcgtaatgttagattcggtgttagagaacacggaatgggagctatctgcaatggcattgctcttcacagccctggactgattccatattgtgcaaccttctttgtattcactgactacatgagag

SEQ ID NO: 156952 - DNA, 265 bp, Glycine max
catagaagctgcaaaatggcttcataaagtggttgatcgccccaatgtgtatattaagattcctgctacagaggcatgtgtgccttcaattaaggaagttattgctaatgggataagtgtgaatgtgacgctgatattctctcttgcaagatatgaagctgtaatagatgcttacttggatggtcttgaggcatctgggttaaatgacctctctagagttacaagtgttgcctctcactttgtcagtagagtggacactctcatt

SEQ ID NO: 156953 - DNA, 265 bp, Glycine max
tgaatctgttgaccaataattataaaaaaagcatcaagaaggaagcttgttggaccatatcaaacatcacagctggtaataaacagcagattcaggctgtgattgaggctaatctaattgctcctttggtcaatctgcttcaaaatgctgagtttgatatcaagaaagaagctgcttgggctatctcaaatgctacatccggtggttctcatgaacaaatcaagttcctagtaagtcaagggtgtatcaaacccttgtgtgatct

SEQ ID NO: 156954 - DNA, 264 bp, Glycine max
aacagctttcatggttccattggtggctggtgatggaaccaaaactcaggcacttgctatttgccactcaaatacttctggaatgaatcatcaaatgcttcatcaacttatgggcgttgatcctggaactaaccctgtttgccatttccttggaagcaaggccattttatgggtacccaatttatctgtggacactgcctatcagaccaacattgttgcttaattagtccatgcatcttgagcaccatgagaatgagattgtgt

SEQ ID NO: 156955 - DNA, 265 bp, Glycine max
tctgaatctgcgtgtgtttgtgaattgttgttgagatctgaatcaaaatcagaaacgataatggctacaccggaccacctcttcaacctccgcaacaacttctacctcggcgcttaccaagccgccatcaacagcagcgacgttgccaacctctcccaagaagataccctcgagcgcgacaccctcgtccaccgctgctacatcgccctcggccagctccagttcgtcatctccgagatccacgacgatgctcccacaccactcc

SEQ ID NO: 156956 - DNA, 263 bp, Glycine max
tgagcatgaacctgttagaaatcttgtagatgctgttaataaaattaagccaacagtgttgattggaacatcgggacaaggaagaacatttactaaagaggtgattgaggcaatggcttctattaacgagagacctattattctttctctttccaaccctacgtcacagtcagaatgcactgctgaagaagcttacaagtggagccagggacgtgccatttttgcaagtgggagcccatttcctcccgttgagtatgagggga

SEQ ID NO: 156957 - DNA, 262 bp, Glycine max
ctctttcttcctcttcctcagtagtgcgattttcgattctcttctctgcaactatgcctaaccctaaggtcttcttcgacatgaccatcggcggtcaacctgccggccgcatcgtgatggagctctacgccgacgtgactccgagcaccgccgagaacttccgcgcgctctgcaccggcgagaagggcgccgggcggagcggcaagcccctccactacaaaggctcgtccttccaccgcgtgatcccgaacttcatgtgcca

SEQ ID NO: 156958 - DNA, 260 bp, Glycine max
ctcttatcgtggaatggggttatctgttggtaccatgattgctggatgggatgagacgggtcctggtctatattatgttgatagtgaaggaggaagacttaaaggcactagattctctgttggatctggttcaccatatgcttatggtgtattggacagcgggtaccgatatgacctgtcagttgaggaagctgctgaacttgctcgacgagcaatttatcacgcaacatttcgtgatggggccagtggtggagttgcta

SEQ ID NO: 156959 - DNA, 253 bp, Glycine max
atcactctcaactctgcttcttttcaatcagttacattttctttggtattccaatggccactgttgaggttgtgtcagcaaaggtttccctcccagaggacacaaaagaggcatcagcgaaggctgatgagaagaagaacacagaagaagttgttgagactccaacaccaacaccagaaaatgtcgtcactgagcaaacaagggaggaaagtactgaggccccacaatgaagattcaaaaaaaacacccgggg

SEQ ID NO: 156960 - DNA, 251 bp, Glycine max
gaagcagagggagtagcggcattaaaaatgcagatcttcgtgaaaactctgacagggaagactataaccctcgaggtcgagagcagcgacaccatcgacaatgtcaaggccaagattcaagacaaggaaggcattcctccggatcagcagcgtttgattttcgccggaaagcagcttgaagatggaaggaccctggccgattacaacatccagaaggaatcaacccttcatctcgtcctcaggcttcgtgg

SEQ ID NO: 156961 - DNA, 243 bp, Glycine max
ggaaaagactcacatcaacattgtcgtcattggacatgtcgactctgggaagtcaactaccactggtcatttgatctacaagcttggaggtattgacaagcgtgtgattgagaggttcgagaaggaggctgctgagatgaacaagaggtcattcaagtatgcctgggtgcttgacaagctcaaggctgagcgcgaaagaggaattaccattgatattgctttgtggaagtttgaaaccaccaa

SEQ ID NO: 156962 - DNA, 242 bp, Glycine max
caagtgttcaccacctaccaggaccagcagactaccgtctccattcaggttttcgaaggtgagaggagtctcacaaaggattgtcgccttcttgggaaatttgatctgtctggaattccaccagctccaaggggcacccctcaaattgaagtgaccttcgaagttgatgccaacggcattctaaatgtgaaggcagaagacaagggaactggtaaatcagaaaagatcaccattacaaacga

SEQ ID NO: 156963 - DNA, 238 bp, Glycine max
ggattacttgggactactacttctcttcacgagaacataccttgaagtttgactcgtgggaagagcctgcagagttggaatatgtgaagcagcatggggtttctgtgtttctcatgccatccgggatgcttggaactctgctttctctgattgatgttttgcctttgttctcgaacactggttggggtcagaaagccaacctggattttctgaagaaacacatgggagctacatttga

SEQ ID NO: 156964 - DNA, 238 bp, Glycine max
ctcgagccggctcgagcaaacacaacaacactctctcttctcgctcttggcttttcgcacttcactcactctcattcattcatttccaccgttcatggatcccgtaagcgtgtggggtaacacgcccttggcgacggtggatcccgagatccatgacctcatcgagaaggagaagcgccgtcaatgccgcggaatcgagctcatcgcctccgagaacttcacctccttcgccgtcatc

SEQ ID NO: 156965 - DNA, 239 bp, Glycine max
attaaataaataaataaaattaaactaagctaaattcctttctctctctttctttctcttcgagggtttgggtttctcttcctccctggaagaaaaagaagagtcaccgctacgacgccgttcgtgcttttttgaggtgccacagtcatgtttgggcgtggtggaccaaggaggagtgacaactccaaatattatgatattctcggggtttccaaaaatgccagtgaagatgaaatcaa

SEQ ID NO: 156966 - DNA, 190 bp, Glycine max
tcttcatcaagctccgctccaacacagggggaaatgagggaggtccttcacgtgcagggatggcaatgcgggaaccagatcggttccaagttctgggaagtggtgtgcgacgagcacggcatagatccgacggggaagtacgtcggaaactcagatctgcaactcgagcgcgtgaacgtctactacaatg

SEQ ID NO: 156967 - DNA, 246 bp, Glycine max
gatattgcaaaaaacccaaatgtggtgtctgtgttcttgagcaaagaacataagttgcacactacccggtcatacacgaatttcttggactacacagacgtggccagaactccgcatggcaaaagggaagatttggggaaaatacgataattggtaacattgacacaggtgtttggcctgaatcccaaagcttcagtgataaaggatacggtaccgtcccatcaaaatggcgcggaggcctttgtc

SEQ ID NO: 156968 - DNA, 253 bp, Glycine max
caaagagggcgtcttcataaacgcctttcttctccgtttccgtttcctcgttcgaattcgctttttgatctgcgaaaatgagagagtgcatctcgatccacattggtcaggctggtatccaggtcggaaatgcttgctgggagctctactgcctcgagcacggcatcgggcccgatgggcaaatgccaagtgacaagacagttggcggtggtgatgatgctttcaatactttcttcagcgagactggtgctgg

SEQ ID NO: 156969 - DNA, 239 bp, Glycine max
accgagtccgagaggcatcatggcgacactggattccgacgtgaccgtgtttccggtcggcgaagctccagcagcgccggtcctgtctcgtccaccaagaagccgaagcgtttcgagatcaagaagtggaatgcggtttccctctgggcttgggatattgtcgtggataattgcgctatttgtcggacccatatcatggatctctgtattgagtgccaggccagccaggctaacgccac

SEQ ID NO: 156970 - DNA, 240 bp, Glycine max
ctcttctctaatttgcttgttggaaaggaattgaaatgggtgcacttaactacatcatctccaacttttgcacagttcccagcaaaaagatcaaaacaatgcagacagttgagatcaaagtcaaaatggactgtgatggctgtgaacgaaaagtcagaaatgcagtggctacaatcaaaggagtgaaatctgtggagataaacagaaagctaagcagggtgacagtgaatggttgcgttg

SEQ ID NO: 156971 - DNA, 231 bp, Glycine max
aactcacctgcttcttcctctttttgtcatttctcttcaacttcctcttctttcaattctcttcagtctctctccgccttcccaaaatggtgaaccctagatgcttcctcgacgtcagcatcggcggcgcgttagaaggccggatcgttgtggagctcttctccgacgtcgttcccaaaactgccgagtccttccgcgctctctgcaccggcgaaaagggcatcggtccca

SEQ ID NO: 156972 - DNA, 237 bp, Glycine max
ttaattgcaagaatggcacttcgttgcttggtgatgtccctttctgttctcttcactcttggtcttgcgagagaaagccatgccagagacgaagatttttggcatgctgtttggccaaacactcccattccaagttcattgcgagatcttctaaagcctggccctgcaagtgttgaaatcgatgatcaccctatgcaaattgaagaaacacagtacccgaaaaccttcttctataaa

SEQ ID NO: 156973 - DNA, 238 bp, Glycine max
ctcattaattgcaagaatggcacttcgttgcttggtgatgtccctttctgttctcttcactcttggtcttgcgagagaaagccatgccagagacgaagatttttggcatgctgtttggccaaacactcccattccaagttcattgcgagatcttctaaagcctggccctgcaagtgttgaaatcgatgctcaccctatgcaaattgaagaaacacagtacccgaaaaccttcttctat

SEQ ID NO: 156974 - DNA, 242 bp, Glycine max
tcttcaaactagggttttacagaatataagcgctctctatctttggttttcgtcattcaaatccaatccaatatcaaatatgagtcgtcatcccgaggttaagtgggctcagagacttgacaaggtctatatcacggtgcaattggctgattcaaaaaatgccaaggtggatcttacaccagatggtatttttaccttctctggtagtgctggtgctgaagaccatcagtatgagctaaaac

SEQ ID NO: 156975 - DNA, 244 bp, Glycine max
caagaacactctcttgaacattcatggatccagtgagcgtgtggggtaacacgcccttggcgacggtggatcccgagatccatgacctcatcgagaaggagaagcaccgccaatgccgcggcatcgagctcatcgcctccgagaacttcaccgccttcgcagtcatcgaggccctcggcagcgccctcaccaacaaatactccgagggcatagctggcagacgatactacggcggcaacgaatt

SEQ ID NO: 156976 - DNA, 217 bp, Glycine max
gtgagaaagagaaagagagaattcgtaaaccctaatttcggaaagatcggcgatgactgcctccaaggatcgcgagaacttcgtctacatcgccaaactcgccgagcaggccgagcgttacgaagagatggtggaatcaatgaagaacgttgcgaatctcgacgttgaactgacggtggaggagcggatttgctttctgttgggtccaacatgtgat

SEQ ID NO: 156977 - DNA, 158 bp, Glycine max
ctcggttctgccttcacaaaaaaattatcgggatcccctttttctcctaagaaaagccatggctaagggtcccggtctctactctgacatcggcaagaaagccagggatctgctgttcaaggactaccacagtgaccagaagttcaccatcacactta

SEQ ID NO: 156978 - DNA, 243 bp, Glycine max
cggctcgagctcgagcgattcggctcgagggtttctgcgcttgaaaaaaaaaatctgggacacatcgagccaaataattggtccggtactagatgtaacttttcccccaggtaagatgcctaatatttacaacgctctgatagttaagggtcgagatactgttggtcaacaaattaatgtgacttgtgaagtacagcaattattaggaaataatcgaattagagctgtagctatgagtgcgac

SEQ ID NO: 156979 - DNA, 243 bp, Glycine max
gtgagcctcttaaggagtctgaagtgaaggtgctctgcctcaaagccatggaaatcctcgtcgaagagagcaacgttcaaagggtcgacgctcctgtcaccatatgtggtgatattcacggtcagttttatgacatgaaggagcttttcaaagtaggaggggattgccccaaaactaactatttattcctgggggattttgttgatagagggttttactcggttgaaacgtttctgcttctgc

SEQ ID NO: 156980 - DNA, 237 bp, Glycine max
gttcgagtttctgctgtgcttacaaatgcaccattcatgttgaatctggattgtgatcactacgtcaataacagcaaggcagtaagagaggccatgtgctttttaatggaccccaacctagggaagaagctgtgttatgtccaatttccacaaagatttgatggtattgatcgccacgatagatatgctaaccgaaacacagtgttctttgatatcaatatgaaagggcttgatggg

SEQ ID NO: 156981 - DNA, 235 bp, Glycine max
tgcagctgcagaagaagccaaaaagagtaaccatgtgcagagaaaattggagaagcgccagaaagatcgaaagacttgatgctcacattgaggagcagtttggtggtgggcgtttacttgcttgcatttcctctagacctggtcaatgtggcagagctgatggctacattctggaaggtaaggagttggagttttacatgaaaaaactccagaagaagaagggaaagggtgctgc

SEQ ID NO: 156982 - DNA, 239 bp, Glycine max
tggcaagaatgcgcgcctccgcgagttggtaaacctcgtggtggtggccggagacaggaggaaggagtccaaggacttggaagagaaggccgagatgaagaagatgtatggcctcatcgagacctacaagttgaacggccaattcagatggatctcctctcagatgaaccgtgtgaggaacggagagctctaccgtgtcatctgtgacacaaggggtgcctttgtgcagcctgcagttt

SEQ ID NO: 156983 - DNA, 239 bp, Glycine max
gaaagaaacagtcagaatcagaatcagaagaagcgagcaaagatgtcgggtcgtggaaagggaggcaagggtttgggtaagggaggagccaagaggcacaggaaggtgctccgcgataacatccagggaatcacaaaacccgccattcgccgtttggctcgcagaggcggcgtcaagagaatcagtggcctcatctatgaagaaacccgcggcgtccttaagatcttcctcgagaacgt

SEQ ID NO: 156984 - DNA, 237 bp, Glycine max
cactaccactggtcacctgatttacaagcttggaggcattgacaagcgtgttattgagaggtttgagaaggaagctgctgagatgaacaagaggtctttcaagtatgcctgggtgctggacaaacttaaggctgagcgtgaaagaggaatcaccattgatattgctttgtggaagtttgaaacaacaaagtattattgcacagttattgatgcgcctggacatagggatttcattaa

SEQ ID NO: 156985 - DNA, 239 bp, Glycine max
tctagggtttacagagaagctaagaggcgcacgaagcaaaagctcgtggaattgctagcaatggcgaggatcaaggtttacgagctgaggcagaagacgaaggctgatctgctgaatcaactgaaggacctgaaggcggagcttgccttgcttcgtgttgctaaggtcaccggtggtgcccctaacaagctttccaagataaaggtggtgaggttgaacatgcccaggttttgacggtg

SEQ ID NO: 156986 - DNA, 240 bp, Glycine max
aacgaagattcctgcggaatccgcgtcaccggcatgcaattctcctacgacgtgcagcaaccgccgctcttcctcgacttcaacctcaacgtctctcccggatcccgctgcctcctcgtcggtgccaatggatccggaaagacgactttgctgaagattctggcggggaagcacatggttggaggaagagacgttgtgcgcgtcttgagtggttccgcttttcacgacactcagctcgtt

SEQ ID NO: 156987 - DNA, 239 bp, Glycine max
ggcgtcgaagcgaattttgaaggagcttaaggatttgcagaaggatcctccaacatcttgcagtgccggtcctgttcatgaagatatgtttcattggcaagctacaattatgggtcctccagacagtccctatgctggaggtgttttcctagtgactattcatttccctccagattatccctttaagccacccaaggttgcattcaggacgaaggtgttccacccaaatataaatagca

SEQ ID NO: 156988 - DNA, 173 bp, Glycine max
atcataatgtaaataggaaagactaataccaaattcattaaaaaattcaggagaagcaaaaaaatgcaaggtcgtttgtcttcttggctagtcaaacatggactaattcatagatcattgggtttcgattaccaaggaatcgagactttacaaataaagcccgaggattggca

SEQ ID NO: 156989 - DNA, 231 bp, Glycine max
tggctacatcaggttagagagaaatcttgctaacagcagatcaggcaagtgtggaattgcaattgagccatcttatccccttaagaatggtccaaatccacctaatcctggaccatcacccccttcacctgtgaagccaccaaatgtctgtgacaactactacagctgtgctgatagtgctaacttgtacctgtatttgcgagttcggaaatgcttgctttgcctggggtt

SEQ ID NO: 156990 - DNA, 231 bp, Glycine max
tgactaataaatctaaattttttaagaagtacgatacttataatcctacaggagatactgataacgctgaaaaaaaaaaaaatgaattggctttaatacgttattcccaacaatcggattttcggcgagacataatcaaaggatctatacgtgctcaaaggcgtaaaacagttacttggaaattttttcaaaaaagggtgcattcccccctttttttggataaaattgaaa

SEQ ID NO: 156991 - DNA, 230 bp, Glycine max
gttataaatggcgtgtacttattttcccaaaagggaacaatgtggactatttgtccatgtatttggatgttgcagattcagctagtttaccctatggctggagtagatatgcacagtttagcttggcagttgttaatcaaatccataataaatactctgtgagaaaagacacacagcaccaattcaatgcgcgggaaagtgattggggtttcacatctttcatgccgctt

SEQ ID NO: 156992 - DNA, 231 bp, Glycine max
cctgattaaggagagtatggcacagtttagtggcaaaactttggtgcagtggttggtagcaacactgctgattgccttgttgggtggtgcacaagctgttgtgttatgtaacatcgactcaagtcaactaaacttgtgtcgtgctgcagttactggtcaaaaccctccaccaccagatgagaaatgttgtgcagttattcgccaagccaatttaccttgcctctgcagata

SEQ ID NO: 156993 - DNA, 232 bp, Glycine max
aacagcacaaagcgggttactgtctgttcaagctaccatctctctctctctttcttagtgcctccttgctagaagttagcatggcccaagaaactttcctattcacatctgaatcagtgaacgaggggcaccctgacaagctctgtgaccagatctccgatgctgtgatcgatgcatgcttggagcaggaccctgacagcaaggttgcctgtgaaacctgcaccaagaccac

SEQ ID NO: 156994 - DNA, 236 bp, Glycine max
atttaaagaaatcaacacacacaaacacaacaacatatggaggtgctaagggtgcaaaccatagcttccaaatccaaagatgctgccatcccagccatgtttgttagggcagagacagagcaaccaggcatcacaaccgttcaaggggtgaaccttgaggtgccaattattgattttagtgacccagatgaagggaaagtggtgcatgagattttggaggcaagtagggactgggg

SEQ ID NO: 156995 - DNA, 242 bp, Glycine max
tgcagtgacaggaaaaatcactaccaaagcagatgttttcagttttggggttgtgctaatggagttgttgactggattaatggcacttgatgaggatagacctgaggaaagccaatacttggcagcatggttctggcatataaaatcagataagaagaaactaatggctgctatcgatcctgcccttgatgtaaaagaagaaacatttgagagcgtctccatcattgctgagctagcagggc

SEQ ID NO: 156996 - DNA, 235 bp, Glycine max
agctgctgttcctgcgcgtgaacaagcctcaggtaagccaaagccatggttaagcataacaatgttatccccaacggacacttccgtaagcactggcagaactatgtgaagacctggttcaatcagccagcacggaagacaagaagacggttggctcgtcagaagaacgctgtgaagattttccccagacctagagctggaactcttagacccagtgtacatggtcaaactttga

SEQ ID NO: 156997 - DNA, 232 bp, Glycine max
aaaaaagaacagagagagaagaatgaaatctatctatcttcttatccgaagtctgggaggccaataggaagcacgccagctgctacgaatggtgaataaaagacaaaagaaacaaactgctacatagcatacagtctgtcttctcttctcttctccggttatggcgtccgccttgggcacttcttcaattgcggttctgccttcgcgctacttctcttcttcttcttccaag

SEQ ID NO: 156998 - DNA, 229 bp, Glycine max
ctcgggcaacaaaagaggttttgctgacacaatggaccctgagtttcctggcaatgcagggataaacatgatgctatcacctaaaccttctggagttcagcctaccacagtgaaagaaataccaagcaaggtgttacaagaacttccttcagcggcaaatggaactggtcataaccatacatcaggagcttctatcagtggcagtgcaccggctgctaaggcacaggtt

SEQ ID NO: 156999 - DNA, 223 bp, Glycine max
ggatcatttgcttttttgcttccagttttgtccataatcaatgattacacagacaggacattcccttctgagcatgagaggtttatctacacaatcagaacaattcaaggatcccttattgtttcttctttcgtcaatatcttccttgggtttagtaagacgtggggaaatttgacaaggttgtttagtcccataatcatggctcactttggtatgtgtggcg

SEQ ID NO: 157000 - DNA, 271 bp, Glycine max
caatcatcatatttatctttgcaactaaaatggcgtcgtcacaaccagagatggagcatccaaagaaggtttttggttgggctgctcgggactcatctgggcttctctccccattcaacttctccagaagagaaacgggggagaaagatttggtattcaaagtgcaatactgtggaatatgccactcagatctacatatgttaaagaacgagtggggcaacacaacctatcctctggttcctgggcacgagattgctggtgtggtaacaga

SEQ ID NO: 157001 - DNA, 271 bp, Glycine max
cgagcttgctggccgtgatctgactgactctttgatgaagatcctcactgagagagggtacatgttcaccacctctgccgagcgggaaattgttcgtgacatgaaggagaagcttgcttatgttgccttggattatgagcaagaacttgagactgcaaagagcagttcttcagttgagaaaaactacgagcttcctgatgggcaagttatcaccattggagctgagagattccgttgccctgaagttcttttccagccttctatgattgga

SEQ ID NO: 157002 - DNA, 268 bp, Glycine max
aaaaaaaataaaaaatggggataggggtactatttgttgggtttttcttgctatcttgtgttgtgtgtgtgaagggtgtggagccaaaagcctcacccacttgtacatttccggcagtttacaactttggggactcaaactcagacactggaggcatatcagcttcatttgtgccaattcctgcaccttatggcgagggcttctttcacaagccttctggaagggactgtgatggccgtctcattgtagatttcatagctgagaagct

SEQ ID NO: 157003 - DNA, 271 bp, Glycine max
aaaagcttctttggaagtcgccaaagtcggcaagacatatcagctcttaaactccgacgaccatgccaatttcctccgcaaaaataacaagaatcccggagattacaggcctgacattactcatcagtcccttttatctattttggatagcccactaaataaagctgggagattgcggtcggtatacataaggactgaaaaaggtgttcttatagaggttaagccctttgttcgtattccaagaacattcaaacgctttgctggtgtcatg

SEQ ID NO: 157004 - DNA, 257 bp, Glycine max
gggatcttccagtacctgggcgggagctgtcaggagttcattttgctatggagtttcttcatgcaaatactaaaagcttgcttgatagcaatctccaggatggcaacttcatttctgccaagggaaagaaagttgtggtcattggtgggggtgacacgggcacagattgcatagggacatccattcggcatgggtgtagtagcattgtaaatctggaacttctccctcagccaccacaaactagagccccaggcaac

SEQ ID NO: 157005 - DNA, 267 bp, Glycine max
ttaacatatacaaattctctgtgttgtgttgtgtacttgtgttaattgtgttgttgttgtaggaaatttaagtgaagagagaatgatgatgaagtctgctatgtgtgcattggtgcttgtggcactggttgtggttgaagtggggcccatggctgaggctgcggtgacttgcaacccaacacagttgactccttgtcttccggcaattaattcaggttctgcaccttcgagtgcttgttgccagaagctgaaggagcaaaagccatg

SEQ ID NO: 157006 - DNA, 269 bp, Glycine max
cttctctgctgaaagccacagatgtgaaatgaagcatgtgctgttggaaatggaccgaattttaagacctgctgggcatgctatcattcgagagtccgtttatattgtggatgccattgctactattggcaagggtatgagatgggtatgtcgcaaagaaaacaccgagtatggagttgacaaagagaagattctgatatgccagaaaaagctatggcactcatccaacaatggttcaagatgacaaactctggaacctgtgcagtggt

SEQ ID NO: 157007 - DNA, 266 bp, Glycine max
gttgttgttagatcgtggggagagaaaagagtggagcctaagctgaagaatcatgtggatctagttgagcttctcggtattgcagatacaaagaaaggagctgatgtagctggaggtagaggtttctatctcaaaggagatggtgttcgccttaatcaagctctaataaactttgggcttgattttttggataaaagggagtatactttattgcatactcctttcttcatgagaaaagatataatgtcaaagtgtgctcaactagc

SEQ ID NO: 157008 - DNA, 265 bp, Glycine max
cgcaattttcatttttctctctcccttagtcaaagggattcatcgttcttcttcccaggttatttagaaaagcaaaatggtgaagatttgctgcattggtgctggatatgtggggggtcctactatggcagtcattgcacttaagtgcccatccattgaagtcgctgttgttgatatctctaaatcccgcattgcagcctggaacagcgaccagcttcctatctatgaacctggccttgatggtgttgtgaagcaatgccgtggc

SEQ ID NO: 157009 - DNA, 267 bp, Glycine max
aaagaatcgagtgattttcgtttgcgttgctgttgcgactgagtgagtgaagatggcgtgcttgcacgaccacagttgcgaagaccatgactgttcctctaactggtctctctacaaacacatcgacctctccaaggtaactgctttgaatgaggcaaatccaggaagtgttaagtcagttttcaaagcttgggaagagcgtctggattcttctggggttcacttggaaagcaatgagggtgatcctgagttacttgtcttcattcc

SEQ ID NO: 157010 - DNA, 263 bp, Glycine max
aagagtttaaagtgcgagttaatgctttggtagcaaaggctcagaaaacaccagatgaaggatggactatgcaagatggaacttcatggccaggaaacaactcacgtgatcaccctggcatgattcaggttttccttggacacagtggtgcccatgacatagagggaaatgaacttcccaggttggtgtatgtttctagagagaaaaggccaggctaccaacaccacaaaaaggctggtgctgaaaatgcactggtgagggtg

SEQ ID NO: 157011 - DNA, 265 bp, Glycine max
aaagggtccagaagtactcaacgctgttagaccggctggatcggcacttgttgatgactggcactgcctgaaaaccatggtgaggacttttgagacacattgtggatccttgtctcaatacgggatgagacacatgaggtcctttgcaaacatctgcaatgtagggataaagaatgaacaaatggctgaggcttcagcacaagcttgtgtcagtattccttccaatccctggagttctctgcaaaggggtttcagtgcataataa

SEQ ID NO: 157012 - DNA, 268 bp, Glycine max
aactttccttcttcttcttccttccttcctcgtttcgttaaccttctaattcaattcattcctcacttccttttccaaccgaaccttttctccgataatcagagagagataataatggattggggaaacgtaaccgcggaggatctgatcgacgcgctccgtgaggtggattggtcgtcgccgccgcgccctctgtcggaattcttctcgcgattcaccgttcccaggtcttcctccaaatggaacagccgcctcaaatgcaatctct

SEQ ID NO: 157013 - DNA, 267 bp, Glycine max
tgttcaagaaagacggaagcaccactgctggtaattctagccaggtgaccgatggggcttcagctgttctgctgatgaaaagaagtgttgcattgcaaaaggggctacccattcttggtgtattcaggacttttgcagcagttggtgttgatcctgccatcatgggtgttggccctgctgctgcaattcctgttgctgttaaggctgcaggtctagagcttgatgatattgatctttttgaaataaatgaggcatttgcctcccagt

SEQ ID NO: 157014 - DNA, 265 bp, Glycine max
atcgctgtaacattctgtgtgacgctggctgcatcattagctgcacggcagggaccaacatctatggccgcatttcaagtatgtctgcaggtttggttggcagtgtctcttcttgcggatggtctggctgttgctgggcaggcaattcttgcaggtgcatttgctaataaggacttcaacagggccacagcaactgcatcccgagttctacagatgggtttggttctaggattggcacttgcattcattcttggaacaggattgc

SEQ ID NO: 157015 - DNA, 269 bp, Glycine max
ctcccatcataaaaaaccgaccctctcctttccctcttcaccaaccaatggctcccccaaaggccgagaagaagcccgcggagaaaaagcccgcagagaaggctccggcggagaagaagcccaaggccgagaagaagatatcgaaggaaggaggaagcgagaagaagaagaagagaacaaagaagagcgtggagacctacaagatttacatcttcaaggtgctgaagcaggttcaccccgacatcggaatctcaagcaaggccatgggg

SEQ ID NO: 157016 - DNA, 259 bp, Glycine max
tcgagcttctttctctgcgattttgtcttcaatttccagatcacgaaactaaagaagatggagaaagcgatcagcagacagaagattttgcttcatcatctcaacccttcatcgtctacccacgtcaacgaatcatcctccctctatgcttcagcatgtgtggcgggggacagcgctgcttatcaaaggacatcgacattcagggatgatgttgtgatcgtggctgcttatcggactgctcattgcaaaggtaaacgtg

SEQ ID NO: 157017 - DNA, 260 bp, Glycine max
gcaacttccaacaccatagtgaaatggcttccaaggctgcacttctcttgtgtttcaatgttctcttcttcaccgtggttagctccacatatgtgccatgcaacccacgccccaaaactccaaaacacccacctgtcccaaagccaccttccccaaagcaagcaagttgccccaaagacactattaagtttggtgtgtgtgctgatgtgttaggtttgatcaacgtgcaacttgggaagccaccaaagaccccatgctgc

SEQ ID NO: 157018 - DNA, 260 bp, Glycine max
agatgaccagaagacggtcattggctttgggcggctctggctcagagctttaccaagcgcccaatgaagggaatgcttaccggaccagttgagaatggtaacaggaccggtaagcattctcaactggtcctttgttagaaatgaccaacctagatctgagaccacctaccagattgctttgtctatcaaggacgaagtggaagaccttgaaaaggctggcatcactgttatccaaattgatgaagctgctttgagagagg

SEQ ID NO: 157019 - DNA, 262 bp, Glycine max
ctcaaccccaaacagaagcaagctttagccaggcagttaaatctccggcctcgacaagttgaagtgtggttccagaatcggagagccagaacaaagctgaagcaaacggaggtggactgtgagttcttaaagaaatgctgtgaaacattgacggacgaaaacaggaggctaaagaaggagctgcaagagctgaaggcactgaaactagctcaacccttgtacatgcctatgcctgctgccacactcaccatgtgcccttctt

SEQ ID NO: 157020 - DNA, 256 bp, Glycine max
ttaacatatacaaattctctgtgttgtgttgtgtacttgtgttaattgtgttgttgttgtaggaaatttaagtgaagagagaatgatgatgaagtctgctatgtgtgcattggtgcttgtggcactggttgtggttgaagtggggcccatggctgaggctgcggtgacttgcaacccaacacagttgactccttgtcttccggcaattaattcaggttctgcaccttcgagtgcttgttgccagaagctgaaggag

SEQ ID NO: 157021 - DNA, 257 bp, Glycine max
aagagaaatgttgagtgagagcaagctgagggatcttctgcatggttctgagtatgttctcacttatgaagataaagatggagattggatgcttgtaggggatgtgccatgggaaatgttcattgagacttgcaaaaggctgaaaattatgaagggttctgatgccattggtttagctcccagggccatggaaaagtctaaaagcaggatttagggtatcctggatttcctcttttgtctaatcaagtgtttattgt

SEQ ID NO: 157022 - DNA, 269 bp, Glycine max
cagctcgagacgcttatggtggatacctaggcacccagagacgaggaagggcgtagtaagcgacgaaatgcttcggggagttgaaaataagcgtagatccggggattcccgatataggtcaacctttcgaactgctgctgaatccacgggcaggcaagagacaacctggtgaactgaaacatcttagtagccagaggaaaagaaagcaaaagcgattcccgtagtagcggcgagcgaaatgggagcagcctaaacgtgaaaacgggggt

SEQ ID NO: 157023 - DNA, 266 bp, Glycine max
ccgttcttcgtgttctccattccctctctcactccttcatctacgtaatttccttccttcctttctttctttctttctttctttatcttctcatttttctcaatacaattttgttctttctgtctcaagttttgctacttttctcttcttaaccatagttcacatattatatcatcacatatcatagtgatatcatatcacaatgtgtggcatacttgctgtgcttggttgctctgattcatctcaagccacaagggtccgcgtcc

SEQ ID NO: 157024 - DNA, 262 bp, Glycine max
ctcaactgcgcggtgagtgagtgagagacggaaagtgcaaagccaccgtcttctcttctcagagcttggctttgcttatcgattctctctcctctcatctttctcattcaaggtttgtataagatggccgatgctgaggatattcaaccccttgtttgtgacaatggaactggaatggtcaaggctggatttgctggtgatgatgctcccagggctgtctttcccagtattgttggccgacctcgacacactggtgttatgg

SEQ ID NO: 157025 - DNA, 261 bp, Glycine max
ggacgagaacatccccaaggcgcaaagcgcgttgctggtgaggtgcaaggcgaattctgaggctactcttggaacttacaagggggatgccacgcttggggaaggggcttctgagtctcttcatgttaaggattataagtactaagagagaggtgtgagattggttcttttggaatggaattgtttgtttctttgggcctgttttggatattcaagagtgtttttcaaaaaatttctactgaaaaggaaagaaattctcca

SEQ ID NO: 157026 - DNA, 263 bp, Glycine max
ctctctcagtgctctcgatctgcactgcaacttccttgtctgacagatcccgtgttccggagaaaggaaaaggcaagaaagatgtcggggcaaacgcagcgtctgaacgtggtccccaccgtgacgatgctgggagtggtcaaggcgcgtctagtcggcgccacgcgcggtcacgcgctcctgaagaagaagagcgacgcgctcacggtgcagttccgccagatcctgaagaagatcgtgtccacgaaagaatctatgggcga

SEQ ID NO: 157027 - DNA, 259 bp, Glycine max
ggaagagtgagcgtgaaagatgccttgggcgaggctttcagggtctccaaggctcgacgttgctattgacatgggcaatccatttctcaatctcactgttgatggtttccttaagatcggagctgtcgcagccacgcgatcagctgctgaagatacttatcatattatccaaaaggggaatatctcaagtcatgatttcgagaaaacgttgaagaagatgtgcaaagaaggtgtatattggggaactatagctggcgtt

SEQ ID NO: 157028 - DNA, 253 bp, Glycine max
caaccccgttgtccggagccaccattttgcgctccggcaatgttcttcccggtggccatcgtcccttaaacccaccacacttcaaagtcatgggtattccatgggacgacgtcgttgtgatccagcaagggaaggatcacaatgagccctgcatcgtcaccgtcaattgccccgacaaggctggtctcggctgtgatctttgcagaatcatcctcgagttcggtctccgcattacccgtgctgatatttccac

SEQ ID NO: 157029 - DNA, 152 bp, Glycine max
tgagaatgttctttatattcaggtgggtgatcctgttgcagatcacaagtgttgggaaaaaccagaagccatgactgaggaacgtccactcttacaagtgaatgcatcttgtccaggatcagacattgcagctgaaactgcagcagccatgg

SEQ ID NO: 157030 - DNA, 254 bp, Glycine max
gcgagtttaggcgcggcgggatcatcacgagattgcaaaatgaagttcaacattgcaaatcccaccactgggtgccagaagaagctggaaatcgatgacgacctgaagcttcgggcattttgggacaagaggatctcccaggaggtccttggtgacgccctgggtgaggagtttaaaggatatgttttcaaaatcactggtgggtgtgacaaacaaggattcccaatgaagcagggagtgttgacccctggtcg

SEQ ID NO: 157031 - DNA, 259 bp, Glycine max
cagctccaggcagaacaagagcactttgctcctcaaaatgaacccggttcacaagaaaatcccggttctcatccacaatggcaaacccatttgtgaatctctcgttgctgttcagtacattgaggaggtctggaatgacagaaatcccttgttgccttctgacccttaccagagagctcaggctagattctgggctgactttgttgacaataagatatttgatcttggaagaaagatttggacatcaaagggagaggaa

SEQ ID NO: 157032 - DNA, 227 bp, Glycine max
cgttgttgttgttgaagaagaagaagaagaagaagaggaggaggaggaggaggaggaggaggagaatgagaatgaagacgacgatgttttggggttgtcgatggagatgagggttttcgctgagaggtttattgggatggagactttgaagatggagatgatgaaggagacggaacggtgtaggttggagatggagaagatgcggatccagatgattctggaatcac

SEQ ID NO: 157033 - DNA, 262 bp, Glycine max
cttcttcttcttctcttaaaagttattaagagcttttgcttttctttctgcgcgcttttcccaattaagtagttcttccttttctcaaagcaaaaaaaatgttcatcgagagtttcaaggttgagagtcctaacgtgaagtacacagagactgagattcagtccgtgtacaactatgaaaccactgaacttgttcacgtgaacaataatggcacttatcagtgggttgtcaagcccaaaactgtcaaatatgaatttaaaac

SEQ ID NO: 157034 - DNA, 177 bp, Glycine max
cttctcagctgcagcaacagttgccagaatcaatgattgagttaatttcacaagataaaccgttgccagaaaagggtaagcttttgcaagcagtgatgaaagctggtcctttgcttcagacactgcttcttgcaggaccacttcctcaatggagacaccctccaccccctcttgagt

SEQ ID NO: 157035 - DNA, 256 bp, Glycine max
aggagatcaagtatgcggacaagcttccagttataccttgggggccaaggtttactaaatcaagtcaaaatgacatgcgcatcaacttggcaatatctgctgtttttacagcttggatccttgtcaagcgcagtgctgaatataaacctttgcagtttttagcctttgcctttgtttataggctttttgagaagttaaaaacctttgaatctcctgtaacccccaaatataatgaagagggtgaagacacaggcga

SEQ ID NO: 157036 - DNA, 246 bp, Glycine max
aagccagatctggaaaagggtgataaaattatcatgcctccctcagcccttgatcgccttgcgtctttgcacatagagtaccccatgttatttcaaattaaaaatccttctgctgaaagagttactcactgtggggtgctagaattcgtatctgatgaagggatcatatatatcccatactggatgatggaaaatatgctcctccaagagggagacattgtaaaagtgaaaaacaccaaccttgca

SEQ ID NO: 157037 - DNA, 252 bp, Glycine max
gaccgccaacgtcacgcctcagcagaccctccacgagatatcagtctcagcaagggtacttgagaagaagtctccatgcaacttccttgtgttcggccttggccatgacagcctcatgtggacatcgctaaattatggcggccggacggttttcctggaggaggacaagtcctggatcgaccaaatccaggagaaggtaccctctttggagtcctaccatgtcatgtacgacacaaaggccaccaggctgaa

SEQ ID NO: 157038 - DNA, 256 bp, Glycine max
cgcaacaaaaagaaagaatcccaggcgaggagaaagatggacgggaaggagcaggatgtgtcggtgggagcgaacaagttccccgagagacagccgattgggacggcggcgcagagccaagacgacggcaaggactaccaggagccggcgccggcgccgctggttgacccgacggagtttacgtcatggtcgttttacagagcagggatagcagagtttgtggccacttttctgtttctctacatcaccgtcttaa

SEQ ID NO: 157039 - DNA, 255 bp, Glycine max
ggagggtatccccccagaccagcagaggctgatcttcgccggcaagcagctcgaggacggacgtacccttgctgactacaacatccagaaggagtcaactctccacttggtgttgcgtcttcgtggtggtatgcagatcttcgtcaagacccttacgggtaagactattaccctcgaggtggagagctccgacaccattgacaatgtgaaggcgaagatccaggacaaggaaggaatcccaccggaccagcagag

SEQ ID NO: 157040 - DNA, 227 bp, Glycine max
caaggaccagtatatgtgggaactggatgtgttttcaatagacaagcactttatggctatagccctccttctatgcccagcgtaccaagatcttcatgctgttgcttcccctcaaagaagtccaccaacgatgtctcagactttcaaagaaacgcaaagagggaagaacttgaggccgccatttttaatctcaaggaacttgacaattacgatgagcatgagaggtc

SEQ ID NO: 157041 - DNA, 249 bp, Glycine max
gccactggtccacttgggaaggaactctttgaaaaggaacaggatgatctactctcggatctgaaagatgtaccaaaagcagcttgtgatcgaagaatcaatgagtttgtaaaacgggcccgagcagccaagatacatgcttacattatcagccatcttaaaaaggagatgcctgctatgataggcaaagctaaagctcaacaaaagctcatcgataatttggcagctgaatttggaaaggtacaaagg

SEQ ID NO: 157042 - DNA, 254 bp, Glycine max
cgccgccggaggagctggtggccgctggcagcagaacgccgtcgccgaagacgacggcggggaagctgctgaaccggttcgtggagagcaaggcgtcggcggtgtcgctgcaggtgggggaacacgtgcagttggcttacacacaccacaacgaatcaccgtggcatcccagatcatttgctgttaaggatgagatattctgcttgtttgagggggctctagacaatttgggcagcctgagacaacagtatgga

SEQ ID NO: 157043 - DNA, 246 bp, Glycine max
caaagaaaaaaaaaaacccttagccaacacaaccatcatggccacctctgctattcagcaatcagcattcactggtcaaaccgctctgaagcagctcaatgagttcgtccgcaagaccggtggcgccggcaaaggtcgcactaacatgcgccgcaccgtcaagagtgctcctcagagcatttggtatggccctgaccgtcccaagtacttgggtccattctcggagcagattccatcatacctgac

SEQ ID NO: 157044 - DNA, 246 bp, Glycine max
tgccctcagaacacctttgtcccagggctgattgatctggccatcaagaggaacagtttgattggaggagatgactttaagagtggtcagaccaaaatgaaatctgtgttggtggatttccttgtgggggccggcatcaagccaacatctatagtgagttacaaccatctgggcaacaatgatggcatgaatctctcagcccctcaaaccttccgctctaaggaaatctccaagtaccatgttgtt

SEQ ID NO: 157045 - DNA, 219 bp, Glycine max
gcgggcggtttgtcccacgcgcagtgctgatggacctggagcccggaaccatggacagcgtgcggactgggccgtacgggcacatattccggcacgacaacttcgtgttcgggcagtccggcgcgggcaacaactgggcacaggggcactacacggacggcgccgagctcatcgactccgtccttgacgtcgtgcgcagggaggcgagaaatgcggatg

SEQ ID NO: 157046 - DNA, 247 bp, Glycine max
aaatggggtttcatctccttcagtggctgcaagctcagactcgtctcccaatgaggaaaccaaagagaaaaatgtggatgtcaaagatggtgagactgattcctcgttccctaaacctcttgtgactgttaacatcgagccggagccgaatgtggtgcagcaggattttgtagacatgtacatgagattcatgcagcaattcaccgagtcattggcaaaaatgaagcttcctgtggactttgaaagt

SEQ ID NO: 157047 - DNA, 183 bp, Glycine max
attgcctccctctgctgccgtccctaatctgaaggctcccgccatctgcgatcggatttcatggctccaaagaaggacaaggctcccccaccttcatccaagcctgccaagtctggcggtggcaagcagaagaagaagaagtggagcaagggtaagcaaaaggcaaaggtgaataacatggtg

SEQ ID NO: 157048 - DNA, 233 bp, Glycine max
ggattccgactcgccgcattgactcggtccgggttggggtcgactcagttcggtatttcattctctcgcgaatctaatctataggaaaagctaagggcacatcacaatgaaggcattgattctggttggggggtttggaacaaggctgaggccactgacactcagttttcctaagcctcttgttgattttgctaacaaacctatgatttgcatcagatagaggcccttaaggc

SEQ ID NO: 157049 - DNA, 243 bp, Glycine max
gtttgatgatttcattgcagatgcactgcgaggtactggattctatcagaaagcaacactggaagcttaagcagatagaacttgcagattgtgaaatatatgcttcttgtgaaccttgccccatgtgccttggtgcaatccacctttctcgaataaagaggttggtttatggagcgaaggctgaggcagcaattgctattgggtttgatgatttcatagcagatgcactgcgaggtactggat

SEQ ID NO: 157050 - DNA, 244 bp, Glycine max
caatatcctctctttttctcttcgcactctccctcatggcaaggttgagaggctctatggtctcgcccctgttgctaagtacttggtcaggaacgaagatggtgtctccattgctgctctcaacctcatgaaccaggacaaaatcctcatggaaagctggtactatttgaaagatgcagtccttgaagggggtattccatttaacaaagcatatggaatgacagcctttgaataccatggaacg

SEQ ID NO: 157051 - DNA, 247 bp, Glycine max
caaattcagggtatctggcatccccatgcttgtggccattgcatcaagtggtcagacattgacaacaaaagctcgagatctggtttcactctatggagcagatgcatatcctttcaccgaggagagaataaaagaaatagagacagaacaagaagagactgcaaaggggtggccggagaagctgaagcatgaattacatgagcatgagcttgtgttgacgcgccgcagggtgtattactgtgatgct

SEQ ID NO: 157052 - DNA, 253 bp, Glycine max
gggatttttgctggttatgcctctgcccgcatatataaaatgttcaaaggaacagagtggaagagtattgccctcagaactgcaatcatgttccccgcaatcgtttctgccattttctttgtattaaatgctctcatatggggacaaaaatcatctggagctgtgccatttgggaacatgtttgccctgatcttttttaggtttggggattccggttcaactgttttcggttggtgccaagctgggtttaaag

SEQ ID NO: 157053 - DNA, 221 bp, Glycine max
cttaatttctctctgccttgctcatttacacacctctccaacctatcactttcagctttatttgaatccctctctctcctttccaaatggccagcgttgaggttgcacatcaaacaccaacaacagttccagacaatggaacaaccgaggtaatcaagacccaggatacaacccggaacccatacaagcaatgaagctcctgcaacagaacaagcagcagc

SEQ ID NO: 157054 - DNA, 284 bp, Glycine max
tcgtaggttaggtcagatttcggttcgagtattatgctcactgtctctccagagaacttgatagagagatggcagctgcaacatctggtgctgtgttaaatgggttgggatcttccttcttgagtggaggaaacaggagccaaacccttctggcctctgctattggaggcaagttggtgctgctgttactgttaatcccagaagactcattgtggtagctgctgctgcaccatagaagtcatggctccctggtgttagaggtggtggcaatctcgtcgacccag

SEQ ID NO: 157055 - DNA, 246 bp, Glycine max
actggctcttgcaagttcgcatgtaataggggcactctctttcccccagacgaataggcaggccaagaaagagagtgaccctattacatgcgcactggctcttgcaagtatggagcaaactgcaagttcaaccatcctgatcctacagctgttggaggaggaggaggtacacctccttcagggtatggtaatggagggtctatttcattacaaggtgtatcacaaacatctgtaccctcctggtct

SEQ ID NO: 157056 - DNA, 243 bp, Glycine max
gaggaaagtccaagaccgaatctaagagagccgatcccaaacttgctgtgaataagaagggagccgccagcaaggctaggaaacccgccggcaaggggaaggcagcgaaagaccctaacaagccaaagaggcctccaagtgctttcttcgttttcatggaggagttcaggaaggtattcaacaaagaacatcctgaaaacaaagcagtgtctgctgtgggcaaagctgctggagcaaaatgga

SEQ ID NO: 157057 - DNA, 241 bp, Glycine max
gaaacagttgaggccgtacatggaatccatggttccactccccggaatctatgacccggatttcattgctgccaaccaaggagaccgtgccactaacgtaatcaggggcacaacgaaagaacaagttgaacaaatcatcaaagacattaaggagttcaaagaaagcactaaggttgacaaggtggttgtcctgtggacagccaacacagagaggtacagcaacgtgattgtgtggactaaa

SEQ ID NO: 157058 - DNA, 242 bp, Glycine max
gaacacatgcggcaactgtgactgcgctgacaagactaactgcaccaagggaaacagctatggtgttatagtagagactgagaagagctacatcgagactgttgacatggatgttccagcagctgagcatgatgggaagtgcaagtgtggcactaactgcacttgcacggactgcacttgtggccattaaggaatatgtatgaaaatgtaattgccatgtgtttggcaatacaaatctccaa

SEQ ID NO: 157059 - DNA, 241 bp, Glycine max
cctaaccgcacctctctctttcttcccgtgtgcgtcaaagcgaagaacgcgacacgatggtgttctacttcaaagcgcgccccgaagccggcgatttcaccatcttcatgggccttgacaagtacgagaacgaggaactcatcaaatacggttttcccgaagacatctggttccatgtcgataaaatgtcttcagcccatgtctatgtcaggttgcacaaaggccagaccatcgatgacat

SEQ ID NO: 157060 - DNA, 242 bp, Glycine max
ctctctcactcacaaacgcacactgaattcaaaaacatcgaaagagagaggcatggccgagtaaaccttcatcatgatcaagccagatggcgttcaaagaggccttattggcgagattattagcagatttgagaggaagggtttttacttgaaagggttgaaactcgttactgtggaccgtccttttgctgagaagcactatgctgatttgtctgcaaagcctttctttagtggtttggtgg

SEQ ID NO: 157061 - DNA, 180 bp, Glycine max
ggaaacaaggtaaaccaagattgaagccgcctttcccagccaatgctgggttgtatggatgtcctaccactgtcacaaatgtggaaactgtggctgtgtctccaaccattctaaggcgtggacctgaatggtttgccagttttcgtaggaagcacaatgctgggacaaagttgttgtgtg

SEQ ID NO: 157062 - DNA, 187 bp, Glycine max
tgctattatcatccgcagctgcttttattcgcaccgcaaacagtgagccatggccgtcggaaagagaaatcgcatctccaacgggaagaagggtggcaagaagaccgcagctgatccctttggcaagaaggattggtatgacattaaagctccttgtgttttcaagtgaaaaatgttggccaaaacc

SEQ ID NO: 157063 - DNA, 190 bp, Glycine max
  unsure (1)..(190): unsure at all n locations
ctcgttcttcttcttttgttgttctgtgtttgtgtttgtcttttctctcacctgaaaatgtcttgctgcggtggtaactgtggttgcggaagctcctgcaagtgcggcaacggctgcggaggctgcaagatgtanccagacttgagctacactgagtcaaccaacaccgagacccttggtcctggggagt

SEQ ID NO: 157064 - DNA, 243 bp, Glycine max
cccgtcttcacttctttatggtggggtttgcacctctcacttctcgtgggtctcagcaatatgtctcccttactgtcccagagctgactcaacaaatgtgggatgccaaaaatatgatgtgtgctgctgatccccgatacggccgatacttgactgcatctgctatgttcaggggaaagatgagcaccaaagaggttgctggacaaatgatcaatgtgcagaacaagaactcatcatactttg

SEQ ID NO: 157065 - DNA, 241 bp, Glycine max
acttggagtccttagctggaaattagatgctgataaccatgaaaatgatccagagctgaaaaagattcgtgaagagcgtggctacacctacatggatgtttgtgaggtctgcccagaaaagttgccaaattatgagcagaaaatcaaaagcttctttgaagaacatcttcacactgatgaggagatccgcttttgtgctgctggaagtgggtattttgatgttagggattgcaatgatgct

SEQ ID NO: 157066 - DNA, 219 bp, Glycine max
  unsure (1)..(219): unsure at all n locations
ccttcttcttcttctcttaaaagttatgaagagcttttgctttgctttctgcgcgcttttcccaattaagtagttctcccttntctcaaagcagaaaaaatgttcatcgagagtttcacggttgagagtccttacgtgaagtacacagagactgagattcagtccgtgtagaactatgaaaccactgaacttgttcacgagaacaataatggcacttat

SEQ ID NO: 157067 - DNA, 216 bp, Glycine max
cgcttcttccttctctcatcaacaacatgcagatcttcgtcaagactttgaccggcaagaccatcaccctcgaggtcgagagcagcgacaccatcgacaacgtcaaggccaagatccaggacaaggaaggtatccctcctgaccagcagaggttgatttttgctggtaagcagctggaagatggtcgcactcctgctgataataacatacaaaagg

SEQ ID NO: 157068 - DNA, 241 bp, Glycine max
gtgaagtctggcgtctgggctgactcactaagccgtggattgattgatctcaatataactgctcctaaaaaagtatcccttgcggacgttggaattgtgggtggattgagtgatggatccgatgaaagggagaaaggccctccaccttcattttacatggggagagctatgggttcaggatctggtcttggaatgggtaggtctggattcactccttcacagccagcagctggagacgact

SEQ ID NO: 157069 - DNA, 266 bp, Glycine max
cacacttcggctcgaggtccttgtggaaaagatggagattttcaccttagatttattttcttgcttacttcctgtgctcacaggcttgctggatagcaagatagaaagacatgtaaagctgtcactggatatgctgttaaagcttgtagcatttttggtccaacaatacgtgcaactgtttcagcacctccctctgttggtgtcgatctacatcaagaagaaaggcgggaatgctgcaacaagtgctttatggaactgcaaaagat

SEQ ID NO: 157070 - DNA, 239 bp, Glycine max
tgttgttgtaactcgttcttcttcttttgttgttctgtgtttgtgtttgttttgtctctcacctgagaatgtcttgctgcggtggtaactgtggttgcggaagctcctgcaagtgcggcaacggctgcggaggctgcaagatgtacccagacttgagctacactgagtcaaccaccaccgagaccttggtcatgggagtggcacctgttaaggctcaatttgagggtgctgaaatgggt

SEQ ID NO: 157071 - DNA, 178 bp, Glycine max
cacaaacgttggtggtgctggtgctgtggattgtgtttcaatcatgggttcaagaactggttggatgccaatgtcaagaaacttgagtcagaactggcagaggtataactagctcgatggtcaaagctctcctctcaggtcaccacgagtgatggcagaactattgtgtccaacaatg

SEQ ID NO: 157072 - DNA, 237 bp, Glycine max
atcaaggttaacccttcatttgtcagctgccgtggaggttatgctacatggtttagcagcaaaaggagcgaccccaacctgctcactggtgctcttgttggtggacctgatgcatatgatgactttgctgatgaaagagataactatgagcagacagagccagcaacatgtaacaatgcttctcttattggtattctggcaagctaggttgaagtcatggtggctataaccagcttc

SEQ ID NO: 157073 - DNA, 242 bp, Glycine max
caattggaattcagttttccaaccacacgctgcaaatcgagtcgaaggccgtcgctgcaaatctctctcccgaagaagaccgagtggatccaatttggagagcccgaggttaccgaaacggtgtcgcaagtaacccgaacgcagaagagaagaagcactacagaggagtgctacagagaccgtgggggaagtttgcagcggagatccgggacccgaacaagcgcggctccagggtgtggctt

SEQ ID NO: 157074 - DNA, 155 bp, Glycine max
aattgacgttgttcctttgttttctttgtatttcagatatatgcagtatctattactatccgtatagtgtttggcttcatgttcatagcactgatatggaaatttgacttctctcctggtatggtcttgatcagtgctattctgaatgatggaac

SEQ ID NO: 157075 - DNA, 218 bp, Glycine max
caatgagttattacaaccagcagcaaccgccggtcggagttccgccgccgcaaggttatccgccggaggggtacggaaaggagggatatccaccgccgggatacccgccagcgggatcaccgccagctggatcacaccgccgggatatccgccacaacaaagctaatctccgccgccttaccggcgcaggggtatctccgcctacgctcttcaatagc

SEQ ID NO: 157076 - DNA, 239 bp, Glycine max
caactgctgatcatcaaggacagggttattttcagtgcctgttttcttgtattgagacgctacttggatctttaaatgtgaaaaaccttgtcctaccagctgccgatgaagctgagtcaatatggactggtaaatttgggtttacaaagctaccccaagatgagataaacaaatataagaaattttatcgcatgatgatatttcaagggacctcagtgttacagaagcctgttcctgaa

SEQ ID NO: 157077 - DNA, 200 bp, Glycine max
agaatctgttctggctgtaatgctgatattggccatggaagatttttgagttgcatgggatgttattggcatccagaatgcttttgttgccatgcttgcaaacttccaatcactgattattttcgttctatgtctggaaatcgtcgttatcataaatcctgctataaggagttgcatcatccaagatgtgatgtttgcaa

SEQ ID NO: 157078 - DNA, 240 bp, Glycine max
gctgctggaattcacgagaccacctacaactccatcatgaagtgtgatgtggatattaggaaggatctgtatggtaacattgttcttagtggtggctcaactatgttccctggtattgctgaccgtatgagcaaagaaatcactgcacttgctcctagcagcatgaagattaaggttgtggctccaccagagagaaagtatagtgtttggattggaggatcaatccttgcatccctcagc

SEQ ID NO: 157079 - DNA, 240 bp, Glycine max
ctctcgcaaaccaattttcacattctttgtattgagttacttgagctagccgcaaccatggaaccatccaaaaactcgcagaagccctcacatttccatgactacctccccgtgatggcgaacaagctcggcggggacggcctcatcgatgagctctgcaacggcttcaagctgctcaaggactccgacagaggggtgataacctttgagagcctaaagaggaacgctgctctgctgggc

SEQ ID NO: 157080 - DNA, 240 bp, Glycine max
ctctccgctctaaattctctgtctctctctctctctctcgatcaatcatggctttgcccaatcagcaaaccgtcgattaccctagtttcaaactcgtcatcgtcggtgacggtggtacaggaaagacaacgttcgtgaaaaggcatcttaccggtggaatttgagatgaaatacgaaccgaccattggagtggaggttcccccattggatttcttcccaaactgtggaaagattcgcttc

SEQ ID NO: 157081 - DNA, 236 bp, Glycine max
ggatagttggagtcttccatgagctccttcatctcgcactccataagcaaaccgagcgcaagaacgttagcaacttgcgtagacccttggccttacctcagaagtttactaaagtatttgagcgtcatcctggtattttttatatttccaagaagagtgataccctacagttgttcttagggaggcctataatggtcaggaacctgtgcaagatcatgcccttgtacaaattagag

SEQ ID NO: 157082 - DNA, 191 bp, Glycine max
  unsure (1)..(191): unsure at all n locations
cacgattatattcttgtcaggaagaacactggacaaacaggccgtaacagaagcaaacttaaagaaggctggctaccacacatgggaaaaattaattctcacggatccacnagatccttccactccaaatgcagtttcatacaaaacagccagcgcagagaggacacctgataaaggccaggggatacaaa

SEQ ID NO: 157083 - DNA, 271 bp, Glycine max
cgcttacaaggaaatgaccaaccttattgagaaggcaagaaacaatgcatcagcatatgagaagaggtctgagtatggtgatcgtgaaatcacaaaggcagatctggagatggtgactagattagatccacttcgggtgtatccttacagatatcgagcagcagttctgatggacagccataaggaagaggaagccatgcggaactctctagagccaattgcattcaaagctggatttgcacctcttgcatctacgtgcagcaattccatg

SEQ ID NO: 157084 - DNA, 268 bp, Glycine max
taaaaagagaaaaagaataaataaaagtggaggaggagggtgtaggtttggttgatttgattgttgtgcatccatcgttaagctagtggcgatcggatccagctacagcatagagatcaaggaaggaaggaaggaagatgttgggtgttataaggcacaagagtattcgccctgccttctccgcaatcagacacttgtcttctgcagctaaagagattactgtcagggaggctctgaactccgcactcgatgaggaaatgtcagctgt

SEQ ID NO: 157085 - DNA, 267 bp, Glycine max
gtcttgccatggtgggcttcttgggctttgcagtccaagccgccgccaccggtaagggcccgctcaacacctgggccacccacttgagtgacccactccacacaaccatcattgaagccttctcatcctcctcttaagaagaagagtctttcttgtgcctcgtcactattactagcatattgtaaaagtctgttcttcttcggcttttggttgtaattagaacattttcacttagttggattagtagtacttgtgaacaacttgtaa

SEQ ID NO: 157086 - DNA, 266 bp, Glycine max
  unsure (1)..(266): unsure at all n locations
aggatttggccctgcatgcatgcgccggggagcctcccctcacattcctcgactcacttcttcttggagagtgggaagatcgcatgcagagaggactttttcgctatgatgttaccgcctgtgaaaccaaggtgattcctggtgaatatggtntcgttgcncagcttaatgagggtcgtcacctcaagaagagaccaactgagttccgagttgacaaggtccttcaaccctttgatgaaaacaaattcaactttaccaaagttggg

SEQ ID NO: 157087 - DNA, 265 bp, Glycine max
gggaagtccttatcttatagtatcggttagctcttccatttcgcaatccgttccaaaccacataagcttcaacaaagatggatgtagaaaagttgaagaagatggccagttctgttcgaactggtgggaagggtactatgagaaggaagaagaaagctgtccacaagactactactacagatgacaaaaggcttcaaagcaccctgaagaggataggagtgaatgctatccctgcaattgaagaagtcaacatctttaaggatga

SEQ ID NO: 157088 - DNA, 262 bp, Glycine max
tgggatccagtataaagcttatacagattatgcactggacatgggcataattcagaaggctgactatgaacgcatcaacaaagtgatggttccagcctgcgaaatggcaataaaactatgtggcactgatggaaacatcgcatgcacggcatcatattttgtttgtaatacaatattcaattccatcatgtcacatgctggtgatatcaattattatgacatcagaaagaagtgtgaggggagcctttgctatgatttttcg

SEQ ID NO: 157089 - DNA, 262 bp, Glycine max
gaaaaaatgggttcttcttcttctatgtggacggtgtgtgtgattttggcatcactggcctctgcagcactctgtgccaacccacgcaggccagtggatgtacaatttggccgaaactacgtgcccacatgggcctttgatcacatcaaatatttcaatggtggttctgacattcagcttcatcttgacaagtacactggtactggcttccagtccaaagggtcttacttgtttggtcacttcagcatgtacataaagatgg

SEQ ID NO: 157090 - DNA, 261 bp, Glycine max
gccaactgcatgatctgctcttcctcctccaagatgccgggttcccctcgcgggatcgcatctttgtcttcaatggggattacgtggatcggggagcgtgggggcttgaaaccttcttgctcttgttggcttggaaggtattcatgccacataacatatatttgctacgagggaatcacgaatcaaaatactgtacatcagtttatggttttgagaaagaagtaatggtaaagtatggcgataaaggtaagcatgtgtacc

SEQ ID NO: 157091 - DNA, 233 bp, Glycine max
ctaatccctctttcttcctcttcctcagtagtgcgattttcgattctcttctctgcaactatgcctaaccctaaggtcttcttcgacatgaccatcggcggtcaacctgccggccgcatcgtgatggagctctacgccgacgtgactccgagcaccgccgagaacttccgcgcgctctgcaccggcgagaagggcgccgggcggagcggcaagcccctccactacaaaggctc

SEQ ID NO: 157092 - DNA, 266 bp, Glycine max
cagtttccgttaacgctctccaatacaaaataaccactcactgaatattcggtcgaagatgtccgccgccgaagaagctaaagttcccgccgtcgaaaagccggtggaggaggtgaaggcgccgaagcttgccaaggagaagaaacctaaggctccgaaggaaaagaagccgaaacaggccaaaactgcttctcatcctccatatctccagatgattaaggacgctttgattgctctgaacgagaaaggaggatcgagtccatatg

SEQ ID NO: 157093 - DNA, 262 bp, Glycine max
cttcttcttcttctcttaaaagttattaagagcttttgcttttctttctgcgcgcttttcccaattaagtagttcttccttttctcaaagcaaaaaaaatgttcatcgagagtttcaaggttgagagtcctaacgtgaagtacacagagactgagattcagtccgtgtacaactatgaaaccactgaacttgttcacgagaacaataatggcacttatcagtgggttgtcaagcccaaaactgtcaaatatgaatttaaaac

SEQ ID NO: 157094 - DNA, 260 bp, Glycine max
gaagagagcgtcctagtcgcaaccctaataagaagaaccacagcttcaagcgagtgacatccaccagccatgggtcgtatgcacagccgcggtaagggtatatcctcttctgctttgccctacaaaaggacaccccctagctggctcaagatctcttcgcaagatgtggaagaaaatatctgcaagtttgcgaagaagggtttgaccccgtctcagattggtgtcattcttcgagattctcacggtattgctcaggtcaa

SEQ ID NO: 157095 - DNA, 257 bp, Glycine max
atccactcacctgcctcttcctcacccctttctccatctaacgagtaaggaaaaatggcgcgtaagaagatcagagagtatgactcaaagaggttgttgaaggagcactttaagagactttctggcaaggagttgccgatcaagtctgcacaaattactgcatcaactgatttcactgagctacaagagaaggcaccctggctttcatcttctaaattggttgtgaaacctgacatgttatttggaaagcgtggcaa

SEQ ID NO: 157096 - DNA, 258 bp, Glycine max
ctcatggtgttagcatgagtcccatcaaaggtacacaatccaatttgtgagcagatcttttttggctttgatgggactcacggtgttagcatgggtatcgagagtgtggtggataagaatgaaaaaaaatcatctggtggcattcgggatgctggttgtactgcatgtgagatggctgttatttggatgcagaaccagctgaggcagaatcagacagaagataggataatagactatgccaatgagctttgtgaaaaa

SEQ ID NO: 157097 - DNA, 260 bp, Glycine max
caaggcagaaagcaagctcatcctagagttttaaaaatggcagcagcctcctccatggctctctcttccccatccttggctggcaaggccgtgaagctgggcccatcagcccccgaagtcgggagggtcagcatgaggaagaccgtcaccaagcaggcctcctccggaagcccatggtacggcccagaccgcgtcaagtacttgggcccattctctggcgagcccccgtcctacctcactggcgagttcccaggtgacta

SEQ ID NO: 157098 - DNA, 250 bp, Glycine max
atatgctctactatatatgcccaatgcacacgcttttcactttgatggtgtatggagcattgggtatatataacaagtataatgaaattccctctgtaatggctgcaaagattttggcatgctttcttgtggtgatcttggtttgggacatccctggattctttgacatattttggagcccatttgctttatttttgggttatactgatcctgcaaagcctgatctccctcgaatgcatgagctggcatt

SEQ ID NO: 157099 - DNA, 217 bp, Glycine max
aagaagcattcctaaggaattggagggccttcatgagaaatactcatccacttgcagattgttcaagtaccaagaacttgtattggcaacatcaaattttttgccagaaaatttgattgggaaaggaggaagtagtcaggtttatagaggttgccttcctgatggcaaggaacttgctgttaagatcttaaagccatctgatgatgtttgaaggagt

SEQ ID NO: 157100 - DNA, 263 bp, Glycine max
cggctcgagcggctcgagcggctcgagcaccgttcgctcttcctctcccagacaaacacatggctttgcccaagcagcaaaccgtcgattaccccagcttcaagctcgtcatcgtcggtgacggtggcacaggaaagacaaccttcgtgaaaaggcatctcactggtgaattcgagaagaaatatgaaccgaccattggtgtggaggttcatccgttggattttttcactaactgcggaaagattcgattctattgttgggat

SEQ ID NO: 157101 - DNA, 259 bp, Glycine max
gggttgctcttcagaggaatgacgttgaacttgttgctgtcaacgatcctttcatcaccactgattacatgacatacatgttcaagtacgacaccgttcatgggcagtggaagcattttgatgtgaagctgaaggactctaagacccttctcttcggtgagaagcccgtcaccgtttttggattcaggaaccctgaggaaattccatggggtgaggttggtgctgattatgttgttgagtcaactggcgtattcactga

SEQ ID NO: 157102 - DNA, 261 bp, Glycine max
gcttcttgttgttggaaagaaaccctagcaagcggaacaatggcagacgttgaggtcgatgtggcggctgcagcagcagcagggcagccgaagaagagaacgttcaagaagttcagtttcaggggcgtggatctcgatgcgcttctggacatgtccaccgatgaactcgtgaagatgttcagtgctcgcgcacgtagaaggttccagagaggcctcaccagaaagcccatggccttgatcaagaagcttcgcaaagcgaaa

SEQ ID NO: 157103 - DNA, 258 bp, Glycine max
caaaaattagggaggaatacccagacagaatgatgctcactttctctgttttcccatctccaaaagtttctgatacagttgtggagccatacaatgccactttgtctgtacaccaactggttgaaaatgcagatgagtgcatggttcttgacaatgaagcactttatgacatttgctttaggacattgaaactcagcacccctagctttggtgatctcaaccatctgatttctgcaaccatgagtggggttacctgtt

SEQ ID NO: 157104 - DNA, 259 bp, Glycine max
gttccagaaccgtagagctcggtggaagaacaaacagctggagaaggattacgagactctgcatgcaagttttgagagtctcaagtccaactatgactgtctcctcaaggagaaagacaagttaaaagctgaggtggcgagcctcactgagaaggtgcttgcaagagggaaacaagaggggcacatgaagcaggctgaaagtgaaagtgaagaaacaaaaggattattgcatttgcaggaacaggaaccaccccagagg

SEQ ID NO: 157105 - DNA, 167 bp, Glycine max
ctttactcctcttcaatcagttgcatattctttgctattccaatggccactgttgaggttgtgtcagccaaggttgccctcccagaggacacaaaagaggcatcattgaaggttgacgaggagaagaacacagaagaagttgttgacgactccagacaccacgaaac

SEQ ID NO: 157106 - DNA, 258 bp, Glycine max
gcaacacaagaacactctctcgaacatccatggatccagtgagcgtgtggggtaacacgcccttggcgacggtggatcccgagatccatgacctcatcgagaaggagaagcaccgccaatgccgcggcatcgagctcatcgcctccgagaacttcacctcgttcgcagtcatcgaggccctcggcagcgccctcaccaacaaatactccgagggcatgcccggcaaccgctactacggcggcaacgaattcatcgacc

SEQ ID NO: 157107 - DNA, 256 bp, Glycine max
acgctttctcatcgctgatcaaacttcaaaccctagctaggatttcaaggtacacttaacgatggcttcaaaacgcattactaaggagttgaaggatctgcagcaggaccctcctgtttcctgcagtgctggccctgttggtgatgacatgtttcattggcaagctacaattatgggtccaactgacagtccttatgctggtggtgtattcctggtgaccattcacttcccaccagattatccatttaagccacca

SEQ ID NO: 157108 - DNA, 226 bp, Glycine max
agttgaaacctggtgtcttatctgtacatgaagggaacgatgtgaccaagtactttgtcagcagtggctttgcattcatccatgcaaactctgttgctgatataatagctgttgaggctgtgccggtggaccgaattgatgcgaatctagtccagaagggtcttcaagatttcacccagaagctgaactcagccacaactgatttggagaaagctgaagctcagat

SEQ ID NO: 157109 - DNA, 266 bp, Glycine max
aaagcgggttactgtctgttcaagctaccatctctctctctctttcttagtgcctccttgccagaagttaaaatggcccaagaaactttcctattcacatctgaatcagtgaacgaggggcaccctgacaagctctgtgaccagatctccgatgctgtgctcgatgcatgcttggagcaggaccctgacagcaaggttgcctgtgaaacctgcaccaagaccaacatggtgatggttttcggagagatcacaaccaaggccaacgt

SEQ ID NO: 157110 - DNA, 266 bp, Glycine max
gaaaacattctggagaagccagaaaagcctgagagcacttcttcccctagagcttcacatacagtaatttcaagtaccgttaagaaacctatatggtgctaagaaagcagtgaagagtggggggctcggcgctcgtaaactcactaaaaagccaagtgagtctctctatgagcagaagcctgaggaaccccctgctccagtttcatcttcaacaaacaatatgcctgctgggccatctccaacgtctcggtttgagtatgtagaaa

SEQ ID NO: 157111 - DNA, 261 bp, Glycine max
gatgaggttcaaactactggtaagcactcttcaggattgattgttttgcccctgtattcaggactttcacgcgctgaacaggatttagtgttctctcaagcccctcgaggaaagagaaaagtgatcatttctactaatatagcagaaacatcactgacgttgggaggaattgtctatgttgttgacagtggattctctaaacagcggttctacaatccgatttctgatattgaaaatctggttgtggcaccaatctctaga

SEQ ID NO: 157112 - DNA, 260 bp, Glycine max
aagaggaggcaccatgacaagcactcttctgtctttgctcttcttgctcttctctcttctcactccaactctaatttcctcttcaccagttctaaaccctcaagaggtcgtacaagaggtcaacaagaaaatcaatggctctatagcaagacccagaaggaacttgggctacctctcatgtggtagtggcaaccccatcgatgattgttggaggtgtgaccccaactgggagcagaacaggcagaggctagcagactgcg

SEQ ID NO: 157113 - DNA, 258 bp, Glycine max
cgacgccggttcgcggttcgagaccgaggagaccaacggcaccgcacacttcctcgagcacatgatctttaagggcaccgagaggcgcaacgccgtgagctcgaggaagagattgagaacatgggaggacacctcaacgcctacacctcaagggagcaaaccacctactacgccaaggtcaccgacaaggacgtcccccaggccctcgacatccgcgccgacatcctccagaactcccgattcgaggaaactcgcatc

SEQ ID NO: 157114 - DNA, 258 bp, Glycine max
aaggaactcaatcgcattgctggagtggacaagacttgcaattttgtcaaggctgacttcatgaaaatgccattaccagacaacagttttgatgcagtgtatgcgattgaagccacttgccatgcaccagatgcttatggatgctataaagagatttttagagtgttaaagcctggtcaatgttttgctgcttatgaatggtgcatgaccgattcttttgatccccaaaacccagagcaccaaaaaatcaaggcagaa

SEQ ID NO: 157115 - DNA, 257 bp, Glycine max
gcaagaggtcttgcaaagattcatgcagagtacagtgcagccaaagtgcctcacgggaatgtgaaatcctccaacgtgcttctagacaagaacggtgttgcatgcatctccgattttgggttatcactcctattaaacccggttcacgccattgcccgattgggagggtacagggccccggagcaagaacagaacaagaggctatctcagcaggctgatgtgtatagtttcggagtattgttgttagaagttctcac

SEQ ID NO: 157116 - DNA, 264 bp, Glycine max
agctgaaatagaggacttgaggtccaagctggatgcatctgagagggatattttggagctgactgaggctgttaaagttaaagatgctgaggcagaggcatatatatctgaaattgagactattggtcaagcatatgaagatatgcagacacagaaccaaaatctgttgaaccaggtgatcgagagggatgactataatattaagcttgtatcagatagtgtgaagacaaaacaggcgcacaacactttaatgtcccagaagca

SEQ ID NO: 157117 - DNA, 257 bp, Glycine max
ctccttcaccgtcgctctctccaacgatcacaacaacatcgtcatcccatggcaaacgccgcatctggtatggcagtccatgatgactgcaagttaaggtttttggagctgaagacaaagaggacacaccgtttcatagtttttaagattgaggagcagcagaagcaggtcattgtggagaagcttggtgagccagcccaaggctatgaagatttcactgccagccttcctgctgatgagtgccgttatgctgttta

SEQ ID NO: 157118 - DNA, 254 bp, Glycine max
tcccaccccacttacatacacactctcccactcctccgagccggtcgagttgaatcggtgagtcagtgaccgagttgaaccatgtcggacgaagagcaccatttcgaatccaaggccgatgccggagcctccaagacctatcctcagcaggccggaaccatccgcaaaaacggctacatcgtcatcaagggtcgtccctgcaaggttgttgaagtttctacttccaagactggtaagcacggccatgctaagtg

SEQ ID NO: 157119 - DNA, 231 bp, Glycine max
tttacttcccctatggctcgtcactccttgctcttagccctcctcctcttcgccgccgtggccaccgccgcgatggcggtggccgcgtccgacgccgacgacatcctgatccgtcaggtggtgccagatgttggcgagcgaagaggaggacaacctgctgaacgccgagcaccacttcgcgagcttcaaggccaagttacccaagacctacgccaccaaggaggagcacga

SEQ ID NO: 157120 - DNA, 258 bp, Glycine max
ctcgagccgaatcggctcgagcttattgcaatgaaccacacagacgctatcatcaccagcaccttccaagagattgctggtagcaatgacactgttggccactatgagagtcacactgacttcaaccttccaggactttaccgtgctgtgcacggtattgatccattcgatccacagtacaacatagtctctcccggtgcagacatgggtatatacttcccatacactgaaactgagcgtagttcacagttttccact

SEQ ID NO: 157121 - DNA, 262 bp, Glycine max
agaaaatggagataattggagtgtaggacagcgacaacttgttgctctgggccgagctctgttgcagcagtcaagaatacttgtactagatgaagcaacagcatcagttgataccgccacagataatcttatacagaagattatccgaagtgagttcaaagaatgcactgtttgcaccattgcacatcgaatacctactgtcattgacagtgatctagttcttgtgctcagtgatggtcgagttgcagagttcaacactcct

SEQ ID NO: 157122 - DNA, 258 bp, Glycine max
cttgctccgcgccaagtcgcaccagaaattggacccctctgccgtccacggcgtcaccaggttctccgatctcactccgtctgagtttcgcggccagttcctcggcctgaagccgctccgccttccctccgacgctcagaaggctccgatccttccgaccagcgaccttcctaccgatttcgattggcgcgaccatggagctgttaccggcgtcaagaatcagggctcgtgcggatcgtgttggtcatttagcgccgt

SEQ ID NO: 157123 - DNA, 258 bp, Glycine max
tttgtaaagggtctcacagcgtaacagacttgaactacccttcaatcacattaccaaatcttggcctaaaacccgtaaccattactcgcacagtcacaaatgttggaccaccagccacatacactgcaaatgtccactcgcctgctggatataccattgtcgttgtgccaagatccttgactttcacgaaaattggggaaaagaagaaattccaagttattgtgcaggcaagcagtgtaactacgcggagaaagtatc

SEQ ID NO: 157124 - DNA, 257 bp, Glycine max
ttgcttttgatagttatatgattccagaagatgatctagaattagggcaattacgtttactagaagtggacaatagagtggtagtgccagctaaaactcatctgcgtgttattataacatcagctgatgtacttcatagttgggcagtaccttccctgggtgtcaaatgtgatgctgtgcctggtcgtttgaatcagatctctacttttatacaaagagaaggggtttactatggtcaatgcagtgagatttgtgga

SEQ ID NO: 157125 - DNA, 255 bp, Glycine max
aaagaaggcgtcttcataaacgcctttcttctccgtttccgtttcctcgttcgaattcgctttttgatctgcgaaaatgagagagtcatctcgatccacattggtcaggctggtatccaggtcggaaatgcttgctgggagctctactgcctcgagcacggcatcgggcccgatgggcaaatgccaagtgacaagacagttggcggtggtgatgatgctttcaatactttcttcagcgagactggtgctggaaag

SEQ ID NO: 157126 - DNA, 253 bp, Glycine max
tgcttctgtttgattccttggcagaaacatagatgcaccatcatctgagacatagcagctgactttgtctcagatgatggtgcatctatgcatctgtttgattccttggcagaaactgctgaatttgcaagaagatgggttcccttttgcaagaagtataacattgagccaagggctcctgagttttacttttctcagaaaattgattacttgaaggataaggtgcagcctacatttgtgaaggaaagaaggg

SEQ ID NO: 157127 - DNA, 254 bp, Glycine max; identical to SEQ ID NO: 114665

SEQ ID NO: 157128 - DNA, 254 bp, Glycine max
gtgctctgctcgtgcctctagggttatcatatctccatttccatttcctctctctcagtttccaagaatcttaagctatgggaaagtcttacccaaccgtgagcgctgattaccagaaggccgttgagaaggcgaagaagaagctcagaggcttcatcgctgagaagagatgcgctcctctaatgctccgtttggcatggcactctgcatgaacatacgacgatagcatgaagaccggctgactcatcggaacc

SEQ ID NO: 157129 - DNA, 253 bp, Glycine max
ctaatttcggaaagatcggcgatgactgcctccaaggatcgcgagaacttcgtctacatcgccaaactcgccgagcaggccgagcgttacgaagagatggtggaatcaatgaagaacgttgcgaatctcgacgttgaactgacggtggaggagcggaatttgctttctgttgggtacaagaatgtgattggtgctcgcagagcgtcctggaggatcctgtcttccattgagcagcaggaagaaacaaaaggga

SEQ ID NO: 157130 - DNA, 249 bp, Glycine max
caaatcggtccatctttcactcgatgagagaacaggttcaggatttgtgtcgcatgatctttaccttcacgggtatttcagcgcttctattaagttgccttctgattacactgcaggagttgttgttgccttctatatgtcaaatggtgacatgttccagaataaccatgatgaaatcgactttgagtttttggggaacattagaggcaaagactggaggattcagaccaatgtttatggcaatggtag

SEQ ID NO: 157131 - DNA, 250 bp, Glycine max
ctcgcggatctaatattaaggaatagcttaagggcacattacaatgaaggcattgattctggttgggggatttggaacaaggctgaggccactgacactcagtttccctaagcctcttgttgattttgctaacaagcctatgattttgcatcagatagaagcccttaaggccattggagtgactgaggtagtgctagccatcaattaccaaccagaggttatgttgaatttcttgaaggattttgaatca

SEQ ID NO: 157132 - DNA, 230 bp, Glycine max
ctcactgtcccaaaaaactgtggtctcaggcaacaaaagaggttttgctgacacaattgacccagagtttcctggcaatgcagggataaacatgatgctatcacctaaaccttctggagttaagcctaccacagtgaaagacataccaagcaaggtattacaagaacatccttctgcagaaaatggaacgggtcatacccatacgggagcttctatcagtagcagtgcac

SEQ ID NO: 157133 - DNA, 189 bp, Glycine max
ctcaacacttacggattcaggaaagttgtgcctgatcggtgggagttctcgaacgattatttccgccgaggcgagaagcggcttctttgcgaaattcagcggcggaagatctcatcgccggcgccgtctccgactgcgccgacgacggttacggtgccgatgccgttgaccgcgataccgatcatatcg

SEQ ID NO: 157134 - DNA, 238 bp, Glycine max
gccaagaaacttgaggatattgtgccctcttctcacaactgtgatgttcctcatgtgaatcgtactgattaccagctcattgatattgctgagggtggtttttggcgtgcgacttagtggaaagggttaccactagggatgagctcatgctgcccactgatgagagtctgctcactcagataaaggatggatttgctgagggcaaggatctggttgtgtctgtcatgtctgctatggg

SEQ ID NO: 157135 - DNA, 250 bp, Glycine max
gagggaatagggttagggttagggttagggttaggtggaggatgccgaagaacaagggaaagggaggtaagaacaggaagaggggaaagaacgaggcggacgacgagaagcgagagctggtgttcaaggaggacgggcaggagtacgcgcaggtgctccggatgctgggtaacgggcggtgcgaggcgatgtgcatcgacgggacgaagaggctctgccacatccgcgggaagatgcacaagaaggtgtg

SEQ ID NO: 157136 - DNA, 250 bp, Glycine max
tggaaaggccttgagagccacagcatgtgctacatcatgtgcattggcagcacacaaattgcggcgcccagtcaggatgtatctaaatcgaaagacagatatgataatggctggaggaaggcatcccctgaaaacaacttacagtggtgggtttcaagaatgatgggaagattacagcattagatcttaagatattggtcaatgcagggatatatgtggatgttagtccaataataccacgcaacatgat

SEQ ID NO: 157137 - DNA, 219 bp, Glycine max
gttgtttctttgcccttcatggcatctcaggctagccttctccttcaaaagcagctcaaagatctttgcaaaaaccccgtcgacggcttctctgccggtttggtcgatgaaaccaacatttttaaatggagtgtcaccataattgggcggccgataatctctacgaggggggatttttcaatgctattatgagtttcccatccaattacccaaatagtc

SEQ ID NO: 157138 - DNA, 251 bp, Glycine max
gagaaaggagggcaatttagcttgcacatactcaagcattccaccattgtggcaaagccaaggtcattttagactccaccacatgatcatgatcatatgatcaatccccttaattttttcttttttcttttcccttttctttactctgtattgtatcaatgcttgaaaatggggttgttccaaaaatgtcatatatatttggcctgctaatgggtattgtaaatctctgaacttgaagtgatgcacggttt

SEQ ID NO: 157139 - DNA, 249 bp, Glycine max
caagactctcatgaggacaggatcagctgcttaggtttgtcagctgatggaagtgccttgtgtacaggaagttgggacacaaacttaaagatatgggcatttggagggcataggaggacaacttaagccattgcgggaaggtcaaattggagacgaattgcgtgctaatttatataacccttcattttagccttgcaactcatgtccgtttgtccatgtgtgtgatcttagtactttttccattgtact

SEQ ID NO: 157140 - DNA, 250 bp, Glycine max
gtcggtagctgaagcattttataagcctccactttcctgaactagttttaacatacaatctttcaagtacacctccccagcttccatttaagaatggagatcactagaataggccaatggttaagtcttctgatatgtgtactactattactgcagacagaaggggttcctgtgggaatcacttttgttgaaaatgcagtggcaaaaggggctgtttgtttggatgggagtcctccagcttaccacttcc

SEQ ID NO: 157141 - DNA, 244 bp, Glycine max
ctgttctcttcaccattctctttcttctttgtttcaagtttcaacaacccagattcactctctctctcgtaattttctctcttattgaggctagaaaaagagagcaaaaaaactaaaaaatgcctgcggtcggaggtataaacaccggagggggcaaggagtaccctggaagcctcactctatttgtgacggtaacatgtatagttgcagccatgggtggtttaatcttcggttacgatatcgg

SEQ ID NO: 157142 - DNA, 255 bp, Glycine max
gttagtgagagaaagttctctctgcttctctctcttagactcataaccctattgcgtgctttgcaatcgaccccgattatggccaacagtaacctccctcgtagaatcatcaaggatacgcagcgtttgctcagtgagccagcacctggcattagtgcgtccccttcggaagacattatgcggtattccaatgtgaccatccggggcccaactcagtcgccttatgaagggggcgtcttcaagttggtattcttt

SEQ ID NO: 157143 - DNA, 252 bp, Glycine max
atcaaattagttcattctctttgcgcagttccctacctctcctttcaagatgcagatcttcgtcaagaccctcaccggaaagaccatcacccttgaggtggaaagctctgacaccatcgacaacgtcaaggccaagatccaggacaaggaaggaattcccccggatcagcaacgtctcatcttcgccggaaagcagctcgaggacggccgtaccctcgccgactacaacatccagaaggagtcaacccttca

SEQ ID NO: 157144 - DNA, 222 bp, Glycine max
tggctatgcccctgttcttgactgccacacttcccacattgctgtcaagtttgctgaactcatgaccaagattgacaggcgatctggcaaagagcttgagaaggaacccaagtttttgaagaatggtgatgctggttttgttaagatgattccgaccaaacccatggtggttgaaactttctctgagtaccccccacttggtcgctttgctgtcagggatat

SEQ ID NO: 157145 - DNA, 248 bp, Glycine max
cgcaggcgcagagtagagcagcacagaagagggaaaacggcaccgccgccgtagaagaaaacaaccatggtgcacgtctccttttacaggaactatgggaagacattcaagaagccgcgtcgtccgtacgagaaggagcgtctcgacgcgaagttgaagctggttggtgagtacgggcttcggtgcaagagagagctgtggagggtgcagtacgcgctcagccgcatccgcaacaacgcgcggaacct

SEQ ID NO: 157146 - DNA, 246 bp, Glycine max
ggaaagggtgtgagaagagaatggagagtaaagaggaagatgttaacgttggagcaaacaagttctcagaaaggcaaccaattggtacagcagctcagggtggtggtgacaaggactacaaggaggcacccccagctcctttgtttgaacctggtgagctcaaatcatggtccttctacagagctggaattgctgagtttgtggcaactttcttgttcctctacattaccatcttaactgtcatgg

SEQ ID NO: 157147 - DNA, 247 bp, Glycine max
gcattgcgtaatggctctgattttccctatgtatctcgggatggtggcaggttaattgaagctaaagatgtagtatttgaatgtggtcccaaatgtggttgtggtcctggttgtgtgaaccgaacgtctcaaagaggacttagatatcgtctggaggttttccgtactgccaaaaaaggatgggctgttagatcctgggattttataccttctggagcaccagtttgtgagtacaccggaatacttg

SEQ ID NO: 157148 - DNA, 248 bp, Glycine max
tgcagatccgaggagttaccctttcttttcttttttcttttttctctttcctcattctacttaaaactcccaccagtgatggcaggtttggctccagagggaacacaattcgatggtcgccaatatgatgctaagatgagtgaattgctttccactgatgggcaagaagtcttcacctcttatgatgaagtgtatgacagctttgatgcaatgggattgcaagagaatcttctgcgaggcatatatgc

SEQ ID NO: 157149 - DNA, 171 bp, Glycine max
caaccctaacgcgtgcagagcagagagagacgcagccatggggcgaagacccgcgaggtgttataggcaaattaagaacaaaccataccccaagtcacggttttgccgtggtgttcctgatcccaagatcaggatttacgatgttggtatgaagaagaagggtgtgaatga

SEQ ID NO: 157150 - DNA, 247 bp, Glycine max
ctttctttacctacttggacgggaatgtaaatgtactttggttagcacctaataatgttattgattactattttgcactttctttgttttagactgcagtggcagtaggagtggagcctagtcctaagttgccttacaatgaatattatgaatattttggcccggactataatctccatgtgaacccatccccatgggaaactctaaccacacccagggatctggaaaaaattcggaatacattact

SEQ ID NO: 157151 - DNA, 246 bp, Glycine max
aatgatccaagaatcaactggctctgcaacccagtccataaacacagggaactgcgtggcctcacttctgctgggaaaagtaacaggggtttacggggcagaggacatctctaccacaaaaatcgtccatcccgcaggcaaacctggaagagaaacaacactctttcccttcgtcgctaccgttgattttgtcaccattatcgtatgttgcttcattttccaagtatttggagtgcattatatgta

SEQ ID NO: 157152 - DNA, 230 bp, Glycine max
  unsure (1)..(230): unsure at all n locations
caaagccctcaaagcataatctcactcgtattagcgttgctgagagagacagacaaatggcaacaagcgaagaagtggttgtcgcggcgccgaggagncgcgccttgaggcccggctgaagcacaaacgggagagaaaatggacgttttggtgcggacaccaatccaaacccaaacagggcgctgcttagggtacctctcttcgcaaggtctacaccttcgacaccgttg

SEQ ID NO: 157153 - DNA, 249 bp, Glycine max
caccagagaagcacctaccatcaccccatgatgtctttgttggcaactggaaacccacaaaaaatgacacattgtccaaaagggtacccggatttggtgccacaataaacttgctctatggggatcaaacttgtggtcagggatcagataatgaggccatgaacaacatcatttcacactatctttattatcttgatctcttgggtgttggcagagaagaggcagggcctaatgaagttctctcctgtg

SEQ ID NO: 157154 - DNA, 249 bp, Glycine max
ctgaggattccgaacgagtgaccttcttcgtttctcgcaaagtttaagtaatcatgggtcaggaaaaggttcacatcaacattgtcgtcattggacatgtcgactctgggaagtcaactaccactggtcacttgatctacaagcttggaggtattgacaagcgtgtgattgagaggttcgagaaggaggctgccgagatgaacaagaggtcattcaagtatgcctgggtgctcgacaagctcaaagctg

SEQ ID NO: 157155 - DNA, 248 bp, Glycine max
aacactcattaattgcaagaatggcacttcgttgcttggtgatgtccctttctgttctcttcactcttggtcttgcgagagaaagccatgccagagacgaagatttttggcatgctgtttggccaaacactcccattccaagttcattgcgagatcttctaaagcctggccctgcaagtgttgaaatcgatgatcaccctatgcaaattgaagaaacacagtacccgaaaaccttcttctataaagaa

SEQ ID NO: 157156 - DNA, 248 bp, Glycine max
ggccgccgcggtggagaacgcgctcccgtgcagcttggaggacctctacaaaggagtcaagaagaagatgaagatttccaggaacgtctacgacgcttttggcaaatgtggggatgtggaggagattttgactatcgagataaaacctggctggacaaaaggaacaaaaattacctgcccagagaaaggtcaccggtgcgccgggtcccaccccaacagatctcattttggtgatagatgagaagccg

SEQ ID NO: 157157 - DNA, 226 bp, Glycine max
ggcattcgaaatcggtgaagatggttgctatgaggtttcatcagtaccaggtggtgggaagggctcttcctaccgaatccgatgagcatcctaagatctaccgcatgaaactctgggcaactaacgaggtccgtgccaaatccaagttctggtattttttgagaaaattgaagaaggttaagacaagcaatgggcaagtgcaagccataactgcgatttttgagag

SEQ ID NO: 157158 - DNA, 251 bp, Glycine max
ctggcttcgtcaaccttctcgaggctgccaaatccgccaacccccaacccgccattgtctgggcttcgtccagctccgtctacggcctcaacacccaaaaccctttctccgagctccaccgcaccgaccagcccgccagcctctacgccgccaccaagaaggccggcgaggaaatcgcccacacctacaaccacatttacggcctctccctcaccggactccgtttcttcaccgtctacggcccctgggga

SEQ ID NO: 157159 - DNA, 248 bp, Glycine max
ccgatacaagaaaatggcgtatttctggtctgatttggcaaatcatagcaatgtggccaatgcacttggggtgcttttcttctacattttttacaggactgtggtgcttagttataggaagcagaagaaggactatgaggacaggcttaagattgagagggccgatgccgaggagaggaggaagatgagggctttggagagggagatggagggaattgcaggtgatgatgaggcgggttagcagggga

SEQ ID NO: 157160 - DNA, 238 bp, Glycine max
caacaacgtgtcctccgacctgaaggcgttctccgccgcgctggccctctcctccatcctcctctccgcccctctccccgccggcgccgacatctcggggctcaccccatgcaaggagtcgaagcagttcgcgaagcgtgagaagcagtcgataaagaagctggagtcgcgctgaagctctacgaggcgggcagcgcccccgcactggccattaaggcgagcgtggagaagacgaaga

SEQ ID NO: 157161 - DNA, 245 bp, Glycine max
cgatgccctggctaaaatggttgatcctacattggaaggattataccctgtgaagtccctttctcgatttgcggatgttattgctctgtgtgttcagccggagccggaattccgaccacctatgtcagaagtggttcaagcgctggttcggttagtgcagcgtactaacatgagcaagaggacgtttggaactgatcaaggaggatccaacagagggggtgatgaccaagatacacaagacatgt

SEQ ID NO: 157162 - DNA, 246 bp, Glycine max
cggaatatcatatgataagtaatagttagggatagggatgacaggatttgaacccgtgacattttgtacccaaaacaaacgcgctaccaagctgcgctacatcccttttccatttgtttctagtgttattgtaaagaatctttgtcttgttttccacatttttatctgttgatatatagatatatatataatatatatctatcatttttctaattttctgccattttttttagtttcctatactat

SEQ ID NO: 157163 - DNA, 244 bp, Glycine max
agaacttcgtgaagaagcacactggtcccggcatcctctccatggcgaacgccggtcccggaaccaacggatctcagttcttcatctgcacgacgaagacggagtggctcgacggaaagcacgtcgtgttcggacaggtcgtcgaggggatggacgtcgtcaaggagatagagaaggtcggatccagctccggcaggaccgccaagccctcgtcgtcgccgactgtggtcaactctcttagata

SEQ ID NO: 157164 - DNA, 229 bp, Glycine max
gtttgttgttgtaactcgttcttcttcttttgttgttctgtgtttgtgtttgttttttctctcacctgaaaatgtgttgctgcggtggtaactgtggttgcggaagctcctgcaagtgcggcaacggctgtggaggctgcaagatgtacccagacttgagctacactgagtcaaccaccaccgagaccttggtcatgggagtggcaccggttaaggctcaatttgaggg

SEQ ID NO: 157165 - DNA, 249 bp, Glycine max
ctccgaaccctcgatcactctcacgcgctcctatattcgctcctccaccgtcgctctctcgaacaaccacaacaccatcctcatcacatggcaaacgcagcatctggtatggcagtccatgatgactgcaagttgaggtttttggagctgaaggcaaaaaggacacaccgtttcatagtttttcagattgaggagcagcagaagcaggtcattggggacaacttggtgagcctgcccagggctatgaag

SEQ ID NO: 157166 - DNA, 246 bp, Glycine max
gggttctcctaacatcgagatggacgagcacagtttcatggtgaacagagaaagagctgttgattacttgaactccttggacaaggtcttcgtcaatgaccaattcttgaattgggccccgaagacaggatcaaagtccggattgtatctgccagagcttaccattcattgttcatgcacaacatgtgtatccgccccactcctgaagagctggagaattttggtactcccggacttcactatata

SEQ ID NO: 157167 - DNA, 246 bp, Glycine max
atcctattccctatggctggtgcgacttgcgaggtgtagacatgatgtgatgtgatgaattgaggggaatccattgaagaggcgaggcgagttaatcagaaatcagaatgcacttgagcgagaacgaagggatagaggggaaggccttcgtggtcaccggtggactgggattcgtaggatctgctctctgcttggagctcatccgaagaggtgctagagaggtgcgagcctttgacctccgcctct

SEQ ID NO: 157168 - DNA, 218 bp, Glycine max
tgcccaaattttttcatagcattttcagaggaacaatggcgggtagggtttcgacgtgcttcttcttcgtgtttgctctttctctccttcttccttttcagatctccgctgaggaatcatcggagaaagagttcgtactcacattggatcactctaactttcacgacattgtcagcaagcacgatttcatcgtcgtcgagttctacgctccatggtgg

SEQ ID NO: 157169 - DNA, 244 bp, Glycine max
cttggaatccaaaaatgagagaaatcatcagcattcacataggtcaggccgggatccaggttggcaactcctgctgggaactctactgcctggaacatggcatccagcccgatggcatgatgccaagtgactcctccttcggtgtagcccacgacgccttcaacaccttcttcagcgaaaccggatccggcaagcacgtccctcgcgccgtcttcgtcgatctcgagcccaccgtcatcgacga

SEQ ID NO: 157170 - DNA, 172 bp, Glycine max
tctcgagccgaatcggctcgagcttctcaacccagtccgaggatgcgcctgccatcaaaaagaaggttgaggatgtaatgccaatcgctactggacacgagcgcgaggagcttcaggctgagctcgagggaaggaatattcttgaaatagaccatcccgaggttccattcgg

SEQ ID NO: 157171 - DNA, 156 bp, Glycine max
gtggatgaaaggccgcagaagtctttgcttccaccctttgaatctgcagaaatgcgagctttagcagagagcctaagtagggatatcattcgtggaagtccagatgtgaagtgggaaagcatcaaggggttagagaatgccaaacgtttataaaaa

SEQ ID NO: 157172 - DNA, 253 bp, Glycine max
gtttttcttcatagctaaagacacagcacgatgacgatgaagataatggtagcgataaagcgagtggtggactacgccgtgaaaatcagggtgaaggcagacaagacaggggtggtgagccagaacgtgaaaatgtcgatgaaccccttctgcgagatcgctctcgaagaagcccttcgcatcagagagtctggcttggcctccgaggttgtcgccgtcaccatgggaccctctcaatctctcgacactctcg

SEQ ID NO: 157173 - DNA, 258 bp, Glycine max
cgctcgagcgaatcggctcgagcaacaacttctgctacttcctactccaaccgcacttcagctccgcaattatcatgggcaaggtcaagatcggaatcaacggatttggaagaattggccgtttggtagccagagtggctctgcagagagacgatgttgaactcgttgccgttaacgaccctttcatcaccaccgattacatgacatacatgtttaaatacgacagtgttcatggacactggaagcatcacgatgtca

SEQ ID NO: 157174 - DNA, 258 bp, Glycine max
atcaaatttgcaacaaataacttctctgatgcaaataagcttggtcaaggtggattcggaattgtttataagggtacgctctctgatggacaagaaattgcaattaaaagattgtctatcaattctaaccaaggagaaacagaatttaagactgaaatttcgctaacaggaaagcttcagcaccgaaacttagttagactacttggcttctgttttgcaaaaagagaaagattattgatatatgagttcgttcccaat

SEQ ID NO: 157175 - DNA, 216 bp, Glycine max
gataaagtcatatgtgaatctgcaatcatagtagagtacatagatgaggtttggtccaacaatgctctctccatccttccacaaaatgcttatgaccgagctaatgcccgattttgggtttcttacatcgatgacaagtggtatacgtccataaggaatactattttggctgaagcggctgatcaagatgatgaggcaaagaagccacactttgtg

SEQ ID NO: 157176 - DNA, 259 bp, Glycine max
cgccgccagcggagaatgacgcgatgaaagtggactctcgcggcggctccgacgccggcaccgaaaaggaaatgtcagctcctgtcgcagatggtaatgatgcactcactggtcacataatctcaaccacaattgcaggcaaaaatggcgaacctaaacaaaccatcagttacatggccgaacgtgttgttggcactggatcatttggcattgttttccaggcgaagtgcttggagactggcgaggcagtggctataaa

SEQ ID NO: 157177 - DNA, 254 bp, Glycine max
gaggcaggagtggctcttgtctgaactcagtggaaagcgccctctctttggccatgaccttcccaaaacagaagaaatcaccgatgttttggaaacattccgtgtcatttcagagcttccctcagacaacttcggtgcctacatcatatcaatggcaacatccccatctgatgtgcttgctgttgagcttttacaacgtgaatgccatgtgaagcagccactaagggtggtgccactgtttgaaaagcttgctg

SEQ ID NO: 157178 - DNA, 254 bp, Glycine max
aactagtaatatttattagaatttgccagagaattagaagaataaacataataccccagatggcttcaaaaacttgttcctcccttgcccttttcctcacactcaacctcgttttcttctcacttgtctctgcatgcggttatacaccatgccctggtccaaacccaaagccaaggcccaaccccaaccctaaccctaaccccagcccaagtggctcgtgcccccgtgacgcactcaaactaggtgtatgcgcc

SEQ ID NO: 157179 - DNA, 259 bp, Glycine max
aaagaattggatgaagtttcatgtcctatctgcatggaccatccacataatgctgttctcctcctttgcagctctcatgagaagggctgcagatcttacatttgtgatacaagttatagacattcaaattgcctggaccgttttaaaaaaatgagggacaattttaaggagaaccaaaatttacccagttctttagtaaacacaaacaattctggtaatagttttgatattaaccttactgtgcaatctgacatgcatg

SEQ ID NO: 157180 - DNA, 251 bp, Glycine max
aacaaagaaaaaaaaaaacccttagccaacacaaccatcatggccacctctgctattcagcaatcagcattcactggtcaaactgctctgaagcagctcaatgagttcgtccgcaagaccggtggcgccggcaaaggtcgcactaacatgcgccgcaccgtcaagagtgctcctcagagcatttggtatggccctgaccgtcccaagtacttgggtccattctcggagcagattccatcatacctgaccgg

SEQ ID NO: 157181 - DNA, 256 bp, Glycine max
gtgagcttcaacaagttggttggagaactgcctgagtcattgggaagaatgaagaagttggagcagctgaatgtggcgaataacgagttgtctggtgagattcctgagagtgtttgcatgttgccgaggttggagaatttcacgtactcttataactacttctgcagtgagtcaccaacgtgtctcaagttgaaggataaggatgataccaagaattgtattccttataggccattgcaaaggtcactggatgagt

SEQ ID NO: 157182 - DNA, 249 bp, Glycine max
gtccctttggtcttcatcttctgttctgatccaggtatggcttctaaacgcatcttgaaggagctcaaggatttgcagaaggatcctcctacctcatgcagtgcaggccctgtggctgaggacatgtttcactggcaagccacaatcatgggacctgctgatagcccatatgcaggtggtgttttcctagtttcaattcattttcctcctgactatcccttcaagccaccaaaggttgcttttcggact

SEQ ID NO: 157183 - DNA, 250 bp, Glycine max
aattgggcaacttttagtgctggtgagaggtcgcgccacgacgattctccagattacaccatatttgttggtgacttggctgcagatgttactgattatcttcttcaggagacatttagggctcgttataactcggtgaagggtgcaaaagttgtcattgataggctaactggccggaccaatggatatggcttggtaaggttttcagatgagagtgagcaagtgagggctatgactgagatgcaagggg

SEQ ID NO: 157184 - DNA, 256 bp, Glycine max
atggcaatgactttaggtaccttccctttggggttggcagaaggagttgccccggaatcattcttgcattgcctattcttgccatcactttgggacgtttggtccaaaactttgagctcttgcctccccctggccagtcccagattgacaccagtgagaaaggagggcagtttagcttgcacatactcaagcattccaccattgtggcaaagccaaggtcattttagacttcaccacatgatcatatgattgtggg

SEQ ID NO: 157185 - DNA, 253 bp, Glycine max
atccctttgatcttctccgaactatattagcttctcaaggtgaaccaaaggtatatccaaacatgaggtctgcattcatggatatcatccatactcgtggattccaaggcttgtattctggattatcgccaactttagtggagattataccttatgcaggcctacaatttggcacatatgatacatttaagcgttggggcatggcttggaatcatagatactccaacacttctgcagaagataacctctctag

SEQ ID NO: 157186 - DNA, 254 bp, Glycine max
ctctttcttcctcttcctcagtagtgattttcgattctcttctctgcaactatgcctaaccctaaggtcttcttcgacatgaccatcggcggtcaacctgccggccgcatcgtgatggagctctacgccgacgtgactccgagcaccgccgagaacttccgcgcgctctgcaccggcgagaagggcgccgggcggagcggcaagcccctccactacaaaggctcgtccttccaccgcgtgatcccgaacttcat

SEQ ID NO: 157187 - DNA, 250 bp, Glycine max
ggtaaagaaagaaagagaagagaagaatcgaagacgaagatggaggacgcatcagcatcaaagttcattccacaccaaatcggaggcgtccaaaacgacgcgcttcgattcggtctccatggagtcaagagcgacatcgttggttctcaccctcttcaatcttcactccaatctacaaggagaatggatgaagcgatgaagaggcaatgcaaagttaacctgtacggaactgcttttcccatgaaggagg

SEQ ID NO: 157188 - DNA, 248 bp, Glycine max
catttccttatctatattcacctccatcttaaaacagttcccctagaaacttcgatctgaagatgggtggcattgcatttggacgctttgatgattctttcagtttaacctcaatcaaggcctatattgctgagttccattcaaccttgctctttgtttttgccggtgttggttcagccatagcctatggtaagttgacatcagatgcagcacttgatcctgctgggttactggcagttgctatttgc

SEQ ID NO: 157189 - DNA, 250 bp, Glycine max
caaggatttcgcggcgtgggcaaaacccgaaaccgccgatgattccatgtgggaggacgcacaggaagccttcaccaaaagccccacactggttaggtcaaaccaagacctaaaagaagagttcgaagaagcttccaacggtggaattcagagccttgctttgggtgctttggacaacagtttcttggtgagtgataatgggattcaggttgtgaagaatttcgcacatgggattcatgggaagggtgct

SEQ ID NO: 157190 - DNA, 255 bp, Glycine max
ggtgacagttcgttctccgttggctacttcagccgcgagcggctctccgtgaccgccaccgacatcgtcgacaacttcctcttcggttgcggccaaaacaaccagggcctctttggtggctccgccggcctcatcggcctcggctgccaccccatctccttcgtccaacataccgccgccgtatatcgtaaaatcttctcctactgcctccccgccacctccagctccaccggccgcctcctcttcgacaccacc

SEQ ID NO: 157191 - DNA, 255 bp, Glycine max
agaaaaagcaaaaacactgaatacaccaaaaatggccaaaagcaaaaactgtcatgctttgcctcttctccttgccctgatcctcttcttcactcttcttggaacctctcacgcaggtggcatagccatctactgggggcaaaatggtaacgagggcaccctctcagaagcatgtgcaacaggcaaatacacccacataaacatagcctttctcaacaaattcggcaatggccaaaccccagaaatgaacctggc

SEQ ID NO: 157192 - DNA, 254 bp, Glycine max
ggcacattgcatctcattgggctactgagtgatggtggagttcactccagacttgatcagttgcagttgttgcttaaaggagttagtgagcgaggtgttaaaagagtccgtgtccatattcttacagatggccgtgatgttttggatggctcaagtgtggggtttgtggaaacccttgaaaatgatcttgcaaacttgcgcgcaaaaggtgtcgatgctaggatagcatcaggtggaggtcgtatgaatgtcac

SEQ ID NO: 157193 - DNA, 248 bp, Glycine max
gcaagtcctgacggtggcgcaagccgtggaggacaagatcgacgacgagatcgccgccctggagcgtctggacgccgatgacatcgaggccctccgcgagcgccgcctccagcagatgaagaagatggcggagaagcgctcccgctggatctccctcggccactccgaatattccgagattccctccgagaaagacttcttccccgtcgtcaaggccagcgaacgcgtcgtctgccacttctaccgcg

SEQ ID NO: 157194 - DNA, 249 bp, Glycine max
gtgttgcaaactttgttgggaagccagctgctatagtttttggtatgggctatgtgacaaactctgctattcttccagtcttgatggggaagggaagtttgattattagtgattcattgaaccacaactccattgttaatggtgcacgaggatcaggagcaacaattcgcgtttttcaacataacgagccatctcatctagaagaagtgttgagagaacaaattgctgagggacaacctaggacacata

SEQ ID NO: 157195 - DNA, 245 bp, Glycine max
ctcagaagaaaagaaaagcaaccaaaaatggttctcacatccactgccacacacccagatgaacaagaccagagcctaaactatacttttgcttccagatatgtgcgtgaacctattccaaagttcaagatgccggagaaatccataccaaaagatgctgcttatcagataataaacgatgagttgatgttggatggtgcaccaaggctcaacttggcctcgtttgtgaccacttggatggagcc

SEQ ID NO: 157196 - DNA, 248 bp, Glycine max
gagagagcagaggaaaaggggaagaaaaatgttgagtgcgacggcgatcggcgcgttattgggtttgggaacccagatgtactccaatgctctccgcaaactcccctacatgcgccatccgtgggagcacgtggtcggaatggggttgggcgcggtgtttgtgaaccagcttctgaaatgggaggcccaagtggagcaagacctcgacaagatgctcgaaaaggccaaggccgccaacgaaagacgtt

SEQ ID NO: 157197 - DNA, 249 bp, Glycine max
tttcattcataccgttcgcaacacgatcactattctgcgacgatggtggcacattcgagttcttggggaagggcactcgtcgcgatctcgccctacaccttctccgccatcggcatcgccgtcgctatcggcgtctccgtcctcggcgccgcctgggggatctacatcaccggaagcagcttgatcggcgctgcaatcagggctcctcgaatcacttccaaaaatctcattagtgtaatcttctgtgaa

SEQ ID NO: 157198 - DNA, 222 bp, Glycine max
gatcaagacgcattctgagtccattagctacccaattgctctttggattgagaaaactactgagaaggagatctctgatgatgaggatgatgaagagaagaaggatgaggagggtaaggtggaggatgttgacgaagagaaggagaaggaagaaaaacagaaaaagaagattaaggacgtgtcacatgaatggtccttggtgaacaagcagaagcccatttg

SEQ ID NO: 157199 - DNA, 245 bp, Glycine max
gtgaaccctctctataaaagcgcttccttctcatttggaacctattccattctctaaaccctaaacgactctatctctcttcgttttgttcttccttgcgctcctcctcgttcgttcgttctccctcgcgtagatcggcaatggcggagaccgagacgtttgctttccaggctgagatcaaccagctcctcagtctcatcatcaacaccttctactccaacaaggaaatcttccttcgtgaactc

SEQ ID NO: 157200 - DNA, 245 bp, Glycine max
ctcttacaccatgagtgcatcaaccaaagcttggattgtggcatcaagcataggggcagtggaggccttgaaagaccaattaggtgtatgcagatggaactatgctttaaggtcactacaacaacatgcaaagaacaacatcagatcttatagtcaagctaggaaattgtcctctgcatcctctgctgcggtttccaacaaggtcaagagaaccaaagaagagcatatggggaaagtcatcgaat

SEQ ID NO: 157201 - DNA, 206 bp, Glycine max
cgcgaagttaaacccctctccgacatagatgaccaacagggcttgcgtttccaaattccattcatactattctatggtaatgaaccatcaatggcagggaaagaccctgctaaggtcattagagaggcacttgcgcaaactcttgttttttactacccttttgcgggtaggattagggagggactcgtaaaaatttggggggggtt

SEQ ID NO: 157202 - DNA, 244 bp, Glycine max
agaaggttcaggatcttctccttcttgatgtcacccctctctctcttgggttggaaactgctggtggggtgatgacagtcttgatccccaggaacactactatcccaacaaagaaagaacaggttttctcaacctattctgacaaccagcctggtgtgtggacccaggtttatgagggtgagagaacaaggtctagagataacaacttgttgggcaaatttgaactttctggcattcctccagc

SEQ ID NO: 157203 - DNA, 177 bp, Glycine max
ctgatatctttaagacttggagacaaggtaggactggctttcctttggttgatgcaggaatgagagaactttgggcaacaggatggatacacaacagaataagagtaatagtttccagttttgctgtgaaaatgttgctactcccctaaaaggggggaatgaaatatttctgggaca

SEQ ID NO: 157204 - DNA, 249 bp, Glycine max
gttccacacaagcaccttcacataaaattcaagtatcgaagaagaagatggctttaggtgttcctgctcttccgttgacatacgtggctcacgttctggcagttgttgccagcgtcttggtcgtggtctgggtcgtcaatttcaggggtggcttggcttgggattctgataacaagtccctcatcttcaacattcatccagttcttattgttattggcttactagttcatgggggtgaagctattataa

SEQ ID NO: 157205 - DNA, 247 bp, Glycine max
gggaaaagaactattacattacttctattgcaggggctaataatgggagctctcttgtggtgatgtcaaaaggcacacagtatacacaacaatcatacaaagtaagtgactcattcccattcaaatggataaacaagaagtggagagaaggttttcatgtgacctcaatggccactgctggaagtcgttggggtgttgttatgtcgcgaaatgccggattcagtgatcaggttgttgaacttgattt

SEQ ID NO: 157206 - DNA, 247 bp, Glycine max
tcttcttcttggaaaaggacttgcattctggaacaaagttggacttgcacttcaccaggagtacatctaatcaagccacgttcttgtcacgccaagttgcggattcgatacccttttcatccaacaaggtggactttatattcaacaagttttctgtcaaacccgggtcagaggaggctcagatcatgaagaatactattagtgagtgtgaagagggtggaatcaaaggagaggaaaagtactgtgc

SEQ ID NO: 157207 - DNA, 247 bp, Glycine max
ctcttgtccctatgattgctaggggagtgatgttgggtcctgaccagcccgtgatcctccacatgcttgacattcctccggcagcagagtccttgaatggggttaaaatggaattggtggatgctgcattccctcttcttaaaggtgttgttgccacaactgatgtggttgaggcatgcactggggtcaatattgccgtgatggttggtggattcccaagaaaagaaggtatggagaggaaggatgt

SEQ ID NO: 157208 - DNA, 246 bp, Glycine max
ggtgggccatgctcggagccttgggctgcgtcttcccggagttgctgtcccgcaacggggtgaagttcggagaagccgtgtggttcaaggccgggtcccagatcttcagcgagggtgggctcgactacttgggcaacccaagcctgatccacgcccagagcatcctcgccatctgggccacacaagttatcctaatgggtgccgttgaaggttaccgtattgctggtggccccctcggtgaggtca

SEQ ID NO: 157209 - DNA, 243 bp, Glycine max
ctttctgttctcttcactcttggtcttgcgagagaaagccatgccagagacgaagatttttggcatgctgtttggccaaacactcccattccaagttcattgcgagatcttctaaagcctggccctgcacgtgttgaaatcgatgatcaccctatgcaaattgaagaaacacagtacccgaaaaccttcttctataaagaagaccttcatccaggcaaaacaatgaaagtacaattcagcaag

SEQ ID NO: 157210 - DNA, 240 bp, Glycine max
tttgggtttctcttcctcccttggagaaaaagaagagccaccgctgcgacgccgttcgtgcatttttgaggtgccgctgtcatgtttgggcgtggtggaccaaggaggagtgataactccaaatattatgatattctcgggatttccaaaaatgccagtgaagatgaaatcaagaaggcctatagaaaggcggctatgaagaaccatccagatagggggatgagctcctgaaatgtttag

SEQ ID NO: 157211 - DNA, 237 bp, Glycine max
caaaagtggaaagtaagcatgaggcatacgctggaccaaccaaacgcggccttccggatggtgggatattgatgagtggatgtcagactgaccaaacttctgcagatgcaagtcctgcaggcaacgctgccagtgcttatggtgcttttagcaatgcgatacaggctataattgaggagactgatggtgcaatcacaaaccaagaacttgttcaaagggcaagagagaagctgaaga

SEQ ID NO: 157212 - DNA, 275 bp, Glycine max
ctgttccttcaccttctcaccacaattaccctcctacccctgcccctgctaagcctcctactcaccaccatcaccatcaccctcctgctcctgttaatccacctcctgttccggttcatcctccagttaaacctcctgttccggttcaccctccagttaaacctcctgttccggttcaccctccagttaaacctcctgttccggctcaccctcctgttaaacctccggttgttccggttcaccctcctgttaaaccccggttgttccggttcacc

SEQ ID NO: 157213 - DNA, 180 bp, Glycine max
accagctcaccgacgaccagatcgccgagttcaaggaggccttcagcctcttcgacaaggacggcgatggttgcattactaccaaggaacttgggactgttatgaggtcacttggtcaaaacccaactgaggcagaactgcaggatatgataaacgaggttgatgctgatggcaacggaa

SEQ ID NO: 157214 - DNA, 266 bp, Glycine max
gaaataagagcggatgtttagaattgtggaagcgaaaaaagcccgggaccggatggtttaaatttcaaatttattaaacagttttgggagatgttaaagcccaaaatcagccgattcattgctgaatttcatgctaatagggtattttcaaggggcaccaatgcatctttcattgctttgatcccaaaggtgaaggatccacatcatcttaatgaatatagacctatctcattaataggctgtgtttataagattgtggctaaact

SEQ ID NO: 157215 - DNA, 268 bp, Glycine max
tggttgtggtgagtgcacacatggcacatgctaggatcaactgcggccgtgtcgcggtcgcggtgtctccgtgccttggctaccttcgtcgcggtggaaggccacaggcgaggtgctgcaacggagtgagaaacctccacgccctggccaagaccaccgtggatcgccggacggcgtgcaattgcctgaaaacctttgccagaggtcttggtaggggtgtcaatgccaacaacgcagctgcacttccaagaaaatgtagagtcaacat

SEQ ID NO: 157216 - DNA, 266 bp, Glycine max
ccccaagctaaatgttgtggctccatggagggagtgggatattacaggtagagaagatgctatcgagtatgctaaaaagcataatatacctgttcctgtgacaaagaaatccatttatagcagggataggaatctttggcacctaagccatgagggtgatattttggaagacccagctaatgagcctaaaaaggacatgtacatgatgtctgtagacgctgaggatgctcctgatgaagcagaatatgtggaatttgagatagagt

SEQ ID NO: 157217 - DNA, 266 bp, Glycine max
gagtgagtgagtgagcaagagtgaagagcgaagagaatggctcccaagtgcttaatctttttggctgtgttatgcttctcagcactgtcactgagtcgttgtcttgcggaggataatggacttgttatgaacttctacaaggaatcatgccctcaggctgaagacatcatcaaagaacaagtcaagcttctctacaagcgccacaagaacactgctttctcctggctcagaaacatcttccatgactgtgctgttcagagttgtga

SEQ ID NO: 157218 - DNA, 263 bp, Glycine max
ctagcttccaaaccctaacactcctcttcctcttcgatcatcacctctccacaatgccgccgaagttcgacccctcccagatagtcgacgtcttcgtccgcgttaccggcggcgaagtcggcgcggcgagttccctggccccgaagatcggtcccctcggtctctcccccaagaagatcggagaagacatcgccaaagaaaccgccaaggactggaagggcctccgcgtcaccgtcaagctcaccgttcagaatcgtcaggcg

SEQ ID NO: 157219 - DNA, 214 bp, Glycine max
gcggcggcgtcttcgccggagagttctacttctagagtctcctccttccactcgtcgccgcgctggcagctctacttcaacgagatcaaagataccgataagctcgttgtgatagatttctcggcgtcgtggtgcggtccttgcaaattcatagagccagcgattcacgccatgcgcgacaagttcaacgacgttgacttcgtcaagatcgacg

SEQ ID NO: 157220 - DNA, 256 bp, Glycine max
agatgtcgaagcgtggtcgtggtggttcggcggggaacaagttccgcatgtcgctgggtcttccagtggcggcgacggtgaactgcgccgacaacacgggggcgaagaacctctacatcatttcggtgaaagggatcaaaggccgtttgaaccgtcttccctcggcctgcgttggcgacatggtgatggccaccgtgaagaagggaaaaccgatctgaggaagaaggtcttgccagctgtcatcgttcgccagcgc

SEQ ID NO: 157221 - DNA, 215 bp, Glycine max
tgacaacctatgcaaggtgatcaaggatgttttgggtgacaaggttgagaaggttgtagtctctgaccgtgttgttgattcaccatgctgtctggtgactggagaatacggttggactgcaaacatggaaaggatcatgaaagctcaagccctaagggacaacagcatggcaggatacatgtcaagcaagaagcaatggagatcaaccctgagaa

SEQ ID NO: 157222 - DNA, 151 bp, Glycine max
ggtatctctgtaccaagatgctcatgtgcctgataattttgtacctaaaatacctcttgctggaggcaagaattatgaggctcataggtgttgggaggatatatttgatgcaatcactgatgctaaacacttcatatacattactgggtgg

SEQ ID NO: 157223 - DNA, 269 bp, Glycine max
cttttagcaagttaacaacacttttgtcttcgttccattatctagttctcaattctcttcaccctttgcctctgaaagaaatgggtagtcttgaagcggaaagaacaacagtaggattggcagcaagagacccttcagggattctctccccatacacctacaatctaagaaacacaggccctgatgatgtttacattaaagttcactactgtggaatttgccattctgatctccaccagattaaaaatgatcttggcatgtccaactat

SEQ ID NO: 157224 - DNA, 265 bp, Glycine max
gtggactttaaaatccgcactgtggagcaggatgggaagactattaaacttcaaatttgggacactgcgggtcaggaacgtttccggacaatcactagcagctactatcgtggggctcatggcattattgttgtttatgatgtcactgaccaagagagcttcaacaatgttaagcagtggctgaatgaaattgaccgttatgcaagtgaaaatgttaacaagcttctagttggaaacaagtgtgatcttacggcaaataaagttg

SEQ ID NO: 157225 - DNA, 264 bp, Glycine max
tgacatgatgcttctcgctcacaacgccggcggcaaagagaggacggaagagaactggaagtggctgttcaaagaaacaggtttcgcccgttacaacatcatcaagatcaacgctcttccttccatcattgaggcgtttccaatctaacgaagaggaagccactacacttcatgtgcgtggttttatgttgcatgtgttgatattattattaacagctatgtgatcttcgtgtgatgtggttttcatccctacccgtgttatgt

SEQ ID NO: 157226 - DNA, 264 bp, Glycine max
ctcaggacaatggtcttgtgccaatcgtagagcctgaaattcttcttgatggagaccacccaattgagaggacgctggaagtggccgagaaggtctggtcagaagtcttcttctatttggctgaaaacaatgtcctttttgagggaattttgctcaaacccagcatggttacacctggggctgaacacaaggaaaaggcttctccagaaaccattgccaaatatactctaaccatgcttagaagaagagttcctcctgctgtcc

SEQ ID NO: 157227 - DNA, 216 bp, Glycine max
gctcctattatcttggacttggtccttcttgctgagctcagcactcgaatcgagtttaaagctgaaaatgagggaaaattccactcattccacccagttgcgaccatccttagttacctgaccaaggcccctctggttccaccgggtacaccagtggtgaatgcgttgtcaaagcagcgagctatgctggaaaacatcctgagggcttgtgttgga

SEQ ID NO: 157228 - DNA, 257 bp, Glycine max
ggaatatataccgttgaagatgtcgtacaacttgtggtcagagatccacagagattgcggaatattcttgggagtggcatgtcaaacaaaatgtgggatgttctagttgagcatgcaaagacttgtgttcttagtggaaaactctatgtatactatcccgatgatgcaaggaatgttggcgttgttttcaataacatctatgagttgagtggtttaattaccaatgaccaatattactctgctgattctctctccga

SEQ ID NO: 157229 - DNA, 257 bp, Glycine max
ctaaaaccttgatttttcccaatccattccacgcaccatatgactatcagatgctgacatggaggactacggtttcgagtactccgatgagtaggaagtggagcaagacgttgatatcgagaatcaatattacaattcaaaaggtatggtagaaagtgatccagaaggtgcgcttgctggttttgctcaggtagtgcaaatggagcaagaaaaagcagaatggggatttaaagctctaaaacagactgtcaagctat

SEQ ID NO: 157230 - DNA, 220 bp, Glycine max
gggatttcattaagaatatgattactgggacatcccaagctgactgtgctgttcttatcattgattcgaccactggtggttttgaagctggtatttccaaggatggacagactcgtgaacatgctctgctttcattcacccttggtgtgaaacagatgatttgctgctgtaacaaaatggatgctactacacccaagtattccaaggccaggtatgatgg

SEQ ID NO: 157231 - DNA, 261 bp, Glycine max
gaagttttcaaggaattttatcaaacaaaaactaagcacaggaaacttacttggatttattccttgggaacctgcaacattagtgggaaattcgatccagaaaactgtggagctgattgtaacaacttaccaggcttcggcattgcttctatttaattcctcagatagactgagttattcggagataatgtctcagttaaacttatctgatgacgatgttattagactgctccactccttgtcatgtgccaagtacaagat

SEQ ID NO: 157232 - DNA, 264 bp, Glycine max
acgaaggtaaatttgatgtaagaacgactcgtttgacaacctgtgaccctcatgctaagcacacagttgtcaactccaacagtccccaagaggttgaagagggcaaggaaattatcttcacatatgatgttgaattccaggagagtgacgtgaagtgggcttcaagatgggatgcttatttgctaatgaatgatgatcaaatccactggttctctattgttaactcattactgattgttctcttcctttccggcatgggggaat

SEQ ID NO: 157233 - DNA, 135 bp, Glycine max
cttcttgctggctatgacaaagagacaggccctgaactgtactacattgactacattgcaacgcttcacaagcttgaaaagggggcttttggttatggctcctatttttcactctcaatgatggacagaccacta

SEQ ID NO: 157234 - DNA, 257 bp, Glycine max
gtgttcactagtgatagtgaggtgttacaattgaccatggcagtgttacctataattggactgtgtgagttagccaattgtccacaaaccacaagctgtggaatcctcagaggaagtgctaggcctggtgttggggctgttataaacttttgctcattttatttggtaggagcaccagtggctattgtatttgccttttatcggaaacttcggatggtgggcctttggtatgggttgctggcagcacagatcgcatg

SEQ ID NO: 157235 - DNA, 135 bp, Glycine max
caaacatggcaatgaagaagttcttgtgggttgttctgtccctttctttggtccttggagttgccaatagctttgattttcacgacaaggatttggtgtccgaggaaagcctgtgggacttgtacgatagattga

SEQ ID NO: 157236 - DNA, 262 bp, Glycine max
ggaggagcaccaaagggtcctcaactgagagacattgatcgtggagcagatattgtggtagccactcctggtcgcttgaatgatattcttgagatgagaagaattagtcttaatcaggtttcttacctggtgctagatgaggcagacaggatgctggatatgggttttggaacctcaaattaggaaaattgtgaatgaggtgcccaatcgcaggcaaactctaatgtttactgcaacatggccaaaggaggttaggaaaatt

SEQ ID NO: 157237 - DNA, 251 bp, Glycine max
ttgtttgttgttgtaactcgttcttcttcttttgttgttctgtgtttgtgtttgttttttctctcacctgaaaatgtcttgctgcggtggtaactgtggttgcggaagctcctgcaagtgcggcaacggctgcggaggctgcaagatgtacccagacttgagctacactgagtcaaccaccaccgagaccttggtcatgggaatggcactgttaaggcttcatttgaaggttgctgaaatgggtgtgcccg

SEQ ID NO: 157238 - DNA, 259 bp, Glycine max
aaaaaaatctaagtccctttggtcttcatcttctgttctgatccaggtatggcttctaaacgcatcttgaaggagctcaaggatttgcagaaggatcctcctacctcatgcagtgcaggccctgtggctgaggacatgtttcactggcaagccacaatcatgggacctgctgatagcccatatgcaggtggtgttttcctagtttcaattcattttcctcctgactatcccttcaagccaccaaaggttgcttttcgga

SEQ ID NO: 157239 - DNA, 250 bp, Glycine max
gagagagtgcatttcaatccacatcggtcaggccgttattcaggtcggaaacgcctgctgggagctctactgcctcgaacacggcattcagcctgatgggcagatgccaagtgataagactgttggtggaggtgatgacgctttcaacaccttcttcagtgaaactggggctggaaagcacgtgcctcgtgcgatttttgtagatctcgagcctactgttgatttgtgaagttaggactcggacataccg

SEQ ID NO: 157240 - DNA, 252 bp, Glycine max
  unsure (1)..(252): unsure at all n locations
ggacgaacctatattggagaaagccattgggtcggaaattgaatggtacccgggaaaatgtttgacttagaaagttttgaagataaagcctaagacgggttcaaagaatgctagaccaattaccaaaaccgagagctgtgaaagttctcttcaattttttcaaaccaccagaagtccctgaggatgatgagtctangatgaagatttggctgaggaacttcagaatcagatggaacaagattatgacattgg

SEQ ID NO: 157241 - DNA, 255 bp, Glycine max
gttgtaactcgttcttcttcttttgttgttctgtgtttgtgtttgttttttctctcacctgaaaatgtcttgctgcggtggtaactgtggttgcggaagctcctgcaagtgcggcaacggctgcggaggctgcaagatgtacccagacttgagctacactgagtcaaccaccaccgagaccttggtcatgggagtggcacctgttaaggctcaatttgagggtgctgaaatgggtgtgcccgctgagaacgatgg

SEQ ID NO: 157242 - DNA, 229 bp, Glycine max
attccggataacctaccacttgatgctgctgctcctatcctctgtgctgggatcactgtgtatagccctttgagatactatggacttgacaagcctggtctgaatcttggtgtggttggtcttggtggactttgtcacatggctgtcaagtttgccaaagctcttggagctaatgtcacagtgattagcacatctcctaacaataagaaggaagccattgagaacatag

SEQ ID NO: 157243 - DNA, 235 bp, Glycine max
ctcgagccgcaccagcaccactgctactgccacgaagggccaaaacggacgtgcaagtctgacggctacacggtcccacaggggacacagatcctcatcaacgagtgggccataggaaggaacccggccatatgggaagacgcacataggttctcgccagaaagattcttggactctgacatagacgtcaagggtcgccacttcaagctcacgccgttcgggagcggaagacgaa

SEQ ID NO: 157244 - DNA, 219 bp, Glycine max
aaagtatttcttgtcttcgaatatgtaccaaatggcacgctcaggaattggatctctgatgagcatgctagaaaatccttgagttggactcaacacataggagctgcaattggagtggcaaaaggaatccagtttttgcatacagggattgtccctggtgtatattccaatgatctgaagatagaagatgttttattcgatcagaatcttgttgcaaaa

SEQ ID NO: 157245 - DNA, 250 bp, Glycine max
ctcattaattgcaagaatggcacttcgttgcttggtgatgtccctttctgttctcttcactcttggtcttgcgagagaaagccatgccagagacgaagatttttggcatgctgtttggccaaacactcccattccaagttcattgcgagatcttctaaagcctggccctgcaagtgttgaaatcgatgatcaccctatgcaaattgaagaaacacagtacccgaaaaccttcttctataaagaagacctt

SEQ ID NO: 157246 - DNA, 253 bp, Glycine max
caaggatgtaaaagtacctctggatattctaatattcaagctcatgaaggcatatatgcgttcctcatctctacgaaaagcagctttaagggctctgtctaagatgttaactgttgatgagctattttatttgagggagcagtttgcacttttagagccaagcaaaaatggcactattagcttggaaaatatcaaagcggtcttgatggtaaatgcaacagatgctatgaaggagtcacgccatactgacttt

SEQ ID NO: 157247 - DNA, 254 bp, Glycine max
cgattactcttgaggaaacaaaaatctaagatgagccgccatccttctgtcaaatgggctcagacgtctgatgtactctacttaacagttgagctgcctgatgctcaggatgttaagctcaaactggagccagaaggaaaattttacttctctgcaactgctggtgcagagaaaattccttatgaggttgacattgatctgtttgacaagattgatgtaaataatagcaaagctagtgttggttcaagaaacat

SEQ ID NO: 157248 - DNA, 193 bp, Glycine max
gcacagcttgtgacctcaaaaaacggaggcttaaccatccttgcaccagatgatggtgcattttcagaactcaaagcaggttactttaactccctaggagataggcaacaaaaagcactgatacagtatcatgttcttcccgtttatgtttgtcagctccaactttgatgctctgagcaaccctgtgctgaca

SEQ ID NO: 157249 - DNA, 246 bp, Glycine max
ccttgtcaaccttattggttattgtgctgatggagatcaaaggcttctagtttatgaatatatgccattaggatgcttggaagaccacttgcatgacattcctcctggcaagaaacgacttgactggaacacgcggatgaaaatagctgctggggcagcaaagggattggaatatctacatgacaaagctaatcctcctgtcatataccgagacttaaagtgctccaacattttgcttggtgaagg

SEQ ID NO: 157250 - DNA, 184 bp, Glycine max
gtctctgtgtttgcggctgaggattccgaacgagtgaccttcttcgtttctcgcaaagtttaagtaatcatgggtaaggaaaaggttcacatcaacattgtcgtcattggacatgtcgactctgggaagtcaactaccacttggtcacttgatctacaagcttggaggtattgacaagcgtgtg

SEQ ID NO: 157251 - DNA, 244 bp, Glycine max
cagcgctcctgaatctttccatatacgaaaatagcaaaggaagtattgtttcttcaggagcagttccaggtatagttcatgtgctgaagaagggaagcatggaagctcgggaaaatgcagctgcaacacttttcagcctttcagttatagatgaaaacaaggttacaattgggtctttaggagccataccaccactggtgacactgctaagtgagggtagccaaaggggtaagaaagatgctgc

SEQ ID NO: 157252 - DNA, 184 bp, Glycine max
cccgtcgtagcagaaaaacttgtcaccatggtttcttccgacaaggatccacgagaggatgtccttcaagcctggtacatggatgatagtgatgaagatcaaagactcccccaccacaaagaacccaaggagtttgtctcgttggaccaacttgctgaacttggagtccttagctggaaactag

SEQ ID NO: 157253 - DNA, 253 bp, Glycine max
tatccctctaatcactctagctgttgcaaatttctactatttttcaatggcttctgcagatgttgagttccgttgctttgttggtgggcttgcttgggtcaccggcaacgatgccctcgagaaagccttttcaatctacggcgacatcgttgaatcgaaggttatcaacgaccgtgagactggaaggtccagaggattcggatttgtgaccttcgcctcagagcagtcaatgaaagatgcgatcgcaggaatg

SEQ ID NO: 157254 - DNA, 203 bp, Glycine max
cttgagctctgcgagatcttgagtcgccgatttgaaaagatgagtaagcttcagagtgatgctttgcgtgaagccatctcaggaatcatggccgattccaaggagaagaatcgcaaatttgtggagaccatcgaactccaaatcggtttgaagaactacgatccacagaaggacaagcgtttcagtggctccgtcaagttgcc

SEQ ID NO: 157255 - DNA, 252 bp, Glycine max
ctcagctatgactaccagagaaatccttcaaaagatgaaggtaaaagttggtttgggttcatcagaccctgattcagggaaaggaaagagcaagatgtcaaagaacataactcatggctttcatttggtgaaaggaaaatcatatcatgacatggaggattacgttgtggctcaatttaggcaaatagataacaatgaattgggtttgtttgcaatatttgacggccatgcgggtcacaacgtacctaatta

SEQ ID NO: 157256 - DNA, 248 bp, Glycine max
atggataaagacaaaagttcaatgtcttgggtatgcatgaatttgacagtgacaggaagagaatgtcagttatattggggtaccctgacaattcagtgaaagtttttgtcaaaggagcagacacatccatgcttaatgtgatagacaggtcattcaaaatggacttagtaagagccactgaagcacatcttcactcttactcttccatgggtttgaggacacttgttattggtatgagagacttgaat

SEQ ID NO: 157257 - DNA, 232 bp, Glycine max
ccctagtcaaggagattcatctctgcaggttgttttagaaaagaaaaaatggtgaagatttgctgcattggtgctggatatgtggggggtccaacaatggcagtcattgctctgaagtgcccctccattgaagtggctgttgttgacatctccaaatcccggattgcagcatggaacagtgacaagttcctaatcatgagccaggccttaatggtgtggtgaagcatgtcgt

SEQ ID NO: 157258 - DNA, 242 bp, Glycine max
gtgggagttctcacaatggctgggaaaggcgttcgtgttttggttacccctaccagtgatctgggcaagatcttagcctgcatgcatggactagatataggtggtgagatgaacctagctgctggcattcaggtggcacaattggctcttaagcatcggcaaaataaaaagcaacagcagaggattattgtctttgctggaagtcctgtcaagcatgaaaagaagatgctggagatgatagg

SEQ ID NO: 157259 - DNA, 205 bp, Glycine max
ggcgaagatgttactgttggtaacttttttgctgctttacttggaaacaagtcggcacttactggtggcagtgggaaggttgtggacagtggacctgatgatcatatatttgtatactatactgaccatggaggtccaggggtgctcgggatgcctgctggtccttacttatatgcggatgatctgattgaagtcttgaagaaaa

SEQ ID NO: 157260 - DNA, 246 bp, Glycine max
tttcttttttcccgcagtcatgggcaaggtcaagatcggaatcaacggatttggaagaattggccgtttggtggccagggtggctctgcagagagacgatgttgaactcgttgccgttaacgatcctttcattaccaccgattacatgacatacatgtttaaatacgacagtgttcacgggcactggaagcatcacgatgtcaccgttaaggatgagaagacccttctcttcggtgacaagccagt

SEQ ID NO: 157261 - DNA, 270 bp, Glycine max
ctagaatggaatttcgatgctcagtcatctcttttaccattctcttctctcttgctcttgcaggagagagccatgtccatgcatcgctacctgaggaagattattgggaagctgtttggccaaacactcccattcccactgcactgcgagagcttctaaagcctctccctgcaggtgttgaaatcgatgaactccctaagcaaattgatgatacacagtacccaaaaacattcttctataaagaagaccttcatccaggcaaaacaatga

SEQ ID NO: 157262 - DNA, 269 bp, Glycine max
agaagaggttgcataactgaacaaacaaagcaaccctatgtcgaaggtggtttgtgtcaccggagccagtggcgccagtggatcataggtggccctcctcctccaccagcgtggttatacggtccatgccaccgtccaagacatcaaggatgaaaatgagacgaaacatttggaggaaatggaaggagcaaagagtcgtctccatttttttgaaatggatcttcttgacatcgactccattgccgctgccataaagggttgctccggcg

SEQ ID NO: 157263 - DNA, 266 bp, Glycine max
aagagtgtttcttggggggaattacattggtggagctgaggaaattcagaggctgcatgaggatgggaagcttgagaagcttttggtttgttgtgagaagattgaggacagtgttggaggtgatggaggagggggagtgtgtgaggcttgtggggatataaggtttgttccttgtgaaacatgttgtggaagctgtaaaatttactatacaggtgatgaagaagatgaagaagaatatgttgatggtgaagtgggggagtgtggat

SEQ ID NO: 157264 - DNA, 264 bp, Glycine max
gtttctcttggtttgtggagtggtgttcaaggtgcaccacaagtgccatgctacttcatttttggtgattctttggttgataatgggaacaacaaccagctccagtctttggctagggctgattacttgccttatgggattgacttccctggtggaccttctggaaggttttccaatgggaaaaccactgttgatgcaattgctgaacttttgggattcgatgattacatacctccatatgctgatgctagtggcgatgctata

SEQ ID NO: 157265 - DNA, 264 bp, Glycine max
gacgcgccgctacatgaccgacatgataacctacgccgacaccgacgtcgtaatcgtcggagccggctcggcggggctctcctgtgcgtacgagatcagcaagaaccccgccgtgagcgtcgccataatcgagcagtccgtgagccccggcggcggcgcgtggctcggcggacaactcttctccgccatggtggttcgcaagccggcgcacctcttcctggacgagctcggcgtggcgtacgacgagcaagaggactacgttgt

SEQ ID NO: 157266 - DNA, 264 bp, Glycine max
tttgctttgacatttataagaacatcaacaaaataaagaaggtcaagtgccctgtacttgtaatacatggtacagaagatgatgttgtcaattggttacatggtaatggactttggaagatggcaagggagtcatatgaccccttgtggatcaaaggaggtggtcactgcaacttagagctttaccccgattacatccgccatctttgcaaatttatccaagaaatggagagcatgacaactgagaagcgcctcaaaaagattc

SEQ ID NO: 157267 - DNA, 264 bp, Glycine max
gagatgaatggcaaaatggtggtaagcaaacctctgtatgtgactctagcccaacggaaagaagataggagagctagactgcaggctcagtttgctcaaatgcgacctgttggaatgccaccatctgtcggtcctcgtgtgccaatgtatcccccaggtggtccaggtattggtcaacaaatattttatgcccaaggccctcctgctatcattccttcccagcctggatttgggtatcaacaacaacttgttcctggtatgagg

SEQ ID NO: 157268 - DNA, 264 bp, Glycine max
cacagcactagatcatggtgtcgtggctgttgggtatggtacagctaatggtcatgattattggatcgtaaggacttcatggggtcctagctggggagaagatggctacatcaggttagaaagaaatcttgctaacagcagatcaggcaagtgtggaattgcaattgagccatcttatccccttaagaatggtccaaatccacctaatcctggaccatcacccccttcacctgtgaagccaccaaatgtctgtgacaactacta

SEQ ID NO: 157269 - DNA, 265 bp, Glycine max
cttgggaggagttcaaaagacacagactaggcgctgcccaaaattgctctgccactcttaacggcaaccacaagctcactgatgctgttcttcctcccacgaaagactggaggaaagaaggaatagtgagtgatgttaaagatcaaggcagctgcggatcatgctggacattcagcacaactggggctttagaagcagcctatgcacaagcatttgggaagagtatctctctttctgagcagcagctagtggattgtgctggccg

SEQ ID NO: 157270 - DNA, 268 bp, Glycine max
aggccctgatgatgtttacattaaagttcactactgtggaatttgccattctgatctccaccagattaaaaatgatcttggcatgtccaactatcccatggtcccaggacatgaagtggttggtgaggtactggaggtgggatcaaacgttagcaggttcagagtgggagagttggtgggagttggactcctcgtaggttgctgcaaaaactgccagccatgccaacaagacattgagaattactgcagcaagaagatctggtcttac

SEQ ID NO: 157271 - DNA, 264 bp, Glycine max
gtgatgatgacacatggcaatgtcttagctgcactctctgctgtgatgaccattgttcctgacattgggacaaaggctatatatcttgcatacttaccgatggctcatatcttagaattagcagctgagaatttgatggcagctgttggggttcctataggatatggatctcctctgacctttactgatacttcaaacaagatttcaaaaggaacaaagggggatgctactgcactgaggccaactttaatggcagctgtgcca

SEQ ID NO: 157272 - DNA, 265 bp, Glycine max; identical to SEQ ID NO: 118503

SEQ ID NO: 157273 - DNA, 261 bp, Glycine max
agacaacaaaacagaatgggtgtggtggtgatcgacggcagcaccgtgcgcgacttcgtgaacgacgaggcggccttcgcgaagagcgtggacgagcagttcggggtgctggacctcaacaacgacggcgtcctctcgcgctcggagctccgcacggccttcgagtccatgcgcctcatcgagacgcacttcggcatcgacgtcgccacgccgccggatcagctcgcgaactctacgactccatcttcgacaagttcgacg

SEQ ID NO: 157274 - DNA, 266 bp, Glycine max
ctcgagccgcatcggctcgagagttcttctctatgccactcaatgcgaaggatacagcagagtaccccaagccatttgggactggtagctagagtattggacacaatggggatgttggttaggttgagtaccttcttctcaacaccaatcacgaacacaacttctctttctatggcaaaaatgctgaacaatctaggtgtctattatacagttacatgtcttctgtgagaactatggcatgcgagattcttgagttgctggcagaa

SEQ ID NO: 157275 - DNA, 272 bp, Glycine max
taaaattctctcttcctttttgggttctcctattccaagcttcaatcttttctctcttctcacagccttcttcactcacaggaggtgaagatgtcgactccggctaggaagagactgatgagggattttaaaagattgcaacaagatcctcctgctggcatcagtggggctccccaagacaataatattatgctttggaatgctgttatctttggcccagatgacaccccttgggatggaggtacgtttaagttgacacttcagtttacaga

SEQ ID NO: 157276 - DNA, 270 bp, Glycine max
tgcttacacacctcctgaatatttaagaaatggaagggtcacgcctgaaagtgtcatttacagctttggaaccgttcttctagacctcctcagtggcaagcacatccctcccagtcgagcacttgatatgatacaggggacaaacaatatgctcttaatggattcacattgagaggggaagttttcaacagaagaggcaacggtagttgttaatcttgcctctaaatgtgtgcaatatgaaccaagggagcggcctgatacaaaggattt

SEQ ID NO: 157277 - DNA, 258 bp, Glycine max
  unsure (1)..(258): unsure at all n locations
ggttactttgcccaagataatgtctgagtcgtancctgacacgtggtgggcaggttgtgtacatcttaggtcaagttcgtgccttggagaatgagatgctcaaccgcatcaagacacaaggccttgatatcacgcctcgtattctcattattactcgtcttcgccctgatgcagtaggaactacctgtggccaacgtctagagaccgtatatgatactgaatattgtgacattctccgagttccttgcagaaccgaaa

SEQ ID NO: 157278 - DNA, 264 bp, Glycine max
gtcctccgtctccgtggtggcatgcagatcttcgttaagaccctcaccggcaagactataaccctagaagtcgagagctccgacaccatcgacaacgtcaaggctaagatccaggacaaggagggtatccccccagaccagcagaggctgatcttcgccggcaagcagctcgaggacggacgtacccttgctgactacaacatccagaaggagtcaactctccacttggtgttgcgtcttcgtggtggtatgcagatcttcgtc

SEQ ID NO: 157279 - DNA, 262 bp, Glycine max
agagtaccgagcttttgatcaggaagctccccttccagaggctggttcgtgaaattgctcaggacttcaagactgatctgcgtttccagagccatgctgtgcttgcattgcaagaagctgctgaggcataccttgttggactctttgaggatactaatctgtgtgccattcacgctaagcgtgtaactattatgcccaaagatatccagctggcaagaaggattcgtggtgagcgtgcttgatgtggtggtggtggtggtgg

SEQ ID NO: 157280 - DNA, 271 bp, Glycine max
cggatctagagtcttcagtttctcctcgttgttcttcgctttcctgttttcaatttcgattctttcgttaatttaataagatgtttgggagggcaccgaagaagagcgataatacgaggtactacgaaatcctcggcgtctccaagaacgcttcgcaggatgatctgaagaaggcttacaagaaagccgccattaagaatcaccccgacaagggcggtgatcccgagaagtttaaagagctggcgcaagcttatgaggttctgagtgaccc

SEQ ID NO: 157281 - DNA, 268 bp, Glycine max
cagaaacaggtcaaataattacaactgccattggcggtcgagatggacaaccaaagcagacaatctcttacatggctgaacgtgtggttggtactggttcttttggtattgtttttcaggctaagtgccttgaaactggggaatctgttgccataaagaaggtgttgcaagacaggagatataagaatagggaactccaggttatgcgcacagttgacaattctaatgttgtcaaactaaagcactacttcttttcaacccccgataa

SEQ ID NO: 157282 - DNA, 265 bp, Glycine max
gaaaccctgaagagatcccatgggggtcaactggagctgacatcattgttgagtccaccggagttttcacccataaggacaaggccgccgcacatttgaagggtggtgcaaagaaggttattatttctgcccccagtaaggatgcccccatgtttgttgttggtgtcaacgagcacgagtacaagccagagcttgatattatttccaatgctagctgcacaaccaactgccttgccccacttgccaaggttatcaatgacaggtt

SEQ ID NO: 157283 - DNA, 264 bp, Glycine max
ggcgaagaacagaatgaagaggaagaacaagaggatgacaaggatgaagagaatgaacaacagcaagaacaattacctgaagagtttatctttgatgctgaaggtggcttggtagatgaaaaactcctcttctttgcccaacaagcacagagacgccgtgggagggctggaagggcaaaaaatgttatattttccgaggatagaggccgatacatcaagcccatgcttccaaagggccctgtaaagagattagctgtagatgca

SEQ ID NO: 157284 - DNA, 263 bp, Glycine max
ctcgagccggtccctttgtgattcctgggaaactcatttcattagagtgagagagagagagagagagagagagaggtatcacagtgagacggagaagccctaactacgcacgcactcattcttgagaaagctcaatattcattcgtccatggcactctcttctcgtctcttttccaaatccaaattgatctatggctgtcaaatacttctgcaaaaggagcatgctattccagttcgtcactttgctaaagagtctgcccctc

SEQ ID NO: 157285 - DNA, 264 bp, Glycine max
atttgaggccaggcaagccccactcaaccaccacacctctcctcgttcacgctacccctttctgctcttcttctacctttcaagttttaaaagtataaagatggcagagacattcctatttacctcagagtcggtgaacgagggacaccctgacaagctctgcgaccaaatctccgatgctgtcctcgacgcttgcctcgagcaggacccagacagcaaagttgcctgcgaaacatgcaccaaaaccaacttggtcatggtctt

SEQ ID NO: 157286 - DNA, 256 bp, Glycine max
aagaaggcgtcttcataaacgcctttcttctccgtttccgtttcctcgttcgaattcgctttttgatctgcgaaaatgagagagtgcatctcgatccacattggtcaggctggtatccaggtcggaaatgcttgctgggagctctactgcctcgagcacggcatcgggcccgatgggcaaatgccaagtgacaagacagttggcggtggtgatgatgctttcaatactttcttcagcgagactggtgctggaaagc

SEQ ID NO: 157287 - DNA, 83 bp, Glycine max
gttggtggtcaggacaagatccgtccactgtggaggcattatttccagaacactcagggtctcatttttagtggttgatagca

SEQ ID NO: 157288 - DNA, 259 bp, Glycine max
gtttcactttctttgcatagggcaacctcctttctctgtgactctgagtatcgtatcgttttattattatttctaattctctcttatcaggtccattgaatatgtctccgtcgttggatcttcctcccaagggtggcttcagttttgatctatgccgaagaaacgcaatgcttcaaaacaagggcctcaaagccccaacctttctcaaaactggcaccactattgtcggtttagttttccaggatggtgtcattcttgg

SEQ ID NO: 157289 - DNA, 260 bp, Glycine max
tctcactcaaccaaatctcagttttgagttcaactcaactaaactatgtcttccttatccctatatgccaacctctcctctctaccatcctccctcaccattcgttcttcttcatccaaagatacctctttgaaacaggattggaggacaaagtccaaacctatcccaccaggtggcacataccctgcaaaagatcattgcagtcgttgtgggttgtgtgatacttactatattgcccatgtcaagaatgcatgtgcttt

SEQ ID NO: 157290 - DNA, 266 bp, Glycine max
gtgaacgttccgaaaacaaagaagacatactgcaagagtaaggtgtgcaggtagcacaccctgcacaaggttacccaatacaagaagggtaaagatagcattgctgcccaaggaaaacgccgttacgatcgcaaacaatctggttatggcggacaaactaagcccgtcttccacaagaaggctaagaccaccaagaagattgttctgaggttgcaatgccacggttgcaagcatgtctcccaacacgctattaagaggtgcaagca

SEQ ID NO: 157291 - DNA, 262 bp, Glycine max
caacaggatccttttctcgatcagctgttaactataatgctggagcacagacaacagtttcaaatataatcatggctgcagctgttctagtgaccctcctgtttttcatgcctctgttctactatacaccaaatgttgtcttagcggccattatcatcactgctgtgattggtctaatagattatcaatctgcatacaaattatggaaggttgacaaacttgatttcttggcctgtttgtgctccttttttggggttctgtt

SEQ ID NO: 157292 - DNA, 259 bp, Glycine max
catcatcatccatggctgcctccgtctccactgtcggagctgtcaacagagctcttttgaacctgaatgggtctggacctggggtttcagctcccagttcatccttctttgggagcagcttgaagaaggttattggctcaagggtccccaacacaaagatttcctctggaagcttcaagattgttgctgtagaagagaagaaagagattgaagagacccagcagaccgacaaggacagatggaagggtcttgcctatga

SEQ ID NO: 157293 - DNA, 259 bp, Glycine max
gaagcccatacttgtgggagatagatggcacgcttgtcactgctcattttcgcgttctgcgccgtcgccgtcgccgtcgccgtcgcgggctcctccttcgatgatgccaaccctatccgtttagcgtcggacttggagtcgcaggtgctggacgtgatcggacagagccgccacgctctctccttcgcccgcttcgctcgccgccacggcaagcgctaccgttccgtcgacgagatccgcaaccgcttccggatcttct

SEQ ID NO: 157294 - DNA, 259 bp, Glycine max
ggtagttttgtggtctgtgaaagatcacttaacaacactcagaatggtcctgctatgcccccagtgcagcattttgttagagcagacatgctgccaagcgggtatttgataagaccctgcgaaggagggggatccattattcatattgtcgatcatatggttctagagccctggagtgtacctgaagttttgcgcccactgtatgagtcatcaatgctgctagctcaaaggacaactatggcggccttacgtcatttga

SEQ ID NO: 157295 - DNA, 192 bp, Glycine max
ctatttgacgacttaaccccaaacgaagaaaaaagactgagagcaattgcatcaacaacaaattgaaaggatgtcgatcttcgagtacaacggaagcgccgtggtggctatggtcggcaagaactgcttcgccattgccagcgaccgagagctcggcgttcagctccaaaccatagcaacggatttccaacg

SEQ ID NO: 157296 - DNA, 267 bp, Glycine max
gtgattctgtttggagagtacaggaaatcatcaagaagaacatatatactgctagggagtatgtcgtttatgtttatagtggctgatgctgtgctaatggcatcatcagggcaaagaaacagcactgccaaggaataattggacaacacacaagttgtttatagattgcctagtgcaaagggagaaaaattctcattgttcattggtgtgaataagagaagacgaaaaaatctattaagaaaagagtgcagaaaaagaaataaagca

SEQ ID NO: 157297 - DNA, 272 bp, Glycine max
cttaatttctctctgccttgctcatttacacacctctccaacctttcactttcagctttatttgaatccctctctctcctttccaaatggccagcgttgaggttgcacatcaaacaccatcaacagttccagaaaatgaaacaaccgaggtaatcaagacccaggaaacaaccccggaaccagtaccagctactgaggctcctgcaacagaacaagcagcagctgaggttcctgctgcagaagaacaacaagcaactgatgttcctgcccca

SEQ ID NO: 157298 - DNA, 289 bp, Glycine max
gcgtattcggctcgagggctgagacctgatggcaagacccaagtcactgttgagtactacaatgacaagggtgccatggttccaatccgcgtccacactgtgctcatctccaaacagcatgattaaattgtcacaaatgatgagattgcagctgatcttaaagaacacgtgattaagcctgtgattcctgagaagtaccttgatgagaagaccattttccatttgaacccttctggcaggtttgtcacttggatgccgaatgtcgatgctggtctcaccggccgcaaga

SEQ ID NO: 157299 - DNA, 274 bp, Glycine max
cagagaccgaaatacttcgagatggcccgtacaaagcaaactgctcgtaagtcaactggaggaaaagctcccaggaatcagcttgcaaacaatgctgcacgtaagtctgaaccaacaactggtgctgtgaagaagcctcatcgttatcgacctggaactgtgcccctccgtgagattaggacataccagattagcgctgtgctcctaatcaggaaccttcatatccaaatgttggttcgcgaaattgcccaggatttcaagactgatctgcgtt

SEQ ID NO: 157300 - DNA, 124 bp, Glycine max
gacaatatctaaggtgttgctctccatttgctccctattgaccgatccgtaccctgatgaccccgttggggctgtaattgctcatatgtacaagccagatcggtctatgtacgcaacgactgct

SEQ ID NO: 157301 - DNA, 256 bp, Glycine max
cgcaacaaaaagaaagaatcccaggcgaggagaaagatggaggggaaggagcaggatgtgtcgttgggagcgaacaagttccccgagagacagccgattgggacggcggcgcagagccaagacgacggcaacgactaccaggagccggcgccggcgccgctggttgacccgacggagtttacgtcatggtcgttttacagagcagggatagcagagtttgtggccacttttctgtttctctacatcaccgtcttaa

SEQ ID NO: 157302 - DNA, 268 bp, Glycine max
tcgagacctacaagttgaacggccaattcagatggatatcctctcagatgaaccgtgtgaggaacggagagctctaccgtgtcatctgtgacacaaggggtgcctttgtgcagcctgcagtttatgaggcctttgggttgactgtggttgaggccatgacgtgtgggttgccaacgtttgccacatgcaatggtggtcctgctgagatcattgtgcatggaaaatctggttaccacattgatccttaccatggtgaccatgctgctga

SEQ ID NO: 157303 - DNA, 220 bp, Glycine max
tgctgcgcaagaacaagcttggcaccgttcccgttcacctcaacgtctatgatctcaccccaattaatgcgtagcctattggtttggccttggactctaccattctggggttcaagttcatgggctggaatatggatttggtgcgaacgagcacgacacaacggggattttccaagttcaaccgaaacactgccctgggttcaccttcagaaagtcaatt

SEQ ID NO: 157304 - DNA, 267 bp, Glycine max
gcctacatatacaacactactttcagttttttctgtctctgaatctcaaactcttcggaaagattaacattaatggctccaagggatatcaatagatccaacgttgttgttgttgccggagtatccaacccgacccataaagagatccgttaccgcggcgtgaggaagcggccgtggggccgctacgccgccgagatccgcgacccaggcaagaagacacgcgtgtggctaggaacgtttgacacggcggaggaggcgtcgcgtgcg

SEQ ID NO: 157305 - DNA, 258 bp, Glycine max
aaaagacctatatttggtaagccaatcaaattggacattaataaaggaatggagagggcagaacaaattggaggaggcaaagctgtggccacagtcctagccattggcacagcaaatccacccaatttcatccttcaggaggattatcctgacttctactttcgggtcaccaatagcgaccatttgcaccgcttgaagcaaaagttcaagcgcatttgcgagaattcaaagatagaaaagcgacacatagtccacacg

SEQ ID NO: 157306 - DNA, 218 bp, Glycine max
caaacaaatagctggccaaaagaactggtcacaaagtctcttcagagcgatgcactctatcagtatatacttgaaatcagtgtgtaccaagagagcatgagagcttgaaggagctacgagagttgaccgataaacacccttgggaactgatggctacaccacctgacgaagggcaacttctaggcatgctccctaagcttatcaatgccaagaacaca

SEQ ID NO: 157307 - DNA, 269 bp, Glycine max
aggataccggtgtggcgaggtcctcggagtaccctgaggttcagaggattaccaataagttgcttgagacattggaggagtttgtgagggatagggccaagaggccaaagagtccggagaggaaagaggaggttccgccggtggagaaggtagaggaggagccggccccggatatgaatgaaatcaaggcactgccaccaccagagaattatatcccacctcctccgcctgagccagagcctaagccgcagccacaggttacggaggat

SEQ ID NO: 157308 - DNA, 270 bp, Glycine max
aagaaattgaaagcgcgcgcgagaatttggagtggaaactgacgatggagaacggattcgctcgcatggacgacgaggttcatcgccggagccagagcaaccagaccttcacctgcaggtgtgagctccagactcctcactgcgacgccgtcggatccaccgccgtcgtcgccgtcgtcacgccggacaaaatcgtcgtctctaactgcggcgactcccgcgccgtcctctgccgcaacggcgtacgcatcgctctctcctccgatcaaa

SEQ ID NO: 157309 - DNA, 264 bp, Glycine max
tgagacattgatgtttgattaccataggcagcatggaattgaaatacgcattgcaagaatctttaacacatatggaccacgcatgaatattgatgatgggcgtgttgtcagcaacttcattgctcaagcactgcggggggaaccattgacatcccaatgtccgggaacacaaactcgaagtttctgttatgtctctgacctggttgatggccttatccgtctcatggaaggatcaaacaccggaccaatcaactgtggaaaccc

SEQ ID NO: 157310 - DNA, 260 bp, Glycine max
  unsure (1)..(260): unsure at all n locations
ggagngaggagccattaaacaacttgtaggtgttacgaaggacacaagaaaaggtggtcctttagaaggagctcatgttcacattgttcacttgtctgattcaagtgcttccttggatctgattaaggaaacaaaaagtcgtggtgacagcataagtgttgagacttgtccccattacttagctttctcatctgaagagataccaaatggagatactcgttttaagtgttccccgcccattcgtgatgcttataacagag

SEQ ID NO: 157311 - DNA, 265 bp, Glycine max
atcctggggagtattgtgttgttgctccagacactgaaattttctgtgagggggagcctttgaaaagagaggatgaagaaagactggacgaagttgggtatgatgatgtgggtggtgtcaggaaacaaatggctcagattcgtgagttggttgagcttccattgaggcatccacagctttttaaatcaattggtgtgaagcctcccaagggaattttactttatggacccccaggttctgggaagacattaatagcaagagctgt

SEQ ID NO: 157312 - DNA, 267 bp, Glycine max
tagtcgagccgaatcggctcgagggtgggtcaaaccgcaggagataaagttaaggagtatatgatagctgagtcagtacccaacagcaacgattgagtttagaggaactgtgattggtggttctccttctgctcctcaaattgcttccttttctagccgtggaccgaaccatcttacatcgcagattctgaaacctgatgttattgctcctggtgttaacattttagcagggtggactgggcgtgtgggtcccacagattttgacat

SEQ ID NO: 157313 - DNA, 261 bp, Glycine max
gagacagagcagcactcacattcacaacgaagggtttcctattcatcagacatggtggaaggcaatcaagagtcacgaactcggtggccctcaagttctgaagtgggaagatgtgggaaatgggagatccaaaagaaagcgaggtccggtgtgaggaacagagccattgggggttaatttcattgatgtctactttcgcaaagagtttacaaagccgcttcttttcgcttcactccaggtatggaagctgttgggggtgtg

SEQ ID NO: 157314 - DNA, 266 bp, Glycine max
cttcactgttcaggatggaatagatgccattgaagatgttatctaccatattgaaacatatgatgtgactacaattagagcaagcacacctatgtttctcatgtctcggaagattaaatcacttggtgtcaaatgggttatctcaggagaaggatctgatgagatctttggagggtatttgtacttccacaaggcacccaacaaggaggagttccacagagaaacatgccgcaagatcaaagcacttcaccaatatgattgcttgc

SEQ ID NO: 157315 - DNA, 261 bp, Glycine max
tgtgaaacagatgatttgttgctgtaacaagatggatgctactacaccaaagtactccaaggccaggtatgatgaaattgtgaaggaagtttcttcctatttgaagaaagtaggatacaaccctgacaagattccttttgttcctatatctggtattgagggagacaacatgattgagaggtccacaaaccttgactggtacaagggtcctactctgctagatgcacttgaccagatctctgagcccaagaggccttctga

SEQ ID NO: 157316 - DNA, 262 bp, Glycine max
cagtgaaagagaatccgaggcgaagagaagagaaaaattaagatggaggggaaggagcaggatgtgtcgctgggagcgaacaagttcccggagagacagccgattgggacggcggcgcagagccaagacgacggcaaggactaccaggagccggcgccggcgccactggttgacccgacggagtttacgtcatggtccttttacagagcagggatagcagagtttgtggccacttttctgtttctatacatcactgtcttaa

SEQ ID NO: 157317 - DNA, 242 bp, Glycine max
ctttgtcgcaaagagaagagatctgcctcctttttatcaaatctatctcttcttcaagttgaaaatggggctgtctttcaccaagttgttcagccgactgtttgccaagaaagagatgcgtatactgatggtgggtctcgatgctgcgggtaagacaaccattctgtacaaagctcaagcttggagagattgtcacaacaattcccaccattgggtttaatgtggaaactgtggatatagga

SEQ ID NO: 157318 - DNA, 260 bp, Glycine max
gtcgagccgaatcggctcgagggctccggccatgccgcgagcttcgcgatcaactaggaggagggctaaatttcgaagagcagaagacaatcaaaagtgtgcatttgacttattggccaccgtagctggtaaactattgcaagagagagagaatccaaccatgtctagtgatacatcattagaaaaggatcagtgtggatttgtcaaagagtgccaagatgcaaataaaccatccaaatctgagatttctgatgaaggaa

SEQ ID NO: 157319 - DNA, 257 bp, Glycine max
gagagagagagcgagcagtttcagacacagagagaggggtttgggattggagggattgacgctgcgtctcttcctcttctctttcgatccatccctcattcctaatcctccaatccaaccacctcagcctcacactcacatatacacatatctgaacgcgtatcgtccctcctatggcttcaaagcgcatcctcaaggagctcaaggacttgcagaaagaccaccaacttcttgcagcgctggtcaagtagctgagg

SEQ ID NO: 157320 - DNA, 219 bp, Glycine max
aagaaaagaaaatcctcacccattttcttcgtagccaaacactctgaaattctcagttatgtcgtggcaagcgtatgtggatgatcacctactgtgtgaaatcgaaggtaaccacctcactcacgccgctatcatcggccaagacggaagcgtttgggctcagagcaccaacttccctcagttcaaacctgaggaaataactgccatcaataatgactt

SEQ ID NO: 157321 - DNA, 257 bp, Glycine max
ggtagatctaagagattatacaatgtaccaggaactgtcttctgcccttgagaaaatgttcagctgtttcactctaggtcaatgtggttcccatggagctccaggaagagaaatgttgagtgagagcaagctgaaggacctcctgcatggttcagaatatgtactcacttatgaagataaagatggtgactggatgcttgtcggagatgtaccatgggatatgttcattgacacatgcaaaagactgaaaatcatga

SEQ ID NO: 157322 - DNA, 159 bp, Glycine max
cagcgttggatctgttctcgtctccgctctcatgcttggcgtcgccgtcgtctgcctccacggcgcgttccgcgtgccggaggatctgtttcttgacgaccaggacaactctcaggccaccggattcctctccttcctccgcggccctgccgcgtcggc

SEQ ID NO: 157323 - DNA, 252 bp, Glycine max
gaagattctggtgaatgcgtagaaaaggaaaataaagaaattagcgtgaaaaatgttgggtgtgttcagcagctccatagtgtcgccgccggaggagctcgttgccgccggcagccgtacaccgtcgccgaagatgacggcggcggcgctgcggaagtggttcgaggagaagaacccctccgcagtgtcggtggaggtcggagagcatgtccagctcgcttatacgcaccagaacgagtcgccgtttcagcc

SEQ ID NO: 157324 - DNA, 200 bp, Glycine max
ctttcttgtttgcttcccaagtctctcgaagcatctttctttctcttcctgcagaagctatccgtgttacttgttcccaagtctccaacaagcaaagtacatggttgatttggaaatccaggtccccagcgcattcgacccgtttgccgaggcgagagaatcagatgcccccggggcaaaggagtatgtgcacatacgaa

SEQ ID NO: 157325 - DNA, 250 bp, Glycine max
cactcgcaagcaaaaagaaagaatcccaggcgaggagaaagatggaggggaaggagcaggatgtcgttgggagcgaacaagttccccgagagacagccgattgggacggcggcgcagagccaagacgacggcaaggactaccaggagccggcgccggcgccgctggttgacccgacggagtttacgtcatggtcgttttacagagcggggatagcagagtttgtggccacttttctgtttctctacatca

SEQ ID NO: 157326 - DNA, 206 bp, Glycine max
gaagaacctctggtgcccgaagatatgtggtactgtcctaaatgcaaagagagacgacaagcaagcaagaagcttgatttgtggagactcccagaggttttggtcattcatttgaagaggttctcatacagcaggtcgatggagcataaactggagacttttgttaactttcccattcatgattttgatttaaactaattacatag

SEQ ID NO: 157327 - DNA, 259 bp, Glycine max
gcagtcctttcattaagtcattcattcaaggttttctaccgggtattgcattgaagctttttctcatctttttgccaacaatattgatgatcatgtcaaaatttgaaggcttcggatctatttcatctctggagagaagagcagcatctagatactatcttttcaattttgtgaatatatttcttgggaacatacttaccgggacagcatttgaacagctggactctttcattcaccaagcagccaatgagtaagtcat

SEQ ID NO: 157328 - DNA, 256 bp, Glycine max
ctttcttctgcatcactttccattctcttcaacctaacgcagcatcgctatactcttcattccatggctttgcccaatcagcaaaccgtggattaccctagtttcaaactcgttatcgtcggtgatggtggcacaggaaagacaacctttgtgaaaaggcatctcaccggagaattcgagaagaaatatgagccaaccatcggtgtggaggttcacccattggattttttcacaaactgtggaaagattcgattct

SEQ ID NO: 157329 - DNA, 250 bp, Glycine max
cctggccctgtgttaattgatatacctaaagatattcagcaacagcttgcgattgctaattgggatcaaccaattaggttacctggttacacgtctaggttgcctaagtctcctaatgagaaacatttggagcttattgtgaggttggttatggaatctaagaaaccggttttgtatgttggtggtggttgtttgaattctagtgaggaattgcggcgttttgtcgagctcaccggtgttcctgttgcta

SEQ ID NO: 157330 - DNA, 245 bp, Glycine max
ttgatacctatggtggctggggtgctcatggtggaggtgccttttcagggaaggaccctaccaaggttgacagaagtggtgcctatattgtaaggcaggctgcaaagagtgtcgtggcaaatggccttgctagaaggtgcattgtgcaagtttcctatgccattggtgtccctgagcccttgtcagtgtttgtggacacttatggaactgggaagattcctgacaaggagattctgcaaattgtg

SEQ ID NO: 157331 - DNA, 199 bp, Glycine max
gatggcaggaaagaaaatcccagatgtgttgctgaattcaggacacaaaatgccagttataggcatgggaacttcagtggagaatcgtccatcaaatgagacccttgcttctatctatgttgaagccattgaggtgggttaccgtcattttgacactgctgcagtgtatggaacagaggaacccataggcctaccgtgg

SEQ ID NO: 157332 - DNA, 252 bp, Glycine max
ctcttcgagggtttggtgttctcttcctcccttggagaaaaagaagagccagcgctgcgacgccgttcgtgcatttttgaggtgccgctgtcatgtttgggcgtggtggaccaaggaggagtgataactccaaatattatgatattctcgggatttccaaaaatgccagtgaagatgaaatcaagaaggctatagaaaggcggctatgaagaaccatccagataagggaggagatcttgaaaagtttaagga

SEQ ID NO: 157333 - DNA, 255 bp, Glycine max
cttttctaaggcccaaatgggagggtggtatgtatgatggtgatgagaataaacggctggatgcacttcggttagccatggagttgggagctgattacattgacattgaacttcaggtagcacatgagttctatgactctatacgtgggaagacattcaataaacccaaggtcattgtttcatctcacaactatcagcttactccttcaattgaggatcttggtaaccttgtagcaagaatacaagcaacgggag

SEQ ID NO: 157334 - DNA, 244 bp, Glycine max
cacaaccactcttaatttctctctgccttgctcatttacacacctctccaacctttcactttcagctttatttgaatccctctctctcctttccaaatggccagcgttgaggttgcacatcaaacaccaacaacagttccagaaaatgaaacaaccgaggtaatcaagacccaggaaacaaccccggaaccagtaccagccactgaggctcctgcaccagacaagcagcactgaggttctgctc

SEQ ID NO: 157335 - DNA, 254 bp, Glycine max
gggtgattccagtggggtggcagtgaacaaattggaaagtattagccaaggagagaaacagttccgaacagaagttagcacaatagggacagtgcaacatgttaatctcgttaggctccgcggattctgctccgaagtgccaaaaggttactagtttatgattacatgccaaatggctccttggatttccatttgttccataacaagaactctaaggtgttggactggaaaatgagataccaaattgcgttggg

SEQ ID NO: 157336 - DNA, 248 bp, Glycine max
gctcttacgtgaaagctgctaagaagttgcatgagattgatcctttacaaaagcctaaacaggaccgttatgctcttaggacttcaccacaatggcttggtcctctaattgaagtgattagattctctaccaagtcaattgagagggagattaactcagtcaatgacaaccctttgattgatgtgtcaaggaacaaggcacttcatggtggtaacttccaaggagctcctattggagtctccatggat

SEQ ID NO: 157337 - DNA, 244 bp, Glycine max
gaaaaagtgttggaagagagaaggaaggccttccaagcactcaagactgaagagagaaaggtggacactaaagagtttgaatccatgcaggccttatcaagcaagaaagataatcatgacatattcattaaactgggatctgataaagataagcgaaaagaggcttttgagaaggaagaaaaatccaagaagtccgtgagcatcactgagtttctgaagcctgctgagggggaagcatactata

SEQ ID NO: 157338 - DNA, 253 bp, Glycine max
gtgtggaaccaaatcaaagcgccactgattgtcccgttgctgagactagcactgtttctgtgcttgatcatgtcggtgatgatgttcattgagagagtctacatgggcattgtcatcactctggtgaagttgtttgggagaaagccagagaaacgttacaactgggagccaatgaaggacgacattgagttgggatactcttgttacgcggtgtgatcttgttcaagtccccatgtacaacgacagagaggtt

SEQ ID NO: 157339 - DNA, 253 bp, Glycine max
tttcattttccctcactttctcgctccccaaacgcccctctctctcctccaatggccgaccagctcaccgacgaccagatcgccgagttcaaggaggccttcagcctcttcgacaaggacggcgatggttgcattactaccaaggaacttgggactgttatgaggtcacttggtcaaaacccaactgaggcagaactgcaggatatgataaacgaggttgatgctgatggcaacggaaccatcgatttcccag

SEQ ID NO: 157340 - DNA, 254 bp, Glycine max
attctatttccatcattaactttcaattcggctaatggacacatcattggtgtttaccgtgaggaggcgtgaaccagagctgatagctccggcgaaacccacccctcgcgaagtgaagctactatccgacatagatgaccaagatgggttacggttccaaattccggtgatacagatctatcgccacgacccatccatggcagggaaagaccctgttgaggttatcagaaaggctttggccagaacgcttgtgt

SEQ ID NO: 157341 - DNA, 250 bp, Glycine max
tctagttacatggaggagaaagacaactttgctatatactatgtggtgataccatgtgctgtgttagccttgtttattcatccatcaacttcacatcatttattgaacaggatttcctgggcattctgtgtatatctcgaagctgtgtcagtactgccccaactgcgagtcatgcagaacacccaaattgttgagccattcacagctcattatgtatttgccctgggtgtggcaagattcttgagctgtg

SEQ ID NO: 157342 - DNA, 223 bp, Glycine max
ttggagggaaaaagttaaaacttgctatttgggacacagctgggcaggaaaggtttagaacacttactagttcatattacagaggagcacaaggaataattatggtatatgatgtaacaaggcgggaaacctttacaaatctatctgatatatgggctaaagaaattgacttatactcaacaaatcaagattgcatcaagatgcttgttggaaacaagttgat

SEQ ID NO: 157343 - DNA, 212 bp, Glycine max
ctctctcactcacaaacacacactgaactaaaaaacatcaaaagagacatggctgagcaaaccttcatcatgatcaagcctgatggcgtccaaagaggccttattggcgagatcattagcagatttgagaagaaaggtttctacttgaaaggtttgaaacttgttactgtggaccgtccttttgctgagaagcactatgctgattggtctgc

SEQ ID NO: 157344 - DNA, 251 bp, Glycine max
gtgcgagagcttatataccgagagattctggagtaccatccgaagatgttaaaagaacatctagagggagccgagccaacaggattcatgtatccaagtgcggtggatcacttcaagaagcaatttgcatatcttgaggagcattatggaaaaggtggaactgttactccacccgagaggcaacatgcatcattacccaggtcatgtgtgttgtattcagataactcaggaccaaatatggctgaggttgc

SEQ ID NO: 157345 - DNA, 265 bp, Glycine max
gaagatagaatgtgcacagccctaaagacgaattaccagcttagcgaggagatcggtcgcggtcgtttcggcaccatcttccgctgcttccacccactctccaacgcaccctacgcctgcaaactcatcgacaaatccctcctccatgactccaccgaccgcgactgcctccagaacgaacccaaattcatgaccctcctttcacctcacccaaacatccttcaaatcttccatgttttcgaggacgaccaatatctctccatag

SEQ ID NO: 157346 - DNA, 260 bp, Glycine max
ctgccgcttacaaggaaatgaccaaccttattgagaaggcaagaaacaatgcatcagcatatgagaagaggtctgagtatggtgatcgtgaaatcacaaaggcagatctggagatggtgactagattagatccacttcgggtgtatccttacagatatcgagcagcagttctgatggacagccataaggaagaggaagccattgcggaactctctagagcaattgcattcaaagctgatttgcacctcttgcatctacgt

SEQ ID NO: 157347 - DNA, 248 bp, Glycine max
cctctgtctcctcctcaatcttcattgtcctgatctttcccttggtgacaaaccaagactaacacacacagaacatagcttgtgttggtgaggtgagaagataaagaaagaatggcatttgcaggaacaacacagaagtgtatggcctgtgacaaaaccgtttatctggttgataagttgaccgcggataaccgagttttccacaaagcttgcttcagatgccatcactgcaaaggacccctcaagct

SEQ ID NO: 157348 - DNA, 261 bp, Glycine max
caacgatggcgactcagatcctctctcgcatcttccccaaaaccctaaccccagcccccttcctcttccgctccctcaccaccgctccctctcgtccttccctccccgcgctctccttcctccgccgtatctccgttgcagccaacccctccctccgccgcgtcctcctcccaaacgccccctccctccgcgccctctccacacgcgccaccacctcctccctcaacgaccccaaccctaactggtccaaccgtcccccga

SEQ ID NO: 157349 - DNA, 257 bp, Glycine max
ctcgagccgattcggctcgagccgtaagctcccaagcagtgggacgaggctcgggactcagaccgcgtgcctgttgaaacatgagccggcgactcataggcagtggcttggttaagggaaaccaccggagccgtagcgaaagcgagtcttcacagggcaattgtcactgcttatggacccgaacctgggtgatctatccatgaccaggatgaagcttgggtgaaactaagtggaggtccgaaccgactgatgttgaa

SEQ ID NO: 157350 - DNA, 256 bp, Glycine max
gcaagaagcttgtctctgccaccaaggaagggctcaagcttgacgagagtgaagatgagaagaagaagcaagaagagttgaaggagaagtttgacaacctctgcaaggtgatcaaggatgttttgggtgacaaggttgagaaggttgtggtctctgaccgcgttgtagattcaccatgctgtcttgtgactggcgaatacggttggaccgcaaacatggaaaggataatgaaggcccaagctctaagggacaacag

SEQ ID NO: 157351 - DNA, 258 bp, Glycine max
ggtatgatgaaattgtgaaggaagtctcttcctacttgaagaaagtaggatacaaccctgacaagattccttttgttcctatctctggttttgagggagacaacatgattgagaggtccacaaaccttgactggtacaagggtccaactctgcttgatgcacttgaccagattagtgagcccaagaggccctctgacaagcccctcaggcttccccttcaggatgtgtacaagattggaggtattggaactgtgccag

SEQ ID NO: 157352 - DNA, 254 bp, Glycine max
ctaatcttgataacccaccctacaaaattaacaatggtgaagttcaacaatccattaattacagaacagtcccagcaacatctttacactttggtaatatcactgagtataatgcccacaatttgtatggactactagaatccaaagtcactaacaaggcattggtggatataactggtaaaaggccattcatcctaagtagatcaacttttgtaagttctggtaagtatgcgtctcactggacaggagataat

SEQ ID NO: 157353 - DNA, 257 bp, Glycine max
gagcgagcgagcgagcagtttcaaagagaggatttgggattgggaaggcgagggattgcgctgcgtctcttcctcttctctttcgattcatccctcattcataatcttccaatccaacaacctcagcctcacactcacacatacacacatctgaacgcgtatcgtccctcccatggcttcaaagcgcatcctctaggagctcaaggacttgcagaaagacccaccaacttcttgcagcgctggtccagtagctgagg

SEQ ID NO: 157354 - DNA, 264 bp, Glycine max
cttgaggcatttctggcacagttttttccacttttattttaactttaagactgcacagagagaagcatataattcctgagtcaatatagaatttgtgaagtcagtccaaacttcagtttcaaagatgcctcgtggaacgcttgaagttgttctgatcagcgccaaaggaatcgatgacaatgattttctctccagcattgatccttatgtgattctcacatacagggcacaggagaaaaagagcactgtgcaagaagatgctgg

SEQ ID NO: 157355 - DNA, 261 bp, Glycine max
ctcgagccgatctcaattctcccctcacagttgcaggttggagtgtcaaagcaattgtcagcaggatattgtttgagtgtttagagaatgaaaatgtctcaattgtaactgaaaaagaggttcagacactatccagtactgatgcatctgaactattggaagctgtggttaaaattgtgaatgaatgtctagctgaagtgcctcgatttggatttgaagaaccaaaatcagctcttggaacttcagaggttctcgaaatca

SEQ ID NO: 157356 - DNA, 259 bp, Glycine max
ataccactgctgttgtaatccttctcaaagtggtattggagtggttaaacaaccgatggaaggttcaaagcctcctcctcctccgcctcctcctatgttggagagaagggcaaggcctcaaaaggatcaagctttgaactgcccaaggtgcaattcaacaaacaccaaattctgctactacaacaactatagcctctctcagccaaggtacttttgcaagacatgtagaaggtattggactgagggtggttctctcaga

SEQ ID NO: 157357 - DNA, 256 bp, Glycine max
ctcgagccgattcggctcgaggatgaatttgaggacaaaatgaaggaattggaaagcatacgcaatcctatcattgccaagatgtaccaaggtggtgctggtcctgacatgggtggtgctggtgctggggcagccgaggatgattatgctgctccttctggtggaagtggtgctggccccaagattgaggaagtggactaaatgtgtagttgctttcatccatttatctgtttaaaacttatttgatgctttttta

SEQ ID NO: 157358 - DNA, 257 bp, Glycine max
ctcctatgctgatacccagagacacagacttggaccaaattatctgcagcttcctgctaatgcccctaagtgtgcccatcacaacaatcaccatgatggtttcatgaatttcatgcacagggatgaagaggtcaattacttcccttcaaggtatgatcctgtccgtcatgcggaaaaggtccccgttcctcctcgtatcctaggtgggaagcgtgaaaagtgcatgattgagaaggagaacaacttcaagcaacctg

SEQ ID NO: 157359 - DNA, 251 bp, Glycine max
cacactctctgcttcgcgtgtaccaacaagtgcaagttcgaatcaatggccagcgctcagctcacagcaatagcgtcatcgatctctacggcgtcgtttgaagggcttcgaccttccgctgttcagtttgcttccacgggcagaattagaattggcaatctctcccaaaggtccttccggggcttggttgtcaaagccgccaccgttgttgcccccaaatacactgcgataaagcctctgggagatagagt

SEQ ID NO: 157360 - DNA, 254 bp, Glycine max
tgcagacaataagttcgaacaagttcaggagcggcatggatttcttccaccgcgcgaaggcggtgcgcctccgcagccaccacgacaagtacctcctcgcggaggaggacgaggagtcggtgacgcaggaccgcaacggctcctccaaaagcgcacggtggacggtagaatacgtggccgaatacgacaacataattcgcctgaagagctgttacggcaagtacctcaccgcttccaaccacctcttcctcttg

SEQ ID NO: 157361 - DNA, 249 bp, Glycine max
ctacagttgtcgttggatccctagcctttgcggtcttctgggtactagcggatctcccagctgtgcctagtctactcattgggagaactgtagggtccctgctaggtgcgatgcgtatggtaatgttcaaagttcttagtccagaccgagcttatgctgcaattgatcttccagttacttagtctactatatgggactatggctgtcgctactttgcttgacatatcgaacgtgttcaagtacttgggg

SEQ ID NO: 157362 - DNA, 256 bp, Glycine max
gctagaagggaacaaacccgcaaagagaaaacccgtgttcaccaaagtggatcagctcaaacctggtaccaacggtcacacgttggtggctaaggtcttgtcctccgacaccgtcgtacacaaaccgcgatcctcttccgcccacaacctcaaacccactgtcatcgccgagtgcctcatcggcgacgacaccggcaccatcgtcttcaccgctcgcaacgaacaagttgatatgatgaaggctggagctacagta

SEQ ID NO: 157363 - DNA, 256 bp, Glycine max
gtctgcagagtgcagagccttctctcctctattttggcttccaacctttttgctccattcattctcaacaacaaaccaatctctatattttgcttagacaatgagggggagcttgtggcaacttgggcaatcgatcactcgccgtcttgcccatggagataagaaggctgttgctcgccgatgttttgcctcagaagctgagctgaaaaagacagtgtttcatgacttccatgttgctcatggtgggaagatggtt

SEQ ID NO: 157364 - DNA, 253 bp, Glycine max
aattagaaatatagtgcgcaattatcaacagacgggatttttgtgggaacagtacgaacagacgaagggtaagggaaaaggggctcatccatttactggttggacatcgcttgtagtattaatcatggcagaagcatatggaaatatttaggataaacacagcttggtggaggctattgtaacaaacattccttgcttccttctcattttccgtccatgaataccaaggcagtaagtgtgcatgtaacgttgt

SEQ ID NO: 157365 - DNA, 253 bp, Glycine max
gcattattcaatggccaccacagcagctctatccggaaccatggtgagcacctccttcatgaggaagcaacctatgacgaccaagagcctaaagacattccccaacgctctttttggtctgaaaggtggacgaggtggtcgtgtaacttgcatggcctcgtacaaggtgaagctcataaccccagaaggagaagtggagtttgaatgcccagatgatgttttcattgttgacaaggctgaggaagaaggcatt

SEQ ID NO: 157366 - DNA, 250 bp, Glycine max
gtctaaactgaaaaatatgccaaagttttattttgaatcaccaatggtcatgccaagtagagcaatgctaattcatttcacagtcttctaattatgcatttatttcaatcttgatccttccaggcatgggtcacacttggcagagcacaacttaattttggtgagcctgataatgctattgaaagctttgaccgtgctctagctctcaagcctgattatgaggaagctcaagatgataggaaaactgcat

SEQ ID NO: 157367 - DNA, 248 bp, Glycine max
ggaaggttctacttttctggagtttctttggcatggcaatagcaatgatccttcaagccacaggagcaacttcacttgtatcaaacatgggagctcagtacttttctgttggtggcatgttcctgtttgtcttaacatttgctctcggagctggcccagttccaggtctccttctaccagaaatctttcctagtcgaataagagccaaagccatggcagtctgtatgtcagtgcattgggtgataaat

SEQ ID NO: 157368 - DNA, 251 bp, Glycine max
aaaaacactaccaggaaaaagtccactttagctttcacaggcacaaactcgaagggtttaattgtgttgtccttctcagaaatcaagagcctcacaggggatttcaagaatcaaattgggccaaaggtgttcaagggtttgctacccaacaatcatctgattgcagttaaagacctgaatgcgtccatagaggaaaggaagtccgaagtgctgttatgaagatgggttgcatccaccacaagaaccttgtg

SEQ ID NO: 157369 - DNA, 250 bp, Glycine max
gttaaacagtagttcttattcatttttgaaatccgatgcaagcaaaacgattcatgccgctgaaagactgggtaggggtattgagactgatggaattaccacccctgtgctgaacacttctgcctacttttttaagaaaaccgctgatctcattgatttcaaggagaatcgtcaagtgagttatgaatacgggcgctatggaaacccaacgactgtggttctggaggagaagataagtatattggagggg

SEQ ID NO: 157370 - DNA, 250 bp, Glycine max
caaatctttgtcaagactttgaccgggaagaccatcacccttgaggtggaatcctcggacaccattgataatgttaaggccaagatccaggacaaagagggcatccccccagatcagcagaggctgatttttgccggtaaacaacttgaggatggaagaacccttgctgattacaacattcagaaggaatccacccttcacttggtgcttcgtttgagaggtggtatgcagattttcgttaaaactttga

SEQ ID NO: 157371 - DNA, 257 bp, Glycine max
ccttcacaagattctcacaaacaactcttgagaaagaaagaatggctgccaacacattgatgagttctgccatctcagccttcccatctctcctttcctcctcaaaatccagatttgccgcagcagttcctctttccagctttgttgtcaccaatgcctcttcttctcgcttttccatgagtgctgactggattcctggccagcctagacccccctaccttgatggttcagcacctggtgactttggattcgaccct

SEQ ID NO: 157372 - DNA, 254 bp, Glycine max
aaacaagtaaatcatgttgttgatgattcgcttgatgcaacagactttcattacatcccgccattgaatatagtcatgcttattgttggtacacgaggagatgtgcaaccctttattgcaataggcaaacgcatgcaggactatgggcatcgtgttagattagcaacccattcaaattttaaggagtttgttttgacagctgggttggagttttatccattaggcggtgatccaaaagtcttgctggttatatg

SEQ ID NO: 157373 - DNA, 250 bp, Glycine max
ctcacatatacacatatctgaacgcgtatcgtccccgctatcgcttataatcgctcctcaacgagctcaaggacttgcagaaagacccacacaacttcttgcagcgctggtccagtagctgaggacatgttccattggcaagcaacaataatgggtcctgctgatagtccttatgctggaggtgtattcctagtcactattcacttccctccggattatcctttcaagcctcctaaggttgcctttagga

SEQ ID NO: 157374 - DNA, 250 bp, Glycine max
cggctcgagctcgagccgaatcggctcgaggcttaggggatggaaattagaagacataaatccagtactattgcgatactttgcctttggttctagggctgtattgaatcctatggctgccgtgtttggtggaatagttggacaagaggttgtcaaagcatgctccgggaagtttcatccactttttcagttcttctacttcgactctgtggtatcactgccttcagaaccattggacccaaatgatttc

SEQ ID NO: 157375 - DNA, 249 bp, Glycine max
tcattgggtactgcaggcagcattgataccataaagcctctcctcgtggccctgtctttccatcaattttttgagggtatggggcttggtggttgcatatctcaggcaaagtttgagtccaagtctatggcaattatggcaacctttttctcactgacaaccccaattgggatagcaattggaatgggggtgtcaagtgtgttcaaagagaatagccctactgctttaactgttgaagggattttcaat

SEQ ID NO: 157376 - DNA, 247 bp, Glycine max
ctatatctggagattcatactatggctctcacgtgatgcagtatggtgatgtagggcttagcagagatgttctcttccattatttgggtacagatcctgctaatgataatttcacttttgtggatgaaaactccttatggtcaccttcaaaaccagtcaaccaacgtgatgctgatctcatccatttttgggataagttccgcaaagctcctgagggttctctcaggaaaaatacagctcagaaaca

SEQ ID NO: 157377 - DNA, 248 bp, Glycine max
accagatggaggtgatgtttataaaggagttccaaaggattacaccggcgaagatgttactgttgataacttttttgctgctttacttggaaataagtcagcactgactggtggcagtgggaaggttgtggacagtggtcctgatgatcatatatttgtatactatactgaccatggaggtcctggggtgctcgggatgcctgctggtccttacttatacgcggatgatctgattgaagtcttgaaga

SEQ ID NO: 157378 - DNA, 231 bp, Glycine max
ctcgagccggggggaattcaacctcgatgatgttgaagttgccttaaaggattctgaggagatcagttgccggggaaaaaggaggagcagcctacagccatgaatgcatttgagttaatctcaatgtcaaaaggattgaaccttgaaaccttgtttgatactgacaggggttttaaaggggacacaggtttcccctaaatatcctgtggggatgagatactcaacaagttt

SEQ ID NO: 157379 - DNA, 247 bp, Glycine max
atgaaatagccaagaggttaccaagggctcagccagctcagaacccagcaggaatggttcttgttgacagacccgccgaaggaactagggctgcatcatgttgttcataagtatttgagctgtatttgcaccccccaatcctttttaattaatcatgttttctttgggttgtatgtactacacactttgatgtcactgttatgtggagctccaacaagtggtatgggctgcaatttacaaaacacaa

SEQ ID NO: 157380 - DNA, 249 bp, Glycine max
cttcgagcttcggcggagatgctcggaaaaggaagcttggggactgtttacagagcggtgctcgatgacggctgcaccgtggctgtgaagagactcaaagacgctaacccctgcgagagaaatgagtttgaacagtacatggatgttgtagggaagctcaagcaccccaacattgttagactcagagcttattattacgctaaggaagaaaagcttcttgtctatgattatctccccaatggaagcttg

SEQ ID NO: 157381 - DNA, 248 bp, Glycine max
cgccgacaccgacgtcgtaatcgtcggagccggctcggcggggctctcctgtgcgtacgagatcagcaagaaccccgccgtgagcgtcgccataatcgagcagtccgtgagccccggcggcggcgcgtggctcggcggacaactcttctccgccatggtggttcgcaagccggcgcacctcttcctggacgagctcggcgtggcgtacgacgagcaagaggactacgttgtgataaagcacgcggctt

SEQ ID NO: 157382 - DNA, 247 bp, Glycine max
gtgccttatcgctgtggttatcatcttcttcttcctctttcttagatctcttctttctctacgccgcacgccgaaaccatggccggaaaaggagagggtcctgctatcggaatcgatctcggaaccacctactcttgcgtcggtgtgtggcaacatgaccgcgttgaaatcatcgccaacgaccaagggaacagaaccacgccgtcttacgtcggattcactgacaccgagcgtctcatcggtgatg

SEQ ID NO: 157383 - DNA, 246 bp, Glycine max
aaaaaatgttcatcgagagtttcaaggttgagagtcctaacgtgaagtacacagagactgagattcagtccgtgtacaactatgaaaccactgaacttgttcacgagaacaataatggcacttatcagtgggttgtcaagcccaaaactgtcaaatatgaatttaaaaccaacacccatgtccctaaactaggggtaatgcttgtggggtgggggggaaacaatggctcaaccctcactggtggtg

SEQ ID NO: 157384 - DNA, 248 bp, Glycine max
gagtttcagtccatgctggaaggactcgacgaagaagggtgcgtggaagaaccagggcaccactctgagaagaaacgacgactaagcgtggatcaggtgaaggctttggagaagaacttcgaagtagagaacaaactcgaacctgaccgaaagttgaagctggcacaagaacttggcttgcaaccaagacaagttgcggtttggttccaaaaccgtcgtgccagatggaagacaaagcaattggaaag

SEQ ID NO: 157385 - DNA, 246 bp, Glycine max
tcaagaaccgtctttctaaagcatttggaggccgagcttgttttgactgatgcagcaaagggcatgaatggagcagtacaaaaagctgaagaaattttaaaaagtacccccaattcatacatgcttcaacaatttgataatccttcaaatcctaaggttcattatgagacaactggcccggagatatgggaagatactagaggaaagatagatattttagttgcaggaattggaaccggtggaact

SEQ ID NO: 157386 - DNA, 247 bp, Glycine max
tccttatctatcttcacctccatcttttaacagttcccctcgaaacttctgaagatgggtggcattgcattcggacgcttggatgattctttcagtttaacctcaatcaaggcctatattgctgagttccattcaaccttgctctttgtttttgccggtgttggttcagccatagcctatggtaagttgacatcagatgcagcacttgaccctgctgggacactggcatttgctatgtcacggggtt

SEQ ID NO: 157387 - DNA, 246 bp, Glycine max
gttttctattatgagatcttgaactcccctgaaagagcctgtcatcttgcgaacaagcttttgatgaagctatttctgagcttgacaccttgaatgaggagtcatacaaagatagcaccttaatcatgcaacttctcagggacaacctaactttgtggacttctgacatcccagaagatggagaagatgcccagaaagtgaatggcactgccaagcttggtggaggtgaggatgcagagtgagtcc

SEQ ID NO: 157388 - DNA, 244 bp, Glycine max
attcctctctctctctctctgttcctgtcgctgtgtgtcatttcgttttttccccacttccatccatcttcgtttttcttcttcttcttctcccttcgattttcatttctcttttcttttttttttctctttatttatcactattattattcatcttcgtttctttgccttaagcttccttcgatttttttctctcccgttttcgctgtgtcccctcttagatccctctctggatcacagtgag

SEQ ID NO: 157389 - DNA, 245 bp, Glycine max
tgtaagagtaggaaatcgacaaaccctacgctgaaagaagaaaaaatgtccggcgtaaagagagcactgaggcagttcaccttcggaaccggcaagaccgccggtcgcaactcggcggggcgcataacttccttccaccgcggcggcggagccaagcgcttgcaacgaaccgtcgatcacaaacggaatactgcttcttctctcggcgtcgtcgaaaggatcgagtacgaccctaaccgctcctc

SEQ ID NO: 157390 - DNA, 242 bp, Glycine max
atcgaacccgtcgtcacagaaaaacttgtcaccatggtttcttccgacaaggatccacgagaggatgtccttcaagcctggtacatggatgatagtgatgaagatcaaagactcccccaccacaaagaacccaaggagtttgtctcgttggaccaacttgctgaacttggagtccttagctggaaactagatgctgataaccatgaaaatgatccagagctgaagaagattcgtgaagagcg

SEQ ID NO: 157391 - DNA, 242 bp, Glycine max
attcgagagtgctgaaatgggtgttcccgctgagaacgatggctgcaaatgtggagctaactgcacctgcaacccctgcacttgcaagtgaggtgttggagagctaaagcttcaagcagaaatggcccttagaaataatgataaaaactatatgtagtttcaaaacttcaaaattatgtagtatgtattatgttgcactctggtgttttgtgtctaaacaaacacccttagaataaagtggt

SEQ ID NO: 157392 - DNA, 249 bp, Glycine max
ctttgttgttgtaactcgttcttcttcttttgttgttctgtgtttgtgtttgttttttctctcacctgaaaatgtcttgctgcggtggtaactgtggttgcggaaactcctgcaagtgcggcaacggctgcggagctgcaagatgtacccagacttgagctacactgagtcatccaccaccgagaccttggtcatgggagtcgcacctgttaaggctcaatttgagggtgctgaaatgggtgtgcccgc

SEQ ID NO: 157393 - DNA, 253 bp, Glycine max
gtcgaagatcccgagaaacagatattggaaccggcgataaaaggaacggttaatgtgttgaaggcggcgaaggaagcaggggtggagcgcgtggtggcgacttcatcgatttcgtcgattatgccaagtctaattggccagctgataagattaagggagaagagtgttggacggaccttgaatactgcaagcaaaaggggttgtattatcccattgcaaagactctagcagagaaagcgggttgggactttgc

SEQ ID NO: 157394 - DNA, 254 bp, Glycine max
caaaatcagcctctaatatttttctcactgtctctccagagaacttgatagagagatggcagctgcaacatctggtgctgtgttaaatgggttgggatcttccttcttgagtggaggaaacaggagccaacccttctggcctctgctattggaggcaaagttggtgctgctgttactgttaatcccagaagactcattgtggtagctgctgctgcaccaaagaagtcatggctccctggtgttagaggtggtgg

SEQ ID NO: 157395 - DNA, 254 bp, Glycine max
ctgaggtctaattttctgggcaccaagttcacaatcttggatggcgagcccgcgcatgaaacttcacttccactgaattgcaagttgcagcaaagagtccatctgaagcaggtacttcctaacaaggttgctgctgctgctaactacaaagtggccacagtatcttatgaactcaatgtcctccgaacaagaggtccaaggcgaatgcggtgtatgatgcacttaatccccatatttgcaatccaagaaggagg

SEQ ID NO: 157396 - DNA, 227 bp, Glycine max
caaagctataacaaggttggggtgtcctacacctgttcctgcagtcttcatcggagggaagctggtggggtccaccaatgaagtcatgtccctccaccttagtggttcactcactcaactgctgaaaccaatcgagctttgtcttaaagaagggtgcacatgcaaattaaattaaaacatgttcctgctaccttaattggaagaataaacatgcagtatagtagtgt

SEQ ID NO: 157397 - DNA, 252 bp, Glycine max
gcgtggttgggtttccgcttagaattgcttggaagcttagttttttgcctttctgcaatgttcatgatcatgttacccagcagtatcataaagccagaaaatgttggtttgtctctctcatatggcttgtcattaaatgccgtgatgttctgggctatatacatgagctgtttcattgaaaacaaaatggtatctgttgagaggatcaaacagttcacaaatattccatcggaagcttcatggaacattaag

SEQ ID NO: 157398 - DNA, 247 bp, Glycine max
atgattttcaggttaaatgtttcaatgctcctttgcaaccatctgaaattgtgggtgtaaagaaggttgtacaagaaaaattgtctgaaggggtgaatgaacgtggacttactttgactggattcctatttcttcatgccctcttcatagaaaaagggcgtcttgagacaacatggactgtgctcaggaagtttggatataatgatgatatcaagcttgctgatgatctaattccacctataaagtg

SEQ ID NO: 157399 - DNA, 247 bp, Glycine max
ctttctctctctaactcaatctctctctctctctctctctgaattttctcctctctccgattccttttattaattggagtttactcgctccttttcctttccctgaaaacatttcctcgtcgtattgatgtcgaaaagggccggccacttccaaaatttggtgaatgggatgtcaatgatccaacctcagctgaggggttcacagtgatttttaataaggccagggatgagaaaaagacaggtggta

SEQ ID NO: 157400 - DNA, 258 bp, Glycine max
cggctcgagccgcccaaatcaataccacaatgggttttcatttgcctggtatcagaaaggcattgtttgcagtgaatcaagcatcttcaaaagccattcatgtgccaaagggctatcttgcagtatatgtcgggagaacatgaagaggtttgtgatccctgtgtcatacttgaaccaaccttccttccaagacttgttgagtcaagctgaggaagaatttgggtatgatcatcccatgggtggccttgcaattcctta

SEQ ID NO: 157401 - DNA, 258 bp, Glycine max
gctgaaggaagttatacgagaatgtgacactctgtgccttgtttttgagtacatggaatacaacctgtaccaacttatgaaaaacagggaaaagctgttttctgaaaatgaagttagaaattggtgttttcaagtttccaaggtttagcttacatgcaccagcgtggatactttcatcgtgatcttaagcctgaaaacttgctggtcaccaaagatgtcatcaagattgctcgatttggcctagccagagagatcagt

SEQ ID NO: 157402 - DNA, 260 bp, Glycine max
tgcttgtttcaggtgcactcatggaggatgtgtaattagcccatcaaattatgttgcccatgaacatcgtctttattgcaggcaccatcatactcagttgttcaagcagaaaggtaacttcagccaacttgacagcaagaaaacgatgaaggggtgacggagaacagaataactgagtaatggctagcattcaactttcaagttacattggcaatacaagttcagttggtgactcattttcaggcatcaaattcccttgt

SEQ ID NO: 157403 - DNA, 258 bp, Glycine max
atataattgtgctatccagctattcaccatttgtgaaatacactcctcaatacatgtggcttaaagaagagctgaagcgagttgagagggagaagtatccttggctcattgtgctcatgcacgtgccgctctacaatagtaatggagctcactatatggagggtgaaagcatgcgatctgtttttgagagctggttcatcgagtacaaagttgatgtgatctttgctggccatgtccatgcttatgaaagatcatatc

SEQ ID NO: 157404 - DNA, 253 bp, Glycine max
gctggattgaaagaacgaaattacttagggttatctgattgctcatcagttgatagcagtgcctctactgtgccaagcttgtgtgatgagaaaaaggagaacatgaatttgaaggctacagagttgaggctggtcttcccggatcccaatcgcctgaaagggagccggatcttttctctttaagcccagcaaagcttgatgagaagccactgttcccgtctttagtaggaagcaaagggaacagtggcttcct

SEQ ID NO: 157405 - DNA, 246 bp, Glycine max
  unsure (1)..(246): unsure at all n locations
ctagattctctgtctctctctctctctctcgatcaatcatggctttgcccaatcagcaaaccgtcgattaccctagtttcaaactcgtcatcgtcggtgacggtggtacaggaaagacaacgttcgagnaaaggcatcttaccggtgaatttgagaagaaatacgaaccgaccattggagtggaggttcacccattggatttcttcacaaactgtggaaagattcgcttctactgtagggatactg

SEQ ID NO: 157406 - DNA, 243 bp, Glycine max
cctacgtaagagggcaagcaagaagtataacacttttgtccaggattcaattgtggatgatcttaccgatgtggagtccttgcaatttgatttggctacaattgaagctgccacgaatggattctcggatgagaacaagattggccaaggtggatttggtgtggtttataagggtatcctccctaacagacaggagatagctgtgaagaggttgtcagtaacctccttgcagggtgcagtaga

SEQ ID NO: 157407 - DNA, 238 bp, Glycine max
ccgagatcaattggctattgatgatattgtgtttggtagtaactatttgtttcagagacacaaagcatctgggtaatgcctcaggtttggcagttatcacagtgatgctggtgaccacttgtttgatgtcactggtattgtactttgctggcaccagaatgttctccttgcacttgggtttgttttcatatttggctacattgaggttctcttcttctctgcttctcttatcaagttc

SEQ ID NO: 157408 - DNA, 261 bp, Glycine max
attgcttttgttcccaattttctcaaattgctttcggttttcgatctgattctgcaaaatcatggagatggagcgcatcgttgaattccctcacacatacatggagacgacccccgagaaagagagcgcgtttgggctgggacatcgctgaggtccccaaggctcaggtaggattgttttgtggacaagaggttgagaatatttcaagctttgctccttcagaacatccccctagttctctgtttaagggagttgctcgaa

SEQ ID NO: 157409 - DNA, 250 bp, Glycine max
gaagattctggtgaatgcgtagaaaaggaaaataaagaaattagcgtgaaaaatgttgggtgtgttcagcagctccatagtgtcgccgccggaggagctcgttgccgccggcagccgtacaccgtcgccaagatgacggcggcggcgctgcggaagtggttcgaggagaagaacccctccgcagtgtcggtggaggtcggagagcatgtccagctcgcttatacccaccagaacgagtcgccgtttcagc

SEQ ID NO: 157410 - DNA, 255 bp, Glycine max
gcggaacatgtcatgtttggctccttggacaacctcttccaaagcaccaacataataccaaaggatattggtatccttattgtgaattgcagcttgtttaaccctaccccctcactgtcttccatgattgttaacaagtacaaattaaggggtaacattaggagctttaatttgggagggatggggtgcagtgctggagtcattgctgttgatcttgctaagggacttttgcaggtccataggaacacatatgct

SEQ ID NO: 157411 - DNA, 274 bp, Glycine max
tctctgaactgcgctcgagccttatgtcacagccagtcgcacttttgacaaattcactactgcagctaccctaatctacaagcaacccttgaaaaattccagtgtaaaaaatctcacccttctcaagccaactttgccaccaataaatgccacacgctttgtggcaaacttcacagcaaaattcagaagcttggctagtgccaaattccctgccacggtacctcaaaaagtggacagaaaatttttcatccatgtggggctagggactagtcct

SEQ ID NO: 157412 - DNA, 254 bp, Glycine max
cagcttctactcgtgtaatctctgcgtgggctacaatggattccggtgtccaaggttgcatcttagccactttaattctccacgacgaggaaatcccagtcaccgctgagaagatcaacgctctgttgaaggcttctaatgtctccgccgagtcttactggcccagcctcttcgccaagctcgcccagaataagaacatcgaagacctcattttgaacgccggcggtggtggggccgccgttgcagttgccgct

SEQ ID NO: 157413 - DNA, 253 bp, Glycine max
catggccaccgtcacttctgcagccgttgctattccctcattcactggcctcaaggcaagcgcaggcaaagtgagtgccgcagttaaagtctcagctccccaagccacaaggttgggcatcaaggcttcgtgaaagacgttggagtcgctgttgtggccactgccgcgagtgcagtgctggctagcaacgccatggccattgaagtgttgctgggtggtgatgacgggtctctggctttcgttcccaacaatt

SEQ ID NO: 157414 - DNA, 257 bp, Glycine max
catgcaccaagaccaacatggtcatggtctttggagagatcacaaccaaggccaacgtagactatgagaagattgtccgtgacacatgccgagaaattggattcatctctgatgatgttggtcttgatgctgaaaatgcaaggtgttggtcaacattgagcagcagagccctgatatcgcccagggtgtgcacggtcacttcaccaagcgcccagaggaggttggtgctggtgaccagggtcacatgtttggctatg

SEQ ID NO: 157415 - DNA, 254 bp, Glycine max
gttatggcaatggccacaggagaggcaccagctgaagctaccccaactgaggtgccagagattgtcaagactcttcaagaaacttgggacaaagttgatgataagtatgcagtgagttcacttgccttggtggggtgattgcattgtggggctcagttggattgatctcagcaattgataggcttcctttgattcctgggattcttgagattgtaggcattggatacactgggtggtttgtatacaagaacata

SEQ ID NO: 157416 - DNA, 254 bp, Glycine max
aaagtatagagtgaaagaatgggtgagaaaagcaagattttgatcataggaggcaccggctacatcggcaaacatatagtggaagcaagcgcaaaggctggaaatcccacttttgctttggtgagggaaccacactctctgacccctccaaggcacaactcatccacaattttgaggctttgggcgttaatttggtccgcggggatctgtacgatcatgagaagttggtgaaagctatcaagcaagtagatgtc

SEQ ID NO: 157417 - DNA, 251 bp, Glycine max
atccagggacagttaccaattgttctacacaggatgtttacaacctgcccgtggagagtggaaagacctaccttttgagaattgtcaatgctgcactcaatgaggagctattcttcaaaattgctggccacaagctcactgtggtagaagttgatgccacatatgtaaagccattcaagattgaaacaattgtgatagcccctggccaaaccaccaatgtgcttctaaatgcaaaccaaaaatctggcaag

SEQ ID NO: 157418 - DNA, 237 bp, Glycine max
tctaattgtagattaatgatgattgattacgatgtatttaggagttcatatacaagtgcataaattgaaaattcgtgaatgtttgtaatctctttcactctttgttttgctcggttcttgagattgcctaagcttcattacttcaagtcatccattttaaaaaaaaaaaaaaaaaaaaaaaaaaaaaaaaaaaaaaaaaaacaaaaaaaaaaaaaacaatcaaaaaaaaagaaaggg

SEQ ID NO: 157419 - DNA, 252 bp, Glycine max
ccaagatcaaagaacagaaaccatgcctctgccaatacctcaagaaccccaatctcaagaagtttgttgactctcctaatgcaaggagagttgctagcacttgtggaactcccttcccaaggtgctaatgttaataaattggaagaggttttaatttctctgcctgattatgcatcttgatatctatccaagtgtttggccagagactagagagtgaaagaaaattatgtgttaattgttatcatatatata

SEQ ID NO: 157420 - DNA, 250 bp, Glycine max
tgcttcgttgttgcagtcctcttcgctctccgctcacgaaaaacacaaatctcgcgccgattggataaagcagctcaacgatcatctcgaggccatcgatcccgagatcgccgacataatcgaactcgaaaggcgcgtcaatggaaggggttcgaacttataccttcggaaaatttcacgtcgctgtcggtgatgcaagcagttggatcggtgatgacgaataaatacagtgaaggatatcctggtgcta

SEQ ID NO: 157421 - DNA, 257 bp, Glycine max
actacgttcaatatgtcgctggtggcaaacgaggatttccagcacatacttcgtgttttgaacacgaacgtagatgggaagcagaagataatgttcgctcttacctcaatcaaaggtattgggaggcgatttgctaacatttgctgcaagaaggctgatgttgacatgaacaaaagagctggtgaactgagtgtgctgagttggatagtgtgattaactgtggttgccaaccccggcaattcaagattccggactgg

SEQ ID NO: 157422 - DNA, 253 bp, Glycine max
ggacaattgatatgcactggggtgaatatcatcagaattttatagaaggtttgaacaaacagctggagaaggatgatatactgtatggttacactttggatgaactagtcaaagtgacatacaacaatgggaatcctctgcctgaattcaacaatgcagctgaggtttggaatcatgacttcatctgggaatccatgcaaccaggagggggtgatatgcccaaactaggtctccttcaacagattgaaaagga

SEQ ID NO: 157423 - DNA, 247 bp, Glycine max
gcacttttcctccctctgacttttgctacaactactaccagtacaagcatatagttggaatggctcgattttcattggatgagatatcagacactggtgcctttgtgagatctgcttcaacattcaaaattggatttcgagggacccgaattcgctgtttccaccggaatcagggaggtatcatctctatgtatcatatgcttgtccttgggcttccaggtgccatgcttacttgaatatcaaagga

SEQ ID NO: 157424 - DNA, 236 bp, Glycine max
tctcgagccgaatcggctcgagcacaactccactcttagctgccactggtttttcttcttacatttctcttcctttctaagcttttttcgattacccatttggagattctgtcctaatggctcttgctcttccaaagtttcctccttttccgggttttctcccaaacccagtgttggggatgctctgaaaaacccaacttgctctgtttctctgagctttgcgaatgtgaaattgg

SEQ ID NO: 157425 - DNA, 252 bp, Glycine max
acaaggcacaatctccatgtccctaacccaacccccatacgacctccaatccttcaaattccaacccatcaaagaatccatcgtctcacgcgaaatgacgcgccgctacatgaccgacatgataacctcgccgacaccgacgtcgtaatcgtcggagccggctcggcggggctcacctgtgcgtacgagatcagcaagaaccccgccgtgagcgtcgccatagtcgcgcagtccgtgagcaacagcggcggc

SEQ ID NO: 157426 - DNA, 130 bp, Glycine max
ctttttgtcatcgtctatgtgcttttcatcattcacggttacttcctatacctcagcaagaaatggtacaagaaaacgacatggatgtatctcgccgttcccatgatactatacggatgcgaaaggctat

SEQ ID NO: 157427 - DNA, 221 bp, Glycine max
ctttcacttcttctctctcaccctccaactatgagttactacaaccagcagcagccacccgtcggtgttcctcctccccaaggttacccaccgccggaatcttacggaaaggacgcgtaccctccgccaggtaccctccacagagaggataccctccgcaggcgtatccagcacaggggtaccctccaccctacgcgcctcctcagtacgctcagcctccg

SEQ ID NO: 157428 - DNA, 283 bp, Glycine max
tcggctcgaggaaggcccttatgagggaacccagaagtgttgcctctgttatgcgcttccagttccatgattgctttgtcaacgggtgtgatggttctatgttgcttgatgatacaccaacgatgctgggggagaaattggccctctcaaatataaattcgctgagatcgtatgaagttgtcgatcaagtgaaggaagcgctcgagaaggactgccccggagtggtttcctgtgctgacatcataattatggcatctagagatgctgtctctctgacaggtgg

SEQ ID NO: 157429 - DNA, 273 bp, Glycine max
cttttattcttagctttcctttccagttcatacttcatcctagtattactttccctctttgcattccaaatggccactgttgaggttgcacagcaaacaccaacaactgtgacagagaatgaaacaacgactgaggtaaccaagattgaggaaactaccccagaacagccagccaccgaggttactgccccagaaacagtcaacgaagaagcaaaagaggaagcagcagttgagactaatgaggcaacagaagttacagaggaagggaaggct

SEQ ID NO: 157430 - DNA, 275 bp, Glycine max
cggctcgagggctcgagtgatgtgcagcatcagtgagaaagccaaaaggaagcgccaatctgcattccgacggagtgcgcaaacgcagctggggacgctacgtctctgagataaggctcccgggccagaaaacacgcatatggctcggctccttcggctcgcctgagatggcggctcgcgcttatgactccgctgctttcttcctcaaaggaacatctgccactcttaatttccccgacctcgtacactccctgcctcgacctctctcatcttcc

SEQ ID NO: 157431 - DNA, 271 bp, Glycine max
tgaggataaggagatgtcttcctctgtcaccaatggcgatgattccctcactggtcacatcatatctacaactattggaggcaaaaatggggaacccaaacagactattagttacatggcagaacgggttgtaggaactggatcatttggaattgttttccaggcaaaatgcttggaaactggggaagcagtggctattaaaaaggttttacaggacagaagatacaagaatcgcgaactacagttaatgcgtgttttggatcatccaaat

SEQ ID NO: 157432 - DNA, 265 bp, Glycine max
ctttcgaaagattttatccaattgaaattttaaaaatgactgggataaacttaagaattcaattattgaaattgaataagtaaacaatttaattggattggtcgaatggtatcaaaaaaatggagtactaactcccatttcttatttattattgaattaaccgatcaacttgctttgttatcgaacatttctttttgatttcaaaaattttccggaaaaaatttgaatctatttttatatgcgaatcaatcctactacttctggt

SEQ ID NO: 157433 - DNA, 257 bp, Glycine max
cttcaccctttgcctctgaaagaaatgggtagtcttgaagcggcaagaacaacagtaggattggcagcaagagacccttcagggattctctccccatacacctacaatctaagaaacacaggccctgatgatgtttacattaaagttcactactgtggaatttgccattctgatctccaccagattaaaaatgatcttggcatgtccaactatcccatggtcccaggacatgaagtggttggtgaggtactggaggt

SEQ ID NO: 157434 - DNA, 273 bp, Glycine max
caaggtggagcttctctacaccaagttcgtgtcgcttgtcaaatcggatcccgtgattcacaccttgctcccgctttcgccaaagggagagatttgtgatatcaatggtgtgtgtgttgatgctgctgaggatgagttcttcaggttgactaccaaggaaggaaagttgactgtggagagggatgttgtgaggactaaaaccatcgatttttcgccaattttgcagttcgaacaagacccggttcagatccttgatgcactgttgccactgta

SEQ ID NO: 157435 - DNA, 270 bp, Glycine max
caggctctgcctgttgctttgatgattcatgataactcgtcggatcgcacggcctttgtgccggcgacgcatcattcaaatttctgccctatcaactttcgatggtaggatagtggcctaccatggtggtgacgggtgacggagaattagggttcgattccggagagggagcctgagaaacggctaccacatccaaggaaggcagcaggcgcgcaaattacccaatcctgacacggggaggtagtgacaataaataacaataccgggctc

SEQ ID NO: 157436 - DNA, 272 bp, Glycine max
ctcactaccaagagtgatgtgtatagttttggagtagttcttttggaaatgatatcgggaagacgagctatagacaagaatcagccaactggagaacataaccttgttgattgggccaagccttacctatctaataaacgaagagttttccgtgtgatagatccccgtctcgaaggtcaatatttacagagtcgagctcaagccgcagctgcgcttgctattcaatgtctctccatagaggctaggtgcaggccgaatatggatgaggtggt

SEQ ID NO: 157437 - DNA, 271 bp, Glycine max
atcaaagcagtgctcttgaacttacttgtaggagctacaggtacaactgaagtcacaacaatctgggccatgactgaactaataaaaaatccaagcattatgaagaaagtgcaagaagaaattagaggcttaagtggtaagaaagatttcttggatgaagatgatattcaaaagttttcctacttaagggcagtgataaaagagacacttagattgcacttaccagcaccactacttataccaagagaaacaaataaaaaatgcatgttag

SEQ ID NO: 157438 - DNA, 264 bp, Glycine max
aacacaattaacacaagtacacaacacaacacagagaatgatgatgaagtctgctatgtgtgcattggtgcttgtggcactggttgtggttgaagtggggcccatggctgaggctgcggtgacttgcaacccaacacagttgactcgttgtcttccggcaattaattcaggttctgcaccttcgagtgcttgttgccagaagctgaaggagcaaaagccatgcttctgtggctacctcaaaaaccctagcttgaagcagtatgt

SEQ ID NO: 157439 - DNA, 268 bp, Glycine max
ccggtctgtttcaatcgtgcctcctgcatactatgctcaccttgctgcattccgcgcaaggttttacatggaaccagagacgtcggatagtggctctatgacaagtggtgctgttgcaggccgtgggatgggcggtgtagggcgtacacgcaagtacctggtgccaatgctgctgtgagaccattgcctgcactcaaggagaacgtcaagagagttatgttttattgttaagacatgaatgccaaagattactgttaaaaccttgttt

SEQ ID NO: 157440 - DNA, 212 bp, Glycine max
aggacattctccaaaagtcagggagcattggaagctggtgatttgactcattgggacattaccttttggagtgagaggctacgtgagtcaaaatatgatattaatgaggaagaactgcgtccctttttctctctgccaaaggttatggatggactctttaaccttgcaaaatcactttttggcattgaaattgagccagctgatggtctagc

SEQ ID NO: 157441 - DNA, 270 bp, Glycine max
tgcactatttttgcgtatggacagaccgggacagggaagacatacaccatggaaggaggtgcaagaaagaagaatggcgaatttccgagtgatgctggtgtcatcccaagagctgtgaagcagatttttgatatattggaagctcagaatgctgagtataacatgaaagtaacgtttctagagctttacaatgaggaaataacagatcttttggcccctgaggagacttcaaaatttatagatgataagtctaggaaacctattgctcta

SEQ ID NO: 157442 - DNA, 271 bp, Glycine max
ctgaactagcctactatgctcatggacagaaactgttggttggttacaaaaagggatatggaattttttgtacctgctgcaatgagcaggtcagtgcctctcagtttgaagctcatgctggctgggcatctcgacgcaaaccttacctgcacatatacacatctaatggaatctctctccatgagttgtccatctctttatcaaaagatcataggaggttttccaacaatgacaatgatgatctctgcatcatatgtgaagatggagggga

SEQ ID NO: 157443 - DNA, 264 bp, Glycine max
atggcttcagagaagaaactttcgaacccaatgagggagataaaagtgcagaagctcgtcctcaatatctctgttggcgagagtggagatcgtctcaccagagccgccaaggtgttggaacaacttagtggccaaaccccagtgttttccaaagcaaggtacactgttcgttcctttgggattagaagaaatgagaagattgcatgctatgtcactgtcagaggtgacaaggcaatgcaacttttggagagtggtttgaaggtg

SEQ ID NO: 157444 - DNA, 267 bp, Glycine max
tttggtccatacttttgtcagcctgtaattgctggattaggggatgaagacaaaccattcatctgcacaatggattgtcttggggcaaaggagcttgcaaaagattttgttgtttctgggactgcatctgagtctctgtatggtgcttgtgaggcgatgtttaagcctgacatggaaccagaggaattgtttgagaccatctcccaagcactgctatcatctgtagatcgtgattgtttgagtggctggggaggacatgtctatgtt

SEQ ID NO: 157445 - DNA, 268 bp, Glycine max
gatggccttatccgtctcatggaaggatcaaacaccggaccaatcaaccttggaaacccaggtgaatttacaatgactgaacttgctgagacagttaaagagcttattaatccaggtgtggagatcaagatggtggagaacactcctgatgacccacgacaaagaaaaccagacatcacaaaagcaaaggaattgttgggctgggagccaaaggtcaagttgcgtgatggtcttcctcgtatggaagaggatttccgtctgaggcttg

SEQ ID NO: 157446 - DNA, 266 bp, Glycine max
aggaaatctcgagacctttgacttcgcacagatttgtgtcccctgatatggatgacgctgaagatgaggctggatcatatttcatcagcgctgtttgctggaagagtgatcgccccactattctaacagcaaatagtcaaggcaccatcaaagtgctggtgcttgcagcttgaacacgagaaaaaaaatgaaatagaatgtggaattggtattatcttttcccatatgctatgattgattgtatcatttattaaattgtacatagt

SEQ ID NO: 157447 - DNA, 260 bp, Glycine max
gctgaaactcctcttcgagttagatctcagcaacaaccgtttcgccgggaagttccccgacgtggtgctgcttttgccgcagctcaagtttctagatctgagattcaacgaattcgaaggcacggttccgaaggagctcttcgacaaggacctggacgcgattttcatcaatgacaaccgcttcgtcttcgacttgccggaaaatttcggaaactcgccggtgtcggtgatcgtgctggcgaacaaccgcttccacggat

SEQ ID NO: 157448 - DNA, 267 bp, Glycine max
ggtttcggagagtgatagctttgatccgtatcaggagtttttgaaggcattaataggctttatagatgttgctgggctttattttgccttgacccagttgactcacaggaacatctctcagaatcataaatttcaagctgttggacttggctgggcgtttgctgattctgtactgcatcgattggctcctctttgggttggtgccagaggattagaatttacttgggattacattcttcagggccttgaagctaatgcaaatttggt

SEQ ID NO: 157449 - DNA, 259 bp, Glycine max
gctttgctttttttaatttttaattttaatttttaatttttaatttctgtttctcttcttgcaggtgttggaacaacttagtggccaaaccccagtgttttccaaagcaaggtacactgttcgttcctttgggattagaagaaatgagaagattgcatgctatgtcactgtcagaggtgacaaggcaatgcaacttttggagagtggtttgaaggtgaaggaatatgaacttctcagaaggaacttcagtgatactggt

SEQ ID NO: 157450 - DNA, 263 bp, Glycine max
ggattttctttgggaagaagttgagtctgatcgactcaacctcaaccttctcctggttcctgcattgcgttgctctctctataccttctaattcccaaatttctagggtttggtacagagagaaaaaggaacataagatgtctcagaacgggaagctgatgccaaatctagaccagcatagcaccaagcttctcaatctcactgttcttcaacgaatcgacccttttgtcgaggaaatctcatcaccgctgcgcatgtcacct

SEQ ID NO: 157451 - DNA, 228 bp, Glycine max
atctgcacaagaaagatgaggattttgagaaaaagcttttccacaacctctttgtgtatgtcaagctagagtccatgatggaagggtgctcagattcagatgactacagcttatatgatgagcagactgagaggtcaacacaaggcctattgaacaataacacaaacacagctgcattgaatatggatccaacagtttcatcagtggattcaattgtatcagtctcat

SEQ ID NO: 157452 - DNA, 264 bp, Glycine max
gttctccaagcggaactcgccggtggcgcacgcggtcggattttgggactaccactccttcatcgccgccgccgcgctttttgagccggaagggttcggcaccaccgggaacaagacgatgcagatgatggagatcgccgccttcttcggacacgtcggcagcaagacctcttgtggttatggagtggccactggaggacctttggcctggggtctttgttacaatcatgaaatgagtcctatgtagtcatactgtgatgacta

SEQ ID NO: 157453 - DNA, 265 bp, Glycine max
cgcaaacttgctgtgaatctcattcccttccctcgtctgcactttttcatggtgggttttgccccactcacatctcgtggttcccaacagtacagagctcttactgtacccgaattgacccaacaaatgtgggatgctaagaacatgatgtgtgcagctgatcctcgccatggtcgatacttgacagcttctgcgatgttccgtggtaagatgagcacaaaggaggttgacgaacagatgatcaatgttcagaacaagaactcat

SEQ ID NO: 157454 - DNA, 266 bp, Glycine max
ctcaccttgaagattcaagtgcatggaattcgagtatacctcaccctaagctcaatgaaagaattctgtcttctctgtcacggagaactgttgctgctcacccctggcacgatttagagattgggccaggagctccagctgttttcaactgtgtggttgaaattggcaaaggcagtaaggttaagtatgagctggacaagacaagtggacttataaaggttgatcgtattctttactcatcagttgtctacccacacaactatggt

SEQ ID NO: 157455 - DNA, 266 bp, Glycine max
gatgtagccattcaagaaagaaatctggccatttccgagaaaaaagcagcatatgctgagcgcgatatggcattcatgcagcgagatgctgcaattgctgaacgtaataatgcaattttggaacgagataatgcaattgcaactcttcagtatcgcgaaacctctttaagtagtggcagtatgccatcatgccctccaggatgccaaatttcacgtggtgtgaagcatatacatcatccccagcaacaggtacaccatatacctaa

SEQ ID NO: 157456 - DNA, 268 bp, Glycine max
tagaaaagaaaagaaaggaaaagaaaagaaaagaaaaagaagggagtgcaggtaaagagaagcacacacttcacacacaaaccaaaaatcaggttcaaacacagatctgggagaagaagaagaagatggggcaggaccagaaccagagatcgctgatctatgcgttcgtgtctcgcggcacagtgattctcgccgagtacaccgaattcagcggcaactttaacacaatcgcgttccagtgcctccagaagctccctgcctccaacaa

SEQ ID NO: 157457 - DNA, 257 bp, Glycine max
ctcgagccgaatcggctcgagggcggtcatcgtgtcggcggcgacggcggagacgccgaagcagaagggcgaatcgaaagggttcgtggaagagatgaggttcgtggcgatgaggctgcacacgagggaccaggccagggagggcgagaaggaggtcaagcagcccgaggagaaagccgttaccaagtgggacccatccgtcgaagggtacctgaaatttcttgtggacagtaagctcgtttatgacacgctggaga

SEQ ID NO: 157458 - DNA, 260 bp, Glycine max
gatgattctagtccaaaggatcatgtttttgttgatgaattcagctgcataggctgcaaaaactgtgccaatgtagcttgtgatgtgtttggaatagaggaagagtttggaagagccagagtgtacagccaatgcgggaagcctgaattggttcaacaggctattgatagttgccctgttgactgcattcattggacatcagctgcacaactatcattgcttgaagacgaaatgcgccgcgtagaaagagtcaatgttgc

SEQ ID NO: 157459 - DNA, 250 bp, Glycine max
  unsure (1)..(250): unsure at all n locations
tggaaacattgttgcctctttgttggcacataaattaggagtcactcagtgtaccattgctcatgcacttgagaagaccaaataccccgaatccgacatttactggaaaaaattggaagagagataccacttctcttgccaattcacagctgatctatttgccatgaaccacacagatttcatcacaancagtaccttccaggagattgctggactgcaggacactgttggacagtatgagtctcacaca

SEQ ID NO: 157460 - DNA, 218 bp, Glycine max
gttgtttggagcgatccgagaaaaactctgtaaacatgttggtttaccaggacctccttacaggtgatgagcttctctctgactccttccgttacaaggaaattgagaatggaatgctgtgggaagttgaggggaagtgggttgttaaaggagcagttgatgtagacattggtgcaaacccttctgctgagggtggaggagaagttgagggagttgat

SEQ ID NO: 157461 - DNA, 261 bp, Glycine max
atgaaatagccaagaggttaccaagggctcagccagctcagaacccagcaggaatggttcttgttgacagacccgccgaaggaactagggctgcatcatgttgttcataagtatttgagctgtatttgcaccccccaatcctttttaattaatcatgttttctttgggttgtatgtactacacactttgatgtcactgttatgtggagctccaacaagtggtatgggctgcaatttacaaaacacaacaacttgatggtgc

SEQ ID NO: 157462 - DNA, 283 bp, Glycine max
cggctacgcgcttcgagggctatttgagaaacgccgggcacgcaagtttgtcatttatgtgcaaaactacaacgagagcgatcccaagacccacgaggggatggacttgacaagagtgagctactaaagagttgatagcaaaatacggccttgatgataacactatagacttcattggtcatgctttggcgcttcatagcgatgatcgctacttggctgagccagcactggacaccgtgaagagaatgaagttatatgcagagtctcttgcacgctttcaagg

SEQ ID NO: 157463 - DNA, 274 bp, Glycine max
actcggctcgagcaaattctctgtgttgtgttgtgtacttgtgttaattgtgttgttgttgtaggaaatttaagtgaagagagaatgatgatgaagtctgctatgtgtgcattggtgcttgtggcactggttgtggttgaagtggggcccatggctgaggctgcggtgacttgcaacccaacacagttgactccttgtcttccggcaattaattcaggttctgcaccttcgagtgcttgttgccagaagctgaaggagcaaaagccatgcttct

SEQ ID NO: 157464 - DNA, 263 bp, Glycine max
aaccataccgtaccagcagaggaaagagagaaaatttcagaacaaaaaagaagcagaggaaaagagagatagagagagaagaaaagctgtgaagagaagagtctgaaatctgaatcataaataattggtttttgagatgaagaactgcgagttgtgcaagcttccggctcggactttctgcgagtcggaccaggctagcttatgctgggactgcgacgccaaggttcatggagccaacttcctcgtggaaagacacacgcgca

SEQ ID NO: 157465 - DNA, 261 bp, Glycine max
gagatgctcttgttgcatggaccaacccattctactagaggagatagcaagtacctgagtcaaatgctaagcttaaagcttaagcctatagatgaagacaatcctattaagaggtggtacaaaagcaccaagtacttcctgcaggataattggcagagaacttgggtattgctactgtggattggcgtgatgttaggtctatttgcctacaaatttgtgcagtatagaagacaacctgcatatgaggtgatgggccattgt

SEQ ID NO: 157466 - DNA, 262 bp, Glycine max
aaaaaattttactccggatgtgccaaatagcatttcaggaagaccaagacaggaagatgctcaggaatttctgagctttgtaatggatcaaatgcatgatgaattactgaagcttgaaggacagtcttcaagtcttaatggtagcaaatcttctctggtttcttcggtggaagatgatgaatgggaaacagtggggccgaagaataaatctgctgttacaaggactcaaagctttctcccatcagaattaagtggtattttt

SEQ ID NO: 157467 - DNA, 260 bp, Glycine max
tgagagtgttggtggctggtggaggaattggtggccttgtgttggctctggctgcaaagcatagagggtatgaagtgaaggtgtttgagaaggatttgagtgctgttagaggagaaggtaggcaccgtggcccaattcaactattgagtggtgctcttgctgtgttggaaaccatcgatcagagtgttgcaaggcagataatggaggctggttgtgttactgccaataggactaatggccttgctgatggtctatctggg

SEQ ID NO: 157468 - DNA, 243 bp, Glycine max
  unsure (1)..(243): unsure at all n locations
gtggtaccgttgggagcccagtgtctgctaacaaaccaaacgtgagagataatcaagtaaaaggggtcgccaccactacaagtggttcctcacgtgagccatctgatgaggatgatgaagcaggtccttgtgaacaaagcacaaacgctattgatatgaagcgccttagaaggaaggtttctaatagagagtctgcaaggaggtccaggagaaganaacaagcccatttggctgacctggagt

SEQ ID NO: 157469 - DNA, 235 bp, Glycine max
aaagaaggcgtcttcataaacgcctttcttctccgtttccgtttcctcgttcgaattcgctttttgatctgcgaaaatgagagagtgcatctcgatccacattggtcaggctggtatccaggtcggaaatgcttgctgggagctctactgcctcgagcacggcatcgggcccgatgggcaaatgccaagtgacaagacagttggcggtggtgatgatgctttcaatactttcttc

SEQ ID NO: 157470 - DNA, 230 bp, Glycine max
gtcaatggcaacaacatcccctcacaccgccctcttccaaaaccgcaccaaccctttcactctctcctccttcaaacccacatccatcaaatgcgccacccaactccatacccaagccccgcccctcacccactcccaagatcgcgtcttcaacttcgccgccggtcccgccaccctcccggaaaacgtcctcctccgtgcccaatccgagctctacaactggcgcggat

SEQ ID NO: 157471 - DNA, 259 bp, Glycine max
  unsure (1)..(259): unsure at all n locations
gatgtccgtcagagatatgctcatgtgaaggactacatccacgttactttaattgaggccaatgagatattgtcttcctttgatgtccgactcaggcagtatgccaccaatcaattgacaaagtcaggagttcgacttgtcnctggcattgtgaaagatgttgaagagaagaagattatcctaaatgatggtactgaggttccgtatgggttgctggtatggtctactggagttggtccatctgctattattcaatctt

SEQ ID NO: 157472 - DNA, 260 bp, Glycine max
gcaacctcagctaatttcttgcgaaaatatggacttacaggggaattcaaactcaacatagagtgcaaccatgccaccctctctggccacagttgtcatcatgagctcgaaactgcaaggatcaatggattgctgggtaatattgatgcaaacactggtgatcctcaagttggttgggacactgatcagtttcttgtagatattcaagaggcgacactgattatgctcagtgtgatcagaaatggaggacttgcacccgg

SEQ ID NO: 157473 - DNA, 253 bp, Glycine max
  unsure (1)..(253): unsure at all n locations
gctttgtgaagaagcattgatagctactgatccaacaattacatcccttggtccaaacctagaggcggcagtttacaagacaggatctgtatgtgcggccttccttgctaacgtagacaccaaatctgatgtaacagtanactttagtggcaattcatatcacttgcctgcatggtctgtgagcatcttaccagactgcaagaatgtagtgcttaatactgcaaagattaattctgcatctgcaatttcaagc

SEQ ID NO: 157474 - DNA, 260 bp, Glycine max
agaaaaatgagagaaatcatcagcattcacataggtcaggccgggatccaggtcggaaactcctgctgggaactctactgcctcgaacatggcatccagcccgacggcatgatgccttctgactccaccttcggtgtagcccacgacgccttcaacaccttcttcagcgaaaccggatctggcaagcacgtcccccgtgctgtcttcgtcgacctcgaacccaccgtcatcgacgaggtccgctgcggcacctaccgtca

SEQ ID NO: 157475 - DNA, 259 bp, Glycine max
agataagtggaagaggccagtctcaaacagtatttgtaaggggtttcgatacatcccttggagaagatgagatacgagggagtttgcaagaacattttggatcttgtggggacattaccagggtgtcgattcctaaagattatgagtctggtgctgtcaaggggtttgcttacgtagacttcagtgacgttgatagcatgggcaaagctctagaactccatgaaactgaacttggaggttataccttaacagtggatga

SEQ ID NO: 157476 - DNA, 257 bp, Glycine max
gaatttgtggccactttcttgtttctttatgtcactgttttgactgtgatgggtgttgcaaaatctcccagcaagtgctccactgttggtgtccaaggcattgcttggtcatttggtggaatgatctttgcccttgtctattgtactgctggtatctcagggggtcacattaacccagctgtgacatttgggctgtttttggcacgcaagttatctctcactaggacagtgttctacatgatcatgcagtgcttggg

SEQ ID NO: 157477 - DNA, 255 bp, Glycine max
caaaaacattatttccctccttggattctgctttgaagatggcaatcttcttttggtctatgatttcttatcaagaggaagccttgaagagaatctccatggtaataagaaaaatccacttgtgtttggttggactgagagatacaaggtggcaatgggtgttgctgaggctttggagtatctgcataataatgaaggccaatctgtgatccatcgcgatgtaaaatcatcaaatgtgttgctatctgaggattt

SEQ ID NO: 157478 - DNA, 256 bp, Glycine max
gcatctctggaggggctatctccacatgtaccactatataaagtaacagaagggaatgaaccttgctttttcacaacatacttttcatgggatcatgcaaaagctatggttatggggaactcatttcagaaaaaggtgtcactactctttggacttggccatgctgtggaggaaaagttgaatgggtcaagtccagggggaccaagacaaagagcagaagctttggctgccttatctaatgcatttggttcatctt

SEQ ID NO: 157479 - DNA, 211 bp, Glycine max
ctggtggcatagatccggttgctctagacttcaaaagcatgggaaaaggtcaggcttgggtgaatggtcaacatataggaagatactggactcgggtttccccaaaaagtggatgtcaacaagtctgtgattatcgtggagcatataattccgacaagtgttcaacaaattgtggaaaaccaacccaaaccttgtacaatgtcccacgatc

SEQ ID NO: 157480 - DNA, 218 bp, Glycine max
ccagacttttcaaatttgcctaatctggaaaagctagtgctgatagattgtccaaggttgtttgaggtctcccataccgttggacatctcaataaaattcttatgataaatttgaaagattgtattagccttcatagccttccaagaagcatctacaaattgaaatctcttaaaacactcattctctctggatgtttgaagattgacaagttggaaga

SEQ ID NO: 157481 - DNA, 256 bp, Glycine max
ggacaatagttcaaggacttcccattgatgagttctcaaggacccaatctctaatatggtcacaagcagcactagcagctgatagtgcacttgaaagctttctagctttgataattgcagcaccacgttgttgaacagtagtaatgaattcaccattcaaccaggcatcatcagctataagctcgcggacgggcttctccccaacagttgcatggttaacatcaggatattgggttgatgagtgattgccccagat

SEQ ID NO: 157482 - DNA, 269 bp, Glycine max
gtctaatcttcgtgctgatatgacccttgctggttttgatggcttacgcatccagcgatcggaccaaacatttttgttccttggagagggctatgttgcagaggaaggtaatttaactctgccacctggttctttgattgctctttctcataaggagaaggaaatcacaaatgctttggaaggagctggtacacaaccaacagagtctgaagttgcttatgaagtttccttgatgtctcagacaaatatgtatagaccaggtattgatg

SEQ ID NO: 157483 - DNA, 264 bp, Glycine max
ggtgaacatccagaccatgtggttgtcattaagtacgtgccttatgtaggggacagcaagagggccatggatgagtacactctctgagatattcatgggtggaaagaacacaattgtgttgcacaacacatgtgaggactcactgttagctgctcctattatcttggacttggtccttcttgctgagctcagcactcgaatcgagtttaaagctgaaaatgagggaaaattccactcattccacccagttgcgaccatccttag

SEQ ID NO: 157484 - DNA, 261 bp, Glycine max
ccttttcgcctggtttagatgcagaagctcttagaaaagctttccaaggatgggggactgatgagaagaccgttatagcaatattgggtcacagaaatgttcatcagaggcaacaaatcagaaagatttatgaggaaatttaccaagaggacctcatcaaacgcctagagtctgagctctctggtgactttgagagagctgtgtaccgttggatgctggaacctgcagatcgtgatgctgttttggccaatgttgccatca

SEQ ID NO: 157485 - DNA, 254 bp, Glycine max
cactaatgaaaatcttccaccaaatgtaattaagcaacttgccaaggagttgaaaagtcttgatgaatcccctcctgagggcattaaggttgtggtaaatgatgatgatttttcgacaatattttctgacattgaaggcccagctggaactccttatgagaatggagttttccgaatgaagctgttgctgtctcatgatttcccgcattctccacctaaaggttttttcttgactaagattttccatccaaaca

SEQ ID NO: 157486 - DNA, 255 bp, Glycine max
attccagccacacgcttcagaagacatggcctcattgggtgggttacaaaatgtgagcggcatcaattttcttatcaaagagggtccaaaagtcaatgcaaagttcgagctgaagccgccaccatatccactgaatggtttggagccggtgatgagccagcagacacttgagtttcactgggggaagcaccacaagacttatgtggaaaatctgaaaaaacaagttgttgggacagagcttgatgggaagtcact

SEQ ID NO: 157487 - DNA, 256 bp, Glycine max
cggttttgaatcttttgagcgaaaatgcagtcgagtcctttgcttctggaggaacccataaggatggcctccatcctcgagccatccaagcctagtttctttccagcgatgacaaagattgttggcacacttggcccaaagtcacgatcggttgacgtgatttcccaatgtcttgaggcaggaatgtctgtggcaaggttcgatttttcatggggtgatcctgaataccaccaagagacgttggaaaatttaatgg

SEQ ID NO: 157488 - DNA, 259 bp, Glycine max
agctgttacctcagtatcctataatccatcggcacccaatctccttgccactggatccatggacaaaacggtaaaactttgggatttgtcgaacaaccaaccctcttgtgtagcatctaaatctccgagagcaggggttatctttagaatttctttctcagaggacaaccccttcttgttggctataggaggctcaaagggaaaattgcaagtttgggataccttatctgatgctggcatttctcgaagatatgggaat

SEQ ID NO: 157489 - DNA, 254 bp, Glycine max
taattgcaagaatggcacttcgttgcttggtgatgtccctttctgttctcttcactcttggtcttgcgagagaaagccatgccagagacgaagatttttggcatgctgtttggccaaacactcccattccaagttcattgcgagatcttctaaagcctggccctgcaagtgttgaaatcgatgatcaccctatgacaattgaagaaacacagtacccgaaaaccttcttctatgaagaagaccttcatccaggc

SEQ ID NO: 157490 - DNA, 250 bp, Glycine max
ctcgagccgaatcggctcgagatcctgaactatatgaagacatcggtatcaagcctcctaagggggtcattttatatggacgaacctggtactgggaagaccttgcttgcgaaggccgtggcaaactcaacatcagcaacattcttgcgcgttgttggtagtgaattgataacaaagtacttgggagatggcccaaaacttgtgagagaactttcagagttgccgatgatctttctccttctattgtatt

SEQ ID NO: 157491 - DNA, 255 bp, Glycine max
atcaactcttcaaaagggagaagaaaaggaaagaaaactctcaaaaaactattatagcaatggcagaacaaaaccaaaaccaaacaactgaagctggaaggcaccaagaggttggtcacaagagccttctccagagtgatgctctttaccagtatattctggagacaagtgtctacccaagagaacctgaatccatgaaagaactgagagagttgacagcaaaacacccatggaacatcatgacaacctctgcag

SEQ ID NO: 157492 - DNA, 251 bp, Glycine max
gtcaattgagagggagattaactcagtcaatgacaaccctttgattgatgtgtcaaggaacaaggcacttcatggtggtaacttccaaggaactcctattggagtctccatggataatacacgtttggctcttgcttcaattggtaaactcatgtttgctcaattctctgagcttgtcaatgattattacaacaatggtttgccttcaaatctcactgccagcagaaaccccagcttggattatggattca

SEQ ID NO: 157493 - DNA, 245 bp, Glycine max
cggctcgagcccaggcatattgtgctgtccttatcattgactccaccactggtggtttttaatctggtatttcttaggatggacagactcgtgagcatgctctacatgctttcacccttggtgtgaagcagatgatctgctgctgtaacaagctggatgccacttccccgagttactctagggctatgtatgttgaaactgtgactgaagtctcttcctacgggaatagggctggttacatccca

SEQ ID NO: 157494 - DNA, 261 bp, Glycine max
ttagaattgtagagatgctgttccgctgcaatattctaaggcttgttggtgctgtagctaattctcactatccaccaaataaagttttgatatgggatgatcatcagagcaggtgcattggtgaatttacatttaggtctgatgtgcgtggagtgaaattaagacgtgatcgaattgtagttgttcttgagcacaagatatatgtttataacttcacagatttgaagcttcttcatcagattgcgactctggcaaatccta

SEQ ID NO: 157495 - DNA, 248 bp, Glycine max
agtgttcattcaatcatcactgatctaagatatgtctacatctgataagtcagaagtggtggaaaggggtgctaaggatgatgaaaagccaaaggaagaacatgagaagggtggatttcttgatacagtgaagtatttcattcaagacattggtgagaagattgaaggagcagttgggtttgggaagccaactgcagatgtcactgggatacacattccatcaattaatcttgagaaggcagagctag

SEQ ID NO: 157496 - DNA, 262 bp, Glycine max
tctctctgtgtatttccctacctctcccttcaagatgcagatcttcgtcaagaccctcaccggcaagaccatcacccttgaggtggaaagctctgacaccatcgacaacgtcaaggccaagatccaggacaaggaaggaatccccccggaccagcaacgtctcattttcgccggaaagcaacttgaggacggccgtacccttgctgactacaacattcagaaggagagtactcttcacctcgtcctccgtctccgtggtggc

SEQ ID NO: 157497 - DNA, 259 bp, Glycine max
ggaatgggtcccaaacccaaaggctccgtactacacaaacaaaacatgctgggctattcatgagcaccaaaactgcatgaagtatggtagaacagactctgagttcatgaagtggaagtggaagccaaatggatgtgaccttcctgtgttcaaccccttccagtttcttgagataatgaggggaaaatccatggcatttgttggagactcagttggcagaaatcaaatgcagtccatgatttgcctcttatcaagggtg

SEQ ID NO: 157498 - DNA, 259 bp, Glycine max
cttcaagatgcagatcttcgtcaagaccctcaccggcaagaccatcacccttgaggtggaaagctctgacaccatcgacaacgtcaaggccaagatccaggacaaggaaggaatccccccggaccagcaacgtctcattttcgccggaaagcaacttgaggacggccgtacccttgctgactacaacattcagaaggagagtactcttcacctcgtcctccgtctccgtggtggcatgcagatcttcgttaagacactc

SEQ ID NO: 157499 - DNA, 255 bp, Glycine max
tctcgaaccgaatcggctcgagattccaatatattccattctctatgtgtatttccctacctctcccttcaagatgcagatgctcgtcaagaccctcaccggcaagaccatcacccttgaggtggaaagctctgacaccatcgacaacgtcaaggccaagatccaggacaaggaaggaatccccccggaccagcaacgtctcattttcgccggaaagcaacttgaggacggccgtacccttgctgactacaacat

SEQ ID NO: 157500 - DNA, 251 bp, Glycine max
gccgaaggaatatggaggtttctattacagatgaaattgcaggcactatggagctcaatatagataggtcgggtgagctcaaagcatttgatgacacaaaagctggtttgaaaggccttgttgatgaaggggtcgcaaagatcccaagattatttcatcatccacctgatgaatttgtcatggcttcaaagttaggcaacacagaatacactatacctgttatagaccttgcagaagttggcaaagatcca

SEQ ID NO: 157501 - DNA, 252 bp, Glycine max
tatctccatttccatttcctctctctcagtttccaagaatcttaagctatgggaaagtcttacccaaccgtgagcgctgattaccagaaggccgttgagaaggcgaagaagaagctcagaggcttcatcgctgagaagagatgcgctcctctaatgctccgtttggcatggcactctgctggaacttacgacgtgagctcgaagaccggtggtcccttcggaaccataaagcacccctccgaactcgctcac

SEQ ID NO: 157502 - DNA, 266 bp, Glycine max
tcagctcgaggtgtgaaactgtgaaagagagttatggcatgaggtggtggagctccagtacctaaggatgatgagccacaacctcatcccccgaaggatcagttaccgaatgtttcttactgcattacgagtcctcctccatggcctgaggccatacttcttggttttcaacattatcttgtgatgctcggtacaactgtgctaattcccactgctcttgttccccagatgggaggtgtcaatgaggagaaggcacaagttatcca

SEQ ID NO: 157503 - DNA, 256 bp, Glycine max
gcaacaattgtttctgttgataggctagtggggccaaaggctcctggggaaacttgtcatattgtgattgatcacggtggaaatgttccctactgggaaggacagagttatggtgttattccaccaggtgaaaatcctaagaaacctggggctcctcataatgttcgactatattcaattgcttccacaaggtatggggacttttttgatggaaaaactgccagcttgtgtgtgcgtcgtgctgtttattatgatc

SEQ ID NO: 157504 - DNA, 248 bp, Glycine max
gcttctcagcactgtcactgagtcgttgtcttgcggaggataatggacttgttatgaatctctacaaggaatcatgccttcaggctgaagacatcatcaaagaacaagtcaagcttctctacaagcgccacaagaacactgctttctcctggctcagaaaaatatccatgactgtgctgttcagagttgtgatgcttcactgttgctggactccacaagaaggagcttgtatgagaaggaaacagata

SEQ ID NO: 157505 - DNA, 256 bp, Glycine max
ctcgagccggcccaggatctcttcctctggttccaggtcatgagcatccgcgtcgacgtcaccagcaccggcctcatctacttcgacgtcggcgccgcctccaagcgcttccccctctccctcttcgaaacgccgcccgaatgcgtcgccgttagctcccaacaacaagacgccccttcccaccaccagggtcaggttcaatctggaaggattcggcataagctcaatcagggaacctctggaagagatgttctat

SEQ ID NO: 157506 - DNA, 251 bp, Glycine max
ctctgctctcctcttgcttttgatagagaagaaagaagcgagaagatgtcagacgctgtctgcagcgactgcaagaggcagacggaggtggtgtttgaccactctgccggcgacacggtgtgctcggagtgcggcctcgtactggagtcccactctatcgacgagacctctgagtggcgtaccttcgccaacgagtccggtgacaacgatcccaatcgtgtcggcgggccctccaaccccctcttcaccga

SEQ ID NO: 157507 - DNA, 249 bp, Glycine max
gcttattgatggttatttggcagaggttgccccagatattaatttaaaacttcccaagtttcaagcccttgccgctgctgttccagagtatgccaggcctttggatgatggtttatatcgtgccatagatatttatttgaagtctcacccatggttggtggagtcagagagagagcaactatgtaggctgatggattgccagaagctctcattagaagcatgcactcatgctgcgcagaatgacaggct

SEQ ID NO: 157508 - DNA, 250 bp, Glycine max
gttaggactgggacataccgccaactattccatcctgagcagctcattagtggaaaggaggatgcagcaaacaactttgcccgtggccactataccattggaaaggagattgttgagctttgcttggaccgcatcagaaagcttgctgacaactgcacaggtctccaaggttttctggttttcaatgctgtgggtgggggaactggctctggacttggttcccttttgctggaaccctttcagtggacta

SEQ ID NO: 157509 - DNA, 261 bp, Glycine max
ccttccaatccttccaaccaccactattggatccttccctcagactgtagaactgaggagggtacgccgtgagttcaaggctaacaagatctccgaggaagagtatgttaagtcaattaaggaggaaattcgcaaagttgttgaacttcaagaagagcttgatattgatgttcttgttcatggagaaccagagagaaatgatatggttgagtacttcggtgagcaattgtcaggctttgccttcactgttaatgggtgggt

SEQ ID NO: 157510 - DNA, 248 bp, Glycine max
cttgaattcacatttcaacaaccatagccatgtcattctccttctccaaagcacttgtccttgcctgctccttctgcttatttgcgtctttggcatatggacgcgatttctccattgtgggctattcatcggaggacttaaagtccatagctaagctcaatgaactctatgaatcatggatgtcacagcatgacaagatttacctaagcaatgaggagaagcatcttaggtacgagattttcagggat

SEQ ID NO: 157511 - DNA, 255 bp, Glycine max
atcccacctgaccagcagattcttatctttgcgggtaaacagcttgaggatggtcgaaccctcgccgactacaacatctagaaggaatccactctccattccgagtttcgcctcagtggtgccagttctatctgagcatagactttgtctggtccgcagatcaccctcgatgtcgaatcctcggacactattgataatgtctaggccaagatgcaagactcggaggctgtacctccagatgaaccgttgcttata

SEQ ID NO: 157512 - DNA, 246 bp, Glycine max
ctttaaacgccgaaggttcatccaatctccgaaggccttcatcggattgcaaccatgtcgacgagaaatgttagagagcctcaggaggaaaacgtgactctgggcccagctgttagagatggtgaacatgttttcggagtcgctcgaatctttgcactcttcaatgacaccttgattcatgtcactgatctgtctgggagggacacacttgtccgcatcactggcgggatgactgctacagctgac

SEQ ID NO: 157513 - DNA, 253 bp, Glycine max
aatcaatggccactcctacttcaacttggtcctcataacaaacgtaggaggtgctggggatgttcatggtgtggccatcaaggggtcaagaacagggtggatgccaatgtccagaaactggggtcaaaattggcaaagcaacaactatctcaatggccaaagcctctcattcaaggtcacaaccagtgatggccgtacagctgtgtcctacaatgttgcccctgctggttggtcctttggccaaacctacact

SEQ ID NO: 157514 - DNA, 260 bp, Glycine max
ttcagatctagagaggaggtcgtacattgaaaccatcgatcactccccggaatctatgatccggatttcattgctgccaaccaaggagaccgtgccactaacgtaatcaggggcatgaagtaagaacaagttctacaaatcatcaaagacattaatgagttcaaggacagcactaaggttgacaaggtggttgtcctgtggacagccaacacagagaggtacagcaacgtatttgtgggactaaacgacaccagggaaaa

SEQ ID NO: 157515 - DNA, 247 bp, Glycine max
gtgttttttcttcagtaaagaagaaacctttctctttgcgcgtgtcccgttctcttctccaatcctcctccatccccactgtgtgatctgatcctaaaccttatagccatgactaccatggagattaagctatggaatgacaagcgcgaaagagaaatgtatgacatctttggggagctttatgccattatcaaagctactgagaggcttgagaaggcctatgttagagatataatttcaccgcagg

SEQ ID NO: 157516 - DNA, 249 bp, Glycine max
gaacttctacaaggaatcatgccctcaggctgaagacatcatcacagaacaagtcaagcttctctacaagcgccacaagaacactgctttctcctggctcaggaacatcttccatgactgtgctgttcagagttgtgatgcttcactgttgctggactccacaagaaggagcttgtctgagaaggaaacagctcgaagctttgggttgagaaatttcaggtacattgagaccatcatggaagctttgga

SEQ ID NO: 157517 - DNA, 253 bp, Glycine max
tgtgagagatagtgactgcaaaaccgctccagccttgtttcttctcagatcttcttccatggaacagtacgagaaggtggagaagataggcgagggaacatacggcgtcgtttacaaggctcgcgaccgcgtcaccaatgagaccatcgctctcaagaagattcgcctcgagcaggaggacgaaggcgttcccagcaccgccattcgcgagatttctctcctcaaagagatgcagcataggaacattgttagg

SEQ ID NO: 157518 - DNA, 246 bp, Glycine max
gtgaataagaagtttagtaatcagtacaaggcaaccattggagcggattttttaaccaaagaagtgcaattcgaagataggcttttcaccttacagatttgggatacagctggccaagaaagattccaaagccttggagttgctttctatcgtggtgctgattgttgtgttcttgtatatgatgttaattcgatgaaatcatttgacaaccttaataactggagggaggatttctgattcaagcaa

SEQ ID NO: 157519 - DNA, 244 bp, Glycine max
gcagatttaagttcaaagttggaagactatgcacaaaaattcaatgatagaacagtattgaatgacaaggttgcagaacttgagaaagagttgcaacttgcacgggatgctattgctaaccagaaaggagcagagtcccagaagttggaactagaggcagcattacagaattctcttgaagaacttgaaactaagaaaaatgatatctctcttttacagaaacaagtgacagctctagagcaga

SEQ ID NO: 157520 - DNA, 247 bp, Glycine max
ctacccactcctttctctgtctccatcgtttcgcattgcacaagcactctctctttcccttaccctttttcaggtttcaacgctccaactatccatggcaaaccgctggctcagacccgaggtgtatccactgttcgctgcggttggtgctgctgttgggatctgtggattccaactggttcgtaatatctgcatcaaccctgaagtcagggtgaacaaggagggaaggaaggcaggagttttggag

SEQ ID NO: 157521 - DNA, 255 bp, Glycine max
ggcgaagagaagagaaaaattaagatggaggggaaggagcaggatgtgtcgctgggagcgaacaagttcccggagagacagccgattgggacggcggcgcagagccaagacgacggcaaggactagcaggagccggcgccggcgccactggttgacccgaaggagtttacgtcatggtccttttacagagcagggatagcagagtttgtggccattttctgtttctatacatcactgtcttaaccgtcatgggag

SEQ ID NO: 157522 - DNA, 249 bp, Glycine max
gttaaaatggaattggtggatgctgcattccctcttcttaaaggtgttgttgctacaaccgatgtggttgaggcatgcactggggtcaatattgcagtgatggttggtggattccctagaaaagaaggtatggagaggaaggatgtgatgactaagaacgtctccatttacaagtcccaggcttctgcccttgaaaagcatgctgatgccaactgcaaggctcttgttgttgctaacccagcaaacacc

SEQ ID NO: 157523 - DNA, 252 bp, Glycine max
cagcaacacgcggctggtggttgcactgtatgacgccctaaactccggcgactccaacgccgtcgtcaagatcgtcgccgccgatctcgagtggtcgttccatggtccgccctctcaccagtttttgatgcgcatgctcaccggcgactccgccgccgacaactccttccgattcgttccgcagtccatcgccgccttcggctccaccgtcatcgtcgagggctgcgactccgcccgcaacattgcctgggt

SEQ ID NO: 157524 - DNA, 246 bp, Glycine max
aacggtcataaaaaatggaagaattatgggaagcttgacaggaataccaactgataaaattgctgacaaattttggttagtcttccaagcacttggtgacattgcctttgcctatccatactccattctccttcttgagatccaggacactctagagtctcctccaccagaaaatcaaaccatgaaaaaggcctccatggttgcaatcttcattacaacattcttctacctgtgctgtggatgctt

SEQ ID NO: 157525 - DNA, 199 bp, Glycine max
agacaatcctcacccattttcttcgtagccaaacactctgaaattctcagttatgtcgtggcaagcgtatgtggatgatcacctactgtgtgaaatcgaaggtaaccacctcactcacgccgctatcatcggccaagacggaagcgtttgggctcagagcaccaacttccctcagttcaacctgaggaaataactgcca

SEQ ID NO: 157526 - DNA, 287 bp, Glycine max
catccatctctgatctcactcaccattcaccaacctgcttctctggtctcttctttcccttcccaagaagaagaagaagaagatgccttcttcagaatcatcaacaggcttctccgaaaccatttgtgtgaccggcgctggtggcttcatcgctcttggatggtcaaactcctcttggagaaaggctacactgtccgaggaaccctcagaaacccagatgatcccaagaacgggcacttaaaagagtttgaaggagcttcccagagactaactctgcataaggttga

SEQ ID NO: 157527 - DNA, 267 bp, Glycine max
tgaagctggtatttccaaggatggacagactcgtgaacatgctctgctttcattcacccttggtgtgacacagatgatttgctgctgtaacaaaatggatgctactacacccaagtattccaaggccaggtatgatgaaattgtgcaggagtctcttcctacttgaagaaagtaggatacaaccctgacaagattccgtttgttcctatctctggttttgagggagactacatgattgagaggtccaccaaccttgactggtacaag

SEQ ID NO: 157528 - DNA, 249 bp, Glycine max
gcgtggaacctctctctctctctctctctctctgcggaaaccggaatatctcagttctctgatcagatccatccgacgtcgtttcagtgataatggctccgttcagcggcgatgagacggcaccgtttttcggcttccttggagccgcagtgccctcgtcttctcctgtatgggagctgcctatggcacagcgaagagtggcgttagcgtggcttcgctgggtgtgatgagaccagagctggtgatgaa

SEQ ID NO: 157529 - DNA, 281 bp, Glycine max
tgtcagtgttgcatcgcgtctggtggtagactaagggaaaagacaaggaccacaacatctgctcaagtgttactgcgtgcggcacttccatgcctctcttcatcatcgcatcttatcttcgctgccactgcaacagggtaggaagatgcagagttctccattgttgatggttttgtggagataagtgaatgcatggcagagatgaccaagtacgtggctaatgaaccatccgatgggcttttctttatccaacagcatgctcaaaatgcaatatcaatatc

SEQ ID NO: 157530 - DNA, 278 bp, Glycine max
caatgacactggcaaccttgtgcttcttgatggtgcctccagcagtacttgggagagttttgatgattatagagacaccttgctgccttctcagactatggaaaggggtcagaagctttcttctaaacttaggaggaatgacttcaaattggcaggtttgagctctttttccaaaatgatggtaatcttgtgatgcactctataaatttgccatctgagtatgttaatgctaactactatgcaagtggaaccattgagtccaacacatcaagtgctgg

SEQ ID NO: 157531 - DNA, 279 bp, Glycine max
gcgctacgaagagatggtggagttcatggagaaggtctccgccgccgccgacaacgaggaacttaccgtggaggagaggaacctcctctccgtcgcctacaagaacgtgatcggagcgcgccgcgcctcgtggcgcatcatctcctcgtcgagcagaaggaggagagccgcggcaacgaggatcacgtctccgtcatccgcgactaccgatccaagatcgagtccgagctctccaacatctgcgacggtatcctcaagctcctcgactctcgcctcatt

SEQ ID NO: 157532 - DNA, 279 bp, Glycine max
agccaagtgaaagagagaagaaaagtcaaagacaatgtcagggatcattcacaagattgaggagacccttcatgtgggaggccacaagaaggaggaggagcacaagggtgagcagcaccatggtggagaatacaaaggggagcatcatgtgaacacagtactgaatacaaaggagagcatcatgttggtgagcacaagccggagcaccatggaggagaagagcacaaagaggggttcctagacaagatcaaggacaagatccacggcgaggagggtggc

SEQ ID NO: 157533 - DNA, 281 bp, Glycine max
agaaaagagaagaagcttcttcttggttaccttgacagacagagagtggagcaaacgacaaatcagcgagttggaacattttgtgtttggtggagatgcctattcggagcttggtagaagtggagccaccaagcccactgagatacttatcggcgccgccgttatgatgatcggagttgtgttaccagtcggttacatgatgttccgtaacaagcgcgtcccctcctcttcctcctactccaaacagacgtaggaacaaggttttgatttgatatagagaa

SEQ ID NO: 157534 - DNA, 283 bp, Glycine max
gcttcaccccaatccaacgctccataatcctcgacttcattaactcgttaagttccaccgcgggggccccacttccctccgtagcatcgtggtggaagaccacggacaagtacagggggggatccactacaatcgtcctagggaaacaatcctagaacaaacttattccctcggaaactacctcaacggaacacaactagtctctctctcctcacgcttcgaccacctcaacgccatcaacgtcgttctcacatctagcgacgtaggggttgacggcttctgc

SEQ ID NO: 157535 - DNA, 277 bp, Glycine max
ctttaactggaatagagttaaattacggtactgtgatggagcatctttcagtggagatagtgaagatgagtctgcacagctccagtttcgaggacaaaaaatatggctagctgcaatggaggaattaatgtccaaaggaatgcagaagccgatcaggcacttctctctggatgctctgcgggtggtctggcatccataatacactgtgatgagttcgggagcttgtttggaaaatcttccaaagttaaatgtttgagcgatggaggtttttttcttg

SEQ ID NO: 157536 - DNA, 273 bp, Glycine max
gcgacgagcgcgacaagaagcggcggcgttacccaaaccttgggcttcaagccgtaccgtcacctgaaaactctaaccgaccatgaaaacgcggtgtcgtgcgtgaagttctcgaacgatggaaccctcctagcctcggcctccctgacaaaaccctaatcatatggtcctccgccaccctcaccctctgccaccgcctcgtgggccactccgagggcatctccgacctagcctggtcctccgactcccactacatctgctccgcctccgacg

SEQ ID NO: 157537 - DNA, 276 bp, Glycine max
ctcagagactgaagctgcaggtgtggttcgccagatagcttcaggattagaggctattcatagagctaacattgtccacagagatttgaagcctgagaattgccttttcttggatgtgaggagggactctcctcttaagatcatgactttgggttgagttctgttgaggaattcactgacccagttgttggtttgtttggatccattgattacgtttcaccagaggctctttctcaagggaagataactaccaagagtgacatgtggtctctgggg

SEQ ID NO: 157538 - DNA, 273 bp, Glycine max
gaagaataggttcctagtatacgaatatatgcataatggtaacctgcaagatcatctgaatggaattggggaaagaaagatggattggcctttaagacttaaagtggcactgggagcagcaaaaggacttgcttatcttcattcagttcttgtcttggaattcctattgttcatagagatttcaaatccaccaatgttcttctagatgccaaatttgaagcaaagatatctgattttgggcttgccaaactaatgtcagaaggacaggagaca

SEQ ID NO: 157539 - DNA, 278 bp, Glycine max
ctcgagccgaaacttttttcatctaataatggctgcaacaacacgttcacgtgcatccatctacgatgtgttcctcaacttcagaggggtagacacacgctatggtttcaccggcaatctctacagggctctttctgacaagggattcgtaccttctttgacgaagagaagcttcacagcggagaggaaataacacctgcacttttgaaggcaattaaagattccagaattgccatcactgtgctctctgaagactttgcttcttcctcattttgctt

SEQ ID NO: 157540 - DNA, 277 bp, Glycine max
ctcttaaaagttattaagagcttttgcttttctttctgcgcgcttttcccaattaagtagttcttccttttctcaaagcaaaaaaaatgttcatcgagagtttcaaggttgagagtcctaacgtgaagtacacagagactgagatcagtccgtgtacaactatgaaaccactgaacttgttcacgagaacaataatggcacttatcagtgggttgtcaagcccaaaactgtcaaatatgaatttaaaaccaacacccatgtccctaaactaggggta

SEQ ID NO: 157541 - DNA, 281 bp, Glycine max
cctctgcgctctctctctctgtctcctacgattcgttttgccccttttgttgccctaatttcaaccatgcctcgccgtagctccggtggaagatctgcccgtcctgctcctcgggcagctcctcgtcctgctccagttcaccatgccctcctccagcccctgctcagagtggtggtggatctatgcttggtggcattggttcaaccatagctcaaggtatggcttttggcaccggaagtgcagtggcacacagggctgtggatgcagtcatgggtcctcgt

SEQ ID NO: 157542 - DNA, 278 bp, Glycine max
aggacattcattcatctatggctacccttattgctcccagcaaccactctccccaagaagatgctgaagctctcagaaaggcttttgaaggatggggaactgatgagaacactgtcatagtaattttgggtcatagaactgtgtatagaggcagcaaatcagaagagtttatgaggaaatttaccaggaggatcttgtgaagcgcctagagtctgagatcaaaggagactttgagaaagccgtgtaccgatggatactggaacctgcagatcgtgatg

SEQ ID NO: 157543 - DNA, 278 bp, Glycine max
gtatctgaactctccacctccaaggttatggtctttccggtcaaagaaggtatcccaccagaccaacagaggcttatctttgccgggaaacagcttgaagatggaagaacccttgctgactataacatccagaaggaatctacccgcacttggtgttgcggcttcgtggtggcatgcaaatctttgttaagactttgactggaaaaaccataactttggaggttgaaagttctgataccattgataatgtgaaggcaaagattcaggacaaggagggc

SEQ ID NO: 157544 - DNA, 252 bp, Glycine max
cattgataaaggtgttgctgctgctgcaaaagttgtccgtaaggcgtatccacaagaaaaggttggtgtgtttgtaagacgaggtaaaggtggtcctcttactgtagttgaatacagtgagttggaccagtcactagcttctgcatcaatcaagcaactggccgtcttcgtttttgttggagtaatgtctgcttacacatgttcactctggattttctgaaccaagtggcaaattggcttgaaaaaagacag

SEQ ID NO: 157545 - DNA, 177 bp, Glycine max
tagttcattctctttgcgcagttccctacctctcctttcatgatgcagattctcgtcaagaccctcaccggaataaccatcacccttgaggtggaaagctctgacaccatcgacaacgtcaaggccaagatccatgacaaggaagaattcccccggatcagcaacgtctcatcttcg

SEQ ID NO: 157546 - DNA, 276 bp, Glycine max
agcttaaagaatatattgagaaatgggagggtccagtggtagcaccatcacgccacaacctcaagctttttgctgacaaggagacatatgaatcaatggatgcattagcaaagcttcaaaacaagactgctcatcagttggccatgaagttatccgtaattatgttgcttccaaccaaaatggaaaaggcgaatgatttcatttttacttaacgaaggaagatgtatgtgatgttgctttatggttgacaggaatggtggataggcaactgaacac

SEQ ID NO: 157547 - DNA, 274 bp, Glycine max
tgtagatgtattagctaaatggattgcagataaatcacaagtctatactcaacatgcttatatgagaccactcggagtagttgctatggttttgggtattgatgatgaatatggacctcagctatacaaatgtgatccagctgtcattactttggtcacaaggcaacaagtgctggattgaaggaccaagaggcaattaatttcttggaaaagaagatgaagaatgacccttcatttacatatgaggagacggttcagactgccatttctgccc

SEQ ID NO: 157548 - DNA, 273 bp, Glycine max
cgggcgcaccctcgccgactacaacatccagaaggaatcaaccctttccctcgtcctccgtctccgtggtggcatgcagatcttcgttaagaccctcaccggcaagactataaccctagaagtcgagagctccgacaccatcacaacgtcaaggctaagatccaggacaaggagggtatccccccagaccagcagatgctgatcttcgccggcaagcagctcgaggacggacgtacccttgctgactacaacatccagaaggagtcaactctc

SEQ ID NO: 157549 - DNA, 273 bp, Glycine max
acataatctatgaaatgggctatgcgactaagagttgttctacatcttgcacaagctctagagtattgcacaagcaaagggcgtgctctctatcatgaccttaatgcatatagagttctttttgatgaggatggtaatcctagctttcgagttttggtcttatgaaaaatagcagggatgggaaaagttatagcacaaatttggcatttacccctccagagtatctcagaactgggagagtaacaccagaaagtgtaatatatagttttggca

SEQ ID NO: 157550 - DNA, 273 bp, Glycine max
gagcttgtgtttttctgatcccttatcttaattaatttaatcaccaatggctcgttctatcgctaacgccaagactttctccgctctcgtgctagacggattctccaacactctcaccagacgtggctactctcaaagcgcaaaaggggaggagttgcctccatagcacccaaatcaggggaagacaaaggtgtctcatcatacaaggtttcctgggtgccagatcccgtcaccggttactacaaaccggaaaacatcaaggaggttcatgtt

SEQ ID NO: 157551 - DNA, 213 bp, Glycine max
atgatgcttgtaggcgatgatccatggcaggaattctgtgccatggttcgcaaaatttatatctaccctaaagaggagatccagaaaatgagcccaggtaccttgagctcgaaaaatgaagagaatcattcggtgacggctaggaaggtgcagatacaaaagatgttaaatgtcagccgcatcaaaagttcaattcagaaaatggtcttgacg

SEQ ID NO: 157552 - DNA, 246 bp, Glycine max
gcaaaacgttcgaaatgggtcgcacactcacaactgcagcaacgtgtcttcttctctcattattattagtgtccctctgtgtgaccaccaccaccaacgccctaatgccatacacacgtagcagcaccctctgggacacgatgtctcatcagaggacccgttcagaatcctggaacacaccccattcagcgacattcccacgaccacccaaggggtggacgatctcgccctggcacgtgcggactg

SEQ ID NO: 157553 - DNA, 274 bp, Glycine max
gctgcaagcaatcctaattcctattctcctatccttttacataactctaaagttagagaaaatagagcaatttcacaacacaactcttataattgtgagttaagtatgggaaggtccccttgctgtgagaaagctcacacaacaaaggtgtctggactaaagaagaagatgacagactcatatcttatattcgagctcacggagaaggctgctggcgttcactccccaaagccgccggccttctccggtgcggcaagagctgccgtctccggtg

SEQ ID NO: 157554 - DNA, 272 bp, Glycine max
gtttgtgctcatgacaaacccacatattgggaatactggcataaattttgatgatgaggaatcaatacagtgtttccttactggacttgtaattagaagtttgagtatcagtacctctaactggagatgtaagaagcctctggggattacctagctgaaaggaatatcatgggaatttatgatgttgatactcgtgcaatcacgcggcgattgcggcaagatggcagtcttattggtgttttgagcactgacaattccaaaaaggatgagga

SEQ ID NO: 157555 - DNA, 271 bp, Glycine max
gggcacaaagaaagaacaagttcaacaaatcatcaaagatcttaaggtgtttaaggaaagcactaaggttgacaaggtggttgtcctgtggacagccaacacagagaggtacagcaacctagttgtgggactaaacgacacatggaaaacctctttgcttccttggacaggaacgaggctgagatttccccttccaccttgtatgccattgcttgtgttatggaaaatgttcctttcatcaatggaagccctcagaacacctttgtcccag

SEQ ID NO: 157556 - DNA, 273 bp, Glycine max
  unsure (1)..(273): unsure at all n locations
tcccgcctctcctcctccttctttttcttncccttcctcttcccctcctttttcaccacctcctgccactcctccccccgccactcctccccccgcagttccaccaccctcattgaccccaacagttacacctctttcttctcacctgtctcttctccagctccgtctccttccaaggtgtttgctcctgcactctctccttcccttgctcccggtcccagcctctccaccatctctccctccggcgatgacagtggggctcaaaacttgtgg

SEQ ID NO: 157557 - DNA, 270 bp, Glycine max
gaggagcttgagaatgatgatgaagtctgctatgtgtgcagtggtggttgtagcacttcttcttctggcggaggtggggcccatggctgaggctgtgacatgcaccccaacagagttgatgtccgtgtcttccagcaatcattccggtgctaaaccttccaatgcttgttgcacgaagctgaagcagcaaaaaccatgcttatgtggctacctcaaaaacgctagcttgaagcagtatgttaactctcctaatgcccgaaaaaccgttgc

SEQ ID NO: 157558 - DNA, 258 bp, Glycine max
attgtcgtcattggacatgtcgactctgggaagtcaactaccactggtcatttgatctacaagcttggaggtattgacaagcgtgtgattgagaggttcgagaaggaggctgctgagatgaacaagaggtcattcaagtatcctgggtgcttgacaagctcaaggctgagcgcgaaagaggaattaccattgatattgcttcgtggaagtttgaaaccaccaagtactactgcacagtcatcgatgcccccggacatc

SEQ ID NO: 157559 - DNA, 218 bp, Glycine max
gaaaaagacgggccaccaaatgttttcttgcatgcattctatgtcattgatgcagcaaagaaagcactagaagcttcatgccctggtgtggtctcttgtgctgacatccttgctctggcagcaaggacgcagtttttcttcaggcggacctacatgggatgttcccaaaggaagaaaggatggtagaacatctaaagcccgtgaaaccagacaattgc

SEQ ID NO: 157560 - DNA, 268 bp, Glycine max
aaaagaaaatcctcacccattttcttcgtagccaaacactctgaaattctcagttatgtcgtggcaagcgtatgtggatgatcacctactgtgtgaaatcgaaggtaaccacctcactcacgccgctatcatcggccaagcggaagcgtttgggctcagagcaccaacttccctcagttcaaacctgaggaaataactgccatcaataatgactttaatgagcctggatcacttgctccaactggatggtatatcggtggcaccaaat

SEQ ID NO: 157561 - DNA, 268 bp, Glycine max
gtccttgactctgtgaatatcaccttgggtgctgaagatgaactaaaacatgcagttgcatttgttcggccagttagtgtggcctttcaggtggtgaatgggttccatttctacgagaatggagttttcactagtgacactgtggtagcacttcccaggatgtgaaccatgccgttcttgctgttggatatggagttgaaaatggtgtcccatattggctcataaaaaattcatggggagaaagctggggtgaaaatggctacttcaa

SEQ ID NO: 157562 - DNA, 266 bp, Glycine max
aatacaggtcctctcggatgcttgcctcagaatattgccaaatttggaactgattcatcaaagcttgacgaactagggtgtgttagttcacacaaccaagctgctaaaacctttaacctacagctacatgctctctgactaaattgcagggccaatatccagattcaaatgtcacatacgttgatatcttcactataaaatcaaacctcatttcaaacttttctagatacgggtttgaacacctattatggcttgttgtggatacg

SEQ ID NO: 157563 - DNA, 269 bp, Glycine max
ggttcacttgagcctgttactgatggtgcaaaccttcagattttaactggttttgccaatgcatttcatgctttgcagcccctcaaagttcctgcattcagttttgcatggcttgagttgattagtcacaggagcttatgccaaaaatgttgactggtaatggtcaaaaaggttggccttatatccaaaggttgcttgtagatctgttccaatttatggagccttttctgaggcatgctgaacttggagaaccggttcgtgtcctctat

SEQ ID NO: 157564 - DNA, 266 bp, Glycine max
agcttttatttggcattgaaaagggtccagagtactcaacgctgatagaccggctggatcgagcattgttgatgactgggactgcctgaaacccatggtcaggacttttgagacacattgtggatccttgtctcaatcgggatgaacaacatgaggtgctttgcagacatctgcaatgtcgggataaagaatgaacaaatggctgaggcttccagcacgagcttgtgtcagtgttccttacaatccctggagttctctagcaaggg

SEQ ID NO: 157565 - DNA, 263 bp, Glycine max
caaaagggagaagaaaaggaaagaaaactctcaaaaaactattatagcaatggcagaacaaaaccaaaaccaaacaactgaagctggaaggcaccaagaggttggtcacaagagccttctccagagtgatgctcttaccagtatattctggagacaagtgtctacccaagagaacctgaatccatgaaagaactgagagagttgacagcaaaacacccatggaacatcatgacaacctctgcagacgaagggcagttcttgaa

SEQ ID NO: 157566 - DNA, 248 bp, Glycine max
atcatatttgcctggcaaggtgaggaaggttggtagggttgcaagggcgatagcatcatgagccacccaatccccagcactgatgattcccattcagtgcaaattattttaccacagaaacagttgggtggaagtcagacatgtacctattttgttgttcgtatactcacaatgttgctccaaagggaaaatttattgcatttgtatcaactgaggcagagacagatcagccggcaattgaactgaaa

SEQ ID NO: 157567 - DNA, 249 bp, Glycine max
cttcacttgcatttggttacatgctggggttattcatttgctagctaatatgttgagtctggtcttcattggcattcgccttgaacagcaattcggatttattaagattggaatcatatacttggtgtcgggtttggtggaagtgtactgtcgtctctatttatcagagaccacatctctgttggtgcttctggtgccctttttggacttcttggcgcaatgctgtctgaacttatcacaaactggact

SEQ ID NO: 157568 - DNA, 267 bp, Glycine max
agctcggaatcggctcagtccagcgaatcggctcgaggcttgttcaacatcataggcaacttgctcttccccttactcgcattcgcgggcctgtacttcctcttccgcagagcccaaggcgggcccggcgggcatggcgggctgggagggcccatggacttcgggcggaacaagtccaagttccaggaagtccccgagaccggcgtgagcttcgctgacgtggcaggcgcggaccaagcgaagcttgaattacaagaggttgttgat

SEQ ID NO: 157569 - DNA, 251 bp, Glycine max
gcaatctttgccgagaagttgctaaggcatgtgttcatgcaggagctcttgattttggaatgaaggctttgtggaagcataatgtctatggactgactccaaatattgcatctgttcaccatttactgagtatgctaagaaccacaatgatactaaactgttggtggaagtaatgaagcttctgaagaagaatgatttaccactgcaaccaggcacagcagatataatttttagcatttgttataatacag

SEQ ID NO: 157570 - DNA, 249 bp, Glycine max
tggtggatgatgtgttttatgtattgcagagttgcctgcggagggcaatatccacttccaatatcagttctgttgtcgcagttttgagtggtgctagtagtttgctcggtaatgaatatcatgaagcttgcagcacaaaactagagagccaaaccttggtgcaaagttgttctttggtggtgttggcgtgcaaaaaacagggaccgaaattgcaacagctttgaataatatggatgttagcagtgaata

SEQ ID NO: 157571 - DNA, 239 bp, Glycine max
caccagaatccgcgccgccattcccaccatcaaacatctcatccaaaacggcgccaaagtcattctctccagccacttggggcggccgaagggtgtcactcccaaatacagcttggcgcctcttgtaccccggctttctgagctcattggtatccagattgtcaaggccgaggacagtattggtccagaagtagaaaagttggtggcttctcttccagatggaggtgttctccttctag

SEQ ID NO: 157572 - DNA, 244 bp, Glycine max
  unsure (1)..(244): unsure at all n locations
gtatatacttcccatacactgaaactgagcgtaggttaacagaattccactctgacattgaatctcttctttacagctcagtggagaatgaggaacacatatgcgtattgaaggaccgcaacaaaccataatcttcaccatggcaatgcttgacgtgttgaagaacatcacggggcttgtcgagtggtacgggaagaacgcacgcctccgcgagttgngtgaactggtggtggtggctggagac

SEQ ID NO: 157573 - DNA, 248 bp, Glycine max
tcttcatccagggagggcaaatgtttccaaggctgaacttaaggagaagctagctaggatgtatgatgtgaaagaccctaatactgtatttgtcttcaaattccgaacacattttggaggtggcaaaccactggatttggtttgatttatgacacagtggaaaatgctaaaaagtatgagcccaaatacaggcttatcaggaacggccttgacactaaggtagaaaagtcaaggaagcaaatgaagga

SEQ ID NO: 157574 - DNA, 249 bp, Glycine max
gggacacctaaaattgctaaaccagaaaaaaccggggaagagaaacctgcagcaaccaaagtctcaagtatgtttggtggaactagagataaatgtgcgggttgtcagaaaacagtgtatcccactgaaaaggttaccgtgaatggaactccttatcacaagagttgtttcaaatgcactcatggagggtgtgttattagtccctccaactacattgcacacgaaggcaaactctactgcaagcaccac

SEQ ID NO: 157575 - DNA, 238 bp, Glycine max
ttggttttcgaatacggcgaggtgtattaacagatattcctgccattctagtgttcgtttccaggaaagttcacaagcagtggctcagtccaatccagtgtctacctattgttcttaaggggcttgtgagtatggtgtgatgtggatgtggtggaattctcggatattggtgcaccagagtcagtttccaaagagcaagctgtacacagagattgtagatgacttgcggtggggcgat

SEQ ID NO: 157576 - DNA, 249 bp, Glycine max
cttcaaaacactcataacacaaagcacaaagcaaagctcatccttgagttaaaaaatggcagcagcttcttccatggctctctcatccccatccttggctggcaaggccgtgaagctgggcccatcagcccagaagtgggaagggtgagcatgaggaagaccgtcaccaagcaggtctcctcaggaagcccatggtacggcccagaccgagtcaagtacttgggcccattctctggcgagcccccgtcc

SEQ ID NO: 157577 - DNA, 251 bp, Glycine max
cgctttcactttactgaacaacgacttcatcttcactcttccttcaaatttccaacaagggttcaagggtattatgcttgctggattcattctcttgctgaaatgcagtctttctagaaagtttgttcactgtccctttattggcgttactatgctacctactggagcaaaagagacccaattacgtgagaacaacagccagaaggtccatcctcaaccaatggaagaggccatgaatcagaatccagaag

SEQ ID NO: 157578 - DNA, 247 bp, Glycine max
gaaagagaggaaaaatgccgctcaagttggcgggaggagccactgtcggttcccttctcctatgtgttgctatttctctctttcacatcgctggggccgaagatccctacaggttcttcaactggaagttacttatggtgacatttaccctcttggtgttcgccaaacgggaatattgatcaacgggcaattcccaggtccagatattcattctgttaccaacgacaacctcatcatcaatgtcttc

SEQ ID NO: 157579 - DNA, 249 bp, Glycine max
agaggagctgctccttcgtgcagctaaaaaagctggaatggatttccatgagttgctggatatccctcaaggagatcggaggaagtaccatgatgatgttaccgttatggtggtatcactcgaaggaagaatctggaaatcatcagggaagtatccgtgagatcttattcaactccctgttgtctgtatacatatttgaggtgccttgaagccagtgccaaactttccaacttgacccatttttcatgg

SEQ ID NO: 157580 - DNA, 249 bp, Glycine max
atcagctttacgtgaaactgttgttgaagtgcctaatgtcagctgggaagacattggaggccttgaaaatgtcaagcgtgaactgcaagagactgtacaatatccagttgagcacccagaaaagtttgagaagtttggtatgtctccatctaaaggagtacttttctatggtcctccaggatgtgggaaaactttgttagccaaagcaattgctaatgaatgtcaagctaacttcatcagtgtgaaagg

SEQ ID NO: 157581 - DNA, 248 bp, Glycine max
catgtcgactcctatgttctgtctgagtccagtctctttgtttatgcctacaagatcatcatcaaaacctgtggtactacaaagctactgcttgcaatcccacccatattgaaatttgctgaaatgctttccctcaatgttagatctgtgaattacaccaggggaagtttcatctttcccggtgctcagccctatccccatcgcaacttttctgaggaagttgctattcttgatggctactttggcaa

SEQ ID NO: 157582 - DNA, 246 bp, Glycine max
aaccccccaaaaagcacaagcctggtaaaacaccaaagacacccaaaacacccgttgttaagccaccagtcaccatccctcccattaatgttcctcccgttgttcttccaccaatagtgaagccccaggtattctccctccaattccaattattaacccaccaaccacaccagggaagggagggaacactccatgcccaccaccaaagtctcctgcgcaggctacgtgccccattgacacgctcaa

SEQ ID NO: 157583 - DNA, 252 bp, Glycine max
gttcagacagcactctccctctccctgaaccgcacccaagccaccaaaaccttcgtggctaactgcaacaaattcagaggcctgaaacccagagagcacgctgcgctcaaggactgcgccgaggaaatagcgacagcgttgaccgcctcagccggtcgctgaaggagctcaagctatgtaaggttaagggtgaggacttcacgtggcacattagcaacgtggagacatgggtcagttctgctttgaccgatg

SEQ ID NO: 157584 - DNA, 227 bp, Glycine max
ccgtctcttggcagcttacgtcaattgtcagaaggttggggccccgcctgaagtggtggcaaggttagaagaagcatgtgcttctgcagcgacaatggctggtggtgatgcagcagctggatcaactgcataggtgaagttccacctttggaccagtcattgaggcttactgtgagatgctcacaaagtatgagcaagaactctccaaacccctaaaggaagccatg

SEQ ID NO: 157585 - DNA, 243 bp, Glycine max
cgaaatatggcttcaactcatctgcttcccctagcaaccttcttcttacttctctccgcttcttatctccagattgctggggcggaagcacaaccgttgactagtctcaagcttaactctcatatcttcaggagtctactgctaaagagattaatgaaaatcccgaggcaggatgggaggctgctataaatcctcgtttctccaattatacagttgaacaatttaagcgccttcttggagtca

SEQ ID NO: 157586 - DNA, 248 bp, Glycine max
gcagaaaccagagaacattccgcccgaaaaaaagtactccttctggaagtaagggagctcaacttcgaaaacatattgatgccacgttaggtagtggaaatctgagggaagcagtaaagctacctcctggggaggatttaaatgagtggctagctgtcaacactgttgatttcttcaatcaggtgaatcttgctttatggtacccttacagagttctgtactcctgagaattgtcggacaatgtctgc

SEQ ID NO: 157587 - DNA, 246 bp, Glycine max
gctcgagcggctcgaggcttttcactgctcctggtgttcttcaatatctcagtggtgtcatcctctttgaggaaaccctctaccagagcacagctgcaggcaagccctttgtgaatgtcttgaaggagctggtgtgcttcctggcatcaaggttgacaagggcacagtcgagcttgctggactcaatggagaaaccaccactcagggtctagatggccttggtcagcgttgtgccaagtactacga

SEQ ID NO: 157588 - DNA, 244 bp, Glycine max
caaccctttataaattgcacttgggtgaggttgtcacaaccaaccctactgtaggaagcaacgtggaagagctcgtctacaaaaatatacgatttgaggtctgggatcttggcggacaagaaagctgaggacatcatgggcaacatattaccgaggaacgcatgctgttattgcggtgattgacagcagtgatagagccaggatctctatcataaaggatgaactttttaggttgctggggcat

SEQ ID NO: 157589 - DNA, 245 bp, Glycine max
ctcatttttcagtttctccgtttcttattcgttagatctcatcttacactcgccatcaagttcgtctcgcgccaccgtcgacgcagctccgaccatctcctttggttccctcactttctcgctctcttcttctcagaaatatgccttctcagaaggttgaaacgggtcatcaagacacggtccatgatgttgcgatggattactatggtaagaggctggccacggcttcatcagatcacacaatt

SEQ ID NO: 157590 - DNA, 246 bp, Glycine max
  unsure (1)..(246): unsure at all n locations
tctttcttctagcatttaagagaaagaacaagaaggacataagtgggaagcccagagcacttagaaggttgaggactgcttgtgagagggccaagagaacattgtcatccactgcccagaccacactngaaattgattctctctatgatggaattgatttctactccactgttactcgtgcttaattcgaggaactgaacatggatctctttaggcagtgtatggagccggtggagaaatgtttga

SEQ ID NO: 157591 - DNA, 245 bp, Glycine max
ctcctgttaacagggacttaatcagcaacttcctgtcagacccacgtgcacggagccattaaagtttgcgctgaactgagacccacagtagacatttctgtgccaccagatgcagactttgttctccggagttgcgttctagcaattagaacttaaaagcaattatggctttcacttcgaatctttttcagatttctcagaactgcagttatcttgttagtttgggttttcatgattggatgcta

SEQ ID NO: 157592 - DNA, 243 bp, Glycine max
gaacgctgctgccgaaacccttccggaaccctaaggtaagtgagtaatcagtggttgagaatggtggagaaggcgaagggtagaaaggaggaggtggttacacgtgagtacaccattaacctcccaagcgcctccatggctgcacatttaagaagaaagctcctaaagctattaaggagataaggaaatttgcccaaaaggccatggggaccaatgatgtgagggtggatgtgaagttgaaca

SEQ ID NO: 157593 - DNA, 248 bp, Glycine max
agaaaatcctcaattttctgagcagccaaacactctctctctgtctctcgaaaattctcagtttgcagagaaaatctgaatcatgtcgtggcaagcgtatgtcgacgatcaccttctgtgtgacatcgaaggtaaccacctcactcacgctgctatcatcggccaagacggcagcgtttgggctcagagtaccgacttccctcagttcaaacctgaggagataactgccatcatgaatgactttaatg

SEQ ID NO: 157594 - DNA, 227 bp, Glycine max
ctgtgactctgtgcttagttaacgttaacagtgacttaagatggcggattctgcagatgtcacccacgatgttgtgtccctcctctcttctcctcaaagggactttcttcttcgaaacaacggcgtcaggttaaaattgacagcttgaagggtaagaaacttggtttgtatttttcggcatcctggtgtggtccatgtcaaacatttacgccaactttggtggatgt

SEQ ID NO: 157595 - DNA, 246 bp, Glycine max
aaaacgcattgtgtttctctctttccgcggcgtaggtctgagcagtttgggaaaccctaactgctctcaccactctctttgctttttttcctctccgatcaacgacctctttcgtcgccctaagcatggcaggacttgcacccgagggatcacagtttgatgctcgtcaatatgataccaagatgaatgagttgcttacatctgatggacaggattttttcacatcttatgatgaggtttatgaca

SEQ ID NO: 157596 - DNA, 246 bp, Glycine max
gttttacaaaaggctctggaagtgtgggacctacaagttatccctcttgactctccagttgctgagcctgcccagattgaccctgagctggaaaatgccttcatttgtcatttgcaagaccattggttttgtatccgtaaagtgaacagggagtggtataattttgacagtctctatgcagccccacagcacctttccaagttttacctctctgcctatcttgactctttgaaaggctttgggtgg

SEQ ID NO: 157597 - DNA, 242 bp, Glycine max
cttggtgagaagaacatcaccttaacaagttggagagaaggagcttcaatgatacgacataggctccgacaaaagaaggttctcttgattttagacgatgttgacaagcacaaacaattaagggctatggttggaagatctggttggtttggtgccggtagcagagtcatcattaccactcgggacaaacatctactaaaatatcatggcgttgaaagaacttatgaggtggaggttttgaa

SEQ ID NO: 157598 - DNA, 243 bp, Glycine max
attcaattttgcgtttctctgcctaaaaggattgaaagatgggtcaagcattcggttgctaccaagtcgatcagtcaaatgtggctatcaaggagcattttggaaaatttgatgatgtcctagagcctggatgtcactgcctgccttggtgtcttgggtaccagattgctggtagtctgtcgctgcgagtgcagcaacttgatgttcgatgtgagacgaaaaccaaggacaatgtctttgtca

SEQ ID NO: 157599 - DNA, 244 bp, Glycine max
aacttgctgaatttattgatagtttcttcctttgctgaattgattttctcctatctgttgtatgttactgggcagcgcgtgctgtatgttgacattgatgttcaccatggtgatggtgttgagaggccttttacaccactgatagagtgatgacagtgtctttccataagtttggggactttttccctggcacaggacacgtcaaggacattggggtgggatcaggaaagaattatgcagtcaa

SEQ ID NO: 157600 - DNA, 230 bp, Glycine max
catgcacagttttgatcctccttatgcacataatgatgtcaaacctggtaatgttctcataacacacagaaaaggacaaccacctcttgccatactgatggattttggcagtgctcgtcctgcaaggaagcaaattagctccaggtcagaggcccttcagttgcaggattgggcatctgaacattgctctgctcctttcggagctcctgagcggtgggcttccccaagcc

SEQ ID NO: 157601 - DNA, 245 bp, Glycine max
ccaggagttgcttgaaggcattagaacatgcatacaacaaattaacaaggctagccgtggagacttaagtcctgaggaattgaaggagagacaggccaaggcaatgcaggatcccgaaattcaaacatccttcaagaccctgttatgagacaggtattgattgatttccaagaaaatcccaaggctgcacaggaacacacgaagaatccaatggtgatgaacaagatccaaaagctggtcagtgc

SEQ ID NO: 157602 - DNA, 241 bp, Glycine max
gtggcggctaaggttggtgtgcttcctctctctccggttagggaaagaaacgcactttttggttttggttttggatttcgatctcactgcattgccttctgctactgctagttgcatgatggtgtgcagaactttgtagttgatttgaataaggcccttgttttccaggttgggcatcttggagaagcttatgaagagtgggttcaccagcccattgtcagcaaggaaggcccccgtttct

SEQ ID NO: 157603 - DNA, 240 bp, Glycine max
aattggcaaaggaagtagaataccttcttaggaagggatggattccttgcttggaattcgagttggagcacggtttcgtgtaccgtgagcacaacaggtcaccaggatactacgatggacgtactggaccatgtggaagctgcctatgtttggttgcactgatgcttctcaggtgttgaaggagcttcaagaggctaagactgcataccccaacggcttcatccgtatcatcggattcga

SEQ ID NO: 157604 - DNA, 242 bp, Glycine max
gtttgcatcaaagggagaaactgggagacacagaagatgagagagataattagtattcatattggacaagctggaattcagtgacacctctgttggcattgcacacgatgctttcaacaccttcttcagcgagaccggattcggcaagcatgtgccaagggctttatttgttgatttggaacctagtgttattgatgaagtaagaactggtccttacagacaactctttcaccctgagcaat

SEQ ID NO: 157605 - DNA, 244 bp, Glycine max
ggaagaaaaagtaaaacacagagagcaaccaccaatcgaagaagaaacaaccgtaacagatctccgtttctcgccaaacaaaaaacaaaaaaatggctgccttcagcggtgacgaaaccgctcctttctttggcttcctcggagccgccgctgccctcgttttttcctgtatgggcgcggcgtacggcaccgcgaagagcggcgtcggggttgcgtcgatgggcgtgatgaggccggagctggt

SEQ ID NO: 157606 - DNA, 242 bp, Glycine max
gtccatgatgtgaccatatcatctcctggggacagtcctaacacagatggaattcaccttcagaactccaaagatgtgttgatatacagcagctctatggcctgcggagatgactgtatttcgatacaaactggatgctcgaacatatatgtacacaatgtcaactgtggaccagggcatggaatcagcattggaagtctaggaaaggataacaccagagcctgtgtctccaacattactgt

SEQ ID NO: 157607 - DNA, 245 bp, Glycine max
caggccgtcggcgccaccactcccttcttcaccgccgttttcgcttacgtcatgaccttcaagcgcgaggcctggctcacctatctcaccctcgtccccgtcgtcaccggcgtcgtcattgccgcgggggtgagccgagcttccatttatttgggttcatagtatgcattgcagctactgccgcacgtgccttaaaatccgtgttacaaggaattttgctttcttctgaaggagagaagttgaat

SEQ ID NO: 157608 - DNA, 243 bp, Glycine max
ttgatggtggaaactgtaagagtggggagagaaactagtgactgacttttcgagaaaggaaaaaaaaagagtttccggcattattccatcatgaacgctcttcccattcttctcttcttcctcttcgtttcggcattagtttatgcgaagaaaactggcgatgtgacggagttgcaaattggcgtgaagcataaaccagcatcatgtgaagttctggcacacaaaggtgacagagtcaaagta

SEQ ID NO: 157609 - DNA, 276 bp, Glycine max
gtggaggtgaaagtgaagatggactgcgaaggatgcgagaggaaagtgaggaaggcggtggaggggatgaaaggcgtgaaccaggtggatgtggaacgtaaggccaacaaagtcactgtggtcggctacgtcgaggcctctaaggtggtcgcccgcatcgctcaccgcaccggcaagaaagccagagctctggccctacgtcccctacgacgtcgttgctcacccctacgcacacggagtctacgacaagaaagccccctccggttatgtccgcaa

SEQ ID NO: 157610 - DNA, 270 bp, Glycine max
aagatacttagaatcaattgagtggcgaggatggcaaacacaaacagcgacaccaaagaagaaagcaaaaaaatggatgaaagagagacaatacctctcctcacctcatacaagatgggaaattttaatctatcccacaggattgtgttggcaccgttaacacgatcaaggtcttacaacttcgttcctcagacgcatgctgctctgtattattctcagaagaactaataagggtggcttcttgatcggggaagctaatggtgtatctga

SEQ ID NO: 157611 - DNA, 270 bp, Glycine max
caccctggcatgattcaggttttccttggacacagtggtgcccatgacgtagagggaaatgaacttcccaggttggtgtatgtttccagagagaaaaggccaggttaccaacaccacaaaaaggctggtgctgaaaatgcactggtgagggtgtctgcagttctcacaaatgctcccttcattctcaatcttgactgtgatcattatgtgaacaatagcaaggctgtacgagaagcaatgtgttttctgatggatccagtagttggcaga

SEQ ID NO: 157612 - DNA, 263 bp, Glycine max
ggttgcgtgggccccgcatagctcgtgccatatatgcaccgccggggatgattcgcaggcgctgatttgggacctttcttccatgggtcaacccgtggagggcgggcttgacccgattcttgcgtacactgcgggtgcggagattgagcagcttcagtggtcgtcttcgcagcctgattgggtcgctattgctttctccaccaagcttcagattcttaggatttgaaattttattaatgcagtatcatcacttctgcttctgt

SEQ ID NO: 157613 - DNA, 258 bp, Glycine max
ctgtgttcttggttcacttggcaaccatccccatcaccggaactggtatcaaccctgctcgtagtcttggtgctgctatcatcttcaacaaggaccttggttgggatgaacactggatcttctgggtgggaccattcatcggtgcagctcttgcagcactctaccaccaggtcgtaatcagggccattcccttcaagtccaagtgattcaatcaaacggattcatgcattaataaggttgagaacaacaaccacaaca

SEQ ID NO: 157614 - DNA, 265 bp, Glycine max
caaaattatattacccggcatggacctttcggatgcaaaccaaccagaggaaaaccattcaagccctgagttgctacttgcacaagttatggcagcttgcaaaaagtatgaggtgaaggtttcaggtcaaaattcttctgagtctggtgttccaggtggttttgaacaaataaagaagaatctatctggagataatgtattggatttgttcacatatcatagaatgggagcatctttcttttctccagagcattttcctttgttc

SEQ ID NO: 157615 - DNA, 231 bp, Glycine max
agagggagtcagagaaaccctaggtaagaagaaaagatgcaggctggtcatggtttgagatcccgcaccagagattccttctctcgtcctttcaggaagaaggcgagcatcgccctcaccacataccttagaagctaccacgtcggcgactatgatgacgctcaaggttaacgttgccgttcacaagggaattccccacaagattctaccatggccgaaccggacgcgtct

SEQ ID NO: 157616 - DNA, 269 bp, Glycine max
aaagcattgaattcaaaaacttaagttcattccttgtgttttgctttcttcctcaaaaccaaacatgtcgaacacatgcggcaactgcgactgcgctgacaagactagctgcaccaagggaaacagctatggtgttattgtagagactgagaagagttacatcgagactgttgtcatggatgttccagcagctgagcatgatgggaagtgcaagtgtggcactaactgcacttgcacggactgcacctgtggccattaaggaatatgta

SEQ ID NO: 157617 - DNA, 264 bp, Glycine max
tcaggaagaccagaaggcgtttagctcggcagaagaaggctgtcaagattttcccaaggcatactgctggacctctcaggccaattgttcatggccagactctgaaatacaacatgaaagtcagatctgggcgaggattttctctcgaagagttgaaggctgtgggaattcccaggaaacttggtccaactattgggatttctgttgatcacggagaaagaatcgttctttgagagtctgcagccaatgtgcagaggctaaaac

SEQ ID NO: 157618 - DNA, 268 bp, Glycine max
gttcctgcgcgtgaacaagcctcaggtaagccaaagccatggttaacgcataacaatgttatccccaacggagcacttccgtaagcactggcagaactatgtgaagacctggttcactcagccagcacggaagacaagaagacggttggctccgtagcagcaagctgtgaagattttcaccaggcctacgagctggacctcttagacccattgtacatggtcaaactttgaaatacacactgaagtgagaacttgaaagcggatttcc

SEQ ID NO: 157619 - DNA, 271 bp, Glycine max
cgagcagtccgtgatccccggcggcggcgcgtggctcggcggacaactcttctccgccatggtggttcgcaagccggcgcacctcttcctggacgagctcggcgtggcgtacgacgagcaagaggactacgttgtgataaagcacgcggctttgttcacgtccaccatcatgagcaggcttctagcgaggcccaacgtgaacctcttcaacgcggtggcggcggaggacttgatcgtgaaggaagggagggttgcaggggttgtgaccaac

SEQ ID NO: 157620 - DNA, 196 bp, Glycine max
atcccttttctcattctcttcttattcttctttttttcttttattcttcactctcatgtcatcttcttccattccctcctcccctgatcacttcccccacctcggcctcggctactccatcgccatagccctagccttcctcttcctcctctccacccttctcctctcctcctacctctgctgccgccacaaccgc

SEQ ID NO: 157621 - DNA, 264 bp, Glycine max
tgtttgttcattgggaaaaaggacgagatgtcttcgagaggcttctgattgattcagattgggcaattaataatggaaactggatgtggctttcttgttcatctttcttttatcagtataatcgtatttattctccaactacatttggtaagaagtatgaccctaatggcgactatattaggcattttctcccagtcttaaaagatatgcccagggagtacatttatgaaccctggacggctcctaaaagcattcagaccaaag

SEQ ID NO: 157622 - DNA, 150 bp, Glycine max
ggaaatgtcgggatcggaggacgagggaggagaagagtacctcttcaagatcgtcataatcggagactctgcggtgggcaaatccaaccttctctcccgctacgcccggaacgagttcaacatggactccaaggccaccataggtgccga

SEQ ID NO: 157623 - DNA, 263 bp, Glycine max
gaattccataaaaaccatggaggagaggcttccataatggtaaccaaggttgacgagccatcaaagtacggcgtggttgtgatggaagagagcacagggcaggttgataaatttgttgaaaaaccgaaattgtttgttggtaacaaaatcaatgctggaatttacctgctgaacccctctgttttggatcgaattgaactgaggcccacttctatcgagaaagaggtgtttccaaagattgcttccgagaaaaagctatatgc

SEQ ID NO: 157624 - DNA, 213 bp, Glycine max
aaaaaagacaacacagagagaagcgtcttaataaacgctcttctctgaaaaacctgatttcttctcttcttctcttctctttcgtttcgatcttcgatctctgaaaatgagagagtgcatttcaatccacatcggtcatgccgctattcaggtcggaaacgcctgctgggagctctactgcctcgaacacggcattcagcctgatgggcagat

SEQ ID NO: 157625 - DNA, 265 bp, Glycine max
gggagcccttgacaatttgggcaacttgagacaacaatatggattggccaagtcaaccaatgaagtattgttggtcattgaggcttacaaagcattgcgtgacagagcaccctaccctgctaatcacgttgttggccatctcagtgggagctttgctttcatagtttttgacaaatctacttctaccctctttgtggcctctgatcaatatggtaaggtacctctatattggggaattactgctgatggctacgtagcatttgcc

SEQ ID NO: 157626 - DNA, 266 bp, Glycine max
gaaagaaactgcaacttcctctgttttgctcccctgtttaggccttttcataagcttagaatgacacacaaggaattttccattgctctagtgactctcattgctgttctctttgtcaacatgaacatccaaggtgccactgctgactatggtagttggcagagtgctcatgccactttttatggcgggggtgatgcttctggcacaatgggtggagcatgtgggtatggaaatttgtatagccagggctatggaactgacactgt

SEQ ID NO: 157627 - DNA, 256 bp, Glycine max
ggagattgctattttagctggcgggtgcgatttggacggtcatatccttgactctgctgaactgtacaattctgagaatcaaacctgggaactactccctagcatgaacaagccgaggaagatgtgctctggggtatttatggatggaaagttttctgttattggtggaattggtggataagattctaagcttcttacatgtggtgaggagtacaatatacaaactagaacatggacaggaattcctaacatgtcc

SEQ ID NO: 157628 - DNA, 250 bp, Glycine max
ctagtcagtgttaggatctgagaaaacacacgtgactacgcgtgtaatgggaacatttggatacgttgcacctgagtatgcaagctcgggtatgcttaatgagcgcagtgatgtatatagctttggagttcttctcatggagataatcacaggaagaagccccattgattattcaagaccacctggagagatgaatttggtagattggtttaaggcaatggtagcaagtcgtcgcagtgaggagctagtt

SEQ ID NO: 157629 - DNA, 223 bp, Glycine max
gagagagagagagagatctatctatctatcaagatggcgttgttggttgagaaaacaagcagtggaagggagtacaccgtgaaggacatgacgcaagccgatttcggaagattggaaatcgagctggcggaggttgaaatgcccggcatcatgtcctcccgcaccgagttcggcccctctcaacccttcaagggcgctaggatgaccggctccctccacatga

SEQ ID NO: 157630 - DNA, 264 bp, Glycine max
actctgcgaccaaatctccgatgctgtcctcgacgcttgccttgaacaggacccagacagcaaggttgcctgcgaaacatgcaccaagaccaacttggtcatggtcttcggagagatcaccaccaaggccaacgttgactacgagaagatcgtgcgtggcacctgcaggaacatcggcttcgtctcaaacgatgtgggacttgatgctgacaactgcaaggtccttgtaaacatctaccagcagagccctgatattgcccaggg

SEQ ID NO: 157631 - DNA, 263 bp, Glycine max
ctgctccactgtacaagtatctaaaatcaagcaaaggtggactctttggggatggtatcaaatggaacttctccaagttccttgttgataaagagggaaatgtggttgatcgctatgcacccacaacttctcctctgagcattgagaaggacttgctgaagttgttggatgcatgaatgaagctatgaatgactggagctgccaataaatgaattgtgattagaatataaattatgaataagaaatgtattgcagatgctgct

SEQ ID NO: 157632 - DNA, 110 bp, Glycine max
tagaagttcacgagtatgacatgtctgagaaagatgactttggtggacaaacatgcctacctatctgggagcttagaagtggcattcgagcaattccacacaacatacga

SEQ ID NO: 157633 - DNA, 191 bp, Glycine max
caaagcattgaattcaaaaacttaagttcattccttgtgttttgctttcttcctcaaaaccaaacatgtcgaacacatgcggcaactgcgactgcgctgacaagactagctgcaccaagggaaacagctatggtgttattgtagagactgagaagagttacatctcgactgttgtcatggatgttccagca

SEQ ID NO: 157634 - DNA, 260 bp, Glycine max
caagaggccctcagacaagccactcaggcttccattgcaggatgtctacaaaattggtggtattggtaccgtgccagtgggacgtgttgagactggtgtcgtgaagcccggtatggtggtgacttttggtcccactgggctgacaactgaggttaagtctgttgagatgcaccatgaggctctcacagaggctcttccaggtgacaatgttggctttaatgtgaagaatgttgcagtcaaggatctcaagcgtggttttg

SEQ ID NO: 157635 - DNA, 261 bp, Glycine max
gagagaagaaaagtcaaagacaatgtcagggatcattcacaagattgaggagacccttcatgtgggaggccacaagaaggaggaggagcacaagggtgagcagcaccatggtggagaatacaaaggggagcatcatggtgaacacagtactgaatacaaaggagagcatcatgttggtgagcacaagccggagcaccatggacgagaagagcacaaagaggggttcctagacaagatcaaggacaagatccacggcgagga

SEQ ID NO: 157636 - DNA, 256 bp, Glycine max
ctcttgcatcaccaagtctgagggtaaattgacatctctggatcagtatatatctataatgaaaactgggcagaaggatatcttttacataactggaaccagcaaagaacaactggaaaactctcccttccttgagcggcttaagaagagcaattttgaggtacaatttaaattgtttgatttttattacaagtatatttgctctattatttgttcttttaaaaacatttgtctttctattctgctgagagatgat

SEQ ID NO: 157637 - DNA, 264 bp, Glycine max
cgcgaaccagccagtggccgcggcgtatccaggtggtcgagcgtcttccatcgaaacagggactaagctctacatttccaatttggattatggcgtttccaatgatgatattaaggagttgtttcttgaagttggcgacgtgaaacggcatactgttcattatgacaggagtgggagatccaagggtacggcagaagtagtcttctcgcgccgagctgatgctgtagctgcagtgaagaggtacaacaatgttcagctggatgg

SEQ ID NO: 157638 - DNA, 260 bp, Glycine max
gtttttgatgcaatcaataacgcacaacacttgatatacattacaggatggtctgtttacactgagattacgttggtaagagattctaggaggccaaagcgtaggagatgcaacacttggtgagcttctcaagaaaaaagcacgtgatggtgtcagggttttgatgcttgtttgggatgatagaacttcggttcctttgttaaaagaagatggcttgatggcaactcatgatgaagacaccgagaactacttctacgaca

SEQ ID NO: 157639 - DNA, 260 bp, Glycine max
ctccttttagcaagttaacaacacttttgtcttcgttccattatctagttctcatttctcttcaccctttgcctttgaaagaaatgggtagtcttgaagcggaaagaacaacagtaggattggcagcaagagacccttcagggattctctccccatacacctacaatctaagaaacacaggccctgatgatgtttacattaaagttcactactgtggaatttgccattctgatctccaccagattaaaaatgatcttggc

SEQ ID NO: 157640 - DNA, 256 bp, Glycine max
tgttgctgaggtgatgaatttgattggtgatgtaaggggaaaggtagcagttatggttgatgacatgattgatactgctgggactattgccaaaggtgcagctctgttgcatcaagaaggggcaagagaagtctatgcatgcactacacatgctgttttcagtcctcctgctattgagaggttgtcaagtggtttgttccaagaagttatcataactaatacaattccagtggcagaacagaactatttccctcaa

SEQ ID NO: 157641 - DNA, 253 bp, Glycine max
caagaggccctcagacaagccactcaggcttccattgcaggatgtctacaaaattggtggtattggtaccgtgccagtgggacgtgttgagactggtgtcgtgaagcccggtatggtggtgacttttggtcccactgggctgacaactgaggttaagtctgttgagatgcaccatgaggctctcacagaggctcttccaggtgacaatgttggctttaatgtgaagaatgttgcagtcaaggatctcaagcgt

SEQ ID NO: 157642 - DNA, 213 bp, Glycine max
gagagaagaaaagtcaaagacaatgtcagggatcattcacaagattgaggagacccttcatgtgggaggccacaagaaggaggaggagcacaagggtgagcagcaccatggtggagaatacaaaggggagcatcatggtgaacacagtactgaatacaaaggagagcatcatgttggtgagcacaagccggagcaccatggaggagaagagca

SEQ ID NO: 157643 - DNA, 259 bp, Glycine max
ctcttgcgacaccaagtctgagggtaaattgacatctctggatcagtacatatctataatgaaaactgggcagaaggatatcttttacataactggaaccatcaaagaacaactggaaaactctcccttccttgagcggcttaagaagaacaattttgaggtacaatttaaattgtttgatttttattacaagtatatttgctctattatatgttcttttagaaacatttgtacttctattctgctgagagcatgatga

SEQ ID NO: 157644 - DNA, 259 bp, Glycine max
cgcgaaccagccagtggccgcggcgtatccaggtggtcgagcgtcttccatcgaaacagggactaagctctacatttccaatttggattatggcgtatccaatgatgatattaaggagttgtttcttgaagttggcgacgtgaaacggcatactgttcattatgacaggagtgggagatccaagggtacggcagaagtagtcttctcgcgccgagctgatgctgtagctgcagtgaagaggtacaacaatgttcagctg

SEQ ID NO: 157645 - DNA, 253 bp, Glycine max
cttgccagaaggtgcattgtgcaagtgtcttatgccattggtgtgcctgagcctttgtctgtgtttgttgacacctatggcactggaaagatccctgacaaggagatccttaacattgtgaaggagaactttgatttcaggcctggtatgatctccatcaaccttgatctcaagaggggtggaaataacaggtttttgaagactgctgcatatggacactttggaagagaggaccctgacttcacatgggaag

SEQ ID NO: 157646 - DNA, 253 bp, Glycine max
ccccatttcgcgttggtgcaaagcatccttcgtttcaatttctctctctcagcgctttctgcaatcgaacctttcatctccaaagggatccacaggccgaaggagaaatggggctgacattcacaaagcttttcagtcggcttttcgcgaagaaggaaatgcgaattctgatggttggtcttgatgctgctggtaagaccactatcctgtacaagctcaagctcggagagatcgttaccacaattcctaccat

SEQ ID NO: 157647 - DNA, 238 bp, Glycine max
ctgtatctgaatctgcgtgtgtttgtgaattgttgttgagatctgcatcaaaatcagaaacgataatggctacaccggaccacctcttcaacctccgcaacaacttctaccaaggcgcttaccaagccgccatcaacagcagcgacgttgccaacctctcccacgaagataccctcgagcgcgacacccttgtccaccgctgctacatcgccctcggccagctccagttcgtcatctc

SEQ ID NO: 157648 - DNA, 239 bp, Glycine max
cttgtgaaaggatgggaatcgctgcagagcatggttattttgtgacgacaaatcgaaatgcagaatgggatacttgtattccagtacctgattttgagtggaaacagattgctgagccggttatgcagttatatatggaaacaactgatggttcaaacatagaggccaaagaaagtgctctagtttggaattcgagctatcagaccgagaccttgtgttcatgccaagctaaggagctt

SEQ ID NO: 157649 - DNA, 256 bp, Glycine max
gagagagagagcgagcagtttcagacacagagagaggggtttgggattggagggattgacgctgcgtctcttcctcttctctttcgatccatccctcattactagtgctccaatccagccagctcagcctgcacactcacatatacacatatctgaacgcgtatcgtccctcctatggcttcaaagcgcatcctcaaggagctcaaggacttgcagaaagacccatcaacttcttgcagcgctggtccagtagctg

SEQ ID NO: 157650 - DNA, 257 bp, Glycine max
gcaccaacagcgagaggatgaagcagaacctggacatagatgggtgtaccaacaagggtcaagtgccatggctaaaagcaccaacagcgagaggatgaagcagaacctggacatatttgattttgtgctgagtgaagaggatttaaaccggatcagtcaggttccacaacgcaggcaatacacaggggacatatggctatctgaaaatgggtcttgcaagaccttggaagaactttgggatggagacgtttaagtat

SEQ ID NO: 157651 - DNA, 254 bp, Glycine max
cgaggacggccgtaccctcgccgactacaacatccagaaggagtcaacccttcaccttgtccttcgtctccgtggtggcatgcagatcttcgtcaagactctcactggcaaaaccataaccctagaggtcgaaagctctgacaccattgacaacgtcaaggccaagatccaggacaaggagggaatccccccagaccagcaacgtctcatcttcgccggaaagcaacttgaggacgggcgcaccctcgccgact

SEQ ID NO: 157652 - DNA, 235 bp, Glycine max
atttgatccaaagttcaacattgtctctcccggtgcagacatgggtatatacttcccatacactgaaactgagcgtaggttaacagaattccactctgacattgacgaagctctttacagctcagtggagaatgaggaacacatatgcgtattgaaggaccgcaacaaaccaataatcttcaccatggcaaggcttgaccgtgtgaagaacatcacggggcttgtcgagtggtac

SEQ ID NO: 157653 - DNA, 251 bp, Glycine max
ggaggatgcgtatgagcagattgtattagaaatgattgaacttcgagaactggatactgcacgtgctattttaaggcaaacgcaggtgatgggtgtaatgaaacaagagcagcctgaaagatatttgcgtcttgatcatctcctagttagaacttattttgatccaaatgaggcttatcaagactcaacaaaagagaagcgacgtgcacaaatagcccaagctattgcagcagaagttactgtagtgccac

SEQ ID NO: 157654 - DNA, 250 bp, Glycine max
gaaagaaggtttttttagtatagttaacagcatggagagggaggaagatgttaaggttggagcacagaaattctcggagaggcaagcactgggtacaggagctaagagtgacaaggactacaaggaggcaccaccagcacccttgtttgagccaggggagttaaagtcatggtctttttacagagctgggatcgcagagtttgtggccacattcttgttcctctacatcactgtcttgactgtcatgggt

SEQ ID NO: 157655 - DNA, 250 bp, Glycine max
ggaacatttccttatctatcttcacctccatcttttaacagttcccctcgaaacttctgaagatgggtggcattgcattcggacgcttggatgattctttcagtttaacctcaatcaaggcctatattgctgagttccattcaaccttgctctttgtttttgccggtgttggttcagccatagcctatggtaagttgacatcagatgcagcacttgatcctgctgggttactggcagttgctatttgcca

SEQ ID NO: 157656 - DNA, 250 bp, Glycine max
ggaagtaggaaatagcagagtttagactttagactttagagtcagtgtacgcagaagagtaaaatcgattggcgatgatggagttgaaagagattcagagactcgaaggccacaccgataaggtttggagcttggcctggaacccgaccaccggtcacgccggtatcccactcgtcttcgcttcttgcagcggcgacaaaaccgtccgaatctgggagcagaacctctcctctggcctctgggcctgcac

SEQ ID NO: 157657 - DNA, 270 bp, Glycine max
  unsure (1)..(270): unsure at all n locations
gcataactgaacaaacaaagcaaccctatgtcgaaggtggtttgtgtcaccggagccagtggcgcacttggatcatnggtggccctcctcctccaccagcgtggttatacggtccatgccaccgtccaagacatcaaggatgaaaatgagacgaaacatttggaggaaatggaaggagcaaagagtcgtctccattattttgaaatggatcttcttgacatcgactccattgccgctgccataaagggttgctccggcgtaatccacctc

SEQ ID NO: 157658 - DNA, 254 bp, Glycine max
tgcattggctctaagcggattctgaaggatcttaaggacctccagttagaccctccatactcttgcagcgccggtcctgtagtcggtagatatgtttcattggcaagcgactataatgggtccccctgatagcccttatgctgggggtgtttgtctagttactattcattttcctccggattatccattcaagccacccaaggttgcatttaggactaaagttttccacccaaatatcaacagcaatggtagta

SEQ ID NO: 157659 - DNA, 245 bp, Glycine max
cggtattcggctcgaggaaaaacaagatgcaataaacttgtttttaggttacttccaaccacaggaagggaaacctgcgctctgggagctggattcagattattatatccatgtatctgggattggggatgatctaattcctgagaagtgttctgaaccaaatctcagttcttctggaagaggtggaatgatattcacgcctataccagcttgcagagaagacttctctcgcataaggtggacat

SEQ ID NO: 157660 - DNA, 271 bp, Glycine max
aaaatgcccactttttttcttccaacgctcctcctccttctcatagccttcgccacctctgtctccggccgccgtgacctcgtcggagactttctccggctgccctccgaaactgataacgacgacaacttcaagggcacccggtgggccgtcctcctcgccggttccaatggttactggaattacagacatcaggctgatgtttgtcacgcctatcaaatattgaggaaaggtggtctgaaagaagaaaatattattgtttttatgtatg

SEQ ID NO: 157661 - DNA, 270 bp, Glycine max
attcgctacttgttaagggctgcactataccagaatgtctcagggaagaggcagtgcatctttgcctattgtggtcactgtggtttcactactgtgccttttggaacgtgctaacgcagcaacttactccgttggaggacctgggggatggaccttcaacactaatgcttggcccaatggaaaaagattcagagctggtgatatcctaatcttcaactatgactcaacgacccacaatgtggttgctgtggacagaagtggatacaacag

SEQ ID NO: 157662 - DNA, 270 bp, Glycine max
aaaaaagtgtagtgggaaatggcaggtgcgggtgcaggaggagggtatggggacgcgaaccagaggatagactacgtgttcaaggtggtgctgataggggactcggcggtggggaagtcgcagatactagctcggtttgcgaggaacgagttcagcttggactccaagtccaccatcggtgttgaatttcagacgaggactttggttatcgatcacaagaccgttaaggctcagatctgggacactgccggccaagaacgatacagagca

SEQ ID NO: 157663 - DNA, 267 bp, Glycine max
cctgtgagtaattcccacatggaatgaaccctatgctgatatgcattgtgcttcaataataggaggaattgtgaacaacactttacgtcctcaaatcccaacttggtgtgatcctgagtggaaatctctaatggaaagttgttgggcttctgatcctgtagaaagaccatctttttcagaaatttccaagaagctgaggagtatggctgcttcaatgaatttgaaatagtcaattgatcttgaataagttaattgaccttctcccgt

SEQ ID NO: 157664 - DNA, 267 bp, Glycine max
ggcagcgatggaagaagacttcgacatccccggcggcgaggaaatggatctcggcgaagacgaggtcggcgaggagagggagatcggctctggcggcctcaagaagaagctcctcaaggaaggtcaaggctgggaaacccccgaagtcggtgacgaagtccaagttcattacacggggactttgctcgacgggactaagttcgattcgagccgcgacaggggatctcccttcagcgttacgcgtggacaagggcaaggtaattaagg

SEQ ID NO: 157665 - DNA, 262 bp, Glycine max
  unsure (1)..(262): unsure at all n locations
gggtgatgttgtttggtgccatgattaccatcttatgtttcttccacaatgcttaaagaattataaccgcaaaatgaaagttggctggtttctgcataccccgtttccatcttctgaaattcacaggacattgccatctcgctcagagnctcttcantcatntcttgcagcnganttggnttgattttacaccnacgacnatgtacgacattttgtaagagcangtacacgcantctttgacnagtgggcacaccngtaggg

SEQ ID NO: 157666 - DNA, 272 bp, Glycine max
ctgatatggaggaccttatagttagattaaatcaagaaatagctgcaaaggattttctcgcaacaaagctcaaggatttggaagtagaacttgaaactaccaaacagaaaaataaggagaacttgcagcaggctattctaattgagagagaaaggtttacccaaatgcagtgggatatggaggaacttagaagaaaatcattggaaatggagatgaaattaaagtctgaatcggggagaaattcttatcaggatttgactaaggaatcaatt

SEQ ID NO: 157667 - DNA, 234 bp, Glycine max
gcgcaatgtcatggatatgaggtctatctatggaggatttgctgcagctttgagagatttgaatgtttgggtcatgaatgtggttacaatagactcccctgatactcttcccattatttttgaacgaggtctgttcggtatatatcatgattggtgtgaatcatttagcacctatcctaggacctatgatctcctccatgctgatcatctgttttcaaagcttaagaaaaggtg

SEQ ID NO: 157668 - DNA, 253 bp, Glycine max
aaagagcctttgctttttctttaggcctttccgaattaagtacttgtttcattttctctcgaagcaagaaaaatgttcatcgagagtttcaaggttgagagtcctaacgtgaagtacacagagactgagattcagtccgtgtacaactatgaaaccactgaccttgttcacgagaccaagaatggcacttatcagtgggttgtcaagcccaaaactgccaaatatgatttaaaaaccaacacccatgtcccta

SEQ ID NO: 157669 - DNA, 255 bp, Glycine max
gaggctgcttaatgggattagagagaagcttgatggggtggtggtgaatgggagcttggagaggcgctatgtggggaatttgaatttgtcatttgcttatgttgaaggggagagcttgctcatgggtttgaaggaggtggctgtgtccagtggcagtgcctgcactagtgctagtttggagccttcgtatgtgttgagggcgttgggagtcgaggaggacatggctcacacttctattaggtttggaattgggag

SEQ ID NO: 157670 - DNA, 265 bp, Glycine max
agaaaatactctgcaaaggacaatgatgatctatgcattgtttgttgggatggtggtaatctattgctttgtgatggatgcccaagagcatttcataaagaatgtgcagctctatcaagtattccacgtggtgactggtactgccaattttgccaaaacatgttccagagagaaaagtttgtggcgcacaacgccaatgctgtggcagctggaagggttgaaggagttgatcctattgaacagattgccaatagatgcattcgca

SEQ ID NO: 157671 - DNA, 245 bp, Glycine max
cggctcgagcgcagagccaagacgacggcaaggactaccaggagccggcgccggcgccgctggttgacccgacggagtttacgtcatggtcgttttacagagcagggatagcagagtttgtggccacttttctgtttctctacatcaccgtcttaaccgttatgggagtcgccggggctaagtctaagtgtagtaccgttgggattcaaggaatcgcttgggccttcggtggcatgatctcgccc

SEQ ID NO: 157672 - DNA, 251 bp, Glycine max
  unsure (1)..(251): unsure at all n locations
gttaacatgaaaggacttgatggcattcaaggaccagtatatgtgggaactggatgtgttttcaatagacaagcactttatggctatagccctccttctatgcccagcgtaccaagatcttcatgctgttgcttcccctcaaagaagtccaccaacgatgtctcagactttcaaagaaacgcaaagagggaagaatcttaggccgccaattttaagcgtaaggaacgtgtacaattcgantagcantagag

SEQ ID NO: 157673 - DNA, 260 bp, Glycine max
  unsure (1)..(260): unsure at all n locations
gacacataaacccggcggtgacattcgggttgttcctaggacgcaaggtgtcattgataagggcgttgttgtacatggtggcacagtgtgccggtgctatctgtggtactggattggccaaggggttccagaaagcatactacataangtatggaggtggtgctaactctgttgctgatggctacaacaatggtactgctttgggtgctgagattattggtaccttcgttcttgtctacactgtcttctctgccactgac

SEQ ID NO: 157674 - DNA, 228 bp, Glycine max
agcttctcgccggcgagagcggcatcacccccatcgaccgcttcgacgcctccaagtttcccacgcgcttcggcggccagatccgcggcttctccgccgagggctacatcgacggcaagaacgaccgccgcctcgacgactgcctccgctactgcattgtcgccggcaaaaaggccctcgaaaacgccgagcctgccccagacaaccatctccaagatgtataggagc

SEQ ID NO: 157675 - DNA, 263 bp, Glycine max
atcatttctccatttccattttctctctcacttttcaagaatcgtaagctatgggaaagtcttacccaactgtgagtgctgattaccagaaggccgttgagaaggcgaagaagaagctcagaggcttcatcgctgagaagagatgcgctcctctaatgctccgtttggcatggcactctgctggaacctttgacaagggcacgaagaccggtggacccttcggaaccatcaagcaccctgccgaactggctcacagcgctaac

SEQ ID NO: 157676 - DNA, 262 bp, Glycine max
ggtttacagagaagcgaagaggcgcaccgttagcagtaactcgtggaattgctagcaatggcgaggatcaaggtttacgagctgaggcagaagacgaaggctgatctgttgaatcagctgaaggacctcaaggccgagcttgccttgcttcgtgttgctaaggtcaccggcggtgcacctaacaagctctctaagatcaaggtggtgaggttgaacattgcccaggttttgacggtgatttctcagaagcagaaggccgcgt

SEQ ID NO: 157677 - DNA, 258 bp, Glycine max
tgcacagaagagtgtgagattaatgggtatgtgatcccagagggagcattggttcttttcaatgtttggcaagtaggaagggaccccaaatactgggacagaccatcagaattccgtcccgagaggttcttagaaactggtgctgaaggggaagcagggcctcttgatcttaggggccagcatttccaactcctcccatttgggtctgggaggagaatgtgccctggtgtcaatttggctacttcaggaatggcaaca

SEQ ID NO: 157678 - DNA, 268 bp, Glycine max
ctcctgcagaccgtgctagggccattggtgtggagcttgtgaactttgatgaggccattgccactgcggatttcatctctctacatatgcctcttacggctgctacatcaaagatactcaatgacgagacatttgccaagatgaagaaaggagttcgcatagtcaatgttgctcgtggaggggtcattgatgaggatgcgcttgttagggcactggattctggaattgtagctcaggcggctcttgatgttttcactgaggagccacc

SEQ ID NO: 157679 - DNA, 256 bp, Glycine max
gaaaccagtggtgttacttgttggaggagcattagctcttttttggacttttgatgttttctcttgtggagacaagctactttgaagtaacaccttaaagagacttcttggcaacgaatacaagaagatcaatgacacgtgagctgtatccccactcgttgtcgtaccaagaaacaagcttcacaaagttcttattcaatgcaattccagcctttgcatcaaaaatacttgatctgctatcgccgataaagtcagt

SEQ ID NO: 157680 - DNA, 257 bp, Glycine max
gtagccttcccgaagaattgttggtattacaagaaaagtacacgtcctcgtgccgattatatagtttgcaggaacttgtatctgcgacctccaactttgtatctgaaaatttggttggcaaaggtggctgtagttatgtttacagaggatgtcttccagatggcaaggaattggctgtgaaaattttgaagccatctgaaaacgtgataaaggagtttgttcaggaaattgagatcattacaactttgcgccacaag

SEQ ID NO: 157681 - DNA, 258 bp, Glycine max
ctcattgttgaaaagaaaccctagcaagtggagcaatggcagacgttgaagtcgatgtggcggcacagcagcagcagggctgccgaagaagagaacgttcaagaagttcagttttcgaggcgtggatctcgatgcacttctcgacatgtccacccatgaactcgtcaagatgttcagtgcccgcgctcgtagaaggttccagagaggcctcaccagaaagcccatggccttgatcaagaagctccgtaaagcgaaaag

SEQ ID NO: 157682 - DNA, 260 bp, Glycine max
ggaggtttggaaaattgcagctgatctgctagtcaagcctgtccaggtgaacattgggaatgtagatgagcttgttgctaacaagtctattactcagcatgttgaagtattgccaccaatggagaaacaaagacggctggaacatattttgcggtcacaggatcaaggatcaaagataattattttgtgttctaccaagaaaatgtgtgatcaacttgctcgtaatctgacacgtcatttcggagctgctgctattcatg

SEQ ID NO: 157683 - DNA, 264 bp, Glycine max
gccaaaattctcttcctcggtctcgataatgcagggaagaccaccctccttcacatgctcaaagacgagagattagttcagcaccagccgacccaacaccccacttcggaggaattgagcattgggaagatcaagtttaaggcttttgatttggggggccatcaagttgcccgcagagtctggaaagactattacgcaaaggtggatgcagtacgtttacctggttgatgccttgacaaagagacggtttcagaatcaaagaag

SEQ ID NO: 157684 - DNA, 253 bp, Glycine max
ttctcaacctactctgacaaccagcccggtgtgttgattcaggtctatgaaggtgaacgaacgaggactcgtgacaacaatttgcttggcaaatttgagttatctggaattcctcctgctcccagaggtgttcctcagatcactgtttgcttcgacattgatgccaacggtatattgaacgtgtctgcggaggacaaaaccactggacagaagaacaagattacaattaccaacgacaagggcaggctttcta

SEQ ID NO: 157685 - DNA, 244 bp, Glycine max
ttggtggatttccttgtgggggccggcatcaagccaacatctatagtgagttacaaccatctgggcaacaatgatggcatgaatctctcagcccctcaaaccttccggtctaaggaaatctccaagagcaatgttgttgacgatatggtcaacagcaacgccatcctctatgagcccggtgaacatccagaccatgtggttgtcattaagtacgtgcctaatgtaggggacaacaagagggcca

SEQ ID NO: 157686 - DNA, 257 bp, Glycine max
gaaagggaaacttcccaaagatgctaggcaaaagctacttaactggtgggaattacattacaaatggccatatccttcggaatcagagaaggtggcattggctgaatcaactggtttggaccaaaagcaaataaataactggttcataaaccagaggaagaggcattggaaaccatctgaagacatgcaatttatggtgatggatggcctgcatccgcagagtgcaactctctatatggatggtcactacatggcag

SEQ ID NO: 157687 - DNA, 258 bp, Glycine max
gctgaatctctgaaagattacgaggaggattttgaaaatcctgaaaagaagcccagaaggaacaagtacgctttcgcatgtgctattttggcttcaatgacttccatcctactaggttaatatattggagtgatgagtggtgctgcactgtacatacaaagatatctcaaggtatcggacgtgcaaatcgaaatcctgaacggtatcataaacttctactctcccgtcggttctttcatcgccggcagaacctccgac

SEQ ID NO: 157688 - DNA, 258 bp, Glycine max
gtgaacacagtgccgtgttttcctcattgccactggttctcaaatggcttagggacaccctcagttgcttcttccccacttgatgaaaacatgtgctgatcatggtgtctacttcaagaaggcactctttgtacctggtttatcagtgtatcacaaagttggatcccatgctttaccagcgacagattctgatgttgacctgtcgtggcagcttactctacaaagagtgtgggaaaatctcatgcaagggaacaaaga

SEQ ID NO: 157689 - DNA, 254 bp, Glycine max
ctcgagccgtttgcagtaatgggtgctctggatcacatatcggaactctttgactgctccagtggcagttccaagcacaagaagcgcaacaattgcagacggtggaggtgaaagtgaagatggactgcgaaggatgcgagaggaaagtgaggaaggcggtggaggggatgaaaggcgtgaaccaggtggatgtggagcgtaaggccaacaaagtcactgtggtcggctacgtcgaggcctctaaggtggtcgcc

SEQ ID NO: 157690 - DNA, 254 bp, Glycine max
ggaaggttggtgttctcactgcggtcatcaagcatatgtcccctgatattgccaaaattcgcaagcttgtgaggcagtctaagtgtcttcaagacaaaatgactgcaaaggaaagtgcaacctggcttgccatcatcaaccaagaggaagccttggctagagagctttaccctgactattgccctccattttcctctgctggaggtaatggatccttggtgatcaatgattgcagcgagtatgatgttgatggg

SEQ ID NO: 157691 - DNA, 254 bp, Glycine max
ggcgaaactcgagagtgtaaggttttgcatttcatttgacgaagagtgagagagtcttatctgtcgtctctgatctctgatcgcatcttcattccgaaaatggctgtttcggctatcactggagcgaggctaactctagggatgtctctttcctcttccacgcgatcacgaacccatgcaatggccgtatctatcgaccccaagaccgataacaaactcactcttaccaagtccgaggaagctttcgctgcggc

SEQ ID NO: 157692 - DNA, 252 bp, Glycine max
  unsure (1)..(252): unsure at all n locations
gtccaagaagatgttggaggagacactcaggtggagatcaacctataagccagaggaaattcgctggcatgaggttgcaatggaaggagagactgggaaattgtatagagcaagttttcatgatagacaaggaaggactgttcttattttgagacctggaatgcagaacactacttcaatggagaatcagttgcggcatcttgtgtatcttttggaaaatgccatgcttaatcttcaccgggncaagaacaa

SEQ ID NO: 157693 - DNA, 247 bp, Glycine max
ctcagtctctgcacacacctcagaagaacagaacagaaccaccagtgcttttcaaagacggtttcagcaatggcgttcttaaataaaattggaaatctggtcaagaattctgctgtcaagcacatcaatcaagatttttcagtgtctaccccatcacttttccaagcaattagatccatgtcatctgcaaagctttttgtcggaggtatttcttacagcactgatgatatgagtttcgggagtcttt

SEQ ID NO: 157694 - DNA, 256 bp, Glycine max
gtttggcagcgacacgtatcttcatcaataatcgcagaagcagtttccggtgcatctcatcgtcttccaaaatgaacgacgcagatgtctcgaagcaaatccagcagatggtgcgtttcatccgccaggaagctgaggagaaagccaacgagatctctgtatctgccgaagaggaattcaatatcgagaagctgcagttggttgaagccgaaaagaagaagatcaggcaagaatacgaacgcaaagagcgccaagt

SEQ ID NO: 157695 - DNA, 267 bp, Glycine max
ctttattttattttctttctttctttctccgatcgcatagctcgctcgcaaccaccatgccttcccgaagaagaactctcttgaaggtcatcattctcggtgacagtggggtggggaagacatctttgatgaaccaatatgtgaataagaagtttagtaatcagtacaaggcaaccattggagcggattttttaaccaaagaagtgcaattcgaagataggcttttcaccttacagatttgggatacagctggccaagaaagattcc

SEQ ID NO: 157696 - DNA, 234 bp, Glycine max
ccgatgttatcaccattgagaactctcgctccgacgagaagcttctgtcagtcttccgcgaaggtgtgaagtatggtgctggaattggccctggtgtctatgacatccactccccaagaataccaccaactgaagaaattgctgacagaatcaacaagatgctggcagtgctcgagaagaacatcttgtgggtgaaccctgactgtgggctcaagacccgtaagtacactgagg

SEQ ID NO: 157697 - DNA, 282 bp, Glycine max
gttcggctcgatcgcggaagctactcaaggtcttacttacagggacgccggcgtggacatcgacgccggctccgaactcgtgcgcaggatagcgaagatggcgccagggattggaggcttcggtggtttattccctctcggtgactcgtacctcgttgctggtaccgatggcgtgggaacgaaggtgatgcttgccttcgaaactggaatccacgatactattgggattgacctggttgcgatgagtgtgaatgacattgttacttcgggggcgaagctttg

SEQ ID NO: 157698 - DNA, 263 bp, Glycine max
tcaccaacaaggttgtgcaacaataccgccatggatgggaatcggaggctgccgccgtcgtcgaggacgtcaagaaaaaccccgacgccgccgtctccggcaccgtcatccgccgccgccttcagctcatgatgtacaacaacatgtaccgcataatgttcgaccggaggttcgagaccgaggaggatcccatcttccggaggctaagacccttgaacgcagagaggtctcgcttggcgcagagctttgagtataactatggt

SEQ ID NO: 157699 - DNA, 261 bp, Glycine max
cctccccctcctccaccttcgtcctccaccgcgccttcggctcccgccaggtcttcacggcgaaccccaccgttgtccagcacattctggggaccggcttccctgtgtaccccaagggcctgactctgaatcgggcccttggagacttcctcggccagggtatcttcaactcagatggcgctggatggaaagttcagcgccaaatttccagccacgagttcaacactcgcgctctcggcaagttcgtcgagaccgtggtcg

SEQ ID NO: 157700 - DNA, 212 bp, Glycine max
ctacccctttacatcccttcctcttgttgcatattgtactttgcgtgcaatttgccttctcacaggaaaattcatcataccaacgctttcaaaccttgcaagtgccctctttcttggacttttcctgtccgttatagtcactagtgtgctcgagctgcggtggagtggtgtgacgattgaggctttgtggcgtaatgaacaattctgggtta

SEQ ID NO: 157701 - DNA, 194 bp, Glycine max
atcatattatctgaacttctggtagaaaatggcagctgaagatgataggaatcttgtcgaaatcatggaaaccctgaatccaatagatgttgctaaatacatgaattttgttggtgccccccaagctggtgctatagctacattttcgggcacaactcgcgacacctttgagggaaaaacaatcgtggatttga

SEQ ID NO: 157702 - DNA, 269 bp, Glycine max
gcaaaattctcttccgtttcaggattagggtttcaccgttacagtgaaacatggcaagaccaaagcgaatctctctgcgtatctttgcgctgctcctcttgatttccacctcttcgtttcaggttctccgcgcttccgatgacgccgatgatgatgcgatcttctatgattcgttcgacgaggattttgaagaccgttgggttgtgtctcagaaagatgagtacagtggtgtctggaaacatgccaagagtgagggacatgatgattat

SEQ ID NO: 157703 - DNA, 281 bp, Glycine max
ttcggctcgaggaggaagcagaaatgccacggggaggctgcaggatgctcattggatgttgatgatggaaggttcaaagtatgctgaaaggttgccaattggactagagagagtgattcggacagtttcgtccgagactgtgaagcatttttacaagaagtggtaccatttatgcaatatggcggttatagcagttggagatttttctgatgcacaggatgtagttgagttgataaagactcattttggccagaaaattcccgatcctgatcctccactta

SEQ ID NO: 157704 - DNA, 257 bp, Glycine max
gtctctctctgtgtctctctctctccacacttagattttgtgaatggctgaagtggaagagcgacaggtcatcggcgtccacaccgttgatgagtgaaggctgcaactccagagtgcgcaagactccagaaaactgattgtggtggagtatactgcgtcctagtgtcgtcgatgccgttttatcgccccagttctcgcacagactgcagaggaaactcgtgaattgatcctcctcaaagtggatgtgcgagaagtga

SEQ ID NO: 157705 - DNA, 261 bp, Glycine max
caggaactttgttgctgatgctgctatcataactgttcctattggaatcctaaaagcgaatttgattgagtttgaaccaaaacttcctgattggaaggtttcagcaatttcagatcttggtgtgggcaatgaaaataagattgccctaagatttgacaaagtattttggcctaatgtagaactcttgggcactgttgctccgacctcttatacctatggcgataccctaagacgaagatgccgaacaagatgggggtgaac

SEQ ID NO: 157706 - DNA, 255 bp, Glycine max
atggcatgaatctctcagcccctcaaaccttccgctctaaggaaatctccaagagcaatgttgttgacgatatggtcaacagcaacgccatcctctatgagcccggtgaacatccagaccatgtggttgtcattaagtacgtgccttatgtaggggacagcaagagggccatggatgagtacacttctgagataagcatgggtggaaagaacacaattgtgttgcacaacacatgtgaggattcactgttagctg

SEQ ID NO: 157707 - DNA, 264 bp, Glycine max
atttttctcactgtcttgtctctccagagaactgtatagagagagatggcagctgcaacatctggtgctgtgttaaatgggttgggatcttccttcttgagtggaggaaacaggagccaaacccttctggccactgctattggaggcaaagttggtgctgctgctgttactgttagtcctagaagactcattgtggtagctgctgctgcaccaaagaagtcatggctccctggtgtcagaggtggtggcaacctcgtcgaccca

SEQ ID NO: 157708 - DNA, 183 bp, Glycine max
gttccaatatattccattctctctgtgtatttccctacctctcccttcaagatgcagatcttcgtcaagaccctcaccggcaagaccatcacccttgaggtggaaagctctgacaccatcgacaacgtcaaggccaagatccaggacaaggaaggaatccccccggaccagcaacgtctgatt

SEQ ID NO: 157709 - DNA, 264 bp, Glycine max
gctgaatctctgaaagattacgaggaggattttgaaaatcctgaaaagaagcccagaaggaacaagtacgctttcgcatgtgctattttggcttcaatgacttccatcctactaggttacgatattggagtgatgagtggtgcagcactgtacatacaaagatatctcaaggtatcggaactgcaaatcgaaatcctgaacggtatcataaacctctactctcccgtgggttctttcatcgccggcagaacctccgactggata

SEQ ID NO: 157710 - DNA, 267 bp, Glycine max
gataagcaactttgccagtatgtggttcattcttctctttgtctccatttttaccacttcaattcttgagcttaggtggagtggggtcagtatagaagactggtggagaaatgaacagttctgggttatcggtgggacatctgcgcatctctttgctgtgttccaggggcttctaaaagtgcttgctgggatcgatacaaattttactgttacatcgaaggcatcggacgaggatggggactttgccgagctttatgtgtttaaatg

SEQ ID NO: 157711 - DNA, 267 bp, Glycine max
tacacacagttgaggtggttggttcgcgttctcgggtaccggccattaacaaaatattgacagagtttttcaaaaaggagcctaggcggacaatgaatgctagtgagtgtgttgctaggggctgtgcgttggaatgcgcaattcttagtccaacgttcagagtacgagaatttcaggtcaacgaaagcgttcctttctcgatttctctttcatggaaaggttctggtcgagatgcacaggacaatggatcagaaaatcagcagagtt

SEQ ID NO: 157712 - DNA, 267 bp, Glycine max
ctttctccgagaacaaaaaagaaaaaaaaaaaaatccgcgattggcccttcccttggaaaagtgaaacccaaaattacgaccgaaagagaagagcgttttagaagtgagaaaagatggggttgtcgtccacgaagctgttcagcgggttttttccgaaaaaggaaatggggatcctgatggtaggccccgatcctgctggaaggacaaccatctttaaaaaccccaaccttggaaaaatcgtcacgattatccccacaatgggtttt

SEQ ID NO: 157713 - DNA, 249 bp, Glycine max
  unsure (1)..(249): unsure at all n locations
cttcatttttcaatcacacatggccatgccaaaacacaaacaccatgttcacaacactcccaacacattcaaatctaccaccaatcaacaacaacaaaaacaacaatatcaacaacttcaagctcatcaacaacaacaacaacaacaacacactcagcttcctctaaacctaccattcttcttctacccaacaataccatcaacctttnttntatctnatnctcttnaaccctattttcccatcatata

SEQ ID NO: 157714 - DNA, 251 bp, Glycine max
ccatctctgatctcactcaccattcaccaacctgcttctctgttctcttctttcccttcccaagaagaagaagaagaagatgccttcttcagaatcatcaacaggcttctccgaaaccatttgtgtgaccggcgctggtggcttcatcgcctcttggatggtcaaactcctcttggagaaaggctacactgtccgaggaaccctcagaaacccagatgatcccaagaacgggcacttaggagattttgagg

SEQ ID NO: 157715 - DNA, 247 bp, Glycine max
cctaacctatcaaacttgaagaaataggggttcgggtgccaactattatggtctctccttggatcaagaaagggactgtgataagtggcgccaaaggacctgctgaaaactcagaatttgagcactcttcaattcctgcaaccataaagaagatgttcaacctttctgctaactttttgactcacagagatgcatgggctgggacctttgagcatgttgtgggggatttaggttcacccagaacaga

SEQ ID NO: 157716 - DNA, 236 bp, Glycine max
acaggctgctaagagcattgtggcaagtggacttgccagaaggtgcattgtgcaagtgtcttatgccattggtgtgcctgagcctttgtctgtgtttgttgacacctatggcactgggaagatccatgataaggagattctcaacattgtgaaggaaaactttgatttcaggcctggtatgatctccatcaaccttgatctcaagaggggtggaaataacgggtttttgaagactg

SEQ ID NO: 157717 - DNA, 228 bp, Glycine max
gctcgagctttcttcttcttctgttaaaagagccgttgctttttctttaggcgtttccgaattaagtacttgtgtcattttctctcgaagcaagaaaaatgttcatcgagagtttcaaggttgagagtcctaacgtgaagtacacagagactgagattcagtccgtgtacaactatgagaccactgaacttgttcacgagagcgataatggcacttatcagtgggttt

SEQ ID NO: 157718 - DNA, 264 bp, Glycine max
cattttctagcttccaaaccctaacactcctcttcctcttcgatcatcacctctccacaatgccgccgaagttcgacccctcccagatagtcgacgtcttcgtccgcgttaccggcggcgaagtcggcgcggcgagttccctggccccgaagatcggtcccctcggtctctcccccaagaagatcggagaagacatcgccaaagaaaccgccaaggactggaacggcctccgcgtcaccgtcaagctcaccgttcagaatcgtc

SEQ ID NO: 157719 - DNA, 243 bp, Glycine max
ctagggttatcatttctccatttccattttctctctcacttttcaagaatcgtaagctatgggaaagtcttacccaactgtgagtgctgattaccagaaggccgttgagaaggcgaagaagaagctcagaggcttcatcgctgagaagagatgcgctcctctaatgctccgtttggcatggcactctgctggaacctttgacaagggcacgaagaccggtggacccttcggaaccatcaagca

SEQ ID NO: 157720 - DNA, 258 bp, Glycine max
caaacaaacactcccattttctctctttctctttctctccgacctagcgagaccgagcgatccgatcctaaccccgcgatgctccgccgcgcaaccacctccctcatctccggcgcctcccgccgccgcctctccaccgacgtgccggcgacgccgcggcggattccgtcttcgcggaggcgtggaacaaagtgagccccaacatcgacccgccgaagacgccgctggcgtacatgaacccccgaccacccactcctt

SEQ ID NO: 157721 - DNA, 257 bp, Glycine max
aaacaattagagggtttaaattgattctttctggagaattagatggtcttcctgaacaagccttttatttggtaggtaatatcgatgaagctactgcgaaagctacgaacttagaaatggagagcaatttgaagaaatgactttaaatctttgtgtactgacccccaatcgaattgtttgggattcggaagtgaaggaaatcattttatctactaatagcggacaaattggagtattacgaaatcatgcgcctattg

SEQ ID NO: 157722 - DNA, 252 bp, Glycine max
cctggttccagtgaagcagatgagatctacaaaatatgcagtgtgataggtagtccaaccactgaatcttgggcagatggactcaaacttgccagggatatcaactatcagtttccacagcttgctagtgtacatctctctacactgatcccatccagaagtgatgatgcgatcagccttgtgacatcactttgttcatgggatccctgcaagagaccaacagcagcagaggctcttgaacatcctttcttt

SEQ ID NO: 157723 - DNA, 264 bp, Glycine max
gaggttttgatgcaacgctgtcactgagaaaggatctctatctacgaaggagcggaataaaacccttctctctgtgattaagagaatggcttcagatcggaaacttcacacttttgaggaggtggcaaagcacaaccagaccaaggattgctggctcatcgtttctggcaaggtgtatgatgtcacccctttcgtggaggatcatcccggaggtgatgaggttttgttatctgcaacagggaaagatgcaaccaatgactttga

SEQ ID NO: 157724 - DNA, 260 bp, Glycine max
gagaatggctcccaagggtttaacctttctggctgtgttaatatgcgtttcagcactgtcactgagtccttctgttgcgggggaagggcaaaataatggccttgttatgaacttctacaaggaatcatgccctcaggctgaagacatcatcacagaacaagtcaagcttctctacaagcgccacaagaacactgctttctcctggctcaggaacatcttccatgactgtgctgttcagagttgtgatgcttcgactgttg

SEQ ID NO: 157725 - DNA, 257 bp, Glycine max
gtggactgcagcttctcaaagatggccagtgggttgatgtgcctcctatgcgccactccattgttgttaacattggtgatcagcttgaggttatcaccaatggtaagtacaagagtgtggagcaccgtgtgatagcacaaacagatgggaccagaatgtccattgcctcattctataaccctggcagtgatgctgtcatctaccctgctccagaattgttggagagggaggcagaatggaaaaaccagctctaccca

SEQ ID NO: 157726 - DNA, 222 bp, Glycine max
actacctatgttccattgcaatgggtggaccttcacgtggggcgtggctgcacgtggtggaacaaacgtgtgccttcgcaccacagctgcacgtgacatatacaggaacatagtagtccacaatgtgacacacatgtgctgtgcccccgttgtgttcaacgtaatcttggaggcaagacaaagtcaaaggattgacataaaggtaataagtgggaagagaaa

SEQ ID NO: 157727 - DNA, 250 bp, Glycine max
ctcgagccgctcgagccgcttcgccggatgatttagagaaggcttacaagagagccgccattgagaaccaagctgacaaaggcggtgatccttagaagttcaaagagcttgctcaagcctatgaggttctgagtgaccctgagaagcgtgaaatttatgacacatatggagaagatgctcttaaggaaggaatgggtggtggtggcggtggccatgatccatttgatatcttcagttctttctttggtgg

SEQ ID NO: 157728 - DNA, 258 bp, Glycine max
ggatctcttcgttccttcgattcgttccatttcttccaaaatggccaaagacccagttcgcgttctcgtcactggagctgcagggcaaattgggtatgctcttgtccctatgattgctaggggagtgatgttgggtcctgaccagcccgtgatgagccctctgatggataatacgatggatgaacttcattcgcaaggaaaaaccattgaagacattgtacaagttctgaacaggactccaatgcatcctcgcattgt

SEQ ID NO: 157729 - DNA, 257 bp, Glycine max
tattcgtgtgtgtttgaagtggaagaaagagaacgcataacacagaacacagtgcagacagcaagtgatgacgtcgaaacagacatacagcgtgtgcttctgctggcggcggcggttcaagctggcgctggcggaggcgccgtcggaaatcaagaccctattcaatgagtactccgagaatgagctcatgacaccttcgcatcttaagagattcctggtcgatgtgcagaggcaacagaaggccactgaagaagacg

SEQ ID NO: 157730 - DNA, 254 bp, Glycine max
atctggagattcatactatggctctcacgtgatgcagtatggtgatgtacggcttagcagtgatgttctcttccattatttgggtacagatcctgctaatgataatttcacttttgtggacgaaaactccttatggtcaccttcaaaaccagtcaaccaacgtgatgctgatctcatccatttttgggataagttccgcaaagctcctgagggttctctcaggaaaaatgcagctcagaaacaagttttggaag

SEQ ID NO: 157731 - DNA, 237 bp, Glycine max
gacggcgcggactgagactggggcttccgggattgcagtctcccgaacgagattcagatctttgcttgagaagttcaattcagtttgatgaaaaaccactgtttcctttgcatcctgctactgatgatcaccattcctcatcaaagcctgctgttttgggtaacaaaagagggttctcagatgtcatgagtggattcgccgaggagaaattgcttgttagttctgaggtcaacacaa

SEQ ID NO: 157732 - DNA, 249 bp, Glycine max
gatgccatcaactttgacttgcctcatgtggttgccactgctcctaagttcgatgggatcacccatgttggaggtgacatgttcgtgtccattcctagtgctgatgctatttacatgaagtggattctgcatgactggagcgacgagcactgcatcaagatcttgaagaactgcgggaaggcattaccggagagcacaggaaaagtcataatggtggatcgcgttcttcgacccgaaggcaacgatctc

SEQ ID NO: 157733 - DNA, 236 bp, Glycine max
gaaatgatcagcttggcagtgcacagaaacctcctcaaactgtatggattttgcatgacaccaacagaaaggcttttggtttatccttacatgtccaatggcagtgttgcttctaggctcaagggtaagccagtgttggactggggcacaaggaagcaaattgccttaggagcagcaaggggactactataccttcatgagcagtgtgatccaaagatactccatagatatgtgag

SEQ ID NO: 157734 - DNA, 227 bp, Glycine max
aaaacaaagtatagagtgaaagaatgggtgagaaaagcaagattttgatcataggaggcaccggctacatcggcaaacatatagtggaagcaagcgcaaaggctggaaatcccacttttgctttggtgagggaatccacactctctgacccctccaaggcacaactcatccacaattttgaggctttgggcgttaatttggtccgcggggatctgtacgatcatgag

SEQ ID NO: 157735 - DNA, 260 bp, Glycine max
tgttggaagttggcaatggaggcatgacttaccaggaatatcgtgctcacttcagcatctgggctttagcaaaggctcctctattgattggctgtgatgtaagagatttgactgctgaaacacttgagattttgagcgataaagaagtcgttgccatcaatcaagactctcttggagtccagggaaggaaagttcaagtttctggagcagatggttgcagacaggtttgggcaggtcctttgtcaggaaaccgattggct

SEQ ID NO: 157736 - DNA, 279 bp, Glycine max
  unsure (1)..(279): unsure at all n locations
atatagcccaagccctatacaaccaaaccctaacacacacccatttgattcagtttccatggctagcctcaaggttgcatttttggctgcagtgctctgcatggttgtggtgagtgcacccatggcacatgcagctatcacgtgcgggcaggtgacgaatagcctngatcaattgcatcggttacctccagaacggaggaacgccgccgtcgggatgctgcaacggagtgaagagcctcaatgccgccgccaagaccaccgccgaccgccagacggcgt

SEQ ID NO: 157737 - DNA, 273 bp, Glycine max
gcaaaagttaagggatgagattgacagagttcttggagcagggcaccaagtgactgagccagacatccaaaagctcccatacctccaagcagtggtcaaggaaactcttcgtcttagaatggcaatccctctccttgtaccacacatgaacctccacgacgcaaagcttgggggctatgatatcccagctgagagcaagatcttggtgaatgcatggtggctggccaacaaccctgcacactggaagaagccagaggagttccggcctgagag

SEQ ID NO: 157738 - DNA, 276 bp, Glycine max
ggcactcagagctaagggaatcgatgaagatcctcgaaactatttgacattcttctgccttggcaaccgggaagtgaagaaaccaggagaatatgagccttctgagcaaccagatcctgattcagattatcagagagcccaagaggcccgacgattcatgatttatgtccataccaagatgatgatagttgatgacgaatacataatcgttggatctgccaatatcaaccaaaggtcaatggatggtgctagggactctgagattgccatgggtgc

SEQ ID NO: 157739 - DNA, 278 bp, Glycine max
ttacgctctctcactcacaaacgcacactgaattcaaaaacatcgaaagagagaggcatggccgagcaaaccttcatcatgatcaagccagatggcgttcaaagaggccttattggcgagattattagcagatttgagaggaagggtttttacttgaaagggttgaaactcgttactgtggaccgtccttttgctgagaagcactatgctgatttgtctgcaaagcctttctttagtggtttggtggattacattgtctctggccctgttgttgccat

SEQ ID NO: 157740 - DNA, 276 bp, Glycine max
tgctactgagtttccacactgcataccttaggtcttccgaattcgaagttaatttgcaagatggctaaggaaaaggctcagatcaacattgtggtggttggtcatgtggaccctgaggaggcaaccaccattaacgagctgaagaagcctgttgtggagaaagaagctccagggcatgccatatgagggcatgcacgtacggcctcggaggggaaccagaaaattatgttaacaaaataatctggaaccctaatgtatcagtgtcatcatcagtgt

SEQ ID NO: 157741 - DNA, 148 bp, Glycine max
cgttctatatcactctcaactttactcctcttcaatcagttgcctattccttgctactccaatggccactgtcgaggttgtgtcagccaaggttgccctcccagaggacacaaaagaggcatcattgaaggttgacgaggagaagaac

SEQ ID NO: 157742 - DNA, 278 bp, Glycine max
cttagtttcaagaaggagaaagactctaaggttgtatgcaagaggaagctcacaaaggagcaagttgctcagttccgagaagcagttaagaaggactattatttccagatgtactatgatgccttgccgatctggggatttattgggacggttgacaaggaagggacaactgaccctagtgagtacaagtatattctttacaagcacattcagttcgatattcattacaacaaagatcgcgtcattgaaatcagtgcccggatggaccctcattctgt

SEQ ID NO: 157743 - DNA, 276 bp, Glycine max
gcatctgattgggctaccaatgggggcaaatacagggttaactacaagtatgcaccctatgttgctgaattctctgaccttgttctgcacggttgtgcagtggatccaattgagcagcagttggccaagtgtgacaatgctcctcaaagttctgaggcaactacaacaattccttcttctggtgttacaccagcacaaagaatcaaaatggagaatttcaggaagaagcacatgacatactcctactgctatgcaaagtcagatacaaagtccctc

SEQ ID NO: 157744 - DNA, 271 bp, Glycine max
gggagctacacttgctactcatttggacaaacctcgtgtttacatgggatgcatgaaatcaggcgaagttttctctgagctgaaccataaatggtatgaaccagagtggtggaaatttggtgacaaaaaatcatactttcgtcatgcatcgggagaaatgtatgttatatcacgagctttggctaaatttatatcaataaacagatctattcttcgtacctatgcccacgatgatgtgagtgctggatcctggtttattgggcttgatgtg

SEQ ID NO: 157745 - DNA, 274 bp, Glycine max
gtcaaatttttcaagctacagaaaagaggccaacgcctgacgcgttcaaactctttacaggttcaccatgggtcatcttgagccggccctttctggagttctgcatttttggttgggacaatttacctcggaccctactgatgtattttacaaatgtgaaattatctcaagaagggtattttcactcagttgtttgcaatgtgccagaatttaagaacacgacagtaaatggtgacttacgatatatgatctgggacaatcctccaaagatgga

SEQ ID NO: 157746 - DNA, 274 bp, Glycine max
attgaatctcagaattctctaaaagagatctttttctgctctttgaagaaagaagggtctttgcttgattttggagatgtctctgctctcagatctcatcaaccttaacctctccgataccaccgagaaggtgatcgcagagtacatatggatcggtggatcaggaatggacctgaggagcaaagcaaggactctcccaggaccagttagcgacccttcagagcttcccaagtggaactatgatggttccagcacaggtcaagctcctggtgaa

SEQ ID NO: 157747 - DNA, 275 bp, Glycine max
cagaaaacagcatcgaacccgtcgtagcagaaaaacttgtcaccatggtttcttccgacaaggatccacgagaggatgtccttcaagcctggtacatggatgatagtgatgaagatcaaagactcccccaccacaaagaacccaaggagtttgtctcgttggaccaacttgctgaatttggagtccttagctggaaactagatgctgataaccatgaaaatgatccagagctgaagaagattcgtgaagagcgtggttacacctacatggatgtt

SEQ ID NO: 157748 - DNA, 275 bp, Glycine max
ctacaagcctattccaaagccagttcccgtgtataagcctataccaaagccagttcccatttataagccaattcccatttttaagccaataccgaaaccagttcccatttataagccaattcccatttttaagccagtaccgaaaccagttcccatttataagccaattccaatttttaagccagtaccaacaccaattcctttttttaagcctataccaaagcctgttcctattgttaaacctattcctattccagtttttaaacccataccta

SEQ ID NO: 157749 - DNA, 274 bp, Glycine max
caccactggtgttaagaggctatatcagatgcaggcgaatgggactctactcttccctgctattaatgtcaatgactctgttaccaagagcaagtttgacaacttgtacgggtgccgtcactctctccctgatggtctgatgagggctactgatgtgatgattgctggaaaggtggctgttgtggctggatatggtgatgttggcaagggttgtgctgctgcattgaagcaggctggtgctcgtgtcatcgtgactgagattgaccccatttgt

SEQ ID NO: 157750 - DNA, 274 bp, Glycine max
atctcattcccgtccccggcgactgagtagcggtctcttcccaactcggaactcagtccattccgcatttcaattttctcttcacttggcaaagcccaaaccaaaccctggctgaagaagagaattgactgagaagaagaacacagaaatgggctccgaactgattttcagagggcacgagacccagcccgtggacgacgcgtactcaccaaagccccacaaaccctggctcaccgtgactcgcccgattcactacatgctccatgagcagcga

SEQ ID NO: 157751 - DNA, 277 bp, Glycine max
gaggttttgacgcaacacactttcactgagaaaggatctctatctaccaaggagcagaataaaacccttctctctggtaagtgaataagagaatggcttcagatcggaaacttcacactttcgaggaggtggcaaagcacgaccagaccaaggattgctggctcatcatttctggcaaggtgtatgatgtcacccctttcatggaggatcatcccggaggtgatgaggttttgttatctgcaacagggaaagatgcaaccaatgattttgaagatgt

SEQ ID NO: 157752 - DNA, 275 bp, Glycine max
gtgaaacactagctagggtattgggagctctcgttgtttcggagttagggaccttacgcagccatggccactgctacgaatgccgccgccgccccaccacgccagctctcccagaaggaagctgacatccagatgatgttggccgccgacgtccacctcggcaccaagaactgcgacttcacaatggaacgttacatcttcaagcgccgcaacgacgggatttacattattaaccttgggaagacgtgggagaagcttcagctagcagctagggg

SEQ ID NO: 157753 - DNA, 271 bp, Glycine max
aagggattcatcgttcttcttcccaggttatttagaaaagcaaaatggtgaagatttgctgcattggtgctggatatgtggggggtcctactatggcagtcattgcacttaagtgcccatccattgaagtcgctgttgttgatatctctaaaatctcgcattgcagcctggaacagcgaccagcttcctatctatgaacctggccttgatggtgttgtgaagcaatgccgtggcaagaacctcttcttcagcactgatgttgaaaagcatg

SEQ ID NO: 157754 - DNA, 130 bp, Glycine max
gctgattccattgcagcatatgcactttgggagcaggtcaacgtgacccgcgattcttcagattatttgtggtatatgacagatgtctacattaatgctaatgaaggattcttaaagaatggacaatctc

SEQ ID NO: 157755 - DNA, 275 bp, Glycine max
agaaggggaagctgctttggttgcgaaatttcagaagttacatgaggacctgactaatggtttccgcaaccttgaggacgaaacccgatgattgatgattgaagatttggtagtttgctcaaatattgtgttatttccaattgtaagacgcagtgctagcatcgcagggttgcaacgtcccgagtgttctcatatttgactgttcgattcattcatatcacatttatttcctttcttggtgctggtttggcttttgatctagtctcatgtgtagc

SEQ ID NO: 157756 - DNA, 270 bp, Glycine max
ttttaagttaaatagtttttcattgtttcatttaatctacaatggctgcttcaacaatggctctctcttcatcattattggctggccaagctatcaagcttgccccctccacccctcagcttggtgttggtagggttagcatgaggaaaacagcctccaagactgtttcttctggaagcccatggtacggcccagaccgtgtcaagtacttgggcccattctctggtgagcccccatcctacctcactggtgaattcccaggtgactatg

SEQ ID NO: 157757 - DNA, 269 bp, Glycine max
ggtttcatgcactagatcctcagaagagctattgggagctaggaaggcataccattccctctttgaccactccattgaagaagatgttgcctctcacatccatggcattgaaagaaagctattggttgccctactaagtgcctatagatacgaaggaacaaaggttaaagatgacactgcaaaatcagaagccaaaatcctttccaatgcaattaagaatgctcataagaagcctattaatgaggatgatgaagtgataaggatattgg

SEQ ID NO: 157758 - DNA, 270 bp, Glycine max
attttagttaaaacatgtccatggccatcattaacacttttggaaacgttgatgtctatattctattattatcatcatggtttctcgtatctgctgtgtgtgtttggggacgacccgccacttttctgcaagactttgaaatcacgtggtcaaagactcatatcaggcaaattgatcaaggcagatccatccaactcattctagatcaaaactctggttgtggctttgcttccaagagtaagtacatgtttggccgtgttagcatgaaga

SEQ ID NO: 157759 - DNA, 268 bp, Glycine max
gttaccactcatggcagagcttgagagtcctaatgttatgcctaagcttatatcatttctctcatctctcctcaaaagggtagctgaatctaatgatcttaaccagcaacaactcctacaccaaaaggtctcagttttccatggcttgactcgccccaccatctcaattcaaagctaccttgagagaattttcaagtatgccaactgcagtccatcatgcttcattgttgcatacgtctaccttgatcgcttcactcaaaggcaaccc

SEQ ID NO: 157760 - DNA, 267 bp, Glycine max
gtcggagctgtgtctggggaaatttgcgttgtttttcgcggtacagctcacacacactgaacggtaagtatggcggacaaggctgttacaatccgaacccgaaagttcatgaccaacaggcttctttccaggaagcagtttgtcgttgatgttcttcatccagggagggcaaatgtttccaaggctgaacttaaggagaagctagctaggatgtatgatgtgaaagaccctaatactgtatttgtcttcaaattccgaacacatttt

SEQ ID NO: 157761 - DNA, 280 bp, Glycine max
ctcgagccgaatcgactcgagcgccacttctgaatctattgaatcaacaatcatgtcggacgaagagcaccatttcgagtccaaggccgacgccggagcctccaaaacctaccctcagcaagccggtaccatccgcaagaacggctacatcgtcatcaaaggccgcccctgcaaggttgtggaagtttcgacttccaaaactggaaagcacggtcacgctaagtgtcactttgttggaattgatattttcactgccaagaaacttgaggatattgtgccc

SEQ ID NO: 157762 - DNA, 262 bp, Glycine max
gttcttggaacccttgaactctgttacagatcactctgtgcttgtggcgatcgtgcaattgccgatggaagccttctagatttcttgagacaagtctctactttcggactctccctagtgaggcttgacataaggcaagagtcagaccgccacacagacgtcttagacgccatcaccaaacatttagaaataggctcataccaggaatggtaccggagaaaaacggcagcaatggcttttatctgagttgagtggcaaacgg

SEQ ID NO: 157763 - DNA, 269 bp, Glycine max
aatctccttcctctctctctctgtctctctgtctcctccatggccatctccttcagtcccaaacaccctccttacgatgagatgatatacacagcaatcggagctctgaaggagagggatggttcgagcaagcgagccataggaaagtacatagaacaagtctacaaggaccttccacccactcaccctgccttgttgactcaccatctcaaccgattgaaatcctctgccctcctcgtcctcgtcaagaaatcctacaagcttcctgg

SEQ ID NO: 157764 - DNA, 137 bp, Glycine max
ctctctctctctctctcgatcaatcatggctttgcccaatcagcaaaccgtcgattaccctagtttcaaactcgtcatcgtcggtgacggtggtacaggaaagacaacgttcgtgaaaaggcatcttaccggtgaat

SEQ ID NO: 157765 - DNA, 269 bp, Glycine max
gtttcttgtggctgaagttcaagtttcaatggcagtgacatgcagcccagtgcagctgagtgcatgtgtaagtgcaataacctcttcaacccctccatcaaacctatgctgctccaagatcaaagaacagaaaccatgcctctgccaatacctcaagaaccccaatctcaagaagtttgtggatcccctaatgtcaggagagttgctagcacttgtggaacactcccttcccaaggtgctaagtgttaataaattggaagaggttttaa

SEQ ID NO: 157766 - DNA, 266 bp, Glycine max
gtcacttcaagtcacaacccaagggtgccaagcaagatgataagtcctttagtgagttccaagatatccatgcatctgccatgccagctgatccagagatacttcctcaacagctactgaagaagtacattacatatgccaagttgaatatttttccaaggttacaagatgctgatatggataaactgtcacatgtctatgccgaactgcggagggaatcttcacacggacaaggagtccctattgctgtaaggcacattgaatca

SEQ ID NO: 157767 - DNA, 267 bp, Glycine max
agaaaccactccaccatcgtcgccttcgccatcggcaaaaagtatgtttctggaaatggattccacataatcggggtataacggatagtccttgtctcaaactcaagcctgtcaccaaggttgttaaggctgggattttggaggttggtgtccaaacctatggaggaggcttgtggcacacatggtttgatcgagacttgaccgtggcggggagggtcattgtgcaggaagagaatgccggttctgtttcgtactcgcatcgccttg

SEQ ID NO: 157768 - DNA, 266 bp, Glycine max
atggagtggccactggaggacctttggcctggggtctttgttacaatcatgaaatgagtcctatgcagtcatactgtgatgactacttcaaactcacatacccctgtactcctggtgctgactactatggacgtggagccattcccattttttggaactacaactatggtgctgtcggagaagctttgaagattgacctactaagccatccagaatacatagagcagaatgccacccttgctttccaggctgcaatttggagatgg

SEQ ID NO: 157769 - DNA, 265 bp, Glycine max
tgtttgtttctgatctatggcttccaaggagttctctggtctttgttccttggtttcttcactctccgagagcattttgtgcactactgggttgaaaatgtatttggtggagagcaaaggaggtgccataacatgcatgttcttggctcttttcttcttggggacatggcctgctcttttgactatgttagaaaggcgtggtcgtcttcctcagcatacctaccttgattactcaatcaccaatttcttgtctgctttactcatt

SEQ ID NO: 157770 - DNA, 264 bp, Glycine max
ggaagaacatgatggcagtacaaaaggttagcactgaggatgtggcagagaagacaacaagcagcactgctaattctggggcatttgtcaaggtttccatggatggagcaccttacctgcgcaaggtggacctcacaatgtacaaaagctacaaagagttatctgatgccttggccaaaatgttcagctccttcaccatgggtaactatggggcccaaggaatgatagacttcatgaatgagagcaagttgatggatcttctta

SEQ ID NO: 157771 - DNA, 264 bp, Glycine max
tggagcttgagaagcttttcttagataaggttatagcaaacttgggcctctgcattagtgtctatgatatcagatcgattgatggtgggtttatcttccctggtgatggggctccaacctatacggttgtgttcaatttgattatgtttcgtccatttgagaaggagattattactgcaaggcttctttcatctgatgctgatggcttacgattaaccattggattctatgatgatatttatattcctgcaagtcgtttgcccg

SEQ ID NO: 157772 - DNA, 269 bp, Glycine max
ccgaaaatgaacgacgcagacgtctcaaagcaaatccagcagatggttcggttcatccgccaggaagctgaggaaaaagccaatgagatctctgtctccgccgaagaggaattcaatatcgagaagctgcagttagtcgaagccgagaagaagaagaccaggcaagagtacgaacgcaaagaacgccaagtcgaaattcgcaagaagattgagtactcaatgcagctgaatgcttctcggatcaaagttcttcaagctcaagatgacgt

SEQ ID NO: 157773 - DNA, 268 bp, Glycine max
gtccaagcagcctccaattcgtgccactctcttcaaaatggccgttaccttctcaaatctccacacagaatcaggtctcaagtccctcgacgacttcctctctgggaaggtctacgtttctggggatcagttcacaaaggacgacatcaaagtgtatggtgctgttttggagaagccaggtgactcttttcccaatgctgccaagtggtacgaggttgtctcatctcagcttgctgcaagcttccccggcaatgctcaaggggtgaga

SEQ ID NO: 157774 - DNA, 266 bp, Glycine max
ttctcctctctccgattccttttattaattggagtttactcgctccttttcctttccctgaaaacatttcctcgtcgtattgatgtcggaaaagggccggccacttccaaaatttggtgaatgggatgtcaatgatccaacctcagctgaggggttcacagtgatttttaataaggccagggatgagaaaaagacaggtggtaacccagattcaccaggaaagactgccactgatcctcatagcaaacctgctgtagagcctggca

SEQ ID NO: 157775 - DNA, 258 bp, Glycine max
tctcaacaacttctgctacttcctactccaaccgcacttctgctccgcaattatcatgggcaaggtcaagatcggaatcaacggatttggaagaattggccgtttggtagccagagtggctctgcagagagacgatgttgaactcgttgccgttaacgaccctttcatcaccaccgattacatgacatacatgtttaaatacgacagtgttcatggacactggaagcatcacgaattcaccgttaaggacgagaagac

SEQ ID NO: 157776 - DNA, 246 bp, Glycine max
ctgctgccgaaacccttccggaaccctaaggtaagtgagtaatccgtggttgagaatggtggcgacggcgaagggtagaaaggaggaggtggttacacgtgagtagaccattaacctccacaagcgcctccatggctgcacatttaagaagagagctcctaaagctattaaggagataaggacatttgcccaaaaggccatggggaccactgatgtgagggtgatgtgaagttgaacaagtttgtc

SEQ ID NO: 157777 - DNA, 264 bp, Glycine max
gaactcaaagcaggcttcctcaactctctttctgatggacagaagctcgagctcttacagttccatgttctttcagactacgtgtctagctccaattttgatactctgacgaatccagtgagaaactgcgaggggctaagccaggaaaggtggaactgaatgtgataagttatggtgggagtgtgaacatctcaacaggtgaggttaacaccaccatcatggatttgtatatactgataagcatcttgctatatataaggtggg

SEQ ID NO: 157778 - DNA, 262 bp, Glycine max
gtccaaagagagcttccaagattcgcaagctgttcaatctgtctaaggaggatgatgtgaggaagtatgtcaacacatataggagaacatttacaactaaaaatgggaaaaaggtgagcaaagctcctaagagacaacggctggtcactcccctgaccctccaaagaaagagggcaacgattgcagataagaagaagagcattgccaaagcaaaatcagagcagcagagtaccagaaacttcttgcctccagattgaaggag

SEQ ID NO: 157779 - DNA, 241 bp, Glycine max
cttggctccgctctttggtttgctcaaccgatctccgcagcaatggtgaacgttccgaagacaaagaagacctactgcaagagcaaggagtgcaggaagcacacgctccacaaggtcacccaatacaagaagggcaaggacagcatcgccgctcagggaaaacgccgttatgaccgcaaacagtccggttacggtggccagaccaagcccgttttccacaaaaggcgaaaaccaccaagaa

SEQ ID NO: 157780 - DNA, 266 bp, Glycine max
gtgatggaggagctcatggaggtggatacggtggcggcgcgggtgccggtggaggaggagggtatggggctggtggagcacatggtggtggttttggaggaggtggtggaagtggtggtggccatggtggctatgttccctaagaactactcttcaatgcacaatagatgtgcaagtgtcccctttcgcgtatcaagaataataagtatgctattaataacggatcataataattaataacgtaacaatcatatcatcaccattaa

SEQ ID NO: 157781 - DNA, 266 bp, Glycine max
gtctggtgcaggttaagtttgtgtagtttggtaagatgggtggtggatttagagtgcttcacttagttagaccatttctctcgtttcttcctgaagttcagactgctgacaggaaagtgccatttagagagaaggtcatatatactgtgatctctctgttcattttccttgtttgcagtcagcttcctctgtatggcatacactcaacaacaggtgctgatcattctattggatgcgtgttatccttgcttcaaaccgtggaactg

SEQ ID NO: 157782 - DNA, 267 bp, Glycine max
atgaaattggcggatattttgcaatcagataatctgcagaatgtgcaggcattgacgcgtgcacgtgttcccatagtaaagctcatggatccagtgacaggaatatcttgtgacatatgcattaacaatctcctagctgttgtgaataccaagcttcttcgggattatgcacacatagatccaaggttgcgtcagctggctttcattattaaacattgggctagtcaagaagagtcaatgaaacttaccatgggaccttgtctagct

SEQ ID NO: 157783 - DNA, 266 bp, Glycine max
agacaagcgtgaatcatgtcggacgaagagcatcacttcgattctcaggcggatgcgggagcgtccaagacgtatcctcagcaggctggtaccattcgcaagaatggctacatcgtcatcaaatccaggccttgcaaggttgtagaggtctctacgtcaaagacaggcaagcatggacatgcaaagtgtcactttgttgcaattgatatttttaatgggaaaagcttgaagatattgttccatcatcctacaactgtgatgttcca

SEQ ID NO: 157784 - DNA, 267 bp, Glycine max
gagcgagagaacaagaacataagggaaccacagcggcggtaacagaagaacaagcagagaatgggtcgagtgagaacgaagacggtgaagaaatcctctcggcaggtgatagagcgtcactactcgcgcatgaccctggacttccacacgaacaagaagcttctggaggaagtggcgataatcccgtcgaagaggctaaggaacaagatcgcggggttctcgagcacctgatgaagcgcatccagaagggccctgtgcgcggcatct

SEQ ID NO: 157785 - DNA, 268 bp, Glycine max
ctctaaaccctaaacaactctttctcttcttccttcgctcgttgttctccctcgcgtagatcgacaatggcggagacagagacgtttgctttccaggctgagatcaaccagctcctcagtctcatcatcaacaccttctactccaacaaggagattttccttcgtgaactcatcagcaacgcctccgatgctttggacaagattcgatttgagagtttgacagatagagcaagctcgatgctcagccagagttgttcattcatattat

SEQ ID NO: 157786 - DNA, 268 bp, Glycine max
tctgatacgagtaatagaaacctctcagcccctctccgatcaaatggccaccgtaatcgacggcaaagccgttgcgcaaaccatccgatctgaaatcgccgacgaggtgcgccagctctctcaaaaatacggcaaggttccgggattagcggtggtgatagtagggaccagaaaagattcacagagctatgttggaatgaagagaaaggcatgcgctgaattggaatcaaatccttcgatgtggaccttcccgaacaagtctcccaag

SEQ ID NO: 157787 - DNA, 126 bp, Glycine max
ctgggttgaaaatgtatttggtggagagcaaaggaggtgccataccatgcatgttcgtggctcttttcttcttggggacatggcctgctcttttgactatgtgagaaaggcgtggtcgtcttcctc

SEQ ID NO: 157788 - DNA, 262 bp, Glycine max
aggaaaaccatcaatggacatgcactctcatgcctgcagaatttgttcccaatcattagttggttgagagattacaaagtctccaagttcaaagatgatctcttggctggcttaactcttgccagtctctgcatacctcagagcataggatatgctactttagcaaaagttgctcctgaatatggcctgtataccagtgttgttcctcctcttatttatgctatgatgggaagctcaagagaaattgcaattggacctgtag

SEQ ID NO: 157789 - DNA, 263 bp, Glycine max
ttgtaactcgttcttcttcttttgttgttctgtgtttgtgtttgttttttctctcacctgaaaatgtcttgctgcggtggtaactgtggttgcggaagctcctgcaagtgcggcaacggctgcggaggctgcaagatgtacccagacttgatctacactgagtcaaccaccaccgagaccttggtcatggagtggcacctgttaaggctcaatttgaggggctgaaatgggtgtgcccgctgagaacgatggctgcaaatgtg

SEQ ID NO: 157790 - DNA, 266 bp, Glycine max
cacaaactatcatggccacggcaacagcagctgccacctcgtcctttatggggacgcgtctcctggaggctcactccggagcggggcgagtgcacgcccgattcggcttcggcaagaaaaaggctcccgccccaaagaaagcctccaggagatcgggccgagacaccgacagacccctttggtatccgggcgccaaagcgcccgaatacctcgatgggagtctgtcggctactacgggttcgatccgtttgggctagggaagcccg

SEQ ID NO: 157791 - DNA, 267 bp, Glycine max
gtggtttcagtgagtgatcggtgttcacttgatccttcataagtcgtcatcatcatcatcatcatcaccgttgattgaagaagatgccgatcagaaacatcgccatcggaaggcctgaagaggctactcaccccgacacgttgaaggcggggttggctgagttcatctccaccttgatcttcgtgttcgccggttcaggttccggcatcgcctacaacaagtcaccgacaacggcgccgccactcccgccggcctcatctccgcttc

SEQ ID NO: 157792 - DNA, 266 bp, Glycine max
caatgagtatgaaagacacaagctgcaggctttaaatcagcggcagaaattggttcttcagagaaaaactgaagaagctgcaatggccaccaagaggttaaaggagttgttagaagcacgtaaaacttccagccgagaaactttagttacaatgaatggaagtggaacaaatggtcagagcactgagaaatctttacaacggtggcttgatcatgaactagagtcatggtagaagagcatgaagttcgttttgagtatgagaaaca

SEQ ID NO: 157793 - DNA, 269 bp, Glycine max
aaaacaaagaaaaaaaaaaacccttagccaacacaaccatcatggccacctctgctattcagcaatcagcattcactggtcaaactgctctgaagcagctcaatgagttcgtccgcaagaccggtggcgccggcaaaggtcgcactaacatgcgccgcaccgtcaagagtgctcctcagagcatttggtatggccctgaccgtcccaagtacttgggtccattccggagcagattccatcatacctgaccggagaatccctggtgacta

SEQ ID NO: 157794 - DNA, 271 bp, Glycine max
tgggttcaacaggtgagactcagattactccaacccatgtatctgatgaagaggcaaaccttttcgccatgcaactagccagtgcctcagtactccctatggttctcaaatcagctcttgagcttgatctgttggaaatcatagccaaggctggccctggtgttcacctttccccctccgacattgcttctcggctcccaacacacaaccctgatgcacccgttagttggaccgtatattgcgcctcttggcttgctacaatatcctctct

SEQ ID NO: 157795 - DNA, 265 bp, Glycine max
ctccacgcgctcgagccgaatcggctcgagcgtttcctttttcaggttttgctatccattaccaccctaaccgacggatccaaacccagatgatcccaccgtgcctgaaattgctcatatgtacaagacagacaggtccaagtatgagacaactgctaggagctggactcagaagtatgcaatgggctagcaaattggaataacgcattatattataggataggacgtgttccttccatttgttaaaagacattaatgtataatc

SEQ ID NO: 157796 - DNA, 261 bp, Glycine max
agaaaaccaagtcaagttctcactttgaagagaaaataacaacgtaaagatgtctgcatcaggaggcagaggaagccaagaggaagagaagaagccttctgatcaaggagcacatattaatctcaaagtcaagggccaggatggtaatgagggtttctttaggattaaaagaagcactcagctcaagaaacttatgaatgcatactgtgatcgtcgattgtagattttaactcaattgctttcttgtttgatggaaggaga

SEQ ID NO: 157797 - DNA, 263 bp, Glycine max
ggaagaagttgattaaatctgacttaattgcctgttacgtttttagaaacaatgattggagaaacagtctttttactatgttttatgttttttgaattttcgaaattttggaacgttggctagttaggtgccgtatgtagtagtttctttatggtaaatttgtgtccgctccctggccaatgaatttgtgctttcttcgtaaaaaaaaaaaaaaaaaaaaaaaaaaaaaaaaaaaaaaaaaaaaaaaaaaaggggggggccgg

SEQ ID NO: 157798 - DNA, 261 bp, Glycine max
ccaatttttaatgactacagctctgtggggtattcacttcttctcaagaaggagaaggcgatcattgtgcagcctgatcgggttgtgatcgcgaatggacctgcttttgggtgtgtgctgatgaaggatttcctcaaggcactcgcaaagcgcctcaagcacaacaatactgcatatgaaaattaccacaggatatttgtccctgatgggcatcctttaaggctgcacccagagagcctttgagggttaatgttctgttcc

SEQ ID NO: 157799 - DNA, 264 bp, Glycine max
atcatattaaatattaaatagaaaaaatggcccgatcatttatcaaaggccaatcttcggtagaagagaaggttcctttggaacacttatttctatttcagtataccgggtctctttctttcatttcaaaaaatttatagaatttcgattttgaaatgaaagaaaagtgtggggataaatataaatgacaaaaagatattggaacataatcttggaaggatgatggaagcaggagttcattttggccacggtactagaaaatgg

SEQ ID NO: 157800 - DNA, 250 bp, Glycine max
cttggtgaagactgaaaaggatagggaagaggctatggatcctgggagtattggcttcaacactggagaacctcgaatacagttgtactttttgctgggtctagtctatgcttcagttacacctactgttcttcctttcataatagttttctttgggctcgcctatgttgtgttccgtcatcagattatcaatgtttataatcaagatacgagagtggtgcagcattctggcctgatgtccattttcgtg

SEQ ID NO: 157801 - DNA, 263 bp, Glycine max
cttccccttatctttctctcttctctctccccgcccaaaccctaactccctaccctattccgctttctctcatccatcatgaaaggaggaaagtccaagaccgaatctaagagagccgatgccaaacttgctgtgaataagaagggcgccgccaccaagactaggaaacccgccggaaaggggaaggcagcgaaagatcctaacaagccaaagaggccccaagtgctttcttcgttttcatggaggaattcaggaaggtgttc

SEQ ID NO: 157802 - DNA, 263 bp, Glycine max
ctcatatgaagtgtacttttggtgggatatggaatggtggagggggggatggacagaagaacctttttgttgcctctttcttctttgaccgggctgctgaggctggttttgctgatccaaacttgccagtcgcgatagttcgtcctgcagattttgaggatgcagctaagcaagcatgccaaacaaaacttgagaatgccaaatccacttttcctcgtttgatgaggggaaccttccctatctttgcatggatcttatatacc

SEQ ID NO: 157803 - DNA, 267 bp, Glycine max
ctgcgactgcgcttcacgatgggtgcttacaagtatgtttcggacctatggcgcaagaagcagtctgatgttatgagattcttgcagcgggtgaggtgctgggagtaccgccagcaaccttctattgtccgtttgacaaggtctactcgcccagacaaggctcgccgcttgggtttcaaggctaagcagggttatgtgatttaccgtgttcgtgtacgaagggtggccggaagagaccagttccaaaaggtattggctatggtaagc

SEQ ID NO: 157804 - DNA, 264 bp, Glycine max
ccaatctactaagactgaaaagccttcttcacctgtaacaatggatcaggcgaatcagaccaaccagaccaatattcatgtctatcctgattgggcagccatgcaggcatattatgggccaagagtcaccatgccaccatactacaactcagctgttgcttctggtcacgctcctcacccgtacatgtgggggccaccacagcctatgatgccaccttatgggctccttatgcagcaatttatccacatggaggggtttatact

SEQ ID NO: 157805 - DNA, 263 bp, Glycine max
atagaatttagagttcaaaaacatccatcttctttagaagtcttatttgacactctcttcacaagtttcaacacatacaacaatgggttttcgtctacctagaatcaggaagacatcattttctgcaaacaaatttgcatcttcaaaagtcattgatttgccgaagggcaaccttgcagtctatgttggagagaaaatgaggcggtttgtgattcctgatcatacttgaaccaaccttcattccaggacttgttaagtcaagc

SEQ ID NO: 157806 - DNA, 261 bp, Glycine max
cgactgcctgcagtaattggagggtcttacacctttgttccaaccacaatctcaatcatccttgctggccgattcagtgatgaaccagatcctatagagaaattcaagaggataatgagatcaatccaaggtcctcttattgttgcttcaactcttcaaatagtactgggcttcagtggtctctggcgtaatgttgcaaggttcttaagtccacttcgtcagttcctttggtatctcttgttggttttgggctgtatgagt

SEQ ID NO: 157807 - DNA, 262 bp, Glycine max
aaatctgcccagtggtgatacggaacaccaggacgagtctgccatggctgacgccagtcctagaactgatatttctacagatgttgacacgcatgatatgaatccacggtttgatagaagtcagtcccttgttgctgttgcttctgactccagtgacagatcaaaggataaatcagatcataagagtctccgcaggcttgctcagaatcgcgatgctcaagaaaaagtcggtttatatagaaagcttatgttcaacagctcg

SEQ ID NO: 157808 - DNA, 262 bp, Glycine max
cagcaagagaacttgacaaggaggtcaggcagattattaaggagaaagaagaagccgttcgcaaccaagattttgaaaaggctggagagctacgagatagagagatggatcttaaggcacagatctcaactcttgtagagaaaggcaaggagatgagcaaggcagagagtgaggcaggggatgcaagtcctgttgtgactgaagctgacatacagcaattgtctcatcttggactggtattcctgttgagaaagtctcaaca

SEQ ID NO: 157809 - DNA, 263 bp, Glycine max
ctcacgctcacactcactcatttgcaaagaaagagagagaaatggcactgagggcagccgtgctccgccacgttcgtgtgccactccaagccgctccaaaactgcagccatggcgtgccatgtcatcacacggcgacgatcatctctccaaagaggaggtcgtcgaaagagtcctcgccgtcgtcaaagatttccccaaagtcgatccttccagggtggtccagatgtacatttccagaaggatttgggtttggatagcttgg

SEQ ID NO: 157810 - DNA, 260 bp, Glycine max
cgatacctagtataacatctttaataaacaaaagtatcgaagaacttgaatcggagatggatcatcttgggagacctattgctcttgatgctggggctcaattatacaccatcctagaactttgccgagcatttgaacggatattcaaggaacatttagatggagggcgtccaggaggagataggatatataatgtctttgacaatcagcttcctctgctttacggaagcttccacttgaccggcatctttctctccaga

SEQ ID NO: 157811 - DNA, 264 bp, Glycine max
gcgttgaggggtactcaactcctgggggttattctgcaagggcagtccatcccatagcacttgggaaggtgatgagcattgcaaagatgatgaagtcagagtttgatagtgagaactatacactttctgccattggtggtgttgagacaggcggtgatgctgctgagtttatccttctcggggcaaacactgttcaggtgtgcactggggttatgatgatggctatggacttgtgaagaaactatgtcttgagcttcaagactt

SEQ ID NO: 157812 - DNA, 262 bp, Glycine max
cgctgtggaaatacattgaattgtaatcatcctgtggtcatggagctaattcttgacagcctaagacactgggtcaccgaataccatgtggatggatttcgatttgatcttgcaagtgtcctgtgtcgaggaattgatggctcccccctcaatgcacccccacttattagggctattgctaaagatgcagtattatcaagatgtaaaattattgcagagcttgggattgtggaggtctctatcttgttgggagtttcctaat

SEQ ID NO: 157813 - DNA, 240 bp, Glycine max
aggctgtattgtagaactgaacaagggtttctctttctctttctctgtctgcttcttcactttctctcgtttcaatcgaaaaaaatcatgggcagaaaattcttcgtcggtggcaactggaaatgcaatgggaccactgaggaggtgaagaagattgttactactttaaatgaagctaaagtccctggagaagatgttgtagaagttgttgtgagcctccttttgtgttccttcttttgt

SEQ ID NO: 157814 - DNA, 258 bp, Glycine max
ctcattattactatatacacaccttctttcttctcttctccttcttcagttctcttcctctttttccttctttctttcaacatgggtggcatcagcctcgaagagatcaaaaacgagaaccccgatctggaacggattccaatagaggaagtgtttgagcagctgaaatgttcaagagcaggtctaacatcagaggaagggggcaatcggctcaagtctttggaccaaacaaattggaagagaaaaaagagagcaagt

SEQ ID NO: 157815 - DNA, 249 bp, Glycine max
gtcagatcttctcaaccaggttcttcgttgggcacttggttccattgagattgtcttttttcaccattgccctctatggtatggcttcaaggaaaagaagctaaagtggcttgagagatttgcctatgcaaacacaactgtctatccattcacctccatgcctctagttgcctactgtattcttccagcagtttgtttactcactgacgaattatcatgccaccgattagcacctgtgctgggttgtac

SEQ ID NO: 157816 - DNA, 256 bp, Glycine max
aaaaagccgttttgatcggaataaactacccgggcacgaaggcggagctgaaaggatgcataaacgacgtgaggaggatgcaacgctgcctcatcgatcgatacggtttctccgaagacgacatcaccgttttgatcgacacggacgagtcctacacggagcccacggggaagaacatccggtcagcgttgaccaggctggtccgatcggcgagctaggggacattctgttcgtccattacagcggacacggcacg

SEQ ID NO: 157817 - DNA, 257 bp, Glycine max
ctaaaatcaaccatgggttcagcagctgagactcagattactccaacccatgtatctgatgaagaggcaaacctttttgccatgcaactagccagtgcctctgtactccctatggttctcaaatcagctcttgagcttgatctgttggaaatcatagccaaggctggccctggtgttcatctttcccccactgacatttcttctcagcttccacacagaaccctgatgcacccgttatgttggaccgcattttgcgg

SEQ ID NO: 157818 - DNA, 258 bp, Glycine max
cttttgttgtttgtgtgtttgttttttctctcacctgaaaatgtcttgctgcggtggtaactgtggttgcggaagcgcctgcaagtgcggcaacggctgcggaggctgcaagatgtacccagacttgagctacaccgagtcaaccaccaccgagaccttggtcatgggagtggcaccagttaaggctcaattcgagagtgctgaaatgggtgtcccgctgagaacgatggctgcaaatgtggagctaactgcacctgc

SEQ ID NO: 157819 - DNA, 258 bp, Glycine max
ccgtactctccctgatggcaaggttgagaggctctatggtctcgcccccgttgctaagtacctggtcaagaccgaagatggtgtctccattgctgctcttaacctcatgaaccaggacaaagtcctcatggaaagctggtactatttgaaagatgctgtccttgaagggggtattccatttaacaaagcatatggaatgacagcctttgaatacatggaacagatccaaggtttaacaaggttttcaacaaggggatg

SEQ ID NO: 157820 - DNA, 261 bp, Glycine max
gctcaagaaaagatgagtgctctggttgaagctctattcgagggaactgagaaaggttttgctaaagaagctgataagaagaagaactactttgctgctgctgttgccgaagagggatcccagctgttattgcttcatgctattgaagaattttcttgcaagtctacttccaatgctttgaaggaggttgccctggttctaaaggcactctatgatgctgatgtgttggaggaagagcacatagtgcagtggtatcaaaag

SEQ ID NO: 157821 - DNA, 152 bp, Glycine max
gttggctacaccggagggttatcgaaatgatcttgcttacttgaagagcaaggttgatgctggagcagatctgattgtcacccaattattttatgatacggatatattcctcaaatttgtgaacgcctgtcgccaaattgagaatcaacgtg

SEQ ID NO: 157822 - DNA, 263 bp, Glycine max
agatgtactatgctaagcaaggaatcatcacggaagagatgctttactgtgccactcgtgagaaccttgacccagagtttgtgaggtcagaagttgctcgtggacgtgctatcattccttccaacaagaaacacttggagttagagcccatgatagttggaagaaactttttggtaaaagtaaatgccaacattggaaattctgcagttgcaagttcatagaagaggaagtttacaaggttcaatgggcaactatgtggggag

SEQ ID NO: 157823 - DNA, 253 bp, Glycine max
ggctcgagcatcgtcccactttcttctccttttagggtttcctttttgtttctcctttccagatctgcatcttccattttttaggattaagcggtgagattcgtgaatctgagaaatgtcggattcttctcgggaggagaatgtttacatggcgaaattggcggagcaggccgagcgttacgaggagatggttgagttcatggagaaggtacaaagactgtggaggttgaggagttgacggtggaggagagaa

SEQ ID NO: 157824 - DNA, 255 bp, Glycine max
gcttcttcgtctccccaaagctgtcacctttctttccttttctgcttccactaaatcccccactaagtcttttcaagtgagatcaattgctggtactacagaagctgcatcggggtttgttgagatggtttctgggactaagaggaagtattacatgctaggtgggaaagggggagtagggcagacaagctgtgctgcttcacttgctggtaatttgccaataatggacaccctactctcgtggtttccaccgat

SEQ ID NO: 157825 - DNA, 258 bp, Glycine max
gaaaaacttagctactaaggaaggatcaaagagaatggctcaagcaatggcatcaatggctggcttgcgtggttcctctcaggctgtgttggaaggtagccttcaggtgagtggctccacacgcttgaatgtggggagtggaagcagggtggcctcagtcacacgtgcagggttcacagttagagcacaacaacaacaagtgagtggtgaggtacaaagcagccgtcaggcagtgctttcacttgttgctgctggttt

SEQ ID NO: 157826 - DNA, 257 bp, Glycine max
gtgtaaatcaaatagaaatttataaaatctatgatcctagagtagttccctagacaaaatagaagtaagttcacaaacaagattcaagaataagattctctgatgaaaggagagaaatatgtctgaggatccgctgggtataaggagtgaaagaggggatcatttgtttcttgaacagttcttttaaaaaaattttctatcggatttttgagcataggagattttatgatttatgacttggaggatttttcagaata

SEQ ID NO: 157827 - DNA, 257 bp, Glycine max
attctcttcactttaaagttacatagtttttcattgttttacttaatctacaatggctgcttcaacaatgactctctcttcatcatcattggctggccaagctatcaagcttgccccctccacccctgagcttggtgttggaagggttagcatgaggaaaacagcctccaagactgtttcctcaggaagcccatggtacggcccagaccgtgcaagtacttgggcccattctctggtgagcccccatcctatctcac

SEQ ID NO: 157828 - DNA, 256 bp, Glycine max
cgcgtgatctgcgacaccaggggtgctttcgtgcagcctgctgtatacgaggcttttggtttgacagtggttgaggccatgacttgcggcttgccaacattcgccacatgcaatggtggtcctgctgagatcattgtgcacggcaagtctggcttccacattgacccttaccatggtgaccgtgctgctgatctccttgttgacttctttggaagtgcaagcttgacccaactcactgggacaagatctcaaaggc

SEQ ID NO: 157829 - DNA, 256 bp, Glycine max
ttgggaaacaatgatggcatgaatctctcagcccctcaaaccttccgctcgaaggaaatttccaagagcaatgttgttgacgatatggtcaacagcaacgccatcctctatgagcctggtgaacatccggaccatgtggttgtcattaagtatgtaccttacgttggggacagcaagagggccatggatgagtactcttctgagatattcatggcggaaagcccacaattgtgttgcacaacacttgtgaggcttc

SEQ ID NO: 157830 - DNA, 257 bp, Glycine max
tcacgcacttacaataaatattccttgaatatagaatgatccgtcaaacaattcatgcaaattatttaatttttaactgatctgttgactgttgattcaatgcagcaaacacttcttaatttgttacttcgtaactaccttcactacaacctatatgatcaggctgagaagttgaggtcgaaggctcctcgatttgaagcacattcaaaccgcagttttgtcgttatctcttctacctagggaaaattcggacaatt

SEQ ID NO: 157831 - DNA, 126 bp, Glycine max
cttcgtcgatgttcaacacagttgcaaccaaaaagatagccattctggggtttgcattcaagaaggacactggggacacaagggagacaccagcaattgatgtgtgcaaaggactactcggtgaca

SEQ ID NO: 157832 - DNA, 264 bp, Glycine max
actcataacacaaagcacaaagcaaagctcatccttgagttaaaaaatggcagcagcttcttccatggctctctcatccccatccttggctggcaaggccgtgaagctgggcccatcagccccagaagtgggaagggtgagcatgaggaagaccgtcaccaagcaggtctcctcaggaagcccatggtacggcccagaccgagtcaagtacttgggccattctctggcgagcccccgtcctacctaaccggtgagttccaggcg

SEQ ID NO: 157833 - DNA, 270 bp, Glycine max
ggatgaactaggaaagcttgaagcaattgattgtggaaaaccactagatgaagcactggcagacctggatgatgttattggttgttttaactactatgccgagcttgcagaaggattggacgcaaagcaaaatgctcctgtatcccttcctatggaaaccttcaagagttatgttctcaaggagcccatcggagttgttgcattaattactccatggaactatcctctatttgatggctacatggaaagttgctcctgctctagctgctg

SEQ ID NO: 157834 - DNA, 262 bp, Glycine max
gtgcgtgtgtgtgagaatggaagagagtggtgatgcgaaggatcttcagaaaccgttcctccacacagggagttggtacaacatgggttccaggcagtccagcatcatgggatcctccactcaggttatccgcgacggcgtcgtttccgtcctcttctgcgtcctcatcgtcgccttgggtcccattcaattcggcttcacgtgtgggtattcttctccaacccaaggggctatagttcgcgatctaaacctctctatttcg

SEQ ID NO: 157835 - DNA, 261 bp, Glycine max
gtttctcctccttcaaaaccccctcctcgtgactgtctacgatgcccaaattgtctcataccatgctcagaggtacattggcgggtagggtttcgacgtgcttcttcttcaagcttggtctttctctgcttctaccttttcagatctccgctgagggttcatcgtatatagagttcgtactcacattggatcactctaacttttacgacactgtcagctagcacgagttcatcgtcgtcgagttctacgctccatggtgtg

SEQ ID NO: 157836 - DNA, 265 bp, Glycine max
ctccaacatgtgttgagaaaagcagaagagtatctgatttcagttgctcctgaaacaccctactcggaattcgagaacagattccgggagattggtctggagagggggtggggtgacactgccgagcgtgtcctcgagatgatccagcttctcctggaccttcttgaggcacctgacccttgcaccctcgaatcattccttggaagagtccctatggtcttcaatgttgttatcctttctccccatggttactttgcccaagata

SEQ ID NO: 157837 - DNA, 264 bp, Glycine max
attcgcggttgttgaattctgagcagccaccgtgaaccggtctcacctcgttgactcattctccgtccacttgcgaaagagaagagatctgaaaccctaacctaaccctaacagaggtaatggattcagtgcctcgaagaagcagaggaggaggcgttttcgaaagcctctacaaggtcctcatgcgccgcaactccgtctacgtcaccttcatcatcgccggcgccttcctcggagagcgggctgtggattacggagttcaca

SEQ ID NO: 157838 - DNA, 240 bp, Glycine max
agatgctaacttcctaaaggttgtttccagtgccataattgacaagtacattggagaaagtgccaggttaatcagagagatgtttggttatgcacgtgatcaccagccgtgcatcatttttatggatgagatcgatgccattggaggttcgccgtttcagtgagggaacaagtgcagatcgtgagattcagagaacgctaatggagctgcgtaatcagctcgatggatttgatcaacttg

SEQ ID NO: 157839 - DNA, 258 bp, Glycine max
ttcggttcagcaacaacgtgatcggactcctgaacttcctgaccttcctcctctccatcccgatcctggtggccggagtgtggctgagcaagcagggcgccaccgagtgcgagcggtggctggagaagccggtgatcgcactcggcgtcttcctcatgctcgtctcactcgccggcctcgtcggcgcgtgctgtcgcgtgtcgtggctcctctggctctacctcctcgtcatgcttcgtctcatcgttcttctcttcg

SEQ ID NO: 157840 - DNA, 259 bp, Glycine max
aaaatgcccactttttttcttccaacgctcctcctccttctcatagccttcgccacctctgtctccggccgccgtgacctcgtcggagactttctccggctgccctccgaaactgataacgacgacaacttcaagggcacccggtgggccgtcctcctcgccggttccaatggttactggaattacagacatcaggctgatgtttgtcacgcctatcaaatattgaggaaaggtggtctgaaagaagaaaatattattg

SEQ ID NO: 157841 - DNA, 263 bp, Glycine max
catcactgaactaacaaagcaaccctatgtcgaaggtggtttgtgtcaccggagccagcggcgccatcggatcatgggtggtcctactcctcctccagcgtggttacaccgtccatgccaccgtccaagatatcaaggatgaaaatgagacgaaacatttggaggaaatggaaggagcaaagagtcatctccatttttttgaaatggatcttcttgacatcgactccattgccgctgccataaagggttgttccggcgtaatc

SEQ ID NO: 157842 - DNA, 268 bp, Glycine max
cgcaattgctgtggaaggaccacagatgtgggctgctggatggcaaacagctatgtctcaaattggaccccaattcatatggtgggtagctgctcaaagtgtattctatcatctatacaatcaagtgtcgtacatgtctctggatcagatctctcccttgacgtttagcattggaaacaccatgaaacgtatatctgtcattgtgtcttccattattatcttccacacaccagttcaacccatcaatgctcttggtgctgccattgct

SEQ ID NO: 157843 - DNA, 264 bp, Glycine max
ggcagttccagtgattgatttttcaaagctgaatggtgaagaaagaaccaaaactatggcacagattgctaatgggtgtgaagagtggggattttttcagttgatcaaccatggtattccagaggaactccttgagagggtgaagaaggttgcctctgagttctataagctggaaagagaggagaatttcaagaactccacatcagtgaagctactaagcgattcagtcgaaaagaagagcagcgaaatggagcatgtggattg

SEQ ID NO: 157844 - DNA, 254 bp, Glycine max
gggtctactctgctagatgcacttgaccagatctctgagcccaagaggccttctgacaagcccctcaggctaccccttcaggatgtgtacaagattggaggaattggaactgtgcctgtgggacgggttgagactggtgtcttgaagcctggaatggtggtgacttttgcaccaactggactgacaaccgaagttaagtctgtggaaatgcaccatgaagctctcacagaggctcttcccggtgataatgttgg

SEQ ID NO: 157845 - DNA, 206 bp, Glycine max
tattaagcaaaaacaatatggaagtaaagaaagtctgttttgttgctctagcctttgctttggttctgagagttgctgagagctttgagttcaatgaaaaggacctggaatccgaggaagggttgtgggatttgtacgagagatggaggagccaccaaacggtttctcgaagcctccatgagaagcaaaaccgcttcaacgtgttc

SEQ ID NO: 157846 - DNA, 260 bp, Glycine max
gtgtatctttatttggcggagtaggtgaacgtactcgtgagggaaatgatctttatatggaaatgaaagaatctggagtaattaatgaacaaaatattgcagaatcaaaagtagctctagtatatggtcaaatgaatgaaccgcccggagctcgtatgagagttggtttaactgccctgactatggcggaatattttcgagatgtcaatgaacaagatgtacttctatttatcgacaatatctttcgcttcgtccaagca

SEQ ID NO: 157847 - DNA, 259 bp, Glycine max
gcattgagtacagtgcaaagtatgaggctgctggggagcttgatcatgtgaaggagattatcaagtggggtactgattattttctcaagagttttaatagcactgctgataccatcaccacccttgctgctcaggttgggcttggagatacttctgggtgacagtccgaatgatcactattgctggatgcgtccggaggacatggactatgaccgtcctgtgactgaatgccacagttgttccgatctcgcggctgaga

SEQ ID NO: 157848 - DNA, 256 bp, Glycine max
gtcagatcaacattgtggtggttggtcatgtggaccctgaggaggtaaccaccattaacgagctgaagaagcctgttgtggagaaagaagctccagggcatgccatatgagggcatgcacgtacggcctcggaggggaaccagaaaattatgtgaacaaaataatctggaaccctaatgtatcagtgtcatcatcagtgtgtagtttaagctagctttgctatggttacggtctttgagatgagagtcttgatgaa

SEQ ID NO: 157849 - DNA, 261 bp, Glycine max
aatcaatcatcttttgtttgttcttcagtactttagtgtgtgatttaattccaagattttgagaatgtctagctgtgggtgtggaagtagctgcaactgtggcagcaactgcggttgcaacaagtactcttttgacttgagctatgttgagaagacaaccacagagactcttgttttgggtgttgggtctgtgaaggcccaattggagggtgctgaaatgggtgttgcagctgagaacggtggctgcaactgtggatcaag

SEQ ID NO: 157850 - DNA, 265 bp, Glycine max
gcagacagataaaggaatcctgcatcaatggatttctcgcttcgacatttacccctatcttgagaggtttactcaggatgcaacagccaagattcttgagttcatggaagggaaaccagatctagttattggaaattacactgatggaaatttggtagcatcactaatggctagaaaacttgggataactcagggaactatagcacatgctttagagaagaccaagtatgaagactcagatgtcaagtggcaagagttggacccc

SEQ ID NO: 157851 - DNA, 250 bp, Glycine max
ctgaagctttggctgccttatctaatgcatttggttcatcttctgagaaagcatccggtttggcacaagatagattgaatgggttaggccaagggggaccaaggcaaagggcagaagctttagccgctttaaactctgcatttaattcatcatcctgggccgaagatttttactcctaggccatctggaagaggtcaaggatcacaaagagctgcagcagtagctgctctttcacaagttcttatggctg

SEQ ID NO: 157852 - DNA, 221 bp, Glycine max
gtcggggattccccctttttacggagactctgctgctgggatctttgaggctgtggttagggctaacatcatgttcccttctagaatcttccggactgtgtcccccgccgccaaggatctcttgagaaaaatgatctctagggactcttctagaaggttctccgcagaacaagccttgagacacccttggatcatgagtgcgggtgacacggctgaactag

SEQ ID NO: 157853 - DNA, 259 bp, Glycine max
cccttcccgatctttcttcccttttggaaatccttttcggatgatatcacctaaaggctctcgcatgtctccacaacttcttgcagtgttgcaagcttttgaggcaacattggcagagaggctgaaaaatcttatgcctaaaagcaaggatgaaatcctcaccttgtcttggatgactttagctatgaagtcactttgtgaaagtcacaatgacatacggacccttatgactgcccttgagcttcctgtgagtgattgg

SEQ ID NO: 157854 - DNA, 229 bp, Glycine max
gtaaaactcaaaatctagtttcatactttttttcttcttcttgaaatggctctccaggctgcttctcttgttcctgcttctttctcggttcttaaagagggaaagagtggtgtgtctctcaaggactccaccttgttcggtctttcattttcagaacctatcaaagctaacttcagctcttctgcattgaggtgcaatagggaattcgaacaaaagctctgtgttgtgg

SEQ ID NO: 157855 - DNA, 216 bp, Glycine max
cccttacaaggtaaactccaccaccggctacatctgttacgaccgcttggaagaaaaagccctagacttcaggccaaaaatcataatctgcggtggcagcgcgtaccctcgcgattgggactacaaacgtttcagggaagtcgctgataagtgcggacattgcttctctgcgacatggcgcacactagcggccttgtggccgcgcagggaagtgaa

SEQ ID NO: 157856 - DNA, 245 bp, Glycine max
gttctgatgggaaaaccttctactgtctagagatggcaaaatatttcaaccctggtgaagctgaagccatgaatcagagtgtagcttacctactgtcaaagttgagttacattccatccacactcttcctatcataagtttcttacgtggaattcttagacagagtgcatgtttctgagaaaaagctaagagcacaaggcttgtgggaagttccccatccttggctgaaccttctgatcccaagg

SEQ ID NO: 157857 - DNA, 253 bp, Glycine max
cacaaagcacaaagcaaagctcatccttgagttaaaaaatggcagcagcttcttccatggctctctcatccccatccttggctggcaaggccgtgaagctgggcccatcagccccagaagtgggaagggtgagcatgaggaagaccgtcaccaagcaggtctcctcaggaagcccatggtacggcccagaccgagtcaagtacttaggcccattctctggcgagcccccgtcctacctaaccggtgagttccc

SEQ ID NO: 157858 - DNA, 258 bp, Glycine max
cgaggacttaccctttcttttcttttttcttttttctctttcctcattctacttaaaactcccaccagtgatggcaggtttggctccagagggaacacaattcgatggtcgccaatatgatgctaagatgagtgaattgctttccactgatgggcaagaattcttcacctcttatgatgaagtgtatgacagctttgatgcaatgggattgcaagagaatcttctgcgaggcatagatgcttatggttttgagaagcc

SEQ ID NO: 157859 - DNA, 230 bp, Glycine max
gccctcagaacacctttgtcccaggactcattgatctggccatcaaaaggaatagtttgattggaggagatgactttaagagtggtcagaccaaaatgaaatcggtgttggtggatttcctagtaggggccggcatcaagccaacatctatagtgagttacaaccatttgggagacaatgatggcatgcatctctcagcccctcaaaccttccggtcgaaggaaatttcc

SEQ ID NO: 157860 - DNA, 155 bp, Glycine max
agccaaggtaggttaaacactcttcttcatcgtcgtcgcaatgggacgtgtgatccgtgcgcagcgtaagggagcaggctcggtcttcaagtcccacacgcaccaccgcaagggccctgcccgcttccggagcctggatttcggagagcgcaacg

SEQ ID NO: 157861 - DNA, 98 bp, Glycine max
cgagaataaatgcaactaccacaaagacttacgctacaagaaccatatttttcttgaaaagtgatggaaccttgacgccattggccattgagttaagt

SEQ ID NO: 157862 - DNA, 252 bp, Glycine max
cgtgaaacaacagctttcatggttccattggtggctggtgatggaaccaaaactcaggcacttgctatttgccactcaaatacttctggaatgaatcatcaaatgcttcatcaacttatgggagttgaacctggaactaaccctgtttgccatttccttggaagcaaggccattttatgggtacccaatttatctgtggacactgcctatcagaccaacattgttgcttaattagtccatgcatcttgagca

SEQ ID NO: 157863 - DNA, 267 bp, Glycine max
gctgcactagtgatgcttgaagcaattgattgtggaaaaccactagatgaagcactggcagacctggatgatgttattggttgttttaactactatgccgagcttgcagaaggattggacgcaaagcaaaatgctcctgtatcccttcctatggaaaccttcaagagttatgttctcaaggagcccatcggagttgttgcattaattactccatggaactatcctctattgatggctacatggaaagttgctcctgctctagctgct

SEQ ID NO: 157864 - DNA, 257 bp, Glycine max
atgatgttgagaagatcagatgagtaactgcattcagtagttcctgtaacatacttcgcggaattcgagaactggttctgggttatgggtcattagatgcgagcgggtaacactgtcgagcgtgtcctcgatattatcaagcttctcctggaccgtcttgaggcacctgacccttgcaccctcgagatattccttggaagagtccctatggtcttcaatgttggtatcctttctcgccatgggtactttgcccaaga

SEQ ID NO: 157865 - DNA, 254 bp, Glycine max
ctcactggtgtgtatggcttctggaagcacgtgaccaatcttgaacgccgtgagagcaaacgttacctcgagatgttctatgctctcaagtaccgcaaattggctgagtctgtgccccttgctattgaagagtaaattcatgtttgaagagaacatcaatggagaaaccggcttttggtcgtttgaagtcttatggagctttcataaataacgccattgattttgattgtgatcagcttttggatttaaagagt

SEQ ID NO: 157866 - DNA, 252 bp, Glycine max
accacctaaggcacctcaagatttatacgagagctattataacgcaaacaaatccaacctgaagttgtatgttagacgtgtgttcatttcagatgaatttaatgaactgttgcctaagtacctaaactttttgctgggtcttgttgattctgacacattgccacttaatgtatcgcgagaaatgcttcagcaacatagtagtctaaagacaatcaagaagaaacttattaggaaagcccttgatatgatccg

SEQ ID NO: 157867 - DNA, 253 bp, Glycine max
gcaacgacttttcttcagagggatagaaaagggtgataacctacatttgcaccttgaaggtgtaaaggataagtcaaagcttttgcttttggagggcactagctagcaaagagaggaaacttgaggaaaccagaaaacaaaacgtaatgtctaaagcttttgaggctattgcaggtgttagagctgaggtggacaagctctcaaatagggtgacttccatagaagtagctattaatggggggaacaaagcatc

SEQ ID NO: 157868 - DNA, 249 bp, Glycine max
ggagtcaagtatttggtgatgatgccaagttcttggttgaggtaaaatctggtcaggtagaagcaagtttgaacccagatcaagagcttagaaggttaaaacagatgtttgaagcttggaaaaaggattatggggcaagactgcgtgaaacaaaagttattataaataaacttggaagcgaagatggcgcacttgagaaaatgaagaaaaagtggtggggaagaaggaccagtacaaggataaattgat

SEQ ID NO: 157869 - DNA, 219 bp, Glycine max
gagaatacttgctggagatatgtctgctgtacgcattgctaacacaatagctatgttcaggtcccagcgtattggaatggttcaaacccaggaccagtacattttctgctataatgctatcatagagtgaactgaagaccatgctcctcagcagcaatatgagtagaagggcagggatactgtttaagttgttagaatgcgattggggttacagaaggc

SEQ ID NO: 157870 - DNA, 175 bp, Glycine max
gcccggcatgattgtcaccggcatggaggtggcagaaattgatggctccccaaggatgggtccgacgtttggggcgatgatgatatcagggcagaaggcggctcatttggcgttgaaggcgttggggaggaacaatgcaactgaagtaacgtgtgtagaaggaagggaagaaccc

SEQ ID NO: 157871 - DNA, 199 bp, Glycine max
  unsure (1)..(199): unsure at all n locations
atctcttctcttcgctcctgcacttgttgtttctttgcccttcatggcatctcaggctagccttctccttcaaaagcagctcaaagatctttgcaaaaaccccgtcgacggcttctctgccggtttggtcgatgaaaccaacactttttgaatggagcgncaccagtantgggccgcccgagatactctatgagggggg

SEQ ID NO: 157872 - DNA, 220 bp, Glycine max
tgaaaagcggatcagttggattcaagaaggaatatctcgatcaaccggacattcccagcacatggaaagcaatggaggcactctatgactcaggcaaggcaagagccataggagttagcaatttctcttcaaaaaagcttcaagatctcatgaatatagcaagagtgccgcccgcagttaaccaaggggaattgcacccaggacggcagcagccaaagct

SEQ ID NO: 157873 - DNA, 242 bp, Glycine max
ccgaaggcgtcttcataaacgcctttcttctccgtttccgtttcctcgttcgaattcgctttttgatctgcgaaaatgagagagtgcatcgcgatccacattggtcaggctggtatccaggtcggaaatgcttgctgggagctctactgcctcgagcacggcatcgggcccgatgggcaaatgccaagtgacaagacagttggcggctggtgatgatgctttcaatactttctcagcgagac

SEQ ID NO: 157874 - DNA, 79 bp, Glycine max
cagaagaacaagtagttgagaactaagaaggagaggcaaatggcgtcctcaatgatctcttccccagctgttaccactg

SEQ ID NO: 157875 - DNA, 196 bp, Glycine max
agagtacactactgaagctaatgacaggtgacttgatgcctagtgatggcatggtccgacgtcataatcatcttcgaattgcacaatatcaccagcatttggccgaaaagctagacatggaaatgtctgctctccagtttatgattaaagaatacccgtgaaacgaggaagagaagacgagggcggcgagagggaa

SEQ ID NO: 157876 - DNA, 173 bp, Glycine max
  unsure (1)..(173): unsure at all n locations
cgttcttcttcttttgttgttctgtgtttgtgtttgttttttctctcacctgaaaatgtcttgctgcggtggtaactgtggttgcggaagctcctgcaagtgcggcaacggctgcggaggctgcaagacttacccagcacttagcaacacggagncaaccaccaccgagacca

SEQ ID NO: 157877 - DNA, 242 bp, Glycine max
atcgagccgaatcggctcgagaccgcacgaatatcttgttgttaggagcgatccgagaaaagctctgtaaacatgttggtgtaccaggacctccttacaggtgatgagcttctctctgactccttccgttacaaggaaattgagaatggaatgctgtgggaagttgaggggaagtgggttgttaaaggagcagttgatgtagacattggtgcaaacccttctgctgagggtggaggagaaga

SEQ ID NO: 157878 - DNA, 191 bp, Glycine max
cttgagaatcagattcaagctgttgccaaaagggaatatcaccaaggagattcaagcgatagtgatcccagatttagaatagctgatatcccagctgctgtatttggctcaagagctcatctagaggagaaagctttagctacaaggaagagggaccgcaaagtttttgaagaagggcctccagcatgtgg

SEQ ID NO: 157879 - DNA, 77 bp, Glycine max
ctcccattgttctcgccatttccaaatcacccgatctccacaactacgacctgtcttccatcagagtcttgaagtcc

SEQ ID NO: 157880 - DNA, 164 bp, Glycine max
ctccggcatctcctccacgagtcactcctccgcctgcgtctcctcgttcgaattcgctattagatctgagtcaatgagcgagtgcatctcgatccacattggtcatgctggtatccaggtcggaaatgcttgctgtgaactctactgtctcgagcacggcatcg

SEQ ID NO: 157881 - DNA, 168 bp, Glycine max
tggggtttgaggaaactgagttaaggcttggactgcctggaaacggaggcactgaagaagtgctcatcaggaagaggggtttctctgagactgaaactggtcatgaagatgagtctgccaccactgtggatttgatgcttaaatctttctcgaaggaggccgcaacca

SEQ ID NO: 157882 - DNA, 183 bp, Glycine max
tactcattctccatacctcaacgaagaggttaaagagacggcaacactttgctgtccgccttgaccgagcagagcttcgtcttggccctcgattttgccctaaagtactctcagtcacaacagacaccgtcgtcgacgacgacgacaacaaaggcaccgaagcagaccaaggcggagaagaag

SEQ ID NO: 157883 - DNA, 225 bp, Glycine max
  unsure (1)..(225): unsure at all n locations
ctttaaagcatgctaaagaaggaacagaaagctcagctttctggtctgcactaggaggaaaacaaagttacaccagcaagaaagttgttaatgaggttgtcagagatccacatttgttcactttataggttaacaaaggaaagtgtcaatggagaggaggcttacaacgttncgtaggacgaccatctgtcggaggatatccntatacctgtcacacatgtagaa

SEQ ID NO: 157884 - DNA, 175 bp, Glycine max
ctcttctttttactctctttctgtctctctctacgctttctcgttcgagatccctcaagggatccactaactgaaggagaaatggggctgacattcaccaagcttttcagccggacttttcgccaagaaggaaagtcgaatgctgtaggcggggctcgatgcagctggtaatacc

SEQ ID NO: 157885 - DNA, 194 bp, Glycine max
cgctcatcggctggctgaaagcattcagtcaaaaaatctaaactcatggaatgatccacttggagcacttattattggagtccaccagctgaagttatctggttggaagccagaagaatgtggtgctattgaaaatgagcgtcatcacctgagcaaaagaggccgttctgaaacggaaggaaatgtagatggtc

SEQ ID NO: 157886 - DNA, 173 bp, Glycine max
ggctcgaggaagaagggatacgaggctctttatatggttgatgccattgatgaatatgctgttggtcagctcaaggaatttgagggcaagaagcttgtctctgccaccaaggaagggctcaagcttgacgagagtgaagatgagaagaagaagcaagaagagtttaaggagaa

SEQ ID NO: 157887 - DNA, 170 bp, Glycine max
gtataggtactgtctttcataaggacgctcatttatggaccaatataaaggaagtaagtgcacgtgaaatggcagttgcagcacgtgagggttctagacggcttcagatcctcaaatctgaagaaaggaggaaaacttttcaggcaaattccgaatcagtggagacaaga

SEQ ID NO: 157888 - DNA, 202 bp, Glycine max
  unsure (1)..(202): unsure at all n locations
gtaaaatctcttgactctatgaaaaaaaggcaaaattcaatcataattccaattggctctgtgcagtatggtgtatgtagacatagagctctgctttttaagtatttatgtgatcacatggagccaccagttccttgtgagcttgtcagggggtacccagaattttcaccacagtcctggaagatcaggctgacnatgaggg

SEQ ID NO: 157889 - DNA, 212 bp, Glycine max
ctgaaacttcagaggcggcttgccgctagcgttctcaagtgtggtagaggcaaagtttggcttgaccctaatgaggtcaatgaaatctccatggctaattctcgacaaaacataaggaaattggttaaggatagtttcattatcaggaagccaactaagattcattcccgttcccgtgactgcagaagtaaggaggcctagaggaagggacg

SEQ ID NO: 157890 - DNA, 245 bp, Glycine max
tttgttctcagctacccaaacaaagaaggtcgaggatcttgcccgcttatcatttcaggcaactcctatctatattgatgtagatgatgggagataaaaaggtcacaaatgaaggattgcagcagggctatgttgttgttccctgtgctaaacgttttgttgttctctattcattcttgaggagataccaatcagaaaaagtgatggtctattactcttcatgcaactctgtcaaattccatgca

SEQ ID NO: 157891 - DNA, 257 bp, Glycine max
atttctcaacaacttctgctacttcctactccaaccgcacttctgctccgcaattatcatgggcaaggtcaagatcggaatcaacggatttggaagaattggccgtttggtagccagagtggctctgcagagagacgatgttgaactcgttgccgttaacgaccctttcatcaccaccgattacatgacatacatgtttaaatacgacagtgttcatggacactggaagcatcacgatgtcaccgttaaggacgaga

SEQ ID NO: 157892 - DNA, 252 bp, Glycine max
agtgactctaaagaactatatgagcttgacaaggaagagtatgcaaagaaagggagctacagaattgaccacactccaacattaaagtttcttgacaaggcatgtgtgaaaacagattcgaacactagtccatggacgctatgcactgttactcaagtagaggagaccaaacaaatgataagaatgattccgatcttggttgctacatttgtgcctaataccaagatggcccagatagataccctttttgtg

SEQ ID NO: 157893 - DNA, 258 bp, Glycine max
gagaaaagttagggttcacaacttttccttttccttttgcttgcgaatctgaatcaaataatcaatcatccattcattattcatcatgtacgtcggcgaagaaaatcacgctgaagagttcggacggcgaggctttcgaggtggaggaggcggtggcgctggagtcgcagacgataaagcacatgatcgaggttgactgcgccgacagcggcatccctctgccgaacgtgacgagcaagatcctggcgaaggttatcg

SEQ ID NO: 157894 - DNA, 254 bp, Glycine max
ggcacatctctttgctgttttccaaggcttgctcaaagtgcttgctggaattgacaccaacttcactgtcacctccaaggcctcggatgaagacggagactttgccgaactatacatgttcaaatggaccacccttcttattcctccaacaacccttctcataataaacttggtgggggtggttgctggcatctcctatgccatcaacagtggctaccaatcttggggacccctctttggtaagcttttctttg

SEQ ID NO: 157895 - DNA, 255 bp, Glycine max
gtcaaatgttgcaggctacagggatgggcctagtgaggatgctaaattctcaaatgatttcgatgtggtatatgttcggcccacctgttccttgttggtcattgatagaggaaatgctgctcttcgacaaatctctcttgaccaggaggactgtgattatcagtctaattcaatttccagtacagatatacttacagttgttggtgctgttatagtaggatatgctacatgtatgcttcagcagggatttggatc

SEQ ID NO: 157896 - DNA, 256 bp, Glycine max
gcttttggttggactttgctgaatggagagtgcaagaatcagccaatggttaaatcttcttgtttgtgtactgctattgctcaaggcagaaggatctttagttccattgattttggtcgagaatgcagaatcaaaaggagctgtttgtttggatggaagtcccccagcttaccactttgataagggatttggggaaggtattaatagctggattgttcacattgagggaggaggatggtgcaacaatatcgagagt

SEQ ID NO: 157897 - DNA, 260 bp, Glycine max
aaaatggccaaaccataaaagatgtcgccaccgggctaccggctacgccatttgattatggggccggacacgttgatccagtggctgcgtttgatcctggtcttgtgtatgatacttccgtggatgactacttgagcttcttctgtgccttaaactacagttcctatcaaataaagcttgttgcaagaagagacttcacctgcagcaaaaggaacaattacagagtggaagatctcaattacccatcttttgctgttcct

SEQ ID NO: 157898 - DNA, 254 bp, Glycine max
tgcggtggtaactgtggttgcggaagctcctgcaagtgcggcaacggctgcggaggctgcaagatgtacccagacttgagctacactgagtcaaccaccaccgagaccttggtcatgggagtggcacctgttaaggctcaatttgagggtgctgaaatgggtgtgcccgctgagaacgatggctgcaaatgtggaccaaactgctcctgcaacccctgcacttgcaagtgaggtgttgggagagcaagcttcaa

SEQ ID NO: 157899 - DNA, 255 bp, Glycine max
cgaatcgaggcctccgaggacacgtggccgccgcggaagagcgtcgtctcctgcgccggcgtcgcccgcagctggagacatatcaccaaagacattgtcaaaacgcccgaactctcctccaagatcaccttccccatttctggtagacagcctggcccaagggagaatctcctacagtgctttataaagcgcaacgggtccaccccaacatactattggtttctcagtttaaccagtacgctagctgaagatggg

SEQ ID NO: 157900 - DNA, 252 bp, Glycine max
gatagacagagcccatgaactgggtctgcttgttctgatggatattgtacacagccatgcatcaaataatacattggatgggctgaacatgtttgatggaactgatggtcattacttccatcctgggtcacgaggttatcattggatgtgggattctcgccttttactctacggaagctgggaatttctaaggtatctactcccgaattcgagacggtggctggatgaatacaagtttgatggatttcggtt

SEQ ID NO: 157901 - DNA, 251 bp, Glycine max
ttcatgggcaacaaaggacatgattcaacaagccaattactttgggtcgctgacccaggcatcagctattagagttgggtctttccaaggggaggaaatatatgccccattcaagagcctgcttccaatggtaaaccctgatgatgttgtgtttgggggatgggatatcagtaacttgaacctggcagatgccatggccagggccaaggtgtttgatatcgacctgcagaaacagttgaggccttacatgg

SEQ ID NO: 157902 - DNA, 248 bp, Glycine max
ggaaggtctccttcagctaccttctgacaaggctcttttgtctgaccctgtattccgccctctcgttgataaatatgcagcggacgaagatgccttctttgctgattacgctgaggctcaccaaaagctttccgagcttgggtttgctgatgcctaagcaacgtttaggggattgttgaagaggcatggtgcccataatatttctctaaaaaattgtatggtcatggtttttaatgccaatgtgggtt

SEQ ID NO: 157903 - DNA, 252 bp, Glycine max
gaggcattagcagagttgtatgtaatcgatgagcaatatgagaaagccttcttgttgtatgctgatcttatgaagccagaagtatttgattttattgataaacataacctacacgatgcaattcgtggaaaggttgtccaactaatgaggctagactgcaagcgtgcagttcctttgttaatccagaatagggacttaataagtccacctgaagttgtgaagcaacttctaaatgcggatgataagagtgat

SEQ ID NO: 157904 - DNA, 255 bp, Glycine max
gctttctccgagaacaaaaaaaaaaacgtgattcgctcttctcttcgaataaaccacaaaaccaacaaacgagaagaggagtgagacaagatggggttgtcgttcacgaagctgttcagcaggttgtttgcgaagaaggaaatgaggattctgatggtaggtctcgatgctgctggtaagacaaccatcttgtacaagctcaagcttggagaaatcgtcaccaccatccccaccatcggatttaatgttgagact

SEQ ID NO: 157905 - DNA, 258 bp, Glycine max
ggagtccatcgcttagaaaccaaaaggctctctcacgcagtcgcagtgagtgaaaaggaaaaccctaattgcggtattctcagtgccttcgagagaaagaaaaaatggcagataatcttgttctccgtggcaccatgcgcgcccacaccgacgttgtgacggcgattgccactcccatcgacaactccgacatgatcgtcaccgcctcacgcgacaaatccatcatcctctggcatcttaccaaggaggacaagactt

SEQ ID NO: 157906 - DNA, 242 bp, Glycine max
gatatgcctctctatgatatactaaatgagttccaaaagggaagtagtcatatggctgctgttgttaaggctaggggaaaaggcacagaaactcgacaaatcattgatgaagacaaacatgaagacaacaaaaccattggcggggactcacagttgaccgctccgttgctacataagcaggatgcagaatcaggaagcgatgttgatgcctaagtcaagccttgataacattactgccctaa

SEQ ID NO: 157907 - DNA, 252 bp, Glycine max
gtagaaacacgaaactcagaatccatggcgacaccagcgacgacgaagcgaaaaccggtgttcgtgaaggtggatcagttaaaacctggcaccaacggccacacactgacggtgaaggtggtcagttccaagccggtgagaacggtgaccacccgcggcggtcgaccgacggtgctagccgcgcgcccgtcgcgcattgccgagtgcctcgtcggcgacgaaaccggaaccataatcttcaccgctcgcaaa

SEQ ID NO: 157908 - DNA, 250 bp, Glycine max
gaacaagtagttgagaactaagaaggagaagcaaatggcttcctcaatgatctcttccccagctgttaccactgtcaaccgtgccggtgccggcatggttgctccattcactggcctcaagtccatggctggcttccccaccagaaagaccaacaatgacattacctccattgctagcaacggtggaagagtgcaatgcatgcaggtgtggccaccagttggcaagaagccgtttgagactctttcctac

SEQ ID NO: 157909 - DNA, 251 bp, Glycine max
attttccggccatgtacctcgaaatcgaggtttttgaccggctcttccggtaaacttaaccgggaagtgactatgcggccaatggggtgccctcctcgtgcctagttcaaggttgaagccaagaagggagagtggttacctggacttggcctccccaacttacctcaatggcactcttcctggtgacaatggatttgaccctctggggctagctgaggacccagcgaacttgaggtggtacgttcaagccg

SEQ ID NO: 157910 - DNA, 245 bp, Glycine max
cctttgttcactcttcttctcttgcggctagggttttagcgcacttcttctagatttaaggaagatcggtaaggaaaaggttcacatcagtattgtggtcattggccatgtcgactctgggaaatccactaccactggtcacctgatttacaagcttggaggcattgacaagcgtgttattgagaggtttgagaaggaagctgctgagatgaacaagaggtctttcaagtatgcctgggtgctgg

SEQ ID NO: 157911 - DNA, 252 bp, Glycine max
cgcgcatgttcgccggagaactcagccccgaccgcgacttcttcatctacagccgccacttcaacccgacggtgctgagcctcagtcgcctcatggccgccctcgaaggcaccgaggccgcctactgcaccgccagcgggatgtccgccatcgccgccgtcctcctccagctctgcagccacggcgaacacgtgggtcgcctccaaaactctctacggtgggacccacgcgctcctctcacactttctcccg

SEQ ID NO: 157912 - DNA, 250 bp, Glycine max
ctgaccctgattgcgttggttgttgcggccctgtgcgccgttgatctaacccagagagcatcatcatcatcatcatcccctcacgcgccaggtccctccgtggactgctccaacctggttctcaccatggccgattgcttgtccttcgtcaccaacggcagcaccatcacaaagccagagggcacatgctgctctggtttgaagtctgttctcaaaaccgctccggcgtgtctctgcgaggctttcaaga

SEQ ID NO: 157913 - DNA, 242 bp, Glycine max
cgtcactccttgctcttagccctcctcctcttcgccgccgtgtccaccgccgcgatggcggtggccgcgtccgacgccgacgacatcctgatccgtcaggtggtgccagatgttgagcgaagcgacacaggaggacaacctgctgagcgcagctcaccacttcacctgcttcaaggccaagttcgccaagacctacgccaccaaggacgagcacgatgcctctcttcggcgtcttcaagtcc

SEQ ID NO: 157914 - DNA, 246 bp, Glycine max
cgagatttcaagactggttacctgaccctctcatcggcaaagtccatgtttgtgagccaattgattggaacagccatgggttgtgtaatcgctcctctcacattctggatgttttggactgcctttgatgttggctcacctgatggcccttacaaagcaccatatgccgttatattcagggaaatggccatactcggtgttcagggattctcagagcttccaaagtactgccttgaaatgtgcggt

SEQ ID NO: 157915 - DNA, 245 bp, Glycine max
gtgaggttcatgtatttatacggcaaaagaaggttttgcggggatttgatgaagagattagagattttgttgaagaacaaatgtctgtaagagttattgaattccataccgaggagtctcttcaagctatcacgaagtcagcggatggctcattctctgtaaagaccaacaaaggtacagtggacggtttctcacatattatgtttgctacaggacgcagacctaatactcagaacttaggcctg

SEQ ID NO: 157916 - DNA, 249 bp, Glycine max
atgggttatgagagagtgagagtgctgtttcttctgtttctgataccactgccaacggttctgggttggggcaaggatggccactatgccacttgtaagattgcacaggagtatcttagtgaagatgctctatttgcggtcaaacaattgcttccagattctgctcaaggtgatcttgctgccgtttgctccttgggctgatgaggttggccatactcaccgctatcattggagcagcgctttacatta

SEQ ID NO: 157917 - DNA, 248 bp, Glycine max
gtcgtacttccaacttgcagctgaggatcatgaatggtggtggaggtctttcctttgtggtggatcaactgggctgttcatctacggctattgcttgtattactactatgcacgatcagatatgtctggttttatgcaaacttcgttcttcttcggttacatggcctgcatctgctatggcttcttcctcatgcttggtagtgtaggtttccgtgcgtctctgctctttgttcgtcacatatacaggt

SEQ ID NO: 157918 - DNA, 142 bp, Glycine max
gtcggaaactacagtgatggaaacattgttgcctctttgttggcacataaattaggagtcactcagtgtaccattgctcatgcacttgagaagagcgaataccccgaatccgacatgtactggacaagattgggagagaggt

SEQ ID NO: 157919 - DNA, 138 bp, Glycine max
aggttctcatccgctgcttgccgccccagagtagataatttgggtatgggaaactgctggattgaaggacgaagctgcagcacatcaaatagctgcgatgaagacaatgaagagtatacagcagagacattcccgtgg

SEQ ID NO: 157920 - DNA, 246 bp, Glycine max
gcaattaatgcttatgagcaatgtcttaagattgatcctgattctcgaaatgctggccagaaccgtttacttgcgatgaattacatagatgaaggaaatgatgacaaactttttgaggctcacagggactggggtaggcgatttatgagactatattcacagttcacatcatgggacaactcaaaagatcctgaacggcctcttgtgataggatatgtctctcctgattattttacacattctgtg

SEQ ID NO: 157921 - DNA, 245 bp, Glycine max
aggtaatgcacacagtagcattacggactgaagctactataccaggtggtcaaatgccacctaatattggtccagtgttgaagaaccacatgagtgagatgtttgcataccatgcaaccatgatgtctaacactcttggaacctcaactgttgtcttcactagaacgggtttcatggctgtccttctgagccattatcgtccttcgggcaccatatttgcttttacagatgagaagagggtacaa

SEQ ID NO: 157922 - DNA, 243 bp, Glycine max
agaaaaagcaactaagcatagtgtgtaagaaagggagaaaaacaagtgctgtgtagagagaaaaatggctaggtggtgcatgatcttggtggttcttgctcttgccgtggttgcaagtgccagaaacatgcccaatgacgctggtttggaggaccagaagaacttccttgggtatgggttttcgggaattggcaacaatgggcttccctttggtggaatgggttctgggtttgatggtaatat

SEQ ID NO: 157923 - DNA, 248 bp, Glycine max
gggaaaagttggccacggttccttctggtggtggtggtgccgttgccgtcgccgcagctcctgggggaggtgctgctgctgctgctcctgctgctgaggcaaagaaggaggaaaaggaggaggagaaagaggaatctgatgatgatatgggtttcagtctcttcgattaattggtgtagtctattcagcttttttgttcagaacatattcttaattaacactagagcatgagtttgtcaaagttttgt

SEQ ID NO: 157924 - DNA, 242 bp, Glycine max
ggtgtattcctagtcactattcacttccctccggattatcctttcaagcctcctaaggttgcctttaggactaaggtgtttcacccgaacatcaatagcaatggtagcatttgtcttgatatcctgaaggagcagtggagccctgcactcaccatctctaaggtactgctttctatctgctcattgctgactgatccaaatcctgatgatccacttgttccggaaatcgctcacatgtacaa

SEQ ID NO: 157925 - DNA, 244 bp, Glycine max
gtcaggttggaactccttgggcagatggaactgcttccatctcacagtgtgctattaacccaggagaaacttttcattacaagtttacagttgacaggcctggtacatatttctatcatggacaccatggtatgcaaagagcagctgggttgtatggttcattgatagtagatttgccaaagggacaaaacgaaccgtttcattacgatggtgaattcgtccttctttttagtgatttgtggca

SEQ ID NO: 157926 - DNA, 246 bp, Glycine max
gccacgtctccttccactgcatttcttcacttaacccctaaaataaatttcatcctatggttcatctccattgctattgttgctactattttcaccacctatctcttcagaataattctccattttgaagcagttcgtcgtgagtaccaacatccgatctgtgttaacttcttctttgcaccatggatagcccttttgttcctagctcttggagttcccccatcagttaccaaggacttgcatcaa

SEQ ID NO: 157927 - DNA, 226 bp, Glycine max
  unsure (1)..(226): unsure at all n locations
acatcactgaactaacaaagcaaccctatgtcgaaggtggtttgtgtcaccggagccagcggcgccntcggatcatgggtggtcctactcctcctccagcgtggttacaccgtccatgccaccgtacaagatatcaaggatgaaaatgagacgaaacatttggaggaaatggaaggagcaaagagtcatctccatttttttgaaatggatcttcctgacatcgact

SEQ ID NO: 157928 - DNA, 241 bp, Glycine max
gttatgactttgtacaaaggcccggctcttcagttcataaagggacaagcagcaacccaccatgaaagtggcaacagcacacaaccctctgaacaaaactgggtgcttggcacagtagagctcattgtaagttgtggtggttgggctagcttctttatcttgcaatctttcactttgaagatgtacccggcagagctctcggtcacagcttggatttgctttttgggcatttttgagggtg

SEQ ID NO: 157929 - DNA, 247 bp, Glycine max
tgagaattggtttgaagaagagacctctagatcttgatagtattaatgctgctagaaaggcaagagaaggtctaagatctgtaagaccaatgatgggtgcacatgatcagtttattggtaagtcaaaaggtgaagatatagtacctttgaagaattatttggacgctcaatattttggtgagattggaattggcacacccccacagcccttcactgtagtgtttgacactgggagttccaacctttg

SEQ ID NO: 157930 - DNA, 247 bp, Glycine max
ctattattactcccaatgagcttcctgaggctgatggctttttgtttggttttcccacaagatttggatctatggccgctcaatttaaagcattttttgatgcaactggaggcctttggcgtacacaggcactagcagggttcttctatagcactagttctcaaggaggaggccaagaaactaccccgttgacatctattactcagcttgttcaccatggattgatctttgtccccattggatacac

SEQ ID NO: 157931 - DNA, 265 bp, Glycine max
gtgcatgatgctgaattaaatgcagaataagtgatttatcctgatagtgatgatgaattggatggcgtcatgaggaatagtggattatttttatctagaaagtgtacgatggcacatcttttgtactttaaataggtgttgtggtatcaggctaaatcacttcagcctgcagattatgttctataattagaaatcttagttatggttctctttgtgtgactgtgtgaacaataaaattgcttatgccttaacatgcagcaaaata

SEQ ID NO: 157932 - DNA, 213 bp, Glycine max
ctgtgcgtcaataaaagatatgttcgaggagaaaaggaacatattagaaccagcaggagcacttgcactagctggagctgaggcatactgcaagcatcatgggatccaggggaaaaatattgtagcaataaccagtggagcaaacatgaattttgataaacttcgggttgtaactgaacttgctaatgttggtcgtaaacaagaggctgtgct

SEQ ID NO: 157933 - DNA, 262 bp, Glycine max
ggcaaaatagatgcttggaagattccatcttctgaatcagattccctcaatcaatgggctgaaaggtctcgtttcagagtcggcgatcatcttgtgtggaaatatgagaatgggaaggactcagtgttggaagtaacaagggaagattatgccaattgcagcacatccaagcccatcaaagagtacaatgatggaaacacaaaggtgaagctagagcatgctggtccattctacttcataagtggagcaacagggcactgtg

SEQ ID NO: 157934 - DNA, 233 bp, Glycine max
atgccaatgaggagaagaacaaagaccttgcatcacaatatgatgttaagggattcccaacaattaatattctgagaaattgggggaagaatgttcaggaatacaaaggtcccgtgaagcagatgggctccgtgactatttgaagaaacaaagtggtcctgcttcaactgaaattaaatctgctgatgaagctactgcttttattggtgaacataaagttgctattgttggag

SEQ ID NO: 157935 - DNA, 244 bp, Glycine max
cccatctactccttccctcatggctgaacaatcttccaactccatttacgatttcactgtcaaggacatcagtggaaatgatgtgagtctgaatgattacagcgggaaggttctactgattgtgaatgtcgcctctcaatgtggtttgacacagacaaattacaaagaattgaatgtattgtacgagaagtacaagaatcaaggatttgaaatcttggcatttccgtgcaaccagtttgctgga

SEQ ID NO: 157936 - DNA, 256 bp, Glycine max
attctatcaagtttatgtaaatatatgctttgtcttattttgtttgcagattcgtgtatgttgaacttctggaaattcgtaaagatgtccaatgcccaatttgccttggcattattaagaagacaagaactgttcaggaatgcttgcaccgtttttgcagggaatgcattgataaatcaatgcgactagggaacaatgaatgccctgcttgtcgcacacattgtgccagtcgtcgttccttgagagacgatccaaa

SEQ ID NO: 157937 - DNA, 249 bp, Glycine max
gaatgaacttatccaattccacgtgctaccaacatttgtttcaatctcaaacttcgacactcttagcaacccggttagaacgcaagccggtgatgaccctgataggttggcattgaacataacaagctcagggaaccaagtgaacttgacaacaggtgttgttaacaccacagttggtggaagtgtttactccgatcaccagctcgcgatttatcaagtggacaaggttcttcttccgagggattcttc

SEQ ID NO: 157938 - DNA, 250 bp, Glycine max
ccagatctcaattttctgcaatttcactcagaccaggaccttaaccatggctcaacctgcaagcctcacaagaataggccttgctggcctggctgtgatgggccaaaaccttgctctcaacattgctgacaaaggctttcccatttctgtctacaaccggaccgcgtccaaggttgatgagacagttgaaagagcaaaacaagaaggaaaccttcctgtgtatggctaccataacctcaaattctttgtc

SEQ ID NO: 157939 - DNA, 244 bp, Glycine max
gtcttgcccagcagcagcatggtggctggctccctgtttctgcaatggatgcggtagctaagattgtagaggttcctcccatacgggtctatgaggttgccacattttactccatgttcaaccgagctaaggttgggaagtaccatctgttggtttgtggaacaacaccttgtatgataagaggttcacgaggaattgaagaagccttattgaaacacttgggagtgaagcgcaatgaagtaac

SEQ ID NO: 157940 - DNA, 258 bp, Glycine max
gagtaataataatgtgtataatgctacagcagcgggtatggtaaaaaaaatcatacgaaaagaaaaagggggatacgaaataactatagtggatgcattggatgggcgtgaagtgattgatattatacctccaggaccagaacttcttgtttcagaaggtgaatctatcaaacttgatcagccattaacaagtaatccaaatgtgggtggatttggtcagggggatgcggaaatagtacttcaagatccgttacgtgt

SEQ ID NO: 157941 - DNA, 129 bp, Glycine max
gcaaggaagacgccgccaacaacttcgcccgcggccactacaccgttggcaaagagatcgtagatctgtgcttggatcgcgtccgcaagctcgccgacaactgcaccggcctacaaggcttcctcgtct

SEQ ID NO: 157942 - DNA, 249 bp, Glycine max
caggggtggaaatggcaggttcttgaagactgctgcatatggacactttggcagagatgaccctgacttcacatgggaagtggtgaagccactcaagggggagaaggtacctgcttaactaaaaggggttccacactcttggcaagggacttttgcactactactggcttcttattatctgattgctaaaattttctctatgcttccttccctcttactcaattctgtttttttttttctgtatttttt

SEQ ID NO: 157943 - DNA, 254 bp, Glycine max
caagcagggctttcttggttagcaaaacctgtcactggacagagttctattggccttgcgtcacgccatggaagcatcatcaaccaaagcatgcccctcatggatcctctggtgacactgtttggtagcattcatgagaggctccccgagacaggagcaggaggaagcatgcgaacactctgtttccaaattttggaagcatgttcagcactgctgagccgcatgctaaaagtgaacagtgggatgaagagagc

SEQ ID NO: 157944 - DNA, 234 bp, Glycine max
agtgatcgctgcggcattgtatggattcattttacccttggtggagttggtgtacaaaaaaatcaaacagcctcttacttactctcttgtcatggagattcagttcgttatgtgcttctccgccactctcttttgcctccttggaatgatcatcaacaatgaacttaagggtgattcggaggaaacccaaaaaatttaagcacggagaaggaagtactaagctggttttggtgg

SEQ ID NO: 157945 - DNA, 243 bp, Glycine max
ggggaatattcgcgaagagagagagggcggttgcaattgcatagagaagtgcagagagagcgcagggacacgactcagtcaaacagtcggtaactctttcttttcttttctttctttctccgatcgcatcgctcgcaaccacaatcatgccttcccgaagaagaactctcttgaaggtcatcattctcggtgacagcggggtggggaagacgtctttgatgaaccagtatgtgattaggaagt

SEQ ID NO: 157946 - DNA, 255 bp, Glycine max
ggagtattccaagtttgcagaaaaagccacagcactgcttgaaatcctttccaactccgaagaaggacgaactgcaatctcaattgcagatggtggaatcttaacgctagtagagacagttgaagatggatcacttgtcagcacagaacacgctgttggaactctgctatcattatgtcgaagctgtcgagataaataccgggagctgattcaggaagaaggagcaattccgggtctgttacgtctgacagtgga

SEQ ID NO: 157947 - DNA, 252 bp, Glycine max
cgaaggtgcaaagcaaggaagctgaaataactaaatgattctgaattcttgttccatgagtccacaacctctgtcacctcacaatttcagagacctcttcgattccgtcgaagcttttctcttcgactgcgacggtgtgatttggaagggcgacgaactcatcgatggtgttccgcaaactctggacatgcttcgcgccaagggcaagaagctcgtcttcgtcaccaacaattcctggaagtcgcgttctca

SEQ ID NO: 157948 - DNA, 238 bp, Glycine max
ctctctccaaatttctagggtttggttcagagagagaggaacctcaaatgtctcaaaacgggaagctgatgccaaatctagaccagcacagcaccaagcttctcaatctcactgttctccaacgaatcgaccccttcgttgaagaaattctcatcaccgccgcacatgtcaccttctacgagttcaacatcgacctcagtcaatggagccgcacagacgttgaaggatctctcttcgt

SEQ ID NO: 157949 - DNA, 253 bp, Glycine max
gcaggatccacctacatcaaattagcgaattgcaatttaaaggttactaactaacttctgaatttttattttatttattttgtgttctttgatttgactatctccacctgttgtgatgaatcgtgttgttgtagttggaaagcaagcatgaagctgcacaagcttatgttgacgctgcgcattgctataaaaaaactaatataaatgagtctgtatcttgcttagacaatgctgtaaatatcttctgtggaga

SEQ ID NO: 157950 - DNA, 254 bp, Glycine max
gttgcgattgcgactctctcttcctacgataaccgtttcctctcgccggaacaccgacattgatctctctctccggcgatccccgcccatccctccgccatgagttccggcgagctcctccacatacagccccaggagctgcagtttccctttgaattgcggaagcagatctcgtgctctttgcagttgtctaacaagactgacaactatgtggctttcactgtcaagacaacaaatcctaagaactattgtgt

SEQ ID NO: 157951 - DNA, 258 bp, Glycine max
tcaaaacactcataacacaaggcacaaagcaaagctcatccttgagttaaaaaatggcagcagcttcttccatggctctctcatccccatccttggctggcaaggccgtgaagctgggcccatcagccccagaagtgggaagggtgagcatgaggaagaccgtcaccaagcaggtctcctcaggaagcccatggtacggcccagaccgagtcaagtacttgggcccattctctggcgagcccccgtcctacctaaccg

SEQ ID NO: 157952 - DNA, 255 bp, Glycine max
gtggctaactatgagtatggatttttctggcacttttatcaggatggaaaaatagaagcagaggtcaagctcacaggaattctcagcttaggagcattgcaaccaggtgaaactcgaaaatatggcacaaccattgcacctggataataggggctggtcaacaacaattttttggtgcccgtatggacatggcactagattgcaagcctggtgaagcatttaatcaggttgttgaggtgaatgtcaaagttgaaa

SEQ ID NO: 157953 - DNA, 251 bp, Glycine max
caaaaagaaagaatcccaggcgaggagaaagatggaggggaaggagcaggatgtgtcgttgggagcgaacaagttccccgagagacagccgattgggacggcggcgcagagccaagacgacggcaaggactaccaggagccggcgccggcgccgctggttgacccgacggagtttacgtcatggtcgttttacagagcagggatagcagagtttgtggccacttttctgtttctctacatcacgtcttaac

SEQ ID NO: 157954 - DNA, 254 bp, Glycine max
caatttcagttggagatagctgtgagtagtgagagggaggaagacatagacataaagaaggagaagtgaagtgatgaatgccccagatcgttacgagcgtttcgttgtccctgaaggcaccaaaaaggtttcttatgagagggacacaaagatcatcaatgccgcgtccttcaccatcgagagagaggagcacactatcggcaacatcctccgcatgcagcttcacagagaccccaatgtgttgtttgccggat

SEQ ID NO: 157955 - DNA, 254 bp, Glycine max
agtttctcaacaccataattgatgacctttttgcctttgtcattaaaatgccaacactccatcggctttctgtcttccgtgatgatcttatctttgtcatatacttataccagaggtggatttataaagtggacaagaaacgtgttaatgaatttggttttggaggcgaggatgatcaggttgtggcagagacagacgccacaaaggaagaagagaacactacaacggaagaagagaagaaaactaattgattt

SEQ ID NO: 157956 - DNA, 246 bp, Glycine max
  unsure (1)..(246): unsure at all n locations
gcacaatggagataattttgcagctgaaattcagaataggttgagaataattgttgcaggtggagatggtactgccagctggcttctaggagttgtatctgaccttaaattacctcaaccgccaccaattgctactgtgccattggggacgggaaataatcttccctttgcgtttggatggggaaagaaaaatccaaccacggatctccaatcagtggagacattcctanatcatgtanaagcggc

SEQ ID NO: 157957 - DNA, 248 bp, Glycine max
cacaattctctgtgaactttctagaatctcgttcttcctttgccttctccttcttcttcaaccctttttctttctctttctttcgcactttcattctctaaaaaaatctaagtccctttggtcttcatcttctgttctgatccaggtatggcttctaaacgcatcttgaaggagctcaaggatttgcagaaggatcctcctacctcatgcagtgcaggccctgttgctgaggacatgtttcactggca

SEQ ID NO: 157958 - DNA, 252 bp, Glycine max
atgatcttcatccttgtctactgcactgctgggatttcaggaggtcacattaacccagcagtgacatttgggctgtttttggctcgcaaggtgtctttgatccgagccatcatgtacatggtggctcagtgcttgggtgctatccgtggagttggtttagttaaggctttccaaaagtcttacttcaacaagtatggtggtggggctaattccctcgctgatgggtacagcacaggtactggattgggtgct

SEQ ID NO: 157959 - DNA, 254 bp, Glycine max
gtgaaccagtgctgccccgtgcttcaaggcctggttgagcttgaagctgcggtgtgtctttgcaccactcttaagctgaagcttctcaacctcaacatagatgtcccacttgcccttcagcttagtgtggcttgtggcaagtctcctcctcctggttacacctgctccctctaaaccagtgaaaggattgaggaaaatatggtcaaaatcgacatgagaggatgtcgagccacactatctctcttctgtcctga

SEQ ID NO: 157960 - DNA, 257 bp, Glycine max
cgaaatgaaaacccaaagtgcttctctcctctgtctttttctctctcttgctatccttttggctagtggcactgctgcaagtgcaactccaagaagcgcagtgccaagccaccatgtttcaacattcaacagaagcctttttccttccacttttctctttggacttggttcttctgcttaccaggcagaaggagcagcaagtgtagatgggagaggaccaagcatatgggacacctacactagacagcatactgaaa

SEQ ID NO: 157961 - DNA, 237 bp, Glycine max
tcggcatcaagatcacatgttctcaggaaactgaaccattgggaacagcaggtcctctggctcttgccagggataagctgatagatgactctggagaacccttttttgttctcaacagtgatgttatcagtgagtatccactcaaagaaatgattgaattccataaaaaccatggaggagaaggttccataatggtaaccaaggttgacgagccatcaaagtacggcgtggttgtga

SEQ ID NO: 157962 - DNA, 225 bp, Glycine max
ctggaagtgaagcaaatatggcatactctcaacttcaaaaggtgacagctaatgtgcacatcaaggcttctgctgatcagttccataatgttttatgcaacaggacacaccatattgccaacattttccctggaaaagtacagtctgttgaaattcataaaggtgaatggggcactgagggatccgtcatctcctggaattatttacatgcaggcaaagtttgtg

SEQ ID NO: 157963 - DNA, 245 bp, Glycine max
catcttcttcccaaccactactactcactcactgcagatctcaattgcatcgctgtccatggctaccatcgttagcatcaaggcccgccagatcttcgacagtcgtggcaatccaactgtcgaggtggatttgacttgctccgatggtacttttgccagagctgctgttccaagtggtgcatccactgggatttatgaggcccttgaattgagagatggaggatctgactaccttggaacaggtg

SEQ ID NO: 157964 - DNA, 240 bp, Glycine max
ttggtatcgtggctgctactgggatttcttttatacagtttgcaaataccaattccataagaaatatctatgttctgggcctaaccttgttccttgcgatatcaataccacaatattttgtcatgaacactgcaccggatggtcctggtcccattagaacaggtggtggatggtttaatgacattttgaacaccatattctcttctggccccactgtggctataattgttgggactcctg

SEQ ID NO: 157965 - DNA, 252 bp, Glycine max
  unsure (1)..(252): unsure at all n locations
gcagtggagaggtccaacaagcaattccccttttacagaaagcatatggagatagcatgcataaagttttgcatgttggtcctgatacttgttatgtggtctctaaattgctgaaggaggatgaaactgacgcctggggaatagaaccatatgatatagaggatgctgataataattgcaaagcacttatacgtagaggcagtgtgcgtgtgtctgatatcaagtttcctcttccatacaggccanaatctt

SEQ ID NO: 157966 - DNA, 235 bp, Glycine max
gggaaggccaggctatgagcacttgaatgaaccactgcacgttttgattgaggccgaattacctgtcaatgttgttgatataaggctgaggcaagcacaagagatcatagaagagctactcaaacccatggatgagtcacaggatctccacaaaaggcaacaactaagagaacttgctatgctgaattccaattttagagaagatagccctcaactcagtggtagtccctctaca

SEQ ID NO: 157967 - DNA, 251 bp, Glycine max
gcaacactagcgactgttgccgagtacatggtggatggttctcttaggaatgttttgcttcgtaaggataggtatcttgatcgccgcaagagactgataattgccatggatgctgcttttggaatggatatttacactcgaaaaatattgtgcattttgacttgaaatgtgacaatttgctcgtgaacttgaaggatcctatgcggccaatatgcaaggtcggtgattttggcctatcaaagattaagcga

SEQ ID NO: 157968 - DNA, 275 bp, Glycine max
cagtgataggtttggtttggaaggaagaagaaaatgaaggccatagtgataacgaggccaggaggtcccgaagtgctccaacttgaggaagtggaagatcccctagtcggagacgacgagcttctcatcggagtccacgccacttcccttaacagagccgatacctttcagaggaaaggctcctaccctcccccttaagggcgccagccattacctcggtctcgaatgttccggaactgtcctttccctgggtaaaaacgtttccagctggaaaa

SEQ ID NO: 157969 - DNA, 266 bp, Glycine max
ctggagtgaagcacattgtgttagtagggtctatgggtggaacggaccttaaccatcctttgaacagcttgggtaatgggaatatattggtttggaaaaggaaggctgagcaatatctggctgattccggcatcccatatacaattataagggctggtggcttgcaagacaaagatggaggtcttcgggaactacttgtagggaaggatgatgagcttctccagactgaaaccagaaccataagtagatctgatgttgcagaagtc

SEQ ID NO: 157970 - DNA, 249 bp, Glycine max
ggcacacagtgcattcatcaacttactttcacagatgatccagatttccaaaatacatttctctataaactgtgtaagcagaagaccttggaacattttaggaatattattctgctatcttccccccaggatggttatgtgccttaccattctgctagaattgaatcatgccaggctgcttcacgtgacacttcaaagaagggtaaactgttcctagagatgttgaatgcttgtttgggacaaatccgt

SEQ ID NO: 157971 - DNA, 264 bp, Glycine max
ggcacacagtgcattcatcaacttactttcacagatggtccagatttccaaaatacatttctctatagactgtgtaagcagaagaccttggaacattttaggaatattattctgctatcttccccccaggatggttatgtgccttaccattctgctagaattgaatcatggcacgctgcttcacgtggacacttcaaagaagggtaaactgttcctagggatgttgaatgactgtttggagcacatccgtgccaactcaatgca

SEQ ID NO: 157972 - DNA, 263 bp, Glycine max
cgagcattcggttttgaatcttttgagcgaaaatgcagtcgagtcctttgcttctggaggaacccataaggatggcctccatcctcgagccatccaagcctagtttctttccagcgatgacaaagattgttggcacacttggcccaaagtcacgatcggttgacgtgatttcccaatgtcttgaggcaggaatgtctgtggcaaggtttgattattcatggggtgatcctgaataccaccaagagacgttggaaaatttaagg

SEQ ID NO: 157973 - DNA, 265 bp, Glycine max
aatttgtgttgactcacttggatagccgtcagcttcttattaaatcaaatcccggggaagttgtgaagcctgattcatacaaggctataaatgatgagggaatgcccatgtatcagaggccattcatgaaggggaaactttacattcaattcactgtggagtttccagattctctaaaccctgatcaagttaaggccttggaggctgttctgccaccaaagccttcttcacaattgacaaacatggagctggatgaatgtgagga

SEQ ID NO: 157974 - DNA, 274 bp, Glycine max
ctcgagtatcgctcttgcaattattcctcttctcgcaatccgcactagaattctagggttccgaaatggacgctgacggaaagatcaagaagggcgccggctgaagatagggcggcggcccaaagaagaagccggtttcaaggtccgtcaaagccggtctccaattccccgtcggaagaattggcagttatttgaagaaaggaaggtacgctcagcgtgtcggtaccggtgctcccgtatacttggctgcagttctcgaatacctagctgccgg

SEQ ID NO: 157975 - DNA, 274 bp, Glycine max
cggctcgagggaacactgccccaaggtcaaacggatatgcatccacaagtctcaacattggagcaccccctcatcaaacagatgtatcaggcacttctcatgatcattttctgccttcatcaagtgctggaatgttttatgcagtgcctgaaaattatgtacaccagccttctaattctaattatgacagacaagcattttctgctgctgatgggggttttattgatcttacaatgggaaatggacgagggcctcacaagcgaaagagccctgg

SEQ ID NO: 157976 - DNA, 262 bp, Glycine max
attgtattaataggttgaaggattttgggtctgctactgccatcttgctcgtcctgcttctttacctagtccaacagatttgcaccttttcaaggaaggaatccgtctctatgggaggactctgctaactgcaatggtggtaaatggattatacgattcaaaaaggttgtcactggccgtttatgtggaggacctggtaatgcaaatatggtcatctgtaacatttggtatcatccttgataaaatgtatggctatggcatg

SEQ ID NO: 157977 - DNA, 261 bp, Glycine max
aaaccctcttttttctctctcttgcaaaacctaattttcatttcttccctcaaatttcaaaatgcgtgagatccttcacatccagggtggccaatgcggcaaccagatcggcgccaagttctgggaggtggtttgcgcggacacgggatcgaccctaccggaaggtacggtggggactcggagttgcagctcgagaggatcaatgtctactacaacgaggccagttgcggtcggttcgtgccgcgcgcggttcacatggac

SEQ ID NO: 157978 - DNA, 260 bp, Glycine max
agcagcgatgggaatcgatcttaaggctgggggtaagagcaaaaagaccataagaacagcaccagaatccaatgacatctacctcagattacttgtcaagctttatcggttccttgttcgaaggactggcagcaatttcaatgctgttatactcaagcgcttgttcataagcaaggttaacaagcctccaatttctttgtcaaggttaatgaagtatacaaaggggaaggaggataaaattgctgtagtagtggggactg

SEQ ID NO: 157979 - DNA, 234 bp, Glycine max
attaattgcaagaatggcacttcgttgcttggtgatgtccctttctgtactcttcactcttggtcttgcgagagaaagccatgccagagacgaagatttttggcagctgtttggccaaacactcccattccaagttcattgcgagatcttctaaagcctggccctgcaagtgttgaaatcgatgatcaccctatgcaaattgaagaaacacagtacccgaaaaccatcttctat

SEQ ID NO: 157980 - DNA, 259 bp, Glycine max
tgataacccataaccgaccgcaccaccgtttacctttgctgtgcgttctacaatgtcgaaaacctcagagattattacatgcaaagctgctatttgatggggagtaggagaacctgtgactgtggaagagatacaagtagaccctcccagagccaccgaagttcgagttaagatgctttgtgcaagtatatgctccacagacatctctagcacaataggattcccacataccaattgtcctatagcacttggacacgaa

SEQ ID NO: 157981 - DNA, 255 bp, Glycine max
ttaaaagagcctttgctttttctttaggcctttccgaattaagtacttgtttcattttctctcgaagcaagaaaaatgttcatcgagagtttcaaggttgagagtcctaacgtgaagtacacagagactgagattcagtccgtgtacaactatgaaaccactgaacttgttcacgagaacaagaatggcacttatcagtgggttgtcaagcccaaaactgtcagatatgaatttaaaaccaacacccatgtccct

SEQ ID NO: 157982 - DNA, 257 bp, Glycine max
ctcctcgttcgcatcttcaccctttccctgtctctcagaaagatgaaggtggtcgctgcgtatctgctcgccgtcctcggtggcaacaacaccccctccaccgatgacatcaaggaaatcctcggctccgttggaatagaggcagatgaagataggattgaatcgttcttgtctgaagttaagggtaaggatatagttgagctaattgctgccggtaaggaaaagctggcctcggtgccttctggtggcggtggtgc

SEQ ID NO: 157983 - DNA, 258 bp, Glycine max
attcttcttgcaggtctatttaggagagcagtacgtaaacaatgctacgttgtctgacgttacatttttggttgaaggcaaacgattttatgctcatagaatttgtcttcttgcatcatcagattcatttcgtgcaatgtttgatggtggttacagggagaaggaggcaagggacatagagattccaaatattagatgggaggtttttgagttgatgatgagatttgtatattgtggatcagttgatgtcactctgga

SEQ ID NO: 157984 - DNA, 259 bp, Glycine max
aagccccactcaaccaccacacctctcctcgttcacgctacccctttctgctcttcttctacctttcaagttttaaaagtataaagatggcagagacattcctatttacctcagagtcggtgaacgagggacaccctgacaagctctgcgaccaaatctccgatgctgtcctcgacgcttgcctcgagcaggacccagacagcaaagttgcctgcgaaacatgcaccaaaaccaacttggtcatggtcttcggagaaat

SEQ ID NO: 157985 - DNA, 256 bp, Glycine max
gtccagtcagaaatggtcttacaaggttggactgaaaggtgaatcgttgagccttcacactgaaagtgggagtagctctgttgaatggatacgaggatcattagtggctaaaaaacaacctttgacatggtacaagacaacttttagcgcaccggctggcaatgatccattggctctagatttgggaagcatgggaaagggtgaagtatgggtaaacggtcgcagcattggtcgccattggcctggatatatagca

SEQ ID NO: 157986 - DNA, 252 bp, Glycine max
gaagatgccgccaacaactttgcccgtggccattataccattgggaaagagattgttgatctgtgcttggaccgcatcagaaagcttgctgacaattgcacggactccaagggtttttggtcttcaatgccgttggtggaggaactggttctggacttggttcccttctcttggagcgtctctccgttgattatggcaagaaatcaaagcttggtttcacagtctacccctctcctcaggtgtccacctctg

SEQ ID NO: 157987 - DNA, 254 bp, Glycine max
ctcgagccgcgatcagaaacatcgccgtcggaaggcctgaagaggcgactcaccccgacacgttgaaggcggctttggctgagttcatctcaaccttcatctcgtgttcgccggctcaggctccggcatcgcctacaacaagctcaccgacaacggcgctgccacccctgccggcctcatctccgcctccatcgcccatgcattcgccctcttcgtcgccgtctccgtcggcgccaacatctccggcggccacg

SEQ ID NO: 157988 - DNA, 259 bp, Glycine max
ccttgaagaaggacaggaaccccaagtaccctcgcattagcgccccgccgaggaacaagcttgatcattatcagatcctgaaataccccctcaccactgagtctgccatgaagaagattgaggacaacaacactttggttttcattgtcgacctgcgtgccgacaagaagaagatcaaggatgcggtgaagaaaatgtatgacatccaggccaaaaaagtgaacaccttgatcaggcctgatggcaccaagaaggcata

SEQ ID NO: 157989 - DNA, 235 bp, Glycine max
atcccgccattgaatatagtcatgcttattgttggtacacgaggagatgtgcaaccctttattgcaataggcaaacgcatgcaggactatgggcatcgtgttagattagcaacccattcaaattttaaggagtttgttttgacagctgggttggagttttatccattaggaggtgatccaaaagttcttgctggttatatggttaaaaataagggcttgctgccatcgggacctt

SEQ ID NO: 157990 - DNA, 252 bp, Glycine max
ctacaccaaagtcttcgtcggaggattggcctgggagactcagagcgaaaccatgcgccgctacttcgaccagttcggcgagattctcgaggccgtcgtctcaccgataagaacaccggaagatccaagggctacggtttcggtataggtgactttccgggatcccgaggccgcaaggaagagcgtgtgctgatccatctcctgttattgatggcagaagggccaattgtaatttggcttcacttggtcgac

SEQ ID NO: 157991 - DNA, 252 bp, Glycine max
gaaactctctctctctctctctctctctctctagaaaccctattgcacgttttgcaatcgaactcgacaatggccaacagcaacctccctcgaagaatatcaaggaaacgcagcgtttgctcagtgagccagcacctggtattagtgcctccccctctggagagaatatgcgatatttcaatgtgatgatccttgggcatacccagtcgccttatgaaggaggcgttttcaagttagaactatttttgccag

SEQ ID NO: 157992 - DNA, 248 bp, Glycine max
ggaacctaattgaggctgctgagcaagagtatgagaaagaaaagctgaatgagagaattgctaaattgtctggtggtgtggctgtgatacaggttggcgcacaaactgagacagagctcaaggaaaagaaattgagagttgaagacgctcttaatgctacaaaggcagctgtagaggaaggtattgttgttggtggtggttgcactcttctgagacttgcatcaaaggtggatgcaatcaaggatagc

SEQ ID NO: 157993 - DNA, 252 bp, Glycine max
gtttgttgttgtaactcgttcttcttcttttgttgttctgtgtttgtgtttgttttttctctcacctgaaaatgtcttgctgcggtggtaactgtggttgcggaagctcctgcaagtgcggcaacggctgcggaggctgcaagatgtacccagacttgagctacactgagtcaaccaccaccgagaccttggtcatgggagtggcacctgttaaggctcaatttgagggtgctgaaatgggtgtgcccgctg

SEQ ID NO: 157994 - DNA, 253 bp, Glycine max
cgttttgcgtttctctgcctaaaaggattgaaagatgggtcaagcactaggttgctatcaagttgatcagtcaaatgtggctatcaaggagcattttggaaatttgatgatgtcctagaacctggatgtcattgcctgacttggtgtcttgggtaccagattgctggtagtttgtcactgcgtgtgcagcaacttgatgttcgatgtgagacgaaaaccaaggacaatgtctttgtcactgtggttgcatctg

SEQ ID NO: 157995 - DNA, 246 bp, Glycine max
cagagcttcatcacgaacttgcaagcgttggattgtgctgagactttggcaatgaaaatgaaaagatcgaatattactgcagatgtttatggtctctgtcacataagccttaaagacttttccctccaagttggaaatcaagaggctggttgtctattacctagtttgccttcagatgctacatttgacagtgtttctgggatcagcttcctctgtgatctaaatgataatattccagctccttgg

SEQ ID NO: 157996 - DNA, 250 bp, Glycine max
gctgatgaggatgagtatgaggaggaagaggaggaggaggagtatggccaacatgatatgtgattttgaacttggtaatgtattgcggtggcttgaagatgtataacatgccgcaacttcctgttgccggttgattgtctcttttgaggggatggttctgttccggctagatctagtttccattactgttctataaaactggttctgtttgtttccgtttttatgtaacctgttgtttgtagggaagaca

SEQ ID NO: 157997 - DNA, 238 bp, Glycine max
ctgaattccagaccaacttggtcccataccctagaatccatttcatgctttcctcatatgcaccagttatctctgctgagaaggcctaccatgaacagctctcagtggcagaaattaccaacagtgcttttgagccatcgtccatgatggccaagtgtgatcctcgtcacggaaaagtacatggcgtgttgcctgatgtaccgtggtgatgttgtgcccaaagatgtaaacgctgctg

SEQ ID NO: 157998 - DNA, 239 bp, Glycine max
ctcactcactctgcactcaccactgccacacttcaatcgcactaatggctgtcaccttctcagatctacacaccgaagagggcatcaaatccctcgatcaattcctttctgggaaaacctatatttctggggatcagttgacaaaggatgatattaaagtgtatgcagctgttgtttgaaaagccaggggaaacttttcctaatgctgccaagtggtacgatgctgtctcttctaaatt

SEQ ID NO: 157999 - DNA, 249 bp, Glycine max
ggcggatgtagtgggcctggaccgtcgggtcgaagagtccgatttcgagaaactcacttatctcaaatgtgccctcaaagagaccctccgcctccaccctccgataccgctcctcctccacgagacggcggaggacgccaccgtcggcggctacttcgtccccaggaaggcgcgtgttatgatcaacgcgtgggccattgggagggacaagaattccggggaggaacccgaaacttttaagcccgcccg

SEQ ID NO: 158000 - DNA, 228 bp, Glycine max
attggaggcagggaaaccccagagggccaaaaagctattcaaacattgaaggatgtttatgctcaatgggtccccgaagaaagaatactgaccacaatctttggtcggcagaactgtctaagcttgctgctaatgccttcttagcacaaaggatttcatctgtcaatgccatgtcagcactttgtgaggctactggggcaaacgttcaacaggtgtcctattctgtgg

SEQ ID NO: 158001 - DNA, 251 bp, Glycine max
tggagcgtctctccgttgattatggcaagaaatcaaagcttggtttcacagtctacccctctcctcaggtgtccacctctgttgttgagccataaacagtgtcctctccacccattctctcttggagcacaccgatgttgctgtcctcttggacaatgaagccatttatgacatctgcagacgctctctcgacattgagcgtcccacctacaccaacctcaaccgccttgtttctcaggtgatttcatctt

SEQ ID NO: 158002 - DNA, 247 bp, Glycine max
actcgagccgattcggctcgagtgagaccaagccccactcaaccaacacaccactctctctgctcttcttctacctttcaagtttttaaagtattaagatggcagagacattcctatttacctcagagtcagtgaacgagggacaccctgacaagctctgcgaccaaatctccgatgctgtcctcgacgcttgccttgaacaggacccagacagcaaggttgcctgcgaaacatgcaccaagaccaa

SEQ ID NO: 158003 - DNA, 243 bp, Glycine max
attctctaaaagagatctttttctgctctttgaagaaagaagggtctttgcttgattttggagatgtctctgctctcagatctcatcaaccttaacctctccgataccaccgagaaggtgatcgcagagtacatatggatcggtggatcaggaatggacctgaggagcaaagaaaggactctcccaggaccagttagcgacccttcagagcttcccaagtggaactatgatggttccagcaca

SEQ ID NO: 158004 - DNA, 247 bp, Glycine max
gcagaagaacaagtagttgagaacaaagaaggagaagcaaatggcatcctcaatgatctcttccccagctgttaccactgtcaaccgtgccggtgccggcatggttgctccattcactggcctcaagtccatggctggcttccccaccagaaagaccaacaatgacattacctccattgctagcaacggtggaagagtgcaatgcatgcaggtgtggccaccagttgggcaagaagaagtttgagac

SEQ ID NO: 158005 - DNA, 95 bp, Glycine max
cccagaccaatttaagagctcctttgactttattgatgggcatgttaaaccagtggttggaaggaaaatcaattggttgaaagctggacttatag

SEQ ID NO: 158006 - DNA, 274 bp, Glycine max
attccattggtccaactccacacaccttgcaagagttactggagacaaccttgggttctctcttgtcagcacttatgcagcactgtgatccccctcagaggagattcccattagagaagggtgttcctccaccatggtggccaactgggaatgaagaatggtggcctcaaattggtctacctaaagatcaaagcccaccaccttacaagaaaccacatgacctaaaggaggcatggaaggttggtgttctcactgcggtcatcaagcatatgtc

SEQ ID NO: 158007 - DNA, 271 bp, Glycine max
attcaagagaacatgaaagcaatcgatgtcattccattactgactcctgttgtgatggagaagattgaagctgttgttcaaagcaagccaaagcgccctgaatcataccgatgaattgaagtttttccatggtggacacatatatgcattagatgggaggctccgtcatccccgtgcacttgagtgaaaattcttgttgaaaattattggtgtggttgatgtgatttcttgggacttcttttctttgtcattttttctttctggcactgat

SEQ ID NO: 158008 - DNA, 270 bp, Glycine max
ctgctgaggtggccttgaggcttgtcaggccgggaaagaagaccaaggatgtaagtgatgcaattcaaaaggttgctgctgcctatgactgtaaaattgttgagggtgttcttagccaccaaatgaagcagtttgttattgatgggaataaagttgtgcttagtttgtctaatccagacacaagggttgacgaagcagagtttgaggagaacgaatttatgctattgatatagtaacaagcactggggatggcaagcctaagctgttgga

SEQ ID NO: 158009 - DNA, 271 bp, Glycine max
ccatttttgggataagttccgcaaagctcctgatggttctctcaggaaaaatacagctcagaaacaagttttggaagcaatgtctcacagaatgcatgtagacaacagtgtaaaactgattgggaagcttttatttggcattgaaaagggtccagaagtactcaacgctgttagaccggctggatcggcacttgttgatgactggcactgcctgaaaaccatggtgaggacttttgagacacattgtggatccttgtctcaatacgggatg

SEQ ID NO: 158010 - DNA, 271 bp, Glycine max
ctacgcgttcgtgtcgcggggaacagtgattctcgcggagtacaccgaattcagcggaaacttcaactccatcgccttccagtgccttcagaagctccctgccaccaacaacaagttcacctacaattgcgacgcacacaccttcaattacctcgtcgacaatggctacacatattgtgttgttgcagatgaatcaattggaagacagttacccatggcttttctagagcgtgtcaaagatgaatttgtgtcaaaatatggtggtggaaag

SEQ ID NO: 158011 - DNA, 269 bp, Glycine max
ctcgagcgcgggcgatgaagaggcaatgcaagagttcattgccagaggtggaatgattggaacaaccattggtcccaaagggatggttaagggtgataaggatgagagtgactacaagaaggagctgaaggacaagaagtttgggcaagaggctcagaaactgtggatgaggatgaggagtgaggtcattgctgagcttcaggagaagggctttgatgtggaatgaatgagtgcaatgagtgctcaaaactattggtggtagtaaatat

SEQ ID NO: 158012 - DNA, 266 bp, Glycine max
tgcaactacacttcttgaaaaggccaaggctaaaggggtttctttgttgcttccaactgatgttgtcatagcagacaagtttgctgctgatgctaacagcaagactgtgccggcatcaagcatcccagatgggtggatggggttggatattggtcctgattccatcaagacatttggtgaagcattggatacgactcagaccattatttggaatggaccaatgggtgtttttgagtttgataagtatgccacaggaacagaggcta

SEQ ID NO: 158013 - DNA, 267 bp, Glycine max
ctttgctggtttgtactttgttgctctcttctcctcaatcattgcaactggtattcttgagttgaaatggagtggagtgagcattgaggaatggtggagaaatgagcagttttgggtcattggtggtgtatcagctcacctctttgctgttatacaaggtctgctaaaggttctggctggaattgacaccaatttcactgttacatcaaaggcaacagatgatgaagagtttggagaattgtacacctttaagtggactacactctt

SEQ ID NO: 158014 - DNA, 267 bp, Glycine max
accttccacacttaataggaacccaaaaaaaaaaaaaaaaagtaagcccagctttgttctgctccaatcctcacacaatggcgatggctttcaaaatggcgactactgggatgtgggttacggatgagtgcaagaactcatccatggaaatgaagtggaagaaggtgcccagatacatagtcttcaagatcgctgagaagtcaaggcttgtcaccgttaaaaaggtcggtggccccggcgaaaactatggtaatctcgctgccccct

SEQ ID NO: 158015 - DNA, 265 bp, Glycine max
ctggtttgaatgttcttgttgagacctactttgctgacatccctgctgaggcatacaagaccctcacatctctgaatggcgtcactgcatatggatttgatttggtccgtggaaccaacactcttgatttgatcaagggtggatttcccagcggaaaatacctctttgctggagtggttgatggaaggaacatctgggccaatgaccttgctgcttctctcactaccttgcagggtcttgagggcattgtgggcaaagataagct

SEQ ID NO: 158016 - DNA, 266 bp, Glycine max
tgtttgttgttgtaactcgttcttcttcttttgttgttctgtgtttgtgtttgttttttctctcacctgaaaatgtcttgctgcggtggtaactgtggttgcggaagctcctgcaagtgcggcaacggctgcggaggctgcaagatgtacccagacttgagctacactgagtcaaccaccaccgagaccttggtcatgggagtggcacctgttaaggctcaatttgagggtgctgaaatgggtgtgcccgctgagaacgatggctg

SEQ ID NO: 158017 - DNA, 268 bp, Glycine max
ctcggataaccgtagtaattctagagctaatacgtgcaacaaaccccgacttctggaagggatgcatttattagataaaaggtcaacacaggctctgcctgttgctttgatgattcatgataactcgtcggatcgcacggcctttgtgccggcgacgcatcattcaaatttctgccctatcaactttcgatggtaggatagtggcctaccatggtggtgacgggtgacggagaattagggttcgattccggagagggagcctgagaaa

SEQ ID NO: 158018 - DNA, 270 bp, Glycine max
caccctgcaacaagccagagatcctctctccaagcttgcttgacttcccttccctcactctcagcagcccagtcactcctttgaatgatgacccttttgacaagtcctcctcattaccttcattgggaagcacttcttcagaggaagagagagccatagctgaaaaagggttctacttgcatccctctcccatgtctactccaagagactttgagcctcagctcttgcctttgttccctgtgacttcacctagagtttctgagtcaacta

SEQ ID NO: 158019 - DNA, 266 bp, Glycine max
gtactcttcacctcgtcctccgtctccgtggtggcatgcagatcttcgttaagacactcaccggcaagaccataaccctagaggttgaaagctccgacaccatcgataacgtcaaggccaagatccaggacaaggagggtatccccccggaccagcaacgtctcatcttcgccggaaagcagctcgaggacggccgcaccctcgccgactacaacatccagaaggaatcaacccttcacctcgtcctccgtctccgtggtggcatg

SEQ ID NO: 158020 - DNA, 270 bp, Glycine max
cccaaagctgagaagcccaaggccgagcccgagaaaaagaaggacggtggcggcgagaagcccaaggccgagcccgagaaaaagaaggacggtggcggcgagaaacccaaggccgagcccgagaaaaagaaggatggtggggagaagcccaaaggggatgctccgaaaaaggaagccgagaagcccaagcccgggcccgagaagcccaaggacaagcccgcgccagctcccttacccgtgcagccacatatggctgcacctatggcggtt

SEQ ID NO: 158021 - DNA, 267 bp, Glycine max
ctttctccggcgacgatctcagattccggccactcctctcgccggcgagcccttactcttccctcctccgtcgagccctctccgattcgaatcgttcccagcctcgcaccaccatgaatcccgaatacgattatttgttcaagcttttgctgattggagattctggtgtaggcaagtcatgtcttctcctgaggtttgctgatgattcataccttgacagctatatcagtaccattggagtggactttaaaatccgcactgtggagc

SEQ ID NO: 158022 - DNA, 263 bp, Glycine max
gaacgtgtactacaacgaagcttcctgcgggcggtttgtcccacgcgcagtgctgatggacctggagcccggaaccatggacagcgtgcggactgggccgtacgggcagatattccggcccgacaacttcgtgttcgggcagtccggcgcgggcaacaactgggccaaggggcactacacggagggcgccgagctcatcgactccgtccttgacgtcgtgcgcaaggaggccgagaactgcgactgcctccaggggttccagg

SEQ ID NO: 158023 - DNA, 266 bp, Glycine max
gtcccaaagagttaacaagagattcaagaccggcatggctaatgaagaggaacagaaaaaccacctcttcggcatcaaagatctcggtcacaagactctccttcagagtgatgcactctatcagtatatacttgaaaccagtgtctatccaagagagcacgagtgcttgaaagagatacgcaagatgactgcaaaacacccactgaacatcatggcaacaccagcagacgaaggacaacttctgagcatgcttgttaagctcacga

SEQ ID NO: 158024 - DNA, 265 bp, Glycine max
gtgacaaagtgttcactgctttgtgccaagggaagatcattgatccacttttggaatgccttggggagtggaatggggcacctcttccaatatgttagtttttcttattttctgttttcttgaagagtggtttcttttctgtacacgtgtttgtgttgatattaagcatttggtttgtctatataaggctgtggcaaatcaatccacatacaacaacttcccagttttccttgatgtatgccatgcaaggaacttgtaattcata

SEQ ID NO: 158025 - DNA, 267 bp, Glycine max
acagagtcctgatattgctcaaggtgtgcacggccacctcacaaagaggcctgaggagattggtgctggtgaccaaggtcatatgttcggctatgccactgacgagactcccgagctcatgcccttgagccatgtccttgccacgaagctcggtgccaagctcaccgaggttcggaagaacgggacatgcccttggctgagacctgatggcaagacccaagtcactgttgagtactacaatgacaagggtgccatggttccaatccg

SEQ ID NO: 158026 - DNA, 269 bp, Glycine max
cgtcaacgttagtgctttatttaggtgacaaaactactcacagagaaagacactcggagaccttgcaagacttcatcaatggctgtcaaagtttatattgtgtactactccatgtatgggcatgttgagaaactagcagaagaaataaagaaaggggcttcctctgtggaaggtgttgaggccaaattatggcaggtacctgagacgctgcaggatgaggtgctcggtaagatgagtgcaccacccaagagcgatgtaccagtcattac

SEQ ID NO: 158027 - DNA, 266 bp, Glycine max
actgaaagttcggtgcaaacacaagaattaattgttggaagtaaacctcaactgtgcccagaaccatccaatgctgtaaattactcccttggtactgtatctgggccccaggatacagggataactccagagaaccgaacatgcaatcctaagagatgtagattttttggctgtacgaaaggagctcgaggtgcttcggggctttgtatcgggcatggtggtagacagagatgtcagaaacctggatgctacaaaggtgctgagag

SEQ ID NO: 158028 - DNA, 269 bp, Glycine max
gtccaaaatcaagcaaattgatgatgcactgaaagccatagacaaggatatccagtctctacaggaggaactgacagctgtttctcagaagagggacaaggcttttgagagcatgcagcagctaagaaaacagcgcgaggaggggaacacctatttctaccaaagtcgtacagttctgaacaaagcacgggagctggctgcaaagaaagatattaatgctcttgatgaagtttcacagacagaggttgagaaatttatggcactctgga

SEQ ID NO: 158029 - DNA, 263 bp, Glycine max
aagatgtcaaagaaacattacttaaggagattccctccgctaaagttgatgccatggagttagatctcagttcattggagtctgtcaagaaatttgcatcagagtttaagtcctctggtcttccattgaatatgttgataaacaatgcaggaattatggcatgtcctttcaagctctctaaagacaaaattgaactacagtttgccacaaatcacttaggtcattttctcttgaccaatcttttgttggacactatgaagaaa

SEQ ID NO: 158030 - DNA, 264 bp, Glycine max
ccggaaccctacccggtggccggagtctccctccgattaccgtgagctggtggcgaggtacagcgacgagatgaatgttctggcgcaaaagttgctggctttgattacggagagtcttgggctgcgagcttcgtgcattgaagatgctgttggggagttttatcagaacattacgattagttattaccctccgtgccccgaaccggatcttactctcgggttgcaatcgcattctgatatgggagcaatcacgcttctgattca

SEQ ID NO: 158031 - DNA, 263 bp, Glycine max
ctgatgtggcatcattctttagactattcactgtagttcctgtgtttgtgactgcatatatctgccactacaatgttcacagcatagacaatgaacttgaggacccctcgcatctgtgaggagtagtacaaaccgcccttgttctatgctcttcagtgtacgtaatgataagcttctttgggttcctcctatttggcgaaggaactcttgatgatgtgctggccaatttcgataccaatcttggaattcctttcggttctgtg

SEQ ID NO: 158032 - DNA, 268 bp, Glycine max
gagaatagccaatcattggttaaggaggccatccatgttataagctgtggctatgaagagaagactgaatggggcaaagagattgggtggatttacggctcggtcacagaagatattttgactggattcaagatgcactgcagagggtggaaatcagtatattgcatgccaaagcgaccagcattcaagggatctgccccaataaatctatcagatagattgcaccaagttctgaggtgggctcttggctctgttgaaatttttctta

SEQ ID NO: 158033 - DNA, 265 bp, Glycine max
gaaaaccagacatcacaaaagcaaaggaattgttgggctgggagccaaaggtcaagttgcgtgatggtcttcctcgtatggaagaggatttccgtctgaggcttggagttggcaaaaagaattaacttgtttttcgctcctttggtgacatgttaaagtagaataataagtgagatgggtctggcccgttttcaaaattttcgtcattatagttattgttacgattatgatactgagaaagttggggggcctgaaatttggcatc

SEQ ID NO: 158034 - DNA, 267 bp, Glycine max
gcttcttcagccactccgcacctcgcagcctctgtgccctcaacaaccatggctgaaatcgaaactaccgttccagatcccacccaaatcgacgtcaaactcttcaatcgctggagacttcgaggatgttgaggttaatgatatgtctctggctgattacattggagtgtccccatcaaagcatgctacatatgttcctcacactgctggtaggtactcagtgaagaggttcaggaaagcgcagtgccccattgttgagaggctcac

SEQ ID NO: 158035 - DNA, 268 bp, Glycine max
tgatcacatcaaaggggtcctcatgaacatacttgcagcaggtacagataccactgcagccacatcagtttgggctatgacagccctagtaaaaaaccctagagtaatgaagaaagttcaagaagaagttagaaatgtggggggaacaaaagatttcttagatgaagatgatattcaaaaacttccctatttcaaggcaatgataaaagagacgttgagattgcacctaccaggtccactacttgtaccaagagaatcaactgaagag

SEQ ID NO: 158036 - DNA, 266 bp, Glycine max
gggttctcatttcgcaaccatcggccgcacttactcttgttctcaagggattcgattttctctgcactcacttctagggtttcctccgcgctatcagcaatcatggccgacgaaacaccaaatgagatgaaggaggaggttccagaaattgttccttttgatcctaccaagaagaagaagaagaagaagattacaattgtagatcctgctgatgaccctgtggagaaattggctgagaagacagaaaacctctcagtttctgaggg

SEQ ID NO: 158037 - DNA, 263 bp, Glycine max
caagaatggggttctctacagaggtgtgtcacctgatgttttgatgttggaacagacaggacatatacagctggtggacttcagatttggaaaacagctttcaggtgagagaacattcacaatttgtgggatggcagattcactggctccagagattgttttgggaaaaggccacggtttccctgctgactggtgggcgttgggagttttaatatattttatgttacgtggtgagatgccatttggatcatggagagaaaatg

SEQ ID NO: 158038 - DNA, 263 bp, Glycine max
ccagaatggggttctctgcagaggtgtgtcaccggatgttttgatgtcaggaacagacaggacatatacagctggtggacttcagatatcgaagacagctttcaggtgagagaacattcacaatttgtgggatggcagattcactggctccagagattgttttgggagaacgccacggtttccctgctgactggtgggcgttcggagttttgatatacattatgttacgtcgtgagatgccatttggatcatgtagagaagat

SEQ ID NO: 158039 - DNA, 262 bp, Glycine max
tttttaatagccttacaaagtacaatggtgacaaaatggttcctgttccagcatcacaggttaaacaaattgcaggaagagctggtcggagaggatgcctttaccctgatggactcgccacaaccttgcatttagatgatttggactacttgattgagtgtttgaaacaaccttttgatgatgtaaaaaaggtaggcctttttccatcttatgagcaggttgaattgttttctgggcaacttccagatttgacattcaccca

SEQ ID NO: 158040 - DNA, 211 bp, Glycine max
gaggaaaggaagggagtagggagtgagtaattttgaaaataaagaggaaagcttgaagcagaagagagagatgtcatcatcttcagacctggacaggcaaatagagcagttgaagaggtgtgagcctcttgaggagtctgaagtgaaggtgctctgcctcaaagccatggaaatcctcgtcgaagagagcaacgttcagagggtcaacgct

SEQ ID NO: 158041 - DNA, 265 bp, Glycine max
ccagaatccatcttagacccatgtgtttagtagtaaatgcttgcgcaacagggatcttcgagataatgttgttggggtttgttttgtggcccatgatataactgctcagaagaatgtcatggacaaatttacgcgtattgaaggtgattacaaggcaattgtacagaaccgcaatccattaatccctcctatatttggcacagatgaatttggctggtgttgtgagtggaatccagctatgacgaagttaactggatggaagcga

SEQ ID NO: 158042 - DNA, 265 bp, Glycine max
cgcagagtagagcagcagagaagagagaaaacggcactgcagccgtagaaggaaaaccgaccatggtgcacgtctccttttacaggaactatggtaagacgtttaagaagccccgccgtccgtacgagaaggagcgtctagacgcggagctgaagctggtgggggagtacgggctgcggtgcaagagggagctgtggagggtgcagtacgcgctcagccgcatccgcaacaacgcgcggaatctccttaccctcgacgagaagaa

SEQ ID NO: 158043 - DNA, 264 bp, Glycine max
tgccgttgctgcacttggcatgctgagtaccattgccaccggattggccattgatgcatatggtccaatcagtgacaatgctggaggtattgctgagatggccggtatgagtcacagaattagagagagaactgatgcccttgatgctgccggaaacacaactgccgcaattgggaagggatttgccatcggttctgctgcccttgtatctctggccctctttggtgcctttgtgagccgagctgctattacaactgttgatgt

SEQ ID NO: 158044 - DNA, 264 bp, Glycine max
ttcaaaaattttccggaaaaaatttgaatctatttctatatgcgaatcaatcctactacttctggtcctgaggttactgcgcttgcgaaaaaaaatctgggacgtatcgcccaaataattggtccggtactagatgtagcttttcccccaggtaagatgcctaatatttacaacgctctgatagttaagggtcgagatactgttggtcaacaaattaatgtgccttgtgaagtacagcaattattaggacatagtcgaattaga

SEQ ID NO: 158045 - DNA, 263 bp, Glycine max
cttgtgttttgctttcttcctcaaaaccaaacatgtcgaacacatgcggcaactgcgactgcgctgacaagactagctgcaccaagggaaacagctatggtgttattgtagagactgagaagagttacatcgagactgttgtcatggatgttccagcagctgagcatgatgggaagtgcaagtgtggcactaactgcacttgcacggactgcacctgtggccattaaggaatatgtatgaaaatgtaattgccatgtgtttgg

SEQ ID NO: 158046 - DNA, 260 bp, Glycine max
cgaacagcaaaagatccatgatggtgaacctgttgtcgaggatgatgatgatgaggaagaggatgatgatgatgatgatgatgaggatgatgaccatgccgaaggactagaaggtgatgcatctggtaggtcgaagcagaccagaagtgaaaagaagagtcgcaaggcaatgcttaaacttggaatgaaacctgtcacaggtgtcagccgagtgacagtcaagaagagcaagaatatcctgttcgttatctcaaaaccag

SEQ ID NO: 158047 - DNA, 264 bp, Glycine max
aagacacactcgttcatatatctctctgctcttctcttctcttctacctctcaagtttttgaagtataaagatggcagagacattcctattcacctcggagtcagtgaacgagggacaccctgataagctctgcgaccaaatctccgatgctgtcctcgacgcttgcctcgaacaggacccagacagcaaggttgcctgcgaaacatgcaccaagaccaacttggtcatggtcttcggagagatcaccaccaaggccaacgttg

SEQ ID NO: 158048 - DNA, 266 bp, Glycine max
tggagctcttgaaaatgtcaaggatacattgaaggaattggttatgcttcctttacaaaggccagagctattttgtaaagggcaattaaccaagccgtgcaagggtatcctattatttggtccccctggaacaggtaagacaatgcttgcaaaggcagttgctaccgaagctggtgcacatttcatcaacatttccatgtcaagtatcacatctaagtggtttggtgagggtgaaaaatacgtgaaagctgttttttccctggcaa

SEQ ID NO: 158049 - DNA, 262 bp, Glycine max
atttactgtgtctagcgttatgctattagcggcctataatgtacatcggaagttgcttttgtcttgctcatagatttgagtacagaagatcgctggttagtagttagttagtcgtgcgtgtattagcggtatttatgtggttgatattttgctatgattattactgaattcatcaaataacagtgacttctcaattgtgtcaactcaaataactcagtccttcccattaggtgggattggttaaatgcgcagatcgacaatt

SEQ ID NO: 158050 - DNA, 263 bp, Glycine max
ctgatttgtctggcagggaaacccttgtccgaatcactggtggtatgaaagttaaagctgacagagatgaatcatctccttatgctgctatgcttgcagctcaggatgttgctgccagatgcaaggaactgggcataactgctcttcatatcaagctccgtgctactggtggtaactagaccaaaacacctggtcctggtgctcaatcagctcttcgagcccttgctcgttcaggcatgaaaattggtcgtatagaggatgtt

SEQ ID NO: 158051 - DNA, 264 bp, Glycine max
ccaagctgaagttcaaaccagcttacaatccatatactgaacctagcatagagatttttagttatcatgaaggctttaaaaaatgggtagagataggaaactctggcatgttcagacctgaaatgttgcagacgatgggacttcctgaagatgtccaagttatagcttggggtctttcccttgaaaggccaacgatgatactatacgggatagataacatcagagatctctttggacacaaggtggatcttgggcttataaaga

SEQ ID NO: 158052 - DNA, 258 bp, Glycine max
atcacaatcgccacttggctggctataacggaagcgtattgcactgggatctgcaagggggcttgcgtatttgcatgatcattgtgacgctaagattattcaccgtgatgtcaaagcagcaaatatattgttggacgaggaatttgcagcagttgttggagattttggtttagctaaacttatggattataaaggtactcatgtcactactactgtacgtggaacaatttgacatatcgcaccagagtacctctcaac

SEQ ID NO: 158053 - DNA, 262 bp, Glycine max
gcaatgtatggtttggagctggtgttatcctcaagggaaaaatcagtatcgtggccaatcctggtgttaagctggaagttcccgatggtgctgtcatttcggataaggaaattaatggcccagaggacctcctgtgaggaagcccgctgagtttagaagtatcagactgtatactatctttatggtctcatgttttttccaattattactactcccaagtttgatgggcaaagaaaataagtccctttttgtttgtcttctg

SEQ ID NO: 158054 - DNA, 260 bp, Glycine max
gattctgactgggcttcagaccctgatgataggcattctacttctggtgcagcactgtatgttggtccaaacttggtatcttggtggtccagaaagctgaaagtggtctctcgatccagtacagaggcagaatacagaagtttggctgctgtcacagctgatattctatggattcagactcttcaggaacttgcagttcctcatatcacaccgcttgtgctctgtgataattccagtgctgttcaattagcacataatct

SEQ ID NO: 158055 - DNA, 260 bp, Glycine max
atctattcttacaagttacatccattgagaaacatgaaggtctcccccttagcattttcaatcctttttttgtccttcaccatagaactcttcattggcattgcttcagcagcacaagaaccagtgcttgacacctcaggccagaagctgagaacaggtgtcaagtactacattctaccagtcttcagaggcagaggtggaggcctaacagtttcaagcagtggcaacaacacatgccccctctttgtggtgcaagagaa

SEQ ID NO: 158056 - DNA, 259 bp, Glycine max
aaccctcttgccgcacttcgtgtggggcccactcccgcacttcctccagacgtggcttcgcaattacctcggcggcgtcctcctctacctcctctccggcctcctgtggtgcttctacatttattattggaagcgcaacgtttatgttcccaaagatgctattccctctcgaagagccatgctcttgcaaatatctgttgctatgaaagccatgccttggtacactttgcttccaactgtttcggagtacctggtagaa

SEQ ID NO: 158057 - DNA, 261 bp, Glycine max
cggctcgaggaagagcatcactgaactaacaaagcaaccctatgtcgaaggtggtttgtgtcaccggagccagcggcgccatcggatcatgggtggtcctactcctccaccagcgtggttacaccgtccatgccaccgtccaagatatcaaggatgaaaatgagacgaaacatttggaggaaatggaaggagcaaagagtcatctccatttttttgaaatggatcttcttgacatcgactccattgccgctgccataaagg

SEQ ID NO: 158058 - DNA, 260 bp, Glycine max
gttacaacttacggctaaattctcaaagatttaaactttgtctcagagtttccaaattcacccaaccccagagagaaaatgtctctaatcccaaatttcttcggtggcagaaggagcaacgttttcgatcctttttccctcgacgtctgggaccccttcaaggattttcctttcccaaacactctttcttcagcttcctttcctgaattttctcgggaaaattctgcattcgtgagcactcgtgtggattggaaggagac

SEQ ID NO: 158059 - DNA, 263 bp, Glycine max
ctgaaaagggtgtggtgattttcacaaagagctcttgttgcctctgctatgcagtcaacattctgtttcaagaacttgagtgtgaatcctgtggttcatgagattgatcatgaccctgaaggcagagaaatggagaaagctctttgaggcaaggctgcactgctccagttccagctgtattcataggagggaagctaatgggatccaccaatgaaatcatgtccctccacctaagtggttcactcactcagatgctgaaacct

SEQ ID NO: 158060 - DNA, 258 bp, Glycine max
gaatacaccaaattctaccactctcttgccaaggatttcagtgatgagaaacctttagcatggagtcatttcactgctgagggtgatgttgagttcaaggcagtcctgtttgtaccacctaaggcacctcaagatttattgagagctattataacgcaaacaaatcgaacctgaagttgtatgttagacgtgtgttcatttcagatgaatttaatgaactgttgcccaagtacctaaactttttgctgggtcttgttg

SEQ ID NO: 158061 - DNA, 257 bp, Glycine max
caaaatcaaatccaaacaatgatataaacaatgggggaagagtcaggtctgttcttgatgttggctgtggggttgctagctttggaggatatcttatttcctctaatgtgatagcaatgtcattggcaccaaatgatgtcatcaaaatcaaatccagtttgccttagagaggggaattccagcatatcttggtgtcttggggacccaaagactcccttatccaagtagatcattcgaacttgctcattgctctcgct

SEQ ID NO: 158062 - DNA, 257 bp, Glycine max
tttgaaggaggatctgcctagtcggcttcattatgccgcgagtgatcggattgcgccgataattgggttgattgaggaaggtttcaaggttgagcagaagagaaccaagcgccaagagtgtggcggttcgcacggttagacaatgcggttttctccatgaggactatttttattggacatggtcctcgatttgctagagggaggaagataccgtcgtttgagaatgttgagatttataatttgattacttctattct

SEQ ID NO: 158063 - DNA, 257 bp, Glycine max
cgctctcgaaggggatcgggattgggaagtacatggtctccgacgtgttttctgtcggagggtacaattgggcgatttatttctaccccgatgggaagagcgtggaggacaatgcaacctacgtgtcgctcttcatcggctggccagcgaaggcaccgatgttagggcacttttcgagttgacccttttggatcagagtgggaaggagaggcacaaggtgcatagccatttcgagaggactcttgaaagcgggcctt

SEQ ID NO: 158064 - DNA, 260 bp, Glycine max
cgcaaattctcctcctacaccaacaataatggcaccttctccacaagaaatcatcttccgatccccactccccgatattcccatccccacacatctcccattgtactcttactgcttccaaaacttgtcaaagttccatgacgtccatgcctcatcgacggcgacaccggcgagaccctcacctacgccgacgtcgacctcgctgctcgccgcatcgcctccggcctccacaaaatcggcatccgccagggtgacgtcat

SEQ ID NO: 158065 - DNA, 261 bp, Glycine max
cctaacgcgtgcatagcagagtcagagacagagacgcagccatggggcggagacctgcgaggtgttataggcaaattaagaacaagccataccccaagtcacgtttctgccgtggtgttcctgatcccaagatcaggatttagatgttggtatgaagaagaagggtgttgatgagtttcctttctgtgtccatctggttagttgggagaaggaaaatgtttcaagtgaggccctggaagctgctcgcattgcttgcaacaa

SEQ ID NO: 158066 - DNA, 254 bp, Glycine max
tatctatgtttgcaagattctctgattcctgagaaagtttcagggaaaattgttatatgtgagagaggtgggaatccgagagtggaaaagggtttggtggttaagcttgctggaggtgctggaatgatattggcgaaagtgaagcctacggagaagagttagttgctgactctcatcttcttcctgctgcgtctttgggacaaaaatcaagcgagattttgaagaactatgtttcatcttcacctaatccaaca

SEQ ID NO: 158067 - DNA, 255 bp, Glycine max
gtctcttctcttctcttcgctcctccacttgtttgcccttcatggcggcatctcaggcaagccttctccttcaaaagcagctcaaagatctttgcaaaaaccccgtcgacggcttctctgccggtttggtcgatgaaccaacattttcgaatggagtgtcaccataattggaccgcccgatactctttacgagggggatttttcaatgctattatgagtttcccatccaattacccaaatagtccaccttcagtt

SEQ ID NO: 158068 - DNA, 255 bp, Glycine max
aagacacttgttttctacagaggcaagcctcctcatggatccagaactgattggatcatgcatgagtatcgcctcaacatccttaacgcctctcagagccatgttcccatggaaaattgggttctatgtcgcatattttgaagaagagaagcggtgctaaaaatggggaggagagcaacaaggtgaggaactctaaggtggttttctatgacttcctagcgcagaacaagactgattcctcatcctcggccgcca

SEQ ID NO: 158069 - DNA, 256 bp, Glycine max
tgaattccagaccaaccttgtgccataccccaggattcacttcatgctttcatcttatgctcccgtgatttcagctgagaaggctcaccatgagcagttatcagttggtgaaatcacaaacagcgcattcgagccatatctatgatggccaagtgtgatcctcgccatggaaaatacatggcttgctgtctcatgtaccggggtgatgttgtgcctaaagatgttaatgcagctgtgggaattatcaagaccaagc

SEQ ID NO: 158070 - DNA, 255 bp, Glycine max
tttctctcttctctctccacccaaaccctaactcccgaccctgttcccctctcgtatccgtcatgaaaggaggaaagtccaagaccgaatctaagagagccgatcccaaacttgctgtgaataagaagggagccgcaccaaggctaggaaacccgccggcaaggggaaggcagcgaaagaccctaacaagccaaagaggcctccaagtgctttcttcgttttcatggaggagttcaggaaggtattcaacaaaga

SEQ ID NO: 158071 - DNA, 255 bp, Glycine max
atgggttcaacaggtgagactcagattactccaacccatgtatctgatgaagaggcaaaccttttcgccatgcaactagccagtgcctcagtactccctatggttctcaaatcagctcttgagcttgatctgttggaatcatagccaaggctggccctggtgttcacctttccccctccgacattgcttctcggctcccaacacacaaccctgatgcacccgttatgttggaccgtatattgcgcctcttggctt

SEQ ID NO: 158072 - DNA, 255 bp, Glycine max
gaaattattttggctgatggcactcttgtgagagccaccaaggacaatgagtactctgatctatactatgccattccgtggtctcagggaacactcggccttcttgttgctgctgagatcaggcttatacccgttaagagtacatgaagctaacctataaacctgttgttggcaccctgcaagatcttgctcaggcatattgtgattcttttgctcccagagatggagaccaggataatgaggagaaggttccag

SEQ ID NO: 158073 - DNA, 256 bp, Glycine max
agccgcctcggctagggttcggaaacgaagaagggttctgttttcttttcgcgatgagggccaagtggaagaagaagcgtatgaggaggctgaagaggaagcgccgaaagatgagacagagatccaagtagtgcgttaacctagtttgtttccgttgcttttacaattgcttatgttgtcaaataggacacccagttgttagtggcactggtctctcctttttgatgttttgatacattttgttggattttatttc

SEQ ID NO: 158074 - DNA, 260 bp, Glycine max
gtagagcaaatcccgatggtaacgccgctttggtgaactccttctgcgaaatcacttcctcttccaaggaagaagctcttttctttttggagagccacaatttcgacctagacgctgccgtttcgactttcctcgacaacccaacaaccccctcatccctctcaacgacgaccttgccattcccaaccccaacgccgtttcccctccctcagattctcactctccggacttcaacccttctcgctcgccgtctccgtctc

SEQ ID NO: 158075 - DNA, 252 bp, Glycine max
caacagcacaaagcgggttactgtctgttcaagctaccatctctctctctctttcttagtgcctccttgccagaagttaaaatggcccaagaaactttcctattcacatctgaatcagtgaacgaggggcacccgacaagctctgtgaccagatctccgatgctgtgctcgatgcatgcttggagcaggaccctgacagcaaggttgcctgtgaaacctgcaccaagaccaacatggtgatggttttcggag

SEQ ID NO: 158076 - DNA, 252 bp, Glycine max
gcagaaagcaagctcatcctagagttttaaaaatggcagcagcctcctccatggctctctcttccccatccttggctggcaaggccgtgaagctgggcccatcagcccccgaagtcgggagggtcagcatgaggagaccgtcaccaagcaggcctcctccggaagcccatggtacggcccagaccgcgtcaagtacttgggcccattctctggcgagcccccgtcctacctcactggcgagttcccaggtga

SEQ ID NO: 158077 - DNA, 258 bp, Glycine max
gctcgcgatctagaactagtgttccaataaacgatccaatactcgtgatatctggtcatatagtccacccaagttgacgacccaggctcataggtggatctgcatcttggtgccgctggccctgcgctactgggagatgtttcttggtacctgtcacattggtctccaaaggacatgatgtctactcaggtgaattgaagatcaatcttgtggatctgaaggggggtggcttgttcagcccaagagactctgcgccat

SEQ ID NO: 158078 - DNA, 253 bp, Glycine max
gcagaaagcaagctcatcctagagttttaaaaatggcagcagcctcctccatggctctctcttccccatccttggctggcaaggccgtgaagctgggcccatcagcccccgaagtcgggagggtcagcatgaggagaccgtcaccaagcaggcctcctccggaagcccatggtacggcccagaccgcgtcaagtacttgggcccattctctggcgagcccccgtcctacctcactggcgagttcccaggtgac

SEQ ID NO: 158079 - DNA, 253 bp, Glycine max
gtgatttatgaaataggtttttggtgctgcatggaaatccgttttcacagctgatgagaaagagcgtgagaagaatgttgaggaagcaattgaggctctgcagtttcttgagaatgagataaaggacaagaagtctttggaggagaggagattgggttggtagatattgctgctgtctacatagcattttgggtccctatggttcaagaaattgcagggttggagttattcacaagtgagaaatttcctaagc

SEQ ID NO: 158080 - DNA, 254 bp, Glycine max
gcggaatcagctagaattttctaataatggccaaagacgttgagcaggttacagagcaaggtgaatactccgcgaaggattaccatgacccacctccggcgccgttgatcgacccagatgagctcactaagtggtcttgtacagagccgccatagctgagttcatagcaacactccttttcctttacatcaccgtgttgaccattattggctacaagagacagagtgacaccaaaatccccggtaacaccgagt

SEQ ID NO: 158081 - DNA, 252 bp, Glycine max
ctcgagcgaatcggctcgagcatgccaaatggaagtttaggtgaggttcttcatagcaagaaagggggccactgccattggtacacaaggtataagattgctgtggaggcttcaaagggcctttgctatctacacatgactgttcaccactcattgtccatagagatgttaaatccaacaacatccttcttgattccaattttgaagcacatgttgctgattttgggctcgctaaattcctgcaagattctg

SEQ ID NO: 158082 - DNA, 253 bp, Glycine max
acaagattggggagacccttcatgtgggagggcacaagaaggaggaggagcataagggtgagcaccatgctggagaatacaaaggggagcaccatggtgaacacagtagtgagtacaaaggagagcatcatggtgacacaaagctggagagtaccatggtgagcacaagccagagcacaaagaggggttcctagacaaagtcaaggacaagatccatggtgagggcggcgcgccgagggcgagaagaagaaga

SEQ ID NO: 158083 - DNA, 252 bp, Glycine max
caaggaggtgattttacacatggcaatggtatgggtggagaatcaatttatggagagaagtttgctgatgagaacttcaagttaaagcatactggaccaggacttctatcaatggcaaatgctggtcctgacacaatggctcacaatttttcattacaaccgtgacaactagctggttggacggaaggcatgttgtttttggtagagttctttctggattggatgttgtttacaatattgaagctgaaggaa

SEQ ID NO: 158084 - DNA, 250 bp, Glycine max
caaagctcctgagggttctctcaggaaaaatgcagctcagaaacaagttttggaagcaatgtctcatagaatgcatgtagacaacagtgtaaaacttattgggaagcttttatttggtattgaaaagggtccgaagtactcaacgctgttagaccggcaggatcggcacttgttgatgattggcactgccttaaaaccatggtgaggacttttgagacacattgtggatccttgtctcagtatggcatga

SEQ ID NO: 158085 - DNA, 251 bp, Glycine max
aatttttgaaccatccaattgtcaaagaaagtctgccccctagagatcctgttttctcctttttcaagggtctctatgaaagcctttttggttcaaaatagatttgatgatgtggtgtgagacttagtatttcaagaattatgtgtttgttaaaggcttctatgaaagcctcactgcttcaaaatagattcatgtatgtgagactcagaatctctggggaaaattgtgtgtggtgtggactacttgttttg

SEQ ID NO: 158086 - DNA, 251 bp, Glycine max
ggaagttggaagctccgacttcccaaaccctcgttctgcaatgaactctcccctcgccaaatcgctcttcgcaatcgacggcgttactcgcgttttctttggatctgatttcgttaccgttacgaaatcggagaggctgcgtgggaattcctcaagcctgaagtcttcgccgccattatggatttctactcctccgctcagcctctctttttagattctcaagccgccgcggccatggatacagctattca

SEQ ID NO: 158087 - DNA, 250 bp, Glycine max
gagcgagtcaacgtctattacaatgaagcgagttgcggaaggttcgtgccgagggcggtgctcatggatctagagccagggaccatggacagcgtcagatctggtccctacggtcagattttccgacctgatacttcgtcttcggccagtccggcgccggaaacaactgggccaaaggtcactacaccgaaggcgctgagttgattgactctgttctcgatgttgtcaggaaggaggcagaaaactgtga

SEQ ID NO: 158088 - DNA, 250 bp, Glycine max
tgaagatgcggttggtgaagatgtggtgggagaactaaccaagtccatggaaaaaattggcctggatatgcgcgttgctgctctagtcagtctcactctcctctcttttggatttctttattttttatagccggatttgagcatgatggtttccagtttgtgtctgacagaaatttggagttataaggttaatgataccattggaacattagctggaggcagattctacaatcaggatgtcattgctgct

SEQ ID NO: 158089 - DNA, 248 bp, Glycine max
aagaccggtggacccttcggaaccatcaagcaccctgccgaactggctcacagcgctaacaacggtcttgacatcgctgttaggcttttggagccactcaaggcggagttccctattttgagctacgccgattctaccagttggctggcgttgttgccgttgaggtcacgggtggacctgaagttccattccaccctggaagagaggacaagcctgagccaccaccagagggtcgcttgcccgatgcc

SEQ ID NO: 158090 - DNA, 251 bp, Glycine max
tggccagcaaaattgctccaagtgttatttttgttgatgaggttgatagtatgttaggaagacgtgaaaatcctggtgaacatgaggctatgcgtaaaatgaagaatgaattcatggttaattgggatggtttagaacaaaagataaagagcgtatacttgttcttgctgctacaaatagaccttttgatcttgatgaggctgttattaggagacttccacgaagattgatggttaatttgccagatgctc

SEQ ID NO: 158091 - DNA, 254 bp, Glycine max
aaaagttcctcctcgcacttcagtatctcttccccattttcgactgggccccaaactacaatcttacccttctccgctctgacctcatctctggcctcaccattgccagcctcgccattcctcagggaatcagtatgccaagcttgccaacttgccacctattcttggattatattcgagttttgttcccccattgatatactcgctgcttggaagttctagacatcttggtgttggacctgtttccattgcgt

SEQ ID NO: 158092 - DNA, 253 bp, Glycine max
tgcataagaacatgtagttgagaactaagaaggagaagcaaatggcttcctcaatgatctcttccccagctgttaccactgtcaaccgtgccggtgccggcatggttgctccattcactggcctcaagtccatgctggcttccccaccagaaagaccaacaatgacattacctccattgctagcaacggtggaagagtgcaatgcatgcaggtgtggccaccagttggcaagaagaagtttgagactctttcc

SEQ ID NO: 158093 - DNA, 247 bp, Glycine max
gcagagctgaagcatggcagtgttgtgattgctgcaatcacaagttgtacaaatacatcaaacccaagtgttatgcttggggctggtcttgtagcaaagaaggcacatgatctaggtttgcaggttaagcatgggtgaaaacgagtcttgctcctggctctggagttgttacaaaatatctacttaaaagtggcctgcaaaagtatctaaatgaacagggtttcaacattgttggatttggctgtac

SEQ ID NO: 158094 - DNA, 250 bp, Glycine max
gaagtttcaaggaaattggcagagcttggatatcaaaggagtgcaaagaagtgcaaggaaaaatttgagaacgtgtacaagtacaacaagagaaccaaagagaacaaaagtggcaaatcacatggaaaagctataaattctttgatcaattacaagccctcgagaaccaattcacagtctcttacccgccaaaaccacaacctacttctactttgactacaacaaacacattgacaagtgatcatggtaa

SEQ ID NO: 158095 - DNA, 249 bp, Glycine max
atgctaacagcactgaatttgagccccataccaaaagcccatacatcatatttatgcctgagggatcaaaaacacacatgggaggcaccatgcgccttggatctaggaggacatatttccagaccaaggaatcaaatctgcaaaattatatggctgcaaaagcttcattgatgagagacatcggcatagatatgaggtgaatccggatttagtagcctgccttgaaaatgctggtctttcttttactgg

SEQ ID NO: 158096 - DNA, 251 bp, Glycine max
ggaagaggaaccctagctagggtttggaagaagctgatccgagaagatggtgcagcgtctcacctaccgcaaacgccacagctatgctaccaaatccaaccagcacagagtcgtcaagactcccggtggcaacttgtttatcagaccacgaagaagagggccagcggacccaagtgccctgtcactggaaagaggattcaagggattccacatttaaggccagcagagtataatagatcaaggttacacag

SEQ ID NO: 158097 - DNA, 250 bp, Glycine max
gccttgggctgcgtcttcccggagttgctgtcccgcaacggggtgaagttcggagaagccgtgtggttcaaggccgggtcccagatcttcagcgagggtgggctcgactacttgggcaacccaagcctgatcacgcccagagcatcctcgccatctgggccacacaagttatcctaatgggtgccgttgaaggttaccgtattgctggtggccccctcggtgaggtcactgacccaatctacccaggtgg

SEQ ID NO: 158098 - DNA, 215 bp, Glycine max
atagaaaatcccgatggtaacgccgctttggtgaactccttctgcgaaatcacttcctcttccaaggaagaagctcttttctttttggagagccacaatttcgacctagacgctgccgtttcgacttttctcgacaacccagcaatccccttatatgtctccatgacgaccttggcattcccaatcccaacgccgttgccactcccgcagattct

SEQ ID NO: 158099 - DNA, 249 bp, Glycine max
gcatccatctctgatctcactcaccattcaccaacctgcttctctgttctcttctttcccttcccaagaagaagaagaagaagatgccttcttcagaatcatcaacaggcttctccgaaaccatttgtgtaccggcgctggtggcttcatcgcctcttggatggtcaaactcctcttggagaaaggctacactgtccgaggaaccctcagaaacccagatgatcccaagaacgggcacttaaaagagtt

SEQ ID NO: 158100 - DNA, 246 bp, Glycine max
gcaagacaaaggtaggatggtcttgattatcttttttactctaattcgtgctttagttttggtaagtgtgttgttttcttgttctgtttcatcttcataaatttatttgtagcattatctcgtatatgaggtctatcatccaaatattgacttggaaggaaatgtttgtctcaacatcttacgagaagattggaaacctgtccttaatataaacactgtcatctatggcttgtatcatctcttcac

SEQ ID NO: 158101 - DNA, 247 bp, Glycine max
aaaatgtccatcctaagcactgcagggagtggaaaattcagcagtgaccggacaattgctcaatatgccaaggaaatttggaacatagaagagtgccgcgtgccataatttctgctggatgtgtgtctatgcactcaagttactgtatatagcaccaacagaatgataagtaaaaagaagtgaataataaaaattaaaaataatttctgaaaagagaaagtgaaggagattttagctttctataata

SEQ ID NO: 158102 - DNA, 249 bp, Glycine max
aataacatagcatagagtgagaagtgagaagagaaaaatggcaatctccatacccagtagacaacttttcatagatggagagtggaaagtccctcttctcaacaatcggtttccgatcatcaaccccgctatgaagacatcatagggcatattccagccgctactaaggaagatgttgaccttgcggtggatgctgctaaaagagccttttcccataacaaaggcaaagattggtcttcagctcctggc

SEQ ID NO: 158103 - DNA, 247 bp, Glycine max
aattgctaaggcccggaaatcaggacaaagggtaattggagagcccgttgcctctgggttagcccttgatgaatcttggctttggcatcctgactttgagactgctgcaaagtatgtcatgagtccccctttaggaaacgaggacatgataaggcccttcaagctgccctttcaacaggagttttgcagctggtaggaactgatcattgtgcctttaattccacccagaaagctcttggaattgatg

SEQ ID NO: 158104 - DNA, 233 bp, Glycine max
tattcacttcttgccaccgctctcgctcttcctgaagatggaaagatcttggccatggatattaacagggagaattatgaattgggtttgccagtaattaagaaagctggtgttgaccacaaaattgaatcagagaaggtcctgctctcccagttcttgatgaaatggttaaagatgagaagaaccatgggagctcatgacttcatctttgtggacgctagacaagggacaac

SEQ ID NO: 158105 - DNA, 240 bp, Glycine max
ctcgagcgattcggctcggaaaccacggatatacattggatgcatgaaatctgggcctgtcctatcccaacaaggggtaaggtaccatgaacctgagtactggaagtttggagaggctggaaacagatacttccgtcatgccacaggacagttgtatgccatttcaaacgatttggctacatacatatcaattaaccagaatgttcttcacaagtatgccaacgaggatgtgtcactagg

SEQ ID NO: 158106 - DNA, 243 bp, Glycine max
acctactctccgctcccaagagcacgcaccaccactattgcacttcttcctcgttctccctctttttcttcttcttcgctaaacccttttttctatctcactaacacaacaatgggagacgagaagaagggcaagcctgctgcttccggcgtgtggtccaccatcaagcctttcgtcaatggtggagcctccggcatgctcgccacctgcgtcattcaacccatcgatatgatcaaggtgagg

SEQ ID NO: 158107 - DNA, 240 bp, Glycine max
acgtgatggaggctaaggttgttgtgagctcttgtgggcacgatggaccttttggcgccaccggggttaagaggttgaagagtattggcatgattgatagcgttcctggaatgaaggctttggatatgaatgctgcagaggatgctattgtgaggctcacgagggagattgtgcccggcatgattgtcaccggcatggaggtggcagaaattgatggctccccaaggatgggtccgacgt

SEQ ID NO: 158108 - DNA, 244 bp, Glycine max
atatatatagaatatagatagatatattgtttaggttatcaagtattaatctgaacaatatatctatatatagaatatagatagatatatatataatagaacgtaaaaaaaaaaagaataataaatagaaaaaggagcacgttgattatatagaaagtaaagggcaacaatcatttttgtttaccatgggtaaggacaccatcgctgacataataacctatataagaaatgctgacatgaataa

SEQ ID NO: 158109 - DNA, 238 bp, Glycine max
gagagtttgttaaagaactgtgaagaagagggtaactgcaaacaaagcaagcaaaacaaaagacgcagtgatggagaggatgaagagggtgcttctgctgcttctggccttcactgttcttctcatgttgccagaagcttctgctacaaagtttactgttggaaacaaccagttttggaaccccaatattaactacactgagtgggctaaaggcaaacatttctaccttggtgactgg

SEQ ID NO: 158110 - DNA, 240 bp, Glycine max
agcagctgtctctattttcagactcacgcgtgaccagctcaacacactgaaagccaaatccaaagaagatggcaacacaatcagctatagttcttatgagatgttggcgggtcacgtgtggcgaagtgtaagcaaagcaagagcacttcctgatgatcaagaaaccaaattgtacattgcaactgatggaaggtcaaggttgcagcctcctaccccacccggttactttggcaatgtgat

SEQ ID NO: 158111 - DNA, 239 bp, Glycine max
gcatgagcctgttggcagtctcctagaagctgttaaggtaatcaagcctacagttttgattggatcatcaggagtgggaaaaacatttacaaaggaagtaattgaggctgtgacttctatcaatgaaaaacctcttgttttggccctctccaatccaacttcacagtctgagtgtacagctgaagaggcttacgaatggagtgagggtcgtgcgattttcgctagtggaagtccatttg

SEQ ID NO: 158112 - DNA, 237 bp, Glycine max
gcattctaaaggattcctacacagggatataaaacctgacaactttctcatgggacttggtcggaaggcaaaccaggtttatataattgattttgggcttgcaaaacgatatagggactcctcaactaatcgccacatcccttacagggagaacaaaaacttaacagggactgcacgctatgctagttgcaatactcatcttgggattgagcaaagtcgacgggatgatttggagtc

SEQ ID NO: 158113 - DNA, 235 bp, Glycine max
caacagcacaaagcgggttactgtctgttcaagctaccatctctctctctctttcttagtgcctccttgccagaagttaaaatggcccaagaaactttcctattcacatctgaatcagtgaacgaggggcaccctgacaagctctgtgaccagatctccgatgctgtgctcgatgcatgcttggagcaggaccctgacagcaaggttgcctgtgaaacctgcaccaagaccaaca

SEQ ID NO: 158114 - DNA, 237 bp, Glycine max
caactatggaaaagctggggaagccttgaaggtggatctgttgaaccatccagaatacatagaacaaaatgccaccttagccttccaggctgcactctggcagtggatgaacccaccagagaagcacctaccatcaccccacgatgtctttgttggcaactggaaacccacaaaaaatgacacattgtccaaaagggtgcctggatttggtgccacaataaacttgctctatgggga

SEQ ID NO: 158115 - DNA, 229 bp, Glycine max
atctgtgagaattctggaggccaagcacgacctttactctgcagtaatcggagagaaggtgtgcatgaagattggaaatggttcatggtgcccaactgggagggaatggacactatcaacttctggtcacaattatgctgtgtggcacaagtagtgttctgttggcatgtcatgacccgtctccactggaatcacagagaagagaaaggaattacgtgcttatatgctt

SEQ ID NO: 158116 - DNA, 240 bp, Glycine max
gcatgagcctgttggcagtctcctagaagctgttaaggtaatcaagcctacagttttgattggatcatcaggagtgggaaaaacatttacaaaggaagtaattgaggctgtgacttctatcaatgaaaaacctcttgttttggccctctccaatccaacttcacagtctgagtgtacagctgaagaggcttacgaatggagtgagggtcgtgcgattttcgctagtggaagtccattgat

SEQ ID NO: 158117 - DNA, 244 bp, Glycine max
cagcgacacgtatcttcatcaataatcgcagaagcagtttccggtgcatctcatcgtcttccaaaatgaacgacgcagatgtctcgaagcaaatccagcagatggtgcgtttcatccgccaggaagctgaggagaaagccaacgagatctctgtatctgccgaagaggaattcaatatcgagaagctgcagttggttgaagccgaaaagaagaagatcaggcaagaatacgaacgcaaagagcg

SEQ ID NO: 158118 - DNA, 238 bp, Glycine max
aaacaaccttctttctttttctgtgagcctttctttcaggttcttaacttgatcagtgtgcagtgtccaaatcataagggtagttgcaaattgcaatggctaagcatgatgttgagggtggttccttctctgcaaaggactaccatgatcctcctccagcaccgttgattgatgctgaggaactcacacagtggtccttctacagggctttgattgctgagttcattgccacaatgct

SEQ ID NO: 158119 - DNA, 235 bp, Glycine max
ggcagcagtgcgaagagaaagaaagagaagaagcgcttatcgaactcggacggaagcactgagttaactcagagcgagtgaaagtgttgctgcgtgatgtctggtggtatcgcccgtggacgcctcaccgaggagcgcaagtcgtggcggaagaaccatccccatggttttgttgcgaagcggagacgctgcccgatggaaccgtgaacttgatggtgtggcattgcactattcc

SEQ ID NO: 158120 - DNA, 237 bp, Glycine max
gcgtgaggaagaagaagaagtaccaggcccacgaccccgataaccaattcaaagtcggcgacatcgtccagctccagaagaccaggcccatcagcaagaccaaggcctttctcgcactccccgttcccaaaaggccctccagcaggcccgaggcccagcccgaggaactttccattcccttcgagtcccagccctagaagactccagagtcacccctcaatttcactctctcacgcc

SEQ ID NO: 158121 - DNA, 235 bp, Glycine max
ggtatttgtacgtcaaaggctatggagttgaccagaagaactacaccaaggccaaagagtattttgagaaggctgctgataatgacgaggttggcggccactataaccttggcgtcatgtatctcaaggggattggagtcaatagggatgttaagctcgcctgtaagttctttgttttcgccgctaaccatggccaaccaaaggccttctaccagctcgctaagattttccatac

SEQ ID NO: 158122 - DNA, 234 bp, Glycine max
gaccgctacggttcagaaaggctcggtggtgaaatccgccggagcgttggggatggtgctgtccaacaccgccgctaacgggaggagctagtggcggatgctcatttattaccggccaccgcagttgggcagaaagccggtgacgctattaagaagtatttggtttccgatgcgaaaccgacggtgaagattttttttgagggaaccaaggtggggattcagccatcgccggtg

SEQ ID NO: 158123 - DNA, 248 bp, Glycine max
cgccttggtgttggagatcgtgatgaccttcggtctggtgtacacggtctacgcaactgccattgaccccaagaagggtaatttgggaattattgctcccatcgccattggtttcattgtcggcgctaacattttgttcgggtggggccttctctaggtgcggccatggaaccccgctgtggacattgtggggcctgcttgtcgttgagctggcacctgggaccagatcactggactctactggggcc

SEQ ID NO: 158124 - DNA, 238 bp, Glycine max
ccgtgggtgcttctggtgcattatttggcttactaggaggcatgctatcggagctcttgataaattggacaatatatgccaataagtttgcagcgttattgactcttatagtcatcgttgtaatcaatttagccattggagttcttccacatgtggacaattttgctcatattggaggatttgtctctggcttttttcttgggtttatctttctgattcgcccccagttcaaatgggt

SEQ ID NO: 158125 - DNA, 241 bp, Glycine max
caggggtgggagaaagctacctttggaagtggagcaaacgatcatgtcttctggaattatgcttgttataattctggggttattccttattgttcgtgataccctaaaccttgattttatcaaagacttgttgtaattattgagaattctagttagtagtgggcttcaaaaagtatttcatgattctcatctgcaatgctgttgcaccagtgtcttaggcagggatattctgtagaggagg

SEQ ID NO: 158126 - DNA, 236 bp, Glycine max
cgcaacaaaaagaaagaatcccaggcgaggagaaagatggaggggaaggagcaggatgtgtcgttgggagcgaacaagttccccgagagacagccgattgggacggcggcgcagagccaagacgacggcaaggactaccaggagccggcgccggcgccgctggttgacccgacggagtttacgtcatggtcgttttacagagcagggatagcagagtttgtggccacttttctgtt

SEQ ID NO: 158127 - DNA, 235 bp, Glycine max
tatttggaacatttccttatctatcttcacctccatcttttaacagttcccctcgaaacttctgaagatgggtggcattgcattcggacgcttggatgattctttcagtttaacctcaatcaaggcctatattgctgagttccattcaaccttgctctttgtttttgccggtgttggttcagccatagcctatggtaagttgacatcagatgcagcacttgatcctgctgggtta

SEQ ID NO: 158128 - DNA, 235 bp, Glycine max
agatattttagttgcaggaattggaaccggtggaactgtttctggagctggccaattcctaaaacaacaaaatccgaaaatacaggttattggcgtagagcctctggaaagcaacatacttacaggtggaaagccaggacctcacaaaattcagggtattggggctggttttgtgcccaggaatttggatcaagatgtgcttgatgaagttatagcgatatcaagtgatgaagca

SEQ ID NO: 158129 - DNA, 236 bp, Glycine max
aaaatgtccatcctaagcactgcagggagtggaaaattcagcagtgaccggacaattgctcaatatgccaaggaaatttggaacatagaagagtgccgcgtgccataatttctgctggatgtgtgtctcttgcactcaagttactgtatatagcaccaacagaatgataagtaaaaagaagtgaataataaaaattagaaataattctggaaagggacatgaggggatttagtttc

SEQ ID NO: 158130 - DNA, 233 bp, Glycine max
agcagcaattcttatttatttcagattaatacttgataacctaaacaatatatctatatatagaatatagatagatatatatataatagaacgtaaaacaaaaaaagattaataaatagaaaaaggagcatgttgattatatagaaagtaaagggcaacaatcatttttgtttaccatgggtaaggtcaccatcgctgacataataacctatataagcaatgctgacatgaat

SEQ ID NO: 158131 - DNA, 235 bp, Glycine max
ggcatgattgatagcgttcctggaatgaaggctttggatatgaatgctgcagaggatgctattgtgaggctcacgagggagattgtgcccggcatgattgtcaccggcatggaggtggcagaaattgatggctccccaaggatgggtccgacgtttggggcgatgatgatatcagggcagaaggcggctcatttggcgttgaaggcgttggggaggaacaatgcaattgatggaa

SEQ ID NO: 158132 - DNA, 234 bp, Glycine max
gaagaggcagctgacaggctcatgggccttatatgtgagacaaagggaaatcatgaaacagctcttgagcatcttgttttagccagcatggcaatggtaaataatggccaggaagcagaagtggcatctgttgactgcagcattggagacacatacttgtctttgtctcgatatgatgaggctgcctttgcatatcagaaagcgctaacagttttcaagaccagcaaaggagag

SEQ ID NO: 158133 - DNA, 242 bp, Glycine max
ctcgagcgttcaaattggctatagtttgaaagttctgcagcagatctagtcatagaaatcagttgtagattgtagaaatcaattcattcttacatacattacattacagtacaaaagaatcaaatggaagaaagatgatcatccctgttcgttgtttcacctgcggaaaggtcattggaaacaaatgggatacctatttagaccttctgcagtcagattacagtgaaggagatgccctggat

SEQ ID NO: 158134 - DNA, 237 bp, Glycine max
cattatgtcaataacagcaaggctgctcgagaggccatgtgctttttaatggacccccaaactgggaagaaggtctgctatgtccaatttcctcaaagatttgatggcattgataggcatgatcgttatgctaatagaaacacggttttctttgatattaacatgaagggcctagatggtattcagggtcctgcatatgttggcacagggtgcgtattttaggaggcaagctttata

SEQ ID NO: 158135 - DNA, 235 bp, Glycine max
gcttggagctctttgcatgcaatggctaaaggacaaggtatactcaatccgtgatgcagccgctaataacatcaaacgcttggcagaagaatttggaccggattgggcaatgcagcacattattccccaggttttggacatggttactgatccacattatctgtatcggatgacaatcttacaagcaatttctctactagctcctgttctgggctcggagattacttcttcaaaa

SEQ ID NO: 158136 - DNA, 231 bp, Glycine max
ctttgttcactcttcttctcttgcggctagggttttagcgcgctcttctagatttaaggaagatgggtaaggaaaaggttcacatcagtattgtggtcattggccatgtcgactctgggaaatccactaccactggtcacctgatttacaagcttggaggcattgacaagcgtgttattgagaggtttgagaaggaagctgctgagatgaacaagaggtctttcaagtatg

SEQ ID NO: 158137 - DNA, 238 bp, Glycine max
ggaccaaacagcatccgcggcagcgacggtaaccctccaacaacaacacttccgctgcgaaaaatgtctctggtggcgaacgaggatttccagcacattctgcgtgtgctgaacaccaacgtggatgggaagcagaagataatgttcgcaatgacctccatcaagggtattggaaggagattcgccaacatcgcttgcaagaaggctgatgttgacatgaacaaaagggctggtgagt

SEQ ID NO: 158138 - DNA, 239 bp, Glycine max
gggaaacatcaaatcaacatgctgagagtgggcgcaaagagggttttggaaacgacgttgtttggggttagggttccggcgaggctgtaccacgagagggttgtggatcactacgacaacccccggaacgttggatcgtttgacaagaacgacccgagcgtggggacgggtttagtgggggccccggcgtgcggcgatgtgatgaagctccagattaaggtcgacgacaaaaccggaat

SEQ ID NO: 158139 - DNA, 239 bp, Glycine max
atcagaaccttagccatggcagcgttccagaagatcaaggtcgccaaccccatcgtcgagatggacggagatgaaatgactagggttatctggaagtcaatcaaggacaagctcattttgcccttcttggagttggacatcaagtattatgacttaggccttccttaccgtgatgagaccgatgataaagttacaattgaaagtgcggaagcaactctcaagtataatgtggcaattaa

SEQ ID NO: 158140 - DNA, 239 bp, Glycine max
cttctggaaaaacttttccaacttttgatcctaggactggagatgtaattgccaatgttgctgaaggagatgctgaagatgtaaatcgcgctgtccatgctgctcgcaaggcttttgatgagggaccatggccaaagatgacagcttatgaaagatcacgtataattttgcgctttgctgatttattggagaaacacaatgatgaagttgcagccatagaaacatgggatagtggcaag

SEQ ID NO: 158141 - DNA, 240 bp, Glycine max
gagaaagttctctctctttgactcacaaccctattgcgtgctttgcaatcgaccccgcttatggccaacagtaacctccctcgaagaatcatcaaggaaacgcagcgtttgctcagtgagccagcgcctggaattagtgcgtccccttcggaggacaatatgcggtatttcaatgtgatgatccttggcccgactcagtcgccatatgaagggggagttttcaagttggaattatttttg

SEQ ID NO: 158142 - DNA, 234 bp, Glycine max
ctgatttgtctggcagggaaacccttgtccgaatcactggtggtatgaaagttaaagctgacagagatgaatcatctccttatgctgctatgcttgcagctcaggatgttgctgccagatgcaaggaactgggcataactgctcttcatatcaagctccgtgctactggtggaaacaagaccaaaacacctggtcctggtgctcaatcagctcttcgagcccttgctcgttcag

SEQ ID NO: 158143 - DNA, 230 bp, Glycine max
ctttgttcactcttcttctcttgcggctagggttttagcgggctcttcgagatttaaggaagatgggtaaggaaaaggttcacatcagtattgtggacattggccatgtcgactctgggaaatccactaccactggtcacctgatttacaagcttggaggcattgacaagcgtgttattgagaggtttgagaaggcagctgctgagatgaacaagaggtctttcaagtat

SEQ ID NO: 158144 - DNA, 233 bp, Glycine max
tttgaggccaggcaagccccactcaaccaccacacctctcctcgttcacgctacccctttctgctcttcttctacctttcaagttttaaaagtataaagatggcagagacattcctatttacctcagagtcggtgaacgagggacaccctgacaagctctgcgaccaaatctccgatgctgtcctcgacgcttgcctcgagcaggacccagacagcaaagttgcctgcgaaac

SEQ ID NO: 158145 - DNA, 254 bp, Glycine max
atcaactgaggcagagctgcaggacatgataaatgaggttgatgctgatgggaatggtaccattgatttcccagaattcctgaatctcatggctcgcaagatgaaagacactgattcagaggaggagctgaaggaggctttccgcgtgtttgacaaggatcagaatggcttcatctctgcagcggagctccgccatgtgatgaccaatctcggtgagaagctgaccgacgaggaagtcgatgagatgattcgcg

SEQ ID NO: 158146 - DNA, 249 bp, Glycine max
gttaaaacgacgcggagacggcgtcgtcggactcgacaacttcaacgactactacgatccgtctctgaaaaaagcccgcaagtccctcctacgccaagcatgacgtcttcatcgtcgatggcgacctcaacgacgccaagctcttggcaaagctcttcgatgtggtcgcgttcacccacgtgatgcacctcgcggcgcaggccggggttcgctacgccatggagaatccccactcctacgtccacagca

SEQ ID NO: 158147 - DNA, 133 bp, Glycine max
gcaacaagagcttctgatccgcgtcgccacgctctccctcatctacgtcctcgccttcatcacgcgcctcttcagcgttctccgctacgagtccatgatccacgagttcgacccctacttcaactaccgcacc

SEQ ID NO: 158148 - DNA, 243 bp, Glycine max
tacaatgtcattgtggaaattgccactatcctctccccggaagagcttttggcggttagacgcgcctatctcaaccgctacaagcactccttggaagaagatgttgcagctcatacctctggccatctacgccagcttttagtggggttggtgaccgcattcaggcatgttggtgatgagatcaatccaaaattggcacaatctgaggctgaaattcttcatgatgctgtaaaagagaagaag

SEQ ID NO: 158149 - DNA, 246 bp, Glycine max
aaccaattggcctcaagtttgagaacccaagagagggtgaagaaggccaaacctggtgttgtttctgctgttcttacatcaagtaacaccaaagaatcagtggcttttcaaatgccatcgtttctcagaagaaaggctgatccaaaaaatgttgtttccatcatattgggagggggacctgggattcaactctttcctcttaccaagcgagctgccacacctgctgttcctgttggtggatgctac

SEQ ID NO: 158150 - DNA, 250 bp, Glycine max
ggaaagggcaaaagccgctaaagtggacagtcaggcagcttattttgaagacccatattcagtctccagcaacttcacttccagtgttagcgaactcacaattggcaagaaggatttacgaaggaacttgaagggaaaatatcgtggtgacggtccatgcatagccacaaaccccatcgacaggtgttggaggtgtgaccccaattgggccaacaatcgccagaagctcgcagattgcgtccaaggcttc

SEQ ID NO: 158151 - DNA, 252 bp, Glycine max
gaagatgcgagcacttcattgacagatcgagcagcaaaactacgtcaaacagcggctcttatagaatgcaacctaaagcttcttggagcaactggaattgaagacaagctacaggagggtgtaccagaagccattgaatccctgcggcaagctggaatcaaggtctgggttcttaccggtgataagcaagagactgcaatttcaattggtctttcttgtaaacttctgagtgcagatatgcagcaaataatt

SEQ ID NO: 158152 - DNA, 245 bp, Glycine max
gggatcctgaaacgggagaaggcttgaccagcattgaaccgacaacgggaacaataaatgacgtgtgtacatttcctggcagtggtttgatcttgctggccttagattgtagtcaaataccatcttacttcataccatcgcttggacctgctcccaagtggtgttcttcgctagagaatttcactgaggagttagacatgggtggacaaacaactatttatgatcattacaaatttttgacaaag

SEQ ID NO: 158153 - DNA, 248 bp, Glycine max
acctgagcatgtggagaaagctttgaagcatgtttaccatgcgtcaacaaacaaaaccaaaggaaaggaattggagcttttgttagcaatattgccggacaacaatggttctctctatggtgatatcaagcgtatttgtgaaaccgaccttggtttaatttctcaatgttgtttgacaaagcatgtctttaagatcacaaagcagtatttggctaatgtgtctctgaaaatcaatgtcaagatgggag

SEQ ID NO: 158154 - DNA, 245 bp, Glycine max
gagagagagagagagagagagagagatctatctatctatcaagatggcgttgttggttgagaaaacaagcagtggaagggagtacaaggtgaaggacatgacgcaagccgatttcggaagattggaaatcgagctggcggaggttgaaatgcccggcctcatgtcctcccgcaccgagttcggcccctctcaacccttcaagggcgctaggatcaccggctccctccacatgaccatccaaaccg

SEQ ID NO: 158155 - DNA, 244 bp, Glycine max
tattaggccttccttaccgtgatgagaccgatgataaagttacaattgaaagtgcggaacaactctcaagtataatgtggcaattaagtgcgcaactattactccagatgaagctcgtgtgaaggagtttggtctgaagtcaatgtggaagagtccaaatgggacaattaggaacattttgaatggaactgtcttcagagaaccaattctttgcaaaaacattccccgccttgttcctggttgg

SEQ ID NO: 158156 - DNA, 116 bp, Glycine max
ctcgtcactagctctgtgcattcttctctcgctctctgccttccatcacactcggcatttcctttcccaagatagtagaagatggcagacactgaggatattcaacctcttgtttg

SEQ ID NO: 158157 - DNA, 248 bp, Glycine max
taaagcgggttactgtctgttcaagctaccatctctctctctctttcttagtgcctccttgccagaagttaaaatggcccaagaaactttcctattcacatctgaatcagtgaacgaggggcaccctgacaagctctgtgaccagatctccgatgctgtgctcgatgcatgcttggagcaggaccctgacagcaaggttgcctgtgaaacctgcaccaagaccaacatggtgatggttttcggagaga

SEQ ID NO: 158158 - DNA, 251 bp, Glycine max
tgttgttttcagatcaaaaggccttctttcctcatttcggacgcacgctccccatccatgtctacttgtgtaaaatcccgagatgtttgtattgttggtgttgcacggacgccaataggtggtttacttggcaccctatcatctctttctgccacagagttaggctcaattgctattaagactgctctcaagagagcaaatgttgatccatcactcgtgcaagaggtgttttttgggaatgttcttagtgc

SEQ ID NO: 158159 - DNA, 250 bp, Glycine max
attttcatcatcttcttcttctttttcatcaatcatcaccagtggttcttttccttctgagaagatcgaattgtgttttgcaaaaatgggagttccagagaaagaccctctttcccaattgagtttgcctcctggttttcggttttaccccaccgacgaggagcttctcgttcagtatctgtgccgcaaggtcgctggccaccatttctctcttccaatcattgccgaaattgacttgtacaagttcgac

SEQ ID NO: 158160 - DNA, 248 bp, Glycine max
gcccatacttgtgggagatagatggcacgcttgtcactgctcattttcgcgttctgcgccgtcgccgtcgccgtcgccgtcgcgggctcctccttcgatgatgccaaccctatccgtttagcgtcggacttggagtcgcaggtgctggacgtgatcggacagagccgccacgctctctccttcgcccgcttcgctcgccgccacggcaagcgctaccgttccgtcgacgagatccgcaaccgcttccg

SEQ ID NO: 158161 - DNA, 246 bp, Glycine max
caattaacaaactctaacaacatcatggtgcaatcaaagaagttcagaggtgtcaggcaacgccattggggttcatgggtatccgaaattcgccacccgcttctgaagagaagggtgtggctagggacatttgaaacagcagaagaagctgctagagcctatgatcaagctgcgattctgatgagtgggagaaatgccaagaccaatttcccaataactcaaactccagaaggtgatccaaagagc

SEQ ID NO: 158162 - DNA, 242 bp, Glycine max
gtgagattcatcaattttgaaagaacaaaacttcctgaagaaattctaaagcataatctagaagaaaaaagaaaatatttttcagatataattcttgaagttgaaaggagtgatgccgaggttcaggctgagggagtatacaaccaaaggcttcagaatcttgctgtcactcttgataaggtaaggtatgttatgagatgtatttttggcgatccacggaaagcaccacctcctcttgagaa

SEQ ID NO: 158163 - DNA, 244 bp, Glycine max
cggcagtgaagttattagaatctgtgttgtgttgtgttgtgttgagcagagagagagagtgagggataagaagagaatagggttagggttagggttagggttagggtttgattgaggatgccgaagaacaagggaaagggaggtaagaacaggaagaggggaaagaacgaggcggacgacgagaagcgggagctggtgttcaaggaggacgggcaggagtacgcgcaggtgctccggatgctgg

SEQ ID NO: 158164 - DNA, 243 bp, Glycine max
ccaagccccactcaaccaccacaccactctctctgctcttcttctacctttcaagtttttaaagtattaagatggcagagacattcctatttacctcagagtcagtgaacgagggacaccctgacaagctctgcgaccaaatctccgatgctgtcctcgacgcttgccttgaacaggacccagacagcaaggttgcctgcgaaacatgcaccaagaccaacttggtcatggtcttcggagaga

SEQ ID NO: 158165 - DNA, 128 bp, Glycine max
ctctctctccctctttctcgtcactagctctgtgcattcttctctcgctctctgccttccatcacactcggcatttcctttcccaagatagtagaagatggcagacactgaggatattcaacctcttg

SEQ ID NO: 158166 - DNA, 248 bp, Glycine max
gaggaacaacacttgttattactctttcattggtgctttcgacacttgtgtccttctccactttcacacatgccttctctacttctgcgtttccggaactgaatcctataaaacctaggcactcacgtcttctcaggagtgccgtgcaacatgaaactcctacatcacagctttctgaaatatggtcacctctggaaagccaaggacggaaaccttatgttgaatcagataagccatcattaccagag

SEQ ID NO: 158167 - DNA, 248 bp, Glycine max
  unsure (1)..(248): unsure at all n locations
attgtgccctccctctttctagctatttccctctcttaacacaattaacaaagatatatcatatcatatcaactccaaatgatgaaaaatattgggttgtttcttcttgtggtggtggctacttttgtggtggcagccacagctggtagcttttaccaagactttgaaataacatggggtggtgagcgtgccaaaatctatgaaaatggaaatcttctcaccctctccctagacagagnctctggctc

SEQ ID NO: 158168 - DNA, 242 bp, Glycine max
gacctaccaagaagaaaaagcttgactgggagctgcgtctaaaaatagcacttggagcagcacaaggacttgcttatctacaccatgattgctgtcctagaatcatccacagggatgtgaaatcatctaacattatattagatgcagactttgagcctcatctcactgattttggcattgccaaaagtctctgcccctcgaagtcccatacttctacttacataatgggcacaattggctac

SEQ ID NO: 158169 - DNA, 241 bp, Glycine max
cttggaaccgttcttcgtgttctccattccctctctcactccttcatctacgtaatttccttccttcctttctttctttctttctttctttatcttctcatttttctcaatacaatttttttctttctttctcaagttttgctacttttctcttcttaaccatagttcacatattatatcatcacatatcatagtgatatcatatcacaatgtgtggcatacttgctgtgcttggttgctc

SEQ ID NO: 158170 - DNA, 239 bp, Glycine max
tgcaattgaagttaaaagccttagccttccctacaactccaaacacaaagacatcatcatccatggctgcctccgtctccactgtcggagctgtcaacagagctcttttgaacctgaatggttctggagctggagcttcagctcccagttcagccttctttgggaccagcttgaagaaggttattgcctcaagggtccccaacagcaaggtttccggtggaagcttcaagattgttgct

SEQ ID NO: 158171 - DNA, 242 bp, Glycine max
ctcagaagaagacccttccaccgggcccaccgggctccctatcttcgggaaccttctatctcttgacccggacctccacacttacttcgccgccctggcccagatccacggcccaattctcaagctccgactcgggagcaagctcagcatcgtcataacctcaccggccatggctcgcgaggtgctcaaagagaatgacaccgttttcgccaaccgcgacgtccccgccgccggaaggtcag

SEQ ID NO: 158172 - DNA, 244 bp, Glycine max
attaacaaatcatagcatagcagaagaagaagaagaagagatacatagaaagaaagaaaaaaaaaatgagtttgagggaagacaatgaagagggaagggatctgaagaagccatttcttcacacgggaagttggtatcgtatgagtgggagacaatccagtgtgttcggttccacacaggccattcatccagtcctccatctctgtctttgcttgtgttctaatcgttgctttgggtccaattc

SEQ ID NO: 158173 - DNA, 243 bp, Glycine max
ttccaatatattccattctctctgtgtatttccctacctctcccttcaagatgcagatcttcgtcaagaccctcaccggcaagaccatcacccttgaggtggaaagctctgacaccatcgacaacgtcaaggccaagatccaggacaaggaaggaatccccccggaccagcaacgtctcattttcgccggaaagcaacttgaggacggccgtacccttgctgactacaacattcagaaggaga

SEQ ID NO: 158174 - DNA, 244 bp, Glycine max
cgtttaccatgctttcctaagagaaagagaaaagtaaaacccctcactactgatagattttcattcctccgaggaaaaaaaaaacatgtcggatgctttgatcaatggattggccggagctggaggagggatcattgctcagctcatcacatacccacttcaaactgtaaacactcgccaacaaaccgagcgtgatccgaagaaagacacgaggagtcaaggggccctcgaacgaatgtgccag

SEQ ID NO: 158175 - DNA, 247 bp, Glycine max
aaacctcctcactaccctaaaccaccagttcatccacatccaccccatgtcccaaaacctcatccaaagcctccagtgcatccccatcgaccttatgtcccaaaacaacaattggggcagtagcaccagcatatgttccaaaaccaccaattgtgaaccctccctatgtcccaaaaccgcctgttgtgccagttacaccaccttatatccctaaaccaccagttgtgacaccagcatatgtccctaa

SEQ ID NO: 158176 - DNA, 244 bp, Glycine max
ggaggagagagacagttcaatggccttgttgatgtctacaggaagacattggcatctgatggtgttgctgggctctaccgtggtttcaacatctcatgtgttggaatcattgtgtatcgtggtctgtactttggattgtatgattccgtgaaaccagttgtcctcaccggatcattgcaggatagcttttttgccagctttgccctcggatggctcatcaccaatggtgcaggtcttgcatcat

SEQ ID NO: 158177 - DNA, 241 bp, Glycine max
ggtcgccttgtcacccaccaaacccatgaccctcccttctatgctgttttcgttgattgcaacaacagtgatggagccagattcatccatgcaactttagatatgaccatatctgatatcctctctcccgttgacgttccacccattgttcaatcattgtttgaccaccacaaagctgtcaaccatgacggtcacacaatgccgttgttgtccgtccaagtcactgaatttgtggatggtg

SEQ ID NO: 158178 - DNA, 240 bp, Glycine max
gggaaggttgatcaaacgctacgcagcggacgtgacttggtagggcatggcacccacacactgtcaacagctggtggtaattttgttcctggtgcaaatgttgaaggtaacggcaatggtactgctaagggaggatcccctagggctcgcgttgttgcctacaaagcatgctggaataaactggatgaaggagggtgctatgatgcagatattctagaagcatttgatcatgccatttat

SEQ ID NO: 158179 - DNA, 242 bp, Glycine max
ggaaatttgcaaggggctcgacaaattcgttattggacaagagagggccaagaaggtgctttctgtagcggtttataatcactataagaggatatttaatgaaacctctttgcccaagtggcctgcaggagattcagataatagtgtgaaagttgatgctgctgatgatgatagagttgaacttgagaaaagcaacatccttctaatggggccaaccggatcagggaagacattacttgcca

SEQ ID NO: 158180 - DNA, 237 bp, Glycine max
gtgaagctactctcagacatagatgaccaagatgggttacgtttccaaattccggtgatacagttctatcgccacgacccatcaatggcagggaaagaccctgtcgatgtgataagaaaggctgtggccaaaacgcttgtgttttactcaccttttgcaggtaggcttagggaaggacttggtcggaaactgatggtggattgtactggggaaggtgttttgttcattgaggctgat

SEQ ID NO: 158181 - DNA, 235 bp, Glycine max
aagagaaagagtgggagaaagccttagagagaatttttttcaaaaaagaaaaatattccttcttaattctacgtacgtgaggtgttagaagacacaacaatgaatttggcaaagggtgttggcggaaacattgacaaatcccaagttctgtccgctgttgaaaagtacgagaagtatcatgcttcttatggaggtcaggaggaggagaggaaagctaattatgttgatatggtta

SEQ ID NO: 158182 - DNA, 292 bp, Glycine max
ttcggctcgagcttagaaggcgtcttcataaacgcctttcttctccgtttccgtttcctcgttcgaattcgctttttgatctgcgaaaatgagagagtgcatctcgatccacattggtcaggctggtatccaggtcggaaatgcttgctgggagctctactgcctcgagcacggcatcgggcccgatgggcaaatgccaagtgacaagacagttggcggtggtgatgatgctttcaatactttcttcagcgagactggtgctggaaagcacgtgccacgtgcagtgtttgta

SEQ ID NO: 158183 - DNA, 280 bp, Glycine max
caacatgcgactgtgttagcctagcggatgaaaacaaaaaaaaataaaaaaaattacatctaagcacagagaaagaggaagagatggaggcagaggcagaaggtgaagaaggtgcgaactaagcatttacaaggcggcgagaagcataaagcgaagagagaacagtttgtacaacgcactgagatccatctaccaagactccatcttcgtctccgagatctctcttctatggcctcagctccctctcctcgccaacctccgctgcggcctctggtactcc

SEQ ID NO: 158184 - DNA, 273 bp, Glycine max
cccgctcaaaggtctacttctcccccaagctttactatcttagagttcaagtaatcgaggctcaggatctcgttccttccgaaaaaggaaggccccctgactcccttgttagagtgcagctagggaatcagatgagattcacccggccttctcaaattagaggcaccaaccctgtttggaatgacgagcttatgtttgtggccgccgagccatttgaggattttatcattgtcactgttgaggacaaagttggtcctaatgttgaaatcttag

SEQ ID NO: 158185 - DNA, 273 bp, Glycine max
ggagaaagttctaataatctcgatgaaagtcaaaaatataagcatttgtggcttgaatgcgaaaattgttatggattaaattataaaaaattttttaaatcaaaaatgaatatttgtgaatactgtggatatcatttgaaaatgggcagttcagatagaatcgaacttttgattgattcgggtacttggaatcctatggatgaagacatggtttctctggatcctattgaatttcattccgaagaggaaccttataaagatcgtattgattct

SEQ ID NO: 158186 - DNA, 275 bp, Glycine max
ccgccacctccagctccaccggccgcctctccttcggcaccaccaccacttcctacgtcaagtacacccccttctccaccatctcccgcggctcctccttctacggcctcgacatcaccggcatctccgtgggcggcgccaaactcccagtctcctcctccaccttctccaccggcggtgcaatcatcgactccggcaccgtgatcacccgcctcccccccaccgcctacaccgccctccgctccgccttcaggcaaggcatgtccaaatacccc

SEQ ID NO: 158187 - DNA, 269 bp, Glycine max
gtacaatcctgtatgtgattctgtactttcggcagatgcaaaggggataattgaatactggagccctgctacacttcaattcccagagaatgtggtcgattttaaattgaaaagtgacactaacctctttgaaattgcaaaatgcaagacttctgtttcggctattgaggttagtccagatggtaagcaattttccattacatcacctgatcggagaatacgtgtgttttggttcagtacaggtaaactaaggcgagtttatgatgaat

SEQ ID NO: 158188 - DNA, 271 bp, Glycine max
cttttctctcttctctctctttctccggcgacgatctcagattccggtcactcctctcgccggcgatcccttattcctccgtcctccgtcgagtcctttccgattcgaatcgttcccagccttgtgccaccatgaatcccgaatacgattatttgttcaagcttttgctgattggagattctggtgtaggcaagtcatgtcttctcctgaggtttgctgatgattcataccttgacagctatatcagtaccattggagtggactttaaaat

SEQ ID NO: 158189 - DNA, 279 bp, Glycine max
  unsure (1)..(279): unsure at all n locations
gtcnccggcgactgagtcgcggtctcttcccaactcggaactcagtccattccgcatttctcttcaaaccaaatttcttctgaagaaggagatttgaattcagaattgagtgagaagaagagaatagaaatgggctccgaattgattttcagaggccacgaggctcagcccgtggacgactcgtactcgccgaagccccacaagccctggttcaccgtgactcgcccgattcactacatgctccgcgagcagcgactcgtcttcgtcctcgtcggcgtc

SEQ ID NO: 158190 - DNA, 275 bp, Glycine max
ggacataataatgtctataatgctaccatatttccccataatgttgggcttggatgtaccagggatcctaacctggcacaaaggattggtgctgcaactgctcttgaagttagagctacagggattccttatgtatttgctccatgcatagcggtttgtagagatccaagatggggtcggtgttatgaaagctatagtgaggatcctaaaattgtgcaagacatgacagagatcatacctggtctacaaggaagtatccctgccaattccaggaa

SEQ ID NO: 158191 - DNA, 273 bp, Glycine max
gaagcctttaaccatgcgggaaacaaacattacaagctaggcatcaaccattttgctgatctcacaaacgaggaattcaaagccataaatagattcaagggtcatgtgtgctccaaaataacacggacacccacatttaggtatgaaaatatgacagcagtgccagctacattggattggagacaggaaggagctgtcacacccatcaaggaccaaggccaatgtggatgttgctgggcattttctgctgtggcagcaacagaaggaatcacc

SEQ ID NO: 158192 - DNA, 267 bp, Glycine max
tttgtagtgattattagaggatttgatcgttaacaatttctcttcttatttgtttaatgtttttggtttcttaggtgaattattcaagaggacccgacaatcccacaaagcagaaagagaggttgttatgttatggcgggcaaaggtgttggttcagtggctaaggcagtagcagaatatcagtatccttggcgtgagaagttggcgaaatataaggatgagtttgctaagggtgtgtggggatactgggagctgggggcatggaag

SEQ ID NO: 158193 - DNA, 271 bp, Glycine max
ctcccctctcaggtttttgtggataagattgagctataatggctgccaggagaccgggtttgattgctttgtttgatgttgatggaactcttacagctcccaggaaggtggtcacaccggagatgttgacattcatgcaagaactgcggaaggttgtaactgttggagttgttgggggttctgaccttataaagatatcagagcaacttggcagcacagttaccaatgactatgattatgtattttctgagaatggtcttgtggctcacaa

SEQ ID NO: 158194 - DNA, 269 bp, Glycine max
gaggaagctccacgagtcctagagaggcatttcttagatttaaggaaaaaatatggggcagtattggatgttgatcttgttaacaagcatggcggagaagggcgactgtgtgaaaaatttggtgatgcatcgcagcatgtggctggtaatgatgtaagatatctgcactttgattttcaccatgtctgtgggcatgttcattttgatcgtctctcaatcctgtatgatcaaatttcagatttccttgagagaaatggatatcttctgtt

SEQ ID NO: 158195 - DNA, 265 bp, Glycine max
tcaagatgcagatattcgtaaaactttgaccggcaagaccatcacccttgaggtggaatcctccgacaccattgacaacgtaaaagctaagattcaagacaaggaagggatcccacctgaccagcagagacttatctttgcgggtaaacaacttgaggatggtcgcacccttgccgattacaacatccaaaaggaatcaaccctccatctcgtgcttcgcctcaggggtggcatgcaaatctttgtcaagactttgaccgggaag

SEQ ID NO: 158196 - DNA, 171 bp, Glycine max
  unsure (1)..(171): unsure at all n locations
gcgtacgtgagcgcgnggttggggtcgagcaaaagtgagagacacctatttgtgagtatgtgggttgtgttgttccataatcattcttgagatcaaactcaaacgacaatatttgtgtcttgagatcaaactcaaacaataatatttgtgttatctggcattgtgtttttt

SEQ ID NO: 158197 - DNA, 268 bp, Glycine max
atcgagataactagaaacagtgtgatgaaaatgaaggtccttgttttcttcgttgctacaattttggtagcatggcaatgccatgcgtacgatatgttccctctccgaatgaacactggctatggtgcccgtactccggaggtgaaatgcgcaagttggaggcttgctgtggaagcacacaacatctttggctttgagaccattcctgaagagtgcgttgaagcaacaaaggaatacatccatggcgaacaatatagatcagactcca

SEQ ID NO: 158198 - DNA, 266 bp, Glycine max
acaacacaaggccatcatcatggcagctgcttctcctatggcaagccaactcaagtccaccttcactaaaactcttgtagctcccaagggcctctctgcctcttcaccactccacctcctgccttctaagaggcaatttagcttcactgttagggccatccaatcagaaaagccaacctatcaagtgattcaaccaatcaacggtgatcccttcattggaagccttgaaaccccagttacatccagccccttgattgcatggtact

SEQ ID NO: 158199 - DNA, 276 bp, Glycine max
gaacggcgtcgacatttccgtcgccgagggcgaatcccccaacagcttgttcaacatcataggcaacttgctcttccccttactcgcattcgcgggcctgttcttcctcttccgcagagcccaaggcgcgcccggcgggcctggcgggctgggagggcccatggacttcgggcggaacaagtccaagttccaggaagtccccgagaccggcgtgagcttcgctgacgtggcaggcgcggaccaagcgaagcttgaattacaagaggttgttgattt

SEQ ID NO: 158200 - DNA, 264 bp, Glycine max
aatttatgcagtatcaattacaattcgtattgtgcttggttttatgttgctggctctcatttggaagtttgactttccaccctttatggtgcttattatcgctatcctaaatgatggtactattatgacaatttcaaaagatcgtgtaaaaccatcacctctgccagatagctggaagctagcagagatatttactactggagttgtgcttggaagttacttggcaatgatgacagttatattcttttgggcggcatacaaaac

SEQ ID NO: 158201 - DNA, 262 bp, Glycine max
ctgaaatcgagctctttatttggagaatctctaagagtggcatccaaatcaacactaaaggtttcaaagacaaagaatacttcactcgtgaccagatgtgaaattggtgacagtctggaagaattcctcacaaaagcaacaccagataaggggttgatcaggttgttggtgtccatgggagaagcattaagaacaatttccttcaaagtgaagacggcttcttgtggtggaacacaatgtgttaatactttggggacgagca

SEQ ID NO: 158202 - DNA, 265 bp, Glycine max
atatcactgagttccagaccaaccttgtgccctaccctaggatccacttcatgctttcgtcctatgctccggttatctctgccgccaaggcctaccacgagcagttgtcggtgccggagatcaccaatgccgtgttcgagcccgccagcatgatggccaagtgtgatccaaggcacggcaagtacatggcttgctgcttgatgtaccgtggtgatgttgtcgctaaggatgtccatgctgctgtagccaccatcgagactaagag

SEQ ID NO: 158203 - DNA, 264 bp, Glycine max
gtcccaatcccatatgcttgttaactgtggcggaatcaccgtaaccccaaggagactccggacaatagctaagaaacaggtggattacttgcttggagacaacccattgaagatgtcatacatggtggggtatggtccacggtacccacgaaggatacaccataggggctcatctttaccgtcgattgctgtacacccgggaaagatccagtgttccgcaggttcagtgtgatgaattcgcaatcccccaacccaacattctcg

SEQ ID NO: 158204 - DNA, 269 bp, Glycine max
cagaggaattcgttttctctgatcgggatctggaagggaagcgaatcgacatgggtttcttggtgacgacgctgatcttcgtagtgatcggaatcatcgcgtgcctctgcaccagaatttgctgcaacagaggaccttctgccaatctatttcaccttactttggtaattactgcaacaatttgctgctggatgatgtgggcgattgtatatctggcacagatgaaaccactcattgtgcctatactgaacgagggtgaataagtctct

SEQ ID NO: 158205 - DNA, 273 bp, Glycine max
ttcctgttgatatatggagcttgggatgcacaattcttgaaatggcaacatcaaagcctccttggaatcagtatgaaggggtagctgcaatatttaaaattggtaacagcagagatatgcctgaaattcctgatcatctctcaagcgaggcaaagaaattcattcagctatgcttacaaagagatccatcagcccgcccaacagcccagatgttactagagcatccctttattcgagatcagtcattaacaaaagcttacaatgtcagaataa

SEQ ID NO: 158206 - DNA, 267 bp, Glycine max
ctctacctctcccttcaagatgcagatcttcgtcaagaccctcaccggcaagaccatcacccttgaggtggaaagctctgacaccatcgacaacgtcaaggccaagatccaggacaaggaaggaatccccccggaccagcaacgtctcattttcgccggaaagcaacttgaggacggccgtacccttgctgactacaacattcagaaggagagtactcttcacctcgtcctccgtctccgtggtggcatgcagatcttcgttaagac

SEQ ID NO: 158207 - DNA, 264 bp, Glycine max
ctctctctctttttcgcctcattccattttcatctatcaatggctccagtagcagcagcatcttcagattcaatcaagccaagagatgtttgcatcgttggtgttgcacgtacaccaatgggtggatttcttggtactctgtcatctctatctgccaccaagctaggctctatagctattgaagctgctcttaaaagggccaatgttgatccatcccttgtggaagaagtatttttgggaatttcttagtgctaattggggcaa

SEQ ID NO: 158208 - DNA, 253 bp, Glycine max
tatggctcgtcactccttgctcttagccctcctcctcttcgccgccgtggccaccgccgcgatggcgtggcgcgtccgacgccgacgacatcctgatccgtcaggtggtgccagatgttggcgaagccgaagaggaggacaacctgctgaacgccgagcaccacttcgcgcgcttcaaggccaagttcgccaagacctacgccaccaaggaggagcacgatcatcgcttcggcgtcttcaagtccaactccgc

SEQ ID NO: 158209 - DNA, 266 bp, Glycine max
aattgttgtaactttttgattcctaaattctctaaaattcgaaattctaatttcgttaggggaaagagattgtttgtgtgtgagtgagtatggctggaaaaggcgagggtcctgctatcggaatcgatttgggaacgacgtactcttgcgtcggcgtgtggcaacacgatcgtgttgaaatcatagccaacgatcagggtaacagaactaccccatcctacgtggctttcaccgacacagaacggttgatcggcgatgcggcgaag

SEQ ID NO: 158210 - DNA, 251 bp, Glycine max
cgcaacaaaaagaaagaatcccaggcgaggagaaagatggaggggaaggagcaggatgtgtcgttgggagcgaacaagttccccgagagacagccgattgggacggcggcgcagagccaagacgacggcaaggactaccaggagccggcgccggcgccgctggttgacccgacggagtttacgtcatggtcgttttacagagcagggatagcagagtttgtggccacttttgctgttctctacatcaccgt

SEQ ID NO: 158211 - DNA, 263 bp, Glycine max
ataagaagaagggtgagctaaagtcaattttccttcctttcctttccactagtcacataatcccgctagtggacatggccagactcttcgccttgcacgacgtcgacgtcaccatcatcaccaccgcacataacgccaccgttttccaaaagtccatcgatttagatgcgagtcgcggtcgccccatcagaacgcacgttgtcaacttccccgccgcacaagtgggtctccccgttgggatcgaagccttcaacgtcgatacg

SEQ ID NO: 158212 - DNA, 264 bp, Glycine max
gatcttttcctctgagaagacgtgtcggtagctgaagcattttgtaagcctccactttcctgaactagttttaacatacaatctttcaagtacacctccccagcttccatttaagaatggagatcactagaataggccaatggttaagtcttctgatatgtgtactactattactgcagacagaaggggttcctgtgggaatcacttttgttgaaaatgcagtggcaaaaggggctgtttgtttggatgggagtcctccagctt

SEQ ID NO: 158213 - DNA, 268 bp, Glycine max
attgaaaggcaagatgtgaagcaaatggtagttgctacacttgctgaatctggcatgaacctatcagatgatgttatagaaagtataattgacaaggttttaccccattttctataacttacatttctaagttctaatagtgcacatgagtcttaagagtctcattttctctttttgaaaactcacatggatagtttcaacattaaattttggatttctttagaccttcgaggaagcagatacaaagcatgatggcaagattgacaag

SEQ ID NO: 158214 - DNA, 278 bp, Glycine max
gaattcggatcgagctaaagcacaagaagttcctgcgaaaattccttctcagcaagtgcctagcttcacatcctcttgggcagttgatgacttgttggaattaacagactttgaatcaccagacaaagttcagaagcaatcccttgagtttggagaacttgaatggctagcagatgtaggcctttttggtgaacagtttcctcatgaagctttagcggcggctgaagttcctcagcttccaatgactagcagtgttggctcacacaaagcccccaaat

SEQ ID NO: 158215 - DNA, 266 bp, Glycine max
caacctcacagcaagtgggcctaggcccaacccgcaaggctcctaccattacggtctcataaacacaaccaggaccatcatactgtcgggttcaccaggtatagtgaatggcaaacaaagatacgcaattaatagcgtgtcttacgttgctccggacactcctcttaagctcgccgactacttcaaaatccctggcgttttccgtgtgggaagcattctgacaggcccatggcggtggcatataccttgacacatctgtgctgcaa

SEQ ID NO: 158216 - DNA, 264 bp, Glycine max
tgctgacttcctgtttgtttctgatctatggcttccaaggagttctctggtctttgttccttggtttcttcactctccgagagcattttgtgcactactgggttgaaaatgtatttggtggagagcaaaggaggtgccataacatgcatgttcttggctcttttcttcttggggacatggcctgctcttttgactatgttagaaaggcgtggtcgtcttcctcagcatacctaccttgattactcaatcaccaatttcttgtct

SEQ ID NO: 158217 - DNA, 261 bp, Glycine max
aaatgaccaagatcttctttgtattgctgttatgtctgatcatagcagcttcttctgggtttgtgaattgctttgatgttgaaaagaaggaaaagattgaaatatttgagctcaataaaggtgacctttctttgaaggtcaccaactggggtgcttcaattttgtccctggtgattcctgataagaatggaaagttgagtgatgttgttcttggatatgattctgttaaggattacactaatgatacaacatattttggag

SEQ ID NO: 158218 - DNA, 258 bp, Glycine max
ctatgaacaatgatgagctacatgtggttatgttcccattccttgcatttggccacattagtccatttgttcagctctccaacaagttgttctctcatggtgttcatgtcactttcttgtcagctgcatccaacattcccagaatcagatcaactcttaatctcaatccagccatcaatgttatctcactaaagttcccaaatggtataaccaacactgctgaattgccacctcacttagctggaaatctcatacacg

SEQ ID NO: 158219 - DNA, 263 bp, Glycine max
gatttgtatgctgcagctaccatattaagatagacttgtgcatccataaatttcttcttgttaattgatcacaaattcagagggcgagccctggtgcagcggtaaagttgtgccttggtgacttgttggtcatgggttcgaatccggaaacagcctctttgcatatgcaagggtaaggctgcgtaccacatccctcccccataccttcgcatagcgaagagcctttgggcaatggggtacgaagtttttttttaattgatcac

SEQ ID NO: 158220 - DNA, 263 bp, Glycine max
cgccggggccattgtttacattaagatagaccttgcgttgcaaacaactatggaagggcttgtggtggccatgtccctgattggagcaacggtaatcaccacatgctctggtcctatagcggattggctcggtcggcgacccatgatgataatctcatctgtgctctatttcttgggtggtttggtgatgctgtggtccccaaatgtgtatgtgttgtgcttggcgaggctacttgatggatttgggattggccttgctgtga

SEQ ID NO: 158221 - DNA, 260 bp, Glycine max
cggatgagatgtacaccacaccggaggatcttgttaaggtcgtttaccactccgcgaaccggattgcgcccgctcacgaagggatggaattgggtattggcgacacttccatcgtcaaggcgcttgctgaggcgtacggaaggaccgaggtgtggattaagactcagtatcagaaaaaaggggatttgggcttggttgctaaagagagacgtacctcgcaacctatgatgtttaagcccgaagacattgactattacgaa

SEQ ID NO: 158222 - DNA, 263 bp, Glycine max
gtcattgaaggctctctcccaccgtctctcgacggcgcctacatccgaaacggccccaacccccagttcctcccgcgtgggccctaccacctcttcgacggcgacggcatgctccacgcgcttcgcatctcccatggcaaaaaacccacgctctgcagccgctacgttaaaacctacaaatacaccatggaaaacgacgccggtttccctctcatccccaacgtgttctccggcttcaactccctcgtggcctccgcggcacg

SEQ ID NO: 158223 - DNA, 263 bp, Glycine max
gtcatttctctctccggcgagaaagaaaaatgcagcatttcatggatttgcaagcgaattcggagttgggtgagtcgaattcatggctttcagtgaaagagcagtccggtgcggcacccaacaccaatttggatcgcgtcctcttcaacgacctcgtcgagattgtccctctcgttcagtcactcatcgatcgtaaagcaagccgttcattcacgcggcgtggttccatgatctacaccaagacacccaccagagaatcattg

SEQ ID NO: 158224 - DNA, 264 bp, Glycine max
aattaagcaccacaccactctccaatatccccaacatggctcaagtgggttctctatcttccgaaatggagacactgaatcatgtcctagccctagtggaggcattccgagcatttgacgcggacaacgatggccgaatcacgcaggcagagctaggaggaatcttggggtcactcgggtacaaccctagcgagcaagaagttagggcaatgattgaacacggcgacaagaacaaagacgggttgttgagcatccacgagttct

SEQ ID NO: 158225 - DNA, 102 bp, Glycine max
tcccaatacagggaggcttatcagttgggttgatagcattgatatatcctgaaatcctctactggggttttgagaatgttgacattttattagaatctcggc

SEQ ID NO: 158226 - DNA, 265 bp, Glycine max
gttgcgaagtcgtgcaactatcccagattatgcttataaggcaattgatgcattgcctgtttctgctcatccaatgactcaattcacaactggtgtcatggcccttcaggtgcagagtgagtttcagaaggcatatgagggtgggatagctaaggcaaggtattgggagccaacttatgaggatacaatgaatctaattgctcgtttgccagccattgctgcttatatttatcgacggaaatacaaggatggaaaaatcataccg

SEQ ID NO: 158227 - DNA, 265 bp, Glycine max
cgagcaaccatggcaatggcaacccaagcctctctcttaaccccacccctctccggtctcaaagccagcgaccgcgcctccgtgccatggaagcaaaactccagcctctccttctccagcccgaagcccctcaagttctccagaacaatcagagcagcagccgccgacgagaccacagaggcaccagcaaaagtagaggctgcaccggtcgggttcaccccaccagaacttgacccaaacaccccttccccgatcttcgggggca

SEQ ID NO: 158228 - DNA, 262 bp, Glycine max
cttgctgaggctgcagcaacaccaagataggaccccattttatccatctgtgttataaaccaccaactggacctgtcaatgtcaagttagcattagtcggaaaaggtttgacttttgatagtggtggctacaacatcaagacaggacctggctgtttgattgaacttatgaaatttgatatgggcggttctgctgcagtttttggagcagcaaaagctctaggtcagatcaacctcttggagtggaggttcattttatagtt

SEQ ID NO: 158229 - DNA, 261 bp, Glycine max
ctatttcctcttcttcatcacttgaatccaccaagtccttctcctcacacacataaaaacaaatatcctccacttcttctacccccagcagtagaacaagaggtgccggagcaagtttcgtcacgccggaacgatgaccggcggcggatccacggggaggttgccgacgtggaaggagagagagaacaacaagaggagagagagaagacgaagagcgattgcagctaagatctacactggccttcgagcccaggggaacta

SEQ ID NO: 158230 - DNA, 260 bp, Glycine max
agacaagccaagtgaaagagagaagataagtcaaagacaatgtcagggatcattcacaagattgaggagacccttcatgtgggaggccacaagaaggaggaggagcacaagggtgagcagcaccatggtggagaatacaaaggggagcatcatggtgaacacagtactgaatacaaaggagagcatcatgttggtgagcacaagccggagcaccatggaggagaagagcacaaagaggggttcctagacaagatcaagga

SEQ ID NO: 158231 - DNA, 261 bp, Glycine max; identical to SEQ ID NO: 115396

SEQ ID NO: 158232 - DNA, 263 bp, Glycine max
ggaaagatgatattgcagttcttcgtgctttcacagagaggcgataacatcgtctaccgcgactatcgtggtgaagctcaaaaaggaagcgctgagacatttttccgaaaagtaaagttctggaaagaagatgctgagggagatgctccacctgtttttaatatagacggtgtgaactacttccacgtaaaggttgctggattgctatttgttgctactactagagtcaatgtctccccttctcttgttttggaacttttaca

SEQ ID NO: 158233 - DNA, 264 bp, Glycine max
ctctaacatcatagtcctcagaggctgattggtgcatactaattgtagacaggctagtcttcctattatcacaaacaatgtctgacagtcaagaatctgacaagaacattgagatatggaagatcaagaaattgatcaaggctctggaagctgctcgaggtaatggtaccagcatgatttctctgataatgcctccacgcgatcaaatttcccgggtcactaagatgttgggagatgaatttggaactgcttcaaacatcaaaa

SEQ ID NO: 158234 - DNA, 262 bp, Glycine max
gtccacttttgaagtacagagaagaagaattgaagaatgtaagaggggatggaactggagagcgcaaggaatgggataggatctatgattatgatgtctacaatgacttgggcaacccggatagcggtgataaatatgcacgccccgttcttggtggttcagccttaccttaccctcgcagaggaagaaccggaagaggaaaaactagaaaagatcccaacagtgagaagccgagcgattttgtttaccttccaagagatga

SEQ ID NO: 158235 - DNA, 260 bp, Glycine max
agttgttgcagttaaaaagctcgtagttggaccttgggttgggtcgatcggtccgcctccggtgtgcaccggtcggctcgtcccttctgccggcgatgcgctcctgtccttaactggccgggtcgtgcctccggtgctgttactttgaagaaattagagtgctcaaagcaagcctacgctctgtatacattagcatgggataacaccacaggattctgatcctattgtgttggccttcgggatcggagtaatgattaaca

SEQ ID NO: 158236 - DNA, 262 bp, Glycine max
gtgaaagacgtcagaatgtacagtcaagacaagataatagctaatcatatcataaaggtccataaatcagctggtggaaggatgggagagagcagaactttgaaagaagagaattggctgaagaggtatttacaatattgtcgaactcaatgccaccctcgtctatctgaatcagcaacaacattattgcagaatcattatgtgaaaatcagacaggatatgagacaacaagcgaatgaaactggagaagctgcagcaatac

SEQ ID NO: 158237 - DNA, 263 bp, Glycine max
gttcattctctttgcgcagttccctacctctcctttcaagatgcagatcttcgtcaagaccctcaccggaaagaccatcacccttgaggtggaaagctctgacaccatcgacaacgtcaaggccaagatccaggacaaggaaggaattcccccggatcagcaacgtctcatcttcgccggaaagcagctcgaggacggccgtaccctcgccgactacaacatccagaaggagtcaacccttcaccttgtccttcgtctccgtg

SEQ ID NO: 158238 - DNA, 262 bp, Glycine max
attttataaagcattttcaagtttctctaacactgaaaaggaattgctccatcgcctatttcttcaggtcattacttcgttgcatgaaaacttagaggatgggtttgagacggtctgtcttcaaacacaggcaggagctactcttgatgctgtggaggaaattgtggaagaacaagatctggatgtcttattttcagataggagtaacataatggatgttgctgagaatctgtctatggcaaagaagaatgaaatccaacac

SEQ ID NO: 158239 - DNA, 259 bp, Glycine max
gtgagattcccatcaacagttctgactcacttgttcagagttatgagattcccagcaacagttctgactcacttgttcagagttatgatgtgattctaaaacccaatgtttcaatggacacatgcaatgtgtttgaaggaagttgggtgagggatgatagctaccctttgtatgatgcttctcactgcccttttgttgaaaggggtttcaattgccttgctaatgggagagcagatagagattacacaaaatggaggtg

SEQ ID NO: 158240 - DNA, 257 bp, Glycine max
gtaagctcccaagcagtgggaggaggctcgggactctgaccgcgtgcctgttgaagaatgagccggcgactcataggcagtggcttggttaagggaaaccaccggagccgtagcgaaagcgagtcttcacagggcaattgtcactgcttatggacccgaacctgggtgatctatccatgaccaggatgaagcttgggtgaaactaagtggaggtccgaaccgactgatgttgaagaatcagcggatgagttgtggtt

SEQ ID NO: 158241 - DNA, 263 bp, Glycine max
atgcaccccatatcagaaatacaaaggagagattccggtcaatgcctatatgttgtcccatacttcttcctttaccacatgccttggcattgcgcatgattttacaattgggtgttaaaccttcttggtttaacacttgcagtacaaccatagaaaagagacctcacttaattccaggaactccttcatctaaaggggatcttcgcacctacatgatcgacataccacctcttggcgactcagtggtgcctgagatgctctta

SEQ ID NO: 158242 - DNA, 261 bp, Glycine max
agcagtgggaggaggctcgggactctgaccgcgtgcctgttgaagaatgagccggcgactcataggcagtggcttggttaagggaaaccaccggagccgtagcgaaagcgagtcttcacagggcaattgtcactgcttatggacccgaacctgggtgatctatccatgaccaggatgaagcttgggtgaaactaagtggaggtccgaaccgactgatgttgaagaatcagcggatgagttgtggttaggggtgaaatgcca

SEQ ID NO: 158243 - DNA, 258 bp, Glycine max
ttcccctctcatcattttaatcacgcgcacatcagcacaacacaacaattcactaagctaaaatcacttcatcatggcttcctcgtgtgcttcctctgccattgcagctgttgccatctccacaccaagttcccagaagaatggatcactcttgggaagcacaaaagcttcttttcttagtgggaggaaactgaaggtgaacaactttacagcaccagttggagcacgatccagcactacagtttgcgcagttgctga

SEQ ID NO: 158244 - DNA, 256 bp, Glycine max
cgtgattccttggcggagtgcgagcgtgcaccgagccgcggcgagacaaaacgctgcgttgggtcgctcgaggacatgatcgactttgccacctctgttttgggccgaaacgtcgccgttcggactacccagaacgtgaacgggtccaagaagagtgtggtggtggggcccgttaggggaatcaacggtggtaaagtcacccaatccgtgtcgtgccaccagagcctgttcccttatctgctttactactgccacg

SEQ ID NO: 158245 - DNA, 257 bp, Glycine max
atgataccatggatgccaatggggaagctagattgattaatggttatggctcaaaacaagtttcacaattccttaatgcaaatatgaagaagcccaaggtggtttctggtgatgatgatttaccaaagagagatgatattggtgaaaggcgaaggaaacacgagcttcgggtgttggctggtgctggaattaggactgaggatgatgatggtgatgatcagatgactgatcttggacctaatgaggttaccgatgaa

SEQ ID NO: 158246 - DNA, 258 bp, Glycine max
atttccctacctctcccttcaagatgcagatcttcgtcaagaccctcaccggcaagaccatcacccttgaggtggaaagctctgacaccatcgacaacgtcaaggccaagatccaggacaaggaaggaatccccccggaccagcaacgtctcattttcgccggaaagcaacttgaggacggccgtacccttgctgactacaacattcagaaggagtgtactcttcacctcgtcctccgtctccgtggtggcatgcaga

SEQ ID NO: 158247 - DNA, 260 bp, Glycine max
aatggcggctctcagaaaagccgtgttctttgtaatcgctcaatgcttcaccttttccgcatatgctgcaaggtttgaaatcacaaaccgatgcacatacactgtctgggctgcgtctgtgcctgttggcggtggcgtgcaattaaacccgggccagtcatggtccgtggacgtgcctgcaggaacgaaaggggcccgcgtttggacccgaaccggctgcaacttcgacggttcgggccgcggtggatgccagaccggtg

SEQ ID NO: 158248 - DNA, 255 bp, Glycine max
gtgccagttggaggcttggcgtggaagcaaacaacgtagtcaagtggcaaactgttcctgcagcttgcggagagtacatagctgactacgttctaggagaccaatatagatcagattccaaaacagttaaccaacaagcttatttctatgctaaatccctcaaactcaccaacaaagatgtctttgtcttggacgttgacgacactactctctctaatctccagtattttgctaaccatggatttggtgtggaac

SEQ ID NO: 158249 - DNA, 254 bp, Glycine max
gcagcaggctgccacctttttgaattgtcagttgttggttcttcctttcaattacctgggaatacctattggggcaaaccctaggagaggcgactacttagtaggaaccagggtagagaagatgacaatattgagacaataaggaagcgatttaaggtctttcttggagtctagtcttcccgtgattaattattatgatgcaaagggaaaagttcgcaagattgatgctgcaaggcctatcgacgaggtatttg

SEQ ID NO: 158250 - DNA, 256 bp, Glycine max
gctggtattattgctcaagaagttgccggtgatgtccgtatgactgatacccgtgcagatgaagctgagcgtggtattaccatcaagtctacaggtatctcactctactatgaaatgactgatgaagctctcaagagttttaagggagagcgcaatgggaatgagtatcttatcaatctcattgactcccctgggcacgttgacttctcatctgaggttactgctgcactccgtattactgatggagctctagttg

SEQ ID NO: 158251 - DNA, 257 bp, Glycine max
gtcattcccgaaggcatcagcaagcatgcaaaccggagcaaatattttcttgctggtggaatagcaggaggtatttctcgtacagcaactgctcctcttgatcgtctgaaggtggtcttacaagttcaaagcgaacgtgcttctatcatgccagcagtaacaaggatatggaagcaagatggtctgttaggattttttcgaggtaatggattgaatgttgtgaaggtagcaccagaaagtgccatcaaattttatgc

SEQ ID NO: 158252 - DNA, 257 bp, Glycine max
gtcttcccttagtgcccgcgacatgccaccagacgacttgaacatgatgtctgatcttgatggccagcagcagcatcctttgaatgacttgagctgttacttacagccgcggcctggtgctggttctgtgagtagatctggtcggtccaagatcctaactccatcaaatcttgaagatctcttttctgctgagatttcttcatctccccggtattctgatccagcagcgggttccgtgttttcccctacgcacaaat

SEQ ID NO: 158253 - DNA, 260 bp, Glycine max
cgaggacgagaggaagtcgccggacatagaaattccccttgacgcgccgacgatgacgcacgacttcgcgatcacggagaatttcgtggtgatcccggaccagcaggtggtgttcaagctcggcgaaatgatcaaaggaggatcgccggtgatctacgacggcgagaagaaatcgcggttcggaatactgccaaagtacgcttccgacgcgtcgagcatcgtgtgggtggactcgccagacacgttcttcttccacttct

SEQ ID NO: 158254 - DNA, 264 bp, Glycine max
agtggtttcagtgagtgatcggtgttcacttgatccttcataagtcgtcatcatcatcatcatcatcaccgttgattgaagaagatgccgatcagaaacatcgccatcggaaggcctgaagaggctactacaccccgacacgttgaaggcggggttggctgagttcatctccaccttgatcttcgtgttcgccggttcaggttccggcatcgcctacaacaagctcaccgacaacggcgccgccactcccgccggctcatctcc

SEQ ID NO: 158255 - DNA, 255 bp, Glycine max
ttgagtcattccttgattcataccagtcaatgaagcccgcaaggatagtataaggataagatggccatcatggtatctaatccttcttcaagcgatcaaggaaggtgttaatttgaagggctattatgcatggtcattttcggacagttttgaatgggatgctggttacacagttcgattcgggctcatatatgtggattacaagaacaacttgaaaagataccccaagttctctgctttttggttgaaaagttc

SEQ ID NO: 158256 - DNA, 254 bp, Glycine max
cactacctctgcatttttctctcgctctctgccttccatcaccctcgccatttcccttcccaagatagtagaagatggcagacgctgaggatattcaacctcttgtttgtgacaatggaacaggaatggttaaggctggttttgctggagatgatgccccacgtgctgtgtttcccagcattgtaggtcgtcctcgtcacactggtgtgatggttggcatgggccaaaaagatgcatatgttggtgagaggcac

SEQ ID NO: 158257 - DNA, 251 bp, Glycine max
ataacatctcaatgggttttcttctattacaacatcgcccgcaaccatgaccatggctgcgatcgtgctcctgttcacggtctttgccgtttcctccgccctagacatgtcgataatctcgtacgacagcgcccacgcggacaaggccgccacgatgcgcaccgaggaggagctgatgtccatgtacgagcagtggctcgtgaagcacgggaaggtgtacaacgcgctcggcgagaaggagaaggcttcca

SEQ ID NO: 158258 - DNA, 254 bp, Glycine max
cattttagaagaatacccctcttttgctgcatcagaggagttgtaaattaagagcatggctgcacaagctcttgtatcatcatcttctcttaccttctcagcggaggctgcaagacaaagtcttggaccaagatcactccaatctccatttggcttctccagaaaagcctcctttcttgttaaggcagctgctaccccccctgtcaagcaaggatcagacagacctttgtggtttgcatcaaagcaagtctttc

SEQ ID NO: 158259 - DNA, 254 bp, Glycine max
accgaatctaagagagccgatgccaaacttgctgtgaataagaagggcgccgccaccaagactaggaaacccgccggaaaggggaaggcagcgaaagatcctaacaagccaaagaggcctccaagtgctttcttcgttttcatggaggaattcaggaaggtgttcaacaaggaacatcccgacaacaaagcagtgtctgctgtgggcaaagctgctggagcaaaatggaagacgatgtctgatgcgaaaaagca

SEQ ID NO: 158260 - DNA, 254 bp, Glycine max
tgctgttcaaatacagtggtgcctcagctgctctcactgtagacccttcactccacttgtcaagagcttctagcattgtgatgttgattgcatatgtagtctacattgtctttcaactgtggacacacaggcagttatttgaagccgaagatgagggtgaggatggtgaggacggtgaagaagaacaagctgtgattggattatggagtggcattgcttggttggtagggatgactgtgttcattgctgtgttg

SEQ ID NO: 158261 - DNA, 267 bp, Glycine max
ggctcgagaaaacccttagccaacacaacatcatggccacctctgctattcagcaatcagcattcactggtcaaactgctctgaagcagctcaatgagttcgtccgcaagaccggtggcgccggcaaaggtcgcactaacatgcgccgcaccgtcaagagtgctcctcagagcatttggtatggccctgaccgtcccaagtacttgggtccattctcggagcagattccatcatacctgaccggagaattccctggtgatacggatg

SEQ ID NO: 158262 - DNA, 254 bp, Glycine max
gtcttctttctttttttcatttccaaatcacgaaactcaagaagatggagaaagcgatcaacagacagaagattttgcttcatcatctcaacccttcatcatccacccaccccaacgaatcatcctccctccatgcttcagcatgtgtggcgggggatagcgctgcttatcaaaggacatcgacattcggggacgatgttgtgatcgtggctgcttatcggactgctcattgcaaagctaaacgaggggtttca

SEQ ID NO: 158263 - DNA, 255 bp, Glycine max
ccttcgttcactcttctttcttgcggctagggttttagcgcacttcttctagatttaaggaagatgggtaaggaaaaggttcacatcagtattgtggttattggccatgttgactctgggaagtccactaccactggccacctgatctacaagcttggaggcattgacaagcgtgttattgagagatttgagaaggaagctgctgagatgaacaagaggtctttcaagtatgcctgggtgcttgatagcttaagg

SEQ ID NO: 158264 - DNA, 252 bp, Glycine max
atgtttttcaccaatttgtctaaggaagaagttgaaaggctgtttaaagaatttgaggaatatgactttgcaagaacaggaagcattgccactgaaaaggtggatctcaaagagggtcctttagagcaattcactcatgagatggaaccctttctcaggaagcaaggcatgcctgttcggttaaataaaggagttgtggagcttgtttcggattttgttgtttgcgacgaaggaaagcctttgtcacagagg

SEQ ID NO: 158265 - DNA, 253 bp, Glycine max
gttcaactgagggtgagagtgacacaaatctagggagcactactctaaaagttctattagattcttcaaaacatgaccatgcatcgcgagtcttgggcttttgtcttcggcgttatgggcaacatcatctcctttggagtgttccttgctccattgccaaccttttaccaaatctacaagaagaaatccactgaagggttccagtcacttccttatgttgttgcactgttcagtgcaatgctttgatttacta

SEQ ID NO: 158266 - DNA, 255 bp, Glycine max
cttcttcttcccacgctcctccttctcatacccttcgccaccctcgtctccgcccgccctcacctcgccggagactttctccgactgccctccgaaaccgataacgatgacaacgtccagggcacccgctgggccgtcctcctcgccggttccaatggctactggaattacagacatcaggtccatctcatacacatgacacttcaatttttatatctttgatttcttaaataagttctggggttcaatcttgta

SEQ ID NO: 158267 - DNA, 252 bp, Glycine max
ggggaacagacacagtttgcgagtgaacacaagttacaacaatggctttctttggtagaattgggaatttgttacgacagacagcgagcaggcaggttagttcaaaattgcgttcgcccccttcattttttcaggctatacgctgtatgtcatctgccccaagcacaaaactgtttattggaggtgtttcatattctactgacgagcaaagcttgagggaagctttttcaaaatatggtgaagtgttgatgc

SEQ ID NO: 158268 - DNA, 249 bp, Glycine max
gattgaagaagtgcatttcgtcctctaacactcttccaaatcatggctagctcactgcttgtgagggttgccagctgcatggttgtggtgtggatgtttagttttgggcacataattcccttggcagaagctgaaattccatgtggcagggtgcaaatcactgtggctccatgcatagggtacctaaggggtcctggtggaggtgtccctgcaccatgctgcaatggggttaagagcataacaaccaag

SEQ ID NO: 158269 - DNA, 251 bp, Glycine max
cttcgaacttgaaatcgacgcgataatggagcagatgaagcagcacctcgccaccgactcaggcaaacaagtcaccaaaaaaattggactcgtttatcagattcaaattgctcctaagaaacttggaatcgacgaggtcgtctacaccgttgatctcaggaaaggagaggtcaccaaagggccatatgaaggaggaaagcctgatgcatctttttcatttaaggacgaggactttgttaaggtgccttggg

SEQ ID NO: 158270 - DNA, 252 bp, Glycine max
gtctgaacccattcctgaagctaacgatgaacctgttaaagtggtagttgggaacagtcttgaggacattgttttcaaatctgggaagaatgttctgctggagttttatgctccctggtgtggtcattgcaaacagttggctccaatattggacgaattgctatctcatatcaaagtgatgctgatgttgttattgcaaaactggatgcaactgccaacgatatcccaagtgaaacctttgatgtccaggtt

SEQ ID NO: 158271 - DNA, 252 bp, Glycine max
gtcatggcatctcaactgctgaggcaaagaaggacaagagggaaactgggttggccattcctaaggatttggattctgcattggctattcctggagttggaagaagcagagatcaacatccacatgtgtatagggtttctcctgaacagaggaaggctcttggctctggttcaaccaaagctttgaaggaccatatgaagtcctctgcaactgatggtaaaatgcaacagtggttccgtgaagtcttgcagg

SEQ ID NO: 158272 - DNA, 252 bp, Glycine max
ctaggagacagatcactctggttggttgccacattttggggtaccaagacaccttgtacgtccagaccaacaggcaattctaccgcaactgcgtgatctctggcacagtggacttcatctttggcacctcccccaccgtgatccagcactcagtgatcatcgtgaggaagcccttggacaaccagttcaacacgatcaccgccgacggaacatccatgaagaacatggatacaggaatcgtgaccagggttg

SEQ ID NO: 158273 - DNA, 250 bp, Glycine max
cttcggcacctcctcaccgtgatccagcactccgttatcatcgtgaggaagcccctggacaaccagttcaacacagtcaccgccgacggaacatcccagaagaacatggctacaggaatcgtgatccagggttgcaacatcgtcccagaagccgaacttttccctacaaggttccaagtgaagtcataccttggaaggccatggaagcaattctcaaggacggttgtgatggaatccaccgtggtgactt

SEQ ID NO: 158274 - DNA, 249 bp, Glycine max
ggagcaacctctttccttttcactgagtataagtacgtgggaatcttcatggtggcttttgccattttgatattcctcttccttggctctgtggaaggattcagcacaagctaccagccttgcacctatgaccaaactaaaatgtgtaagccagctcttgccactgctgttttcagcaccatatctttcctgcttggaggtgtcacatcgcttatttctggattccttggaatgaaaattcaacttatg

SEQ ID NO: 158275 - DNA, 247 bp, Glycine max
gtcgaagagaggagcggtggttcggcggggaacaagttccggatgtcgctgggtctgccggtggcggcgacggtgaactgcgccgacaatacgggggcgaagaacctctacatcatatcggtgaaagggatcaaagggcgtttgaaccgtctcccctcggcttgcgttggcgacatggtgatggccaccgtgaagaaggggaaacccgatctgaggaagaaggttttgccagctgtcatgttcgcca

SEQ ID NO: 158276 - DNA, 253 bp, Glycine max
ctaatccaattcagacacgaaaaaaccaactacatcagctcatggcaacccccaaccccaccagattctcccttgccatggagagaaccgggcaatgggttttctccccagaaatccccaccgatgttattgttgcagttggacaaaccaatttttctctccacaagtttattctggcggcgaagagtaactacgtcagaaaagtgataatggaatcagaggagagtgacctaacaagaatagagtttccgac

SEQ ID NO: 158277 - DNA, 252 bp, Glycine max
gctaaaatcacttcatcatggcttcctcgtgtgcttcctctgccattgcagctgttgccatctccacaccaagttcccagaagaatggatcactcttgggaagcacaaaagcttcttttcttagtgggaggaaactgaaggtgaacaactttacagcaccagttggagcacgatccagcactacagtttgcgcagttgctgagcctgataggcctctgtggttcccaggcagcacccctcctccaggctaga

SEQ ID NO: 158278 - DNA, 252 bp, Glycine max
ctcaaccatcgaattgttggtgattgaaagagaaggaagaagaagcaggaaatggaagcagtgagagctggtcgagaaggagcaataggtctaggtcaaggtgatggcgtagccaaggacagcactgagactgaactcaccaaaatccgtctcctcagggcaattgttgaaacccgtgatccctcttccaaggaagaggatgattttatgattagaagattcctgcgtgctcgtgatttagattagagaagg

SEQ ID NO: 158279 - DNA, 248 bp, Glycine max
gttaattaaaggttttatgcctatactgaactcactttaatgaacatcttgtagaatgtagattattaaactatatttttaattcaattgctactgctggcattgtactcatgtgtttaaatatttttgtagtgtattggagccacaacattagacgagtataggaagcacattgaaaaagatcctgctttggagagacgattccagccagttaaagtgccagagccaactgtagatgaaccatacaa

SEQ ID NO: 158280 - DNA, 250 bp, Glycine max
ctaaaacatctccagtgggttcttcttcttctattacaacaacgtcgtccaagaccatgaccatggccatggccacgatcctgctcctgttcacggtcttcgcggtttcatcggccctagacatgtcgataatctcgtacgacaacgcccacgccgccacgtcgcgcacgagagcgagctgatgtccatgtacgagcagtggctagtaaagcacggcaaggtgtacaacgcgctcggagagaggagaaga

SEQ ID NO: 158281 - DNA, 253 bp, Glycine max
ctcgtgcgaaaatgcgtgagattcttcacatacagggagggcaatgcggaaaccagatcggagcgaagttctgggaggtggtgtgcgcggacacgggatcgattccacggggaggtaccagggggacaacgagttgcaactcgagcgagtcaacgtctattacaatgaagcgagttgcggaaggttcgtgccgagggcggtgctcatggatctagagccagggaccatggacagcgtcagatctgtccctacg

SEQ ID NO: 158282 - DNA, 246 bp, Glycine max
tgcatgaataatctgatcttggtgggtggacacgtattgttgttgagaagccttttggtaaggatctggaatctgcagagcaactcagtacccagattggacagttgtttgaagaaccccagatttatcgaattgatcactacttaggaaaggaacttgtgcagaatatgttagtacttcgttttgcaaaccgattattcatgcctctatggaaccgtgacaacattgctaatgtgcgatcgtttt

SEQ ID NO: 158283 - DNA, 247 bp, Glycine max
gccgtagcagcggaagctctagcttgggtagcgaatcacaatggcgagaggattaaagaagcatctgaagaggcttaatgccccaaagcattggatgcttgacaaactgggtggtgcatttgctcctaagccctcatctggaccacacaaatcgagggaatgcctgccactcatactcattttgcgaaaccggctgaagtatgctctaacataccgtgaagtcattgctattctgatgagcgacatg

SEQ ID NO: 158284 - DNA, 246 bp, Glycine max
aaagtaactgattttggtcttagtgctttaccccagcatcttagggaagatggactgctgcatacaacttgtggaagtcccaattatgtagcaccagaggttcttgctaacaagggctatgatggtgcaacatcagatacatggtcatgtggtgttatattgtatgtaagcctaacaggatacttaccttttgatgatagaaatcttgtagttctctatcagaaggtatattcatatttgcctcta

SEQ ID NO: 158285 - DNA, 247 bp, Glycine max
cagaaagaggaacgaagcaatggcgccgaagaagccccgaaccacgtcgaggaaccctgatttggtcaggggaattggcaaatattcgaggtcgcagatgtaccacaagaggggcatctgggccatcaaggccaaaaacggcggtgttttgcccctccacgatcccaagcccaaacccgaggccccggcccagaagccgcccaagttctacccggccgatgacgtgaagaagcccctcgcaacaagc

SEQ ID NO: 158286 - DNA, 249 bp, Glycine max
cctacctctccttcaaggttcgtagatttcttctgtttttttttcttcttctttattgtttgttctacatcagcatgatgttgatttgattgtgttttctatcgtttcatcgattataaattttcataatcagaagattcagcttttattaatgcaagaacgtccttaattgatgattttataaccgtaaattaggtctaattagagtttttttcataaagattttcagatccgtttacaacagcctta

SEQ ID NO: 158287 - DNA, 247 bp, Glycine max
ggaggagggaacttggagattggaatggaatacagaactgtttctggagttgctgggccattggtcattcttgataaagttaagggacccaagtttcaagagattgttaacattcgcttaggagatggtactactcggcgtggacaagtgctagaagttgatggtgaaaaggctgttgttcaggtctttgagggtacatctgggattgacaataaatttacaactgtgcaatttactggaaggtgtt

SEQ ID NO: 158288 - DNA, 268 bp, Glycine max
acacaccttgttttcctttctatagagacacacagagagagcaataaacacccttcaatggctaccactaccactaaagtttacattgtttactattctatgtacggacatgttgagaagctagctgaagagattaaaaaaggagctgcttctgttgaaggagtagaagcaaagctatggcaggtacctgaaacactgcctcaagaggtccttgggaaaatgggagcacctccaaagagtgatgtaccaattattacacccaatgagc

SEQ ID NO: 158289 - DNA, 170 bp, Glycine max
attgaaggctctacaggttctaggatttggtgagtacattgaagaagtttatgcagcatatgaacagcacaaactggagaccatggactctttaagagggggtggtggtggtggtaaatggaacaatggcagctgagatcgactcgaggaagatagcatatagcagacgc

SEQ ID NO: 158290 - DNA, 263 bp, Glycine max
atttcagatgaccagcaagacatcacaagaggaaagggtatggttgattccctcttccaagctccacaggagactggaactcactatgcagtcatgagctcttttgagtaccttagcactggacttaaacagtataacttggataacaacatggacggtttttacattgctcctgcttatatggacaagcttgttgttcacatcaccaagaacttcatgaccctgcctaacatcaaggttcctctcattcttggtatttgggg

SEQ ID NO: 158291 - DNA, 254 bp, Glycine max
aaaaacactcaatcaacacacatgattgaagtgcaagcaaatgccatggagcagagttggtgggccaatatgcctcacgagcttctcagagaggtcctcctccgaattgaatcgtcggagtccacgtggccgctgcggaggagcgtcgtggcttgtggcggagtgtgccgcacctggaggaggctcatcgtcaaggagattgtcaagccacctcaattctcttccaacataaccttccccatctctctcaaaca

SEQ ID NO: 158292 - DNA, 252 bp, Glycine max
aagaggggcagtagccgagattccgtgagttgcaaaaatgaagacgattctttccaccgagaccatgaacatcccggacggcgtgagcatcaaagttcatgccaaggtcatcgaagttgagggcccccgcggaaaattggtgcgagacttcaagcatttgaatctcgattttcagctcattactgacgaaaacggtaaaagaaagctgaaaatcgacgcgtggtttggttctcggaaaacatccgccgccat

SEQ ID NO: 158293 - DNA, 251 bp, Glycine max
gaaaacattcttgtggggtaggtactctttggaaatgtctgctgttatttacaaggattgggttttcaccgatcaagcattgcctaatgatcttgtcaagagaggagttgctgttaaggatccatctgctccccatggagttcgacttttgatcgaggactatccttatgcttctgatgggctagagatatgggatgctatcaagtcttgggtggaagaatatgtctcattctactacaagtcagatgagg

SEQ ID NO: 158294 - DNA, 264 bp, Glycine max
ctgagcttcgggggaagagatccagcagcaatggtgtacgtcaaggctcagaaatcaaaagcctacttcaagagatatcaagtcaagttcaagagaagaagagagggaaaaaccgattaccgtgccaggattcggttgattaatcaggacaagaacaaatataacactccgaaataccgatttgtggttcgctttagcaacaaggacattgttgcacaggtaatatctgcgagcattgccggcgatttagttcttgctacagca

SEQ ID NO: 158295 - DNA, 260 bp, Glycine max
gctagaaataagggtatgaaagcttcggagcaggattactttgaacagctttcaagctcattcaggtgcttagtggatttgatcccagctgaaaaatgtaagtttgatggggtgaacgacaaagtggtagtggatgcagctaatggggttggtggagtgaaacttaaatatttagggaaattgttgaatggtttgattattgaggttcggaacagcagtgaagatggaggtgtactgaatgatggagttggtgctgatta

SEQ ID NO: 158296 - DNA, 258 bp, Glycine max
gtgcttcaccgccttcaccacctctaccgccaccacgtccggcgccggaggtgcggacatagcttctccggctaccagatccggcatctccgcgcgtccactgaagagatcttttcccgaggaactctcgccgccggcggatcctccgtcttcagaccagacgaccccgtcggaggcgaacgcgctggtgaaccgctgctccggctgcaggagtaatgtcggactcaccggatttcggtgcagatgcggcgagctctt

SEQ ID NO: 158297 - DNA, 257 bp, Glycine max
ctcgagcgaatcggctcaggcgacacgtatcttcatcaaaaatcgcagaagcagattccggtgcatctcatcgacttccaaaatgaacgacgcagatgtctcgaagcaaatccagcagatggtgcgtttcatccgccaggaagctgaggagaaagccaacgagatctctgtatctgccgaagaggaattcaatatcgagaagctgcagttggttgaagccgaaaagaagaagatcaggcaagaatacgaacgcaaag

SEQ ID NO: 158298 - DNA, 255 bp, Glycine max
aaagtcaataaggattccagagctttatattgaggttcctgaaacttcaactgttggttcactaaagaggactatcgtggaggcagtgatggctatacttggaggtggtgcacatgttggtgttcttcttcaggggaaaaaagttagagatgacaatagaacacttgtgcagactggtatatcttgcaatgaaaatttggataccctgagttcatgttggagcccacttcactacaagcttctccaactgtttgt

SEQ ID NO: 158299 - DNA, 254 bp, Glycine max
ccaaatcccaactactactcacactcactgcagatctcaatccatggctaccattgttagcatcaaggcccgccagatctttgacagtcgtggcaatccaaccgtcgaggtggatttgacatgctccgatggtacttttgctagagctgctgttccaagtggtgcatccactgggatttatgaggcccttgaattgagagatggaggatctgactaccttggaaagggtgtatcaaaggctgttgacaatgtga

SEQ ID NO: 158300 - DNA, 252 bp, Glycine max
cttcatcgttcgattcttctcctcctaaagatgcagatcttcgtgaaaactttgaccggtaagaccatcacccttgaggtggagtcctccgacaccatcgataacgtgaaagctaagattcaagacaaggaagggatcccacctgaccagcagagacttatctttgcgggtaaacagcttgaggatggtcgaacccttgccgactacaacatccaaaaggaatccactctccacctcgtgcttcgcctcagg

SEQ ID NO: 158301 - DNA, 247 bp, Glycine max
ggctcgagggccattgagagatagccccgatgaaatgatggcagccttataccttcaagtcagcataattagccaggctctaatcttcgtcacaaggtcccgcagctggtcttttgttgaaagacctggtcttctcctactaggtgcattttttattgctcagttggtggcaacttttatagcagtgtatgctaactggggctttgcaagaataaagggaatgggatggggttgggctggtgtaatc

SEQ ID NO: 158302 - DNA, 257 bp, Glycine max
gtttgttgatcgagataactagaaacagtgtgatgaaaatgaaggtccttgttttcttcgttgctacaattttggtagcatggcaatgccatgcgtacgatatgttccctctccgaatgaacactggctatggtgcccgtactccggaggtgaaatgcgcaagttggaggcttgctgtggaagcacacaacatctttggctttgagaccattcctgaagagtgcgttgaagcaacaaaggaatacatccatggcgaa

SEQ ID NO: 158303 - DNA, 254 bp, Glycine max
gtcgacggcgaatcgtggaagttccagcgcaagatggcgagtctcgaactcggcagcgtggcgattcggacgtacgcgatggaattagtcaacgaggagatccacgcgcgactgatcccgatcatggaatcaaccgcgcgtggcgaattaaactccgtctgcgttttggatttgcaagatatactacgaagattctcgttcgacaacatatgcaaattctcgttcgggctcgacccgggttgtctcctaccgaa

SEQ ID NO: 158304 - DNA, 253 bp, Glycine max
ttttacttcccctatggctcgtcactccttgctcttagccctcctcctcttcgccgccgtggccaccgccgcgatggcggtgccgcgtccgacgccgacgacatcctgatccgtcaggtggtgccagatgttggcgaagccgaagaggaggacaacctgctgaacgccgagcaccacttcgcgagcttcacggccaagttcgccaagacctacgccaccaaggaggagcacgatcatcgcttcggcgtcttca

SEQ ID NO: 158305 - DNA, 246 bp, Glycine max
actgaattaaaatctgttccaattcattcaattgatcttcagttgtttcgagttgagtccattcttctcggggagaaaattgtgaccgaaacctctctggttcaaacaacacagatagcagatggagatgtgtgccgcaatatgacgctgcctatttatgtaatagtaccgcgccttttgacctgtccaacaactttagctggtcccttctcagttgagttcaaagttgccattgttataagcttc

SEQ ID NO: 158306 - DNA, 247 bp, Glycine max
ctcgagccgctcgagccgattcggctcgagtggaaaacactaagaagcttatagaagacactcaaaactagcttagaaaagatagaaaaagatgcgcttcaagcaaaagaagaggctgaacgtgtgattctcaaaattgaagagatggagcaggacattgtaagtgaagctagtattgaagccaaggcacaacttgaggctgaaaaagccatgcttacagaagcgctttcggagtctgaattcgtta

SEQ ID NO: 158307 - DNA, 245 bp, Glycine max
ctgcaattcactctgtacaattcttcgttcgttctctgcagttatatcctttttgagcttcaatggcggacgctgaaaccttcgctttccaggctgagatcaaccagcttctaagtctcatcatcaacacattctacagcaacaaggagattttcttgcgtgaactcatcagcaatgcttctgatgctttggataagattcgattcgagagcttaaccgacaagagcaagctcgatgctcagcca

SEQ ID NO: 158308 - DNA, 250 bp, Glycine max
ggcagaggttgggaaggccccacggccgggccagggcggttacgaagcgcacggcctgagcgaggaggaggctcgtgtacgcgccatcgcggagatcgtgagttccatggtggacctctcccacaaaggccagaacgtggacctgaacgcgctcaagtccgcggcgtgccgcaagtaccggctctcacgcgcgccgaagctcgtggagatgatcgctgcgctccccgacgccgagcgcgagacgctcctc

SEQ ID NO: 158309 - DNA, 257 bp, Glycine max
aaaaaatgaaatgaatcatttcatattgatagtattgctatgcttagtgtgcgactcgttagttttttagaacggttccaatttaacaaatttataaaccggttcatcgtataaatgaattaaaaaagaactaataaccaacgcatcgcttcggattatctagatctaaagaactagtcaaaacaaaaaaaaatataaaaaaagatatattatagcaactgaactattgtgaagcataaaagaacaaaaatcttatt

SEQ ID NO: 158310 - DNA, 256 bp, Glycine max
ccagactgagaggaagagagagggagattctttgtttgctaccttctctcggaaaaatggttacgttcaggtttcaccagtaccaggtggttgggagggctcttcccacggaagcagatcagcaccccaagatctaccgaatgaagctctgggccaccaacgaggttcgcgccaagtccaagttctggtattttctgaggaaactgaaaaaggtgaagaagagcaatggccaagtgcttgccatcaacgagatttt

SEQ ID NO: 158311 - DNA, 253 bp, Glycine max
aaagaaggcgtcttcataaacgcctttcttctccgtttccgtttcctcgttcgaattcgctttttgatctgcgaaaatgagagagtgcatctcgatccacattggtcaggctggtatccaggtcggaaatgcttgctgggagctctactgcctcgagcacggcatcgggcccgatgggcaaatgccaagtgacaagacagttggcggtggtgatgatgctttcaatactttcttcagcgagactggtgctgga

SEQ ID NO: 158312 - DNA, 252 bp, Glycine max
ggagaaaggagagctgtcatcacatggacttgtctttctcttactctgacggggtccttccttttcttcttctccttcatattttctctctcaccattctcttcttcttctccctttcttagattctccctcttttctctctgccctccgccatgactgaggataaggagatgtcttcctctgtcaccaatggcgatgattccctcactggtcacatcatatctacaactattggaggcaaaaatggggaac

SEQ ID NO: 158313 - DNA, 246 bp, Glycine max
gccagatagctggaagctagcagagatatttactactggagttgtgcttggaagttacttggcaatgatgacagttatattcttttgggcggcatacaaaacaaactttttcccgcgagtgtttggagtcccaagtcttgaaaaaactgctcatgatgattaccggaaacttgcctctgcaatctatcttcaagtgagcactattagtcaggctcttatatttgtaactcgatctcgaggttggtc

SEQ ID NO: 158314 - DNA, 192 bp, Glycine max
gttgtacacaaaaatagtccaagagggacccattttcgtcgtgctgggcctgctcagaaggtatattttgattcagaggaagtacacgcttgtattgtcacgtgcggtggactttgtcctggtctaaatacagtgataagagaaatagtatgcggcttatatcatatgtatggggtgcacaaagttttggga

SEQ ID NO: 158315 - DNA, 248 bp, Glycine max
tgaagagctctttactcaaccgtatgaaaaggttaattggaagaaagcacgtaaccaatgtgcaaaggaagatcgttatcatcctcattctttgatacaagacctggtatgggatagtttatacatatttattgagccactacttactcggtggcctttcaacaagctagtaagagaaaaggcccttcaggtaacaatgaagcatatcctttacgaagatgaaaatagtcgatacataaccattgggt

SEQ ID NO: 158316 - DNA, 149 bp, Glycine max
aaacaaccttctttctttttctgtgagcctttctttcaggttcttaacttgatcagtgtgcagtgtccaaatcataagggtagttgcaaattgcaatggctaagcatgatgttgagggtggttccttctctgcaaaggactaccatgat

SEQ ID NO: 158317 - DNA, 248 bp, Glycine max
tcttcacctttaagttaaatagtttttcattgtttcatttaatctacaatggctgcttcaacaatggctctctcttcatcatcattggctggccaagctatcaagcttgccccctccacccctcagcttggtgttggaagggttagcatgaggaaaacagcctccaagactgtttcttctggaagcccatggtacggcccagaccgtgtcaagtacttgggcccattctctggtgagcccccatccta

SEQ ID NO: 158318 - DNA, 245 bp, Glycine max
cctaggtagagagctcttcctcactctcattcgcaatggccgcagcagcacgtcctctcgtcaccgtgcaggccctcgacagtgacatggccaccgacgcctccgccaccgtccctatccctgacgtcatgaagtcctccatccgcccggacatcgtcaacttcgtacactccaacatctccaagaacagccgacaaccctatgcagtcagccgccgcgctggccaccagacttccgccgagtcc

SEQ ID NO: 158319 - DNA, 238 bp, Glycine max
caaaacactcataacacaaagcacaaagcaaagctcatccttgagttaaaaaatggcagcagcttcttccatggctctctcatccccatccttggctggcaaggccgtgaagctgggcccatcagccccagaagtgggaagggtgagcatgaggaagaccgtcaccaagcaggtctcctcaggaagcccatggtacggcccagaccgagtcaagtacttgggcccattctctggcgag

SEQ ID NO: 158320 - DNA, 243 bp, Glycine max
acccaatccaatcctcgcacacatgcatgctgtctctgccaaagttggggccaagtcataactacatttccattgttacgattctttctttccatcccaaccacttattaagcgtctgatccaatttctttctctcaccatggatcatcgcaaaccattgttacccacttcctctgacgatgctccaaatccacgcactcggaaggaccttgttctaatgatttgcggtttgctcttgctctc

SEQ ID NO: 158321 - DNA, 245 bp, Glycine max
atctctcttcccagttctcacctcaccgctgcatcttcacgtcgtctctaacgagggaaaatgagtcgaggaggtgcagcagcagcgaagggaaagaagaagggtgctacattcaccattgactgtgcaaagccagtagaagacaagatcatggacattgcttctctcgagaagtttcttcaagagaggatcaaggttggtggcaaagctggtgctcttggtgactctgttaccgttacacgtga

SEQ ID NO: 158322 - DNA, 249 bp, Glycine max
ccttcaagtccaagtgattcaatcaaaccgttcatgcttaatcaagttgggaacaacaaaaaaaatcaaaacaatgtttctgggtttcggtttcatttcatcaagatgatctgtttatcttttttttttaattttaatttaaagtctttgtattttgtatgtaaagatgtaaaattatgattattaggtggtgcatgtgttgcgtcatgggccaatgttatcctctgcttttatattggaagaggccca

SEQ ID NO: 158323 - DNA, 244 bp, Glycine max
aacaacagcaacgaagaattcgaagagaaatcaaatcgaatctcatttgatctgtgtgtggttgcggcggcggcaatggcggagcgcttggcatcgatattcgggacggagaaggacagggtgaactgcccgttctacttcaagatcggcgcgtgcaggcacggcgaccggtgctcgcgtctccacacgaagccgagcataagccccactattctcctctccaacatgtaccagcgccctgaca

SEQ ID NO: 158324 - DNA, 242 bp, Glycine max
cagaaatttaagtgaggagctagagaatgatgatgtagtctgctatgtgtgcagtggtggttgtagcacttcttcttctggcggatgtggggcccattgctgaggctgtgacatgcaccccaacagagttgagtccgtgtcttccagcaatcacttccggtgctaaaccttccaatgcttgttgcacgaagctgaagcagcaaaaaccatgcttatgtggctacctcaaaaacgctagcttg

SEQ ID NO: 158325 - DNA, 239 bp, Glycine max
ggagttgctgttaaggatccatctgctccccatggagttcgacttttgatcgaggactatccttatgcttctgatgggctagagatatgggatgctatcaagtcttgggtggaagaatatgtctcattctactacaagtcagatgaggaacttcaaaaagaccccgagctccaagcttggtggaaagaacttgtagaggtgggtcatggggatttgaaggataagccatggtggcaaaa

SEQ ID NO: 158326 - DNA, 238 bp, Glycine max
caaccagtgagtggagttttggatcttctgtcaaaaacaaccgaaggtgctaatgctatgagaatgaaaattgcatctgctataacatctgatgaacaacttctcaggaggagactgcctcgtgttataggtggtgataatctgctaaaactatacgatgagtacaaagctcaaggacaggtcatactgcagttggcagaatcaggttcattttttggtcaggttgatctgttcaagg

SEQ ID NO: 158327 - DNA, 238 bp, Glycine max
gggaaactaggagatatggtgttattgaatgtgatcctctggtgcaaaatggccttgaaaagtctgcaaggcacatggtcatcccctatatgccaatgttggtgccacctataaactggacagggtatgacaaaggagcatacttgtttttgccatcgtatgttatgagagtacatggagcaaagcagcaacgtgaagcagttaagagggctcccaagagtcaacttgatcctgtttt

SEQ ID NO: 158328 - DNA, 240 bp, Glycine max
ctcgtccttcatggggacgcgcctcctggaggcccactccggggcggggcgggtgcaggcccggttcgggtttggcaagaagaaagccgccgccccgaagaaagtttccagggggtcgggctctagctccgataggcccctgtggtatccgggcgccaaggcgcccgagtacctggatgggagccttgtcggagactacggattcgacccatttgggctagggaagcccgccgagtacct

SEQ ID NO: 158329 - DNA, 259 bp, Glycine max
gagataactagaaacagtgtgatgaaaatgaaggtccttgttttcttcgttgctacaattttggtagcatggcaatgccatgcgtacgatatgttccctctccgaatgaacactggctatggtgcccgtactccggaggtgaaatgcgcaagttggaggcttgctgtggaagcacacaacatctttggctttgagaccattcctgaagagtgcgttgaagcaacaaaggaatacatccatggcgaacaatatagatcag

SEQ ID NO: 158330 - DNA, 266 bp, Glycine max
gcggctgtagactcggtttaagtgaggagctagagaatgatgatgaagtctgctatgtgtgcagtggtggttgtagcacttcttcttctggcggaggtggggcccatggctgacgctgtgacatggaccccaacagagttgagtccgtgtcttccagcaatcacttccggtgctaaaccttccaatgcttgttgcacgaagctgaagcagcaaaaaccatgcttatgtggctacctcaaaaacgctagcttgaagcagtatgttaa

SEQ ID NO: 158331 - DNA, 242 bp, Glycine max
cctcaaagcaacacaagaacactctcttgaacattcatggatccagtgagcgtgtggggtaacacgcccttggcgacggtggatcccgagatccatgacctcatcgagaaggagaagcaccgccaatgccgcggcatcgagctcatcgcctccgagaacttcacctccttcgcagtcatcgaggccctcggcagcgccctcaccaacaaatactccgagggcatgcccggcaaccgctacta

SEQ ID NO: 158332 - DNA, 251 bp, Glycine max
atctcgagcgaatcggctcgagtgaataaagtgacaagaagactacctaaaattcccgaagaagtcagggcagagataagctcttattttgtggattctgctccagttgtgccagaggataacagaaaactaaccaaacttgatgattcagctaatttcattcgcactggtttaagtcccagatggcatgatctagatgtgaatcagcatgttaacaatgtgaagtatgttgggtggattctggagagtgc

SEQ ID NO: 158333 - DNA, 254 bp, Glycine max
gttctttcccttggtgacaaaccaagactaacacacacagaacatagcttgtgttggtgaggtgagaagataaagaaagaatggcatttgcaggaacaacacagaagtgtatggcctgtgacaaaaccgtttatctggttgataagttgaccgcggataaccgagttttccacaaagcttgcttcagatgccatcactgcaaaggaaccctcaagctgagcaactacaactcttttgagggagttctttattgt

SEQ ID NO: 158334 - DNA, 255 bp, Glycine max
gaaggtcattgttacaaccaaacacaatgatgatgaacagtatgtttgggagtctcaagctggaggttctttcactgtcaccagggataacactggtgaggttcttggcaggggtactaagatcactctctacctcaaggaagatcagcttgagtaccttgaggagcgtcgcttgaaggatctgatcaagaagcattctgagttcattagctacccaatttctctttggattgagaaaactactgagaaggagat

SEQ ID NO: 158335 - DNA, 256 bp, Glycine max
catcatttccactgccttgatgactattgggattgcaattgttagttggattgcactcccaacttccttcactatcttcaattttggagtgcagaaagatgtcaagaattggcagctattcttgtgtgttgctgttggtctttgggcagggcttattattggatttgtaactgagtactatactagcaatgcatatagtccggtgcaagacgttgcagactcctgcaggactggtgctgcaactaatgttatcttt

SEQ ID NO: 158336 - DNA, 260 bp, Glycine max
tgggagaagaggtcgagtttcacagcagcaatggtgtacgtcaaggctcagaaatcaaaagcctacttcaagagatatcaagtcaagttcaagagaagaagagagggaaaaaccgattaccgtgccaggattcggttgattaatcaggacaagaacaaatataacactccgaaataccgatttgttgttcgctttagcaacaaggacattgttgcacaaataatatctgctagcattgctggcgatattgttcttgctgc

SEQ ID NO: 158337 - DNA, 269 bp, Glycine max
cacgggattcggctcgagtctgcttaatcgaactattcagattctaaaaaatgagttggtggtgggctggagcaatcggtgctgccaagaagaaattcgaggaagaggaaccgccgcgaagcttccagagcgtgggcctggtgatcggcgtgacgggcatcgtgggcaacagcctcgccgagatcctccctctcgccgacacccccgccggtccatggaaggtctacggcgtcgcacgccgcccccgtccgccgtggaacgccgaccat

SEQ ID NO: 158338 - DNA, 242 bp, Glycine max
tgaatatcgagtttgctctttagagatctgtttccctctagacaacggtctgtgtgacctgttattttagttgaatcgaagccgcgaccaaatcttcctgatctttgcctgaggtgatggcatcggcgggtgtagcacctgcttctggagtaagagatgtgaatgcaaattcggttgctgttgaaaggttgcctgatgagatgaatggcatgaaaattagggatgaaagggaaatggaagca

SEQ ID NO: 158339 - DNA, 246 bp, Glycine max
cactgttaaaatggctgtacagtacatgcggagggttattgagaagaaggcaaagtttgatattatgaatctgaactgtttgcaggttgcaccgaagacattcattcctgttttatttggacatgcaagcgatgacaaattcattcagcctcaccattctgatctcatctctgaagcctatgcaggtgacaaaaatgtcataaaatttgacggtgatcacaactcgtctcgaccacaattctttta

SEQ ID NO: 158340 - DNA, 250 bp, Glycine max
ttcacattcaatcaatgatggctcagcttctccacactcccttcatcccttcctcctcctccgcgctccgccgcgccgccaccattccccaccgcaaaacgacctctcgcctcgtcgttcgggccaagatccgggagattttcatgccggcactgagctccaccatgaccgagggcaaaatcgtctcctggaccaaatccgaaggcgacaagctctccaagggcgacagcgtcgtcgtcgtcgagtccga

SEQ ID NO: 158341 - DNA, 250 bp, Glycine max
caaaaggccagagcacagaaggggtgaattgttggcaaggcaaaagggttggagtgcactcaattggtgatcacacagctattgagctcatcggtagagaccgccctggtcttttgtctgagatatcagcagtccttgccagcctccaattcaatgttatcgcagctgaagtttggactcataacaggagaattgcttgtgtcctttatgtcaatgatgctacaaaccaagccatggatgactcaaaaag

SEQ ID NO: 158342 - DNA, 256 bp, Glycine max
cttacttcgagtcatagcagcagggaatataagaactttatgccatcataggctcaatcttctagaacagaaattcaatcttcatttgatgctaaatgcggatagagaatttcttgctcagaagagtgctccacatcgagacttctataatgttagaaaagttgatactcatgtccaccactcagcatgcatgaatcagaaacatcttttaaggttcataaagtcaaagctgagaaaagagcctgatgaggttgta

SEQ ID NO: 158343 - DNA, 251 bp, Glycine max
ggcagaggaaggggcagagttttggagtttgaaagagaaaatattgattgcagttgagttctaatgagtaacgaatacgattacctgttcaagcttctcctaatcggagactcttccgttggaaaatcctgcttgcttctcagattcgctgatgactcctatgtcgacagctacataagtaccattggagttgatttcaaaatcagaacggtggagctggaagggaaaaccgtcaagctgcagatttggga

SEQ ID NO: 158344 - DNA, 246 bp, Glycine max
atttgctggtcgaccatagtcaactgaagtgaaccttgttgattggctgaaaatgatggttggaaacaggagatcagaagaagtggtggaccccaacattgaggtgaagccatccaccagagctttaaaacgggctctcttaactgctttaagatgtgtagatccagattctgagataaggcccaagatgggccaagttgtacgaatgttggagtcagaggaataccctttaccaagagaggaccg

SEQ ID NO: 158345 - DNA, 246 bp, Glycine max
cgcttcttgtgggtgctgctttgaaccttgtgggatatggctgggtctggcttgttgtcacttctcaagtccctgtcttgcctctctgggctatgtgtgctcttatctttgtgggaacaaatggtgaaacctacttcaatacagtttctctggtgtcttgtgtacaaaatttccccaaaagccggggtcctgtggtgggaattctaaagggctttgctgggttgagtggtgcaatcttgactcaga

SEQ ID NO: 158346 - DNA, 245 bp, Glycine max
cattattagtgcagtgctaaccagcagggcaattttccaaaggatgaagaattatactatctatgcagtgtcaatcaccattcgtatagtatttggtttcatgtttattgcattgatttggaaatttgattttgcacccttcatggtgttgattattgccatactaaacgatggtaccatcatgacaatatccaaggatcgagtgaaaccatctccaatgccagacagctggaagctgagggaga

SEQ ID NO: 158347 - DNA, 172 bp, Glycine max
ggcttatggtggatacctaggcacccagagacgaggaatggcgtagtaagcgacgaaatgcttcggggagttgcatataagcgtagatcgcggggattcccgagataggtcaacctcatcgaagtgccgccggatccaggggcaagcaagatataagctggtgaactgaaac

SEQ ID NO: 158348 - DNA, 243 bp, Glycine max
gttccacgcgccgtcctcatggatctagagcccggcaccatggactccgtcagatccggcccctacggccagatcttccgccccgacaacttcgtcttcggccagtccggcgccggaaacaactgggccaaaggtcactacaccgaaggcgctgagctcattgactccgttctcgacgtcgttcgcaaagaagccgagaattgcgactgcttgcaagggtttcaagtgtgccattctcttggt

SEQ ID NO: 158349 - DNA, 239 bp, Glycine max
atttcgccttaccaaccccagggaaactccgaatacaggcctagatcgtttgtacagacagacttttagggtgctaagatccaaagtcgagagggaaacagcccagatcgtacgctaaggtccctaagcaatcacttagtggaaaaggaagtgatcgagcgatgacaaccaggaggtgggcttggaagcagccatcctttgaagaaagcgtaatagctcactggtctagctccatggca

SEQ ID NO: 158350 - DNA, 242 bp, Glycine max
ggtatgacgaaggaggatttgataaagaatttggggacaatagcaaaatctggaacttctgcatttgttgagaagatgcaaacaagtggagatctcaatctgattgggcagtttggagtcggcttctactctgtttatctcgtggctgactatgtcgaagtcattagcaagaataatgatgataaacagtatgtatgggaatcaaaagctgatggagcatttgcaatttcagaagatacatg

SEQ ID NO: 158351 - DNA, 245 bp, Glycine max
ggaaaatgctggagaagatattactggtgcaaagaatgaagtgaagtgtgacaaccaagcacctgaaaacaagagtgagacagagaaatccataccagtaacgaagaaagatggcgaaaatcctacacctgcaaaagctgaagttcctgacaacgagtttgagaagcgcataagaccagaggttatccctgcaaatgagataggggttacatttgcagatattggtgcgttggatgagattaaag

SEQ ID NO: 158352 - DNA, 179 bp, Glycine max
gtttctgtctctgtgtttgcggctgaggattccgaacgagcgaccttcttcgtttctcgcaaagtttaagtcatcatgggtaaggaaaagactcacatcaacattgtcgtcattggacatgtcgactctgggaagtcaactaccactggtcatttgatctacaatcttggcggtattga

SEQ ID NO: 158353 - DNA, 242 bp, Glycine max
tgccactttctgagtacaatacaacactgccatggctgcctcagtctccactattggagctgtcaacagagctccactgagcttgaacagctctgaagctggagattcggttcccagttcagccttctttggcacaagcttgaagaaggttactgcctcaagggtccctaacgtcaagatttcttctggaagtttcaaaatcgttgcggcggagaaagagattgatgagcaacaacagacaa

SEQ ID NO: 158354 - DNA, 239 bp, Glycine max
aaatgaaggccatagtgataacgaggccaggaggtcccgaagtgctccaacttgaggaagtggaagatcccctagtcggagacgacgagcttctcatcggagtccacgccacttcccttaacagagccgatacctttcagaggaaaggctcctaccctccccctaagggcgccagccttgacctcggtctcgaatgttccggaactgtcctttccctgggtaaaaacgtttccagctgg

SEQ ID NO: 158355 - DNA, 242 bp, Glycine max
gaacagtcaactcagaactggtacggacaaggggaatccgactgtttaattaaaacaaagcattgcgatggtccctgcggatgttgacgcaatgtgatttctgcccagtgctctgaatgtcaaagtgaagaaattcaaccaagcgcgggtaaacggcgggagtaactatgactctcttaaggtagccaaatgcctcgtcatctaattagtgacgcgcatgaatggattaacgagattcccac

SEQ ID NO: 158356 - DNA, 244 bp, Glycine max
ctcacatgtgcggcgcgccggtggtgctcaacatgttaaccaacgcgaactccccgttggagaaaccggttcagatcctcaccgccggatcgccgcctcctgcggcggtgctcttcagaacagaggctttggggtttgtcgtgagtcacgggtatggtttgactgagagcagaggattggtggtgtcatgcgcgtggaagggggagtggaacaagttgccggcgacggagagggctcgactgaa

SEQ ID NO: 158357 - DNA, 242 bp, Glycine max
gattcctaatacaaacatggcaatgaagaagctcttgtgggttgtcctgtctctatctttggttcttggagtggccaatagctttgattttcacgacaaggatttggcgtccgaggcaagcttttgggacttgtacgagagatggaggagtcaccacacggtttcgcgaacctcggtgacaagcacaagcggtttaacgcgtttcgagcaaatgtgatccatgtccatgacactagcacgat

SEQ ID NO: 158358 - DNA, 249 bp, Glycine max
agcaagatgagcctgaagaagaagtccaaacacatgcttgaaacaatcactggattcaacagggcaagctaggattcagtgggtccaaaagaactacatgatttacaactactgcactgacactaagcgtttcccacagggccttcctcctgagtgcacaatcgcatgaaaacaaaactatttcatattataaacctctcatacctcatgaattcattttttttttttcttgtcttgtgtaaattaata

SEQ ID NO: 158359 - DNA, 263 bp, Glycine max
ctttcttcttcttctcttaaaagagcctttgctttttctttaggcctttccgaattaagtacttgtttcattttctctcgaagcaagaaaaatgttcatcgagagtttcaaggttgagagtcctaacgtgaagtacacagagactgagattcagtccgtgtacaactatgaaaccactgaacttgttcacgagaacaagaatggcacttatcagtgggttgtcaagcccaaaactgtcaaatatgaatttagaaccaacaccc

SEQ ID NO: 158360 - DNA, 226 bp, Glycine max
ctctcagctcaggagtgtataatctgagcgatgtcagatcttgaggctcccttgcgccctaagaggacatacgtttgggtggactatttcgttcagtttcgatggatccttgttatttttgtggtccttcccatctcgttcaccatttgtttccttacataccttggggatgtaagatctgagtggaagtcctataagacgcgtcagaaggaacatgatgagaatg

SEQ ID NO: 158361 - DNA, 235 bp, Glycine max
gtggatgatcacccttttgatttggacaagatggttttaatggactggagggattctcatttggggaatgaaccctacttgagagctagtaattcaaggtttcctactttcctctatgcaatgccatttagttccaatttgatatttcttgaggagacttcccttgtgagccgtccagtgttgtcttacatggaagtgaagaggaggatggttgcaaggctaaggcacttaggca

SEQ ID NO: 158362 - DNA, 234 bp, Glycine max
atgggcaattgttgaacttctctggctgtggaaatacattgaattgtaaccatcctgtggtcatggaactaattcttgacagcctaagacactgggtcaccgaatatcatgtggatggatttcgatttgatcttgcaagtgtcctttgtcgaggaattgatggctcccccattaatgcccccccgcttattagggcaattgctaaagatgcagtattatcaagatgtaaaatta

SEQ ID NO: 158363 - DNA, 242 bp, Glycine max
atcctatcctatcgtagcaaagaaagaaagaaagaaaaccctagcttaccttttcaactttcaagatgcaaatctttgttaagacactcactggtaagacaatcacccttgaggtggagagttcagataccatagataatgtaaagtccaagattcaagacaaggaagggatcccaccagaccagcaacgtctcatttttgctggcaagcagcttgaggatggacgtacacttgctgattac

SEQ ID NO: 158364 - DNA, 257 bp, Glycine max
gacagattcatagacataccagatgaagttcttgatgtttacaagctttggcgcccgacccctctcattagagccaagaggctggaaaagcttcttgatacgccggctaggatttactacaagtatgaaggtgtaagccccgctggatcacacaaaccaaactctgctgttccacaagcctggtataatttacaagcaggtgtcaagaatgttgtgacagaaactggtgctggacagtggggaagtgcattggcctt

SEQ ID NO: 158365 - DNA, 253 bp, Glycine max
ctccgcattcggctcgagtgattttgcacccttcatggttttgattattgccatactcaatgatggtaccattatgactatatccaaggatagagtgaaaccatcaccacttcctgatagctggaaactgagggagatatttgctactggcgttgtgctaggaagttacatggcactaatgacagtagtatttttctgggcaatgacagatagcaacttcttctcgaacaaagttggtgtgaggccattgaga

SEQ ID NO: 158366 - DNA, 250 bp, Glycine max
tcggctcgagcgatgatgaacacaaatgttggttccttcaagattcctcctgcttccctctcaagttttgatgtgataagtgttattgtctgggtccctgtctatgacaggattattgttcccattgcaaggaaatttacaggcaatgaaaggggcttttcagagttgcaaagaatgggaattggcctttttatttcagtcctgtgcatgtcagcagctgctatagtggagattgtgcgtctgcagcttg

SEQ ID NO: 158367 - DNA, 238 bp, Glycine max
caaggctaactcctacagtgtgcatggaagtgcactgggtgccaaagaagttgatgccacaaggcagaaccttggatggtcacatgagccattccacgtgcctgaggatgtcaaaaagcattggagtcgccacacccctgagggtgctgcacttgaagctgaatggaatgctaagtttgctgagtatgaaaagaaatacaaggaggaagctgcagaattgaaatctattatcaatggt

SEQ ID NO: 158368 - DNA, 235 bp, Glycine max
gcctgttatccttatggtgatggttcagcaatgttgacggtgagtgatgatgaattctgggagggagtttcgcctgtggaatttggcgatttgcctgctctgcaagatgctgtaactgttgtgggatatccaattgggggtgacacaatctctgtgacaagtggtgttgtttcacgcatggagatactctcttatgttcatggttcaacggaacttctgggactgcagatagatg

SEQ ID NO: 158369 - DNA, 234 bp, Glycine max
caacttaagagatcaatatggccaccaccactacccagcctccctctaatatctgttttttccttctgttgttgcttctagcacactttcatttgggcataagccaacttgagctgaattactactctaaaagctgcccaaaagctgaagagatcatcaaggaacaagtcacacaactatataacaagcatggaaacactgccgtttcgtgggtcagaaatctcttccacgatt

SEQ ID NO: 158370 - DNA, 242 bp, Glycine max
ggattcttcttcttcacgtggtacttcttgaacgtgattttcaacatccttaacaagaagatctacaattacttcccctatccatacttcgtatcggttatccatttattcgtgggtgtggcgtactgtttggtgagctgggccgtgggacttcctaaacgtgctcctatagactccaacctactgaagttgctcattccggtggctgtgtgccatgcattaggccacgtgaccagcaatgt

SEQ ID NO: 158371 - DNA, 250 bp, Glycine max
  unsure (1)..(250): unsure at all n locations
ctgagcgtgagaaagagaaggggaagaaagagagagagtgatgggaaggggaagagtggagttgaagaganttgagaacaagatcaacaggcaagtgacctttggcaaaacgaaggaacgggcttttgaagaaagcttatgagctttccgttctttgtgatgccgaggttgctctcatcatcttctccaatagagganaagcagtacgagttttgcagcggttcaagcatgctcaaaacgctggagaggt

SEQ ID NO: 158372 - DNA, 277 bp, Glycine max
caggaaattaaagaagcagttgagcttcccctgacacatcctgaactgtatgaagacattggtatcaagcctcctaagggagttattttatatggggaaccaggaactgggaagacattgcttgcaaaggctgtggcaaactcaacatcagcaacctttttgcgtgttgttggtagtgaattaatacaaaaatacttgggagatggtccaaagcttgtaagggaacttttccgagttgctgatgatctttccccatctattgtcttcatgatgagat

SEQ ID NO: 158373 - DNA, 269 bp, Glycine max
caggtgtcttcttatcttcctaatcatctgtcgcaggctaggagggtccctcctttcatatttgatggggctctctgtcccgctaaggaattgtcaagttgtatgagagatgtgtcattgcatgtgccaattatcctgagtattggatacgctatgttttgtgtatggaagccagtggaagcatggatcttgcaaataatgttcttgctcgggcaaccccagtctttgttaagagacaaccagagatacatattttttgtgctcggttc

SEQ ID NO: 158374 - DNA, 265 bp, Glycine max
gttagaagaagaatgatgatgacctctggtgaagctgtcaagtacaagagctccttggatgcattcacacagatcctcaagaatgagggtgccaagtccttgttcaagggtgccggtgccaacatcctccgtgccgttgccggtgctggtgtgcttgctggttatgacaagttgcaggttcttgtgttcggcaagaagtacggctctggtggggcttaagttctaatgctgagtcagtactattatttgtttttagatggcgatg

SEQ ID NO: 158375 - DNA, 275 bp, Glycine max
atacttagaaacagcaactatgtctctcatgcagcttactagctcccctgttggctcactggtccgtttcattgtaatatttgctttatggtacagaaccatggctttggccaagttgccaccaaacgcttcatcagttccagcagttttagcgtttggagattccatcgtggacccaggcaacaacaacaacataaaaacattgatcaagtgcaacttcccaccttatggaaaggattttcagggaggaaacccaacgggtcgattttgcaatg

SEQ ID NO: 158376 - DNA, 270 bp, Glycine max
tttatagttacacacaaaagcttagccctaagctagcattttcccagcaccaatttatttgcttggatcggaactagggttttgaaattgatgggtacagagagaaagaggaaggtgagcttgtttgatgtggtagacgattctgcggcgaagatggcgaaatccaatggcggcgccgctgctaataatctcaccaatcattggaccgcaaggccttactcccaaaggtacttcgagattttggagaagagaaagaccctccccgtttgg

SEQ ID NO: 158377 - DNA, 271 bp, Glycine max
ctctgctagagcctagaagccagaaaactgctgtttctcgacccacacttttgaacttgaaaacttaaaccctagttctctctcttgtctttcttctgcatcttcaaccatgtcagcgatgctgcaacctcagatcattctgttgaaggaaggcacggacacttcgcaagggaagccgcaggtggtgagcaacatcaatgcctgcaccgccgtcgccgacgtcgtccgcaccaccctcggccctcgcggcatggacaagctaatccacgac

SEQ ID NO: 158378 - DNA, 278 bp, Glycine max
ctgcaacagtagggtacatggcatccccagctagacaaagagaagatgacatgagaaaaccaccttcagggttccctgattgttccatcaagctgcatgcacatgaagttcggttccttgctgcagcaaggaaactagagtttggcaatggtgttcttttctatgatcgtatctcagttggtgcagatttgtctgatgctattggattcaaaggttgtagagaaattgaagggccttatgtggactatctagagacacaatttggtaagcccgttttg

SEQ ID NO: 158379 - DNA, 272 bp, Glycine max
gaaaaagcaattaactaagcatatatagcgtgtaagacagtgagaaaaaaagtgttgtgtagagagaaatggctaggtggtgcatcttggtggttcttgcccttgtcgtggttgcaagtgccagaaacatgcccaatgacgcaggtttggaggaccagaagaacttcctcgggtatgggttctctggagttggcaacaatgggcttccctttggaggagtgggttctgggtttgatggtaatatgggtgggccttctgggctcggtggattt

SEQ ID NO: 158380 - DNA, 270 bp, Glycine max
agaatcttggttactggaggagctggattcattgggtctcacttagttgacagattgatggaaaatgaaaaaaatgaggtcattgttgctgacaactacttcactggatccaaggataacctcaaaaagtggattggtcatccaagatttgagcttatccgtcatgatgtcacggagcctttattgatcgaggttgatcagatctaccatcttgcatgccctgcctctcctattttctacaaatacaatccagtaaagacaataaagaca

SEQ ID NO: 158381 - DNA, 269 bp, Glycine max
gaaaatgaaagtcattgttttcttcgttgctataataattttaggtgcagaatggcaatgcaatgggtcagagcatgagcatgagcatggccacagctaccaaattttccctttgcgaatgaaaaccggccccggtggccactacattccggaggtatcgtgcaaaagttggaggcttggtgtggaagcacacaacgtcattgactggagaaccattcctcaagattgcgagggatatataggaaactacatgcttggccaccaatata

SEQ ID NO: 158382 - DNA, 273 bp, Glycine max
gaccttgctgcttctctcactacattgcagggtcttgagggcattgtgggcaaagataagcttgttgtgtccacctcctcctcccttcttcacactgctgttgatcttgttaacgagaccaagttggatgacgagatcaagtcatggctagcatttgctgcacaaaaaattgttgaagttaacgcattggctaaggcattgtctggcaacaaggatgtggccttcttctctgctaatgctgcagctcaggcttcaaggaagtcctctccaaga

SEQ ID NO: 158383 - DNA, 267 bp, Glycine max
gaaagataaagcattccatagcctcccataaaaatgaagaatactatcttctctgctctctttctactttgtgccttcaccacctcatacctaccttcaaccaccgcggtggtcgataccgacggtgatattcttcagaatcctggcacatactttatcttgtccgtttttcgacccggcggcggagtagaattcgccgccactggaaacgaaacttgccctctcactgtcgtgcagactctcttcgggaggggctttccagcaata

SEQ ID NO: 158384 - DNA, 272 bp, Glycine max
  unsure (1)..(272): unsure at all n locations
tttatttctctcttctctctgcatcgcttcaggttcttctgaaaagatgtctcgcgtgtatgttggtaacttggattcacgagtcaccgagagagatctcgaagacgnattccgtgttttcggagttattcggagtgtttgggttgcacgtagaccacctggtnatgcttttattgactttgatgaccgcagagatgcacaggatgctatccgtgaattggatgggttttcctcaactagctagttaagtcttctttttggcctatggggca

SEQ ID NO: 158385 - DNA, 272 bp, Glycine max
gtcaaaactttcatctttgtcatccacttaacccaggtgtaaaaatgtcagcagtgaacatgtccactatgagacttccaagagcttccttgtctggaacaacaccagctaggagatcatgtgctcttacaaagagtccatcatctttgaggtctgtgaagaatgtgtctaaagtgtttggatttgaatcatcttcctttagagtgtcagcaatggcggtatataaagtgaagctgattggaccggacggtgaagagaatgaatttgaagcc

SEQ ID NO: 158386 - DNA, 254 bp, Glycine max
gagggagtccactctctccaatcccgcaaaatcacccctcatcgacaatttcaaaggcctcggtgtcaatcattggttaggagatctatacgatcatcaaagtttggtgagtgctataaagcaggtcgatgtggtaattgctactgtaggtgacctgcagatatgctgatcaagataagatcatttctgcacttaaaggagcatggaatgttgacaagttctatccatctgagtttggtaatgatgtggtccgg

SEQ ID NO: 158387 - DNA, 267 bp, Glycine max
gtgctctgctcgtgcctctagggttatcatatctccatttccatttcctctctctcagtttccaagaatcttaagctatgggaaagtcttacccaaccgtgagcgctgattaccagaaggccgttgagaaggcgaagaagaagctcagaggcttcatcgctgagaagagatgcgctcctctaatgctccgtttggcatggcactctgctggaacttacgacgtgagctcgaagaccggtggtcccttcggaaccataaagcacccct

SEQ ID NO: 158388 - DNA, 266 bp, Glycine max
caagaagggaaaaaaatattcgaacttcaaagggaaatgattcagcttacaatgacgctctttaagtttgctttcattccaggttacaggtttctgccaacgcataccaacaggaggatgaaagcaattgacaaagaaatacgagaatcacttatggtaatcatcaaccgaagattaaaagcaatcaaagcaggggagcctactaacaatgacttgttaggcatactcttggaatcaaattacaaggaatctgaaaaaagtagtgg

SEQ ID NO: 158389 - DNA, 267 bp, Glycine max
aaagaatggctgccaacacattgatgagtactgctatctcagccttcccatctctcctttcttcctcaaaatccagatttgccaccgcagttcctctttctagctttggtgtcaccaatgcctcttcttctcgcttttctatgagtgctgactggatgccaggccagcctagacctccttaccttgatggttcagcacctggtgactttggattcgaccctcttcgtcttggtgaagtaccagagaatcttgagaggttcaaagagt

SEQ ID NO: 158390 - DNA, 271 bp, Glycine max
actttcagagagtgagctccagcaatcgcaatgggttggatcggcgagactgttgattccgtcaaatctcttcagatccgtcaggtcctcagccaggctgtgagcctaggcatgattgttacgtctgcactgacaatatggaccgcattggtgtgcgttactggcagtgaatctcccgttgttgttgtcctctctggaagcatgggacccggattcacgcggggagacatcttgttcttgcacatgagtgaagatcctattcgggcagggg

SEQ ID NO: 158391 - DNA, 276 bp, Glycine max
acacaaagtaatggacaaaaaaccatgcaactcatcatctcatgatcctgaagtgagaaagggaccatggaccatggaagaagacttgatcttgataaactatattgcaaatcacggtgaaggtgtttggaactccttagccaaagcttctggtctcaaacgaacgggaaagagttgtcgactccgttggctaaactaccttcgtcctgatgttagaagaggaaacattacacccgaggaacagcttttgatcatagaacttcatgcaaagtgggg

SEQ ID NO: 158392 - DNA, 274 bp, Glycine max
gttactatctataattaattaaattcctcgtggaatattgaagaagccatgtctacagctgggcaggtcatcaagtgcagagctgcggtggcatgggaagcagggaagccactgtcaatagaaaccatagaagtggcaccaccccagaaaggtgaagtgcgtttgaggatcctcttcaactccctttgccgtagtgatgtttattggtgggatgctaaggaccagactcctctgtttcctcgtatcttaggccacgaagcttcagggattgtgg

SEQ ID NO: 158393 - DNA, 269 bp, Glycine max
ggaaaagtatttatccaaacctataaatgagctggacctttctaactgcgaccagtgcactcctagttaccgcctcttaccgaaaaattacccaatacctgtagctagccagaaaacagaacttggtgccggagtgttgaatgatcactgggtgtctgtcacttcaggaagtgaggattattccttcaaacatatgcgcacaaatcagtatgaagagagcttgtttagatgtgaagatgacaggtttgaacttgacatgttgttagagt

SEQ ID NO: 158394 - DNA, 270 bp, Glycine max
gtggttactctaccaataggaacccctccacagcatcaacaaatggtgttggacacaggaagccaactctcatggattcagtgccacaacaaaacccctccaacggcgtcgtttgatccatcactctcttcatccttctatattcttccttgcacccaccctctctgcaaaccccgcgttcccgattttaccctcccgacaacctgcgaccagaaccgcctctgccactactcatacttctacgccgacggcacctacgccgagggcaac

SEQ ID NO: 158395 - DNA, 269 bp, Glycine max
ggcgcgtggcctttaattggtcacatccacctcttaggtggctcaaaaccaccccatgtcacgttgggccacatggcggacaaatatggtcccgtcttcaccttgcgtctgggtgctcaaaaaaccgtgggttgtgagcaattgggaaatgggccaacagtgctttaccggccaacgacaaagcgtttgctagccgtcctaaatcagtgtcctttgaattgttgggatacaactattccatgattgggttcatcccttacggttcttat

SEQ ID NO: 158396 - DNA, 269 bp, Glycine max
cttcaagattcaggtactgcgtttcggaagcagacacagatggctcgtacgaagcaaaccgctcgtaagtccacaggaggaaaggctcctaggaagcagcttgcaaccaaggctgcacgtaagtctgcaccaactactggtggtgtgaagaagccccaccgttatcgtcctggtaccgttgctcttcgtgagattaggaaataccagaagagtaccgagcttttgatccggaagctccccttccagaggctggttcgtgaaattgctca

SEQ ID NO: 158397 - DNA, 265 bp, Glycine max
ttaaagcatcaaattttggtccaattgcaactgcttaaatatttttactatacaccatgtttgctttgggaggagtgtaacaagtacctgatgcgcatgtgtttagtaaaagaatataatagcattactactattatatttgttatgtgtctatttgatttcacatccattctattaagaaattaattttgagtttagaatgaaaaaaaaaaaaaaaactgcaaaaaaaaaaaaaaaaaaaaaaaaaaaaaaaggggggggcccc

SEQ ID NO: 158398 - DNA, 254 bp, Glycine max
attcaacttaagagatcaatatggccaccaccactacccagcctccctctaatatctgttttttccttctgttgttgcttctagcacactttcatttgggcataagccaacttgagctgaattactactctaaaagctgcccaaaagctgaagagatcatcaaggaacaagtcacacaactatataacaagcatggaaacactgccgtttcgtgggtcagaaatcccttcacgatgcgtgggttagtcatgcga

SEQ ID NO: 158399 - DNA, 270 bp, Glycine max
aaagatggtatcagagaggccagtggtgatattcagcaagagctcgtgctgcatgagccacaccataaagaccctcttgtgtgactttggggtgaatccagcggttcatgagctggatgagatcccaagaggcagagacattgagcaagctctttcaaggcttggttgttctccatctgttcctgctgtcttcatttctggtgagcttgttggtggagccaatgaagtcatgagccttcaccttaatcgctccttaattccaatgcttaa

SEQ ID NO: 158400 - DNA, 273 bp, Glycine max
gtatttacttccacaggcatggaaactgaagaacctcctgcacctgctgagaagaaagaggcgccaaaaagacggggtgctgctaaaaagaagtcaagtgccatagtgttggacgactcagatagtgataatgaaattcatgatgttgaggacgacgatgacaactttgaaatcatgcagccggttgccctagaagcagggaaaaagaaaggagggagaaagcctgctgctcaaaatgccaagaaggcacctgctgctgcttctaccaaaaag

SEQ ID NO: 158401 - DNA, 254 bp, Glycine max
ctcgggaaaatcacagcgacgctcaggaaaaactctaaactgtgaaaaaaccactgcgatcaatggcaacgatcaaggccgtgaaagctcgccagatcttcgacagccgtggaaatccaaccgtcgaagttgacgttattctcagcgatggaagcttccacagagccgccgtgcctagcggtgcttcaacaggtgtttatgaggctttggaattaagggatggaggctcagactacctcgggaaaggtgttctc

SEQ ID NO: 158402 - DNA, 270 bp, Glycine max
gcagaaagcaagctcatcctagagttttaaaaatggcagcagcctcctccatggctctctcttccccatccttggctggcaaggccgtgaagctgggcccatcagcccccgaagtcgggagggtcagcatgaggaagaccgtcaccaagcaggcctcctccggaagcccatggtacggcccagaccgcgtcaagtacttgggcccattctctggcgagcccccgtcctacctcactggcgagttcccaggtgactacggctgggacactg

SEQ ID NO: 158403 - DNA, 267 bp, Glycine max
aattagttcattctctttgcgcagttccctacctctcctttcaagatgcagatcttcgtcaagaccctcaccggaaagaccatcacccttgaggtggaaagctctgacaccatcgacaacgtcaaggccaagatccaggacaaggaaggaattcccccggatcagcaacgtctcatcttcgccggaaagcagctcgaggacggccgtaccctcgccgactacaacatccagaaggagtcaacccttcaccttgtccttcgtctccgt

SEQ ID NO: 158404 - DNA, 264 bp, Glycine max
agattttatccaattgaaattttaaaaatgactgggataaacttaagaattcaattattgaaattgaataagtaaacaatttaattggattggtcgaatggtatcaaaaaaatggagtactaactcccatttcttatttattattgaattaaccgatcaacttgctttgttatcgaacatttctttttgatttcaaaaattttccggaaaaaatttgaatctatttttatatgcgaatcaatcctactacttctggtcctgagg

SEQ ID NO: 158405 - DNA, 266 bp, Glycine max
gctgcctgtcaaaactatgatttaccccgagccaggattcgaactacaccgcaggcaaggagacacccaaactgctcaaatgtacacagatgttggagtttattatgcaccaggtcctgttcttaggggtgaggtatttgatggggcagaagcagtgcgtaaaatggagaactggttgattgaaaatcatggttttcagccacagtatgctgtgtcagagctgtccgagaaaaacttctggaggatgtttgatgctggtttatatg

SEQ ID NO: 158406 - DNA, 270 bp, Glycine max
gccaagtgaaagagagaagaaaagtcaaagacaatgtcagggatcattcacaagattgaggagacccttcatgtgggaggccacaagaaggaggaggagcacaagggtgagcagcaccatggtggagaatacaaaggggagcatcatggtgaacacagtactgaatacaaaggagagcatcatgttggtgagcacaagccggagcaccatggaggagaagagcacaaagaggggttcctagacaagatcaaggacaagatccacggcgag

SEQ ID NO: 158407 - DNA, 271 bp, Glycine max
gggaaaactcgagccaagcagtattacgcaaatgacgtggatagaacgaagaacatgggtgtgttgattcatggagatggaagttttgctggacagggtgtggtctatgaaaccctgcatttaagtgctcttccaaattacactactggtgggacgattcacatcgtgtttaacaatcaggttgcatttacaactgatccgacttctggcaggtcttcacaatattgcactgatgttgccaaggctttggatgctcccatctttcacgtga

SEQ ID NO: 158408 - DNA, 268 bp, Glycine max
gcagcagggagctctgccgcctccaacaaaacagagttcagaacacaaaccctcgaaccgaacgtttttgagggttgatagagcacgatggttcagtacaattttaagaagattaccgtggtgccaaatgggaaggatgtggtcgacattatcctctctcgcacccagcgtcagacaccaaccgttgtgcacaaaggatatgcgatttcacggctgcgccaattctacatgcgcaaagtgaagtatactcagcagaattttcacgaca

SEQ ID NO: 158409 - DNA, 264 bp, Glycine max
atcatgttacccagcagtatcataaagccagaaaatgttggtttgtctctctcatatggcttgtcattaaatgccgtgatgttctgggctatatacatgagctgtttcattgaaaacaaaatggtatctgttgagaggatcaaacagttcacaaatattccatcggaagcttcatggaacattaaggatcgcctgcctcctgcaaattggcccggggaaggccatgttgatatcaaagacttgcaggtcagatatcgtccaaac

SEQ ID NO: 158410 - DNA, 266 bp, Glycine max
gcagctgatacatagatagataaggatagggatagggttaaggccatggagcgcatcatcggcgccaagtacaagctaggtcgcaagatcggaagcggatccttcggcgaaatctacctcgccactcatattgataccttcgagatcgtcgccgtcaagattgaaaacggtaaaacgaagcatccgcaattgctttatgaggccaagctctacaatattcttcaaggaggaagtggaatcccgagcataaaatggtgtggtgtaga

SEQ ID NO: 158411 - DNA, 265 bp, Glycine max
cttgttcttctttctctattgtctatagtcatctccattgttctcttcattacccacacacacaaaagaaacaacactccaagaggaccaccaggtcctccacctcttcctctcatcggcaaccttcaccaactccacaactcatccccacatctctgcctatggcaactcgccaaactccacggtcctctcatgtcgtttcgcctcggcgccgtgcaaaccgtcgtggtttcatcggccagaatcgccgaacaaatcttgaaaa

SEQ ID NO: 158412 - DNA, 269 bp, Glycine max
atttttcttgaaaaatgatggaactttgacgccattggccattgagttaagtaagccacatcctcagggtgaagcatatggtcctgttagtgaagtctacgtgccttcgagtgaaggagttgaagcttacatttggttactggcaaaggcttacgttgttgtgaatgatgcttgctaccatcaaatcattagccattggctaaacactcatgcggttgtggagccattcgtcatagcgacaaacaggcatctgagcgtggttcacccta

SEQ ID NO: 158413 - DNA, 265 bp, Glycine max
  unsure (1)..(265): unsure at all n locations
ctcaccagtcaccacctctgaactctctctctcatctataagtcaacatggctcatcatgaagattcaagtgcatggaattcgagtaaacctcaccctaagctcaatgaaagaattctgtcttctctgtcacggagaactgttgctgctcacccctggcacganttagngattgggccaggagctccagcagttttcaactgtgtggttgaaattggcaaaggaagtaaggttaagtatgagctggacaagacaagtggacttat

SEQ ID NO: 158414 - DNA, 260 bp, Glycine max
gaagagttaaaaatttgaattggagatagaagagctatagtcacaaaggattggaatacatcttgggttggcaatttgtacttatcagttgtaatgtcctcccctgaataaccgacataaggttatggttcttgctcaaagcgcattccttcatttttgcccagttatgtttatcagaatttttgttgtaattttatcatatcatgtgaaatgatgcttacaagagaatctgttcaaagaaatatgatgttaatgttatc

SEQ ID NO: 158415 - DNA, 260 bp, Glycine max
ctatagtaaaaaaaggacattcattcatctatggctacccttattgctcccagcaaccactctccccaagaagatgctgaagctctcagaaaggcttttgaaggatggggaactgatgagaacactgtcatagtaattttgggtcatagaactgtgtatcagaggcagcaaatcagaagagtttatgaggaaatttaccaggaggatcttgtgaagcgcctagagtctgagatcaaaggagactttgagaaagccgtgta

SEQ ID NO: 158416 - DNA, 258 bp, Glycine max
cccatccaatcctcacatgcatgctgtctctgccaaagtgccaagtcacataacatttccattgttaccattctttctttccatcacaaccacttatcaagcctctgatcctcactttctctcacacaaaaacacactcaccatgggatatcggaaaccaatggtaacccacttcctccgatgctggcccaaatccacaaaactcgaagaggagccttcttctagttatttgcggcttgctattactctcttccctgg

SEQ ID NO: 158417 - DNA, 154 bp, Glycine max
gagaattttgacttcacgcctggaatgatctccatcaatcttgacctcatgagaggcggaaacttcaggtaccagaagactgctgcttatggacattttggaagagatgatccggatttcacatgggagacagtgaagatactcaagcctagtg

SEQ ID NO: 158418 - DNA, 243 bp, Glycine max
ggactacccagaaagggtgggggaacctccgtgtcagtattatttaaagaccggaacctgtaaatttggtgcatcttgtaaattccaccatccaaaaaatggaggtggatatttaagccaagctccactaaatatttatggatacccgttacggctgggtgaaaaagagtgctcctactatttgaaaacggggcagtgcaaatttggtatatcttgtaaattccatcatcctcaacctgctgg

SEQ ID NO: 158419 - DNA, 261 bp, Glycine max
gttgcagctctagctagggtttcgcaagtgcgatcgaagaagaacaacgacgatggcgatggctgcagctctgcgtcgcgaaggaaggcgtttgatccaaccaatcaacgccctccactcttctctcaaattcctccctcatctctcaagaccaagcccctcatggcgcgcgctccatttccactcaagttgtgaggaaccgaatgaagagtgtgaggaatatccagaagatcaccaaggccatgaagatggttgccgcgt

SEQ ID NO: 158420 - DNA, 243 bp, Glycine max
tggacatctcatgagtgcttattgttgccttatgaacaatccctcaccaggttggattcaacttctggtctctactatgactgttcagcccatatgctctgggttggggaacgaaccaggcagcttgatggtgcccatgtcgagtttctaagaggagttgctaatcccttgggaattaaggtaagtgacaagatggatccaaatgagcttgttagactcattgagatcttgaatccccaaaac

SEQ ID NO: 158421 - DNA, 258 bp, Glycine max
acgctctctctctccttctcgctctttcagctttgacttttgttggaaactaaggcctaatcaaaatggtgaagttcacagctgaagagctacgtcgtattatggactataagcataatatccgtaatatgtctgtcattgctcatgttgatcacggaaaatcaaccctcactgattctcttgtggctgctgctggtattattgctcaagaagttgccggtgatgtccgtatgactgatacccgtgcagatgaagctg

SEQ ID NO: 158422 - DNA, 258 bp, Glycine max
aaagagaatccgaggcgaagagaagagaaaaattaagatggaggggaaggagcaggatgtgtcgctgggagcgaacaagttcccggagagccagccgattgggacggcggcgcagagccaagacgacggcaaggactaccaggagccggcgccggcgccactggttgacccgacggagtttacgtcatggtccttttacagagcagggatagcagagtttgtggccacttttctgtttctatacatcactgtcttaac

SEQ ID NO: 158423 - DNA, 258 bp, Glycine max
ccactccatggtcaaaaactgctgagaactttggcaactctactggtgaacaaggctaccctggaggaaaattctttgaccctttgggatttgctggagctatcaaggatggcgtttacattccggatgccgacaagctagagagactgaaattggctgagattaagcatgctaggattgctatgttggctatgctgattttctactttgaggctggccagggcaagacaccccttggtgctcttggcttgtaagcaa

SEQ ID NO: 158424 - DNA, 245 bp, Glycine max
caccgattcacctatgaggtacgtggacattggaattcctgccaacaacaagggcaaacacagcattggttgtctcttctggctccttgcaaggatggtgttgcagatgaggggtaccattcgccctggcctcaaatgggatgtcatggttgatctgttcttctatagagaaccagaggaggctaaacaaacaagaggaggaggaagctccggcggttgattatgccatcacggatttcaatgca

SEQ ID NO: 158425 - DNA, 148 bp, Glycine max
ggttcgtgcagatccccgtgggagtagcggggccattattgttggatggaaaagaattcaccgtgcccatggccaccactgaagggtgtctggttgcgagcaccaacagaggttgcaaagctatatacgtctccggtggggcctcctc

SEQ ID NO: 158426 - DNA, 239 bp, Glycine max
cgcaacaaaaagaaagaatcccaggcgaggagaaagatggaggggaaggagcaggatgtgtcgttgggagcgaacaagttccccgagagacagccgattgggacggcggcgcagagccaagacgacggcaaggactaccaggagccggcgcccgcgcccgctggttgacccgacggagtttacgtcatggtcgttttacagagcagggatagcagagtttgtggcgactttccggttct

SEQ ID NO: 158427 - DNA, 256 bp, Glycine max
gtggttatagttctcatatggacacttgttacgtctcctttgcttgtattgggagggattgctgggaagaatagcaaggctgaatttcaagctcctgttcggacaactaaatatccaagggagattccacctctgccttggtatcgtggaacaattcctcagatggcgatggcaggatttttggctatcagtgctatatacattgaactttactatatatttgccagtgtttgggagcacagaatttacaccatct

SEQ ID NO: 158428 - DNA, 254 bp, Glycine max
atcgctgtggttatcatcttcttcttcctctttcttagatctcttctttctctacgccgcacgccgaaaccatggccggaaaaggagagggtcctgctatcggaatcgatctcggaaccacctactcttgcgtcggtgtgtggcaacatgaccgcgttgaaatcatcgccaacgaccaagggaacagaaccacgccgtcttacgtcggattcactgacaccgagcgtctcatcggtgatgcggccaagaatcaa

SEQ ID NO: 158429 - DNA, 259 bp, Glycine max
ccgccgtgtctttattatggacaactgtgaggagttgattcctgagtatttgggctttgtcaagggtattgttgattctgaagatctcccactcaacatttcaagagaaatgttgcaacagaacaagatcttgaaggtcatccgtaagaacttggtcaagaagtgccttgagctcttctttgaaattgcagagaacaaggaggattacaacaagttctatgaggctttctctaagaacttaaagcttggtatccatgag

SEQ ID NO: 158430 - DNA, 256 bp, Glycine max
taattatcaaacctaaccagtaaaaatggtgaccgtggaggaaatccgcaacgctcagcgttcccatggacccgccaccatcttggccttcggcaccgccacgccgtccaactgcgtctcccaagccgattaccctgactactacttccgcattaccaacagcgaacacatgactgatctcaaagaaaagttcaagcgcatgtgtgaaaagtccatgataaagaagcgatacatgcacctgacggaggagtttctg

SEQ ID NO: 158431 - DNA, 247 bp, Glycine max
ctcttcctcaccgattgctagaatggaatttcgatgctcagtcatctcttttaccattctcttctctcttgctcttgcaggagagagccatgtccatgcatcgctacctgaggaagattattgggaagctgtttggccaaacactcccattcccactgcactgcgagagcttctaaagcctctccctgcaggtgttgaaatcgacgaactccctaagcaaattgatgatacacagtacccaaaaaca

SEQ ID NO: 158432 - DNA, 236 bp, Glycine max
ctcgtgaaaagggaccatggaggcaaattcaggtgccagcgaccgaatttcgagaatcgccggccacctccgcccccagagagaggatgatgtttgtttgaagcgtacgcttgccgtgcaaaaggtggggtctccggattcaaggtggccatattgggtgccgcagacgcatagggcaacctctggcgatgttgatgcagatgaatccactcgtatcacttctccacctctacgat

SEQ ID NO: 158433 - DNA, 236 bp, Glycine max
  unsure (1)..(236): unsure at all n locations
gtccttgctgtantcatgaggaaantgaggaaaggggcatanncggttcaagaagatcagacactcattgcttacattcagaaacatggcacaggaagctggcgtaccttgnccacaaaaagcaggtcttcaaagatgtggnaganttncnnggctgagatggtttaactaccttagacctgacattaagagaggaaaattaagccaagaagaagagcagacaattataaaacttc

SEQ ID NO: 158434 - DNA, 247 bp, Glycine max
tgaagcttagacatgatattccacgacacgaagtcaaacaggtgatttgttcactttgtgggactgaacaagaggttcagcaaaactgtataaattgtggtgtttgtatgggaaaatacttctgtggaacatgcaagctttttgatgatgatatatctaagcagcagtaccattgctgtggctgtggaatttcagaactggaggaagcgaaaatttcttccattgccaacaagtgtggttgttgcta

SEQ ID NO: 158435 - DNA, 252 bp, Glycine max
caccaacacgtgtggaaaatggtactcctgggaagcaatacatgatcaaacatgatgccaatggaaatacacacgtttctgatctcacagtagtggatgttcagagtgtaaaagaggttgcatttcttttaaatcaagctgcaagtagcagatctgtgggaaaaactcagatgaatgaacaatcttctagaagtcattttgtattcactcttcgaatatatggtgtaaatgagggcattgcccaccaggtac

SEQ ID NO: 158436 - DNA, 256 bp, Glycine max
ctctaaaccctaaacaactctttctcttcttccttcgctcgttgttctccctcgcgtagatcgacaatggcggagacagagacgtttgctttccaggctgagatcaaccagctcctcagtctcatcatcaacaccttctactccaacaaggagattttccttcgtgaactcatcagcaacgcctccgatgctttggacaagattcgatttgagagtttgacagataagagcaagctcgatgctcagccagagttgt

SEQ ID NO: 158437 - DNA, 199 bp, Glycine max
ctcgttgaaatgaaaatgggttcttctttgtggactttgtgtctaattttggcttcactagcctcttctgcattctgtgcctttccacggaggccagtggatgttccattcggcagaaactacgttcccacttgggcttttgatcacatcaaatacttcaatggaggttctgagattcaacttcatcttgacaagtaca

SEQ ID NO: 158438 - DNA, 251 bp, Glycine max; identical to SEQ ID NO: 158293

SEQ ID NO: 158439 - DNA, 254 bp, Glycine max
gccaagtgaaagagagaagaaaagtcaaagacaatgtcagggatcattcacaagattgaggagacccttcatgtgggaggccacaagaaggaggaggagcacaagggtgagcagcaccatggtggagaatacaaaggggagcatcatggtgaacacagtactgaatacaaaggagagcatcatgttggtgagcacaagccggagcaccatggaggagaagagcacaaagaggggttcctagacaagatcaagga

SEQ ID NO: 158440 - DNA, 218 bp, Glycine max
ctctctcaagtctcaaccatgtcttccggaaccctagaaaacgagcaacctcaagtggaagaagaacaagcccaagctgaagacaaccacaccaagcaagaagataattcggagatgaaagacgacgatgacagaggcgaagaggaaagggatcaggtagaacaagagaaggatgtggagaaagaggaggaaaaggaggaggaagaagaagaaaagga

SEQ ID NO: 158441 - DNA, 254 bp, Glycine max
tctcgagccgaatcggctcgagagtctccatacatcaacttgggaccttaaagagacggcaacgttgtgctgtccgccttgaccgagccagagcttcgtcttggccctcgattttgccctgtaaaactaatcccagtcacaacagaaataatcaatggcaccgaaacagaccaaggctgagaagaagatcgcttacgatgcgaagtgtgcgacctaatggaggagtacggccaaatcctcgttgtaaactccga

SEQ ID NO: 158442 - DNA, 269 bp, Glycine max
ctaattctcatttcttcatcgttcgattcttctcctcctaaagatgcagatcttcgtgaaaactttgaccggtaagaccatcacccttgaggtggagtcctccgacaccatcgataacgtgaaagctaagattcaagacaaggaagggatcccacctgaccagcagagacttatctttgcgggtaaacagcttgaggatggtcgaacccttgccgactacaactccaaaaggatcccactctccacctcgtgcttcgcctcaggggtgg

SEQ ID NO: 158443 - DNA, 265 bp, Glycine max
ctctgacttaccgtgaagtcatcgctattctgatgcagagacatgttcttgttgatggaaaagtcaggactgacaagacttaccctgctggtttcatggatgttgtttcaatcccaaaaaccaatgagaacttccgcctgctctatgacactaaaggccgattccgtctccattctgtcagggatgatgaggcaaagttcaagctctgcaaggttaggtcagtgcagtttggccagaaaggtatcccatacctgaacacctatga

SEQ ID NO: 158444 - DNA, 259 bp, Glycine max
ggtgggactatgttcaggtgaataataagttgttcaaagacatgaaccgttttcttgcgtactataaagggctaacaacttgggctaagtgggttcagagaaacgtcaatccagcaaaaaccaaggtcttcttcttaggaatttctcctgtgcattaccaggggaaagattggaatcgaccaacaaagtcatgtatgggcgagacacaaccattctttggactgaagtaccctgcagggacaccaatggcttggagggt

SEQ ID NO: 158445 - DNA, 256 bp, Glycine max
gttcgtagaattgggtaacattttagaccctgataggcccaaaaatgacaaagcaaccattctgtgtgatacaattcaattgctgaaggacctaatttctcaagttagtaaactcaaagatgaatatgctatgctaaatgaagaatctcgtgagttgactctagagaaaactgatctcagggaagagaaggcttctcttaaatcagatattgacaacttgaataatcagtatcagcagcagctcaggaccatgttt

SEQ ID NO: 158446 - DNA, 255 bp, Glycine max
gggccgattaccatggcaaggttaccagggtgatagcaaatccttccttgtttgcaaaaagaagatggggacatctcctgagacgctatgctgcttgtgtcctcctccttttaggcattttcttgagattgtagtgaatatgaaatttgatgaagaacctaattattccaagctaatatctttgtttgatggtacgattggacccaatccagcattgcggccaattaatactgaaggtgcccaaaaggttgggca

SEQ ID NO: 158447 - DNA, 254 bp, Glycine max
aagagtttgatcctggctcagaaggaacgctagctatatgcttaacacatgcaagtcgaacgttgttttcggggagctgggcagaaggaaaagaggctcctagcgtgaaggttgcttgtctcgcccaggaggtgggaacagttgaaaacaaagtggcgaacgggtgcgtaatgcgtgggaatctgccgaacagttcgggccaaatcctgaagaaagctaaaaagcgctgtttgatgagcctgcgtagtattagg

SEQ ID NO: 158448 - DNA, 254 bp, Glycine max
gtccaggatcgtggtgtttttgactttctcggtaagaaaaaggatgaagaagacaagcctcatcctcaggaggaggtcatcgccaccgagtttcaaaaagtcactgtctcagaccaaggagagaacaagcacagcctcttagaaaagcttcaccgatctgacagcagctctagctcttcaagtgaggaggaaggagaagatggagagaaaaggaagaagaagaagaaggaaaagaaagggctgaaagagaagat

SEQ ID NO: 158449 - DNA, 242 bp, Glycine max
cgaaatctctggaacaattgatttcattttcggatactccaccaccttgatccaaaactcgaagatcttggtgaggaagcccagggcaaatcagcagaacagagtggtggcagatggcacagggcagaagaacatgcccacaggaatagtcctccataactgcgagatcatgccggaccctaccctcttggcagaccgcttgagcgtgaagacttacttggccaggccatggaaggcattct

SEQ ID NO: 158450 - DNA, 258 bp, Glycine max
gttcttgtgggttgttctgtccctttctttggtccttggagtggccaatagctttgattttcacgacaaggatttggagtccgaggaaagcctgtgggacttgtacgagagatggaggagtcaccacacggtttcgcgaagcttggtgacaagcacaagcggtttaacgtgttcaaagcgaatgtgatgcatgtccataacaccaacaaaatggataagccttacaagctgaaactaaacaagtttgctgacatgacc

SEQ ID NO: 158451 - DNA, 252 bp, Glycine max
gaggaatgatctttaccttttacaaggctcagggttattcagttggttcatctcttgtggaggaagacaagcttagccttgcaactacacttctcgaaaaggccaaggctaaaggggtttctttgttgcttccaactgatgtggtcatagcagacaagtttgctgctgatgctaacagcaagactgtgccagcatcaagcatcccagacgggtggatgggattagatattggtcccgattccatcaagacat

SEQ ID NO: 158452 - DNA, 252 bp, Glycine max
ggcagtccgcgttccacgatttgctcggcgaaggcatcttcaactccgacggcgacacgtggctgttccaacgtaaaaccgccgcactggaattcaccacgcgcactctgcgccaagccatggcgcgttgggtgaaccgagccataaagcacaggttctgccccatcctagccacggctcagaaagaaaacaaatcagtggatcttcaagacctcttgcttcggctcacttttgacaacatatgcggcttgg

SEQ ID NO: 158453 - DNA, 254 bp, Glycine max
ctcccgggaaaaaaagtaggtaaaaaaatatgctaagtataaattgtctactgatgaaatacgaaagctgatgatattgaaaaaaaaagaattgtaaataaggttcaggttcgacttccatagagaatatagatgatattgtctataatgatagaaaaaaataaaaaactttcgaaagattttatccaattgaaattttaaaaatgactgggataaacttaagaattcaattattgaaattgaataagtaaaca

SEQ ID NO: 158454 - DNA, 254 bp, Glycine max
ctcatttatagtttactattgaaagatgggtttgaaaatggcaatactgatcctaggcctgctggccatgttccttttggtctcctcagaggtggcatccacgaattcaaaagaggtgacaaatggagttgaagatgccaaatatcctggtggaggctatggtgggggttacccaggcaatggcggtggtggctatcctggccgtggtggtggctaccctggtcgtggtggtggctatccaggtcgcggtggtg

SEQ ID NO: 158455 - DNA, 258 bp, Glycine max
ttcatctccctctttcttcttttcagctactttaggtctctctctctctctctctctattttctctctctctttcttcctttctttaatacttattaattcatcttttttatctttctttctttctttccccttttgtatttctgggttcgatattgttatcggttatttgtgcactgcttccgccggggctattcaggaatcatggctagggttttggctcagtctgttaatgtccctggtctagtggctgagcata

SEQ ID NO: 158456 - DNA, 253 bp, Glycine max
gggttttagcgcagttcttctagatttaaggaagatgggtaaggaaaaggttcacatcagtattgtggttattggccatgttgactctgggaagtccactaccactggccacctgatctacaagcttggaggcattgacaagcgtgttattgagagatttgagaaggaagctgctgagatgaacaagaggtctttcaagtatgcctgggtgcttgataagcttaaggctgagcgtgacagaggaatcacaatt

SEQ ID NO: 158457 - DNA, 254 bp, Glycine max; identical to SEQ ID NO: 147929

SEQ ID NO: 158458 - DNA, 254 bp, Glycine max
ggcaaatgcgaacaaaggtaaggtgaaatgtgctgatagctccagtttgggctaaggctatggccaatattgcagcctttcttcaatcagtcattgcattgcatatatttgcaagtccaatgtatgagtatttggataccaaatatgggatcaaagggagtgccctggcttttaagaacttgtcatttcgagtcttggtaagaggtggctacctgactttgaacacatttgtatcagctctattgccctttctt

SEQ ID NO: 158459 - DNA, 256 bp, Glycine max
cgagataactagaaacagtgtgatgaaaatgaaggtccttgttttcttcgttgctacaattttggtagcatggcaatgccatgcggtacgatatgattccctctccgaatgaacactggctatggtgcccgtactccggaggtgaaatgcgcaagttggaggcttgctgtggaagcacacaacatctttggctttgagaccattcctgaagagtgcgttgaagcaacaaaggaatacatccatggcgaacaatata

SEQ ID NO: 158460 - DNA, 261 bp, Glycine max
ggagaagaaaagcataacaagcagagcacattgtttagtgctagcatttccaggtcaaggccatatcaatcccatgcttcaattctccaagctattggagcgtcaaggggtgagaataacacttgttactactcgtttctattccaagaatttgcaaaacgtgcctccttccattgctcttgaaaccatttctgatgggtttgatgaagttgggccccaagaggctgggagccccaaggcctatatagatcgcttgtgcca

SEQ ID NO: 158461 - DNA, 256 bp, Glycine max
atcggccagcaccaacagcatcggcggcgacagtcactctccgacaacaacacttccgcggcgaaaaatgtctctggtggcgaacgaggatttccagcacattctgcgtgtgctgaacaccaacgtggatgggaagcagaagataatgttcgctatgacctccatcaagggtattggaaggagattcgccaacatcgcttgcaagaaggccgatgttgacatgaacaaaagggctggtgagttgagtgctgcagag

SEQ ID NO: 158462 - DNA, 255 bp, Glycine max
cacgttccgagttttctgatcgctcatagagagttcgacgcggcggttgcagaagaagattgcaagatgaagttcaacatcgcgagtcccaccactggatgccagaagaagctcgagatcgacgacgatcagaaactacgagcattttgggacaagaggatctcacaggaggtcagcggagatgcacttggtgaggaatttaagggctatgtcttcaaaattactggaggttgtgacaaacaaggattcccgatg

SEQ ID NO: 158463 - DNA, 244 bp, Glycine max
ccaaaaggtactaatgccgtggagtcggcaaatcctggcaagttgaggttacttgacttgactgaaaatgatagagtgttcaatattggtaagtacagcaagaatgaaaataaatctgatgcccacagaatggtgaggactggtcttcaaaaagaaggatcaagagtgatttttggtgttcctaaacctgggaagaaaagaaaatttatggaagtaagcaagcattatgttgcatatgggacgc

SEQ ID NO: 158464 - DNA, 255 bp, Glycine max
cacaaaacatctcatcattcacccaacaaaatggcgctgcttctgataattcccatctcactggtcaccctctggctcggttacaccctataccagcgattaagattcaagctccctccgggtccacggccctggccggtagtcggtaacctctacgacataaaacccgtccgcttccggtgcttcgcggagtgggcgcagtcttacggccccataatatcggtttggttcggttcgaccctaaacgtcatcgtt

SEQ ID NO: 158465 - DNA, 262 bp, Glycine max
ctctgctcgtgcctctagggttatcatatctccatttccatttcctctctctcagtttccaagaatcttaagctatgggaaagtcttacccaaccgtgagcgctgattaccagaaggccgttgagaaggcgaagaagaagctcagaggcttcatcgctgagaagagatgcgctcctctaatgctccgtttggcatggcactctgctggaacttacgacgtgagctcgaagaccggtggtcccttcggaaccataaagcaccc

SEQ ID NO: 158466 - DNA, 258 bp, Glycine max
cctcattcttatttttttcctctcttcactttcactctctctctctctctcagccatcatcatgggagcagtgattctcccagatctcggcaccgagattttgattccggtctgcgccatcattggaatagggttcgccctcttccagtgggtcctcgtctccaaggttaagctctccgctgccagagacgcttcccctaacgccgccggcaaaaatggctacaacgattacctcatcgaagaagaggaaggcctcaa

SEQ ID NO: 158467 - DNA, 250 bp, Glycine max
ctcacactcactgcagatctcaatccatggctaccattgttagcatcaaggcccgccagatctttgacagtcgtggcaatccaaccgtcgaggtggatttgacatgctccgatggtacttttgctagagctgctgttccaagtggtgcatccactgggatttatgaggcccttgaattgagagatggaggatctgactaccttggaaagggtgtatcaaaggctgttgacaatgtgaacaccattattgc

SEQ ID NO: 158468 - DNA, 227 bp, Glycine max
aaatatatcatcaattataagcatgggtttgtggaacacaacgaatgcagtgtcttgccgctttcacaagtttggtgatgaccaaaagaatctggtcttccaaggtgatgccacgtcttcttccaggggcatagaactcacaaagttagacggtggaggaaaaccagtgggtggcagtgtggggagagtgttatactcttctccagtgcacctttgggaaagctcta

SEQ ID NO: 158469 - DNA, 231 bp, Glycine max
ctctctctctccaatggccaaagacctcgaaacggagattcaaagtgggttgcctcacaaggactaccacgacccaccccccgccccattctacgaccccgccgagctccgaaagtggtccttcttccgagccctcatcgccgagttcgtcgccaccctcctcttcctctacgtcaccatcctcaccgtcatcggctacaaccaccagacagccaccgccgccgagccctg

SEQ ID NO: 158470 - DNA, 254 bp, Glycine max
gaacataccaatctacaataaacgatgattctcattatctccctcattttttctcttctctctttctcccatgcttctgtcctagatttctgtgttgcagattatgcaggtcctattggacctgcaggatattcctgcaagaagccttcaaaggtcacagcagatgattttgcttacagtggccttggcattgctggtaacacctcaaacattatcaaagctgcagtgacccctgcatttgatgctcagtttgc

SEQ ID NO: 158471 - DNA, 255 bp, Glycine max
ttcttatttttttcctctcttcactttcactctctctctctctctcagccatcatcatgggagcagtgattctcccagatctcggcaccgagattttgattccggtctgcgccatcattggaatagggttcgccctcttccagtgggtcctcgtctccaaggttaagctctccgctgccagagacgcttcccctaacgccgccggcaaaaatggctacaacgattacctcatcgaagaagaggaaggcctcaacg

SEQ ID NO: 158472 - DNA, 257 bp, Glycine max
tgtggttgaaagttaagaagtagcaaagatgtttccattcgggcacaagggtcaaaagataaaggggactatggtggttatgcagaagaatgtgttggatatcaacagcatcaccagtgttgacgggatcgtcggcaccggcttagacttcttaggcagtgcactcgatacagttacttttttagcctcctccatctccatccaacttattagtgctaccaaggctgatggtgggacaggaaaagttggaaaggcta

SEQ ID NO: 158473 - DNA, 255 bp, Glycine max
cttcttcttcttttgtttctttttttttctgcgtaggcaaagcgagagagagaaaagcgtgaatcatgtcggacgaagagcatcacttcgattctcaggcggatgcgggagcgtccaagacgtatcctcagcaggctggtaccattcgcaagaatggctacatcgtcatcaaatccaggccttgcaaggttgtagaggtctctacgtcaaagacaggcaagcatggacatgcaaagtgtcactttgttgcaattg

SEQ ID NO: 158474 - DNA, 253 bp, Glycine max
atggccactcttcttcttcccacgctcctccttctcatacccttcgccaccctcgtctccgcccgccctcacctcgccggagactttctccgactgccctccgaaaccgataacgatgacaacgtccagggcacccgctgggccgtcctcctcgccggttccaatggctactggaattacagacatcaggctgatgtttgtcacgcctatcaaatactaaggaaaggtggcctgaaagaagaaaatattattg

SEQ ID NO: 158475 - DNA, 249 bp, Glycine max
ccaacatattcttcagttagctcccccaacctatacacttcaccaccacaccacaaccctaccctctctctctgtcatggtcattggaggagccttccctcgtttcgacccaatcaccaaatgtagcacccaagaccgctccaaccagaccatcgcctcggacctcgatggcaccctccttgtctcccggagtgccttcccctactacttcctcgtcgccctcgaagccggcagcgtcttacgagccct

SEQ ID NO: 158476 - DNA, 247 bp, Glycine max
atcgaagaaaagagaatgagtagacgctcgagcagaactgtctacgttgggaatctacctggtgatatccgtgaaagagaagttgaagatttgtttctgaagtatggacacataacacacattgacctaaaggttcccccaagaccacctggttatgcatttgtagagtttgaagatgctcaagatgctgaggatgcaattcgtggtcgtgatggctatgattttgatgggcacggttacgggtgga

SEQ ID NO: 158477 - DNA, 251 bp, Glycine max
caagaaaataaagtttatcaataacaacatggacatgaagttgaatattccagcaattaatgttttattcttattgctagctatttctagtacaactcaatcggttgacattaatataaaaaaatttggcggaggtgcagatataacacaggctttgacaaaagcttgggaagaggcatgcgcagcaacaagtgcaagcaaaattgtgattcctggtgggtcatacaagatggcagcagttgatttaaaag

SEQ ID NO: 158478 - DNA, 232 bp, Glycine max
tctcaacatgcagagattgtcatcgtttgagtttaatgctggaagtgcttgatcaagaagcagcagctctatattcattcaaatcacaagctcagaggcttgaagcacttcatcaatttaaatcgggaaaggtttctatacttcttgcaactgatgttgccagccgtggtttggatattcgtacagttgaccttgttatcaattatgatgttccaaggtttccacgagttta

SEQ ID NO: 158479 - DNA, 252 bp, Glycine max
cgcaagaaaaagaaagaatcccaggcgaggagaaagatggaggggaaggagcaggatgtgtcgttgggagcgaacaagttccccgagagacagccgattgggacggcggcgcagagccaagacgacggcaaggactaccaggagccggcgcgggcgcggttggttgacccgacggagtttacgtcatggtcgttttacagagcagggctagcagagtttgtggccacttttctgtttctctacatcaccgtc

SEQ ID NO: 158480 - DNA, 261 bp, Glycine max
ggaaaagcttctctattagctgcacttgacgacgatgttggcttgcatagggacatcttcatctctgcttccccaggaaatatgcacaatgcattggttggacaccggacatacttgaacttaaagactataaggccaaatatggcattgatgggtcagcttttcctgaataaaaccatagagtggtcagagtttcaggatgcagtggttgaaggtcaccaaaatagacaaggggaactaaggcagaggacgccaaaacaa

SEQ ID NO: 158481 - DNA, 256 bp, Glycine max
cttttagggtttcctttttgtttctcctttccagatctgcatcttccatttcttaggattaagcggtgagattcgtgaatctgagaaatgtcggattcttctcgggaggagaatgtttacatggcgaaattggcggagcaggccgagcgttacgaggagatggttgagttcatggagaaggtagcaaagactgtggaggttgaggagttgacggtggaggagagaaatcttctctctgtggcttacaagaacgtga

SEQ ID NO: 158482 - DNA, 258 bp, Glycine max
  unsure (1)..(258): unsure at all n locations
acattctaaancaaaggacccagttttacatttntntttgttcctgagttccaatggctcttcaggctgcttccntggtttctgcttctttttctattgctaaagagggaaagtctggtgtatctctcagggacaccanaatgtttggtgtttcattgtcggatactctcaaatctgacttcagctctccctcatcgacttgnaaaagggnattccancaaaaatttggccctttgagggttcagtcagtggcaaaac

SEQ ID NO: 158483 - DNA, 254 bp, Glycine max
cggatgcaggctgatgcaacattacctgctgctcagcgccgaaattacactaatgccttccatgcactctatcgaattactgctgatgaaggggttttggcgctttggaaaggtgctgggcctactgttgttagagccatggcattgaacatgggcatgcttgcatcttatgatcaaagtgttgagttcttcagggattctgttggtcttggtgaagctgctactgttctaggtgcaagttccgtttctggatt

SEQ ID NO: 158484 - DNA, 259 bp, Glycine max
ctttcttccatcttcttctcttttcacgtcattatcctaaacttgcagattttcacatcccaagcaacatgaaggggaggttcatgtttctgtcggtgctcctttgtgccacctttcatgtctccttctccattactgacggcttagtacaaacggcaacttcgagctgggtccgaagccctccgccctgaaaggaactgtggtgattggtggcagccactcgatcccagaatgggagatctctggcttcgtggagtac

SEQ ID NO: 158485 - DNA, 266 bp, Glycine max
atagtaaaaaaaggacattcattcatctatggctacccttattgctcccagcaagcactctccccaagaagatgctgaagctctcagaaaggcttttgaaggatggggaactgatgagaacactgtcatagtaattttgggtcatagaactgtgtatcagaggcagcaaatcagaagagtttatgaggaaatttaccaggaggatcttgtgaagcgcctagagtctgagatcaaaggagactttgagacagccgtgtaccgatgga

SEQ ID NO: 158486 - DNA, 265 bp, Glycine max
ctgcattggagctggctatgttggtggcccaaccatggctgtaattgccttgaagtgtcctgagatcgaggtggtcgtggtggacattgctgcaccgcgaatcaacgcgtggaacagcgaccacctcccgatatatgagcctggccttgatgatgtggtgaagcagtgcagggggaagaatctcttcttcagcactgatgtagagaagcatattgccgaggctgacattatctttgtctcggtgaacaccccaacgaagactcag

SEQ ID NO: 158487 - DNA, 207 bp, Glycine max
aattcactctgtacaattcttcgttcgtgctctgcagttatatccttgttgcgcgtcaatggcggacgctgaaaccttcgcttgccaggctgagatcaaccagcttctaagtcgcatcatcaacacattctccagcgacaaggagcctgtcttgcgtgaactcatcagcaatgcttctgatgctttggataagattcgattcgagag

SEQ ID NO: 158488 - DNA, 257 bp, Glycine max
gccgcagcttgaaacagagcagaggaccttgaagagctatggctgtcggaaagaataagaggatttccaagggaaagaagggtggcaagaagaaagccgctgatccctttgccaagaaagactggtacgatatcaaggccccttccctcttccaggtcaagaatattggcaaaaccctcgtctctcgtacccagggaaccaagattgcatccgaaggactcaaacatcgggtttttgaggtctcattggctgatctc

SEQ ID NO: 158489 - DNA, 249 bp, Glycine max
gtgtctgtctctgtgtttgcggctgaggattccgaacgagcgaccttcttcgtttctcgcaaagtttaagtcatcatgggtaaggaaaagactcacatcaacattgtcgtcattggacatgtcgactctgggaagtcaactaccactggtcatgtgatctacaagcttggaggtattgacaagcgtgtgattgagaggttcgagaaggaggctgctgagatgaacaagaggtcattcaagtatgcctgg

SEQ ID NO: 158490 - DNA, 254 bp, Glycine max
gaagagaaagattatgggtatcgtggaagaggctcacaacgtgagaatagtagggaaggggaatgaaatcgtgattcttgctcatgggttcggcacggaccaatcggtgtggaagcaccttgtaccgcatctggtcgatgattaccaagtgatcttgtacgacaacatgggtgctggtaccacgaacccagactacttcgacttcgaacgttactacacgatcgatggttttgtctatgacctactcgccatct

SEQ ID NO: 158491 - DNA, 266 bp, Glycine max
caaggcagaaagcaagctcatcctagagttttaaaaatggcagcagcctcctccatggctctctcttccccatccttggctggcaaggccgtgaagctgggcccatcagcccccgaagtcgggagggtcagcatgaggaagaccgtcaccaagcaggcctcctccggaagcccatggtacggcccagaccgcgtcaagtacttgggcccattctctggcgagcccccgtcctacctcactggcgagttcccaggtgactacggctg

SEQ ID NO: 158492 - DNA, 250 bp, Glycine max
cttctctctcacgttttccgcttcagttttctcgggaaaatcatggtgaaaggtccaggcctctactctgacattggcaagcgagctcgcgatcttctgttcaaggattatcagaatgaccacaagttcaccatcaccacttgaactgccaccggagtggagatcacttcaactggactcaggcaaggtgagctatatttcggcgatgtcagcactaaggtgaagaacaataacatcgcgactgatgtca

SEQ ID NO: 158493 - DNA, 255 bp, Glycine max
gaagaattgatcaatgggcaagtctgtagttgagaagctactttggatggcaattgtgtgcttggtgctgggtgtaatttccattactcccaaggcccaagcagcagtgacatgcaaccaggtggtgagcaacctcaccccatgcatttcttatgtgctcaatggtggcaaaaccgtgcctggcccttgctgcaatgggatcaagaccctctttaacctcgctcactccacaccagaccgccaaaccgttggcaa

SEQ ID NO: 158494 - DNA, 251 bp, Glycine max
atggctcgtcactccttgctcttagccctcctcctcttcgccgccgtggccaccgccgcgatggcgtggcgcgtccgacgccgacgacatcctgatccgtcaggtggtgccagatgttggcgaagcgaagaggaggacaacctgctgaacgccgagcaccacttcgcacgcttcaaggccaagttcgccaagacctacgccaccaaggaggagcacgatcatcgcttcggcgtcttcaagtccaacctccg

SEQ ID NO: 158495 - DNA, 251 bp, Glycine max
caagattgacaggcgatccggcaaagagcttgagaaggagcccaagtttttgaagaacggtgatgctggttttgttaagatgattccaaccaaacccatggttgttgaaactttctccgagtatcctccacttggtaggtttgctgttagggacatgcgtcaaactgttgctgtgggagtcatcaagaacgttgagaagaaggatcctaccggagccaaggtcaccaaggctgcccagaagaagaagtgaa

SEQ ID NO: 158496 - DNA, 253 bp, Glycine max
gaaaagcataacaagcagagcacattgtttagtgctagcatttccaggtcaaggccatatcaatcccatgcttcaattctccaagctattggagcgtcaaggggtgagaataacacttgttactactcgtttctattccaagaatttgcaaaacgtgcctccttccattgctcttgaaaccatttctgatgggtttgatgaagttgggccccaagaggctgggagccccaaggcctatatagatcgcttgtgc

SEQ ID NO: 158497 - DNA, 258 bp, Glycine max
gaagtgcaaaaacagtgtaacaaaaaggaaaagaaaaccaatatgaagttcactataatcacaatatttttctctttatttctacttgactttggttttgcacaacagggggatcttgacatatcaagatttgaggaaaaccaaatacaaaatataggccaggctttcttaagtgcctggactcaagcatgtgcatcaccaactgctgtcaaaattgtgattccagctggcacataccaaatgggtgcagttgatgtc

SEQ ID NO: 158498 - DNA, 251 bp, Glycine max
caatggccaaagacctcgaaacggagattcaaagtgggttgcctcacaaggactaccacgccccaccccccgccccattctacgaccccgccgagctccgaaagtggtccttcttccgagccctcatcgccgagttcgtcgccaccctcctcttcctctacgtcaccatcctcaccgtcatcggctacaaccaccagacagccaccgccgccgagccctgcagcggcgtcggcgtcctcggcatcgcttgg

SEQ ID NO: 158499 - DNA, 251 bp, Glycine max
cagacttgggagtgaactgaaaaagcataaagtatggcttcgacggcagcgtaccttgctcggcgcgcggccagaaggagagggttcggatcctctaccgccgcgccctcaaagacactcgcaactgggccgtacatcgccacctcttctacgacgacgcttcaaacctccgcgaaaggttcgaggagaacagacacgtggaagaccctgataccattgacacgctcataacggatgctgaagcttcctac

SEQ ID NO: 158500 - DNA, 253 bp, Glycine max
gagaagcattagcaaaagcaagaagaactagtctaagcagaaatggcctcttcagtgatggcatctgtggccctcaaacctgcccctttcactgttgagaagtcctcagttagaggccttccctccctctcaaggaactcctcttcattcagagttgtggccagtggtggcaagaagatcaagactgacaagccttatggaattaatggtggcatggctttgagggaaggagttgatgcatctggcaggaaag

SEQ ID NO: 158501 - DNA, 260 bp, Glycine max
agtttgttgtgagctataagctagtttatcgtgaggagaatatgaagttgtttgttttctttgttgctgcagtagttttggtagcatggccatgccatggcgcaggctaccaaagggtccctctccgaatgaaaactggctatggtgagcgttcttcggaggtaaaatgcgcaagttttaggcttgctgtggaagcacacaacatccgagcctttaaaaccattcctgaagagtgcgttgaacccacataggactacatt

SEQ ID NO: 158502 - DNA, 244 bp, Glycine max
cttcaatatttaccgccccgccggagaataagaagaaggatccgagtcacagtcactgctcatcgccatgtctcgggttgataacagaaattcctcagccaccaagcgtgctaggactgatggtagtcgtagggaagatgattggacatgccccagctgtggtaatgttaatttctctttcaggacaacttgtaacatgcgtaattgcactcaaccaaggccggctgatcatcattctaaatct

SEQ ID NO: 158503 - DNA, 243 bp, Glycine max
caatagtcatggaaactagcaagttcagtttgctattcttttacgtaatttgtcttgctatattccctacccttaacgctaacataggtcacttcgatcatgtctggcataggcgattaaaagaagcaagagaagccgcaaaacaagcttacaagccgaaccccatgaaagttaccgctgagttcaatacacatgtcatcagggcaatgagaggctccaacaactcaagaaagggcttatcaa

SEQ ID NO: 158504 - DNA, 249 bp, Glycine max
caaaagtgactcagaaagtattctttgacgtcagtattggaaatccagttgggaagcttgtgggacgtattgtgattggactgtacggcgacgatgtcccccaaacggccgagaacttccgtgccctttgtactggagagaagggctttggctataagggctccaccttccatcgtgtcatcaaggatttcatgattcaaggaggagactttgacaaaggaaatggcactggaggcaaaagtatatatg

SEQ ID NO: 158505 - DNA, 271 bp, Glycine max
cgcataattagggcccatgctcggttcggtaacaaatgggtcagcatagcccgcctcctctcggtccgtaccgataacgtcatcaagaatcactggaagtcgctgtgataactactagtgtagttataatactctttctcgccgttaagaatttggaaatatcttcatttaccatggattggtgtcaaaatcaaaacggaagttttaaaagtacagatgcactatgtattgcggcagaagctgatgaggaggaacttgatttcacaaaggt

SEQ ID NO: 158506 - DNA, 215 bp, Glycine max
tggaggaattggaactgtgcctgtgggacgggttgagactggtgtcttgaagcctggaatggtggtgacttttgcaccaactggactgacaaccgaagttaagtctgtggaaatgcaccatgaagctctcacagaggctcttcccggtgataatgttggattcaatgttaagaatgttgctgttaaggatctcaagcgtggttatgttgcctcga

SEQ ID NO: 158507 - DNA, 240 bp, Glycine max
caaaagagcaaaatcttttttattgcatggtctccttcggtagcccgcattcgccctaagatgctatatgcaacatccaaggacaggttcagaagggagctgcagggcatccattatgagattcaggcaacagacccaaccgagatggatcttgaagtcctcagagagcgtgcaaactgagcacctacacaagagggttgtgtctaggtgatgtagttaagatatctgaagcctcaggga

SEQ ID NO: 158508 - DNA, 241 bp, Glycine max
agaaaatgaaagtccttgttttctttgttgctatagttctagcagcatggcattgccatggctcagaccatgaccatgaccatggccacacctaccaaattttccctctgagaatgaaaactggccatggtggccactacattccggagggatcatgccaaagttggaggcttggtgtggaatcacacaacgtcattgactggaacaccgttcctcaagattgcgagggatatattgggca

SEQ ID NO: 158509 - DNA, 243 bp, Glycine max
gtcgaaaagttcatctctccctctctctcacacatcccagccatgagcctcttcggtataggcagaaaccagagaacattccgcccgaaaaaaagtactccttctggaagtaagggagctcaacttagaaaacatattgatgccacgttgggtagtggaaatctgagggaagcagtaaagctacctcctggggaggatttaaatgagtggctagctgtcaacactgttgatttcttcaaccag

SEQ ID NO: 158510 - DNA, 248 bp, Glycine max
tcatcatcgaagcccgtcgcgagaagaagctgcttcgtcgcggttcccaaaatcgcgtttcccaagctccgtttcaaacccgtcgctatggctacgctcggcgctcgcatggtggccgccgcacccaccgtcactccgccggcctcgctcgacttcgaaacctccgttttcaagaaggagaagattaacctcgctggacacgacgagtacatcgtgaaaggagggagggatttgttccctctgttgca

SEQ ID NO: 158511 - DNA, 245 bp, Glycine max
gtcaagctaccaaggatgctggagtcattgctggtcttaatgtgatgcgaattatcaatgagcctactgcagctgccattgcgtatggtcttgataagacggccacaagtgttggtgagaagaatgtgttgatttttgaccttggtggtgggacatttgatgtttctttactaaccattgaggagggtatcgttgaggtgaaagccacagctggtgacacccatcttggaggtgaggattttgat

SEQ ID NO: 158512 - DNA, 277 bp, Glycine max
ttctgaatgttgttggtaatgctgtgaagttctcaaaagagggttgcatttccatcactgctttcgttgcaaagcctgaatcctttagagatgctagaattcctgactttcttccagtgccaagtgataaccacttttatttgcgagtacaggtaaaagattcaggatcaggaattaatccacaagatatcccgaagttattcactaagtttgcacaaaaccaatcattaacaagaaatcctgctggaagtggacttggcctggcaatttgtaggag

SEQ ID NO: 158513 - DNA, 278 bp, Glycine max
ctccgctctcaaatccgccgtcgccggattgaacgaaatcagtgagaatgagaagaacggattcatccagcctcgtcggccgctatctcagtggcgaacgcagcatgtggaatggagcaagatccagacgcctacggacgaagtggttgtgccttacgacactttggcgccaactcctgaaggttcttcggaggtgaagaatctattggacaagcttgtggtgttgaagctaaatggaggcttgggaacaactatgggttgcactggtcctaaatctg

SEQ ID NO: 158514 - DNA, 278 bp, Glycine max
gccatggctgctctgcaatacttggaatcgctgcgcaacgcgatcctgagctctccgattggtacaattcgctggcggatctataccagaacaagctctggcaccagcttaccctcaagcttgagcagttcgtggctctcgccgtcttccaggccggtgatgcattaatacaattatatcacaatttcatcacagactttgagaccaaaatcaaccttctcaagcttgcgcatttcgctgttatagtttctcggcagtatgctgagaaagaagctgcg

SEQ ID NO: 158515 - DNA, 273 bp, Glycine max
cacaaactcagggtagggcagagagagagagagagagagagagagagagagagaatgggagggtgcgctatcgcggtgcatggtggcgctggtgtcgaccctaatctcccactcgagcgccaagaagaagcgaaacaacttctcacgcgctgtctcaatcttggaatctctgctctaaattctaatcttcccgacatagatgtcgtcgaacttgtggtgagggaattggaaacggatccgctgttcaattcgggccgtggatctgccctgaca

SEQ ID NO: 158516 - DNA, 272 bp, Glycine max
cgcagtgttagggtttctgtagcctccaaccagaaagagagggaaatggctcccaaacatcctagtacgggtttgtttgttggattgaacaagggtcacgttgtcaccaagaaggagttgcctccacgcccttcagatcgtaaggggaaaacaagcaagcgagtgcactttgtgaggaacctcattcgagaggttgccggctttgcaccttatgaaaagcgaataactgagttgctcaaggttggaaaagataagagggcactgaaagttgc

SEQ ID NO: 158517 - DNA, 275 bp, Glycine max
aagtgacaagaccattgacggaagaggagttgatgtctaccttgctggtggggctggtattaccatccagttcatcaagaatgtgatcatccatggagtcaagatttttgacattcaggttggtaatggtggacttattatagattctgagaaccactatggtttgaggactatgagtgatggagatggcatttccatctttggctctagcaatatttggattgaccatgtttccatgagaaaatgcaaagatggattgatagatgctattcagg

SEQ ID NO: 158518 - DNA, 275 bp, Glycine max
gtggatggagagcacgtatcaagcccaatgttgtggttgccaaggatggctctggtcagttcaataccgttgctcaggctattgcttcataccctaagaataaccagggtaggtacattatctacgttaaggccggtgtctatgacgagtacatcaccgttcccaagactgcagtcaacattctcatgtacggtgatggccctgctaagaccatcatcaccggtcgcaagaactacgtcgaaggtgtcaagaccatgcaaactgccactttcgcc

SEQ ID NO: 158519 - DNA, 275 bp, Glycine max
ttgggcgctgatgtggacttcacctatgcttctcacagaggctgttgatgaatacaaggaggccgaggcgcttggactggataccgttccgggcctcgttggccctgttacatagctgttgctctccaagcctgccaagggagttgagaaatccttttctctcctctctctccttcgcaaggttcttgctgtctacaaggaagttattgctgaccttaaggcagctggtgcttcatggattcagtttgatgagcctgaccttgtcttggaccttg

SEQ ID NO: 158520 - DNA, 276 bp, Glycine max
gattggtcccattgattccgaagagaaaagaaaagatgtttgagccacaacagctatacactcgcgcgaagaccgaggaattcgacctcgaatcaggagaaaccctctacccagggctgagcgtcggcgagaaccagctccgatggggtttcatccgcaaggtctacggcatcctctccgcgcagatcgtcctcaccaccctcgtctccgtcaccaccgttttctatactccaatcaatgacctcctcaagggcaattccaccctcctcctcatcc

SEQ ID NO: 158521 - DNA, 271 bp, Glycine max
gagaaagggaagaggagagagagacgaagaagaagagtgtttctcacatcacatggcctccttgcccttggggcaccaccaccaccaccacaaaccggcggcggcggctatacatccgtcgcaaccgccgcagtctcagccgcaacccgaagttcctcgccggagctccgatgtggagaccgataaggatatgtcagctactgtcattgaggggaatgatgctgtcactggccacataatctccaccacaattggaggccaaaatggggaa

SEQ ID NO: 158522 - DNA, 270 bp, Glycine max
gggagaccaaatgctgattctgaaaatcctgtcttgaaagaagagcaagatgcccaagttggtaaggggtcacgaggtgatgttaccatattgcctactctagttgtcaataatagacagtatcgaggaaaattggagaaaggtgctgttatgaaagctatctgtgctggttttgaagaaactactgaaccagctgtttgtttgagcagtgatgtggagacaaatgagtgtttggagaataatggtggttgttggcaggataaagtagct

SEQ ID NO: 158523 - DNA, 273 bp, Glycine max
ctggctcagaaggaacgctagctatatgcttaacacatgcaagtcgaacgttgttttcggggagctgggcagaaggaaaagaggctcctagcgtgaaggttgcttgtctcgcccaggaggtgggaacagttgaaaacaaagtggcgaacgggtgcgtaatgcgtgggaatctgccgaacagttcgggccaaatcctgaagaaagctaaaaagcgctgtttgatgagcctgcgtagtattaggtagttggtcaggtaaaggctgaccaagccaa

SEQ ID NO: 158524 - DNA, 272 bp, Glycine max
acgagatggagcaaataaagcacagaacagttgaagtgaatggcataaaaatgcatgttgcagagaaaggagagggtccagtggtgttgttcctccacggcttccctgagctctggtactcatggcgccatcagattctctctctcagctccctcggctaccgcgccgtcgctcccgatctccgtggctacggtgacaccgaagcaccaccttcaatcagcagctacaactgcttccacatagtgggtgatctcgttgcgcttattgactct

SEQ ID NO: 158525 - DNA, 273 bp, Glycine max
tcaagatcgaattgttggtgcccatttcttcagtcctgcacatgttatgccgcttctggaaattgtacgtaccaagcagacctctgcccaagtgatagttgacgtgttagatatttcaaagaagataaagaaaactccagtggtggttggaaactgcacaggatttgctgttaataggatgttcttcccatatacccaagcaggtctcttgcttgttgaacgtggtgcagatgtttatcaaattgatagagtaataaccaaatttggaatgcc

SEQ ID NO: 158526 - DNA, 279 bp, Glycine max
cgagtgaaggtgggaatccacgaccatgcagacaaaacgcacctacatgatccagatgggacgagaccaccatgccctcgaacgttcaccgaccacctcagctggttcgacgcctccctcaaatcagcgtccccctccgcggagattctctacacttacaaacacgtggcccatggcttctccgccagactcagtcccaaggacgtagacacacttgcaaaacaacccggcatcctctccgtcatccccgaactcaaatacaaactccacaccacaagg

SEQ ID NO: 158527 - DNA, 273 bp, Glycine max
tctctctctacaaaacttagctctgtttttaattattccttgcattctcttgtattaagatggaagcaactaccatcaccaatgggagccaaaacggttcgttttgcttgtccactactaagggaagtagtgatccgttaaactggggagcggcggcagatgcgatgaaggggagccacctggacgaggtgaagcgcatggtggccgagtaccgcaagccggtcgtccggctcggcggagagacgctcaccatcgctcaggtagccgccgtag

SEQ ID NO: 158528 - DNA, 274 bp, Glycine max
  unsure (1)..(274): unsure at all n locations
actaaactaaactagcgaagagaaatgtccgaaaacggagaagaganattactcgcngtggcgcggcacatagcgaaaacgctgggccacaacaacaccatgtctgatgacatattccaaatactatcgaacttcgacggaagattctcgagagagaatctttctgagaaaggcgcagatgcggatcccagaggctgcgccgcactggatcattccctcaaaaccctagaccgccggatctctctctacgtctcctacgaccgccctatctggt

SEQ ID NO: 158529 - DNA, 271 bp, Glycine max
aaaggaccaaccatgtcgcctagtttcgtcttcgacccgcctagcgacgaagaaatcgaacactctgaacacgaagaagaagaagaatccgaagaagaaccagagtcaggatcaggaacaggatcagaatcagagtcagaaggagaaggagaagaagaagaagggcacgaagaagcgcgggttccgaagaagaagaagaagaaaacgcagtctccatgggactttgctaaatacacggaatcagtggcggaggaacacgctcgcaggagca

SEQ ID NO: 158530 - DNA, 270 bp, Glycine max
ctcaccgattgctagaatggaatttcgatgctcagtcatctcttttaccattctcttctctcttgctcttgcaggagagagccatgtccatgcatcgctacctgaggaagattattgggaagctgtttggccaaacactcccattcccactgcactgcgagagcttctaaagcctctccctgcacgtgttgaaatcgatgaactccctaagcaaattgatgatacacagtacccaaaaacattcttctataaagaagaccttcatccagg

SEQ ID NO: 158531 - DNA, 271 bp, Glycine max
ggtttctatgcatttgaatcagaggatgacgtagatccttcgattagatatgttggaaccaattaccctcatgttaagcggcgtaagaacttgcctgaccctgtagaaaaagagaaaggtgtcagtctttggtcaatgattaaggataatatagggaaggatctaacaaaagtttgccttcctgtttattttaacgaacctctttcctccctgcaaaaatgttttgaagaaatggagtattcatatcttctggaccaagcatatgaatggg

SEQ ID NO: 158532 - DNA, 273 bp, Glycine max
ctatgccacacatggaagtggacaaatggattcagctgccacaccagaaaactcatcaatatcaattggagatgatgattttgagcagagttcccaaaagtgtaaatcaggaggggatgaatatgatgaagatgaacctgatgccaaaagatggaaaattgaaggtgaaaatgagggtatgtcagcccctggaagtagaacagtgagagaacctagagttgtagttcagacaaccagtgacattgatatccttgatgatggctataggtggag

SEQ ID NO: 158533 - DNA, 267 bp, Glycine max
cttaggtttgtcccacaagtagtgatgctaagcctatgtttgacatgaatttcatactacttatctatatggcactctcagttgctggttcattttgtgttttgctgcgagccatgatggtgttaaatgctggactttggacagcacagacacttttcacaaagatgttgcatagtgtgctccgtgcccccatggcatgttttgattctacaccaactggaagaatattgaacagggcttccacagatcaaagtgtgctagacttgg

SEQ ID NO: 158534 - DNA, 269 bp, Glycine max
tctttaccaactgctactcttgacggacccataccacctgtaggagccttgagtagcgctctcagtagattacaatcaaataggcctcttagagaattgagagaggttgccaagggagttactaaacgaattggaggtcctatgcatgaattggctgcaaaagttgacgagtatgctcgtggcatgatcagtggttctggatcatcactttttgaagagcttggactctactatattggtcctgttgatggtcataacataaatgatct

SEQ ID NO: 158535 - DNA, 271 bp, Glycine max
aaaatcgaatcccattttaattctcagatccaagcttgggagacagagaaagagaaagagaatggacgccattgattctgtgttcgatccgctgagagaattcgcaaaggacagcggtgaggctcgtgaagcgctgccacaaacccgatcgcaaagaaattcctccaaggttgccgtccgtattgcaattggttcgtcgtgaatggaatccgccggttcctccgtgagctcaatttcaatcccattaaccacatcattgtcggatctgggt

SEQ ID NO: 158536 - DNA, 266 bp, Glycine max
atttttcagtttctcagtttcttattcgttagatctcatcttacactcaccgtcaagttcgtctcgcgccaccgtcgacgcagttccggccactgcctttggttccctcactttctgtctcttcttcttcttctcagaaatatgccttctcagaaggttgaaacgggtcatcaagacacagtccatgatgttgcgatggattattatggtaagaggctggccacggcttcatcagatcacacgattaagataattggggtgagcaa

SEQ ID NO: 158537 - DNA, 268 bp, Glycine max
ctttctctctctcattctcttctccatcgcgcgtaagaaacacattttagttgctactaatgggaactgttgaagctgcaaacaaggatgcaaatggaagtctcctagagaaaaatccttcagttgtttttgtgttaggtggcccaggaagtggaaagggtacccaatgtgcaaatattgtccaaaattttgggtatactcatctcagcgctggtgatcttctgcgagcagaaatcaaatctggttctgaaaatggtacaatgattca

SEQ ID NO: 158538 - DNA, 267 bp, Glycine max
gtggaagttcatgaaggtgagtgggataaatctggcaatatcaaggtgcttacattcgctgatggggacactgttgagaccttaaaggagagagttgattttgatgatgaaaacaagaagataacctacaccatattggagggtgtcatgttgaagtactataagagctacaaggttatcgttcatgttttaccaaaaggtgatgagcacagccttgtgaagtggactttcttgtatgagaaggtggatcacactgcccctgagcca

SEQ ID NO: 158539 - DNA, 268 bp, Glycine max
tacagatcaggatatggagaagggcaggaagggcagtggatagagccactgctgagcatctctttgaggtcatcaactcaagggaggatgtgttgaggaggttgatccgccgttgcgcttatctcaagtatgttgaggcaaggcttggtgataggacactctttgcagatgagattctcaaagatggtttttgcttgaacatgattgaaacaccactttgtcctttgaaggttgtcacaaacttgcaagaagctgtttgggatgctga

SEQ ID NO: 158540 - DNA, 267 bp, Glycine max
gtcagcccggtctctgttgcacacttctcgcagtacaagctaactatgttactactcaagcgacttgaaaacctaggcttccaaatatgtgcgcctgaaagtttggaaggaaatgaacagtcttgtgagaaaaaaataatgatgggccatgagtgtgtttccattgatgccagcaatgactttgtaacagtaactgcatcttctatcattaaagggaagcgtgtagaacagaacattcactgtaacatccttattggtacagatggt

SEQ ID NO: 158541 - DNA, 264 bp, Glycine max
ttattctagtaatacatttctgggttttgtttgccttgtgtgtatctttctattgacgagaataatggaatgttcccaattctctgttttttttgcttttgtccatttttgtgggaatttgtttagcttctactgaggaacaggaaagggacaggattgccaagctgccaggacaaccagaaaatgtgctatttgcacactactcaggctatgtgactgtgaatgaagaagctgggagagcattgttctattggctggttgaga

SEQ ID NO: 158542 - DNA, 265 bp, Glycine max
gcaaactggtagtctctactctgattgggatcttctccctccaaagacaatcaaagatcccgaggctaaaaaaccagaagattgggatgacaaagaatttattcctgatcccgaggataagaaaccagaggggtatgatgacatcccaaaagagctcccagatcctgaagccaagaagcctgaagattgggatgatgaggaagatggtgagtggacaccccctaccattgccaaccctgattacaagggcccatggaaggcaaag

SEQ ID NO: 158543 - DNA, 268 bp, Glycine max
cactccctcctcttcacacattttcttagctctctccaacaatccctctcgttcacactttcagattgtgtgaagatgggggctggtggccgaactgctgttcctcctgccaacaggaagtcagaggctgaccctttgaagcgggtaccatttgaaaaacctcagtttagtctcagccagattaagaaggccattccacctcactgtttccagcgctctgttctccgctcattctcctatgttgtttatgacctcaccatagccttct

SEQ ID NO: 158544 - DNA, 266 bp, Glycine max
ccaagatgtaaacaacctggatcaagttcgtgctttggagaatgagatgctccatcgcattaagcaacaaggattggacattgttcctcgtattctcattatcacccgtcttctccccgatgcagtaggaactacttgtggccaacgtcttgagaaggtgttcggaactgagcactcccacattcttcgagttccctttagaactgagaagggaattgttcgcaagtggatctcaagattcgaagtctggccctacttggaaactt

SEQ ID NO: 158545 - DNA, 262 bp, Glycine max
atcggaacaaacagggaatataagagagaaaaagatgggtttcataatggaattcgcggagaacttggtattgaagttgatggaggatccgaaggaaagggatcggaggttccgggagcacgtttatagagtgaaggacaggtgcgagaagacgaaggagatgtggagctaccctatgcgaccctatgggttttggactttcgaacgccacaattctcagcttgcttgggatgcacagattagccaagtggctgggaggagg

SEQ ID NO: 158546 - DNA, 258 bp, Glycine max
gggagaagggaaggtgagtagtaatggtcatggatgttgcaaatcagggccaggctatgcttccccactggaagccatttctggtcccagagagtctctcatttatgtaacctctgtctacacagggaccggaatagagaagccagactatttggcgacagtggatgtggatccaaactctccaacttattccaaagtcatccataggcttcctgttccttatttaggtgacgaattgcatcacacaggctggaattc

SEQ ID NO: 158547 - DNA, 268 bp, Glycine max
catgcagctgcagctctttctccgagaagcaagaaaaaaaacgtgattcgctcttctcttcgaataaaccccaaaaccaacaaacgagaagaggagtgagagaagatggggttgtcgttcacgaagctgttcagcaggttgtttccgaagaaggaaatggggattctgatggtaggtctcgatgctgctggtaagacaaccatcttgtacaagctcaagcttggagaaatcgtcaccaccatccccaccatcggatttaatgttgaga

SEQ ID NO: 158548 - DNA, 256 bp, Glycine max
caaaaccacaatctaagtaagtgttgagagaagagtgcgtttgtttgtttgaaattaagtagtaaagatgtttggaatcatcggaggaaacaagggtcacaagataaaggggaacttggtgattatgcgaaagaatgtgttggatatcaacagcatcaccagtgttaagggtgtcattggaaccggcattaacatcattggaggtgtcgtcgacaccgttactgctttggcgtcccacatctccatccagctcatc

SEQ ID NO: 158549 - DNA, 256 bp, Glycine max
ggcaattgggtacaccatagcagcttccataagcatgatggcagtcaaaaggtctaattgttatcatagtagcggagggaaaaatccatgcaaaatgaatagcaattggtacatgatttcatatggtgttgcggaaattatcttctcccaaattccagatttccatgagttgtggtggctctctattgtagctgctgtcatgtccttcacatactcattcattggacttggccttggtattggtaaagttatagga

SEQ ID NO: 158550 - DNA, 256 bp, Glycine max
gcgtcgctgctccgtaccagtttcactgcataaatttgagagaaaactctgcaaacatgttggtttatcaggacctccttacaggtgatgagcttctctcggactccttccgttacaatgaaattgagaatggaatgctgtgggaagttgaggggaagtgggttgttaagggagcagttgatgttgacattggtgcaaacccttctgctgagggtggagaagatgagggagtcgatgacgcagctgttaaggttgt

SEQ ID NO: 158551 - DNA, 250 bp, Glycine max
aacaaaaccacaatctaagtaagtgtttgtttgtttgaaattaagtagtaaagatgtttggactcatcggaggaaacaagggtcacaagataaaggggaacttggtgattatgcgaaagaatgtgttggatatcaacagcatcaccagtgttaagggtgtcattggaaccggcattaacatcattggaggtgtcgtcgacaccgttactgctttggcgtcccacatctccatccagctcatcagtgccac

SEQ ID NO: 158552 - DNA, 251 bp, Glycine max
ctctgttctgctcttgtcctgcttttccatccatttatgtgaaaaaggaaaaattgcctgaggtggttcaatcactatggaatcctgcaattgtattgacccacaagtgccagctgatgacttattgatgaaataccaatatatctctgatttcttcattgcccttgcttatttctcaatccctttggagcttatctactttgttaagaaatcagcagtatttccatatagatgggtccttgttcagtttg

SEQ ID NO: 158553 - DNA, 247 bp, Glycine max
ctcgagcgaatcggctcgagtgcaccaataccagatctaaaacgagaaaattattgtgtttgggcaagtcatcaagggagaggatgttgtccaggaaattgaagaagtggatacagatgaacattacaagcctaaagtatctatcgggatacttgatgtgactcttaaacaaaaggtctgaaggttctctgctagatcaagatcataattagctgtgatacttagtcataacctgttttcggggaca

SEQ ID NO: 158554 - DNA, 248 bp, Glycine max
gattaatgcagatggcattatagagaaatcatttttgcccggaaagtactccattgagatgtcttcatccgtctacaagaattgggttttcactgaccaagcattaccagctgatctcgtcaagagaggattggcaattgaagatccctctgcaccccatggccttcgccttgtgatagaggactacccttatgctgttgatggacttgaaatatgggatgctattaagacatgggttcatgaatatg

SEQ ID NO: 158555 - DNA, 255 bp, Glycine max
gagcaatgggtgtgaactcttactccaacagcatgaagatccaagccgagatacaaatgccacccttagaaatccacaaggttcgtttgccaccagaacgcaccaccttgcagaaactcagacacagactctctgagatcttcttcccagatgatccactccacaggttcaagaaccaaacatgcctcatcaagctcctccttgcacttcaatactttttccccattttccaatgggcccctctctacaaccttt

SEQ ID NO: 158556 - DNA, 253 bp, Glycine max
cttgggtgggctcactgttgagcaggctatccagagcaagaagctgttcatcttagatcaccatgactatctcattccatatttgaggaaaataaatgcaactaccacaaagacttatgctaccagaaccatatttttcttgaaaagtgatggaactttgacgccattggccattgagttaagtaagccgcatcctcaaggtgaagaatatggtcctgttagcgaagtctacgtgccttcgagcgaaggagtt

SEQ ID NO: 158557 - DNA, 254 bp, Glycine max
cgactgagtcgcggtctcttcccaactcggaactcagtccattccgcatttctcttcaaaccaaatttcttctgaagaaggagatttgaattcagaattgagtgagaagaagagaatagaaatgggctccgaattgattttcagaggccacgaggctcagcccgtggacgactcgtactcgccgaagccccacaagccctggttcaccgtgactcgcccgattcactacatgctccgcgagcagcgactcgtct

SEQ ID NO: 158558 - DNA, 248 bp, Glycine max
ggagattcatgtggtggaaactcaacagtggtaagaaagcctctgtgcttagatgttgaaggacctttcaaatatgggatctaccaatgggcacttcctgtcatatccagcaactctttggctgtaaagattctttatcccattttttggggtttgatgaccctcagcactttcggaaatgatcttgaacccacaagccactggctagaagtgattttcagtatatgcatagtactcagtggactatt

SEQ ID NO: 158559 - DNA, 247 bp, Glycine max
ctcgagcgctttttacttcccctatggctcgtcactccttgctcttagccctcctccacttcgccgccgtggccaccgccgcgatggcggtgccgcgtccgacgccgacgacatcctgatccgtcaggtggtgccagatgttggcgaagcgaaggaggaggacaacctgctgaacgccgagcaccacttcgcgagcttcaaggccaagtgcgccaagacctacgccaccaaggaggagcacgatcat

SEQ ID NO: 158560 - DNA, 248 bp, Glycine max
ctaaacaactctttctcttcttccttcgctcgttgttctccctcgcgtagatcgacaatggcggagacagagacgtttgctttccaggctgagatcaaccagctcctcagtctcatcatcaacaccttctactccaacaaggagattttccttcgtgaactcatcagcaacgcctccgatgctttggacaagattcgatttgagagtttgacagataagagcaagctcgatgctcagccagagttgtt

SEQ ID NO: 158561 - DNA, 247 bp, Glycine max
aaaaacttcaaagtgggtgataaagttggagttggtgtgatagtggagtcttgcaaggaatgtgaaagttgccaacaagatctggagagttactgtccccgccctgtttttacctataactctccttattatgatgggacacgaaccaaaggtggttattctaacatcatggttgtgcaccagcgttatgtgctccgatttcctgagaacttgcctcttgatgctggtgctcctctgctgtgtgctg

SEQ ID NO: 158562 - DNA, 246 bp, Glycine max
gtggtttcagtgagtgatcggtgttcacttgatccttcataagtcgtcatcatcatcatcatcatcaccgttgattgaagaagatgccgatcagaaacatcgccatcggaaggcctgaagaggctactcaccccgacacgttgaaggcggggttggctgagttcatctccaccttgatcttcgtgttcgccggttcaggttccggcatcgcctacaacaagctcaccgacaacggcgccgccactc

SEQ ID NO: 158563 - DNA, 247 bp, Glycine max
ctttcgaaagattttatccaattgaaattttaaaaatgactgggataaacttaagaattcaattattgaaattgaataagtaaacaatttaattggattggtcgaatggtatcaaaaaaatggagtactaactcccatttcttatttattattgaattaaccgatcaacttgctttgttatcgaacatttctttttgatttcaaaaattttccggaaaaactttgaatctatttttatatgcgaatc

SEQ ID NO: 158564 - DNA, 257 bp, Glycine max
atgctatgctggatctgactgctcccagtttttatctgattgtcctgccaacgctgatggtggtgatccatattttatggagccattttggatgcaacatgcagcaagtagtgccattctagtatcaggatggcatagaatgagttattcttatagcgatggatcagtcatctcacaactattggttgagtacataaaaaaagttcatggcatcgttgggaatgcaatcaccgaaggaaagtacatcgtatttggaa

SEQ ID NO: 158565 - DNA, 249 bp, Glycine max
ggaaagcataatcaaatcaaccatggctacccttattgctcccatcaccttttcacctggtttagatgcagaagctcttagaaaagctttccaaggatgggggaccgatgagaaaaccgttattgcaatactgggtcatagaaatgttcatcagaggcaacaaatcagaaaggtttatgaggaaatttaccaagaggacctcattaaacgcctggagtctgagctctctggtgactttgagagagctgt

SEQ ID NO: 158566 - DNA, 247 bp, Glycine max
gagaaatgtttgcttattatcatcaaatggtttacaaacgagtttatctgaaatttctcaagatcaacattattggagcacttgttctactctttgcatttctcttcctcagttgtgtgtatgcacaagacacaacaacccttgtgcctgcaatcataacttttggtgattctgctgtggatgtagggaacaatgactatcttcccacccttttcaaggctgattaccctccttatgggagggactt

SEQ ID NO: 158567 - DNA, 248 bp, Glycine max
gtatatcctagttgttctgatgcaagggtaatgtgggatcagaagacaggccgttccaggggatttgggtttgtttcttttcggaatcagcaggatgctcaaagtgctataaatgatttgactggaaaatggcttggaagtagacagattcgttgtaattgggcaaccaaaggggccagtgccagtgatgaaaagcagacttcagattcgagaagtgtcgtggagttgaccaatggatcatctgaaga

SEQ ID NO: 158568 - DNA, 248 bp, Glycine max
  unsure (1)..(248): unsure at all n locations
gttcatggaagggaaaccagatctagttattggaaattacactgatggaaatttggtagcatcactaatggctagaaaacttgggataactcagggaactatagcacatgctttagagaagaccaagtatgaagactcagatgtcaagtggaaagagttggaccccaagtaccacttctcgtgtcaattcatggcggatacagtggcaatgaatgcatctgatttcatcataaccagcacataccngg

SEQ ID NO: 158569 - DNA, 243 bp, Glycine max
gaggcattgaagcaagtgcctgagaaaaaccgaaagccatttgtgatctacatcaaggaaggcgtttaccaagagtatgttgaagttacaaaaaaaatgacccatgtggtgtttattggtgaaggggggaaaaagacacgaatatctggtaacaaaaacttcatagatggaacgaacacttatagaactgccactgtcgctattcaaggagatcactttgtggccatcaatatggggtttgag

SEQ ID NO: 158570 - DNA, 243 bp, Glycine max
gcattttggaagttaagccagtggacattactcacacagaccaaataaaggaagaccaacatggcacattggtctcagcaaacagcattggtgtttaccatgaccatttctacatattccatcttgattttgacattgatggtgtggaaaattcctttgtgaagaccagtctcaagactctacaagtcacagacaacagttccaagagaaagagctattggacaactagtaatgaagttgtta

SEQ ID NO: 158571 - DNA, 241 bp, Glycine max
tgctcgtggacagcagggttcatatccaatcaaattgttttatacctccaacatgcccatcattcttcagtctgcccttgtttccaatctctacttcatctcccagctgctccaccgtaagtacagcggaaacttcttcgtagatctattgggaaaatggaaggaatctgaatatggaggtggtcagtctgttcctgttggtggcattgcatactatatcactgcaccatccagcttagct

SEQ ID NO: 158572 - DNA, 243 bp, Glycine max
gtctcatctgcagtccgagtggagactggagttaaagaaggagacaaagttagcatgcactatgatcctatgattgctaagcttgtggtgtggggagaaaatcgtgctgctgccttggtcaaactcaaggatagtctgtcaaagtttcaggttgcaggtctgccaaccaatgtcaactttcttcaaaagcttgctaatcacagggcatttgcaaatggcaatgtggagactcattttattgat

SEQ ID NO: 158573 - DNA, 244 bp, Glycine max
aattaacatcagccctcactccttcgcacaccaaacccttccttcctatctctcactaatctaatggaatccgcagcactgtcgcgcataggcctggcgggcctggcggtgatgggccaaaacctagccctaaacatcgcagaaaaggggttcccgatctccgtgtacaaccgcacggcctccaaagtggaccagaccgtagatcgtgcccgcaacgagggctccctccctctcacgggccaat

SEQ ID NO: 158574 - DNA, 246 bp, Glycine max
ctagccttcttcaagtgttcttcctctttaatttctctatagaatacttacccttttctcaagactaacctctcgatccttctcaaaagaagaaaattaaaatggcaactgaaaagcttagaggttgtgcaaagttttttgcaagctctaaaccctacttggccatgatctctttacaatttggctatgctggcatgaacattatcactaaggtttccctcaaccaaggcatgagccactatgtcc

SEQ ID NO: 158575 - DNA, 245 bp, Glycine max
ctcgagccgaatcggctcgaggtttccctttcattttccctcactttctcgctcgccaaacgcccctctctctcctccactggccgaccagctcaccgacgaccagatcgccgagttcaaggaggccttcagcctcttcgacaaggacggcgatggttgtattactactaaggaacttgggactgtgatgcggtcactagggcaaaacccaactgaggcagaactgcaggatatgattaatgagg

SEQ ID NO: 158576 - DNA, 240 bp, Glycine max
gtatttatggaatggatttctttgttgttctggagcgacctggctatcgtgttggacgtcgccgaagatgcaagtcccgtgttggaattcagcaccgagtcacaaaggaggatgctatgaagtggttccaggtgaagtacgagggagtgatccttaacaagtcccaggctattctttagttagattgagttcactttaggagtgtgttatcagttttgtcaactatagctcgatctttct

SEQ ID NO: 158577 - DNA, 240 bp, Glycine max
acgttgtttgccctaaccatttcacattccccgatttccctcaccggtttgtgttgagcagatagagagagatgaacccgctaacactagtgaagcgcactcagaacatcaatgccagagaagctgcactcggcatcggcgagcaagcctcctggcacaccaagtacaaggattccgcttacgtcttcgtcggtggcatccccttcgatctcaccgagggtgacctcctcgccgtttttg

SEQ ID NO: 158578 - DNA, 242 bp, Glycine max
ggcaatttgtggggcttgctgagatgattggtcctgttgattttaacaagagtgttgagtattggcagcaagacaagtggaatggttgctttcctcttaagtggcacattgttaaggatgttcctaacaatttgttgaggcacattaccttggacaacaatgagaacaaacctgtcactaacagtagggatacacaagaggttatgttggagcctgggctgaaattaattaaaattttcaag

SEQ ID NO: 158579 - DNA, 237 bp, Glycine max
aagacatataaggaagtttatgatgaagttctgcatatgagttctgctttacgagcatctggtgccgaaccaggcactaaaattggaatttatggatctaattgcccggaatggattgtggcaatggaggcttgttctgctcaaagctttgtttgtgtgcctctctatgacacccttgggcctggtgctgtaaattttatcatagatcatgcagaagtagattttgtgttcgtccaa

SEQ ID NO: 158580 - DNA, 226 bp, Glycine max
gaacttcccacgagtggctttaactggtctggtctggtctggtcggacacacaaaaatattagtatggcgaaggtgagttttgtgaagaatggagagcttagattgcctccggggtttcgtttccacccgactgatgaggagctggttttgcagtacttgaagcgcaaggtcttctcctgccctctgacagcctctatcattcctgaggttgatgtttgcaagtct

SEQ ID NO: 158581 - DNA, 238 bp, Glycine max
ttccctcattcttatttttttcctctcttcactttcactctctctctctctctcagccatcatcatgggagcagtgattctcccagatctcggcaccgagattttgattccggtctgcgccatcattggaatagggttcgccctcttccagtgggtcctcgtctccaaggttaagctctccgctgccagagacgcttcccctaacgccgccggcaaaaatggctacaacgattacctc

SEQ ID NO: 158582 - DNA, 242 bp, Glycine max
atttcatgtcacggaccagcaaggaaaaaagataacagatagcaaaaccatcgacctcattgaaaaggctctaggaccaaagagcaagagcacagaaggggtgaaaaattggccgagcaaacacgttggagtgcattctgttggtgattatacagccattgagctaattggcagagaccgcccaggtctcttgtctgagatttcggctgttcttgccaacctccattttaatgtttttgcag

SEQ ID NO: 158583 - DNA, 224 bp, Glycine max
ctcactactgatagattttcattcctccgaggaaaaaaaaaacatgtcggatgctttgatcaatggattggccggagctggaggagggatcattgctcagctcatcacatacccacttcaaactgtaaacactcgccaacaaaccgagcgtgatccgaagaaagacacgaggagtcaaggggccctcgaacgaatgtgccaggttgtaaaagaagaggggtggg

SEQ ID NO: 158584 - DNA, 238 bp, Glycine max
ttgttattgagggaacgggagtgtttgtggatggccctggggctggcaaacacatccaagcaggtgctaagaaggttatcatcactgctccagcaaagggtgctgatattccaacttatgttgtcggagtaaatgaaggggactacactcatgagatctctaacattataagcaacgcttcctgcaccacaaactgtcttgctccctttgtgaagatcctggatgcagagtttggaat

SEQ ID NO: 158585 - DNA, 227 bp, Glycine max
cttcctctctgcagagtgcagagctttctctccccgttgcttcactcattctcaacaacaaaccaatctttcttagaaaatgagggggggcttgtggcaacttgggcaatcgatcactcgccgtcttgcccatggagataagaaggctgttgctcgtcgatgttttgcctcagaagctgagctgaaaaagacagtgtttcatgacttccatgttgctcatggtggga

SEQ ID NO: 158586 - DNA, 230 bp, Glycine max
tggagtttgttctaaattacctaaatgccactgccattggagttctttctataaccctcttctttttgtttttgtataatcccttcaaatttgcattaggtaaaaaagaggctcccaaagttgcaggtgcatggccaatacttggtcacctaccactattgagtggttcagagacacctgatagggttttgggtgctttggctgataagtatggacccatattcaccatc

SEQ ID NO: 158587 - DNA, 237 bp, Glycine max
caaaatcactctattttttagcaccaacttcaattattacaacaaagtataattaattaggcagagaaatatggtggtgaaggtgtatggtccagcaagtgcagcctgtcctcaaagggtgttggtttgcctcttagagaaaggagtagagtttgaacttgtgcatgttgatcttgatctaggagagcataagaaacctgaatttcttctcagacagccctttggtcaagttccagc

SEQ ID NO: 158588 - DNA, 227 bp, Glycine max
cgaggggcaccctgacaagctctgtgaccagatctccgatgctgtgctcgatgcatgcttggagcaggaccctgacagcaaggttgcctgtgaaacctgcaccaagaccaacatggtgatggttttcggagagatcacaaccaaggccaacgtggactatgagaagattgtgcgtgacacatgcaggaacattggttttgtctctgatgatgttggtcttgatgctg

SEQ ID NO: 158589 - DNA, 228 bp, Glycine max
cttctcataataaacttggtgggggtggttgctggcatctcctatgccatcaacagtggctaccaatcttggggacccctctttggtaagcttttctttgcattttgggtgatcatccatctataccctttcctcaaaggtctcatggggcgccaaaacagaacaccaaccattgtggtggtgtggtccgttctgcttgcatccattttctcactcttgtgggttaga

SEQ ID NO: 158590 - DNA, 262 bp, Glycine max
aacacttggtgattggacccggagtctcaaagtcaagttctcagagtgttgccagccaccggacaacggcaagagtggacttctaagagctgaatacttgcaaggagatagaagtccgagtactctccctaaagttctaattgacggtccgtacggagcaccagcccaagactacaagcaatatgaggtggttttgctagtggggctaggaattggagccaccccaatgattagtatacttaaggacatagtgaataacatg

SEQ ID NO: 158591 - DNA, 258 bp, Glycine max
taaaggggtgttttgaaaagatggagcacagagaagatcatgctagaaggaaaaagggatggctcatcacgatgcccttcatctttggtaatgaggtttttgagaagctggctgtggtaggtttcaacacaaacgtgattagctacttgacaacacagcttcgcatgccattgaccaaagcagctaacgccctcactaactttggtggaactgcaagcttgacaccattgcttggtgctttcattgctgattcttatg

SEQ ID NO: 158592 - DNA, 257 bp, Glycine max
ggttcgaaggtgcaaagcaaggaagctgaaataactaaatgattctgaattcttgttccatgagtccacaacctctgtcacctcacaatttcagagacctcttcgattccgtcgaagcttttctcttcgactgcgacggtgtgatttggaagggcgacgaactcatcgatggtgttccgcaaactctggacatgcttcgcgccaagggcaagaagctcgtcttcgtcaccaacaattcctggaagtcgcgttctcag

SEQ ID NO: 158593 - DNA, 259 bp, Glycine max
caaccagcaagacccatatatgctgagcaacttccagcaggtctacagacaatttcaaatattgtggctgtgtccagttgcaaggggggtgtgggaaaatcaactgtagcagtaaaccttgcttacactttggctgatatgggtgctagagttggtatatttgatgctgatgtttatggtccaagcttaccgactatggtctctcctgaaaaccgactgttagtaatgaatccagagaagaagaccataattcctactg

SEQ ID NO: 158594 - DNA, 260 bp, Glycine max
ctttcctcctcttccttgtgatttttgtttgcatcacagggagaaactgagacacagaagatgagagagataattagtattcatattggacaagctggaattcaggtggggaattcatgctgggagttgtattgccttgagcatggaattaaccctgatggcaccatgcctagtgatacctcagttggtgtagcacatgatgctttcaacaccttcttcagcgagacgggatccggcaagcatgtgccaagggctttatt

SEQ ID NO: 158595 - DNA, 91 bp, Glycine max
cttttggagccactcaaagcggagtttcctattttgagctacgccgatttctaccagttggctggcgttgttgccgttgacgtcaccggtg

SEQ ID NO: 158596 - DNA, 259 bp, Glycine max
ggaggacttatggactatgcatttgagttcataatcaacaatggcggcattgattctgatgaggattacccataccgtggtgttgatggtagatgcgacacatataggaaaaatgctaaagtcgtttctattgatgactacgaagatgttcctgcctatgatgagttagccttgaaaaaggccgttgcaaatcagcccgtgagcgttgctattgaaggagggggcagggaatttcaattatatgtatctggtgtattca

SEQ ID NO: 158597 - DNA, 96 bp, Glycine max
catatctccatttccatttcctctctctcagtttccaagaatcttaagctatgggaaagtcttacccaaccgtgagagcggactaccaggaggtgg

SEQ ID NO: 158598 - DNA, 259 bp, Glycine max
ctcgagccgaatcggctcgagacaaggcagaaagcaagctcatcctagagttttaaaaatggcagcagcctcctccatggctctctcttccccatccttggctggcaaggccgtgaagctgggcccatcagcccccgaagtcgggagggtcagcatgaggaagaccgtcaccaagcaggcctcctccggaagcccatggtacggcccagaccgcgtcaagtacttgggcccattctctggcgagcccccgtcctacctc

SEQ ID NO: 158599 - DNA, 257 bp, Glycine max
ctctttgttcctttcttcctctcactctcaccatgattacagtaagcgtaagatggcaaaaggacattttcaaagatgtagaacttgacactacccagtctccttatgtttttaaatgccaattgtatgatttgactggtgtgcctcccgaaagacaaaaaattatggtcaagggtggtcttttgaaggatgatgctgattggtcaacagtaggggtgaaagagggtcagaagctagtgatgatgggtacagctgat

SEQ ID NO: 158600 - DNA, 257 bp, Glycine max
gggagattgtttttctgttccatttctacgaactcagacccttcaatcccaaccgagaaaaaaatcatgaagctgaagacatatgcgggtcttagtatcattgcaactctggctattatatatcatgcatttaacagtaggggccagttttatccggcaatggtgtatctgtcaacttccaagatcagtttggtgcttcttctcaacatgggtttggtctttatgtgtattctatggcaattaaccaagaagttgtt

SEQ ID NO: 158601 - DNA, 205 bp, Glycine max
cggatataaacaataaaataaaataaaacagaagagaaggaaacagaagtaggaaaaaaataaaatgggttacacaagatcttctcttctgtccgtggctcttgtcttggcattctgttcaagcattcagggtttggacatcaccaaattgttgggcgaatatcccgaatgtgcacagtagaccaaatacctaactggaaccaag

SEQ ID NO: 158602 - DNA, 94 bp, Glycine max
atccagaaggaatcaacccttcacctcgtcgtccgtctccgtggtggcgtgcagatcttcgttaagagcctcaacgggaggactgtgacgctag

SEQ ID NO: 158603 - DNA, 259 bp, Glycine max
aaaaatgctatcaaggaggaatcagagggcaagttgaagggaattcttggttacactgaagatgatgtggtctccaccgactttgttggtgataacagatcaagtatttttgatgcaaaggctggaattgcattgaataagaattttgtgaagcttgtctcttggtatgacaacgagtggggatacagttcacgtgtcattgacctgcttgtaatcgttgccaagaagtctttttaattaaggtggttctaacattatg

SEQ ID NO: 158604 - DNA, 258 bp, Glycine max
ctctcttacacaccgaagcactgctactactactactttctctctagatatgggttctggtgctgtgcaactgtttctgatcttggggctcttggctagctcatgcttagcccaagcaccaggtgctgcaccgtcacaaccacccactacaaccccatcaccaccaccacccagatcagcacctgcaccagcacccaccacaccagcaaccccaccaccagcaaccccaccgccagcagcaactccaccaccagcagc

SEQ ID NO: 158605 - DNA, 123 bp, Glycine max
ccaccacacaggctccacaaaacatctcatcgttcacccaacaaaatggcgctgcttctgataattcccatctcactggtcaccctctggctcggttacaccctatgccagcgattaagattc

SEQ ID NO: 158606 - DNA, 255 bp, Glycine max
ggttgtggatagtggccccaatgatcatatatttatatactactctgatcatggcggtccgggagtgctagggatgcctactaatccatacatgtatgcatccgatctgattgaagtcttgaagaagaagcatgcttctggaacttataaaagcctagtattttatctagaggcatgtgaatctgggagtatctttgaaggtcttcttccagaaggtctgagtatctatgcaacaacagcttcaaatgctgaaga

SEQ ID NO: 158607 - DNA, 250 bp, Glycine max
cagaagctgaagaccaccaccaccaccaccaccgattcggaatcgcaatcgcaggcgcttctgcgtctctacctcaccaacgccctcttcttcggggtgttcttctccgtcgcgtacttcctcctccaccgctggcacgagaagatccgcaccgccactcccctccacgccgtcagccacgccgagagcgccgccatagtgtccctcgtcgcctccggcgtctaactcctcggcttcttcggcgttgcgt

SEQ ID NO: 158608 - DNA, 257 bp, Glycine max
tagaattaatggtgaagcaattcaaagcaatcgagatctttccatgatccttgatgctcttctgaaaacaaaatctagagcagtgctgaatgatataattaacaaaaatgatgttacataacattatgaagcagtacaggcatgacttcaaaaagattccaatactacgaaagcttcttaaggtcttggagttcctagaagcaggcaagattttgacatatgaacatattaatggtggtcctccttgtcgtggaatg

SEQ ID NO: 158609 - DNA, 262 bp, Glycine max
tgaagagcttgccactgacccaagaaccgcatcttatgtccaaaagatggccaatgacaatgaatatgtcaaccaacagttctcaagggccataattttgttatcggagacaaatcctttaacaggagatgaaggagaaatcagaaaggattgtcgctacctcaatgccaattagatatataatataagcttgcatttgtgcatgataatatgtataattagcgtaagattataatgcacgagtgtgtcaaaataaagaggg

SEQ ID NO: 158610 - DNA, 258 bp, Glycine max
taaaggggtgttttgagaagatggagcagaaacagaaatcatgctagaaggagaaagggagggctcatcacaatgcccttcatctttggtaatgaggtttgtgagaagctggctgtggtaggtttcaacacaaacatgattagctacttgacaacacagcttcacatgccattgaccaaagcagctaacaccctcactaactttggtggaactgcaagcttgacaccgttgcttggtgctttcattgctgattcttat

SEQ ID NO: 158611 - DNA, 246 bp, Glycine max
caacttctttctttgttccgttctactttcccttcccaacaacaacaagaagatgccttctgcagaagcttcctccgaaaccatttgtgtcaccggcgctggtggcttcatcgccgcttggatggtcaaactcctcttggaaaaaggctacactgtccgaggaaccctcaggaatccagatgatcccaagaactggcacttgaacgagtttgaaggagcctccgggaggttgactctgcatagggt

SEQ ID NO: 158612 - DNA, 257 bp, Glycine max
acgagagacatagctggtgtgagattaagaatggttgtgttatggtcactgctcatgcagtattaggaaagaagttgttctgcatagagtggaagaaccaacggaagctagctatattcagtccagaggacaattcatggaaaatggtaccagttccattgacaggaagctcaagtattggtgttcgatttgggatactaggtggtaagttgttgctattccgtctggaatctgaaactgcttttcagacattgttg

SEQ ID NO: 158613 - DNA, 251 bp, Glycine max
ctcttctgccctctgcacctcccctcacacccttcctcattcgcaggaggtgaagatgtcgaccccggcaaggaagagactgatgagggattttaaaagattgcgacatgatcctcctgctggaatcagtggggctccccaagacaataatattatgctttggaatgctgttatctttggaccagatgacaccccttgggatggaggtacgtttaggttgacacttcagtttacagaggattatcctaata

SEQ ID NO: 158614 - DNA, 255 bp, Glycine max
ctcatttatagtttactattgaaagatgggtttgaaaatggcaatactgatcctaggcctgctggccatgttccttttggtctcctcagaggtggcatccacgaattcaaaagaggtgacaaatggagttgaagatgccaaatatcctggtggaggctatggtgggggttacccaggcaatggcggtggtggctatcctggccgtggtggtggctaccctggtcgtggtggtggctatccaggtcgcggtggtgg

SEQ ID NO: 158615 - DNA, 256 bp, Glycine max
aaaatggcaagcaacaccaccatggtagacgagcgtgcaggggcggagatcgtgtatggcgcggaggaatgccaccgcagctccatggagctcctggaagagcttggattccccaaaggggtgatgccattgaaggaccttgtggagtgcggccgggttcgcgaaacggggttcatttggatgaagcagaaggagccaagccagcacttcttcgagcgcaaccaagaccctcgtgtactacgcggcggaggtcacc

SEQ ID NO: 158616 - DNA, 255 bp, Glycine max
gctttgtggaagtttgagacaacaaagtattattgcacagttattgatgcgcctggacatagggatttcattaagaatatgattactgggacatcccaagctgactgtgctgttcttatcattgattcgaccactggtggttttgaagctggtatttccaaggatggacagactcgtgaacatgctctgctttcattcacccttggtgtgaaacagatgatttgctgctgtaacaaaatggatgctactacaccc

SEQ ID NO: 158617 - DNA, 253 bp, Glycine max
attggagatgacaatgagatgttgctagattccgaatccaatcgccgaaccctcaccgggcgacaacggtacattagctatggtgccctaaatgccaacaatgtgccatgtggtaaccgtggaagatcctactacaattgccagcagaggggtcgtgccaacccttacaatcgtggttgcaccaaaatcacacattgtgctagagacaccagctagatgaacaagtcatgaagctggagagggaatatatatg

SEQ ID NO: 158618 - DNA, 254 bp, Glycine max
agactgagaggaagagagagggagattctttgtttgctaccttctctcggaaaaatggttacgttcaggtttcaccagtaccaggtggttgggagggctcttcccacggaagcagatcagcaccccaagatctaccgaatgaagctctgggccaccaacgaggttcgcgccaagtccaagttctggtattttctgaggaaactgaaaaaggtgaagaagagcaatggccaagtgcttgccatcaagagattttt

SEQ ID NO: 158619 - DNA, 255 bp, Glycine max
gacaccaatgaaaaagtcacagcctctgctcatgatgcttttgtcggcagctggaagcctaccaagaatgacactatggagaatcgggttcctggatttggcactacaatgaacattctctatggggatggtgtttgtggacaaggtgatgtggactcaatgaacaatattgtttcccattacctgtattatcttgaccttcttggtgttggtcgagaacaggctgggccccatgacatccttacatgcgctgag

SEQ ID NO: 158620 - DNA, 257 bp, Glycine max
gtggcactaacgtctgccaaagaagtgtcaccgctgaagggatatttcacaatatttttaggcacaaggttactcacatggggggtgcaccgacagttttaaacatgataatcaattcaccacccaaagtccggaagccgcttccgggaaaggtcgaagtgatgacaggtggtgcaccaccgcctccggatgtgattatcaggatggaagaactaggatttaatgtgactcattcatatggtttgacagaaacctat

SEQ ID NO: 158621 - DNA, 254 bp, Glycine max
gtgtggttgacagttaagaagtagcaaagatgtttccattcgggcacaagggtcaaaagataaaggggactatggtggttatgcagaagaatgtgttggatatcaacagcatcaccagtgttgacgggatcgtcggcaccggcttagacttcttaggcagtgcactcgatacagttacttttttagcctcctccatctccatccaacttattagtgctaccaaggctgatggtgggaaaggaaagttggaaagg

SEQ ID NO: 158622 - DNA, 130 bp, Glycine max
gaccaacttactcatgtttacacatttatcctccgtccggatgcaacctacagcatcctgattgataatgtggagaagcaaactggtagtctctactctgattgggatcttctccctccaaagacaatca

SEQ ID NO: 158623 - DNA, 255 bp, Glycine max
cgccgtgataacacactaacaccaccacttcatcaactttacttgacaacaatattgtaaaactacaaaatctagtttcatactttttttcttcttcttgaaatggctctccaggctgcttctcttgttcctgcttctttctcggttcttaaagagggaaagagtggtgtgtctctcaaggactccaccttgttcggtctttcattttcagaacctatcaaagctaacttcagctcttctgcatgaggtgcaaga

SEQ ID NO: 158624 - DNA, 253 bp, Glycine max
gaggcaaaggtgcaaaagaaggaaagtagttcagatgattcttcttcagaatctgaagatgagaaacctgcacccaaatctgctgttctttcaaaaaagatacctgctaagaatggtgctgcccctccaaagaaaggcaagctcgcctccagttcttctgaagatgactcctctgatgaggatggtgtgcgtgcaaagaagccacagaaaatggttgctgagaaacaaaagaatggagcaacgtgcaaaagaa

SEQ ID NO: 158625 - DNA, 238 bp, Glycine max
gatcgagataactagaaacagtgtgatgaaaatgaaggtccttgttttcttcgttgctacaattttggtagcatggcaatgccatgcgtacgatatgttccctctccgaatgaacactggctatggtgcccgtactccggaggtgacatgcgcaagttggaggcttgctgtggaagcacaccacatctttggctttgagaccattcctgcagagtgcgttgaagcaacaaaggaatac

SEQ ID NO: 158626 - DNA, 251 bp, Glycine max
gtttctcaatcgttagatctcatcttatactcaccggcgagtccatctcgcgccagctacgacgctgctccggccaccgctccggtcaccgcctttggttccctcactttctcgtccttcttcttctcagaaatatgccttctcagaaagttgaaacgggtcatcaagacacggtccatgatgttgcaatggattactatggtaagaggctggccacggcttcatcagatcacacaattaagtaattgggg

SEQ ID NO: 158627 - DNA, 250 bp, Glycine max
gtttctcaatcgttagatctcatcttatactcaccggcgagtccatctcgcgccagcgtcgacgccgctccggccaccgctccggccaccgcctttggttccctcactttctcgtccttcttcttctcagaaatatgccttctcagaaagttgaaacgggtcatcaagacacggtccatgatgttgcaatggattactatggtaagaggctggccacggcttcatcagatcacacaattagataattggg

SEQ ID NO: 158628 - DNA, 250 bp, Glycine max
cacgacttggagttggaatcctcttcttcccctctggtgttctcagtacggaggagtgaaccggagctggtggctccggccaagcccactccccgcgaaattaagatcctatctgagatagattctcaggcgggtcttcgtacccaaattccaatcatacagttctaccgtaacgacccatcattggcaggcaaggacccagttcaagccattcgaaacgctcttgcggaagcacttgtcttctactacc

SEQ ID NO: 158629 - DNA, 248 bp, Glycine max
ctcgagccgattcggctcgagggcatgcctttgagaaggctgtgctaaaaaggttgatgactgatgtgccctttggtgttttgctctctggaggtttggactcttcattggttgcagccgtcacggctcgctacctggcaggcacaaaagctgcgaacaactggggaactaaattacactctttctgtgtaggccttgagggtgcacccgacctaaaggctgcaaaggaagtagcaggtacataggaa

SEQ ID NO: 158630 - DNA, 249 bp, Glycine max
gggaaacaaaaccctcggacacttcctacctattcggacgagggaagttcatgacatcattcaatttttgttccataaatcaaaggcccaagagagcgtgaacctcaccgaagcgcttttgagtctttccaacaacgtaatatcgcagatgatgttgagcattaagagctccggtacagacagccaggcagagcaggcacggactttggttcgtgaagtgacgcagattttcggggagttaacgtgtcg

SEQ ID NO: 158631 - DNA, 124 bp, Glycine max
tcttgatccttcttttactccttgaactcaaacatggcagatgaggtgggtctgctagatttctggccaagtccatttgggatgagggtcaggattgcacttgctgaaaagggtatcaaatatg

SEQ ID NO: 158632 - DNA, 249 bp, Glycine max
gttgagaaaggaatacaagattaccaccacaaagcaatgggcggtatactttctgcgcttcttggcggcgacgcggcggcggcggcgtcttcgccggagagttctacttctagagtctcctccttccactcgtcgccgcgctggcagctctacttcaacgagatcaaagataccgataagctcgttgtgatagatttctcggcgtcgtggtgcggtccttgcaaattcatagagccacgattcacgcca

SEQ ID NO: 158633 - DNA, 250 bp, Glycine max
cggccaccctttcttttcttttttcttttttctctttcctcattctacttaaaactcccaccagtgatggcaggtttggctccagagggaacacaattcgatggtcgccaatatgatgctaagatgagtgaattgctttccactgatgggcaagaattcttcacctcttatgatgaagtgtatgacagctttgatgcaatgggattgcaagagaatcttctgcgaggcatatatgcttaggttttgagag

SEQ ID NO: 158634 - DNA, 245 bp, Glycine max
aaaaatgctatcaaggaggaatcagagggcaagttgaagggaattcttggttacactgaagatgatgtggtctccaccgactttgttggtgataacagatcaagtatttttgatgcaaaggctggaattgcattgaataagaattttgtgaagcttgtctcttggtatgacaacgagtggggatacagttcacgtgtcattgacctgcttgtaatcgttgccaagaagtctttttaataaggtgg

SEQ ID NO: 158635 - DNA, 114 bp, Glycine max
tccatttccatttcctctctctcagtttccaagaatcttaagctatgggaaagtcttacccaaccgtgagcgctgattaccagaaggccgttgagaaggcgaagaagaagctca

SEQ ID NO: 158636 - DNA, 245 bp, Glycine max
ctgaaactatgacttgtgaaaacccagaaaggaaaccttcggtgcgcgttggtagatagatagagagagattattgttgttgggatattctgagaaccgttgattgagaaatgaacggtggtgatgaggtcgtggcagctccggcgagtccaccgcagccgctggagtggaaattctcgcaggttttcggggaacgtacggcgggggaggaagttcaggaagtggatataattctgctattgaat

SEQ ID NO: 158637 - DNA, 243 bp, Glycine max
cgaagatgctttgggattgtttcgtagcatgggagagtgggggtgttaccctaatgagactacttttcttgttttgattaggagtctgtatcaggctgctaggttggaagagggggatgagatgattgataggatgaggtctgctgggtttggtgagtttctagataagaaggcttactatcagctcctcaagattttgtgtggcattgagagggttgatcatgctttgagtgttctgctatg

SEQ ID NO: 158638 - DNA, 249 bp, Glycine max
atgggaaccagtcttgtccacagtgcaagactagatacaagaggcacagagggagtcctcgagtggagggtgatgaagatgaagatgactctgatgatatccagaatgagttcaattatgcccaaggaaaagccaaggctaggcgccagtgggaagatgacgctgacctggcgtcgtcttctagacgcgaatctcaacagccaattcccctcctcaggaatggccagacgatgtctggtgagattccgg

SEQ ID NO: 158639 - DNA, 247 bp, Glycine max
ggatatttggattggttttctttcaccggcggcgaaggtaaggtggtgcaaacaaacaaaaaaccctaattctcgaatatcagatcggcgatcggaggaagaatctgaagttgggcgaagatggttctcgcggagttaggagggagcatttcgcgtgctcttcagcagatgagcaatgcgacgatcatcgacgagaaagtcctcaacgattggcctcaaggacatcacgcgcgcgctctccaatccg

SEQ ID NO: 158640 - DNA, 253 bp, Glycine max
gtaactcggcattcggttcgacgctgcttatgctcttgtgtcactgtcatcatacgctttgccactggtattctgttaggaatggctagtcgcgtcgtcaacactttgtggacaagcactacggtgcaaaagaatatgacatgatgggagtgtatcttcagagatcatggatagttttattcttaactgcaatctgtcttcttcccctgttgatcttcagaagcccaattttgactatcttaggccaagatgg

SEQ ID NO: 158641 - DNA, 245 bp, Glycine max
caacttctgctacttcctactccaaccgcacttctgctccgcaattatcatgggcaaggtcaagatcggaatcaacggatttggaagaattggccgtttggtagccagagtggctctgcagagagacgatgttgaactcgttgccgttaacgaccctttcatcaccaccgattacatgacatacatgtttaaatacgacagtgttcatggacactggaagcatcacgatgtcacgttaaggacga

SEQ ID NO: 158642 - DNA, 245 bp, Glycine max
cgaaacttttagggcagatgctttactatgttctcactactggctcgggacagcaaaccctgggagaggagtactgcgacatcactcaggttgcaggaccttatggacttcctcctacccctgcgaggcgtgctcttttcgttgtatatcagactgctattccttatattgcagaacgaattagttctagaattgcttcgcgaggcattgtccttgctgactatgagtctgctggggttttggtg

SEQ ID NO: 158643 - DNA, 245 bp, Glycine max
cacaaacactcaactctctctttctttcttcctgctgctacaatatggagcctctctcttccaccaaacacaacaacaatctctccaagccttcctccctccacacggaggctccgccgccggagccagtcccctccggaagatcatggtggtggcctccatcgccgccggggtgcaattcgggtgggccctacagctctctctacttaccccttacgtccaactgctggggatccccacacttg

SEQ ID NO: 158644 - DNA, 245 bp, Glycine max
aacactcataacacaaagcacaaagcaaagctcatccttgagttaaaaaatggcagcagcttcttccatggctctctcatccccatccttggctggcaaggccgtgaagctgggcccatcagccccagaagtgggaagggtgagcatgaggaagaccgtcaccaagcaggtctcctcaggaagcccatggtacgggccagaccgagtcgagtacttgggcccattctctggcgagccccgtccta

SEQ ID NO: 158645 - DNA, 247 bp, Glycine max
cgcgactactatgtcaacataagaaaagctatgctagctgggtatttcatgcaggtagctcatctggagcgtacaggacactacttgacagtgaaagacaaccaggtggtgcatttgcatccatccaattgcctggatcacaagcctgaatgggtcatttataatgaatatgttcttaccagtcggaattttattcgtactgttacagacatacgtggggaatggttggttgatgtgcaccacatta

SEQ ID NO: 158646 - DNA, 248 bp, Glycine max
ctacgcctctcctctctctcaaaaatcgttctcttcgattttagcgttttgttttgctgctgcctccgttccccccttctcataaacaacgcgttttctcttctgcttcgtatctattctttgctctttggttttggttgattcaaggccttcacagcattcgttgcggcattttaatcgatttatccaagcaggactgaatgaactaatggagtctaaaggtgggaaaaagaagtctagtagtagta

SEQ ID NO: 158647 - DNA, 243 bp, Glycine max
ttcggatctagagtcttcagtttctcctcgttgttcttcgctttcctgttttcaatttcgattctttcgttaatttaataagatgtttgggagggcaccgaagaagagcgataatacgaggtactacgaaatcctcggcgtctccaagaacgcttcgcaggatgatctgaagaaggcttacaagaaagccgccattaagaatcaccccgacaagggcggtgatcccgagaagttaaagagctg

SEQ ID NO: 158648 - DNA, 241 bp, Glycine max
cacagattgaagcaccgtggtcctgactggagtgggctccaccaatatggtgataactatttggctcatcaacggttagccatagttgatccagcttctggtgatcaacccctcttcaatgaagacaaaactgttgttgttacggtgaatggagagatctacaatcatgaagaactcaggaaacaattgcctaatcacaccttccgtacaggaagtgattgtgatgttattgctcacctgt

SEQ ID NO: 158649 - DNA, 240 bp, Glycine max
gtgcatctcacaggatgtctggactgagcttggacgtccctgtggcattcatcaaaagcaggttgatcaaatggttattcattctgcttcagattttcggccacggacaactctctgtggtgattacttttataattattttactcgtggtctggacatcttatttgatggacagactcacaaaatcaagaagtttgtgttacacaccaacttccctggtcatgctgatttaattctcac

SEQ ID NO: 158650 - DNA, 151 bp, Glycine max
ccatagcccgcctcctccacggcagaactgacaacgccatcaaaaaccactggaactccaccttgaagcgcaagtgcacttcaaccatgattgacgacgacaacactcccccgctcaaaagatccctcagtgccggcgctgctattccagt

SEQ ID NO: 158651 - DNA, 244 bp, Glycine max
accgcttctggacatcagtggcggcgcgtggcgcgtgcctgccactcgtgctcaactgccagattgcgctgcttgggtgcaacttggtttgccacgtagcagtgctcttgttgcattttctaacaggagggtgtaacgggattggcgcgtgggtcttcaattccgtgctcaacggtgctattttgttgctgtttcttaatttttacgtgaggatgtatttagcaaggaggaggagcgtaagggt

SEQ ID NO: 158652 - DNA, 252 bp, Glycine max
gtgttgcggctgctgttctttcaagtgctggctacaaggtggttgttcttgagaaaggaaactatttttctactcaggattattcatctctagaaggtccttccatgaatcaactatatgaaactggagggatccttgcttctgtggactcaagagtgctagttttggcaggatcaacagtgggtggtggctctgctgttaattggtcagcctgcattaagaccccacacaaggtgctaaatgagtggtctg

SEQ ID NO: 158653 - DNA, 240 bp, Glycine max
tataagaccgatcttcctgaaaatgatcaactgaatgttgcctttgactgatgttggacatgctagcatgcaagtatgcattgctggatttaaaaaggggcagctgaaagtgttgtcccaatcatatgataggtccctaggtgggagggactttgacgaggttctgttcaatcattttgctgcaaagtttaaggaggagtacaagattgatgtattccaaaatgccagggcttgtctgag

SEQ ID NO: 158654 - DNA, 241 bp, Glycine max
ctcgggaaaatcacagcgacgctcaggaaaaactctaaactgtgaaaaaaccactgcgatcaatggcaacgatcaaggccgtgaaagctcgccagatcttcgacagccgtggaaatccaaccgtcgaagttgacgttattctcagcgatggaagcttccacagagccgccgtgcctagcggtgcttcaacaggtgtttatgaggctttggaattaagggatggaggctcagactacctcgg

SEQ ID NO: 158655 - DNA, 256 bp, Glycine max
caattccattctctttgcctgcctagtttcaattctgtccaatttccaaaaccaaaacaagccacacaagttcatggcaactcccaataacagactctctcttgccatggagagaactgggcaatgggttttctctcaagacataccaactgatgttatagtggaagttggagaaacaactttctctctgcacaagttcatgctagtggcaaaaagcaactacataagaaaactgatattggaatcagatgagagc

SEQ ID NO: 158656 - DNA, 255 bp, Glycine max
ggagatcatctgtatgaagcatgggaacacatattaacttgcctctcccgaattgagcatttgcaactgttaggtgagggtgccccaagtgatgcaaccttcttcacttcaactaatcttgaaatggaggagaaagcactgaaaacattaggtttctcttcttttaagaaaggaacactccagaatccagccatggtggctgttgttcgtggtagttcatatgacagtacaagtattggggtcaatgcttctgca

SEQ ID NO: 158657 - DNA, 255 bp, Glycine max
agaaagataaagcattccatagcctcccataaaaatgaagaatactatcttctctgctctctttctactttgtgccttcaccacctcatacctaccttcaaccaccgcggtggtcgataccgacggtgatattcttcagaatcctggcacatactttatcttgtccgtttttcgacccggcggcggagtagaattcgccgccactggaaacgaaacttgccctctcactgtcgtgcagactctcttcgggagggg

SEQ ID NO: 158658 - DNA, 249 bp, Glycine max
ctagaagcaataagatgaaaatgaaagtgcttgttttgtttgttgctacagttttggtagcatatgaatgccatggctcagactaccagaagttccctctccaaatgaaaactgggtttggtgggcaatacagcaatgaggtggcatgtgccagttggaggcttggcgtggaagcaaacaacgtagtcaagtggcaaactgttcctgcagcttgcggagagtacatagctgactacgttctaggagacc

SEQ ID NO: 158659 - DNA, 253 bp, Glycine max
tgcagttggccagaaaatggacttggtgttttatacattgcagcttggtttctttgacatggattttgatctcatttccaaaagcatagacaaagccaaaaacttgtttgaggaaggtggtgattgggaaaggaagaataggctgaaagtgtatgaaggcctgtactgcatgtccactcgaaatttcaagaaggctgccaagttatttttggattctatttcaaccttcaccacctatgaactttttccctat

SEQ ID NO: 158660 - DNA, 253 bp, Glycine max
atcttcatattcatcaaactcatcaaaatgaatctgtaccactcctccaccaccaccaccaccaccaccatcttcaccgtcatattcctcctccttgcaatattattcactctcacaccccacaaggccaacggtgccacgtgtcaccctgaggaagaagcgggcctgttgggcttcaaatccggtatccgatccgacccgtccggcctgctcagtaactggatatcgggtacggactgctgcacatggaccg

SEQ ID NO: 158661 - DNA, 254 bp, Glycine max
cagaatagttgaagtgaatggcataaaaatgcatgttgcagagaaaggagagggtccagtggtgttgttcctccacggcttccctgagctctggtactcatggcgccaccagattctctctctcagctccctcggctaccgcgccgtcgctcccgatctccgtggctacggtgacaccgaggcaccaccttcaatcagcagctacaactgcttccacatagtgggtgatctcgttgcgcttattgactctctgg

SEQ ID NO: 158662 - DNA, 252 bp, Glycine max
gtgagtgaccctgcaaaacttccgaagtggaactatgatgggtctagcacagatcaagctccaggggatgacagtgaagtcattctatacccacaagctattttcaaggacccctttaggagaggaaacaatattcttgtcatttgtgatgtgtacaccccagctggtgagccacttccaaccaacaagaggtatggtgctgccaaaattttcagtcaccctgatgttgctgctgaggaaccatggtatggt

SEQ ID NO: 158663 - DNA, 253 bp, Glycine max
ccaaaatccccggtaacaccgaatgtgacggcgttggcattttgggcatcgcttgggccttcggtggcatgatcttcatccttgtttactgcactgccggaatctctgggggacacatcaaccctgcggtgacattcgggttgttccttggacgcaaggtgtctttggtgagggcgttgttgtacatgatagcacagtgtgccggtgcaatctgcggtgctgggttggccaaagggttccagaaatcgttcta

SEQ ID NO: 158664 - DNA, 255 bp, Glycine max
caatctctctctctccaatggccaaagacctcgaaacggagattcaaagtgggttgcctcacaaggactaccacgacccaccccccgccccattctacgaccccgccgagctccgaaagtggtccttcttccgagccctcatcgccgagttcgtcgccaccctcctcttcctctacgtcaccatcctcaccgtcatcggctacaaccaccagacagccaccgccgccgagccctgcagcggcgtcggcgtcctcg

SEQ ID NO: 158665 - DNA, 251 bp, Glycine max
gttcattcgatgcaggtgggtttcgccggcgccggagacacggcggagaaaaacccgttcaccccaaaagccttcgcgattcggtattgggacaaagagatccgcagcgggttaccgaagccaccgtttcttgtatcaaaggcgtcgccgctgagcgcggcggaggcggcggcgttcttaaagctcgtctccgggaactcgctctccacgcggctgccggaattctgcgccgccgcgaactcctctgcttc

SEQ ID NO: 158666 - DNA, 251 bp, Glycine max
gttttctgattaactctttcttctcataactctgccgccgcaacagccccaaatccaatggcttcagagaagaaactttcgaacccaatgagggagataaaggtgcagaagctcgtcctcaatatctccgttggcgagagtggagatcgtcttaccagagccgctaaggtgttggaacagcttagtggccaagcccctgtgttttccaaagcaaggtacacggttcgttcctttgggattagaagaaatga

SEQ ID NO: 158667 - DNA, 250 bp, Glycine max
ccaaaacaaaagaaaacgaaaatccccaatcctgcgttgtgttgcgacttgcgagccatgagaggggtcgtgaaagcgtttgcggggaatctgttgttccatggaagaaagactcagactcagtgcattcgctcctacagtctgatcccaatggtgatagagcactcttcccgaggtgagagggcatacgacatcttctcgcgccttctgaaggagcgcattatctgcatcaacggacccatctccgacg

SEQ ID NO: 158668 - DNA, 247 bp, Glycine max
cggagatacctgcatccctttcaaattgtacctatcttaatactcttagacttgaccaaaaccaactcaccggtcacattcctgcaaacttgagtcagctcccgcggcttaagttgtttagtgttgccaataatcttttgacagggccagttccaccctttaaacctggtgtagctggtgcagataattatgcaaataattcaggcctgtgtggtaatcccttgggtacttgccaggtcgggtcttc

SEQ ID NO: 158669 - DNA, 248 bp, Glycine max
gcggaaagaagactacttcttgtgctgttggtttggcaaagacagtgttgaggaggaccaaacaacggctactaggttggccaatacaatgtctacctcattaaagggtagacctgtacagggtcgcatatttgaaggcaaagagccgccacagtttgttgctattttccaaccaatggtggttctcaagggagggttcagctctggatacaagaaactaatagcagacaaaggagtatcagatgaga

SEQ ID NO: 158670 - DNA, 250 bp, Glycine max
gtgcgatttttgtagatcttgagcccactgtgattgatgaggttaggactgggacataccgccaactattccatcctgagcagctcattagtggaaaggaggatgcagcaaacaactttgcccgtggccactataccattggaaaggagattgttgagctttgcttggaccgcatcagaaagcttgctgacaactgcacaggtctccaaggttttctggttttcaatgctgtgggtgggggaatggctct

SEQ ID NO: 158671 - DNA, 253 bp, Glycine max
tatcaacagcgcaaggattgataatgtaggtttagacccctgtaatgtccaacaccttctgaatctcattaaccctaatcacatcatggtatgaagaccttcttatctgaatagcacggtgatctttgtggtaagcgaggcagagagagcagagagcaccgttcatacaatctaagcaatacatgttgcactcgctcttgtgcgaatcagcgtgaagcttgcattgaacaaagaagctctctttgagaagagg

SEQ ID NO: 158672 - DNA, 250 bp, Glycine max
ctcgagccgcgggactttcactagccgcagcagcctcaggaggagaataaggatgtctcacagaaagttcgagcacccaaggcacgggtcactgggatttctccccaggaagcgtgctgctcgtcacaggggaaaagtgaaggcattccccaaggatgacccatccaaggcacccaagctcactgcattcttgggttacaaggctggtatgactcacattgttagagaggtcgagaagccaggatcaaag

SEQ ID NO: 158673 - DNA, 247 bp, Glycine max
aaagaaagaggtgaagtcaaatggtccttagttctgggagtgttgatgcttgagtcttgacggaacgaacggaaaaggggatctcaatggacaacaccaagccccttatcgaactggaactcgacgatgatggcagaatcagaagaaccgggaatgtgtggactgctagcatacacattataacagtggttgtaggggcaggggtgctgtctttggcatgggttatggcacaactaggatggttagc

SEQ ID NO: 158674 - DNA, 244 bp, Glycine max
aaagcgcgagatacctcaccgcaaccagtggaactcaccgaattgaactcaagttttttctcttctctcggtttcatcgccatggatgaagaagtgcgcaagatcttcagcaagttcgacaagaacggcgacggcaagatctcgtgcgccgagctgaaggagatgatggtggcgctgggatccaaaacgacgtcggaggaggtgaagcgcatgatggcggacttgatcggaaggcgacggctac

SEQ ID NO: 158675 - DNA, 251 bp, Glycine max
acttaacaacagcacaaagcgggttactgtctgttcaagctaccatctctctctctctttcttagtgcctccttgccagaagttaaaatggcccaagaaactttcctattcacatctgaatcagtgaacgaggggcaccctgacaagctctgtgaccagatctccgatgctgtgctcgatgcatgcttggagcaggaccctgacagcaaggttgcctgtgaaacctgcaccaagaccaacatggtgatggt

SEQ ID NO: 158676 - DNA, 247 bp, Glycine max
acctacctctttttcttctctctcaacaacttcaccttcttcctcctcgatcatgtctcacttcaagggcaagtaccatgatgagcttatcgccaatgctgcgtacattggcactcctggaaagggtattcttgctgctgatgagtcaacagggacaattggcaagcgtttggccagcatcagtgtagagaacattgaatccaacaggcgagctcttagggagctgcttttcactgctcctggtgtt

SEQ ID NO: 158677 - DNA, 250 bp, Glycine max
caacggaaaggaactttgcaagagtattaacccagatgaagctgttgcttatggtgctgcagtgcaggctgcgattctcagtggcgagggtaatgagaaagtgcaggatcttcttttgttggatgttactcctctatccactggtttggagactgcaggaggagtcatgactgtgttgattcccagaaacacaaccattcccaccaagaaggagcaggtgttctcaacctactctgacaaccagcccggt

SEQ ID NO: 158678 - DNA, 250 bp, Glycine max
gccactatagtaaacaatcttctctatctaaaatggagtttgttctaaactacctaaatgccactgccattggagttctttctctaaccctcttctttttgtttttgtataatcccttcaaatttgcattaggtaaaaaagaggctcccgaagttgcaggtgcatggccaatacttggtcacctaccactattgagtggttcagagacacctgatagggttttgggtgctttggctgataagtatggacc

SEQ ID NO: 158679 - DNA, 249 bp, Glycine max
cagatgcgaatgaattggacctagtcctccaaaccctctcttcttttcccccaatcgtcttcgccggcgaggcgaggaatctggaggagaagctcgctcaggctgccatggggaacgcttttctccttcagggcggtgattgcgccgagagcttcaaggaattcactgccaacaacatccgtgacacctaccgtgtcatccttcaaatgggtgtggtcctcatgttcggtggccaaatgcccgttatca

SEQ ID NO: 158680 - DNA, 247 bp, Glycine max
agttaagaaagactcagaactccaagcttggtggaaggaagctgttgagaagggtcacggtgacttgaaagacaagccatggtggcctaagttgaacactcttcaagatctgattcacatttgctgcattattatatggactgcttcagcactccatgcagctgtgaatttcggacaatacccttatggcggtttcatcctaaatcgtccaactctaaccagaagattgctcccagagccaggaacc

SEQ ID NO: 158681 - DNA, 206 bp, Glycine max
ttctaaagaaatataactaatattctttagaataatcaaaaagaatattaaattcaaataaattttagatagaaaaaagacttaaaaaggaggatttgaacatgcgagatctaaaaacatatctttccgtggcaccagtagtaagtactctatggttcggggctttggcgggtctcttaatagagatcaatcgttttttaccagat

SEQ ID NO: 158682 - DNA, 234 bp, Glycine max
cacatacactcacactctctctttcttccttcctgctgctacaatatggagcctctctcttccaccatacacaacaacaatctctccaagccttcctccctccacacggaggctccgccgccggaggccagtcccctccggaagatcatcgtggtggcctccatcgccgccggggtgcaattcgggtgggccctacagctctctctacttaccccttacgtccaactgctgggg

SEQ ID NO: 158683 - DNA, 88 bp, Glycine max
caggaagcttcctttccagaggttggttcgtgaaattgcccaggatttcaagactgatctgcgtttccagagccatgctgtgcttgca

SEQ ID NO: 158684 - DNA, 246 bp, Glycine max
gtgaggaagcccctggacaaccagttcaacacagtcaccgccgacggaacatcccagaagaacatggctacaggaatcgtgatccagggttgcaacatcgtcccagaagccgaacttttccctacaaggttccaagtgaagtcataccttggaaggccatggaagcaattctcaaggacggttgtgatggaatccaccgtgggtgacttccttcaccccgaaggatggtgcccatgggccggtgaa

SEQ ID NO: 158685 - DNA, 249 bp, Glycine max
ggaagaaccaccactaccttatccatttccactcctcaccaagccacaccatggcctcaaccaacgccctctcttcagcttccattctacgctctcccaaccgccagtctctgaccagaagagcgaaccacaacggaagagtaaattaccgtcaaccgaatagccgtttctccgtcaaagcctccgccaaagagattgcctttgaccagcattcccgctctgctatgcaggccggcattgacaagctcg

SEQ ID NO: 158686 - DNA, 248 bp, Glycine max
ggactggttaactgaaaaaatgcgtaacaataatttcactgtctcatcaatgcatggtgacatgcctcagaaagaaagagatgctattatgggagaatttcgtgctggaacaacccgtgtactaataacaactgatgtttgggcccgtggtcttgatgtacagcaggtttctctagttatcaataatgaccttccaaataatcgtgagctttacattcatcgaattggccgttctggacgttttggaa

SEQ ID NO: 158687 - DNA, 249 bp, Glycine max
  unsure (1)..(249): unsure at all n locations
gtcgagctcgcctccgcggaggtcatttttcagaaccccgatctgatgaacaaggtgcgtgatttgttnnnnnnnnnnnnnnnnnnnnnnnnnnnnnnncctgaaacgtgttcctgggcgttgaattgcgttgccaccaccgatcaaggcgagaacgacccttcctcgctctggctcaaccctgaaatcaaagactcctccaccgtctcgccgccgaattccacggttaataagacgatgcatttcgaa

SEQ ID NO: 158688 - DNA, 250 bp, Glycine max
caaaaaggaaagaagcagattctgtcctttgaaatcaacaagaaaagatgtcaggtgaagaggtagctgttgcagttgaggtacctgctacttcaattccaggtgagccaatggacatcatgactgctctacagcttgtgctgagaaaatctctggcctatggtggtcttgcacgaggtcttcatgaaggtgccaaggtgatcgagaagcatgctgcacagctctgtgttctagcagaagattgtgacca

SEQ ID NO: 158689 - DNA, 245 bp, Glycine max
gtagagtgaatcgttctcatcatggatcttgtaatcaaacatcacaggtgtgacaccctgtgcattcccaatgaggtcctttctgatgatcacaatggtgacaccagagggccccacattcttctgggccccagcatagataaccccaaaccttgtcgactccacaggcttggagcagaaatttgaggacatatcagcaaccaaaacaccactcttgggaacagggtagtccttgaactccaccc

SEQ ID NO: 158690 - DNA, 246 bp, Glycine max
ctctttcaaaagggagaagaaaaggaaaggaaacaaaacgcacaaaggattattatagcaatggcagaacaaaaccaaaaccagacaactgaagctggaaggcaccaagaggttggccacaagagccttctccagagtgatgctctttaccagtatattctggagaccagtgtctacccaagagaacctgaatccatgaaagaactgagagagttgacagcaaaacacccatggaacatcatgaca

SEQ ID NO: 158691 - DNA, 246 bp, Glycine max
acttgtccttctttgcgagattgaatcgtaagcagcggctaccctaatcctctcctcttcctctctactaatttcagctatggccgacgaagctgtggttgttccagatcccacccagatcgatgtcaagctctttaaccgctggagcttcgacgatattgagattactgacatttctctggctgattatatcggagtggcgacatccaagcacgccacgtatgtgcctcacaccgccggcaggta

SEQ ID NO: 158692 - DNA, 242 bp, Glycine max
tttgatgccaatggtggacccatctcgaaagagttgattcccaaactcagtgtggtgaagaataatttatcctctaaattgggggtagcgctaccagatattgatgcccggcaattcattgctaccatcatatttcttaagggggttggagggattttgtttgtgtttggaagcacatttggatctttcctactgcttttgcatctggcgattactactccacttctgtacgatttctataa

SEQ ID NO: 158693 - DNA, 243 bp, Glycine max
tgaagatgaagaacaggtggaaattgagaatttgaatgctagggtcagtgatgttgatgataaaggagacaatcagactagactgtctgaaacagctgatcgatctgttcaggaagctttagaatccggtgctactcaacatgcaagtgatgatgaccttgtcgagagttcttcagccattgcacctgggtatgtacccagtgaacttgatgaaagaattgttcttgagctaccgtcatcaat

SEQ ID NO: 158694 - DNA, 247 bp, Glycine max
ctttgtttgcttctcaagtctctcgaagcctctttctctctcttctagaagctatctgtgtttggtgttactaagtctccaacaagcaaagtacatggttgatttggaaatccaggtccccaccccattcgacccgtttgccgaggcgagagaatcggatgcccccggagcaaaggagtatgtgcatattcgaattcagcagaggaatgggaagaagagtctgaccacagtgcaagggctgaagaag

SEQ ID NO: 158695 - DNA, 245 bp, Glycine max
gtattgacgtcgatgatgaaaatgaaattggtgaaaacattactgcttctcctttgtgtgaaactcttctgttatgcagtgattggtgctcctcaaacttgtcctgctaacaatgaggataaatgcggcgattcagatgaatggaaaggggagtttttccctgacattcccaaaattaaatatgagggtccgtcaagtaagaatgtgctttcatttaaatggtataatgcagaggaggaaattct

SEQ ID NO: 158696 - DNA, 244 bp, Glycine max
cgccgccgtcgggatgctgcaacggagtgaagagcctcaatgccgccgccaagaccaccgccgaccgccagacggcgtgcaactgcctcaagtcggccgccagccaaatctccggcttcaaagccaacaacgccgcctcgctccccggcaaatgcggagtctccatcccctacaagatcagcacctccaccaactgcgctaccatcaaggtttgaagagaaagtcatggacgcaggaaaccgga

SEQ ID NO: 158697 - DNA, 247 bp, Glycine max
cgtctttctcgtcttcgattcatcgccaaaccccaacctttcctatctcctcattcaacaccatcccatttttctctcacccccaaaaccaagaaaccgaatcgattccgattccgattccgatcaatggctgcggaacccaaggaatcgccttccaacaaccccggtcttcacactacccctgacgaagccaccaagggttacatcatgcaacaaactatgttcagaatcaaggaccccaaagtga

SEQ ID NO: 158698 - DNA, 248 bp, Glycine max
ggagaacgggttggtcccaattgtggagccagagatcttgcttgatggtgagcatgggattgacaggacattcgaagtagcccaaaaggtgtggtcagaggtattcttctacctggctgagaacaatgtcctgttggaaggtattctcctcaagcctagcatggttactccaggagccgagtccaaggacaaggccactcctctgcaagttgctgattacaccctcaagctccttcacaggagaatcc

SEQ ID NO: 158699 - DNA, 282 bp, Glycine max
attaatgtgcacaaggatctttgttggttcctggaacattggaggcattacaccacccaagaacttggacatggaagactggcttgacacacaaaataattcagcagatatatatgttctggggttccaagaaattgtaccactaaatgcagcaaatgtactaggtccccaaaacagaaaagtttctatgaaatggaattctctaattggggcagcccttaacaatagagacaccaacaaaggttgttgaagacaataaaacagctgaacctcagaagatat

SEQ ID NO: 158700 - DNA, 276 bp, Glycine max
atcgaaaccctcgatttccgcatccgcatcgaggctcacgtcatccaaccgtgcctctccgcacggttacttgctgaaccgcgtcgccgaatacgctacagcggcggcggctgctaccgctcctccctctgctccgcctccgggcaagaaggaggttagcggcggacgggaagatcaccgatgagttcaccgggacaggctcgatcgggcaggtctgccaggtcatcggtgccgtcgtcgatgtcagattcgacgagggtttgcctccgatcatga

SEQ ID NO: 158701 - DNA, 278 bp, Glycine max
tcgagcattcggttttgaatcttttgagcgaaaatgcagtcgagtcctttgcttctggaggaacccataaggatggcctccatcctcgagccatccaagcctagtttctttccagcgatgacaaagattgttggcacacttggcccaaagtcacgatcggttgacgtgatttcacaatgtcttgaggcaggaatgtctgtggcaaggtttgatttttcatggggtgatcctgaataccaccaagagacgttggaaaatttaagggctgctatcaaaag

SEQ ID NO: 158702 - DNA, 277 bp, Glycine max
tctacctctgccactttctgagtacaatacaacactgccatggctgcctcagtctccactattggagctgtcaacagagctccactgagcttgaacagctctgaagctggagattcggttcccagttcagccttctttggcacaagcttgaagaaggttactgcctcaagggtccctaacgtcaagatttcttctggaagtttcaaaatcgttgcggcggagaaagagattgatgagcaacaacagacaaacaaggacagatggaaaggtcttgcct

SEQ ID NO: 158703 - DNA, 275 bp, Glycine max
ggtgattgaagaaatggcagatgcagcgaagggtacctacagagcctcaagatggtcccttaacggaatgactgctcttgtgaccggtggaactcgtggaattgggcatgccatagtggaggacttatgtgggtttggtgccactgtccacacttgttccagaaaccaagctgaattggataagtgtttgacagaatggcgtacaaaggttttttggtttctgggtctgtgtgtgatgtctcatctcaaccccacagagagaagttcattcagga

SEQ ID NO: 158704 - DNA, 280 bp, Glycine max
gtaataagatgccaactttggaggagtatggtaccaatttgaccaagctagcggaagagggaaaattggatcctgttgtgggaaggcagccgcaaattgaacgtgtgactcaaattttaggtcgtcggactaaaaataatccttgtcttattggagaacctggtgttgggaagacagcaattgctgaaggtctcgctcagcggattgcaaatggtgatgtacctgaaaccatagagggaaaaaaggtcataaccctcgacatgggtctgcttgttgctgg

SEQ ID NO: 158705 - DNA, 284 bp, Glycine max
ggaagaaccaccactaccttatccatttccactcctcaccaagcgcaccatggcctcaaccaacgccctctcttcagcttccattctacgctctcccaaccgccagtctctgaccagaagagcgaaccacaacggaagagtaaattaccgtcaaccgaatagccgtttctccgtcaaagcctccgccaaagagattgcctttgaccagcattcccgctctgctatgcaggccggcattgacaagctcgccgacgccgtcgggctcactcttgggcccaggggga

SEQ ID NO: 158706 - DNA, 283 bp, Glycine max
aagaaatgggtagtcttgaagcggaaagaacaacagtaggattggcagcaagagacccttcagggattctctccccatacacctacaatctaagaaacacaggccctgatgatgtttacattaaagttcactactgtggaatttgccattctgatctccaccagattaaaaatgatcttggcatgtccaactatcccatggtcccaggacatgaagtggttggtgaggtactggaggtgggatcaaacgttagcaggttcagagtgggagagttggtgggagt

SEQ ID NO: 158707 - DNA, 280 bp, Glycine max
gcaaatcagcagaacatagtggtggcagatggcacagggcagaagaacatgcccacaggaatagtcctccataactgcgagatcatgccggaccctaccctcttggcagaccgcttgagcgtgaagacttacttggccaggccatggaaggcattctcaagggcagtgttcatcgagaatgttatcggggacttgattcagccagatggttatattccatggaacccaattgaaccaaacacacaggattgctacttcgctgagtttggcaacactggac

SEQ ID NO: 158708 - DNA, 275 bp, Glycine max
ctttttcttctctctcaacaacttcaccttcttcctcctcgatcatgtctcacttcaagggcaagtaccatgatgagcttatcgccaatgctgcgtacattggcactcctggaaagggtattcttgctgctgatgagtcaacagggacaattggcaagcgtttggccagcatcagtgtagagaacattgaatccaacaggcgagctcttagggagctgtttttcactgctcctggtgttcttcaatatctcggtggtgtcatcctctttgaggaa

SEQ ID NO: 158709 - DNA, 269 bp, Glycine max
caactccataacacaaggcagaaagcaagctcatcgtagagttttagaaatggcagcagcctcctccatggctctctcttccccatccttggctggcaaggccgtgaagctgggcccatcagcccccgaagtcgggagggtcagcatgaggaagaccgtcaccaagcaggcctcctccggaagcccatggtacggcccagaccgcgtcaagtacttgggcccattctctggcgagcccccgtcctacctcactggcgagttcccaggtg

SEQ ID NO: 158710 - DNA, 271 bp, Glycine max
attgctacttcaattctgattgcaaccacgacactactccaccttccaacatgggcggtatcagccttgaggaaatcaaaaacgaaaacgtcgatctggaaaaaattccagtagaggaagtgtttgagtcgctgaaatgttcaagagcaggtttaacatcagacgaaggagccagccggcttcaagtttttggaccaaacaaattggaagagaaagaggagagcgaattttgcagtttctgggtttcatgtggaacccttatcatgggtca

SEQ ID NO: 158711 - DNA, 276 bp, Glycine max
  unsure (1)..(276): unsure at all n locations
gtttgatacaggagcatntgttggtggaagcaaacagatctttgaccatgaagctggaagaaatcanttcaagaaaccagtataggcaaacatgggaagctggtgagcaaagtatgccatatggaacccaaaatgctcactctcaaggcttcttccagcctttggagtgcaaccccacattggcagataggttctgactacaggtacatccctgaagcctcagagcagcagctagctgccacaactcaagcttcaacaagtcatggatttttcctg

SEQ ID NO: 158712 - DNA, 224 bp, Glycine max
ctctaaggttgtatgcaagatgaagctcacaaaggagcaagttgctcagttccgagaagcagttaagaaggactattatttccagatgtactatgatgacttgccgatctggggatttattgggacggttgacaaggaagggaaaactgaccctagtgagtacaagtattttctttacaagcacattcagttcgatattcattacaacaaagatcgagtcattg

SEQ ID NO: 158713 - DNA, 278 bp, Glycine max
caaaccctaaccctagaagaagaaaaaaaccacaaccaccaccatctagggtttttctttttctcatggctagtttgtcaactaggattttcttcatcatgtcccttgtgtgcctggctctcggtccaatggcacaaggggaaatgacatgtggccaggttgtgagcaacctgaccccatgcatctcctatgtggtgtatggtggaaccaatgttcctgaacagtgctgcaatgggataagaaatctctatggcatggctcagaccaaaccagaccgc

SEQ ID NO: 158714 - DNA, 283 bp, Glycine max
gcgagatggggttctgggtcatgggtaatggtaatggattgcagaagctaaaatcacttacagttgcatcttgcaaaggagtaacagatattgggcttgaagctgtaggaaagggttgtccaaatctgaaaattgcacacctccacaagtgtgcatttctgtcagacaatgggttgatgtcattcgccaaggctgcttcatcacttgaaagcctacgattggaagagtgccacagaattacccaacttgggttttttggtgtcctttttaactgtggtgcaaa

SEQ ID NO: 158715 - DNA, 276 bp, Glycine max
cttcaaaacactcataacacaaagcacaaagcaaagctcatcctatgagttaaaaaatggcagcagcttcttccatggctctctcatccccatccttggctggcaaggccgtgaagctgggcccatcagccccagaagtgggaagggtgagcatgaggaagaccgtcaccaagcaggtctcctcaggaagcccatggtacggcccagaccgagtcaagtacttgggcccattctctggcgagcccccgtcctacctaaccggtgagttcccaggcg

SEQ ID NO: 158716 - DNA, 158 bp, Glycine max
tggagattcacaggtggaagctatgttggacaagactatatgtgccatgtctagcgtgttcattggagcacctggttccactttcactgaagacatcctgcggctgagaaaggactggggatcagcatccatgtgtgatgagtatctttgccaaagtg

SEQ ID NO: 158717 - DNA, 272 bp, Glycine max
tctcgagccgaatcggctcgagagaagaaacttaatcgatcatcacttcacttcactaatacatcatggcagacgagacccagaacaagtatgagagctctgatgttgaggtccaggatcgtggtgtttttgactttctcggtaagaaaaaggatgaagaagacaagcctcatcctcaggaggaggtcatcgccaccgagtttcacaaagtcactgtctcagaccatggagagaacaagcacagcctcttgagacaagcttcaccgatctga

SEQ ID NO: 158718 - DNA, 271 bp, Glycine max
attcaacttaagagatcaatatggccaccaccactacccagcctccctctaatatctgttttttccttctgttgttgcttctagcacactttcatttgggcataagccaacttgagctgaattactactctaaaagctgcccaaaagctgaagagatcatcaaggaacaagtcacacaactatataacaagcatggaaacactgccgtttcgtgggtcagaaatctcttccacgattgcgtggttaagtcatgcgatgcatcattactgtt

SEQ ID NO: 158719 - DNA, 273 bp, Glycine max
gaattttctaataatggccaaagacgttgagcaggttacagagcaaggtgaatactccgcgaaggattaccatgacccacctccggcgccgttgatcgacccagatgagctcactaagtggtccttgtacagagccgccatagctgagttcatagcaacactccttttcctttacatcaccgtgttgaccattattggctacaagagacagagtgacaccaaaatccccggtaacaccgagtgcgacggcgttggcattttgggcatcgcttg

SEQ ID NO: 158720 - DNA, 278 bp, Glycine max
aaagagaatccgaggcgaagagaagagaaaaattgagatggaggggaaggagcaggatgtgtcgctgggagcgaacaagttcccggagagacagccgattgggacggcggcgcagagccaagacgacggcaaggactaccaggagccggcgccggcgccactggttgacccgacggagtttacgtcatggtccttttacagagcagggatagcagagtttgtggccacttttctgtttctatacatcactgtcttaaccgtcatgggagtcgccgggg

SEQ ID NO: 158721 - DNA, 283 bp, Glycine max
  unsure (1)..(283): unsure at all n locations
gatgaaagggantnttgantccacttctggggttggcgatggttcgagctgcggaagggagaataatgatcgagccaaacaaggagttgaactcagcacagcacagagacaagagcttcagatgaagaagtccaagcttgtgaccatgctcgatgaggtggagcaaaggtacagacagtatcaccaccaaatgcaagttgtgctaacatcgtttgagcaagcagcgggtgttggtgcggcaaagtctttacacgggccttgccttgaagacaatctcaaagca

SEQ ID NO: 158722 - DNA, 281 bp, Glycine max
gtttttgcattttgctgggtctatattgtaagaattatggcatcagaggagacaacaatttggaaggcaatgataaaaactccagcctccatagtgttgataatttacaccttcatatcaatgtggtttgtaggtggtctcactgccttccatttgtatttgataagtaccaatcagactacatatgaaaacttcagataccgatatgatcggcgagccaatccatataataaaggagtgttgaataatttcaaagagatattctgcatcagcattcccct

SEQ ID NO: 158723 - DNA, 271 bp, Glycine max
  unsure (1)..(271): unsure at all n locations
gcactacatggggttggtggagcatntgcaaagagtatntttgtggatgagcttggggcacaagaaagctctttactgaactgtacaccaaaggaagactttggaggaggacacccagaccccaatttgacatatgcaaaagagttggttgctcgtatgggattgggcaaatccgaaccacaagatgatcccccagagtttggtgctgcttctgatggtgatgcagatcgcaacatgatacttggtaaaaggttttttgtcactcctcaga

SEQ ID NO: 158724 - DNA, 268 bp, Glycine max
agtttgggtgcttttgcaaccattaaccatcttcacttccaggcttattatttggctctgcccttcccaattgagaaggcccccactaagaaaattgcaagtttaaatggtggggtgaagatatctgaactgttgaagtatccagttagaggtctcgtctttgagggtggcgatacgctggaagatttatcaaatgttgtttcagatgcctgtatatgtcttcagaacaacaacatacctttcaatgttcttatctctgactgtggaa

SEQ ID NO: 158725 - DNA, 122 bp, Glycine max
gttaaatttacctgcgaatcttgggttcactccaagtatgataaccctgctaagagagtgtttttctccaacaagtcatatttgccatctgaaacaccagaaggagtgaagaggttaagaga

SEQ ID NO: 158726 - DNA, 209 bp, Glycine max
aaatggtcaggtgggacaatatgatgtcagcatcaatacccgacgaggatatcttctacacagttggatttttgcattcaagtgggtttgataattggaaggcctatgatgctcaagataaagaaattctacaattctgtaacgactctgggatcaacgttaagcaatatcttccccactaccgcacacaagaagattggacaaaccat

SEQ ID NO: 158727 - DNA, 124 bp, Glycine max
cacgctttctctctgcttagggttttgatcgcatcggatcttcactctcttctccgatctcaaaatgcccgccgtttatggagctcgcttgaccaccttcgaagactccgagaaggagagtgac

SEQ ID NO: 158728 - DNA, 270 bp, Glycine max
gcaagtgggccaagacctaatccacaaggatcataccattatggtttgataaacacaactcgtacaattagacttcaaaattctggtccagttatcaatggcaaacagagatatgctgtcaatagtgtgtccttcatacctgctgatacaccacttaaactggctgattactacaagatccaaggggtgttctcccttggaagtatccctgactaccccactggtagtggtggctaccttcaaacttctgtcatggaagccgatttccga

SEQ ID NO: 158729 - DNA, 267 bp, Glycine max
  unsure (1)..(267): unsure at all n locations
gttttggatggatacnttgcatgtggttcagaatctaatgaggtgtactgttatcacaaatcactgcctgtgccaattgctactcataaatttgagtcaattgatcacatttctggtcatctaaatagtggtgataataatggacagtttgtttctagtgtttgctggagaaagaaatctaacatgcttgttgctgccaactcagttggaattgtgaaactattgcagatggtctgacacaaaagagaaaatatttggttaacattt

SEQ ID NO: 158730 - DNA, 268 bp, Glycine max
ggcgatggacctcggaacctatgacgtgccagaaggagtggacattctgggaagatacgatgcagagtttgcaaaaatcctcgcaaaagatgctttgaaattcgttgctgaactgcaacgtgagttccggaacgatatcaagcatgcattagagcgcagaagagaggcaaagaagaagtacaatgaagggtctcttccggggtttgatcctgccaccagtgacatcagagagcaggagtgggtgtgtgcacctgttccaccagctgct

SEQ ID NO: 158731 - DNA, 271 bp, Glycine max
gtgacttttgcaccaactggactgacaaccgaagttaagtctgtggaaatgcaccatgaagctctcacagaggctcttcccggtgataatgttggattcaatgttaagaatgttgctgttaaggatctcaagcgtggttatgttgcctcgaactcaaaggatgatcctgccaaggaggctgctaacttcactgcccaggttatcatcatgaaccatcctggtcagattggaaatggctatgcccctgttcttgactgccacacttcccaca

SEQ ID NO: 158732 - DNA, 269 bp, Glycine max
tctcgagccgaatcggctcgagactttccccaacttgcaatgacataacctgatggtcgtgaacgaatctgtcatgaagcgtacaacactagtggctaacacttcaaacatgccagtggctgctcgtgaagcttcaatttatacaggaatcacattagctgagtatttcagagatatgggttataatgtcagtatgatggcagattctacatctagatgggcagaagcattgcgtgaaatctctggacgactggcagaaatgcctgcag

SEQ ID NO: 158733 - DNA, 263 bp, Glycine max
tcgtgaccgcacgatcaagctgtggaacaccctgggagagtgtaagtacacaatccaagacggcgatgcgcattctgattgggtaagctgcgtccgtttcagccctagcacccttcagcccactattgtttctgcctcgtgggaccgcaccgttaaggtttggaacctgacaaactgcaagttgaggaacacgcttgctggacacaatggttatgtgaacactgttgctgtttcccctgatggctctctgtgtgccagtggtg

SEQ ID NO: 158734 - DNA, 270 bp, Glycine max
aaggcagaaagcaagctcatcctagagttttaaaaatggcagcagcctcctccatggctctctcttccccatccttggctggcaaggccgtgaagctgggcccatcagcccccgaagtcgggagggtcagcatgaggaagaccgtcaccaagcaggcctcctccggaagcccatggtacggcccagaccgcgtcaagtacttgggcccattctctggcgagcccccgtcctacctcactggcgagttcccaggtgactacggctgggaca

SEQ ID NO: 158735 - DNA, 265 bp, Glycine max
tactgctacagggaatgagccgggatgttcagcctccacaaaagcatgcatatacggcatccagtacggtgacagttcgttctccgttggctacttcagccgcgagcggctctccgtgaccgccaccgacatcgtcgacaacttcctcttcggttgcggccaaaacaaccagggcctctttggtggctccgccggcctcatcggcctcggccgccaccccatctccttcggtcaacaaaccgccgccgtatatcgtaaaatcttc

SEQ ID NO: 158736 - DNA, 272 bp, Glycine max
tttctgtgataggatggatttgccttgttctcaacataagcgtttttgctgctcctctttgcatcatgaaacgtgtcataaagacgaagagtgtggaattcatgcctttcagtttgtccttctttttgaccataaatgctgtcatgtggttcttctatggccttctcctcaaggactactacatcgcactcccaaatactcttgggtttctattcggcataatccagatggtgctgtatttgatttatagaaacgccaagccacaaggatta

SEQ ID NO: 158737 - DNA, 273 bp, Glycine max
agcggtatgaaattcaccacaagctccgctatactgatgaggctcttgtagctgctgcacagctgtcctaccagtatatcagtgatcgatttttgccagacaaagctatcgatttgattgatgaagctggttcacgagtccggcttcaacatgcacagttacctgaagaagcaagagaacttgacaaggaggtgaggcagattattaaggagaaagaagaagctgttcgcaaccaagactttgaaaaggctggagagctacgtgatagagaga

SEQ ID NO: 158738 - DNA, 265 bp, Glycine max
gatcaaggtcagtgatgcggacttggagttcctcacaggaagtgacaagattgatgatgaatctgctttgtcattgtggcaccccaatttgaagttgctccttgtcactcttggggaacatggttccagatactacaccaagagtttcaaaggatcggtagatgctttccatgtcaatacagttgatacaactggtgccggtgattcctttgttggtgctttattgccaagattgtcgatgatcagtccatacttgaagatgaac

SEQ ID NO: 158739 - DNA, 266 bp, Glycine max
attgaatggcaaatacgacgatggcaaatatgaacacgaacagcaactccaaagaagaaagcaaaaaaatggatgaaagagaggcgatacccttgctcaccccatacaagatgggaaattttaatctatctcacaggattgtgttggcaccgttatcacgatcgaggtcttacaacttcatccctcagccgcatgctgctctatattattctcaaagaacaactaaggtggctttttgattggggaagcctccggtgtgtctgata

SEQ ID NO: 158740 - DNA, 264 bp, Glycine max
caatggaggcgattaggaagagtaggattcttatatttggaggaactggttacatagggaagtatatggtgaaggcaagcgtcacgttaggccatccaacttttgtctacactcgccctcttgatgcacaaactccttcctctaaggcacagctttgcaaggagttcaactctatgggggtcacacttgtccatggagaacttgagcatgaccagattctggcatgattaaacaagtagacattgtgatatgttctcttccata

SEQ ID NO: 158741 - DNA, 267 bp, Glycine max
  unsure (1)..(267): unsure at all n locations
gggagacgtgagaggcgttcgtatcaagaactgctcattgactggcacaaccaatggccttagaatcaaggcatggccagagaggtatccaggtgcagcgtcagatgtaagcttcagtgacattatcatgaaagatgtcaaaaatcctatcatcattgaccaagagtatgaatgttatccagactgcaaaaagaagccgtcacttgtanagctccaaaatattcattctcaaatataaggggaactacaatttcaccacttgcagtg

SEQ ID NO: 158742 - DNA, 267 bp, Glycine max
cagatctggagcaggagaatagcgttggcagcgtttgcgtttgctctgctgttccaatcggcctcagcagacgacgtcgttgtgctctctgaagataacttcgagaaggaagttggtcaggacagaggagctctcgttgagttctatgctccttggtgtggacactgcaaaaagcttgctccagaatatgaaaagcttggtagcagcttcaagaaagccaaatctgtttaattggcaaggttgattgtgatgagcataagagtttgt

SEQ ID NO: 158743 - DNA, 269 bp, Glycine max
ccattctctctgtgtatttccctacctctcccttcaagatgcagatcttcgtcaagaccctcaccggcaagaccatcacccttgaggtggaaagctctgacaccatcgacaacgtcaaggccaagatccaggacaaggaaggaatccccccggaccagcaacgtctcattttcgccggaaagcaacttgaggacggccgtacccttgctgactacaacattcagaagggagtactcttcacctcgtcctccgtctccgtggtggcatgc

SEQ ID NO: 158744 - DNA, 263 bp, Glycine max
ctcgagatgcacaagcaaaactcaaggcacgtcaaggagtggcccatgttgggatggaagacctagatgtgaaagatcctcacacaatgaagagtgtaccagctgatgctaaaaccatgggtgaggtgatgttcaggggcaacactgtgatgaatggatatctgaaggacttgaaagcaacacaagaggcatttaaaggtggatggttttggactggtgatttggagtaaagcatcctgatggatacatagagcttaaggatc

SEQ ID NO: 158745 - DNA, 260 bp, Glycine max
gtggtttcagtgagtgatcggtgttcacttgatccttcataagtcgtcatcatcatcatcatcatcaccgttgattgaagaagatgccgatcagaaacatcgccatcggaaggcctgaagaggctactcaccccgacacgttgaaggcggggttggctgagttcatctccaccttgatcttcgtgttcgccggttcaggttccggcatcgcctacaacaagtcaccgacaacggcgccgccactcccgccggcctcatct

SEQ ID NO: 158746 - DNA, 263 bp, Glycine max
gtggtttcagtgagtgatcggtgttcacttgatccttcataagtcgtcatcatcatcatcatcatcaccgttgattgaagaagatgccgatcagaaacatcgccatcggaaggcctgaagaggctactcaccccgacacgttgaaggcggggttggctgagttcatctccaccttgatcttcgtgttcgccggttcaggttccggcatcgcctacaacaagctaccgacaacggcgccgccactcccgccggcctcatctccg

SEQ ID NO: 158747 - DNA, 262 bp, Glycine max
tcgggattgactgcctcaattgctctagaaaaggcaggacagatggaatctggaaaagtggtccttgttactgctgcggcaggaggaacggggcaatttgctgttcagctagcaaaattagcaggaaatacagtggttgcaacttgtggaggtggggcaaaagccaagcttctgaaagatttgggagttaacagagtcatagactatcatagtgaagatgtaaaactgttctaagggaagagttccccaaaggtattgacat

SEQ ID NO: 158748 - DNA, 262 bp, Glycine max
cttgaatcttcgttatccttctttttttctccttgaactcgaatattcactatggcagatgaggtggttctgctagatttctggccaagtccatttgggatgagggtcaggattgcacttgctgaaaagggtatcaaatatgagtccaaagaagaggacttgcagaacaagagccctttgctcctcaaaatgaacccggttcacaagaaaatcccggttctctccacaatggcaaacccatttgtgaatctctcgttgctgt

SEQ ID NO: 158749 - DNA, 261 bp, Glycine max
ttggacgtggaggatttggagcagtgtaccaaacagttcttagagatggacattcagttgccataaagaagctcacagtatcaagccttgtcaagtctcaagaagattttgaaagagaagtgaagaaattaggaaaaatcagacaccaaaacctcgttgaacttgagggttattattggactccatcactgcagctcctcatatatgagtatctctctggtggagtctctataagcatctccatgaaggatctggtggaaa

SEQ ID NO: 158750 - DNA, 264 bp, Glycine max
gcgagcgagcgagcagtttcaaagagaggatttgggattgggaaggcgagggattgcgctgcgtctcttcctcttctctttcgattcatccctcattcataatcttccaatccaacaacctcagcctcacactcacacatacacacatctgaacgcgtatcgtccctcccatggcttcaaagcgcatcctcaaggagctcaaggacttgcagaaagacccaccacttcttgcagcgctggtccagtagctgaggacatgttcca

SEQ ID NO: 158751 - DNA, 265 bp, Glycine max
atttctcaagaaaatccattggctctacttgattgtggatgaagggcatcgattgaagaatcatgagtgtgctctagcaagaaccctggactctggctatcacattcaacgaagactgctgttgactggtaccccaattcagaacagtttgcaggaattatggtccctgctcaattttctccttccaaacattttcaattcagttcagaatttcgaggactggttaatgctccctttgcagaccgagtggatgtctctctaactg

SEQ ID NO: 158752 - DNA, 261 bp, Glycine max
caacttctgctacttcctactccaaccgcacttctgctccgcaattatcatgggcaaggtcaagatcggaatcaacggatttggaagaattggccgtttggtagccagagtggctctgcagagagacgatgttgaactcgttgccgttaacgaccctttcatcaccaccgattacatgacatacatgtttaaatacgacagtgttcatggacactggaagctcacgatgtcaccgttaaggacgagaagacccttctcttc

SEQ ID NO: 158753 - DNA, 260 bp, Glycine max
ctcaacattttacactcttttcttcttctcgttgttgcttcgctgttgaatcatggatcagaaggtcgatttcagcgctccccattccatgggaaccactatcatcggcgttacttacaacggcggtgtcgttctcggagccgactctcgaaccagcaccggagtgtatgttgccaaccgagcatcggacaaaatcactcagctcactgataatgtatactgtgtcgctctggatcggctgctgattctcagattgtctc

SEQ ID NO: 158754 - DNA, 260 bp, Glycine max
ctctcttccaaacacacatcctcacccatggcagcaccatcttcagagacaaagtcaccatcatcctcgaacacgcagcttccgctgaaaccaatcccaggcagctacggaatgccgttttttggagcaataagcgacagacacaactacttctaccaccaaggacgcgacaagttcttcgcgacgaggattgaaaaacacaactccaccgtgatccgaacaacatgcctccggggcccttcatctcctcggaccctcgt

SEQ ID NO: 158755 - DNA, 261 bp, Glycine max
tacaaaggttgctgtaggagataagattgcagtagtgctaagtgctaacacctgcagtgaacaatggcctctgcatcagcatctctgctcaagtcttcacttgttcttgacaagtctgagtgggtgaagggacaaacccttcgccaaccttctgcatcagttgtgagatgcaaccccaccaccccatcaggcctcaccatcagagctggttcctatgctgagagctcgttaagaccgcgaaaacagtggcttcaccaggga

SEQ ID NO: 158756 - DNA, 260 bp, Glycine max
acaaaatacggtgcgttgaatggtggtgccaactttgttgcccctggttacaccaagggtgatggtcttggtgctgagattgttggcactttcatccttgtttacaccgttttctccgccaccgatgccaaacgtagcgccagagactcccacgtccccattttggcacccttgccaattgggttcgctgtgttcttggttcacttggcaaccatccccacaccggaactggtatcaaccctgctcgtagtcttggtgct

SEQ ID NO: 158757 - DNA, 263 bp, Glycine max
aagaagcccaatcttttcatctacggtgatggccccacaaataccatcatcactggccgcaagaactttcacgagggtaccaagacaatgagaaccgccaccttctctactgttgccgaggatttcatggcgaagtcaattgcatttgagaacaccgctggtgcagaaggacaccaagcagtggcacttcgcgtgcaaggtgatcgttcagtgttctttgatgtgctatgcgcggttaccaagacacattgtatgcccacgcc

SEQ ID NO: 158758 - DNA, 258 bp, Glycine max
gaattagctgatatagacgtttttgttagtacagtagatcctatgaaagaacctccacttataactgcaaatacagtactatccatccttgctgtagattatccagtggagaaagtttcatgttatgtctcagatgatggtgcagctatgctgacatttgaagccatttcagagacttcagagtttgcaagaaagtgggttccgttctgtaagaagttaacattgaacctcgggctcctgagtggtattttgctcaaa

SEQ ID NO: 158759 - DNA, 256 bp, Glycine max
atcggataagctatttgagcctgaattattcaagcagattgattctgttatcaaggcatgctcaaatccctcaataatacgctcactgttcagtgctactttacctgattttgttgaagatcaagctcgagaacttatgcatgatgctgttcgtgtaattgttggcagaaagaatatggcttctgaaacaataaagcaaaaattggtttttactggaatgaagaaggaaaacttctagcaattcgtcaaagctttg

SEQ ID NO: 158760 - DNA, 257 bp, Glycine max
ctgggttgcagggaaaaagaaaaataaaatgggttccgataataccaacttggagttcttgaaggagatcggtttgggctcctccaacattggttcttacattaatggccaatggaaagccactggttcttctgtcacttctgttaatccttctaacaatcagagcatagctcaagtgactgaagcgactttgcaagattatgaggagggattgcaagttgcagtgaagcagccaagacatggatgactattccggc

SEQ ID NO: 158761 - DNA, 258 bp, Glycine max
ttcgacccctccaagcgcaaaggatacttatcgtgggatgactattttatggcaattgcgtttttgtcagctgagaggtccaaagaccctaataggcaggttggggcttgtttggtgagtcaagatggtgtaattcttggaattggttataatggatttccaagaggttgttctgatgacaagctaccctgggcaaagaaatccaggactgggaatccttggagacaaagtacccttatgtttgtcatgcagaagtaa

SEQ ID NO: 158762 - DNA, 252 bp, Glycine max
tcgcttcttcgccatgggagaagacttcaacaataacgatcctctcatccgcaaccaaaacgccgccgttcaggctcgcgccaaggaccagaaccgcgccaacgcccttcagctcaagctgattggacagagtcaccctactggtctcacagcgaatttgttgaggctctttgagcctaggcctgccttggactataagcctcctccggagaaaagaaatgccatcgctaataggcacaaaaaagagcaaga

SEQ ID NO: 158763 - DNA, 258 bp, Glycine max
tgccgttaaggatccatctgctccccatggagttcggcttttgattgaggactatccttatgcttctgatgggctagagatatgggatgccatcaagtcctgggtgcaagaatatgtgtcattctactacaagtcagatgcagcaattcaacaagaccccgaactccaagcttggtggaaagaacttgtccaagtgggtcatggtgatttgaaagataagcatggtggcaaaagatgcaaacttgtgaagagttgatt

SEQ ID NO: 158764 - DNA, 259 bp, Glycine max
  unsure (1)..(259): unsure at all n locations
gttcctctcgaggaaattatgaaggataagaattttgatcttgtaacaaaagaaatatttggaccctttcaggttatcacggactacaaaaacagtcaactatcagttgtattggatgctgtggaaagaatgcataaccatttaacggctgctgtagtttcaaatgattctgaggtgctccggttgcccnggctcttagaccagcataagtagtaccattactgaattgccaacaacttcctgtaaaaacaaaggatca

SEQ ID NO: 158765 - DNA, 258 bp, Glycine max
aaaaaagatatattatagcaactgaactattgtgaagcataaaagaacaaaaatcttatttagttgtaaagcaataaaaatatacagataaatgaagaggtgaaagaaagagagaaaaaaaatcaatgatatagaattctaatatgtaaaggtctatgggttatctcataaaaggtagtgtaataaagcatcaatctaaatcaattcatatctatttaatatgaattaatttataacgtaaacaaattaagagctctg

SEQ ID NO: 158766 - DNA, 257 bp, Glycine max
ccttgttcttctttctctattgtctatagtcatctccattgttctcttcattacccacacacacaaaagaaacaacactccaagaggaccaccaggtcctccacctcttcctctcatcggcaaccttcaccaactccacaactcatccccacatctctgcctatggcaactcgccaaactccacggtcctctcatgtcgtttcgcctcggcgccgtgaaaccgtcgtggtttcatcggccagaatcgccgaacaaat

SEQ ID NO: 158767 - DNA, 256 bp, Glycine max
gatgttcttctaccctttttgccactcactcgacaacaccataaccataaaccaccccattagagacggcgacgttttggtctccaacggtttaggaaactttgcgctcggtttcttcagcccgcgaaactccacaaaccgttacgttgggatttggtacaacaaaatctcggaacaaacggttgtgtgggttgccaacagagacactcctcttaagacacttccggtgttctcaaaataagcaacaacggaaacc

SEQ ID NO: 158768 - DNA, 256 bp, Glycine max
tataataccaagttatctgacttttttgagattctggcaacatctgaggatagatatggacagactttcgtttccacagcacgtggtaggaaatatcccgtgactgtcaacctatggcaaccagagaaaaatgcttttgaatgggctacatctttgaaagcccctcacacagaggatgcaattcgggttactcagtccacagcaaactttttcatagtgaagctaggaaatccacaaacacacctgatgctcaaaa

SEQ ID NO: 158769 - DNA, 255 bp, Glycine max
ggctcgagcggctcgagcactttctctctctctctctctcacccagatcttgtagcaatggcgagcgctcccactccacgcgaagagttcgtgtacatggcgaagctggcggagcaggccgagcgctacgaggagatggtggagttcatggagaaggtctccgcctccgccgagagcgaggagctgaccgtggaggagcgtaacctcctctccgtcgctacaagaacgtgatcggcgctcgccgcgcctcctggc

SEQ ID NO: 158770 - DNA, 254 bp, Glycine max
ggagcagaagaaggcaaagatagtggcagagctccaagctgtgaagcacaacagtggcaagtcctacaatcagttagcggaggagactggactcaccaacgtctatgttgctcagcttctcaggagacaggctcagctcaatccccaaactgcccctctacttcgggcagcgctgcccgacctgccccaagaccttgtttctgagatgatgagacccctttgaggtcttatgaccctaatctcatccaagaccc

SEQ ID NO: 158771 - DNA, 254 bp, Glycine max
cgcactgatggtattcctgaacaggacattgtcaagcttgttgacaccttccctggccaatccattgatttctttggtgcactgagggccagagtatatgatgatgaagtgaggaagtggatttctggtgttggtgttgacagtgttgggaagaagcttgtgaactcaaaagatggacctccaacctttgagcagcccaagatgactctggagagctcttgctgtatggtaacatgcttgtccaagaacaagag

SEQ ID NO: 158772 - DNA, 256 bp, Glycine max
  unsure (1)..(256): unsure at all n locations
ttttcccttttattttgctctcttctctgcacaacaattccttctcattccagatattccaaccatcgaccgatctcaattctcaaccttaacctctcagaatgtcttacgcttatctcttcaaatacatcatcatcggtgacaccggagttgggaagtcttgtcttctacttcaattcacagacaagcgctttcagcccgtccatgacttgaccacggtgttgaatttggtgccangatgatcacaattgataac

SEQ ID NO: 158773 - DNA, 259 bp, Glycine max
gaaggtcttgatgatgcagatgatgatggtgaggaagaatatgaaaatgacttagaagtgacagaagaagctgagcctgttctccagaagcctcctgaacaaccagtggttacaaaagaagctgaaaggcaactttcaaagaaggaattaaagaaaaaggggcttgaagaacttgaagctgttttggctgagctaggatacacacgagaggaacccactggtcaagaagatgattccaatggtgctgagaagaaagaag

SEQ ID NO: 158774 - DNA, 258 bp, Glycine max
tgacaaagctagtagctgaagttcttgagaggaacaaattacctggtgcaatattcacctctttctgtggaggtgctgacattggtcaggcaatagcaaaagacactcgcattcccctggtttcatttactggaagttcaaggttggcttgatggtccagcaaacagttaatgagagatttggcaaatgcttgcttgagttaagtggtaacaatgcaataattgtcatggatgatgcagacatcaaattggctgtacg

SEQ ID NO: 158775 - DNA, 257 bp, Glycine max
tgactcgagccgaatcggctcgacttcggctgtctcatcactaccaacttatatttcaaggggaccaagttatggctcccgatgcaaagttctcctagcttttgaagataacgggtcttcaaaaattggggttaggtttgataatcaattccagatggaaatgatcttggtggcctttgcgaagatgaccatgggttcttctgttctgcaaatcatttactacaagtagacggctctggaggggatgatcttgacaa

SEQ ID NO: 158776 - DNA, 251 bp, Glycine max
atcggccagcaccaacagcatcggcggcgacagtcactctccgacaacaacacttccgcggcgaaaaatgtctctggtggcgaacgaggatttccagcacattctgcgtgtgctgaacaccaacgtggatgggaagcagagataatgttcgctatgacctccatcaagggtattggaaggagattcgccaacatcgcttgcaagaaggccgatgttgacatgaacaaaagggctggtgagttgagtgctgc

SEQ ID NO: 158777 - DNA, 255 bp, Glycine max
tcgtcctctaacactcttccaaatcatggctagctcactgcttgtgagggttgccagctgcatggttgtggtgtggatgtttagttttgggcacataattcccttggcagaagctgaaattccatgtggcagggtgcaatcactgtggctccatgcatagggtacctaaggggtcctggtggaggtgtccctgcaccatgctgcaatggggttaagagcataaacaaccaagccaaaaccaccccagatcgtcaa

SEQ ID NO: 158778 - DNA, 253 bp, Glycine max
gaacaagggtttctctgtctgcttcttcactttctctcgtttcaatcgaaaccaaaacaaaaacatgggcagaaaattcttcgtcggtggcaactggaaatgcaatgggaccactgaggaggtaaagaagattgttatactttgaatgaggctaaagtccctggagaagatgtcgtagaagttgttgtgagccctccttttgtgttccttcctgttgtaaaaagtttgctgcgccctgatttccatgtttcgg

SEQ ID NO: 158779 - DNA, 245 bp, Glycine max
agagagaaaattaacatgggaagaggaagggttgttctggagagaatagagaacaagatcaaccgtcaagtaacattctcaaaacgcagaagtgggttgctgaagaaggcctttgagctttctgtgctatgtgacgctgaagttgcccttatcatcttttctagccgtggcaagctttttcagtacagcagcactgatattaacaaaatcattgagaggtatcgccaatgtcgttacagcaagtc

SEQ ID NO: 158780 - DNA, 253 bp, Glycine max
gtcgatggagattagaaacgtgttgggtgagagtgtgagagaagtgaaagaggaagatctgcagaaacttccttatctgaaagctgtgattttggaaggcttgaggcgacacccgccaggacactttgttttgccgcatgcgtcactgaggacgtagtttttaatgattatttggtccctaagaatgggacggtgaatttcatggtggctgagatggggtgggaccctaaggtatgggaggatccaatggcat

SEQ ID NO: 158781 - DNA, 258 bp, Glycine max
ctgacaccctcccatttgctacaatgggatcaggttcacttgctgcaatgtctgtatttgagtccaagtacaaggaaagtttgagtagggatgaaggcattaagctagttgttgaggcgatatgcgctggaatatttaatgacctaggaagtggaagtaatgttgacgtttgtgtgataaccaagggacacaaggaatatctcaggaaccaccttctaccaaatcctcgtacctatgtcaatccaaaaggctttgatt

SEQ ID NO: 158782 - DNA, 254 bp, Glycine max
caaatagagagagaacttcaagtgagggtgagagtgacacaaatctagagagagcactagtactctaaaagtctattatattcttcaaaatatgaccatgcatcgcgagtcttgggcttttgtcttcggcgttatgggcacaatcatctcctttggagtgttccttgctccattgccaaccttttaccaaatctacaagaagaaatccactgaaggtttccagtcacttccttatgttgttgcactgttcagtg

SEQ ID NO: 158783 - DNA, 256 bp, Glycine max
cagagagtgatttcagtgagtgatcggtgttcacttgatctcatcataatcgtcagcgtcaattgaagaagatgccgatcagaaacatcgccgtcggaaggcctgaagaggcgactcaccccgacacgttgaaggcggtttggctgagttcatctcaaccttcatcttcgtgttcgccggctcaggctccggcatcgcctacaacaagctcaccgacaacggcgctgccacccctgccggcttcatctccgcctcc

SEQ ID NO: 158784 - DNA, 255 bp, Glycine max
ggcttcaacgacggctaccgtgcggtcagaaccttcaccccgtgccgctcgtgcgactgggcagaagttcagcatggactcgcggcgcagagatggtacgccaccaatcacatcttgccagatggacgtcaaataattatcggaggaagaagacaattcaactacgagttttaccccaagacacaagccaagaatacttacagtttaccttttcttgctcaaaccaacgacgctaacgctgaaaacaatctctac

SEQ ID NO: 158785 - DNA, 252 bp, Glycine max
aattgttgtaactttttgattcctaaattctctaaaattcgaaattctaatttcgttaggggaaagagattgtttgtgtgtgagtgagtatggctggaaaaggcgagggtcctgctatcggaatcgatttgggaacacgtactcttgcgtcggcgtgtggcaacacgatcgtgttgaaatcatagccaacgatcagggtaacagaactaccccatcctacgtggctttcaccgacacagaacggttgatcgg

SEQ ID NO: 158786 - DNA, 244 bp, Glycine max
cacgtttcacaatcactttttgcgcttctctcactcactcactcttcttcttcctcttcgtgtggttttctttctcgaactcgaactaagatgcgtgagattcttcacatccagggagggcaatgcgggaacagatcggagccaagttctgggaggtggtgtgcgcggacacgggatcgattcaacggggaggtaccaaggggacaacgagttgcaactcgagcgagtcaacgtctactacaat

SEQ ID NO: 158787 - DNA, 256 bp, Glycine max
cactcatatttggcatctgctggtattgatggtgtcaaagttgatgttcagaatatccttgaaactcttggagcaggacatggtgggagggtgaaacttgcaaggaaataccaccaggcattggaggcatcaatcgctaggaacttccctgacaatggaatcatttgttgcatgagtcacaacactgatggattatacagcgcaaagcgttcagctgttattagggcatcagatgatttctggccaagagaccctg

SEQ ID NO: 158788 - DNA, 252 bp, Glycine max
atgaagagcgaagagaatggctcccaagggtttaatctttttggctgtgttatgcttctcagcactgtcactgagtcgttgtcttgcggaggataatggacttgttatgaacttctacaaggaatcatgccctcagctgaagacatcatcaaagaacaagtcaagcttctctacaagcgccacaagaacactgctttctcctggctcagaaacatcttccatgactgtgctgttcagagttgtgatgcttca

SEQ ID NO: 158789 - DNA, 251 bp, Glycine max
  unsure (1)..(251): unsure at all n locations
tgcaaacaatgtcaccaattgggttggtaccatttggatgacacccatattangcgcctacattgctgacgctttccttggccgctattggactttgtcatagcctccaccgtttatctctcgggtatgtctctgttacactggcagtgtcccttcctagcctgaagccacctcaatgctttgaaaaggatgtgacaaaatgtgccaaagcctccacactacagcttgcagtgttctatggtgcactctac

SEQ ID NO: 158790 - DNA, 252 bp, Glycine max
gacctctggtgggacccaaaaggttggggtgaagaaggctttggttttctatggagggaagcccccaagagggatcaaaaccaattggatcatgcatgaatataggctaactgataacaagcctaacaataggcctctcctggttgtgacttgggcaacaagaaaaacactctaaggcttgatgattgggtgctgtgccgaatctacaagaagagcaacacgcataggtcacccatggagcatgacagggaa

SEQ ID NO: 158791 - DNA, 238 bp, Glycine max
ccactgtcctgaagaacctcctacctgccttgttccttttcctgaaggttataaacgcccaattgagtggcctaagagcagagagaagatatggtattacaatgttccacacaccaagcttgcggaagtaaaggccaccagaattgggtgaaagtaacgggcgagtaccttacttttcctggtggtggaacccaattcaaacatggggcacttcattacattgactttatacaagggc

SEQ ID NO: 158792 - DNA, 245 bp, Glycine max
cagcaatggagctgtcttccagtgcatttgtggtaatattgttggcagtcgcagctacagcagtactctcaaatgggttggatctatctttcttgcccagcgatttcctctttggcattgcttcttcctcttaccagtatgaaggagcttacaagagtgacggcaaaggactgagcaactgggataactacactcacggaccaggtagaagtgtaataatggatggaagcaatggggatatcgcg

SEQ ID NO: 158793 - DNA, 250 bp, Glycine max
ggagtgggagcttccctgtaaagtggcacatcataaaagatgtgccaaatgcaaattttaggcacattatactagagaacaatgagaacaaacctgtcactaatagcagagacacacaagagataatgcatagaaaggtttggaaatgctgaaaatattcaaaaaccataatttgaagacatctttgcttgatgactttatgtattatgaaaatcgtcagaagatcatgcaggaagaaaaggccaagttg

SEQ ID NO: 158794 - DNA, 249 bp, Glycine max
gcgagggagaacgagacgtttgctttccaggctgagatcaaccagctcctcagtctcatcatcaacaccttctactccaacaaggaaatcttccttcgtgaactcatcagcaacgcctctgatgctttggacagattagatttgagagtttgacggacaagagcaagctcgatgctcagccagagttgttcattcatattattcccgacaagactaacaattcgctgaccattgttgacagtggcattg

SEQ ID NO: 158795 - DNA, 254 bp, Glycine max
ccgaaacagtttccatctctctcacaaaatgacaacaatatcaaattgctcccttctcttcctcttcctcttcctctccaccctccacatagcttccaccctctcaacccccaccaacttcatcaagtcctcctgcagcaccacccagtacccagccctctgcatccagtccctctccgtctacgcctccaccatccagcaagacccccacgagctcgtccagacagccctctccctctccctcaaccacaccg

SEQ ID NO: 158796 - DNA, 248 bp, Glycine max
atcgagataactagaaacagtgtgatgaaaatgaaggtccttgttttcttcgttgctacaattttggtagcatggcaatgccatgcgtacgatatgttccctctccgaatgaacactggctatggtgcccgtactccggaggtgaaatgcgcaagttggaggcttgctgtggaagcacacaacatctttggctttgagaccattcctgaagagtgcgttgaagcaacaaaggaatacatccatggcga

SEQ ID NO: 158797 - DNA, 252 bp, Glycine max
ggcttccctggcggcttccaccgcggctatgtcagaaatccttggaaaccccgttaacctcagatgcgcaaccaggtctgctccatcaccaactacacctgccaccttcaagaccgtcgcacttttctccaagaagaagccagctccacctccaaagaaaaagcctgccgctgtatcccccgccaatgaggaactcgccaagtggtatggtcctgacagaaggatcttcttgcctgagggtctcttggaccg

SEQ ID NO: 158798 - DNA, 249 bp, Glycine max
cttaatacagcctatgactcatggcaggtccaaacaagcttagctccttcatcagcagatccccatggcttttggcatgattgtagattaaatcatgctaaatgtacttcttcacaaatccaatatttgcaagtggtttgacatatgagaaatagctttcacaagaagtataaatatgtcttcagtaaattactgtaacaagtcatttccctgtatctaatgcaggattcaggaatcaaatgctgaatg

SEQ ID NO: 158799 - DNA, 244 bp, Glycine max
caccattctagatatcagagaactttgcagctctcttaggtttttaaaaaacaccacgcaaacagcaagatggccacttccgacagtaacatgctactaaattatgttccagtttatgtgatgctcccactcggagttgtcaatgttgacaatgtttttgaagacccagatggccttaaagaacagctcttgcagcttcgagctgcgggtgttgacggggttatggttgatgtgtggtggggga

SEQ ID NO: 158800 - DNA, 239 bp, Glycine max
cccaattactggtactggcattaacccagcaaggagtttcggagcagctgtaatctacaacgaagacaaaatctgggatgatcagtggatattctgggttggaccaattgttggagcagcagtggctgattttaccaccaatacatccttagagcagcagctatcaaggctcttggatccttcaggagcaacgcttaattaattaatcaattaagctagctaccttgattaatttgcca

SEQ ID NO: 158801 - DNA, 227 bp, Glycine max
ggctcgaggttgtgttgtgttgaagtagcaccctagcaaagatgttacgcatcttaggaggcaataaggggcacaagatcaagggtactgtggtgttgatgagcaagaatgtgtggacttcaacgaaatagtgtccactactcagggtggtttggttggtgctgccaccggcatcttcggtgctgccaccggtattgttggtggagttgtcgatggtgctactgcca

SEQ ID NO: 158802 - DNA, 242 bp, Glycine max
atattccccctttccctagtttagctacttacctcaatctttctcatgggaaagtttgccctagccaatatcctcttggtccttctcttgaacttgagcactttgctcaatgttcttgcttgtccctttgcccttacccttctcccaagcctccaaaaaagcctcccgttgtgaaaccaccggttcacaaaccaccaaaaccatgtccaccacccaagtcatctccaaaaccaccccatgta

SEQ ID NO: 158803 - DNA, 223 bp, Glycine max
tgctgttcttgcgcgtgaacaagcctcaggtaagccaaaaccatggttaagcataacaatgttatcccaaacggacacttccgtaagcactggcagaactatgtgaagacttggttcaatcagccagcacgaagacaaggagacgattggctcgtcagaagaaagctgtgaagatattccccagacctacggctggacctctcaggcccattgtacatggtca

SEQ ID NO: 158804 - DNA, 248 bp, Glycine max
ctcgagccgctccctttctcctcggtccacagagacaaaatgtaagacaggtgccaacagtacatcacgaaagaaaggactagctgagccgagatcactaactaaaacgaatttaatactaatcgaaaatataatagaatagaaatagaactgtcttttcatatagatatcccttcaacacaacataggtcatcgaaaggatctcgaagacccaccaacgcacgaaagccgggatctttcagaaaatg

SEQ ID NO: 158805 - DNA, 247 bp, Glycine max
ggaacacaaaaaatggcagatattcctcgggtgaagcttggaagccaaggcctggaggtttccaagttaggatttggttgtatgggcctaagtggagtgtacaacgatcctgttcccgaagaggttggcatctctttgatcaaacacgcattcaccaaaggggtcactttctttgattctgcagatttttatggagcacgtgccaatgaagttttggtcggaaaggctctcagggactttcctcgag

SEQ ID NO: 158806 - DNA, 246 bp, Glycine max
tggagagcttcacttggcagtgagattcacttgcaccgcatgggttaacatggtagcccagtatggtaggcctttactgcccaaaatgcattatgtccaaccaatacccgtcaggcacatagattggctcgccaccaggtcatgcagattgtggcagctcgcctatctagagccgagccaccccttaggcgtgaagcagttgagtacatgctcgacgttgactaccacatgtggagtctaaggaga

SEQ ID NO: 158807 - DNA, 242 bp, Glycine max
cttagccatgtctctcccacacactaggaatgtgtgttttggtgtacggttcttgctctggctgtggccacaagtgccagaaacgttcccaaccccaaggatgctggtcttaaggaccagaagaacttctcagctatggtggagttggtggttttccgggattgggaacaatggactgccttttggaccatactgtgccggaataggtggtggttttggcggaggtggtggacttggtggtg

SEQ ID NO: 158808 - DNA, 247 bp, Glycine max
aatagattctttccatcagtttgctggggtgaagtggctgcgggagaagcctttgtctaagtttgaagatgtgcaatggctccttatacacaaggcagaagaggagaaactcattcaagttactattaactgcctgagcagtatcttaataagttaatagaccaattcaatgaatattatattagtgacagtgttagcagatctgctcagctgtggaatgatcagaggaagttgatactgcatgatg

SEQ ID NO: 158809 - DNA, 241 bp, Glycine max
cttgtttcacaagtttccttggaagcggacgcagttaccctctctacctttcttctattttctcattcctgcctctcttctcaacatggccgccaacagatggttgaaacctgaggtatacccactcttcgcttcagttggtgtggctgttggaatctgcggtatgcaacttgttaggaatataaccaccaatcctgaagtcagggtgaccaaacagaacagaactgcaggaattcttgag

SEQ ID NO: 158810 - DNA, 243 bp, Glycine max
gcctcccataaaaatgaagaatactatcttctctgctctctttctactttgtgccttcaccacctcatacctaccttcaaccaccgcggtggtcgataccgacggtgatattcttcagaatcctggcaatactttatcttgtccgtttttcgacccggcggcggagtagaattcgccgccactggaaacgaaacttgccctctcactgtcgtgcagactctcttcgggaggggctttccagca

SEQ ID NO: 158811 - DNA, 246 bp, Glycine max
ctcagtgaaagagaatccgaggcgaagagaagagaaaaattaagatggaggggaaggagcaggatgtgtcgctgggagcgaacaagttcccggagagacagccgattgggacggcggcgcagagccaagacgacggcaaggactaccaggagccggcgccggcgccactggttgacccgacggagtttacgtcatggtccttttacagagcagggatagcagagtttgtggccacttttctgtttc

SEQ ID NO: 158812 - DNA, 242 bp, Glycine max
atcaaaatgaagaaacccaatgctgcgatccgtgatgctaatgctgctttggagattaatcctgattctgctaaaggatacaagtcacgtggcgtagacgagcaatgcttggtcaatgggaagaagtgcaaaggatcttcatgtggcttcaaagttagactatgatgaggaaataaatgctgtacttaaaaaggtggaaccaaatgctcacaagattgaggaacaccgtcggaagtatgaaa

SEQ ID NO: 158813 - DNA, 256 bp, Glycine max
aaaagattcagtgaagaacaacgttaatggcatctcttggtgtgcaagcagttcatcctcctccattaacatccacctccgacccacctcctctttttgatggcaccaccaggttgtacatcagttattcttgcccctatgcacaacgtgtatggatcgctcggaacttcaagggactaaaagacaagatcaatttggtgcctataaaccttcaagacaggccagcttggtataaggagaaagtctactctgaaaa

SEQ ID NO: 158814 - DNA, 252 bp, Glycine max
taacaggcgaactgatttcgttatcagaacaagaattggtggattgtgatactggatataaccaaggatgcaatggaggacttatggactatgcatttgagttcataatcaacaatggcggcattgattctgatgaggattacccataccgtggtgttgatggtagatgcgacacatataggaaaaatgctaaagtcgtttctatcggggcctacgattgtgcacagaaagtgcttctaaactgtttcgata

SEQ ID NO: 158815 - DNA, 248 bp, Glycine max
ctctgatggattatgatggattgaacgctgttgggacagggttggggactgcagctgtaattgtgatggataaatctacggatgttgtggatgctattgcaaggctttcctatttctacaagcatgaaagctgtgggcagtgcaccccatgcagagaggggactggttggctttggacgatcatggaaagaatgaaagttgggaatgccaagttagaagaaattgatatgcttcaggagttgactaaa

SEQ ID NO: 158816 - DNA, 244 bp, Glycine max
gttcattctctttgcgcagttccctacctctcctttcaagatgcagatcttcgtcaagaccctcaccggaaagaccatcacccttgaggtggagagctctgataccatcggctgcgtagttgtcaagatccatgctgatggaccattctattgtggtcagctttgctcaaggtggaaggacggttgtgacatctcgggtttatccaacaaaggcaatctatggagctgctaggttgttcttgtt

SEQ ID NO: 158817 - DNA, 247 bp, Glycine max
gaagaagctcctccagtgccacctgcaccgcccatagtggccatgctgccatcccctggcatgggccacctaatcccaatgatcgagttcgccaatcgagcagggcgttaccaaaatttgcttggaacgcatcagaaagcttgctgacaactgcacaggtctccaaggttttctggttttcaatgctgtgggtgggggaactggctctggacttggttcccttttgctggaacgcctttcagtggac

SEQ ID NO: 158818 - DNA, 243 bp, Glycine max
ccttccccctccacccacccagcatatctctccatgccgatggtacccagccacgggtggaagctgccatggttaatgccagaatacgcaagcctgtcagagcaaaccaagccaaagttgggtacattgggcctgctactgatttcaactatgaccacaaacatcttggtactggccctcaaacacttctcgaaattgctgagggtcgccacccatttttcaagacactctcgaatgccaaaa

SEQ ID NO: 158819 - DNA, 242 bp, Glycine max
atttctttcgagctgacaatcctgaaggtgtggaggcacgtaacgaggtagcaaagatggcatttgaagatatgatatcttggatgcaagaaggtggccaggttgggatatttgatgccacaaacagtagcaagcagcgaagaaacatgctgatgaaattggctgaaggtagatgcaagatcatttttctggaaacaatatgcaatgatgtagacataattgagaggaatattcgctttaaa

SEQ ID NO: 158820 - DNA, 239 bp, Glycine max
ctctgagtagaagaagatcaagatcaaggaagaggatgtcgaaagaggatgtgtttgttggcgcgatcgaccaaggaacgagcagcagcaggttcataatatacgacgcgaagactggagtagtaggatgccaccacgtggagttcacccagttctacccgcaagccgggtgggtggagcatgaccccatggagatcttggagagtgtgaaggtgtgcgtggccaaggccgtcgataag

SEQ ID NO: 158821 - DNA, 241 bp, Glycine max
gggttctgagctcatacactgcaatgctacctacgatagaaagtctcttctcatcaatggttagaggagaatcctcatctcgggctccattcactatcccagaagcacccctaaggtttgtgtttcattttcttcactctttatgtgtttcaatcttaaaatgtgtttcaagctttgtgttgttttgtttgcttcaaatgtgggaggatctaattcggaaggccaaacacggaggacttga

SEQ ID NO: 158822 - DNA, 256 bp, Glycine max
ttcggctcgaggaaagatcaccaatcggccccttgctggtactgttagaagaggaaaaacaccaaaagaagatatcatgttggagaaacaacttttgaatgatgaaaagcaatgtgcagagcacgtaatgctagttgatttggggagaaatgatgttggaaaggtctccaaaccgggttctgttcaagttgaaaagcttatgaatattgagcgctattcccatgttatgcacatcagctcaacagtcacaggggag

SEQ ID NO: 158823 - DNA, 242 bp, Glycine max
gtggaacctctctctctctctctctctctctgcggaaaccggaatatctcagttctctgatcagatccatccgacgtcgtttcagtgataatggctccgttcagcggcgatgagacggcaccgtttttcggcttccttagagccgcagctccttttcttttcggtcaatgctagcggtcaattttgtggagtggctgagatgaccggacgtgttgatttcaataaaagtatggatttctggc

SEQ ID NO: 158824 - DNA, 218 bp, Glycine max
caacaacattcattcattcacagctgtcacgccgtgaacggaaaatggcaacggcgagacgcatttcccgcctatcaccgaatgcaacggaacgacaccgtgcgagtctgtggccgccgacctcgacggtacgctcctcatcacccgtagctcgttcccgtacttcatgctcgtcgccgtcgaagccggcagcctcctccgaggcctcatgctcctgg

SEQ ID NO: 158825 - DNA, 231 bp, Glycine max
cacaaagcacaaagcaaagctcatccttgagttaaaaaatggcagcagcttcttccatggctctctcatccccatccttggctggcaaggccgtgaagctgggcccatcagccccagaagtgggaagggtgagcatgaggaagaccgtcaccaagcaggtctcctcaggaagcccatggtacggcccagaccgagtcaagtacttgggcccattctctggcgagcccccgt

SEQ ID NO: 158826 - DNA, 235 bp, Glycine max
ctagagttttaaaaatggcagcagcctcctccatggctctctcttccccatccttggctggcaaggccgtgaagctgggcccatcagcccccgaagtcgggagggtcagcatgaggaagaccgtcaccaagcaggcctcctccggaagcccatggtacggcccagaccgcgtcaagtacttgggcccattctctggcgagcccccgtcctacctcactggcgagttcccaggtga

SEQ ID NO: 158827 - DNA, 239 bp, Glycine max
tttgtcataaaaatgttgtttttaacaacatagactagtattaataatgtgactgaagttgtgtttctgggtcaactaaggcatccacatctcgtgaagctgattggatattgctgtgaagaagaacacaggcttctggtatatgagtatttaccacgaggcagcttagagaatcaactatttagaagatatacggcatcgttaccatggtcaacaagaatgaaaattgcagctggagc

SEQ ID NO: 158828 - DNA, 238 bp, Glycine max
gctagatggaaaccaacttgctgaggctgacgaatttgaggataagatgaaggagttggagagcatttgtaatcccatcatagcaaagatgtaccagggtgctggtggtgatgcgggtggagccatggatgaggatggtcctgcagctggcagtggaagcggtgctggacccaaaattgaggaagtcgattaagcagaagattctcatgggttgttcttgattttgtcaaagaccctt

SEQ ID NO: 158829 - DNA, 240 bp, Glycine max
gtgcctgccatgtatgttgcaattcaggctgtcttgtctctgtatgccagtggacgtactacaggtattgtgcttgattctggtgatggtgtgagccacacggtgcccatatatgaagggtatgctcttcctcatgcaattcttcggttggaccttgctggccgtgatttaacagagtacttggtgaaaatccttaccgagagaggatactccttcagcacctctgccgaaaaggaaatt

SEQ ID NO: 158830 - DNA, 242 bp, Glycine max
ggcatctttggagcaaaggcaagaagaagggagaagggggtttctgaaactgttgcttggaaatctgggagttggtttgcctgcactattgggaagtggcaaagcttatgctgatgaacaaggggtttcatcctccagaatgtcttactccaggtttctggagtatttggacaaggacagagttaaaaaagtggatctttatgacaatggaaacactgctgttgttgaggctgtttcgcccg

SEQ ID NO: 158831 - DNA, 153 bp, Glycine max
cctgagtggattgattttccaaggggtgatcaacatcttcctactggcgtaatagttccagggaataacaacagttttgataaatgcaggcgtagatttgacttgggtgatgcggactatctaagatatcgagggatgcaagaatttgatcac

SEQ ID NO: 158832 - DNA, 243 bp, Glycine max
ttcagattggtcaagctccttttactccccgcaacaaaacaccacctagttgcagattttttcttcttcaaaaatttgtttatctttatcctaatttgatttggctttaaggttttccattatagcggttttctgaaagaatcccctgggatcagcaacgtctcatcttcgccggaaagcagctcgaggacggccgtaccctcgccgactacaacatccagaaggagtcaacccttcaccttg

SEQ ID NO: 158833 - DNA, 234 bp, Glycine max
cgcaacaaaaagaaagaatcccaggcgaggagaaagatggaggggaaggagcaggatgtgtcgttgggagcgaacaagttccccgagagacagccgattgggacggcggcgcagagccaagacgacggcaaggactaccaggagccggcgccggcgccgctggttgacccgacggagtttacgtcatggtcgttttacagagcagggatagcagagtttgtggccacttttctg

SEQ ID NO: 158834 - DNA, 249 bp, Glycine max
atctcctttaccaccattctagatatcagagaactttgcagctctcttaggtttttaaaaaacaccacgcaaacagcaagatggccacttccgacagtaacatgctactaaattatgttccagtttatgtgatgctcccactcggagttgtcaatgttgacaatgtttttgaagacccagatggccttaaagaacagctcttgcagcttctagctgcgggtgttcgatgggcggattctcaagtgggaa

SEQ ID NO: 158835 - DNA, 236 bp, Glycine max
tattttcttgtcgttgagaagcttcgcgaacgaaagcaaagaaccctagaccgtcacagaaccattccatagccatgtctggtgttggccctctttctcaggattgggaacctgtcgtcctccgcaagaaggctcccaccgccgccgccaagaaggacgagaaagccgtcaacgccgcccgccgctctggcgccgaaatcgaaaccctaaaaaagtataatgctgggacaaacaaa

SEQ ID NO: 158836 - DNA, 238 bp, Glycine max
ggaatcagaggctccccctaacttctggggccacaccccggaagaagaatactacacctcccaaggcgttcgcaacaccaagtcccacttcgaaacccccaacggcaaaatcttcacccagtccttcctccctctcaacctccaaccccaccaagtcaaagccaccgtctttatgacccacggctacggctccgacaccggctggctcttccagaaaatctgcatcaacttcgccacc

SEQ ID NO: 158837 - DNA, 234 bp, Glycine max
gaaaccagatgaacctgtattagattggtacagcagaatgaaaatagcatcaaatgcggcgaaaggactatggtacttgcacgacaaggccaatccttcagtcatataccgggacttgaaatccgccaacatcttgctggataatgataacaatgcaaaactatctgattatggactggccaaacttgctggtaaagataagacgaacatcgtaccaacaagagttatgggaaa

SEQ ID NO: 158838 - DNA, 207 bp, Glycine max
cgtggagatcgaatcctctagccctctcaactcatatttcccacgtagttcgtcggtcaaaccaacgattctcttctcaaagtaatagagagatctttttctggttagacttctatcaatgcaatgaaagaaccatcccttcctatttctttgtcctgtcagaaatagaataagacccaaaagagcccttctttaccactttagggg

SEQ ID NO: 158839 - DNA, 235 bp, Glycine max
ctgcgactctctttccttccctctttttccgaatctgaatcgaaatggcttcggagactgagacgtttgcttttcaggccgagatcaaccagctcctcagtctaatcatcaacaccttctacagcaacaaggagatctttcttcgtgagctcatcagcaatgcctctgatgctttggacaagattcgatttgagagtcttacagacaagagcaagcttgatgctcagccagagtt

SEQ ID NO: 158840 - DNA, 238 bp, Glycine max
tctcgagccgattcggctcgagctcttttgggaattactcgaatgacgcattgcagtatcctagtgatgccctcatgcaaagatactatggatttgtctgctgctgcaacaactgcctcccccgtctttgttgctgctccagcagagaaaggccattttcttatagactttctcatgggaggtgtttcagcagctgtctcaaaaactgctgctgctcccattgaacgtgttaagcttt

SEQ ID NO: 158841 - DNA, 239 bp, Glycine max
ccgttaaggacgagaagacccttctcttcggtgacaagccagtcactatttttggacacagaaaccctgaagagatcccatgggggtcaactggagctgacatcattgttgagtccaccggagttttcaccgataaggacaaggccgccgcacatttgaagggtggtgcaaagaaggttattatttctgcccccagtaaggatgcccccaagttggtggtgggtgtcaacgagcacgag

SEQ ID NO: 158842 - DNA, 241 bp, Glycine max
ccttgcttattgaaggtaaccatgttcgattaagtggtcaggatgttgaaagaggaacttttagtcaccgccatgctgtagttcacgatcagacaacaggagagaaatattgtcccctggacaatgttataatgaaccaagatgaagagatgtttaccgttagcaatagttcactttctgagattggggacctaaaacggattatccaaacccaattgggaatcccggttcacaaccaaac

SEQ ID NO: 158843 - DNA, 227 bp, Glycine max
ggaaggtctcctcctaaaatgattgaaggccctgatggtagaagcttgcagctgaaatttaggtcccggttgtctcttcccctattcacaggaggaaaagtggaaggcgagcagggggctccaatacatgttgttctgattgatgccaatagtggaagcattgtaacatctggacctgaatcctgtgttaaacttgatgttgttgtccttgaaggtgattttaacaa

SEQ ID NO: 158844 - DNA, 179 bp, Glycine max
aggaggaacaaccatgttccctggtattgctgacagaatgagcaaggaaatttctgcattggcacccagcagcatgaagatcaaggttgtagcaccacctgagagaaaatacagtgtctggatcggtggttctatcttggcatctcttagcacctttcagcagatgtggattgcaaagg

SEQ ID NO: 158845 - DNA, 249 bp, Glycine max
tcttgatggattatgatgcattgaaggctgttgggacagggttggggactgcagctgtaattgtgatggataaatctacggatgttgtggatgctattgcaaggctttcctatttctacaagcatgaaagctgtgggcagtgcaccccatgcagagaggggactggttggctttggacgatcatggaaagaatgaaagttgggaatgccaagttagaagaaattggtatgcttcaggagttgactactc

SEQ ID NO: 158846 - DNA, 176 bp, Glycine max
gaaatcttaagacttccttttgcgctgatcaatcaaggtcttctcaggcaaatgatgttcgcaagcaaatcgatggcagcgctgttccagtacatacagaacgttagttatcgccgcggatacgtactcatcatgctggtgggagtatactttgttacaaacttgatccttgctgt

SEQ ID NO: 158847 - DNA, 236 bp, Glycine max
ggcggtatgtcccagtcctaacctcatcaatcacagtggaaaggaggatgcagcaaacaactttgcccgtggccactataccattggaaaggagattgttgagctttgcttggaccgcatcagaaagcttgctgacaaatgttcatcgcctcgtgatcatacaaataacactagtagccgtgataccaatgatgatcattatcagaatcgtgatgatcaacatgacactcatgatc

SEQ ID NO: 158848 - DNA, 230 bp, Glycine max
atggccactcttcttcttcccacgctcctccttctcatacccttcgccaccctcgtctccgcccgccctcacctcgccggagactttctccgactgccctccgaaaccgataacgatgacaacgtccagggcacccgctgggccgtcctcctcgccggttccaatggctactggaattacagacatcaggctgatgtttgtcacgcctatcaaatactaaggaaaggtgg

SEQ ID NO: 158849 - DNA, 229 bp, Glycine max
ttattgctgaccttaaggcagctggtgcttcatggattcaatttgatgagcctacccttgtcttggaccttgaatctcacaagttgcaagctttcactgacgcatatgcagaacttgcacctgctttgtctgatctgaatgttcttgttgagacctactttgctgacatccctgctgaggcgtacaagaccctcacatctctgaatggcgtcactgcatatgggtttga

SEQ ID NO: 158850 - DNA, 262 bp, Glycine max
attttgcatgagattgaggaggaacccagagccaagatggcacttgacacttgcaagcaactcatggatctttctattggggaattaacaaggtcacttgatggaataaatgagtttaacctcataaatgttgacaaaatcctcatgaatttaaaagtttggcttagtggtgcggttacataccaagatacttgcttggatgggtttgagaacaccactagtgatgctggcaaaaagatgaaggatttgttgacgataggca

SEQ ID NO: 158851 - DNA, 253 bp, Glycine max
gatctgcctcctttttatcaaatctatctcttcttcaagaatagttgaaaatggggctgtctttcaccaagttgttcagccgactgtttgccaagaaagagatgcgtatactgatggtgggtctcgatgctgcgggtaagaccaccattctgtacaagctcaagcttggagagattgtcaccaccattcccaccattgggtttaatgtggaaactgtggaatataagaacatcagcttcactgtctgggatgt

SEQ ID NO: 158852 - DNA, 257 bp, Glycine max
gtaaagttgaagatgtggatgaagataaggagaaggaggagaagaaaaagaagaccattaaggaggtatctcatgagtggtcattggtgaacaagcagaagcctatttggatgaggaaacctgaagagatcacaaaagaagaatatgctgctttctacaagagtcttaccaatgattgggaagagcatttggctgttaagcacttttctgttgagggtcagctggagtttaaggctgtcctctttatccccaagagg

SEQ ID NO: 158853 - DNA, 260 bp, Glycine max
ccgacgtctccactttcaacatcttaattagggctttgtgcaaggcccatcagctccggcccgcgattcttatgcttgaggacatgcccaactacgggctcaggcccgacgaaaaaacgttcaccacacttatgcaggggtttatagaagaggctgacgtggaaggcgcgctgaggattaaggaactcatggtggagtctgggtgcgagctcacgagtgtttcggttaatgttttggtgaatgggctttgcaaagagggg

SEQ ID NO: 158854 - DNA, 261 bp, Glycine max
cacaaaacttgctatagcagtaagctataactcatttgaggctctgtgagaattgagaaatggctaaagatgttgaggttcaagagcaaggaggagagtactctgccaaagactaccatgaccctcctccagcacctttgttcgacccagaggagctcacacagtggtccttctatagagccctcatcgctgagttcatagcaacccttctcttcctttatgtcactgtgctcaccattattggctacaaaaggcagactg

SEQ ID NO: 158855 - DNA, 261 bp, Glycine max
aaaccctagtctccatacatcaacttgggaggttaaagagacggcaacgttgtgctgtccgccttgaccgagccagagcttcgtcttggccctcgattttgccctgtaaaactaatcccagtcacaacagaaataatcaatggcaccgaaacagaccaaggctgagaagaagatcgcttacgatgcgaactgtgcgacctaatggaggagtacggccaaatcctcgttgtaaactccgacaacgtgggatcgaaccagctc

SEQ ID NO: 158856 - DNA, 258 bp, Glycine max
ggaaaaggcgtcttcataaacgccgcccaaaacttctcatacccttttattcattccattcgtttctagggttttcttttctttgccgagaaaatgagagagtgcatttcgatccacattggccaggccggtatccaggttggaaacgcctgctgggaactctattgccttgaacacggcattcagcccgatggacagatgccgagtgacaagaccgttggcggaggagacgacgccttcaacacatttttcagcgag

SEQ ID NO: 158857 - DNA, 251 bp, Glycine max
atgattttgcgttgctaataagtgtccttaggatattagtttaagaattaaaaaaaaaaaaaatttattttgtgaatcataagaaaatgaaaaaaaaaatcatgagaaacataattttgtgcctccaaataaagatatttctactttaaattttttaagaaatatacttaaggtattggttagtatttcccttatctatatatgccatcatgccagccatgtgacttgttgacattggtatagtttggtgt

SEQ ID NO: 158858 - DNA, 258 bp, Glycine max
gcacaaccaacacctccacagcctctcctacctcccggagccatggccgccgccgactcctccgccgctccatcgcaccagttgtcgcagagggagacggacatccagatgatgctcgccgccgacgttcacctcggcaccaaaaactgcgactttcagatggaacgctacgtcttcaagcgcagaaccgatggtatttacataattaaccttggcaagacatgggagaagctccagctcgctgctaggattattgtt

SEQ ID NO: 158859 - DNA, 259 bp, Glycine max
cgatgccaaacgtagcgccagagactcccacgtccccattttggcacccttgccaattgggttcgctgtgttcttggttcacttggcaaccatccccatcaccggaactggtatcaaccctgctcgtagtcttggtgctgctatcatcttacaacaaggaccttggttgggatgaacactggatcttctgggtgggaccattcatcggtgcagctcttgcagcactctaccaccaggtcgtaatcagggccattccctt

SEQ ID NO: 158860 - DNA, 263 bp, Glycine max
ggcagactagtatccgatcctctgtcctctcgaagctttcatcgttcaacatattctcaccatctcagtcatgggcctgctatcttgttttaggtctaccgtcctgagaaaatgttccaaaggaagctctggcatgtcaagattcctgtatacgaacaattttcaacgaaacttgatttcgtctggtggcaatgaatcgtattatgggtattttaacaggagatcatacacttcactttatatgggaactggaactgtgggtg

SEQ ID NO: 158861 - DNA, 266 bp, Glycine max
gtgagatacactaagttatcctcataaatacactctaattaggtggcaagataagtgtctaaccttagtaacattgccacatattgtgttcattttggaattgtgccactaaaattctattcaattcatctatggctgcctcttcttatgctatgcaatcaatcctggcaaaccctttgatccgcatttccagcgggtctagggtgaaccaatttggcgttcctgctttgcacatgagaaggaatgttggcctgagagttaggtcc

SEQ ID NO: 158862 - DNA, 266 bp, Glycine max
attgatttcattttcggatactccaccaccttgatccaaaactcgaagatcttgctgatttgccatgggcttcctcaccagaacatagtggtggcagatggcacagggcagaagaacatgcccacaggaatagtcctccataactgcgagatcatgccggaccctaccctcttggcagaccgcttgagcgtgaagacttacttggccaggccatggaaggcattctcaagggcagtgttcatcgagaatgttatcggggacttgat

SEQ ID NO: 158863 - DNA, 251 bp, Glycine max
ctgtgactgcctctgttccgccaagcgcacattttcccaccgttcaggccaccggctgagttaggtttccggcgaggatgggtgctgctctgctgtcggagcttgcgacggagatagtcgtgccagtgtgcgccgtcatcgggatcgtgttctcgctggtgcagtggttcctcgtgtcgcgcgtcaagctcactcccgaccgcaacggaacgacgtcgtcgccgcgcaacaacaaaaacggctacggcgac

SEQ ID NO: 158864 - DNA, 250 bp, Glycine max
cttcttcctccaagagaagtaaacaaccctcacattcaccacagcagcacacacagacaaagacaaccttgtttgtctccaatcaaaacctttcaagctggcgttcgaaaaccaagacaaccctgtccgagaaatcaagcccaagaataggagaatcatgggtgctggaggccctgatgatgaggacaccaacaggtggccaccgtggctgaagcctctgctaaaagacagtttctttgttcaatgcaag

SEQ ID NO: 158865 - DNA, 252 bp, Glycine max
ctctctgaagatggcttcacgcaggctcgtatcttctctgattcgatcctcccttcgtagatctcaatcgaagccctcaatttccgcatcgacatcgaggctcacgtcatccaaccgtgcctcaccgcacggatacttgctgaaccgcgtcgccgagtacgccaccgccgcggctgctgctaccactcctccctctcctcctcctccggggaagaaggagctcggcggcggcgggaagatcaccgatgaatt

SEQ ID NO: 158866 - DNA, 252 bp, Glycine max
gtgagagtgaagcgcgaagcgagaagcgacatggatccagacgcgttggcaaaggcattcgtggagcactactactccaccttcgacaccaaccgcaacaatctcgccaatctctaccaggaaggttccatgctctctttcgagggtcagaagatccagggctcccacaacatcgtcgccaaactcacctcccttcccttccaacagtgccagcactccatcaccaccgtcgattctcagccctcaggcgtc

SEQ ID NO: 158867 - DNA, 253 bp, Glycine max
atttccctacctctcccttcaagatgcagatcttcgtcaagaccctcaccggcaagaccatcacccttgaggtggaaagctctgacaccatcgacaacgtcaaggccaagatccaggacaaggaaggaatccccccggaccagcaacgtctcattttcgccggaaagcaacttgaggacggccgtacccttgctgactacaacattcagaaggagagtactcttcacctcgtcctccgtctccgtggtggcat

SEQ ID NO: 158868 - DNA, 254 bp, Glycine max
gaaactcacagaagaaacactgacagagaagagacagttgcagcaactcctttcaatatgtgcagctgaaaggacaacagaagagacggccatgaatgaaactagctccagatctcaccaaattcttagattgacagttgaaagtaatcctcgtgattatgcagacaccgcaagatccggagctctatttgccagtgtgaattttgttgatctagcaggaagtgagcgtgcttctcaagcaatgtcagcaggca

SEQ ID NO: 158869 - DNA, 254 bp, Glycine max
ggcggagtttcagccttacttcgtcctcggggatttgtgggagttctttcgggaatggagtgcttatggcgcaggagtgccacttgtactgaatgacaaggatagtgttgtgcagtactatgttccctatctttctgggatccaaatttattcccagaatgtgaagccagctgtaaagtcaaggcaacttggggaggatagcgacagtgattttagggactcaagtagtgatggtagcagtgatagcgaacctg

SEQ ID NO: 158870 - DNA, 256 bp, Glycine max
gagagagcgagcagtttcagacacagagagaggggtttgggattggagggattgacgctgcgtctcttcctcttctctttcgatccatccctcattcctaatcctccaatccaaccacctcagcctcacactcacatatacacatatctgaacgcgtatcgtccctcctatggcttcaaagcgcatcctcaaggagctcaaggacttgcagaaagacgcaccaacttcttgcagcgctggtccagtagctgaggac

SEQ ID NO: 158871 - DNA, 257 bp, Glycine max
agccaccaagagcagccactgttagagaactcgttcatagaagaagacgagccgcaagaaacagcttatgattcgtcggagaagatagtggtggtcggagtcgacgagtccgatgacgaggagaattgggggagagtgccccgattctcgtggaagaagctatggctgttcaccgggccgggctttctgatgagcatagcgtttctggaccctggaaacttagagggggaccttcaggcgggtgccattgcagggta

SEQ ID NO: 158872 - DNA, 259 bp, Glycine max
gttcccaaattcattttaatcctaattctgcacttcttgatcattcgatttttctcctcaagatgcagatattcgtaaaaactttgaccggcaagaccatcacccttgaggtggaatcctccgacaccattgacaacgtaaaagctaagattcaagacaaggaagggatcccacctgaccagcagagacttatctttgcgggtaaacaacttgaggatggtcgcacccttgccgattacaacatccaaaaggaatcaac

SEQ ID NO: 158873 - DNA, 250 bp, Glycine max
tgttttgttaaagttcacttagaaatccttcgccctctcataattttatctccaatggcattgggaagcataatgcacttccttcaagataagaccattttagtcactggtgccactggcttcctcgcaaaaatttttgtggaaaaaatattgagagttcaaccacatgtgaagaacctttaccttcttttgagagccagagatactgactctgctactcaacgtttacatactgagatcatagggcagg

SEQ ID NO: 158874 - DNA, 251 bp, Glycine max
ctcacacttgacaaagaggaggcaccatgacaagcactcttctgtctttgctcttcttgctcttctctcttctcactccaactctaatttcctcttcaccagttctaaaccctcaagaggtcgtacaagaggtcaacaagaaaatcaatggctctatagcaagacccagaaggaacttgggctacctctcatgtggtagtggcaaccccatcgatgattgttggacgtgtgaccccaactgggagcagaac

SEQ ID NO: 158875 - DNA, 249 bp, Glycine max
atcgagataactagaaacagtgtgatgaaaatgaaggtccttgttttcttcgttgctacaattttggtagcatggcaatgccatgcgtacgatatgttccctctccgaatgaacactggctatggtgcccgtactccggaggtgaaatgcgcaagttggaggcttgctgtggaagcacacaagctctttggctttgagaccattcctgaagagtgcgttgaagcaacaaaggaatacatccatggcgaa

SEQ ID NO: 158876 - DNA, 253 bp, Glycine max
gggttatcatatctccatttccatttcctctctctcagtttccaagaatcttaagctatgggaaagtcttacccaaccgtgagcgctgattaccagaaggccgttgagaaggcgaagaagaagctcagaggcttcatcgctgagaagagatgcgctcctctaatgctccgtttggcatggcactctgctggaacttacgacgtgagctcgaagaccggtggtcccttcggaaccataaagcacccctccgaac

SEQ ID NO: 158877 - DNA, 251 bp, Glycine max
cgttttctttgaaacgcacagcttcaatcaccgaccacaccacccatcaacgacatgcttcctctttcccttctcaagactgcccaaggccaccctatgttggtggaactgaaaaatggggagacatataacgggcatttggttaattgcgacacatggatgaacatccatctgcgagaagtcatttgtacatctaaagacggagatagattttggaggatgcctgaatgctacatacgaggcaatacaat

SEQ ID NO: 158878 - DNA, 259 bp, Glycine max
gcaaagctccctccaggctcaatggggtggccgtacataggagaaacccttcaactctattcccaagacccaaatgcctacttttccaccaaacataaaaggtatggcgaaatattcaagaccaacatcttgggttgcccctgtgtgatgctgacaagccctgaggctgcacgctttgtgctagtgactcaagctcacttgttcagaccaacatacccgaaaagcaaggagcgtttgattggtccttttgctctgtttt

SEQ ID NO: 158879 - DNA, 261 bp, Glycine max
atggcggcttgtctgcaactgtggcaatgcaaactagcgagaccctttgactcattaccggtgcgaaggtcaattcctttgagtctgaggtgttcggccgcgccctcttcttccaagccgacgcgctcctacagcatcactctcatccccggcgacggcatcggccccgaaatcatctcggtggccaaagacgttcttgtcctcgccggttatctcgaagggattaaatacgacttccgcgagatgcttatgggtggagct

SEQ ID NO: 158880 - DNA, 261 bp, Glycine max
cctcgtccttcgctgcaccatcttcgtcaacctctggtccttcgataacgattgccgtataggattccctcatcgaagatactaaccgcatcctcgccgagatccgatccgacgccgacccctccgatcccgacgaccagcaattcttcaaccctaacgacaccttcaccctcggccccaagatcgataattgggacactgagcgcaagaattggcttcaccaaaaccccgaataccctaatgtcatcggaggtaaacctc

SEQ ID NO: 158881 - DNA, 243 bp, Glycine max
cactgatgctggtggcataatcctactgttccaagatgacaaggttagtggattgcagcttctcaaggatgatcagtggatcgatgtcccaccaatgcgtcactccattgtaatcaaccttggtgaccaacttgaggtcataaccaatggcaagtacaagagtgtcatgcaccgagtgattgcccaagccgatgataccagaatgtccatagcttctttctacaaccctggtgatgatgctgt

SEQ ID NO: 158882 - DNA, 243 bp, Glycine max
gttaagggctgcactataccagaatgtctcagggaagaggcagtgcatctttgcctattgtggtcactgtggtttcactactgtgccttttggaacgtgctaacgcagcaacttactccgttggaggacctgggggatggaccttcaacactaatgcttggcccaatggaaaaagattcagagctggtgatatcctaatcttcaactatgactcaacgacccacaatgtggttgctgtggaca

SEQ ID NO: 158883 - DNA, 249 bp, Glycine max
tgaaactcttccactacctcttctcactactcacactactcttcctcttccaagccaaagaaggagtttccattagccctttgcaattgatcacacacccacttgaccccttaacaaagcaagaaatcaccctcgtccaagccacagtcctaaagaaataccccagaccacccaaccatgtcttcttccactacgtcggcctcgacgatcccgacaagacgcacgtcctaaagtgggcctcctccggca

SEQ ID NO: 158884 - DNA, 250 bp, Glycine max
gcagcgcattatagcacaccacacaaaaaagcaaaacagagagaacaactgttactcacacacgccatgggtaaatgaatggtttttgagcaacagcagttaaaagagaaaagggattcagcgaagatgacatcggttggtgtggcaccaacttcgggtttgagagaagccagtgggcatggagcagcagctgcggatagattgccagaggagatgaacgatatgaaaattagggatgatagagaaatgg

SEQ ID NO: 158885 - DNA, 251 bp, Glycine max
gtatttccctacctctcccttcaagatgcagatcttcgtcaagaccctcaccggcaagaccatcacccttgaggtggaaagctctgacaccatcgacaacgtcaaggccaagatccaggacaaggaaggaatccccccggaccagcaacgtctcattttcgccggaaagcaacttgaggacggccgtacccttgctgactacaacattcagaaggagagtactcttcacctcgtcctccgtctccgtggtg

SEQ ID NO: 158886 - DNA, 254 bp, Glycine max
cacaagaaaaggtggccctttagaaggagcacatgttcacatcgtccacttgtctgattcaagtgcttccttagatctgattaaggaagcaaaaagtcatggtgacagcataagtgttgagacttgtcctcattacttagctttcacgtctgaagagataccaaatggggctactcgttttaagtgttccccacccattcgtgatgcatacaacaaagacaaattatgggaggctgtattagagggacacattg

SEQ ID NO: 158887 - DNA, 257 bp, Glycine max
gaaacaaggagaaagaaagaagatggcaggaaagaaaatcccagatgtgttgctgaattcaggacacaaaatgccagttataggcatgggaacttcagtggagaatcgtccatcaaatgagacccttgcttctatctatgttgaagccattgaggtgggttaccgtcattttgacactgctgcagtgtatggaacagaggaagccataggcctagccgtggccaaagccatagacaaaggccttataaagagtagag

SEQ ID NO: 158888 - DNA, 215 bp, Glycine max
cacacacaaaagaaacaacactccaagaggaccaccaggtcctccacctcttcctttcatcggcaaccttcaccaactccacaactcatccccacatctctgcctatggcaactcgccaaactccacggtcctctcatgtcgtttcgcctcggcgccgtgcaaaccgtcgtggtttcatcggccagaatcgccgaacaaatcttgaaaacccacg

SEQ ID NO: 158889 - DNA, 244 bp, Glycine max
tcgcaagcaaaaagaaagaatcccaggcgaggagaaagatggaggggaaggagcaggatgtgtcgttgggagcgaacaagttccccgagagacagccgattgggacggcggcgcagagccaagacgacggcaaggactaccaggagccggcgccggcgccgctggttgacccgacggagtttacgtcatggtcgttttacagagcagggatagcagagtttgtggccacttttctgtttctcta

SEQ ID NO: 158890 - DNA, 244 bp, Glycine max
ttcctatcttgttctgattatggaacagctgaagccaagtgctgctaactcttcccctctcactcccctcggcttcttggacagagcagccaccgtccacggcgacgtcccttccgttgtttataacaacaccaccttcacgtggtcccagacgcgccgccgatgcctccagctggcctccgccctctcctcccttggtatccgccgcggcagcgtcgtctccgtcgtggcccccaacatcccc

SEQ ID NO: 158891 - DNA, 245 bp, Glycine max
gaagaatgtaagaggggatggaactggtgagcgcaaggaatgggataggatctatgattatgatgtctacaatgacttgggcgatccagataagggtgaaaagtatgcacgccccgttcttggaggttctgccttaccttaccctcgcagaggaagaaccggaagaggaaaaactagaaaagatcccaacagtgagaagcccagtgattttgtttaccttccgagagatgaagcatttggtcact

SEQ ID NO: 158892 - DNA, 246 bp, Glycine max
atcctctgaattcaactcgctcgcacatgggaatttattgaccagcatcaaccagatctgtgactgtgttcgattgggtaccaactattattcaataggctgtcagtaacgtaaaagtaatccctgtgccccagccatggctgcaccgtttttctcaacgccctttcagccttatgtttatcagagtccgcaagatgcaattataccttttcagattttagggggtgaagctcaagtggttcagat

SEQ ID NO: 158893 - DNA, 246 bp, Glycine max
cagtggtgacaatgtgcccccacctgtgaatacgtttgcagagattgatttgggtgaagcacttaatcagaatataagaaggtgcaaatatgtgaagccaacacctgttcagcggcatgccataccgatatctctagctggacgggatttgatggcttgtgcgcagactggttctggaaagacagctgcattctgcttcccgattatcagtggaatcatgaggggccaacctgtgcagaggccacc

SEQ ID NO: 158894 - DNA, 256 bp, Glycine max
attaattgcaagaatggcacttcgttgcttggtgatgtccctttctgttctcttcactcttggtcttgcgagagaaagccatgccagagacgaagatttttggcatgctgtttggccaaacactcccattccaagttcattgcgagatcttctaaagcctggccctgcaagtgttgaaatcgatgatcaccctatgcaaattgaagaaacacagtacccgaaaaccttcttctataacgaagaccttcatccaggc

SEQ ID NO: 158895 - DNA, 254 bp, Glycine max
ctcgagccgattcggctcgaggttgatatctcgtttgccaaaaatgaccccaagattagacccattttgtgggttggttactcccgggcaagctgggggaactgccattgctgatgtaatctttggtacaactaacccaggaggaaggttacccatgacatggtacccacaaggttacttggccaaagtgcccatgacaaacatggacatgcgtccaaacccaacaacagggtacccaggaagaacctatagat

SEQ ID NO: 158896 - DNA, 249 bp, Glycine max
ggattacaccggcgaagatgttactgttgataacttttttgctgctttacttggaaataagtcagcactgactggtggcagtgggaaggttgtggacagtggtcctgatgatcatatatttgtatactatactgaccatggaggtcctggggtgctcgggatgcctgctggtccttacttatacgcggatgatctgattgaagtcttgaagaaaaagcatgcttctggaacatataaaaacctagtatt

SEQ ID NO: 158897 - DNA, 252 bp, Glycine max
ccctaaacaactctttctcttcttccttcgctcgttgttctccctcgcgtagatcgacaatggcggagacagagacgtttgctttccaggctgagatcaaccagctcctcagtctcatcatcaacaccttctactccaacaaggagattttccttcgtgaactcatcagcaacgcctccgatgctttggacaagattcgatttgagagtttgacagataagagcaagctcgatgctcagccagagttgttca

SEQ ID NO: 158898 - DNA, 254 bp, Glycine max
tccaactccactagtgaagtacagaaaagaagaattggaaaatctaagaggagatggaaaaggagagcgcaaggaatatgataggatctatgattatgatgtctataatgatttgggtaacccagacaagagcaatgatctagctcgtcctgttcttggagggtctagtgcctatccatatcctcgcaggggaagaactggtagaaaaccaacaacaaaagactctaagagtgagtcaccatccagcagcacct

SEQ ID NO: 158899 - DNA, 259 bp, Glycine max
tgttgctgcaccaccgaacaacttcccctgtaaatcgcgtttcgtttgtgcaaggttttaaaagatggctgatgctgaggacattcaacctcttgttgttgataatggaactggaatggtcaaggctggttttgcaggtgatgatgctcctagggccgtgttccccagcattattgggagaccacgccatactggtgtaatggttgggatgggtcagaaggatgcttacgtgggtgatgaagcccaatcaaaaaggggt

SEQ ID NO: 158900 - DNA, 251 bp, Glycine max
catcgacctcattgaaaaggctctaggaccaaagagcaagagcacagaaggggtgaaaaattggccgagcaaacacgttggagtgcattctgttggtgattatacagccattgagctaattggcagagaccgcccaggtctcttgtctgagatttcggctgttcttgccaacctccattttaatgtttttgcagcagaagtttggactcataacaggcgaattgcttgcgttctttatgtcaatgatgcaa

SEQ ID NO: 158901 - DNA, 247 bp, Glycine max
atagcattccgcaaaatggctgccaccaccttagtctctgaagtcactctcccctcctcctccggccagcggaagatgccgctgatgggcctcggcaccgcgccggaagcaaccagcgcggttaccacaaaagatgctgttcttgaggccatcaagcagggctacaggcactttgatgctgcttctgcttatggtgtggaacagtctgtgggagaaccatagctgaagcacttaagcaaggactaat

SEQ ID NO: 158902 - DNA, 248 bp, Glycine max
atacaattggacatgtagcggcaacagttagcatgtcaaaagttgcggtatcattcacacacattatcaagagtggtgaacctgcttttagtgttctggtttcaagatttcttttgggtgagagctttcctgtgccagtctatctgtctttaattccaatcattggtggatgtgcacttgctgctgtgactgagctcaatttcaatatgatcggttttatgggggccatgatatcgaatttggcattt

SEQ ID NO: 158903 - DNA, 249 bp, Glycine max
cttctccttctctctctctttttcgcctcattccattttcatctatcaatggctccagtagcagcagcatcttcagattcaatcaagccaagagatgtttgcatcgttggtgttgcacgtacaccaatgggtggatttcttggtactctgtcatctctatctgccaccaagctaggctctatagctattgaagctgctcttaaaagggccaatgttgatccatcccttgtggaagaagtattttttggg

SEQ ID NO: 158904 - DNA, 247 bp, Glycine max
gcctaagtattcctcaatgaccgatagcgtacaagtaccgtgagggaaaggtgaaaagaaccctatttagggagtgcaatagagaacctgagatccgatgcgaacaatcagtcgaaggagcttagagcctttacttgatatttagtaaagcgcactcactctaacggcgtaccttttgcatgatgggtcagcgagaaaatgggaacagcggcttaagccattaggtgtaggcgcctttcagaggtgg

SEQ ID NO: 158905 - DNA, 248 bp, Glycine max
cagaaattaagctagagctacatagtttttttcttttctcaccttccttctctcccttcagacaagggacgaaaaatcagagagagagagagagagagagagagaaattccaaaaccatgtcgtcccacagtcatctaagtttcgcctttggggttctaggtaacatcgcctccttcgtgtgctttctggcaccactaccgacattttatagagtttgtaagaagaaatcaaccgaaggttccaatca

SEQ ID NO: 158906 - DNA, 252 bp, Glycine max
ttttacttcccctatggctcgtcactccttgctcttagccctcctcctcttcgccgccgtggccaccgccgcgatggcgtggcgcgtccgacgccgacgacatcctgatccgtcaggtggtgccagatgttggcgaacgaagaggaggacaacctgctgaacgccgagcaccacttcgcgagcttcaaggcctagttcgccaagacctacgccaccaaggaggagcacgatcatcgcttcggcgtcttcaag

SEQ ID NO: 158907 - DNA, 254 bp, Glycine max
ggtttggttgggggtaaagagaatgaagattcagtgtaacgtgtgtgaggctgcggaggccaaggttctgtgttgtgctgacgaggctgcgctgtgttgggagtgtgatgagaaggttcatgcggctaacaagcttgccagcaagcaccagagagtgcctctttctacctcttcctctcatatgcccaaatgtgacatttgtcaggaagcattaggctattttttctgtctagaagatcgggctctgctctgca

SEQ ID NO: 158908 - DNA, 251 bp, Glycine max
tccgtgccctagcttcttcctcctccgccattgcagcagggcacacaaccttcgtcacaaacccaattcgcgagggatcggattcgccatcatggggaagaagaagaagagagtttcctcgaaggtgtggtgttattactgcgatcgcgaattcgacgacgagaagatcttggtgcagcatcagaaagccaagcacttcaagtgccatgtctgccacaagaagctctccaccgccggcggcatggccatcc

SEQ ID NO: 158909 - DNA, 248 bp, Glycine max
cgaagacagcatgtaacaccactcatggtcgcagagatcaagtggttcaagtcaccaaagctaggagtggtcaactcaactctgatctgaggaaattggccgtgaatctcattcccttccctcgtctgcacttcttcatggttggatttgcgcctctcacctctcgcggctctcagcaataccgcgcattgacagtgccagagctgacacagcaaatgtgggatgccaagaacatgatgtgtgctgca

SEQ ID NO: 158910 - DNA, 246 bp, Glycine max
cacaagttcaaaggccatggatgttgcacattttttgtttggcatctttgggaatgcttccgctctgttcctattcttggctccagtgatcacattcaagaggattattaagaacagatccacagagaagttctcgggcattccatatgtcatgacactgctcaattgtctccttttagcttggtatggtttgccttttgtgtctccccacaacatattagtgtcaacagtgaatggcactggatc

SEQ ID NO: 158911 - DNA, 252 bp, Glycine max
gttatgggggccaccaacccaccttagcaacatttggtgcggaccaatatgatgagaaaaatccaaaagagaagagttcaaaagtggctttcttctgttacttttactttgcgctcaatgtcggttctttgttctccaacactgtactagtctactatgaggatacagggatgtggacaatgggtttcttggtatcattggtctctgctgtcatagccttcttggctttcttattgggaactccaagatata

SEQ ID NO: 158912 - DNA, 244 bp, Glycine max
agtgagttttgtttatttgaaattaacaagtagcaaagatgtttggaatcatcggaggaaacaagggtcacaagataaaggggaacttggtgattatgcgaaagaatgtgttggatatcaacagcattaccagtgttaagggtgtcatcggaaccggcattaacatcattggaggagtcgtcgacaccgttactgctttggcgtcccacatctccatccagctcattagtgccaccaaggctga

SEQ ID NO: 158913 - DNA, 248 bp, Glycine max
attagctagctcgcacattaagttatataacacatatttgcttgcttagaaatactattattgaagatatggggagtgtagattatgagtaccctttgggcatgaacaactttgagagagtgcaccaagtcgaggttccaccgccacagccgtttttcaagtctctaaagtactctttgaaggagactttcttccctgatgaccctttgaggcagttcaagaacaagccagcttccaagaagttcatg

SEQ ID NO: 158914 - DNA, 247 bp, Glycine max
aattaagcaattacgtttaacactctaaaacatctctcgttggctatattatatatcctgaaaagctcactcatggcaagtatttctactgtctcggttcttgatagaaggcttgaagggaaagtggctcttatcagtggtggtgctagcggtataggtgaggccactgcaagactcttctctaagcatggagcacacgttgtgatagctgatattcaagacgatttgggtctctctctttgcaaac

SEQ ID NO: 158915 - DNA, 248 bp, Glycine max
gcagtttcaaagagaggatttgggattgggaaggcgagggattgcgctgcgtctcttcctcttctctttcgattcatccctcattcataatcttccaatccaacaacctcagcctcacactcacacatacacacatctgaacgcgtatcgtccctcccatggcttcaaagcgcatcctcaaggagctcaaggacttgcagaaagacccaccaacttcttgcagcgctggtccagtagctgaggacatg

SEQ ID NO: 158916 - DNA, 249 bp, Glycine max
gggaacctccgtgtcagtattatttaaaaactggaacctgtaaatttggtgcatcctgtaaattccaccatccaaaaaatggaggtggatatttaagccaagctccactaaatgtttacggatacccgttacggccgggtgagaaagaatgctcctactatttgaaaacggggcagtgcaaatttggtatatcttgtaaattccatcatcctcaaccggctggcacatcattgccagcatctgcacctc

SEQ ID NO: 158917 - DNA, 249 bp, Glycine max
atctcaccaaaggacaagacattaagaaaggagtgaattttgcatacgctggttcaactgcacttgataaggattttttagtacaaaaaagaatcaatatagaggaagctactttttcattgagtgctcaatttgattggtttaaaggactcaaatcctccctttgtacaagcaaagaagagtgcgataattacttcaaaaactcattgtttctagtaggagagattggtgggaatgacatcaatgcac

SEQ ID NO: 158918 - DNA, 248 bp, Glycine max
aagcacgccgtgtttcgctatctctcccattctctcgcatctcaatacccttttgatttgtgaaaggaaagcaaacatgcttgatcaggtccaacaccctacaatcatggacaaggttgctggccagctccatctccgttctggtgtttctggtattaggagttatgaaggagcctactgccaccccacaatgtaccaaagaccctcttttgggaattactcgaatgctgcattgcagtatcctgtga

SEQ ID NO: 158919 - DNA, 244 bp, Glycine max
atggcaccaacagccaagactctgacttacctggcccaggagaaaaccctagaatcgagcttcgttcgggacgaggaggagcgtcccaaggttgcctacaacgaattcagcgacgagatcccagtgattctcttgccggaatcgacgaggtggatggacgcagaagagagatttgtgagaagatcgtggaggcttgcgagaattggggtatattccaggttgttgatcacggtgtggatcaaca

SEQ ID NO: 158920 - DNA, 245 bp, Glycine max
gaagtgaatggcataaaaatgcatgttgcagagaaaggagagggtccagtggtgttgttcctccacggcttccctgagctctggtactcatggcgccatcagattctctctctcagctccctcggctaccgcgccgtcgctcccgatctccgtggctacggtgacaccgaagcaccaccttcaatcagcagctacaactgcgtccacatagtgggtgatctcgttgcgcttattgactctctggg

SEQ ID NO: 158921 - DNA, 240 bp, Glycine max
tggagacttacctgggaaaagatgatgatgtttgaagatatggggttttgtggcgatttggatatgttatgtgtttctcttggagagggggatattgctgtgagacaaactgaaccggatcctgtagttgaggatgactacagtgatgaagaaattgatgtggatgaacttgagaagaggatgtggagggacaaaatgcgtcacaagcgattgatagaacaaaccaagtccaaggaaggg

SEQ ID NO: 158922 - DNA, 246 bp, Glycine max
gaaacaaagaagtaaacacactgtttcatactttcgtttcgttcattcggcgtagaagcaaaagagagagatagagagagggaaaaaggttgctaccaacaacaaacaaaaacagtgttgcttgattccgcggtggcgagaaccgacgtgagcggcggaggagaggcgcggaacggtggtcttcagggttttctgacgtctctgttctcgaccctcggcggtgttttcgggtcaacgtttcaagaa

SEQ ID NO: 158923 - DNA, 248 bp, Glycine max
ttcagggctgatgagctaatggagttctacaaatcagatttgaaactcaagaaattcttgcatataattgaggattctcctgttttccctgttatatatgacagtaatagaactgtgttatccttacccccaattattaatggtgcacattcagccatcactctggagacaaagaatgtatttattgaatgtactgcaactgatctgacaaaggcgaagattgttttaaatacaatggtgacagcctt

SEQ ID NO: 158924 - DNA, 250 bp, Glycine max
ataatatcgtgtggcagactccagcgaatcccccgcaccctaacgattacgtctttcgaaacgggattcgatacgttagaccatactacttcgaattcatcgctcatgttaaaaatcggtgggcagggaaaaccattgtggatttgttcgctgaggaattcaaaggtcgaccttatgagtattatgttagtgcagtgaaatgtggaaggattcaagtggatggtgagatggtaccggtttcatacatagt

SEQ ID NO: 158925 - DNA, 252 bp, Glycine max
gtttcgaatagattatcctaagtctttgggaatagtgctgcaatggcttcaagtcaggaggaggtgacccttttgggagctactggaagcccatttgtgtgcagggttcatattgccctcaagttgaagggagttcaatacaaatatgtcgaagaaaatttgaggaacaagagtgaactgcttctcaaatccaacccagttcacaagaaggttccagtgtttattcacaatgagaagcccatagcagagtct

SEQ ID NO: 158926 - DNA, 250 bp, Glycine max
gctctcctatcttttgattaggaaagcggcacataccagggggtagcgactgtttattaaaaacacaggactctgctaagtggtaacacgatgtatagagtctgacacctgcccggtgctggaaggtcggaaggagaagtgttataagctttgaatggaagccccggtaaacggcggcagtaactctaactgtcctaaggtagcgaaattccttgtcgcataagtagcgacctgcacgaatggtgtaacg

SEQ ID NO: 158927 - DNA, 247 bp, Glycine max
  unsure (1)..(247): unsure at all n locations
gaaagagagaaaagaactagctagctggagtctgagaactctagcatgtactagtactactcctacattcctccatcttcctttgtacnnnnnnnnnnnnnnnnnnnnnngcaagagcacaaagatggtgagagctccttgttgtgaaaagatgggtttgaagaagggtccttgggctcccgaggaagatcaaatcctcacatcttacgttgacaaacatggtcatggcaattggcgtgccctccca

SEQ ID NO: 158928 - DNA, 244 bp, Glycine max
cgcttcctcaactgcacaacattcctattcaattccagaggaaagaatcatgagttgtttcagctgttgtgaagaagatgactaccagaaggcttctgaaagtggaggacagcatgtagtaaaaaactcaacaggaaatcatggaaatggtcgtgcatccgaaactgcaaagcagggcactcaagctgtgaaaattcagcccattgaagttcctgaattaccagtggatgaactcaaagaaatt

SEQ ID NO: 158929 - DNA, 247 bp, Glycine max
  unsure (1)..(247): unsure at all n locations
gaaccttcctccatagacgaggttgggttgtggtatggccgccacaaagagtcaaagaagatggtcaacgagcaaagaactcctttgatggttgctgccacctacggtagcattgatgtcatgacgttgatnctntctctatcagangctgatgtgaaccgatcatctggcctgacaaaagcactgcacttcactgtgcagcttcaggtgggtctgaaaacgccgtcgatgctgtgaaatgcttcta

SEQ ID NO: 158930 - DNA, 255 bp, Glycine max
aaaacaaagaaaaaaaaaaacccttagccaacacaaccatcatggccacctctgctattcagcaatcagcattcactggtcaaactgctctgaagcagctcaatgagttcgtccgcaagaccggtggcgccggcaaaggtcgcactaacatgcgccgcaccgtcaagagtgctcctcagagcatttggtatggccctgaccgtcccaagtacttgggtccattctcggagcagattccatcatacctgaccggag

SEQ ID NO: 158931 - DNA, 248 bp, Glycine max
gtttgttgtgagctataagctagtttatcgtgaggagaatatgaagttgtttgttttctttgttgctgcagtagttttggtagcatggccatgccatggcgcaggctaccaaaggttccctctccgaatgaaaactggctatggtgagcgttcttcggaggtaaaatgcgcaagttttaggcttgctgtggaagcacacaacatccgagcctttaaaaccattcctgaagagtgcgttgaaccaacaa

SEQ ID NO: 158932 - DNA, 247 bp, Glycine max
ctctagggtttgatcagactcaagggtttaagccatgggaaaaaggaaggcaaaggcaaagcctcctccaaagaagcgaatggataagctcgataccgtcttcagctgccctttctgcaatcatggcagcagcgtcgaatgccgccttgacatgaagaacttgataggggaagctatttgcgggatatgccaagagagctttagcactaccatcacagctttatcagagccaatagacatatacagt

SEQ ID NO: 158933 - DNA, 244 bp, Glycine max
aagctaaatccgacgccaaagccgccgatagcaggttgaagcggaagggcgctggtgctgggaggaagcaatcgaggaaagctgctaaggaccctaacaagccgaagagacctccaagcgctttcttcgttttcatgtccgagttcagagagcagttcaagaaggagcatcctaacaacaaatccgtcgctgttgtcggcaaagctggtggtgaaaaatggaaatcgctatctgatgctgaaaa

SEQ ID NO: 158934 - DNA, 248 bp, Glycine max
agaaagtgttcaaactggagccaaaagaagaggtggcgctggtggtctaaacaaagtttgtggtgtttctcctgaacttcaggcagttgttggtgagccggcaatgccaagaactgagattgtgaggcagctgtgggcatacataaagaaaaacaacctccaagatcctggtaacaaaagaaagataatttgtgatgatgcactgcgtttggtatttgagacagactgcaccgacatgttcaagatga

SEQ ID NO: 158935 - DNA, 251 bp, Glycine max
attcctaattgtttaaacctaattctcatttcttcatcgttcgattcttctcctcctaaagatgcagatcttcgtgaaaactttgaccggtaagaccatcacccttgaggtggagtcctccgacaccatcgataacgtgaaagctaagattcaagacaaggaagggatcccacctgaccagcagagacttatctttgcgggtaaacagcttgaggatggtcgaacccttgccgactacaacatccaaaagg

SEQ ID NO: 158936 - DNA, 245 bp, Glycine max
gcctcgaaatcggtgacgattacgctttcaattcctggatcccttattgctccgttgcacaccatgtccccaaaaacagaatgcctgaggctttctccctcttgagggaactcaagcttccggtttccggttacgccatggatatcgctctcgttcagttctctccggttcgggaaatcttctcgtttgtgctcggcaacaacagttgagataccagtctcaggagtgcttgccggtgtgctgga

SEQ ID NO: 158937 - DNA, 242 bp, Glycine max
gaaaatcgttgagtttatgatagaactaaaagaagtaaaagaagtaaaagaggtaatagaaaatcaaattgaaagtttggttaactcatcggatgatattaagaacaaggtactgcaattgaaattggaggttcctaaggctggagagacgcctgattcagaatcaaagagtagaattggtgattttatatttagaacatcatctagaattattatggccatacttcttagagacatgtttg

SEQ ID NO: 158938 - DNA, 256 bp, Glycine max
ggcgtcgttgaggtcgccatcgacgatgaagacgtcatggagaatccccactcctacgtccacagcaacatcgcgggcctcgtcacgcttctcgaggcctgcaaatcggcgaaccctcagcccgcggtcgtttgggcctcgtccagctccgtctacgggctcaacgagaaggttccattttccgaatcggaccagaccgaccggcccgctagcctctacgccgcaaccaaaaaagccggtgaggaaatcacacaca

SEQ ID NO: 158939 - DNA, 207 bp, Glycine max
atttcaagggctgaaacatctatctttaactgtattctccctttgtttcctcaccagttgattcaggttgcaaacatggcttttccagacccatccatgtcagtttctccacagaggaagatgggaagggggaagattgagatcaagaggattgagaacactaccaatcgccaagtcacattctgcaagcgcaggaacggcttgctc

SEQ ID NO: 158940 - DNA, 245 bp, Glycine max
caaggatcgagtgaaaccatctccaatgccagacagctggaagctgagcggagatatttgccactggtgttgtgctaggagcttacatggcactaatgacagtagtatttttctggctcatgaaggataccgacttcttctcggacaagttcggtgtgaggtctataaggaacagccccggagaaatgatggcagccctgtacctacaagtcagtattataagtcaagcactaatttttgtgaca

SEQ ID NO: 158941 - DNA, 249 bp, Glycine max
caagaatccacacaaactcagggtagggcagagagagagagagagagagagagagagagagagagtgggagggtgggctatcgctgtgcatggtggcgctggtgtcgaccctaatctcccactcgagcgccaagaagaagcgaaacaacttctcacgcgctgtctcaatctgggaatctctgctgtaaattctaatcttcccgccatagatgtcgtcgaacttgtggagagggaattggacacggatcc

SEQ ID NO: 158942 - DNA, 246 bp, Glycine max
aagaccttggatttttatattaagcttacttggacttacaccacttgctgaacgtgtgagcttcattacagaacaagttgccttttacactggtcccacagttggaggacttctgaatgctacatgtgggaatgttactgagctcataatagcaatatttgcccttagcagtaacaaaattgccgtggtcaagtattctctgttgggttctattctttcaaaccttcttctggttcttgggacctc

SEQ ID NO: 158943 - DNA, 243 bp, Glycine max
agcatctaagtgagatacacagtagttaggtagcaagcataagtgtctaaccttagaaacatatctgctacatatcgtgtgcattttggaattgtgccactaaaattctattcatctatggctgcctcatcttatgctatgcaatcaatccttgcaaaccctatgatccgcatttccagcgggtctagggagaaccattttggtgttcctgcttatcacatgagaaggaatgttggcctgaga

SEQ ID NO: 158944 - DNA, 238 bp, Glycine max
cttatttttttcctctcttcactttcactctctctctctctctcagccatcatcatgggagcagtgattctcccagatctcggcaccgagattttgattccggtctgcgccatcattggaatagggttcgccctcttccagtgggtcctcgtctccaaggttaagctctccgctgccagagacgcttcccctaacgccgccggcaaaaatggctacaacgattacctcatcgaagaag

SEQ ID NO: 158945 - DNA, 256 bp, Glycine max
gttctcttgcagcaacaaggtttagtgacaccaaacagacgggaaatgggtcgtggggtcagtgctggtggtggacagagttccttggattatctctttggcagtggggtacctgccagcagtgcaaatggtgctcgcactcaaaatgcaagtgctccttcaccaccggttgataagcaaagtccagcaccagcaccagcaccagcacctgcacctgcagcagcagcagcaccagcacctgcaccagctccagcac

SEQ ID NO: 158946 - DNA, 253 bp, Glycine max
atttgaattttctactgttgaaatgccatatgagacatataatggggtgaatgtgaggcttaggtatgtattgaaagtgaccattaaccgtggctatgctgggagcatagtagaataccaggattttgtggttcgaaactattctccacctccacaaattaacaatagcatcaagatggaagttggaattgaagattgtttacacatcgaatttgaatacaacaaaagcaagtatcatctcaaagatgtcatc

SEQ ID NO: 158947 - DNA, 246 bp, Glycine max
atcctctctttttctcttcgcactctccctcatggcaaggttgagaggctctatggtctcgcccctgttgctaagtacttggtcaggaacgaagatggtgtctccattgctgctctcaacctcatgaaccaggacaaaatcctcatggaaagctggtactatttgaaagatgcagtccttgaagggggtattccatttaacaaagcatatggaatgacagcctttgaataccatggaacggatcca

SEQ ID NO: 158948 - DNA, 245 bp, Glycine max
ggaaaaaaaaaaaacgaaaatgctgagaatcgccgcaagcgcaaagagaattgttcaaacggcgtcgttggaggcgccaccgttggggattagggttctgccgcgtctctaccacgaaagggtggtggaccactacgacaacccccgcaacgttggatccttcgacaagaacgaccccaccgtcggaacgggtctttttggtgcacccgcgtttggcgacgtcatgaagctccagattaaggttg

SEQ ID NO: 158949 - DNA, 233 bp, Glycine max
ggctcgagtctcacgttttccgcttcagtttcctcgggaaaatcatgctgaaaggtccaggcctctactctgacattggcaagagagctcgcgatcttctgttcaaggattatcagaatgaccacaagttcaccatcaccacttacacttccaccggagtggaaatcacttcaactggagtcaggaaaggtgagatatatttggccgatgtcagcactaaggtgaagaacaag

SEQ ID NO: 158950 - DNA, 241 bp, Glycine max
aggactcaaggtgaagcaccctgtggtttttgtgcccgggattgtcactggggggcttgaactgtgggagggtcacctgtgtgctgaggggttgttcaggaaacgcttatggggtggtaccttcggagaagtttataaaagaccttcatgctgggtggatcacatgtcactggacaatgaaacaggattggatccaccagggataagagttaggcctgtctctggacttgtagctgctgat

SEQ ID NO: 158951 - DNA, 239 bp, Glycine max
ggctactggaattacaggcaccagtctgatgtttgccatgcatatcaactactgaggaaaggtggtgtgaaagaggaaaatattgttgtatttatgtatgatgacattgctttcaatgaagagaacccacggcctggagtcattattaacagtccacacggaaatgatgtttacaagggagttcctaaggattacgttggtgaagatgttactgttgacaacttttttgctgctatact

SEQ ID NO: 158952 - DNA, 254 bp, Glycine max
ggaacaagcaagtgcttctaaaggactatgttaccggttttcccaaagaatccgacatgaatattgtcgaaagtaccataacattgaagcttccacaaggttccaatgatgtcttgctcaaaaatttgtacttgtcttgtgatccgtatatgaggaatctcatgaacaagcccgaaggccctcccaatagtcgtgcttacactcctggctctccattaataggatatggtgtgtctaaagtcctggaatctggg

SEQ ID NO: 158953 - DNA, 247 bp, Glycine max
gaaaaaaggtcgttggagtctactcctgatcccattagaataaaaaggtgttggaatagagggaagaacgtggaaagtggttgacgaagaagacgaagaagaagaatggagaagtcagggaagagagtgttgcttacctccaacggcgacgacatttctcaaggcattgccttccatttggtgaagcaagggtgcaggttggttttgctgggagatcagaattccctgcggacatcgcgaacaaaat

SEQ ID NO: 158954 - DNA, 248 bp, Glycine max
tcccgaatcaatgtaccgagttataaagcactacactactatgaaccagagaatgcctctcatctatgtgaaactgtatacatatcaaatctttaggggattagcatatatccataccgcactgggagtttgccatagggatgtgaagcctcaaaatcttttggttcatcctcttactcaccaagttaagctatgtgattttgggagtgccaaagttctggtcaagggtgaatcaaacatttcataca

SEQ ID NO: 158955 - DNA, 245 bp, Glycine max
cgccggtgaggccaggacattggaggagcatctcgccgaggccgccatgggaaatgccttcctcctccagggcggagactgtgctgagagcttcaaggagttcaatgccaacaacatccgtgacaccttccgcatcatcctccagatgagcgtcgtcatgatgttcggcggccaaatgcctgtcatcaaggtggggagaatggcggggcaatttgcaaagcctcgttcggattcgtttgaggagc

SEQ ID NO: 158956 - DNA, 206 bp, Glycine max
gggaacttctccaaccacctctttgctgttgagtttgacacagcaaaggattttgagtttggggacattgatgacaaccatgttggaattgacatcaatagcttggcctccaatgcctctgcatctgaaggttactacactggggatgatgattcaagcaaacagaatctcaccctcaaaagtagggtacatattctagctggggt

SEQ ID NO: 158957 - DNA, 252 bp, Glycine max
cagagatccttgagaagaatggtgtcaaattcggcgaggccgtgtggttcaaggccggtgcacagatcttctcagagggaggccttgactacttgggcaacccaaacctgatccatgctcagagcatccttgctatctgggctgttcaggttgtgctcatggggtttgttgaaggttacagagttggtggaggaccacttggtgaaggacttgacccaatctaccctggtggtgcttttgaccctcttggtc

SEQ ID NO: 158958 - DNA, 250 bp, Glycine max
cttttgctttaccaaattccattttccaattcaaaaccctaactccgttcgaagcaccaaatcgtgatggcaccaaaggcagagaagaagccagcagagaagaagcctgtggaggagaagaaatcgacggtgggagacaaggctccggcggagaagaagccaaaggccggaaagaagcttccgaaggagggaggcgccggcggagaaggtaagaagaagaagagaaacaagaagagcgtggagacataca

SEQ ID NO: 158959 - DNA, 244 bp, Glycine max
gagaagctgagcttgttatcttctccgccatggattctttgttcaccaaaactggtctcaaacctaaggacatagacattctcattgtgaactgcagccttttttctcccactccttctttgtctgccatggtcatcaacaagtacaagctcaggagtaacatcaagagcttcaacctctccggcatgggctgcagtgctggtttgatatccgttgacttggcacgtgaccttctccaggttca

SEQ ID NO: 158960 - DNA, 246 bp, Glycine max
tgattctgctgtggatgtagggaacaatgactatcttcccacccttttcaaggctgattaccctccttatgggagggactttgttaaccaccaacctactgggaggttttgcaatggcaaattagctactgatttcactgctgacacattgggtttcaagacctatgctccagcatatcttagcccacatgcatcagggaaaaacctccttattggagcaaactttgcttcagctgcatctggtta

SEQ ID NO: 158961 - DNA, 237 bp, Glycine max
gcaattcactctgtacaattcttcgttcgttctctgcagttatatcctttttgagcttcaatggcggacgctgaaaccttcgctttccaggctgagatcaaccagcttctaagtctcatcatcaacacattctacagcaacaaggagattttcttgcgtgaactcatcagcaatgcttctgatgctttggataagattcgattcgagagcttaaccgacaagagcaagctcgatgct

SEQ ID NO: 158962 - DNA, 233 bp, Glycine max
ggtggatcaggaatggacctgaggagcaaagcaaggactctcccaggaccagttagcgacccttcaaagcttcccaagtggaactatgatggttccagcacaggccaagctcctggagaagacagtgaagtgattatatacccacaagccattttcagggatccattcagaaggggcaacaatatcttggttatctgtgatacttacattccagctggagaacccattcccac

SEQ ID NO: 158963 - DNA, 252 bp, Glycine max
aataactcaaaatcagttctcttctgcctgcgctctttcgcttcctgcgaatctttccgagaatcgagtcacagagtagagcgaaatcggcgtagagatacaaaaatgccaaaagtaaagacaaatcgtgttaaatacccagagggctgggaattgattgagcctacactccgtgaacttcaagcaaagatgagggaagctgagaatgatccacatgatggcaaaagaaaatgtgagacattatggccaata

SEQ ID NO: 158964 - DNA, 251 bp, Glycine max
ttcctatggctaacaagcaagtagtacatctttgggagtgcgacttatggagggagaggcgaatttgtccaagcttatgctcacttccccgaccgattgaaagagaatattcttccatggcctccaagcggattctaaaggaactcaaggacctctagaaagaccctccaacctcttgcagttccggtcccgtagcggaacatatgtttcattggcaagcaactaaaatggatcccccttatagcccttat

SEQ ID NO: 158965 - DNA, 246 bp, Glycine max
caaatcagcaacccggtttaaacatcataacagaatacataattggttacatgtatccagagcgtcctgtggctaacatgtgctttaaggtctacggctacatcagcatggttcaagcattaacctttttgcaagacttcaaacttggacactatatgaagattccaccaagaacaatgttcatggcacaggtggtaggaacaatcttatcagtatttatatacacagtaacagcatggtggttga

SEQ ID NO: 158966 - DNA, 242 bp, Glycine max
acacggtgttcggaaagtacgagatggggaggcttctggggaagggcacgtttgccaaagtgtattacgggaagcaaataagcacgggcgagagcgtggcaatcaaagtaatcaacaaagagcaagtgagaaaagaaggaatgatggaacaaatcaaacgcgaaatttccgtgatgcgtttggtgcgacacccaaacgtggtggaaatcaaggaagtgatggccacaaagacaaaaatcttc

SEQ ID NO: 158967 - DNA, 247 bp, Glycine max
ctcggtgaaactcaagtacgtgaaactagggtaccaatacctggtgaaccacattctgactctcactctcatacccatgatgatcgccatcttcatggagattctacgcttaggccctgaagagatcctgaacctctggcactccctccacttggaccttgtccaaatcctctgctccgccttcctcatcatcttcatcgccaccgtctacttcatgtccaaaccccgcaccatctacctcgtcgac

SEQ ID NO: 158968 - DNA, 242 bp, Glycine max
caagaaggtgcgtcccttcctccccccttcttggttccaaaccaaaaccatcagtgcaccttcttcttcttcttcttcttcttccagtgcccgcatcatcaagagaacaacaatggaccccaacgagctgaagcgcgtgttccagatgttcgaccgcaacggcgacggaagaatgacgaagaaggagctgaacgactcgctggagaatcttggcatcttcattcctgacaaggagctcggcc

SEQ ID NO: 158969 - DNA, 238 bp, Glycine max
cccaattcttccccctccacccacccagcatatctctctattcctatttattagcacccctcacattaccttgtgtcaccaactactttgactcctttaccataccattacaataattatcaaacctaaccagtaaaaatggtgaccgtggaggaaatccgcaacgctcagcgttcccatggacccgccaccatcttggccttcggcaccgccacgccgtccaactgcgtctcccaag

SEQ ID NO: 158970 - DNA, 178 bp, Glycine max
gggttatcatttctccatttccattttctctctcacttttcaagaatcgtaagctatgggaaagtcttacccaactgtgagtgctgattaccagaaggccgttgagaaggcgaagaagaagctcagaggcttcatcgctgagaagagatgcgctcctctaatgctccgtttggcatgg

SEQ ID NO: 158971 - DNA, 264 bp, Glycine max
attcctaattgtttaaacctaattctcatttcttcatcgttcgattcttctcctcctaaagatgcagatcttcgtgaaaactttgaccggtaagaccatcacccttgaggtggagtcctccgacaccatcgataacgtgaaagctaagattcaagacaaggaagggatcccacctgaccagcagagacttatctttgcgggtaaacagcttgaggatggtcgaacccttgccgactacaacatccaaaaggaatccactctcca

SEQ ID NO: 158972 - DNA, 252 bp, Glycine max
ctcttcttctcttgcggctagggttttagcgcacttcttctagatttaaggaagatgggtaaggaaaaggttcacatcagtattgtggttattggccatgttgactctgggaagtccactaccactggccacctgatctacaagcttggaggcattgacaagcgtgttattgagagatttgagaaggaagctgctgagatgaacaagaggtctttcaagtatgcctgggtgcttgataagcttaaggctgag

SEQ ID NO: 158973 - DNA, 244 bp, Glycine max
agcaattgctgaaggtctcgctcagcggattgcaaatggtgatgtacctgaaaccatagagggaaaaaaggtcataaccctcgacatgggtctgcttgttgctggaactaaataccgtggtgagtttgaggagaggttgaagaaactgatggaagagatcaaacaaagtgacgagataatacttttcatcgatgaagtgcacactttgattggagcaggagcagcagaaggggcaattgatgct

SEQ ID NO: 158974 - DNA, 247 bp, Glycine max
gattcatcaagatttttcttgactaagattttccatccaaacattgcaaccaatggagagatttgtgtcaacacacttaaaaaggattggaatcctagccttgggttacggcatgttcttattgttgttaggtgtctattgattgaaccattcccagaatcagctctaaatgaacaggctggcaaaatgctgcttgagaattatgaggagtatgctagacatgctaggctttacactggaatccatg

SEQ ID NO: 158975 - DNA, 271 bp, Glycine max
ttcggctcgatcatggcgtccgagtgtaacggtaaaagctcatggcctgagttggttggagtggaaggaacggtggcggtggctacaattgagagggagaatcctttggtggatgctaacactgtgcttaaaggatccatcgtcaccgctgattttcgatgtgatagggttcgggtttgggtcaccaaacatggaattgtttatcaggctccaagaattggataagaagtgtttacactaaagcacttcatatatatgttatgagtcatga

SEQ ID NO: 158976 - DNA, 244 bp, Glycine max
ggaattgttgtaactttttgattcctaaattctctaaaattcgaaattctaatttcgttaggggaaagagattgtttgtgtgtgagtgagtatggctggaaaaggcgagggtcctgctatcggaatcgatttgggaacgacgtactcttgcgtcggcgtgtggcaacacgatcgtgttgaaatcatagccaacgatcaaggtaacagaactaccccatcctacgtggctttcaccgacacagaa

SEQ ID NO: 158977 - DNA, 249 bp, Glycine max
ctagcacacaaaacttgctatagcagtaagctataactcatttgaggctctgtgagaattgagaaatggctaaagatgttgaggttcaagagcaaggaggagagtactctgccaaagactaccatgaccctcctccagcacctttgttcgacccagaggagctcacacagtggtccttctatagagccctcatcgctgagttcatagcaacccttctcttcctttatgtcactgtgctcaccattattg

SEQ ID NO: 158978 - DNA, 247 bp, Glycine max
atcgcgaggtggttgagagacgcgtttttacagttacgggcacaagagctgatgaggagacaattgacagattaattgaaactggagatagtgaacaaattttccagaaggctattcaggaacaaggacgaggccagataatggacaccttggctgaaatacaagagcgacatgaagcagttagagatgttgagagaaaacttcttgatttacaacagatatttctggatattgcggtgttagtcga

SEQ ID NO: 158979 - DNA, 249 bp, Glycine max
ctcaaaaaaggcaaagcttattcccccaagacttagctagcactagcaaacacctctatatctaaaatggtttcaatttctgatcatgaactggttttgatctttggtctcctaggtaacattgtgtcattcatggtgttcttagcacccttgccaaccttctatacaatttacaagaagaaatcatcagaaggatttcaatcaattccatatgcggttgcacttcttagcgcactgttgcttctatat

SEQ ID NO: 158980 - DNA, 252 bp, Glycine max
gaaaaaagtgctatttttttacttcttttcttgagactttctgtgctgtgctgccatgggtgtgacacagttgaaccccacttgctcaaaacctcgtcttcactcatctcagctctcttttctatcaaggactcttcctagacatcgccactgcacttttgcgccacttcatagaactcaacaagctaggatttcctgttctgttgcaccaaatgaagtgcaggtgccaactgtgaaaacccaggatcccaa

SEQ ID NO: 158981 - DNA, 257 bp, Glycine max
ggttcgagaaggaggctgctgagatgaacaagaggtcattcaagtatgcctgggtgcttgacaagctcaaggctgagcgcgaaagaggaattaccattgatattgctttgtggaagtttgaaaccaccaagtactactgcacagtcatcgatgcccccggacatcgtgactttatcaagaacatgattactggtacctcccaggctgattgtgctgtccttatcattgactccaccactggtggttttgaagctggt

SEQ ID NO: 158982 - DNA, 258 bp, Glycine max
caaacacatacattgtagtatcacttttgtctcggaatttgttctttttagttcatactagcttaaaggtatcatgtgtggttttgatgtgcatggctgtgatgagtgcaccaatgatggtgcaagccgtgtcatgcaatgatgtttctgtgaacctagcaccgtgcctatcttacctgatgcagggtggagatgttccagaatcgtgctgtagcggagtgaggaacattctgggttctgccagcaccacctttgaca

SEQ ID NO: 158983 - DNA, 258 bp, Glycine max
ctagcagaaacaattagagggtttaaattgattctttctggagaattagatggtcttcctgaacaagccttttatttggtaggtaatatcgatgaagctactgcgaaagctacgaacttagaaatggagagcaatttgaagaaatgactttaaatctttgtgtactgacccccaatcgaattgtttgggattcggaagtgaaggaaatcattttatctactaatagcggacaaattggagtattaccaaatcatgcgc

SEQ ID NO: 158984 - DNA, 253 bp, Glycine max
gctaattagatttctgagagaaaggaaagggtgtgagaagagaatggagagtaaagaggaagatgttaacgttggagcaaacaagttctcagaaaggcaaccaattggtacagcagctcagggtggtggtgacaaggactacaaggaggcacccccagctcctttgtttgaacctggtgagctcaaatcatggtccttctacagagctggaattgctgagtttgtggcaatttcttgttcctctacattacca

SEQ ID NO: 158985 - DNA, 250 bp, Glycine max
ttttcggatactccaccaccttgatccaaaactcgaagatcttggtgaggaagcccatggcaaatcagcagaacatagtggtggcagatggcacagggcagaagaacatgcccacaggaatagtcctccataactgcgagatcatgccggaccctaccctcttggcagaccgcttgagcgtgaagacttacttggccaggccatggaaggcattctcaagggcagtgttcatcgagaatgttatcgggga

SEQ ID NO: 158986 - DNA, 246 bp, Glycine max
gactatccttatgcttctgatgggctagagatatgggatgccatcaagtcctgggtgcaagaatatgtctcattctactacaagtcagatgaggaactccaaaaagaccctgaactccaagcttggtggaaagaacttgtagaggtgggtcatggtgatttgaaagataagccatggtggcaaaagatgcaaactcgtgaagagttggttgaagcttccgctatcctcatatggattgcttcagcc

SEQ ID NO: 158987 - DNA, 247 bp, Glycine max
gtttgatcctggctcagaaggaacgctagctatatgcttaacacatgcaagtcgaacgttgttttcggggagctgggcagaaggaaaagaggctcctagcgtgaaggttgcttgtctcgcccaggaggtgggaacagttgaaaacaaagtggcgaacgggtgcgtaatgcgtgggaatctgccgaacagttcgggccaaatcctgaagaaagctaaaaagcgctgtttgatgagcctgcgtagtatt

SEQ ID NO: 158988 - DNA, 248 bp, Glycine max
gttggttggacaggttgtggaggtttcaacttccaaaactggcaagcatggacacgcaaagtgtcactttgttgcaattgacatcttcactgggaaaaagcttgaggatattgtcccatcttcccataactgtgatgttccccatgttaatcgcattgactaccagctcattgacatctcagaggatggatttgtaagatttcagttgcacttgtgtcccttattcattccccttttcttttaagcta

SEQ ID NO: 158989 - DNA, 249 bp, Glycine max
cgaaaaatgtcgaagctgatcttcgtgttcctttcgcttattcctcttctctgcacctccttctccccagagagaccctcagatcgacgcgtcctcgttttgctcgatgacttcgccatcaaatcctctcattctctcttcttcaactccctcaaatctcgcggcttcgatctccaattccacctcgcagacgacccccaaattgcgctccagagatacggccagtacctctacgacgccctaattctc

SEQ ID NO: 158990 - DNA, 251 bp, Glycine max
tgatcttcttgaagatctaatatgtttcattgatgaaacttgcgatgagggtgccatccttgtatttctacctggaatgtctgaaataaactatttacatgataagttggtggcatcttcccaatttggtgggccatcttctgaatgggttattcctttgcattcagcagtagcatcaagtgaacagaaaagggtatttttacgtcctccaggaaatatacgtaaggtcgttatagcgacaaatatagcag

SEQ ID NO: 158991 - DNA, 255 bp, Glycine max
ttccttttcatcattctcatatcctcaatcaccccccctcgcactcgctcttcccttcctctggtggcgacaatgtcgactcctgctaggaagaggctgatgagagacttcaagaggctgcaacaagacccgcctgcagggatcagtggtgccccccaggataacaacataatgctgtggaatgctgtcatatttggtcctgatgatactccatgggatggaggcacgttcaagttgacactccaatttactgag

SEQ ID NO: 158992 - DNA, 254 bp, Glycine max
cttgaagttcagcatcctgctgccaaggttttggttttggctgggcaggctcaacaagaggagattggggatggagctaatttaactatttcatttgctggggaactcctgcagggtgctgaggaacttatcaggatgggtttgcatccgagcgagatcatcagtggatacactaaagcgatcaacaagactgttcaaatattggatgaactggttgagaatggttcagagagtatggatgttcgtgataagga

SEQ ID NO: 158993 - DNA, 246 bp, Glycine max
tcacaaccttaaacctttctttcttgtaaactttattgattgattctgagaatagaactaagagggtatagacatggctagcgcaattgcagcttcttttttggttctgcttctggctttccccactgtatttggagctgaccatgaagttggtgacactagtggatgggccctcggagttaattacaacacctgggcctctgggaaaactttcacagttggtgacactttggtgttcaagtatga

SEQ ID NO: 158994 - DNA, 249 bp, Glycine max
cgggatttattcaggtcaacagtgaaatagcaatgggtgcaaccatttccccagtttctggataccgaaactctcagttcgatatcagtatccttatctggaaggatccaaaagagggacactggtggatgcaatttgggaatgactatgtattggggtattggccttctttcctgttctcatatttggctgacagtgcttccatgattgagtggggaggtgaagttgttaactctgagcctgatggtc

SEQ ID NO: 158995 - DNA, 254 bp, Glycine max
attttctattgcagatggcttcgtcggttctctccgcagcttcgcactctgtctcaccctcatgttctctgtccaccacgcacaagggaaagcccatgattagagacaacactttgggattccacagaggacccaattccttctctagttcaaggtctagaggtcggatctctatggctgttgcagttaacgtttctcggtttgaaggcatacctatggcgcctcctgatccaattctaggagtttctgaggca

SEQ ID NO: 158996 - DNA, 282 bp, Glycine max
acgtctcctcggacttctgctcgagccaatatagcccaagccctatacaagcaaaccctaacacacacccatttgattcagtagccatggctagcctcaaggttgcatttttggctgcagtgctctgcatggttgtggtgagtgcacccatggcacatgcagctatcacgtgcgggcaggtgacgaatagcctgatcaattgcatcggttacctccagaacggaggaacgccgccgtcgggatgctgcaacggagtgaagagcctcaatgccgccgccaaga

SEQ ID NO: 158997 - DNA, 244 bp, Glycine max
acacaaactcagggtagggcagagagagagagagagagagagagagagagagagaatgggagggtgggctatcgcggtgcatggtggcgctggtgtcgaccctaatctcacactcgagcgccaagaagaagcgaaacaacttctcacgcgctgtctcaatcttggaatctctgctctaaattctaatcttcccgacatagatgtcgtcgaacttgtggtgagggaattggaaacggatccgctg

SEQ ID NO: 158998 - DNA, 245 bp, Glycine max
gtgccttatcgctgtggttatcatcttcttcttcctctttcttagatctcttctttctctacgccgcacgccgaaaccatggccggaaaaggagagggtcctgctatcggaatcgatctcggaaccacctactcttgcgtcggtgtgtggcaacatgaccgcgttgaaatcatcgccaacgaccaagggaacagaaccacgccgtcttacgtcggattcactgacaccgagcgtctcatcggtga

SEQ ID NO: 158999 - DNA, 243 bp, Glycine max
tgcaaactttgacagggaacggatccccgaacgtgttgtccacgctcgtggagctagcgcaaagggtttctttgaagtcacgcatgacatttctcacctcacatgtgccgatttccttcgagcccctggagttcagacccccctcatcgtccgtttctccactgttatccacgagcgtggcagccccgaaaccctcagggatcccagaggttttgctgtcaaattctacaccagagagggtaa

SEQ ID NO: 159000 - DNA, 247 bp, Glycine max
gacttttcttcaacaagaatgctgcaaaatgcttttagaatgtctctcagaggactcagtatgtccactcctccaagtggtttcttcaatgccatcatgtagacttattaaagaatcattgcagaggagaatttccatgaactttgactattatatcagtgcgagtactgactttgtgttattagatgagacaactttaatcaatatcattaagcatccagatctgacagtaacgtctgaagagaaa

SEQ ID NO: 159001 - DNA, 253 bp, Glycine max
ggagaatgttttgcctgttctacagagttatggtattgctgcaatctctccattttctcacagactgagttttgacaacttgcctatggatattcaacacctacgctgtaaagtcaacttccaagctttaacctttgttcctcatatcagagcacttggagatgcccttatcagccgccttcgctatcctgaaggctcagctggagaaatgggctccaactaccttcaagaggtcactggtgcaggtgctagg

SEQ ID NO: 159002 - DNA, 246 bp, Glycine max
tgcattcaatggggaaaacccaaggcctggagtcatcattaacaaaccagatggaggtgatgtttataaaggagttccaaaggattacaccggcgaagatgttactgttgataacttttttgctgctttacttggaaataagtcagcactgactggtggcagtgggaaggttgtggacagtggtcctgatgatcatatatttgtatactatactgaccatggaggtcctggggtgctcgggatgcc

SEQ ID NO: 159003 - DNA, 244 bp, Glycine max
ttttacttcccctatggctcgtcactccttgctcttagccctcctcctcttcgccgccgtggccaccgccgcgatggcggtggccgcgtccgacgccgacgacatcctgatccgtcaggtggtgccagatgttggcgaagccgaagaggaggacaacctgctgaacgccgagcaccacttcgcgagcttcaaggccaagttcgccaagacctacgccaccaaggaggagcacgatcatcgcttc

SEQ ID NO: 159004 - DNA, 242 bp, Glycine max
ccagtcaccacctctgaactctctctctcatctataagtcaacatggctcatcatgaagattcaagtgcatggaattcgagtaaacctcaccctaagctcaatgaaagaattctgtcttctctgtcacggagaactgttgctgctcacccctggcacgacttagagattgggccaggagctccagcagttttcaactgtgtggttgaaattggcaaaggaagtaaggttaagtatgagctgg

SEQ ID NO: 159005 - DNA, 243 bp, Glycine max
gagaaaaacagatagtgtgggagagagaagagcggaagagaaaatgacgaccaggttcaagaagaacaggaagaagagaggtcacgtcagcgccggacacggccgtatcggaaagcaccgcaagcatcccggaggtcgcggtaacgccggtggcatgcatcaccaccgtatcctcttcgacaagtaccatcctggtttcttcgggaaggtaggcatgcgctacttccacaaacttcgcaacaa

SEQ ID NO: 159006 - DNA, 241 bp, Glycine max
ttccattctctctgtgtatttccctacctctcccttcaagatgcagatcttcgtcaagaccctcaccggcaagaccatcacccttgaggtggaaagctctgacaccatcgacaacgtcaaggccaagatccaggacaaggaaggaatccccccggaccagcaacgtctcattttcgccggaaagcaacttgaggacggccgtacccttgctgactacaacattcagaaggagagtactctt

SEQ ID NO: 159007 - DNA, 247 bp, Glycine max
gctattgcaagactcgtgcttaaaaatgtccagcagggagcagcaacaacatgctatgtagcattgcacccacaagtgaagggaactagtggcaagtatttttcagccagtaatgtggccaaaacaacctcacaggggactgatgctgatttggcaaaaaacctatgggatttcagcatggatttgaccaagtaaaaaacccaattgttatttgtcagcagagatagcatcatgcactcttattaaa

SEQ ID NO: 159008 - DNA, 248 bp, Glycine max
ctgcaattcagcgggctcaagtgctccccactctcatcttcttctctcttctccaaaccttctctttggacccaacaatcccaaaagcgcgtttcaattaccattgcgaactcaatagcaatagccaatgcgcagaacaaagagagagcgaggcttaagaaactcttcgaagaagcctacgagagatgccgcaatgctccaatggaaggtgtttccttcaccatcgaagacttcactgctgctcttga

SEQ ID NO: 159009 - DNA, 256 bp, Glycine max
cttgaaaggaccaatggccacccctattggaaaagggcatcgttcattaaatcttactctgagaaaagagctcaatttgtatgccaatgttcgaccttgctacagtcttccaggctacaaaactcggtatgataatgtcaatctaatcacaattcgtgaaaatacggaaggcgagtacagtggacttgaacatcaggttgtgagaggtgtagtagaaagtctcaaaatcattacacgtcaagcaagtttaagggta

SEQ ID NO: 159010 - DNA, 275 bp, Glycine max
agcagccactatagtaaacaatcttctctatctaaaatggagtttgttctaaactacctaaatgccactgccattggagttctttctctaaccctcttctttttgtttttgtataatcccttcaaatttgcattaggtaaaaaagaggctcccgaagttgcaggtgcatggccaatacttggtcacctaccactattgagtggttcagagacacctgatagggttttgggtgctttggctgataagtatggacccatattcaccatcaacaatgg

SEQ ID NO: 159011 - DNA, 262 bp, Glycine max
acagaaacaaaagtggcagtattaggtggcatcaccgaagtgcagggagctgccaacagcgtcgagatcaacaatctcgctcgctttgctgtagaggaacaaaacaaaagagagaattcagttctggagtttgtgagggtgattagtgcaaagcagcaagtggttgctggagtgaattactacataacattggaagcaaaagatggtgagattaaaaatgagtataaagcgaaggtttgggagagggaatcccaagagttgc

SEQ ID NO: 159012 - DNA, 261 bp, Glycine max
tctctcattccccatttcctcacctccttcaaccgctgctaaattctagggttccgaaatggacgctggcggaaagatcaagaagggcgccggaggtagaaagggcggcggcccaaagaagaagccggtttcaaggtccgtcaaagccggtctccaattccccgtcggaagaattggccgttatttgaagaaaggaaggtacgctcagcgtgtcggtaccggtgctcccgtatacttggctgcagttctcgaatacctagc

SEQ ID NO: 159013 - DNA, 243 bp, Glycine max
ctcaaatccaaatccaattccaattccaattcccaatcttctcaaaccctaattcctcatcttgaaaatgagagaaatcttgcacatccagggagggcaatgcgggaaccagatcggagcgaagttctgggaggtgatatgcgacgagcacggcatcgaccacaccggaaagtacagtggcgactcctgacttccaattggaacgcatcaatgtttattacaacgaagcgagtggcggaaggt

SEQ ID NO: 159014 - DNA, 253 bp, Glycine max
agccaagtgaaagtgagaaaaaataaaaatcaaagagcataatgtcagggatcattcacaagattggggagacccttcatgtgggagggcacaagaaggaggaggagcataagggtgagcaccatgctggagaatacaaaggggagcaccatggtgaacacagtagtgagtacaaaggagagcatcatggtgaacacaaagctggagagtaccatggtgagcacaagccagagcacaaagaggggttcctaga

SEQ ID NO: 159015 - DNA, 253 bp, Glycine max
gtaaacgtgcatgcaggccacaagggtaagccagtgcatgtatcagttggctcaaagtctccatttgattacgtctacgccgccacggaaactcaattacacgatgaccccaacgtggcactcttcttcttggaaaaggacttgcattctggaacaaagttggacttgcacttcaccaggagtacatctaatcaagccacgttcttgtcacgccaagttgcggattcgatacccttttcatccaacaaggtgg

SEQ ID NO: 159016 - DNA, 270 bp, Glycine max
cccgatgatagctcagcactgaagccacccaatgtatatggaagcattgagttgaaaaatattgatttttgttatccttctcgaccagaagtgttggtgttaagcaattttagtctcaaagtcaatggaggacaaacaattgctgtagtgggagtttcgggatcagggaagagcacaataatatctttgattgagagattctatgatccagttgctggccaagttttgctagatgggagggatttgaaacaatataatttaagatggttg

SEQ ID NO: 159017 - DNA, 259 bp, Glycine max
cggcgaacgaaacgctgtcgttgcgccaatcgcggcgttgttgttggtggtgctactcgcggcgagtgtggtggtggaggctcaggagaactcggacgtgaagacgctggtgaagcacatgcacgggaagaagtactgcgacaaaggatgggaatgtaagggctggtcaatttactgttgtaacctcactattactgattatttccagacctaccagttcgagaatctcttctccaagcggaactcgccggtggcgcac

SEQ ID NO: 159018 - DNA, 249 bp, Glycine max
tagagctatagttatattgatattgctatttgttaagctcttatttcctcggccatggctaataatgaacgtgatctcttctcggcggagattgtgaatcgtggaattgaaccgtcgggacccaacgctggctcgttgacattctctgtgagggtgaggaggcgcttaccggattttctgcaatcggtgaaccttaagtacgtgaaattgggttaccattatctcataaaccatggcatatacttgttc

SEQ ID NO: 159019 - DNA, 252 bp, Glycine max
cgttcactctccaaaaaggagagtgagcctttgaagatataacacagaaaaaaagaaccagctaatagggaactgcatcgacactatagcagaagatgacatatatacacaagatgggaccattaccatctccaaaaaacctgccaacaagaaaaagactggaaattggaaagcttgctatttaatcctggaaatgaatgttctgagagattggcatactatggtatgagtacaaacctggtgaactatctt

SEQ ID NO: 159020 - DNA, 251 bp, Glycine max
ccaacctctaacctacctcattggctactctctcaacaacttcaccttcttcctcctcgatcatgtctcacttcaagggcaagtaccatgatgagcttatcgccaatgctgcgtacattggcactcctggaaagggtattcttgctgctgatgagtcaccagggacaattggcaagcgtttggccagcatcagtgtagagaacattgaatccaacaggcgagctcttagggagctgctattcactgctcct

SEQ ID NO: 159021 - DNA, 250 bp, Glycine max
cccaatcgtagccgtcgcactttgcgttttctacgtcatctccgattccccgacaatggccatccaaatgagcaagaagagaaagttcgtagctgatggagtgttcttcgctgaactgaacgaagttctgacacgggagttagccgacgacggatactccggcgtggaagttagggttacgccgatgcgcaccgaaatcatcatcagagcgagcaggcccctatccagtctccaaccccattgacgcgtg

SEQ ID NO: 159022 - DNA, 253 bp, Glycine max
ccataatagcagcaacaatggtgaagcactacagacccccggggcagaaaaaggagggaaatgctgccaaatttgtcattaggtcacaagcaatcaagcagcttcaaatcagtctaccccttttcaggaaactatgtattttgaaaggtgtcactccaagggagcctaagatacagttcaagggaactcatcagacttattaccatgtcaaggatgtttccttccttcatcacgagtctttggttgaaataca

SEQ ID NO: 159023 - DNA, 265 bp, Glycine max
cgagataactagaaacagtgtgatgaaaatgaaggtccttgttttcttcgttgctacaattttggtagcatggcaatgccatgcgtacgatatgttccctctccgaatgaacactggctatggtgcccgtactccggaggtgaaatgcgcaagttggaggcttgctgtggaagcagacaacatctttggctttgagaccattcctgaagagtgcgttgaagcaacaaaggaatacatccatggcgaacaatatagatcagactcc

SEQ ID NO: 159024 - DNA, 258 bp, Glycine max
gagcgagcggactcggcatgactcggcattggcgctttaccatttgtctttggtccagagtaaccgatccaagatggttaaactcggttcggttccggttctattgaatatggttaagtcgggtcacatgacgggtcgggttttgttgattttggggaacttgggttccgggtcggacgggagggccacgatgcttgatgcgggcatggtggagtgtttggtggggttgctcagtggggccgagtcaaggagcgggtc

SEQ ID NO: 159025 - DNA, 257 bp, Glycine max
agggatttccatggaagtctcaaaagaagaagctcgagtggcacccgcaccggccctagtggcgttgctgccatcccctggcatgggccacctaatcccaatgatcgagttcgcaaagcgagtggtgtgctaccataacctggcggtgagtttcgtgatccccactgacggcccaccttcaaaagcccaaaaggcagttctggaggcccttccggactcaatttcccacaccttcctccctccggtcaactctccga

SEQ ID NO: 159026 - DNA, 251 bp, Glycine max
caggactggtagaaaatggtgtaacaaaagttccacttatgttctattgtgaaaactctaatctcaatgatggcataaccagtgcatcaaattcaaagatcagcatccccataattgacctcacagtcatccatgatgatcctattttgagagatcatgttgtgggaaaagttagatatgcatgtgagaagtggggcttctttcaggttataaatcatggaattccaactcatgttttggatgagatgatc

SEQ ID NO: 159027 - DNA, 250 bp, Glycine max
cgctctttcagctttgactttggtggaaactaaagactagtcaaaatggtgaagttcacagctgaagagctgcgtcgcattatggactataagcataatatccgtaatatgtctgtcattgctcatgttgatcacggaaaatcaaccctgactgattctcttgtggctgctgctggtattattgctcaagaagttgcaggtgatgtccgtatgactgatacccgtgcagatgaagctgagcgtggtatta

SEQ ID NO: 159028 - DNA, 251 bp, Glycine max
aaatgaacgacgcagatgtctcaaagcaaatccagcagatggtgcagttcatccgccaggaagctgaggaaaaggccaacgagatctctgtctccgccgaagaggaattcaatatcgagaagctgcagttggtcgaagccgacaagaagaagatcaggcaagaatacgaacgcaaagagcgccaagttgaaattcgcaagaagattgagtactcgatgcagctaaatgcttctcggattaaagttcttcaa

SEQ ID NO: 159029 - DNA, 267 bp, Glycine max
tctaaatgcagaattacctgcatgccttcctgtgcttgttgatcggatgggaaatgagataacccgacttactgctgtcaaggcattcgctgtcattgctgcttctccacttcgggtggatctatcatgtgttctagagcatgtggtagcagagttgactgcatttcttagaaaagctaatcgtgctctaaggcaggctaccttgggaaccttaaattcacttatagttgcttatggcgataagattatgttgtctgcttatgaagt

SEQ ID NO: 159030 - DNA, 266 bp, Glycine max
tgctcgagccgaatcggctcgagctcattaattgcaagaatggcaccccgttgcttggtgatgtccctttctgttctcttcactcttggtcttgcgagagaaagccatgccagagacgaagatttttggcatgctgtttggccaaacactcccattccaagttcattgcgagatcttctaaagtctggccctgcaagtgttgaaatcgatgatcaccctatgcaaattgacgacacagtacccgagaaccttcttctataaagaag

SEQ ID NO: 159031 - DNA, 261 bp, Glycine max
ctcttctttctcttcttcctcctcttcttagcctccgccgccgccagcgtccccgcccacaacatcacccgcatgcttgccaaacaccccggcttctccaccttcaaccactatctctccctcacccacctcgccgaagagatcaaccgccgccagaccatcaccgtcctggccctcgacaatgccgccatgtcctccctcctcgacaagcacctctccctccccaccatcaaaaacgtcctctccctccacgtcctcgtc

SEQ ID NO: 159032 - DNA, 258 bp, Glycine max
gcagacttaacaacagcacaaagcgggttactgtctgttcaagctaccatctctctctctctttcttagtgcctccttgccagaagttaaaatggcccaagaaactttcctattcacatctgaatcagtgaacgaggggcaccctgacaagctctgtgaccagatctccgatgctgtgctcgatgcatgcttggagcaggaccctgacagcaaggttgcttgtgaaacctgcaccaagaccaacatggtgatggtttt

SEQ ID NO: 159033 - DNA, 252 bp, Glycine max
tttcgttcgtcaccatgacttttaagcgcaggaatggaggtcgcaacaaacacggccgtggccacgtcaagttcattcgatgctccaactgcggcaaatgctgtcctaaggacaaggctatcaagaggtttctggtgaggaccattttgaaccgggttgcattcaaaaatgttcaggaggctttgtctatgaacaatacacgcttccgaagctttatgtgaagatgcatattgtgttcctgtgctatccact

SEQ ID NO: 159034 - DNA, 243 bp, Glycine max
attcaacaagaccccgaactccaagcttggtggaaagaacttgtccaagtgggtcatggtgagttgaaagataagccatggtggcaaaagatgcaaacttgtgaagagttgattgaagcctcggccaccctcatatggatcgcttcagcccttcatgcagctgttaactttggacagtatccatatggaggtttaatcttgaacaggccaaccattagcaggaatgctgcctgagaaagggtc

SEQ ID NO: 159035 - DNA, 255 bp, Glycine max
caaagataaagcattccatagcctcccataaaaatgaagaatactatcttctctgctctctttctactttgtgccttcaccacctcatacctaccttcaaccaccgcggtggtcgataccgacggtgatattcttcagaatcctggcacatactttatcttgtccgtttttcgacccggcggcggagtagaattcgccgccactggaaacgaaacttgccctctcactgtcgtgcagactctcttcgggaggggc

SEQ ID NO: 159036 - DNA, 252 bp, Glycine max
ctctgtctctctctctctctctcgatcaatcatggctttgcccaatcagcaaaccgtcgattaccctagtttcaaactcgtcatcgtcggtgacggtggtacaggaaagacaacgttcgtgaaaaggcatcttaccggtgaatttgagaagaaatacgaaccgaccattggagtggaggttcacccattggatttcttcacaaactgtggaaagattcgcttctactgttgggatactgccggacaagagaa

SEQ ID NO: 159037 - DNA, 247 bp, Glycine max
gccactttcgccattgtcattccatgccttgaggctggcattgctgagtttgacgattttctcaaagcccaagctgatgaagcccataaaattgctcttgattcctatgtcccagagccccacgatgtcgcccatgaactcaatttccatgttcatatggcactggaaaactccacaaggagggaactaaggcagaggaaacttagaggaggaggcaaatgtcaagcctccaaccccattgacgctt

SEQ ID NO: 159038 - DNA, 247 bp, Glycine max
agaaaaagagaaaagaaaaaaatgtctctagtgactgcagagatcaaagccaaagcagaggtgtatcatggagatgaactctgccaagagaagtcaaagttgctgctaaaggaggtagggctacctaatgggcttttgccattgaaggacattgaggaatgtgggtatgagagggatagtgggtttgtgtggctgaagcagaagaagagcacaaaccacaagtttgagaagattgggaagctggttt

SEQ ID NO: 159039 - DNA, 252 bp, Glycine max
cccacttttaccactaatgtcactggcattagcttcttctgtatccctcccatttgggcaataactttctcttttcagttttctacttctcccaacactcgcggaactagaaagcctctacttccaattccacgtggcaaaaaggagagactctgattctgagccgcttctagaaccttccattgtccaagaagtttcattccacgacgacaacgaagaagaagaattccttgacgaatttgaatacgatga

SEQ ID NO: 159040 - DNA, 254 bp, Glycine max
ctcgagccgattcggctcgagaatcgttggacttgtcgaacaacacttttcacctggggaggcttcccaagtgggtggcttacgtcgccgataatattctctctgaagcttgtgaattgcggaataaagatgaggctagaggattttaagccttcggagacttatttctatgattttattgatctttcggggaatgaaatttcagggagtgcaattgggttggtgaatagtactgagtatttggtggggttttg

SEQ ID NO: 159041 - DNA, 267 bp, Glycine max
cgaagaggagagagaaacgaagaagaagagtgtttctcacatcacatggcctccttgcccttggggcaccaccaccaccaccacaaaccggcggcggcggctatacatccgtcgcaaccgccgcagtctcagccgcaacccgaagttcctcgccggagctccgatgtggagaccgataaggatatgtcagctactgtcattgaggggaatgatgctgtcactggccacataatctccaccacaattggaggcaaaaatggggaacta

SEQ ID NO: 159042 - DNA, 263 bp, Glycine max
ctcaggtcctggaattgttgatggattaaaattgaagggtttacctcgtggtaggggtctattactgcttgctgaaatgagctcagctggtaaccttgccaagggagattatacaacttctgcagtaaaaattgctgaggatcattctgactttgtaattggcttcatctcagtcaatcctgcatcatggccaggggcaccaataaatccttctttcattcaggcaacccctggagttcaaatggtaactggtggcgatgctt

SEQ ID NO: 159043 - DNA, 254 bp, Glycine max
gaagaaaatgaaagtccttgttttctttgttgctatagttctagcagcatggcattgccatggctcagaccatgaccatgaccatggccacacctaccaaattttccctctgagaatgaaaactggccatggtggccactacattccggaggtatcatgccaaagttggaggcttggtgtggaagcacacaacgtcattgactggaaaaccgttcctcagatttgcaagggatatattgggaactgacatgctt

SEQ ID NO: 159044 - DNA, 253 bp, Glycine max
gtttcactgcataaatttgagagaaaactctgcaaacatgttggtttatcaggacctccttacaggtgatgagcttctctcggactccttccgttacaatgaaattgagaatggaatgctgtgggaagttgaggggaagtgggttgttaagggagcagttgatgttgacattggtgcaaacccttctgctgagggtggagaagatgagggagtcgatgacgcagctgttaaggttgttgacattgttgataca

SEQ ID NO: 159045 - DNA, 250 bp, Glycine max
ctcgagccgattgataaacataacctacacgatgctattcgtggacaggttgtccaactaatgaggctagattgcaagcgcgctgttcctttgttaatccagaatagggacttaataagtccacctgaagttgtgaatcaacttctaaatgcagatgataagagtgattgtagatattttttacatttatatctccactcattatttgaagtaaatcctcatgctgggaaagacttccatgatatgcagg

SEQ ID NO: 159046 - DNA, 247 bp, Glycine max
caacaagaagaaggttatttattgcacaagtttgaactggagtgcggatggaagcactttgtttagtggctataccgatggtgtggtcagagtttgggctattggacgttattaggttaagctttttagtgttttcagatgcgaatctgtttttgagttttgggacaaagttagttactgctttactgtagaattgatttttatgttgaagaccgtggcactgaggccttttatttatttttaaaac

SEQ ID NO: 159047 - DNA, 246 bp, Glycine max
cgtgttcaacacgttccgcgcgttggagggttcttatttggatcacattaaagaagagttgggtcataagagtgtgttttcggtcgggccgttgggattcggtcgggctgagtccgacccaaatagaggatccgaggttttgcgttggcttgacgaggtggaggaagaagcgtcggtgttgtacgtttgctttgggagtcagaagttgatgagaaaggaacaaatggaagcattggcggtgggatt

SEQ ID NO: 159048 - DNA, 251 bp, Glycine max
gtggtgccttatcgctgtggttatcatcttcttcttcctctttcttagatctcttctttctctacgccgcacgccgaaaccatggccggaaaaggagagggtcctgctatcggaatcgatctcggaaccacctactcttgcgtcggtgtgtggcaacatgaccgcgttgaaatcatcgccaacgaccaagggaacagaaccacgccgtcttacgtcggattcactgacaccgagcgtctcatcggtgatgc

SEQ ID NO: 159049 - DNA, 247 bp, Glycine max
ggaaatgtttccaggtggtacaagcacattgatgctttgttgagaatctctggtgtttctggcgagggatctggtgttattgttgagggatccctggttgcggacctgttgcaactcccccagctgctgacactaaggctgctgttgctgaggatgacgatgatgatgatgttgatttgtttggtgaagagactgaggaagagaagaaggcagctgaggaacgggcagctgcagtgaaggcatctgc

SEQ ID NO: 159050 - DNA, 257 bp, Glycine max
attcattatatttttgtgtaaatagaggaaaaactcgatggaaaaatggtggtttaattctatgttgtttaataggaagttagaatacaggtgtgaattaagtaaatcaatggatagtcttggtcctattgaaaataccagtctaagggaagaccctaaaattttaaccgatatagaaaaaaaaattcacagggatttggattatttagaaatggaaggttttttttctagcgatctgaatactgtttctaagaatg

SEQ ID NO: 159051 - DNA, 255 bp, Glycine max
ttctttatttataacatggagtactctgtggaaactttggaaagagatcttaagaacacgaggaaatactacgggagtggaaaaacaaaggaagcaccatggagagaatcacagcttaaagggttgcacaattttctcgtggaaaaagaggaagaattgtgacgggcctcacagcatgatttggggaagcattacgtggaggcttttagagacgagcttggaacattaaatgtaagcccttaaacttggcaacca

SEQ ID NO: 159052 - DNA, 229 bp, Glycine max
ctcttttggggtatggaattcaacaagttcagaatcagaagctatgaggggcaatctgatagggctcaagtggaagatcttgagagaagatgcgaggtagggccatcagaaagcgtgtttctcttcacagacactatgggtgaccccatttgtaggatccggaacagtcccatgtacatgatgctggtaagtgattcacacacaattactatatgccactataagggcc

SEQ ID NO: 159053 - DNA, 248 bp, Glycine max
gcatgacatttctcacctcacatgtgccgatttcctccgagcccctggagttcagacccctctcatcgtccgtttctccactgttatccacgaacgtggcagccctgaaaccctcagggatcccagaggtttcgctgtgaaattctacactagagagggtaacttcgaccttgtgggaaacaacttccctgtcttcttcgtccgcgatggcctcaagtttcctgacatggtccatgctctcaaaccca

SEQ ID NO: 159054 - DNA, 246 bp, Glycine max
gataagatagagtcatcatcttctaaaatgtattttcattattatggacaacttctgcatcagcaaaatatgttgcaggactatgtgcggacagggacctatcatgctgctgttcttgagaaccgtactgatttcattggtcgtgttgtagttgatgtgggtgctggtagtggtattttgtcattatttgctgctcaggctggtgcaaaacatgtttatgctgtggaagcatctgaaatggcagaa

SEQ ID NO: 159055 - DNA, 244 bp, Glycine max
gtcttgagaaaaggtttggtcagtccgctgtctttgttgcctctacgcttatggagaatggtggtgttcctcaatctgctactccagaaactcttcttaaggaggctattcatgttatcagctgtggttacgaggataaaactgattggggaagtgagataggatggatttatggttctgtcacagaagatattcttaccggatttaagatgcatgcccggggttggcggtctatatactgcat

SEQ ID NO: 159056 - DNA, 249 bp, Glycine max
gcaaagcgcaagttgactcattatccaaggaattgcgaagtcgtgcaactatcccagattatgcttataaggcaattgatgcattgcctgtttctgctcatccaatgactcaattcacaactggtgtcatggcccttcaggtgcagagtgagtttcagaaggcatatgagggtgggatagctaaggcaaggtattgggagccaacttatgaggatacaatgaatctaattgctcgtttgccagccattg

SEQ ID NO: 159057 - DNA, 248 bp, Glycine max
ctactttcagctcctaagagcacgcatcactgttgcacttcttactcgttctccctcttttttttcttcttcttcttcttcgctaaaccccccctttatttttcctatctcactaacatcgatgggagacgagaataagaccaagtcccctgcttccggcgtgtggtccaccatcaagcctttcgtcaatggcggagctccggcatgctcgccacctgcgtcattcaacccatcgatatgatcaaggt

SEQ ID NO: 159058 - DNA, 252 bp, Glycine max
gcttggaggcattgacaagcgtgttattgagagatttgagaaggaagctgctgagatgaacaagaggtctttcaagtatgcctgggtgcttgataagcttaaggctgagcgtgaaagaggaatcacaattgatattgccttgtggaagtttgaaaccaccaagtactattgcacagtcattgatgcccctggacacagggatttcatcaagaacatgatcactgggacatcccaagctgactgtgctgttct

SEQ ID NO: 159059 - DNA, 280 bp, Glycine max
tttcaaggctctctctattgtttaggttccaaagtcaatatacaatttctgatctctgcatctcaatccaatagatcaaatatgccttcaaacgatggtatagttatcgtggtcatgggtgtcagcggtgctggaaaaaccacaataggtcagatgctggaaaaagagttgaaatacaagtatcttgatgctgatgattttcacttagaatcaaacaaagaaaagatgcgaatgggaatccccctaaccgatgaagaccggatgccatggcttgaatcgc

SEQ ID NO: 159060 - DNA, 273 bp, Glycine max
gatcgagataactagaaacagtgtgatgaaaatgaaggtccttgttttcttcgttgctacaattttggtagcatggcaatgccatgcgtacgatatgttccctctccgaatgaacactggctatggtgcccgtactccggaggtgaaatgcgcaagttggaggcttgctgtggaaacacacaacatctttggctttgagaccattcctgaagagtgcgttgaagcaacaaaggaatacatccatggcgaacaatatagatcagactccaaaac

SEQ ID NO: 159061 - DNA, 272 bp, Glycine max
gaaagaatgaaggcattgcaggaattagttcccagcatcaataagacggacagagcggcgatgcttgatgaaattgttgactatgtgaagttcctaaggctccaggttaaggtcctgagcatgagtagactgggaggagctggtgcagttgctcagcttgttgctgatgttcccctttctgcagtggagggggatcaggacatagaaggtgtatccaatgagcaagcctgggacaagtggtccaatgatggcacagaacaacaggtggctaa

SEQ ID NO: 159062 - DNA, 271 bp, Glycine max
tgaacttgaactatcgtgtcttcttggctttctctgttcaggatcaacatggatattgtatcacgagctttgctatttccgttggctatacttgtgctcatattaagcacaccttgctcaggtgcttttgggaagagtggaactaatgtgaaaacagctatttttctgtcccccaagtttgaacttggaccaggatcggtagccaataaatatgattatgacgctgattttccaagaggtcatatagcacttaagagtttcaatgctgaag

SEQ ID NO: 159063 - DNA, 263 bp, Glycine max
tggagggtgtgaattgtgaatttgtgattgtgggaaaaagatgccgcagaggcactcgaagaacaacaacgatcttgcgttcttcacgtacgatgagaagcgaaaactaggttatgggacccagaaggagaggttgggcaaggactccattaagcccttcgatgcttgctctctctgcctcaaatccctaattgatcctatgagctgccagaaaggccatctcttttgcaaagagtgcattcttcagtgcctcttgtctcaga

SEQ ID NO: 159064 - DNA, 262 bp, Glycine max
gttcagtgctgtatgatgttgatgaaccaactgttcgaagtcttaatggctgccgtgtggcagatcaaattcttaaacttgttccaaatgttgagcacttccgaactgcattgagatgtttaaagttttgggctaaaaggcgtggtgtttattcaaatgttactggattccttggtggtgtaaattgggctattttagttgctcgaatttgccagctctaccctaatgcaatccccagtatgttggtttctcgattcttcag

SEQ ID NO: 159065 - DNA, 271 bp, Glycine max
cttcagcagcaaagggaaaagcaaacagagtgtctaatcgaagatagaagaagagatggctaaatctccagaaactgaacttcccgtcgaagctttcggttgggctgcttcagacacttctggcacccttgcaccttttcatttctccagaagagaaaatggcgttgatgacgtcactctcaagattctcttctgcggggtttgccactcggatctccacactctcaaaaacgactggggtttcaccacttaccctgtcgttcctgggcat

SEQ ID NO: 159066 - DNA, 270 bp, Glycine max
tgagaagccactttggtttctttgcctttctcaatacattttattttccaatggaggtaggaagtgttcttaactttctgcaggacaagaccattttaattgttggagccactggctttctcgccaaaatttttctggagaagatattgagggttcaaccaaatgttaagaagctttttcttcttttaagagcttcggatgccaaatcagctaattatcgcttgcaaaatgagatcatagcgaaggacttatttattgtgctaaaggaga

SEQ ID NO: 159067 - DNA, 267 bp, Glycine max
gttgctttgcaagttgcgagtctctcttcctacgacaaccgtttcctctcgccggaaaaccgacattgatctctctctccgccgatccgtccgccatgagttccggcgagctcctccacatacaaccccaggagctgcagtttccctttgaattgaggaagcagatctcatgctctttgcagttgtctaacaagactgacaactatgtggatttcaaggttaagacaacaaatcctaagaaatattgtgttagacctaacactggag

SEQ ID NO: 159068 - DNA, 267 bp, Glycine max
cagcgatcgaagtttcacatcagccttatccagtttagggtttcggttccttaccctacctgttgacgtatcgaaaccttaaatttgggattaggtctgagcaatctggttggtagaacctttggtcttagagagtcaagttttatgtctggattagacgatcaaattcctactgccttcgatccttttgctgatgcaaatgctgatgactcgggtgctgggtcaaaggagtatgtgcatattcgcgttcagcagcgaaatggtagg

SEQ ID NO: 159069 - DNA, 274 bp, Glycine max
cccaaggtgctcttattgttgcttcaactcttcaaatagtactaggctttagtggcctttggcgaaatgttgcaaggttcttaagtccactttcagcagttcctttggtatctcttgttggttttgggctttatgagttaggctttcctggggttgctaaatgtgtagagattggactgccagagcttatattactagtatttatttcacagtttgtacctcatgtgctacatgcaggaaaacatgtcttcgatcggttcgctgttttatttac

SEQ ID NO: 159070 - DNA, 275 bp, Glycine max
  unsure (1)..(275): unsure at all n locations
gaaactctttatatatttattattgttactgacccaaacaaactcaacaaaaccatgatcccaaacgntgaaatccctcactgggacgccgacggaggaggaccactctctccgttcatctcttcttcttccaangctgacaagtgctcattattattctccctccgaccatttccgaatgttccagtncaaggtccggatctgtccacgtggcaggtcccangattggacggagtgtccctacgcccaccctgccgagaaggctcgcngccgtg

SEQ ID NO: 159071 - DNA, 271 bp, Glycine max
aaggaacaggagggttcattgagccgaaatggctagcatatggtgagataatcaatggtcgttatgcaatgttgggtgcagttggtgcaatagcacctgaaattctaggcaaggctggtctgatccctcaggagacagcactcccatggttcagaacgggtgtgttcccacctgcaggaacctacaactactgggcagactcctacacattgttcgtgtttgagatggcactgatgggatttgcagagcacagaagattccaagactgggc

SEQ ID NO: 159072 - DNA, 270 bp, Glycine max
tcttgttgttgttggtgttgttcagttcttcttcctctctttgaacaacatctcacaattcattcaccttttaattcatctcactcacaaatcacaatgctcttcctttcttccttaataataataccataataatctgttacgttacggggcccaaatgtctgttacggagctcaaggagcgtcactctgctgccaccgacaccgtcaacaatctcagacaccgtttaaagcagaagcgcctttcgttgctcgacacagatatttctgg

SEQ ID NO: 159073 - DNA, 268 bp, Glycine max
gtttaacctcaccaagaacatcatctaccgcgccgcgttcgggtcgagttcccaagaaggccaggacgagttcattaaaatactgcaggagttctccaagctctttggcgcgtttaatattgcggattttataccctatctcgggtgcgtggatccacaaggtttgaactcgagactcgctagggcacgtggcgcgctcgatagcttcattgataagatcatcgacgagcacgtgcataagatgaagaatgataagagcagtgaaatt

SEQ ID NO: 159074 - DNA, 268 bp, Glycine max
cagaaagcttgctgacaactgcactggtctccaaggttttctggttttcaatgctgtgggtgggggcactggctctggtcttggttcccttttgctggaacgtctttcagtggactatggcaagaagtccaagcttggtttcactgtctatccttcaccccaagtttacacctctgttgttgagccttacaacagtgtcctctccactcattcccttcttgagcacactgatgtggctgtcctgctcgacaacgaagccatttatgac

SEQ ID NO: 159075 - DNA, 272 bp, Glycine max
ggtcaccttcaaaaccagtcaaccaacgtgatgctgatctcatccatttttgggataagttccgcaaagctcctgagggttctctcaggaaaaatgcagctcagaaacaagttttggaagcaatgtctcatagaatgcatgtagacaacagtgtaaaacttattgggaagcttttatttggtattgaaaagggtccagaagtactcaacgctgttagaccggcaggatcggcacttgttgatgattggcactgccttaaaaccatggtgagg

SEQ ID NO: 159076 - DNA, 266 bp, Glycine max
cgaaatagttgagcgggaaataagagggttcaatacggtggaagaggccataaaacagaagaaactgttcatcctggactaccacgatttgttgttgccattagtaaaggatgtgagagaacttgaaggcacaacgctatatggatcaagggcattgttcttcctaacccgcgaaggcacattgagacctctggctattgagctgactcggccaccaatggacggaaaaccgcaatggaaggaagtcttcacgccttgctggcact

SEQ ID NO: 159077 - DNA, 272 bp, Glycine max
agtaactccaactccaagtcacattggtgacaaagttagaaacaaggagaaagaaagaagatggcaggaaagaaaatcccagatgtgttgctgaattcaggacacaaaatgccagttataggcatgggaacttcagtggagaatcgtccatcaaatgagacccttgcttctatctatgttgaagccattgaggtgggttaccgtcattttgacactgctgcagtgtatggaacagaggaagccataggcctagccgtggccaaagccataga

SEQ ID NO: 159078 - DNA, 275 bp, Glycine max
ccaaaatcttcatattcatcaaactcatcaaaatgaatctgtaccactcctccaccaccaccaccaccaccaccatcttcaccgtcatattcctcctccttgcaatattattcactctcacaccccacaaggccaacggtgccacgtgtcaccctgaggaagaagcgggcctgttgggcttcaaatccggtatccgatccgacccgtccggcctgctcagtaactggatatcgggtacggactgctgcacatggaccggagtagaatgccactat

SEQ ID NO: 159079 - DNA, 270 bp, Glycine max
ctgtcaaaggatctcccttctgatcttcaaaagcttagatgcaaggttgctttcaacgcactacggtttgctcagccgattcaggaactcggtgacggcattgcagagagaatgcaaagcaagggaccttaccttgttcttcatctaagaatggagaaggatgtgtgggtgaggaccggatgcctccccggtttgagtcccgaatttgatgagattgttaacaatgagaggatacaacggccggagctcttgactgcaagatcaagcatg

SEQ ID NO: 159080 - DNA, 270 bp, Glycine max
cacaggcacaggcacaaggcgttcctcttcccgagcaagtcacagtcacagacccagacaactctgtgagtggggattccatacggcagagatttttgaatttctatgcttcccgtggtcacaaggttcttcccagtgcttctcttgtcccagatgatcccactgttctactcaccatcgcagggatgcttcaattcaagcctatcttcctaggcaagattccaagacaagtaccttgtgctgctactgctcaaaggtgcatccgtacta

SEQ ID NO: 159081 - DNA, 265 bp, Glycine max
cttcttcgaatcccaagtctcaggtctggtaaccttttgaggttgttgggtgcagaagggagcgatggctgcttcagaggagaatagtgcactgttcccaatattcattttgacaataatggccattcctatagtgccatatacaataacaaagttgtgccgttttgccagtaagaaatcaaagagcattcactgtcagtgctctgagtgctcgcggtccgggaagtaccataaatcgatattcaagaggatttcaaatgtctca

SEQ ID NO: 159082 - DNA, 261 bp, Glycine max
gcagccactatagtaaacaatcttctctatctaaaatggagtttgttctaaactacctaaatgccactgccattggagttctttctctaaccctcttctttttgtttttgtataatcccttcaaatttgcattaggtaaaaaagaggctcccgaagttgcaggtgcatggccaatacttggtcacctaccactattgagtggttcagagacacctgatagggttttgggtgctttggctgataagtatggacccatattca

SEQ ID NO: 159083 - DNA, 265 bp, Glycine max
ggaatcgtctctcctccttccttcggtttcaggaaccaacaagaacaagaacaaggttccagaagacaaatggtatttagcctacattgtgtattttaccctgggtctcggttaccttctcccatggaacgctttcatcaccgccgttgattacttctcctttctctaccctgacgccagcgttgaccgcatcttcgccgtggtttacatgatagtcgggctggtggggatctccctcataatcctctacagccacaagtctgac

SEQ ID NO: 159084 - DNA, 268 bp, Glycine max; identical to SEQ ID NO: 158543

SEQ ID NO: 159085 - DNA, 272 bp, Glycine max
gcttcatcaacgacatcttcgagaagcttgcccaggaatcttctagacttgcccgctacaacaagaaacccaccatcacttcgagggaaattcagaccgcggtcaggcttgtgctgcccggtgaattggctaagcacgccgtctctgagggtaccaaggccgtcaccaagtttactagctcttaaactgttgtttatgggcttgttgcacgcccaagtctgttctatgtatctggacacctatgttcagattttaatcaattgtaggggtgg

SEQ ID NO: 159086 - DNA, 272 bp, Glycine max
aaaattgttctctcaccgtgaaagagagagagaggttaggctatggctgatgagagcgttgttgagtccccagtgaagaggcagagagatgatggtgaagaaaatggtgtctctgtttccatggacgcggagggtggcaaagaccctcttagtaacggtttatcatctgtgattcctgggtggttctctgaaatcagtgcaatgtggcctggagaggctcactccttgaaggtggaaaagattttgtttcaaggaaagtcagaataccaaaa

SEQ ID NO: 159087 - DNA, 263 bp, Glycine max
gaaaggcgatggacctcggaacctatgaagtgccagaaggagtggacattctaggaagatacgatgcagagtttgcaaaaatcctcacaaaagacgctttgaaattcgttgctgagctgcaacgtgagttcaggagcgatatcaagcatgcattagagagcagaagagaggcaaagaagaagtacaatgaagggactcttccggggtttgatcctgccaccagtcacattagagaccaggagtggctgtgtgcacctgttcca

SEQ ID NO: 159088 - DNA, 263 bp, Glycine max
cttttggagaacaagactgccttcactacaaagaaagactatggcaaagaagagagagaagcacagtgggcaactgcacagaggactcttcatggtcttcagccacctgaaacaaccaaccttttcaatgacaagaacagttacagggagctgtcagagattgctgagcaagctaagagacgtgccgaggttgcaaggctcagggagcttcatactctgaaaggacatgttgagtcagtggtgaagctgaagggacttgacat

SEQ ID NO: 159089 - DNA, 262 bp, Glycine max
ctcccgacggaacactagttcagaccggcggattcaacgacggcgaccgcgccgtcagaaccttcaccccgtgccgcacctgcgactggaaagaaattgacgatggactcgcggcacggagatggtacgccaccaatcacatcttgccagatgggcgacaaataattatcggcggaagaagacaattcaactacgagttttaccccaagacacaagctaagaacacttacagcttaccttttctggttcaaaccaacgacgc

SEQ ID NO: 159090 - DNA, 266 bp, Glycine max
tttcaaggagagagagaaaatatagcacgccgaaaaacacgctcccacttgtaacttagtataacgacctccaacaactgatacatacaatctcctttccttcgtgttggacaacaacaatggcggcgaaatctagttcgagttcgacaacaaacgtggtgactctgaaggcggcgtgggttctcccgcagcgcacgcagaacatccgtgaggtgtacgaggtggggcggaagttggggcagggtcaattcgggactaccttcgag

SEQ ID NO: 159091 - DNA, 265 bp, Glycine max
tttcaatcccacaacacactcattcctcattcttccactcccgcacaaaacgagctaggttgcagcaccccacagcttccctccaatccaaacacgtcctaatcccccgaaacactcttacccagaaacccatcctcaacctctcctccctcccgggcaccacctttacccccctcaagctcaaattcttcagcggcggcgccgtccgccgctccaccggcgcctcgggagccagaatgtcagccaccgcagcctccagctaggc

SEQ ID NO: 159092 - DNA, 271 bp, Glycine max
  unsure (1)..(271): unsure at all n locations
caactacaaaggttgctgtaggagataagatattgaagtagtgctaagtgcctaacacctgcagtgaacaatggcctctgcatcagcatctcttctcaagtcttcacttgtncttgacaagtctgagtgggtgaagggacaaacacttcgccaaccttctgctgcatcagttgtgagatgcaaccccaccaccccatcaggcctcaccatcagagctggttcctatgctgatgagctcgttaagaccgcgaaaacagtggcttcaccaggg

SEQ ID NO: 159093 - DNA, 271 bp, Glycine max
tctcatcactacctctgcatttttctctcgctctctgccttccatcaccctcgccatttcccttcccaagatagtagaagatggcagacgctgaggatattcaacctcttgtttgtgacaatggaacaggaatggttaaggctggttttgctggagatgatgccccacgtgctgtgtttcccagcattgtaggtcgtcctcgtcacactggtgtgatggttggcatgggccaaaaagatgcatatgttggtgatgaggcacagtctaagag

SEQ ID NO: 159094 - DNA, 260 bp, Glycine max
ataaggcacaagagtattcgccctgccttctccgcaatcagacacttgtcttctgcagctaaagagattactgtcagggaggctctgaactccgcactcgatgaggaaatgtcagctgatcctaaagtgttcttgatgggtgaagaggttggggaatatcagggtgcatacaagatatccaaggggctgctcgacaagtatggccccgagagggttctcgatactccaatcactgaggctgggtttactgggattggagt

SEQ ID NO: 159095 - DNA, 258 bp, Glycine max
ctcttcttcttcccacgctcctccttctcatacccttcgccaccctcgtctccgcccgccctcacctcgccggagactttctccgactgccctccgaaaccgataacgatgacaacgtccagggcacccgctgggccgtcctcctcgccggttccaatggctactggaattacagacatcaggctgatgtttgtcacgcctatcacatactaaggaaaggtggcctgaaagaagaaaatattattgtttttatgtatg

SEQ ID NO: 159096 - DNA, 253 bp, Glycine max
aacaggactttccgttcacgacactcccttttatcgtttcacttccgtcgtcgtcgtcttcaattttggatcttcgcatcgaatcgcatcctatgggtagcagcagaggatacacgctcatggaggttggacccgacggggttgccgtcatcaccatcgtcaaccctcccgttaattcactttcctttgatgtattgcgcagtttacaggagagttttgatcaggcgatacagagagatgatgtcaaggcaat

SEQ ID NO: 159097 - DNA, 254 bp, Glycine max
attttcatcatcttcttcttctttttcatcaatcatcaccagtggttcttttccttctgagaagatcgaattgtgttttgcaaaaatgggagttccagagaaagaccctctttcccaattgagtttgcctcctggttttcggttttaccccaccgacgaggagcttctcgttcagtatctgtgccgcaaggtcgctggccaccatttctctcttccaatcattgccgaaattgacttgtacaagttcgacccat

SEQ ID NO: 159098 - DNA, 255 bp, Glycine max
ctttgcgcagttccctacctctcctttcaagatgcagatcttcgtcaagaccctcaccggaaagaccatcacccttgaggtggaaagctctgacaccatcgacaacgtcaaggccaagatccaggacaaggaaggaattcccccggatcagcaacgtctcatcttcgccggaaagcagctcgaggacggccgtaccctcgccgactacaacatccagaaggagtcaacccttcaccttgtccttcgtctccgtgg

SEQ ID NO: 159099 - DNA, 254 bp, Glycine max
ggttcttccatttgactcttgttctgaacgacttttcaagagaatcaaaccatggcagtgaaagtatacggtccccactgtgcttccaccaagcgggtgctggtttgtctggttgagaaggaagtcgaatttgaggttgtccctgttgatgtcactaagggggagcagaaggatcctgagtacctcaaactacagccatttggagttgttcctgtcatcaaagatggagattataccttatatggttacacttt

SEQ ID NO: 159100 - DNA, 252 bp, Glycine max
gttgaagtcccagataccgctcatcagataagcactgattcatggtttcaagtggcttttatcctcacaaccggaatcaacagtgcctttgttcttggatatccagggaccgtcatggttcccctgggttggatcgggggtgtgattggtctaattcttgctaccatggtgtcactctatgcaaatgctctaattgcttatctccatgaattaggaggccaaaggcacattaggtatagagatcttgctgga

SEQ ID NO: 159101 - DNA, 253 bp, Glycine max
ctttcgaaagattttatccaattgaaattttaaaaatgactgggataaacttaagaattcaattattgaaattgaataagtaaacaatttaattggattggtcgaatggtatcaaaaaaaatggagtactaactcccatttcttatttattattgaattaaccgatcaacttgctttgttatcgaacatttctttttgatttcaaaaattttccggaaaaaatttgaatctatttttatatgcgaatcaatcc

SEQ ID NO: 159102 - DNA, 254 bp, Glycine max
aacaaatcaaagccatggccacctccaacttctctattgttctctccgtctccctagccttctttttggtgctacttaccaaggcacactcgaccgataccgtttctttcaccttcaacaagttcaacccagtccaaccaaacattatgctccaaaaagatgctagtatttcatcctctggggtgttacaactcaccaaagttggcagcaacggcgtgcccacctcgggatctctcggtcgtgccctttacgct

SEQ ID NO: 159103 - DNA, 259 bp, Glycine max
ctggctcgtcactccttgctcttagccctcctcctcttcgccgcggtggccaccgccgcgatggcggtggcgcgtccgacgccgacgacatcctgatccgtcaggtggtgccagatgttggcgaagctgaagaggaggacaacctgctgaacgccgagcaccacttcgcgagcttcaaggccaagttcgccaagacctacgccaccaaggaggagcacgatcatcgcttcggcgtcttcaagtccaacctccgcagagc

SEQ ID NO: 159104 - DNA, 258 bp, Glycine max
gtcatctttgtcatattccaaaattaagcttgcattattcaccagaatggctaattcatatgaaaacaacttcccccctcagaagcaagacactcagcctggcaaagagtacctcatgaatccaccaccccaatacaacagctcccaatacaagccatcaaataaacttcagggaaagatagctgtagtaaccgggggtgattctggaattggacgagccgtgtgcaacttgttttcattagaaggtgctactgtgat

SEQ ID NO: 159105 - DNA, 252 bp, Glycine max
tggatacttaaatgatattttggccgaaaatgcaattgtggatgatactgatctgaatcctttggagtttttagcctccctgttccctggttttgcagcagaaagccttgcagaagcttactttgctaatagatgtgatttacatctgaccactgagatgctcaatcagttagagcttcaagttgatggtggtttcaatcagaatctgaattcaaagactttgtctgctcccaatctcagtgcaatggacta

SEQ ID NO: 159106 - DNA, 253 bp, Glycine max
catcaacttgtcatcttataattgaattgtgtatgtaacaaaaaaaataaaattcagaagagaagagggttgtgagtgtgactccgctgagggatatgacgccagagagggttttcgggaagatgggacatttgcagaagttgttggatcggtttttggcttgtaggcctactgggttggctaagaatagcaggatggttttgattgcgctgtatcctgtggttaaggagagttttcagttgtatgctgatat

SEQ ID NO: 159107 - DNA, 255 bp, Glycine max
gcaagatcggcggcaagctccgttacgcactcaacggtgtctcccacgtcgaccccgaaacccctctcaagctcgccgagtactacggtgtcgccgacaaggtcttcaagtacaacctcatctctgacgccccagacgccgccatcgcctcccgcgaccccatcatcgcccccaacgtcatcaacgccaccttccgcaacttcatcgaagtcatcctcgagaaccccaccaaggtcacccagtcctacaaccttg

SEQ ID NO: 159108 - DNA, 251 bp, Glycine max
attgaatctcagaattctctaaaagagatctttttctgctctttgaagaaagaagggtctttgcttgattttggagatgtctctgctctcagatctcatcaaccttaacctctccgataccaccgagaaggtgatcgcagagtacatatggatcggtggatcaggaatggacctgaggagcaaagcaaggactctcccaggaccagttagcgacccttcagagcttcccaagtggaactatgatggttcca

SEQ ID NO: 159109 - DNA, 253 bp, Glycine max
cctttagaaagttcttcatactcttccagaagcagaaaaaagtgcctttttttttttacttctttacttgaagctttctgtgttgtgctgccatggccgtgacacagttcaaccccacttgctcaaaaactcatcttcactcatctcagctcccttttctatcgaggactcttcctagacatcgccactgcactattgcgccacttcatagaactcaacaagctaggatttgttgttctgttgccccaaatga

SEQ ID NO: 159110 - DNA, 250 bp, Glycine max
aggcattaggtcagacagctgactggtttaggagagcattggctgttgagcctgtcaaggggaacctgcggttaagtggatattctgcttgtggacaagatggaggtgtgcaacttcctcgtggatatattgaggagggtgtctctgatgccgacttggttcttttggtgactacaagacctacaactggaagtacacttgcctgggcggtggcatgtgaacgagatcaatggggtcgtgctatagctgg

SEQ ID NO: 159111 - DNA, 252 bp, Glycine max
tgaagaaacaaattagaagagtgtgttgtgttgtgttgaagtagcaagctagcaaagatgtttggcatcttaggaggcaataaggggcacaagatcaagggtactgtggtgttgatgagcaagaatgtgttggacttcaacgaaatagtgtccactactcagggtggtttggttggtgctgccaccggcatcttcggtgctgccaccggtattgttggtggagttgtcgatggtgctactgccatcttcagt

SEQ ID NO: 159112 - DNA, 247 bp, Glycine max
gagagatttgatagcctcaactcaagtaagggttttctctttgagaaaatcgtatcttacaccttttggtgaccactttgagtgagagaagagaaattaagagagatactcaaattagattcaagagagatggccatcaaccatgaaacttgggctttcattttcggtcttctaggcaacgtgatctcctttatggtgttcctcgctccattaccaactttttaccaaatctacaagaaaaaatcta

SEQ ID NO: 159113 - DNA, 253 bp, Glycine max
ctcaatgggttcttcttctattacaacatcgcccgcaaccatgaccatggctgcgatcgtgctcctgttcacggtctttgccgtttcctccgccctagacatgtcgataatctcgtacgacagcgcccacgcggacaaggccgcgccgttgcgcaccgaggaggagctgatgtccatgtacgagcagtggctcgtgaagcacgggaaggtgtacaacgcgctcggcgagaaggagaagcgcttccagatcttc

SEQ ID NO: 159114 - DNA, 249 bp, Glycine max
gcggttacacgagatcgtgaatgaagagattgacagcgcgcgcgagaatttggagtggaagctgacgatggagaacggattcgctcgcatggacgacgaggttaatcgcaggagccagagcaaccagaccttcacctgcaggtgcgagctccagactccccactgcgacgccgtcggatccaccgccgtcgtcgccatcgtcacgccggacaaactcgtcgtttccaactgcggcgactcccgcgccgt

SEQ ID NO: 159115 - DNA, 250 bp, Glycine max
tggactacggttttactgccgatatggaaaccgagctggataatgtttctggtggattaactgaatggaaaggcctccttagagactattggacacgatttaaatcatattgtgagcgtacatctaatgttcatattcatcaggttgagaagatgttggaaaaaaaatttggcgattatttatttgcttctctcccagatcagagccgggtgtgtccaagttgtatggaaggcacacttatttttaaagt

SEQ ID NO: 159116 - DNA, 256 bp, Glycine max
cgcgcgcgcaaaaacgcattgtgtttctctctttccgcggcgtagatctgagcagtttgggaaaccctaactgctctcaccactctctttgctttttttcctctccgatcaacgacctctttcgtcgccctaagtcatggcaggacttgcacccgagggatcacagtttgatgctcgtcaatatgataccaagatgaatgagttgcttacatctgatggacaggattttttcacatcttatgatgaggtttatgac

SEQ ID NO: 159117 - DNA, 251 bp, Glycine max
gtcatcgttgggatctccatacgccggatctgctaaaatacgcttgatccatatgggcctcctcgaccacttgtgggacgacaccgtcgccggcccaaggccggaaaacggtctcggcaagctccgaaaacaccacaccttcactttccgacctagctccggcaaggaaacggagggcgggagcgtgagatcgtacggagacgaatcgtcggaggaagcgacgagagtgacgcgtagtatcatgatcgtga

SEQ ID NO: 159118 - DNA, 251 bp, Glycine max
gccacagttggaaaaaaaaaaaaagttgttcgagatggcacgtacgaagcaaactgctcgtaagtccacaggaggaaaggcacctaggaagcagctcgcaaccaaggctgcacgtaagtctgcaccaactactggtggtgtgaagaagccacatcgttatcgtcctggtaccgttgctcttcgtgagattaggaaataccagaagagtaccgagcttttgatcaggaagctccccttccagaggctggttg

SEQ ID NO: 159119 - DNA, 247 bp, Glycine max
atttatggtgttgacaagtggggtaggagagcccttttccttgaaggtggagttcaaatggtcatttgccaggctgtagttgcagctgctataggagcaaagtttggaattgatggaaaccctggtgatttgccaaaatggtatgcagttgttgtggttctcttcatttgcatttacgtatcagcatttgcctggtcatggggtcccctaggttggttggtgcctagtgagatctttcccttggaga

SEQ ID NO: 159120 - DNA, 247 bp, Glycine max
tagtaatattattcttcgaatccattttattattcataatgggtattttcacatttgaggatgaaaccacctcccctgtggctcctgctaccctttacaaagctctagttacagatgccgacaacgtcatcccaaaggctgtcgaagccttcaggagtgttgaaaaccttgaggggaacggtggccctggaaccatcaagaagatcactttcgttgaggatggagaaagcaagtttgtgttgcacaa

SEQ ID NO: 159121 - DNA, 248 bp, Glycine max
gtttttgccttcccataggaaaagcaaagattgagagggaaggaaaagatgtgactattacagcctattcgaaaatggttggctttgctctcaaggctgctgagacactggcaaaggaaggaatcagtgctgaggtcattaatttgcgttcaatccggccacttgatcgatccacaatcaatacttctgtcaggaaaaccaacaggctggtgacagttgaagaagggtttcctcagcatggcgttggc

SEQ ID NO: 159122 - DNA, 252 bp, Glycine max
cagacattgtatgagaggatacaatcagcaaagataaactcatcatctgctgataggaaatggaaggcttcaagtgatacaagctccactgatcaatatgacaggttcatgaatgccctttacagtttgctggatggttcttctgataatacaaaatttgaggatgattgtcgagctataattggaattcaatcatatgtcttattcacattagacaagctgatatataaacttgttaaacagcttcaagct

SEQ ID NO: 159123 - DNA, 249 bp, Glycine max
attattatactagtcatcataaaatgaaaattttgcttgctttgtagtttatccagggaatggtatataaatagataaggctctctatctagctgtcttaagtgttgtgccatccacatcttgtctttattttctatttatgtcacctgaacactatcataatgtactggatttccaagaaaatgttatcagttaaatttgaatgcatggttcactatttcaaaaaaaaaaaaaaaggggcggccgccg

SEQ ID NO: 159124 - DNA, 246 bp, Glycine max
ctcgattaatcgaatctcctgctcccggtattatttcgagacgttccgtatatgagcctctccaaacaggacttattgctattgattcgatgatccccataggacgtggccaacgagaattaattattggagacagacaaacgggtaaaacagcagtagccacagatactattctcaatcaacagggacaaaatgtaatatgtgtttatgtagctattggtcaaaaagcatcttctgtggctcaag

SEQ ID NO: 159125 - DNA, 246 bp, Glycine max
gcgtgattgagaccatttaccttgccgtatttatcacttactgccccaagaaagctaggatgtcgacattgaggatgattgttttgttaaattttgggggattttgcacgattgttctcttaacccacctactagcagaaggagagggccgtgtcaagcttctaggatggatttgcgtagtatttgctactagtgtttttgcagcacctttaagcattattagggtggttattcggaccaaaagcg

SEQ ID NO: 159126 - DNA, 244 bp, Glycine max
gctttaggtgttcctgctcttccgttgacatacgtggctcacgttctggcagttgttgccagcgtcttggtcgtggtctgggtcgtcaatttcaggggtggcttggcttgggattctgataacaagtccctcatcttcaacattcatccagttcttattgttattggcttactagttcatgggggtgaagctattataagttacaaagcttttcccctaaagaaggaagtgaagaaattgatac

SEQ ID NO: 159127 - DNA, 243 bp, Glycine max
gtgctgctgacaaggcaaaattcaacaatgtttttgtgaagaatctatcagaatcaaccaccgatgatgagttgaagaacacttttggtgaatttggaactattactagtgctgtagtaatgagggatggggatgggaaatcaaagtgttttggatttgtgaattttgagaatgctgatgatgctgctagggctgttgaggctctcaatggcaaaaattttgatgacaaagaatggtatgttg

SEQ ID NO: 159128 - DNA, 244 bp, Glycine max
gcaaaaagaaagaatcccaggcgaggagaaagatggaggggaaggagcaggatgtgtcgttgggagcgaacaagttccccgagagacagccgattgggacggcggcgcagagccaagacgacggcaaggactaccaggagccggcgccggcgccgctggttgacccgacggagtttacgtcatggtcgttttacagagcagggatagcagagtttgtggccacttttctgtttctctacatcac

SEQ ID NO: 159129 - DNA, 243 bp, Glycine max
ccaaggcaagggtgccaatgccaatgctcttagggatgttgtctccatgggaactgggaagtacaccatgggcaatgatttgtggtatggaccagacagagtgaaatacttgggacccttctcagctcagaccccttcatacttgaaaggagaattccctggggattatggatgggacactgctggcttatctgctgacccagaagcatttgccaagaacagggctcttgaggtgatccatgg

SEQ ID NO: 159130 - DNA, 246 bp, Glycine max
atgaaaatgggttcttctttgtggactttgtgtctaattttggcttcactagcctcttctgcattctgtgcctttccacggaggccagtggatgttccattcggcagaaactacgttcccacttgggcttttgatcacatcaaatacttcaatggaggttctgagattcaacttcatcttgacaagtacactggtactggcttccagtccaaagggtcatacttgtttggtcacttcagcatgaac

SEQ ID NO: 159131 - DNA, 246 bp, Glycine max
attagtactctcgttaatttttttgctaattgctaattgggcacaatggaaaagcttcatgctgtgtgcatcccatacccagcacaaggccacataaacccaatgctcaagctagcaaaactccttcatgttagaggcttccacatcacctttgttaacacagaatacaaccacaaacgccttctcaaatcaagaggttctgattccctcaatagtgtcccatcatttcaatttgaaaccatccct

SEQ ID NO: 159132 - DNA, 245 bp, Glycine max
gataaattcaaaggcttgtttctctaaacattcgcagtggccggccaagagctttcgccttcgccaggcttgagagctaatgctgctattatccttccttggatgtctgagagttggttcattgtgctgtgaattgattattttgttttgtatttcatttaatttttataagttttgtatacaagtttttctcaccaattttttattttggcattttgtcacattgatccacgccaatgatgata

SEQ ID NO: 159133 - DNA, 245 bp, Glycine max
tgaagctggaatttcaaaggatggacagactcgtgaacatgctctgctttcattcacccttggtgtgaaacagatgatttgttgctgtaacaagatggatgctactacaccaaagtactccaaggccaggtatgatgaaattgtgaaggaagtttcttcctatttgaagaaagtaggatacaaccctgacaagattccttttgttcctatatctggttttgagggagacaacatgattgagaggt

SEQ ID NO: 159134 - DNA, 242 bp, Glycine max
tctcactcttcagatctctctcccttccttccatcccaaccacaaggttgctgagaagacataaaaaatggtgaagatttgctgcattggagctggctatgttggtggcccaaccatggctgtaattgccttgaagtgtcctgagatcgaggtggtcgtggtggacattgctgcaccgcgaatcaacgcgtggaacagcgaccacctcccgatatatgagcctggccttgatgatgtggtga

SEQ ID NO: 159135 - DNA, 243 bp, Glycine max
ctcgagccgctcgagccggaactttagaaaccataatacgtctctcaacagctcatgccaaattgaagttgcgcagagaggtttcaaagtctgatgttgaagctgctttgaaggttctaaattttgcaatatatcacaaagaactaacagaaatggaggagcgtgagcaagagagggagagagagctggacaggaagcgcaaggctgatcatgatgaaaatgatggtcctgatcatggtccta

SEQ ID NO: 159136 - DNA, 242 bp, Glycine max
cgctctgtttctgtctctgtgtttgcggctgaggattccgaacgagcgaccttcttcgtttctcgcaaagtttaagtcatcatgggtaaggaaaagactcacatcaacattgtcgtcattggacatgtcgactctgggaagtcaactaccactggtcatttgatctacaagcttggaggtattgacaagcgtgtgattgagaggttcgagaaggaggctgctgagatgaacaagaggtcatt

SEQ ID NO: 159137 - DNA, 242 bp, Glycine max
cggctcgagcggctcgagagtccatgagaggtactgcttcacgataccaaaatcctatgcattggcttcagcagctcctttgctttgtgctggaattacagtttattcaccgatggtgcgccacaagatgaatcaacctggtaaatctcttggagtgattggtcttggtggcctcggatctatggcagtgaaatttggaaaggcatttggtttgagtgtgacagttttcagcactagcatat

SEQ ID NO: 159138 - DNA, 275 bp, Glycine max
gtcgcactccactccactccaatcagtcagatactagcgatggggaggaagcgaaaggtagcaccgaaatctactgtataagccgagcccccgttgaagcaaaactaaccataacccgaaaatgccgctcaggaatacgaagaagaggtcgaagaggaagttgaggaataagaggtagaggaagaggtcgaagaggaagaagaagaagaggaggacgaagaggacgaggaagaagaagaagaagaccataaagaccaataccagcaccaacaaca

SEQ ID NO: 159139 - DNA, 255 bp, Glycine max
ggaacaattaaggcattgcaggaattagttctcagcatcagtaagacgggcagagcggcgatgcttgatgagattgttgactatgtgaagttcctaacgctccaggttaaggtcctgagcatgactagactgggacgagctggtgcagttgctcagcttgtagctgatgttccccattctgcagtggagggggatcaggacatagaacgtgtatccaatgagcaagcctgggacgagtggtccaatgatggcaca

SEQ ID NO: 159140 - DNA, 270 bp, Glycine max
gtcaaagttcaacgagattaactcgataacggtggttttaacggcgaaggacgttgccgttgagggcttctgcatgagccgctgtggcacccacggctctacccggaacgttaaaagtaatgcccgaaccgcatatatctgggttggaaactccgaaacacagtgccccgggcaatgcgcgtggccattccaccaaccgatttacgggccccagacgccgccgttagtttctcctaacggcgacgccggggttgacggaatggttattaa

SEQ ID NO: 159141 - DNA, 262 bp, Glycine max
ggcgaggcgtgaacgaggctcaacgtgcttatcctcggatttttggccatgaagcatctgggattgtggagagtgtaggggaaggagtgagtgaagttgaggaaggggacatagtagtgccaatattcaatggggagtgtggagagtgttcgatgtgcaagtgtgagaagaccaacttgtgtgagaggtttggggtggatgccacgaagaaggtgatggaacgagatggcacaacaagattctccactgttaatgggaaacc

SEQ ID NO: 159142 - DNA, 266 bp, Glycine max
gtgtgagtgagtgtatcaatcggccacacagaaatgggcagtgcttctctgattccagtttcctggttgccttggcggccactttctcctttcaagggaacggtgaaaaccttggtcgcaaaaccatggctgaagaagattcagcaagcaagacccctcatttccgtggttaacaaggctgcctctctatcttcccccgtgacagcacccagcgtcggcgttcggtttcggctggacaatttggggccgcaaccgggttcgaggaa

SEQ ID NO: 159143 - DNA, 281 bp, Glycine max
ggagttttagacccacgatcaggtcggggtcgttcaagtaaagttttccatggcattgtggaacccatattcaagcttgctgggtttagattggaggtagtcaaacaacatctgctggtcatgcgagagatcttgcatcaagtgtagacatcagctcttgccctgatggaataacctgtgttggtggtgatgggatatccattgaggttctaattgtcctcctagttagggacaatcaaaaggaaggattatctataccaattggaattataccggctggt

SEQ ID NO: 159144 - DNA, 217 bp, Glycine max
gttatattgatattgctatttgttaagctcttatttcctcggccatggctaataatgaacgtgatctcttctcggcggagattgtgaatcgtggaattgaaccgtcgggacccaacgctggctcgttgacattctctgtgagggtgaggaggcgcttacgggattttctgcaatcggtgaaccttaagtacgtgaaattgggttaccattatctcat

SEQ ID NO: 159145 - DNA, 262 bp, Glycine max
aacaagaacataagggaaccacagcggcggtaacagaagaacaagcagagaatgggtcgagtgagaacgaagacggtgaagaaatcctctcggcaggtgatagagcgtcactactcgcgcatgaccctggacttccacacgaacaagaagcttctggaggaagtggcgataatcccgtcgaagaggctaaggaacaagatcgcggggttctcgacgcacctgatgaagcgcatccagaagggcctgtgcgcggctctccctc

SEQ ID NO: 159146 - DNA, 261 bp, Glycine max
cctcttttttcctcttcctcagtagtgcgattttcgattctcttctctgcaactatgcctaaccctaaggtcttcttcgacatgaccatcggcggtcaacctgccggccgcatcgtgatggagctctacgccgacgtgactccgagcaccgccgagaacttccgcgcgctctgcaccggcgagaagggcgccgggcggacggcaagcccctccactacaaaggctcgtccttccaccgcgtgatcccgaacttcatgtgcc

SEQ ID NO: 159147 - DNA, 267 bp, Glycine max
ccacggagagagagagagaggttttgacgcaacacactttcactgagaaaggatctctatctaccaaggagcagaataaaacccttctctctggtaagtgaataagagaatggcttcagatcggaaacttcacactttcgaggaggtggcaaagcacgaccagaccaaggattgctggctcatcatttctggcaaggtgtatgatgtcacccctttcatggaggatcatcccggacgtgatgaggttttgttatctgcaacagggaa

SEQ ID NO: 159148 - DNA, 270 bp, Glycine max
cccagcctctcaattacggtgccatgggaactcttttggctcaacagcaattcttggcaacaatggctaatttccaacaccttagtaatgtcaacatgcaagatgatggtgttgctcaaatggccggacctaatggaagatcacctttgccagacatatttcaaccaaattttcaaactcaaactcctagctcaatgatcaacacttcaaggaaagaagaaactaaagcatttgactttatctcggaccatatgtcatctgctcgtgatt

SEQ ID NO: 159149 - DNA, 273 bp, Glycine max
ccgctttcatcttctcatctcttctcttttccctgctaatcatggcaaccttgtcaactgtgaaggtttccccccattgcatgtttcaaacagcaagcaaaaatccatccactgttgccaccacaatgaagtgcccttcttcttttgggtctgtgaagagcatttccagatcttttggcttgaagtcatcctcttcatttagagtcactgccatggcttcttacaaggttaagctgattggcccagatggaacagagaacgagtttgaagcca

SEQ ID NO: 159150 - DNA, 193 bp, Glycine max
attcgcttgattacgtttggcgtatccagtttcgatccagctggattgtccttgtaactaggaagatccagctggatcgaaagtggattcgcttgattacgtttggcgtatcatcttgatgtttggtgcagtcccggctgctcttacctactattggcgaatgagaatgccagagacggctcgctacacggcc

SEQ ID NO: 159151 - DNA, 249 bp, Glycine max
gccctcgtttactgcaccgctggcatctcagggggacacataaacccggcggtgacatttgggctgtttttggcgaggaagttgtcgttgcccagggcgattttctacatcgtgatgcaatgcttgggtgctatttgtggcgctggcgtggtgaagggtttcgaggggaaaacaaaatacggtgcgttgaatcgtggtgccactttgttgcccctggttacaccaagggtgatggtcttggtgctgaga

SEQ ID NO: 159152 - DNA, 263 bp, Glycine max
aataaatgcaaataccacaaagacttatgctacaagaaccatatttttcttgaaaaatgatggaactttgacgccattggccattgagttaagtaagccacatcctcagggtgaagcatatggtcctgttagtgaagtctacgtgccttcgagtgaaggagttgaagcttacatttggttactggaaaaggcttacgttgtggtgaatgatgcttgctaccatcaaatcattagccattggctaaacactcatgcggttgtgg

SEQ ID NO: 159153 - DNA, 268 bp, Glycine max
cttttgcgtacacagcctcaacaaccctaacgcgtgcagagcagagagagacgcagccatggggcgaagacccgcgaggtgttataggcaaattaagaacaaaccataccccaagtcacggttttgccgtggtgttcctgatcccaagatcaggatttacgatgttggtatgaagaagaagggtgttgatgagtttcctttctgtgtccatctggttagttgggagaaggaaaacgtttctagtgaggccctggaagctgctcgtatt

SEQ ID NO: 159154 - DNA, 266 bp, Glycine max
caaataaagcacagaacagttgaagtgaatggcataaaaatgcatgttgcagagaaaggagagggtccagtggtgttgttcctccacggcttccctgagctctggtactcatggcgccatcagattctctctctcagctccctcggctaccgcgccgtcgctcccgatctccgtggctacggtgacaccgaagcaccaccttcaatcagcagctacaactgcttccacatagtgggtgatctcgttgcgcttattgactctctggg

SEQ ID NO: 159155 - DNA, 267 bp, Glycine max
gaaaacagcatcgaacccgtcgtagcagaaaaacttgtcaccatggtttcttccgacaaggatccacgagaggatgtccttcaagcctggtacatggatgatagtgatgaagatcaaagactcccccaccacaaagaacccaaggagtttgtctcgttggaccaacttgctgaacttggagtccttagctggaaactagatgctgataaccatgaaaatgatccagagctgaagaagattcgtgaagagcgtggttacacctacatg

SEQ ID NO: 159156 - DNA, 262 bp, Glycine max
gtggctatgtgcctaatcgtccaccactgatgagaaggttaataccagaagagggtgatccagaatatgcaagtttccatgctgaccctcagaagtattttctgaatgcattgcctagcttgctgcaagccacaaagttcatggctgtggttgacacactctccactcactcacctgatgaggagtacttgggggagaggcaacaaccttcaatttggtctggagacgccgagatcgtcgaggcgttctacgatttctccgc

SEQ ID NO: 159157 - DNA, 263 bp, Glycine max
cacagttatccattcacatttcacagttagcacttagcagactctgctgcagtgaggtgaggggaggtttgtttgttgtttcgtttttcctttcctttccgccagaatccgttgagaatggcgttgccggtagtcgtcgatgcagagtacctcaaggaggtcgacaaggctcgccgcgatctccgcgcactcatcgctaacaggaactgcgctcctctcatgctccgattagcctggcacgatgccggaacttacgatgctaa

SEQ ID NO: 159158 - DNA, 264 bp, Glycine max
attcctttgtaaaccttagggagtacagacaggaggttctccgtctccttgttaaagtatttcagaagcttccttcaccagattatctgagcatttgccaatgtcttatgttcttggatgagtcagagggtgttgcaagcatactagagaagcttttacattctggaaacaaagatgatgcacttttggcatttcagatagcttttgatctggtagagaatgatcaccaagcttttcttctaaatgtcagagatcgccttgcac

SEQ ID NO: 159159 - DNA, 271 bp, Glycine max
ggaagatcttccggcaagtgttctggtgcttagtggtgttccttttcatcgtgctggtcacaattcttttgatatgggcaatccttagacccaccaaacccaccttcacgctccaagacgtcaccgtctacgccttcaacgccaccgtggcgaacttcctcacttcgagttttcaggtcacgctcatctcgcgtaacccgaacgaccgcatcggtgtttactatgatcgcctcgaaaccttcgtgacctaccggagccagcaggtcacgta

SEQ ID NO: 159160 - DNA, 268 bp, Glycine max
agagaatgatgatgaagtctgctatgtgtgcagtggtggttgtagcacttcttcttctggcggaggtggggcccatggctgaggctgtgacatgcaccccaacagagttgagtccgtgtcttccagcaatcacttccggtgctaaaccttccaatgcttgttgcacgaagctgaagcagcaaaaaccatgcttatgtggctacctcaaaaacgctagcttgaagcagtatgttaactctcctaatgcccgaaaaaccgttgcttcttg

SEQ ID NO: 159161 - DNA, 261 bp, Glycine max
gttggttgaataaaaataaaagtacttgtagtgatggtagtgccaataatgaatcttcttcaagtggaatagttggagaaagggataatcatcttgatcatgaaattgcacagctcacaaaacttaggtcaagtcctcatgagcttttgggtcgtgttgttcctggtaagatgaggttacctgcatctactgtgagaatgctggttggtagagaaggtaattattctggaagagggagattttcatcagcagatgggtgtc

SEQ ID NO: 159162 - DNA, 262 bp, Glycine max
aaacacactgctgaaaaccctagctataaatttctacacccaccgacggcagaaaccctagtagtagttttgaaagggaaggaaagatgcagatattcgtgaaaaccctaaccgggaagacaatcacccttgaggtggagtcaagcgacaccattgacaatgtcaaagccaagattcaggacaaagaagggattcctccggatcagcagaggttgatcttcgccgggaaacagctggaggatggccgtaccctcgccgatta

SEQ ID NO: 159163 - DNA, 268 bp, Glycine max
cagaaacgtatgtcggttcgcgatcttgccagcaaatttgagaagggtttggcagctgctgctaagttgtctgaagaggctagactcagagaagcagcttctctggaaaagcatgttcttttgaagaagcttcgagatgcactgcaatccttaaaagggagagtggcaggaagaaacaaggatgatgtagcggaagctattgctatggttgaagctctagcagttcaattgactcaaagggaaggggaattaatacaagagaagtctg

SEQ ID NO: 159164 - DNA, 248 bp, Glycine max
caaacattagctatccctacaatactcctggtgatattcatatgggtggtacaaccaaagcaacgtcatgggaagattgcaccaggtcccaaggcgttgccaattattggtaacctccacatgctagggaaactcccgcaccgcacccttcaaacctttgcaagaagatatggacccataatgtccttgaagctagggcaagtccaagccatagtggtttcctcccctgaaaccgctgaactattcct

SEQ ID NO: 159165 - DNA, 265 bp, Glycine max
ctctggccctgttgttgccatgatctgggatggcaagaatgttgttacaactggccgaaagattatgggagccacaaacccagctcaatctgagcctggaactatccgtggtgactttgccattgacattggaaggaatgttatccatggaagtgatgcagttgaaagtgctaacaacgaaattgcattgtggttccctgagggccctgctaactggcaaagctcccaacactcttggatctatgagtaaatcatatgcctcaag

SEQ ID NO: 159166 - DNA, 203 bp, Glycine max
gcataattgaatcgaattgaggagaatgacgatgaccaccatacaatcgacgccaggaagctcagggtatttggatttgtttcctgagcgcaaaatgtcatttttcaagagtccttatattctgggactcagtgctgtggctggcattggaggcatgctttttggctacgacacaggtgtgatatcaggagcacttctatata

SEQ ID NO: 159167 - DNA, 256 bp, Glycine max
gccaaggtaggttaaacactcttcttcatcgtcgtcgcaatgggacgtgtgatccgtgcgcagcgtaagggagcaggctcggtcttcaagtcccacacgcaccaccgcaagggccctgcccgcttccggagcctggatttcggagagcgcaacggctacctgaagggtgtcgtcactgacgtcatccacgatcctggccgtggcgcgcctctcgctaaggtcgccttccgccacccgttccgctacaagaagcaga

SEQ ID NO: 159168 - DNA, 254 bp, Glycine max
aattcttttgaagagttggagccagaatatgccaagggttacaaaaaagcaagaaatggaagagtttggtgcattggtcctgtttcactcagcaacaaggatgaactagacaaggctgagagagggaacaaggcttcaattgatgagcatttttgcttgaagtggcttgattcgcagaaaccgaaaggtgtgatctatgtgtgccttggaagcatgtgtaacataacatcacttcagttaatagagcttggttt

SEQ ID NO: 159169 - DNA, 208 bp, Glycine max
ggacacacgctcatggaggttggacccgacggtgttgccgtcatcaccatcgtcaaccctcccgttaattcactttcctttgatgtgttgcgcagtttaaaggagagttttgatcaggcgatacagagagatgatgtcaaggcaattgttgttacaggtgcaaagggaaaattttctggaggttttgatatttctgcatttggtggta

SEQ ID NO: 159170 - DNA, 241 bp, Glycine max
gttgaagatgatagcagcaccaaggaccttggttgggatgaacactggatcttctgggtgggaccattcatcggtgcagctcttgcagcactctaccaccaggtcgtaatcagggccattcccttcaagtccaagtgattcaatcaaacggttcatgcttaatcaagttgggaacaacaacaacaacaagaatcaagccaatgtttgtggggtttggtttcatttcgatgagatgatctgt

SEQ ID NO: 159171 - DNA, 249 bp, Glycine max
cagttgaggagcaacgattatgaatccatgtgagactatgtgggctaggagctttgagtagtagaatatgcaggaaaagttgcggattggatagctgaggagcttcaacatttgcttccagagaacgttgaagccaatttggacaaactggttctatcaggtcacagtaggggtgggaaaactgtatttgctgtggctcttggtcatgcaaaaactaatctcaagttttcagcacttgtaggcacatct

SEQ ID NO: 159172 - DNA, 250 bp, Glycine max
gtaagaaagcccgctagttattttagtgcagttgaacctccatacagactatatggttgtcagagcaatgtaatgtactcacggcctcaatcgtttgatggagttcctccgttactctctcggcgaatacttgaaactcttacctatcttgctcgccatcatccatttgtggcaaaaattttgcttcagtttaggctgcatcctcctgcattaagagatccagataatggctggtgttgcacctggcaaa

SEQ ID NO: 159173 - DNA, 248 bp, Glycine max
gaaccatccaatgctgtaaattactcccttggtactgtatctgggccccaggatacagggataactccagagaaccgaacatgcaatcctaagagatgtagattttttggctgtacgaaaggagctcgaggtgcttcggggctttgtatcgggcatggtggtggacagagatgtcagaaacctggatgcaacaaaggtgctgagagccgaactgcttattgtaaggcccatggtggatggaagaggtg

SEQ ID NO: 159174 - DNA, 245 bp, Glycine max
aaaaaaggacattcattcatctatggctacccttattgctcccagcaaccactctccccaagaagatgctgaagctctcagaaaggcttttgaaggatggggaactgatgagaacactgtcatagtaattttgggtcatagaactgtgtatcagaggcagcaaatcagaagagtttatgaggaaatttaccaggaggatcttgtgaagcgcctagagtctgagatcaaaggagactttgagaaag

SEQ ID NO: 159175 - DNA, 244 bp, Glycine max
gtcaatatacaatttctgatctctgcgttccaatctaattgatcaatatgccttcaaacgatggtgtagttatcgtggtcatgggtgtcagcggtgctggaaaaaccacaataggtcggaagctggaaaaagagtcgaaatataagtatcttgatgctgatgattttcactcagaatcaaacaaagaaaagatgcgtatgggaatcccacttacagatgaagatcggatgccatggtttgaatc

SEQ ID NO: 159176 - DNA, 250 bp, Glycine max
ttccctacctctcccttcaagatgcagatcttcgtcaagaccctcaccggcaagaccatcacccttgaggtggaaagctctgacaccatcgacaacgtcaaggccaagatccaggacaaggaaggaatccccccggaccagcaacgtctcattttcgccggaaagcaacttgaggacggccgtacccttgctgactacaacattcagaaggagagtactcttcacctcgtcctccgtctccgtggtggca

SEQ ID NO: 159177 - DNA, 250 bp, Glycine max
tatatgcagagtctcttgcacgctttcaaggagggtcacttacatatatcctttgtatggtttaggagagcttccccaggcatttgcacggcttagtgctgtttatggtgggacatatatgttgaataagcctgagtgcaaggtagaatttgatgaggaaggaaaggttgttggtgtcacatctgaaggggaaactgcaaagtgcaaaaaagttgtttgtgatccatcatatttgcccggcaaggtgagg

SEQ ID NO: 159178 - DNA, 250 bp, Glycine max
cgagaaagagaggaaattggcgtggcgtggcgtgatcggggcacagtctgaatctgaaatccatcttcaaaatctcaattcgatataggagggagctgtgccctgccctgacgttaaaaaaatgtcgctgaatatgaaaaccctaacccaagcattggcgaagaccgcggcggtgatcgagaagacagtgcatacgacggtgcaggatgtgacaggcccgaaggcacttcaggactgagagctgctcgac

SEQ ID NO: 159179 - DNA, 248 bp, Glycine max
ggtgtcttagctcaaacctcacctcaataatctttcgtgctagctagcttaatcatattccaattccaacagaaccaaattctgctagctagctagtacgtcaaaggaaataaaataatatggcattcagcgggacccaacagaaatgcaaggcttgcgacaaaactgttcacttggtcgaaggtttatctgtcgatggggctgcttatcacaagaattgcttcagatgcagccattgcaatggcctt

SEQ ID NO: 159180 - DNA, 195 bp, Glycine max
gcccaaggtcttgtacatttgggaaagggcttattaacacttaatccatatcattctgatcgcttcttactgtcaccgacagcacttgctggattaattaccatgttgcacgcatgcctagacatgaaagctattgtgttgggaaaatatcactatgttctctacttcctcgttttggcaatgcagccagggatg

SEQ ID NO: 159181 - DNA, 249 bp, Glycine max
ccaagatctcttttggtgctaaggatgttgatgtgacggaatggaaaggggacattctggcagtgggtgttacggaaaaagatttggctagagatgcaaactcgaagtttgagaatgtgattttgagcaagattgactcaaagttgggtggtttattagctgaagcctcttctgaagaggatttctctggcaaagttggtcagtcaactgttcttagaattacaggacttggatcaaaaagggttggat

SEQ ID NO: 159182 - DNA, 246 bp, Glycine max
gtttatttgaaattaacaagtagcaaagatgtttggaatcatcggaggaaacaagggtcacaagataaaggggaacttggtgattatgcgaaagaatgtgttggatatcaacagcattaccagtgttaagggtgtcatcggaaccggcattaacatcattggaggagtcgtcgacaccgttactgctttggcgtcccacatctccatccagctcattagtgccaccaaggctgatggacatgggaa

SEQ ID NO: 159183 - DNA, 244 bp, Glycine max
gaagagccataatgcgacttttggaggacagcatggctgagaagatgcttgccagagagatcaaggagggcgactctgttatagtggatgttgattctgatggtaatgtgattgtgctcaatggtagcagcggagcccccgaatccttgccagagacgcttcctgtataatgcggttaatttgctaatactatgtacttaatttgtttaaaccatagtcatagtatgtcttacttgtcaatgta

SEQ ID NO: 159184 - DNA, 246 bp, Glycine max
atccaaaaggcatttggcacagcaggatcacagtatgttcaatgggctgcaaaaatggcggtgggccttaacacaggcgttccatgggttatgtgcaagcaaactgatgctcctgatcctgtgatcaacacatgcaacggcatgagatgcggagaaacttttactggaccaaattcccccaataaacctgccttgtggactgagaactggacatctttctatcacagtgtatggtggactgccata

SEQ ID NO: 159185 - DNA, 247 bp, Glycine max
aaaataatcaaagctttgtgtgatatggctaaagataatgcacatgttcctatgctttcccgcactcatggacagccagcttcaccaactactttgggaaaggaaatggcgatctttgctgcaagattaagcagagaaaggaaggatctgtctcaggttgagatagtggggaaatttgctggtgcggttggaaattacaatgcacatattgttgcatatcctgatgttaactggcctcacattgcag

SEQ ID NO: 159186 - DNA, 242 bp, Glycine max
gcattagtgaacctcgtcttgtagccagaaagttcttggccagacctcagcatgagggtgttggagccgttgttagaagaagcatagggagatttgaactcaagtactttgatcctttccttgtcttggatgaattctcagtgactgctcctgctgggtttcctgatcatccacatagaggatttgagacggtcacatacatgttgcagggagctgtaacgcacgaagattttgaaggacat

SEQ ID NO: 159187 - DNA, 244 bp, Glycine max
gtggtgccggagagaaacccattccacttggtgagaacgttctgcagaagcatgctgcattctttgacttgaataaagatggtgtcatctacccatgtgagacttttaaagggttgcgtgaaatcgggactggggttttgctgtccgttggaggtgctattttcatcaatgtgtttctcagtcagagtactcgtcccggaaagtttccatctatactttttccaattgaaattaaaaatatcca

SEQ ID NO: 159188 - DNA, 247 bp, Glycine max
cgccgctttgtctgcagaggtccaagtgcccgaaactttcgacgacacggaggaggacgacggtgctgatggctccaccgccaccaacaccgtccccaccaccaagcctaagaaaggcaaggccgcattgcctctcaagagggacaggacgagatctaagaggttcttggaaattcaacaattgagggagcgtaagaaagagtatgacttgaagacagcaatatctttggttaaagaaacagctaaa

SEQ ID NO: 159189 - DNA, 122 bp, Glycine max
ggcacctgagctgctattgagcaaggggtatgatggagcagctgctgatgtttggtcatgtggggtgatcctttttgaattacttgcaggctatttaccatttaacgaccggaacttgatga

SEQ ID NO: 159190 - DNA, 244 bp, Glycine max
ctagaaacagtgtgatgaaaatgaaggtccttgttttcttcgttgctacaattttggtagcatggcaatgccatgcgtacgatatgttccctctccgaatgaacactggctatggtgcccgtactccggaggtgaaatgcgcaagttggaggcttgctgtggaagcacacaacatctttggctttgagaccattcctgaagagtgcgttgaagcaacaaaggaatacatccatggcgaacaata

SEQ ID NO: 159191 - DNA, 243 bp, Glycine max
tatagcccaagccctatacaaccaaaccctaacacacacccatttgattcagtttccatggctagcctcaaggttgcatttttggctgcagtgctctgcatggttgtggtgagtgcacccatggcacatgcagctatcacgtgcgggcaggtgacgaatagcctgatcaattgcatcggttacctccagaacggaggaacgccgccgtcgggatgctgcaacggagtgaagagcctcaatgcc

SEQ ID NO: 159192 - DNA, 245 bp, Glycine max
tccaattgaaattttaaaaatgactgggataaacttaagaattcaattattgaaattgaataagtaaacaatttaattggattggtcgaatggtatcaaaaaaatggagtactaactcccatttcttatttattattgaattaaccgatcaacttgctttgttatcgaacatttctttttgatttcaaaaattttccggaaaaaatttgaatctatttttatatgcgaatcaatcctactacttc

SEQ ID NO: 159193 - DNA, 243 bp, Glycine max
agaagatggagatgtatcagatctggagcaggagaatagcgttgggagcgttcgcgtttgttctgcttttcctatcggcctcagcagacgacgtcgttgtgctctctgaagataacttcgagaaggaagttggtcaggacagaggagctctcgttgagttctatgctccttggtgtggacactgcaaaaagcttgctccagaatatgaaaagcttggtagcagcttcaagaaagccaaatctg

SEQ ID NO: 159194 - DNA, 249 bp, Glycine max
catcatcatggccacctctgctattcagcaatcagcattcgcaggtcaaactgctctgaagcagctcaatgagttggtccgcaagaccggtggcgccggcaaaggtcgcaccaacatgcgccgtaccgtcaagagtgctcctcagagcatttggtatggccctgatcgtcccaagtacctgggtccattctcagagcagattccgtcatacctgaccggagaattccccggtgactacggatgggacac

SEQ ID NO: 159195 - DNA, 249 bp, Glycine max
ctgaaaaggccgtggaattggtggatgagaacactatttgtgttgctgctatccttggttccacactaaatggagagtttgaagatgtcaaacgcttaaatgatctcctaattgaaaagaacaaaataactgggtgggacactcctattcatgttgatgcagccagcggtgggttcatagccccatttatttacccagagcttgagtgggacttccggttacaactagtgaagagcatcaatgttagtg

SEQ ID NO: 159196 - DNA, 243 bp, Glycine max
ctgatttacaaaaggttacaaacttctcttgcataaagaatggcatcagcaacaataaggaatgcagttgtcacgggagcaaacaaagggataggatttggaatatgcaagcaattggtttctaatggcatcacagtggtgctaacagcaagggatgagaaaaggggtcttgaagctgttgaaaagctgaaagagtttggtgtgtctgatcaagtggtgtttcatcagcttgatgtgactgac

SEQ ID NO: 159197 - DNA, 242 bp, Glycine max
gaaagggcttcgcataagcgaggaaagagtggttgttgattcatctcctgagatgcctgttgattcaatccaggtacagatatccagtgtggactccaaatttgcgagtgctgtatcagagagtggtcagatcagcattgacggaagagtgaagtttggagaaccccacctgacatgtgtggggtcttcctatgtggatgtgagcttataagggaatctaatcctgtgccggcaggtggatc

SEQ ID NO: 159198 - DNA, 244 bp, Glycine max
tcacaactgagagaaatagcaaatgggttggagaagagtggccacagtttcttatgggtagtgaagaggccaacacaagacgaaaaaacaaagcagattcacgacacaacaacaacaacaacaacaatggatttcgatttgagttcggtgttgccaagtgggttcatcgagagaaccaaggacaggggcctggtggtgagctcgtgggccccacaagtggaggtgctgagccgcggctcggtgg

SEQ ID NO: 159199 - DNA, 244 bp, Glycine max
gagcatgacctctttgaatctttcttccaacaatcttcagggcgcaattccaatagaactgtcgcggattggcaatttggatacattggatatttcaaacaataacttagttggttccatcccttcttcccttggtgacttggaacatcttctgaagttgaatctaagcagaaacaatttaacaggaattattccagcagaatttggaaatcttagaagtgttatggaaattgatctttcaaat

SEQ ID NO: 159200 - DNA, 246 bp, Glycine max
gtgagttgcaggcagtgtcatctctcctttgacgacaagatgagcatcccaattccccatcggcagttattcatagacggagactggaaagtccccgtcctcaagaatcggattcccatcatcaacccttccacccaacacatcatccgggatatcccagcagctactaaggaagacgttgatctcgctgtcgctgccgccaaagctgccctctcccgcaacaagggcgccgattgggcctccgct

SEQ ID NO: 159201 - DNA, 240 bp, Glycine max
gagaagcgtgagatatatgatcagtatggtgaagatgcgcttaaggaaggaatgggtggtggcggtggccatgatccgtttgatatcttttcatctttctttggaggtggaagtagtcgaggtaggaggcagaggcgcggagaagatgtggttcaccctctcaaggtctctctggaggacctttatctcgggacttctaagaagctctccctctccagaaatgtcatatgctccaagtgc

SEQ ID NO: 159202 - DNA, 241 bp, Glycine max
gctgcccactggacaggagacaatgctgctacatggaatgatttggcatactcaatccctgcgatattaaattctggaatctttggaattccaatggttggagcagatatatgtggtttcggaggaaatacaactgaagaactttgccggcgctggatccagttgggggctttttaccccttcgcaagagatcattcagacaagaactccaataggcaagagctttatctttgggactccg

SEQ ID NO: 159203 - DNA, 244 bp, Glycine max
gtcaattcctgaatgccagaaaaagcttccaggtgcttttactggtggggagcctttacctgaggctgtactgtggcttctattgacaggaaagataccaagcaaagcgcaagttgactcattatccaaggaattgcgaagtcgtgcaactatcccagattatgcttataaggcaattgatgcattgcctgtttctgctcatccaatgactcaattcacaactggtgtcatggcccttcaggtg

SEQ ID NO: 159204 - DNA, 241 bp, Glycine max
atcggagcgaagttctgggaggtggtgtgcgcggagacgggatcgattccacggggaggtaccagggggacaacgagttgcaactcgagcgagtcaacgtctattacaatgaagcgagttgcggaaggttcgtgccgagggcggtgctcatggatctagagccagggaccatggacagcgtcagatctggtccctacggtcagattttccgacctgataacttcgtcttcggccagtccgg

SEQ ID NO: 159205 - DNA, 240 bp, Glycine max
gtgttgtgtgtcttcccttggtgttccagtttttatttgcagccgccatgtgcggaatcctcgcagtgttgggttgcgtcgacaactctcagaccaagcgcgctcgcatcatcgaattgtctcgcaggttgcggcatagaggtcctgattggagtggcatacattgctatgaggattgttaccttgctcatcaacgccttgctattgttgaccctacttcgggggatcaactttgtacaa

SEQ ID NO: 159206 - DNA, 243 bp, Glycine max
gcgttggtactgaattccttaatcgagtccagtattcataatctttgagttgatatgggcaactggagcagtgaacgtcatcaaaccactcaacaaagtgatctcggtgcagttttgcgtgatggaaaagaagtacttcttcaagcattcaactgggagtccaacaaatacaactggtggaataatttagaaggcaaagtttctgacatagctaaagcaggatttacttcagtctggttgcca

SEQ ID NO: 159207 - DNA, 244 bp, Glycine max
cttttctaatgcccattgaagatgtattttcaattcagggacgaggaacagtagccactggacgtgttgaacaagggatcattaaagttggtgatgaagtggaggtgttgggtctaatgcagggtggtcctctgaaaacaacagtaactggagttgagatgttcaagaagattttggatcaaggacaagctggtgataacgttggtcttcttctccgtggtctgaagcgtgaagatattcaacg

SEQ ID NO: 159208 - DNA, 329 bp, Glycine max
gcaaaggattctacccgccgctcgatgggaattgcgcttcaaggcgtctcgtagggctaatccgcctcacgagggtcaccaacggcacgtgcctttggggggccgaggcccctactgctggtcggcaaacggacggcgggcgcacgcgtcgcttctagcccggattctgacttagaggcgttcagtcataatccaacgcacggtagcttcgcgccactggcttttcaaccaagcgcgatgaccaattgtgcgaatcaacggttcctctcgtactaggttgaattactattgcgacactgtcatcagtagggtaaaactaactgctcacg

SEQ ID NO: 159209 - DNA, 326 bp, Glycine max
ggctcgaggccgagtgttacattccttttgaaattgacaccacgcaagatggtggaagtgatgaagatagttgtctgcaaggtggagtctacactgttgatggggatgagactgtgccagttctaagttcaggctacatgtgtgctaaaggctggcgcggaaaaacaagattcaacccgtctggtatgcgcacctacgttagagaatatgatcattctcctccagccaaccttctagagggaaggggcacacaaagtggtgctcatgttgacatcatgggaaactttgcattgattgaggatgttataagagtggctgcggagcca

SEQ ID NO: 159210 - DNA, 295 bp, Glycine max
gctacaagcccaacaaacttggttttaattggtataggcgtgccaaggtcttgttaattttgagcgttaagtgctgcaactaatcagatcccaagaccttggcctaccttgccatacagaaaaaaaaaaagcaaaaaaaaagccaaggtttggagccaacaaaaataaacacaaagcacaagtcatggaaagaataatggttggaagtgcaacaaaggttgcttacaccctcttggccactttcgccattgtcattccatgccttgaggctggcattgccgagtttgacgatttt

SEQ ID NO: 159211 - DNA, 287 bp, Glycine max
aagtctcaatttcgaaccccatttcttgtttctttttctcttttgttattcatcttcaacctcaccccttcatacgcactctatggagcatccacacccgtgcttcaactcactccctctaacttcaagtccaaggttctgaattcaaatggagttgttcttgttgaattctttgctccatggtgtggacactgtcaggctctgactcctatatgggagaaggcagctactgtgttgaagggtgttgttactgtggcagcaattgatgctgatgctcacccgtcttt

SEQ ID NO: 159212 - DNA, 309 bp, Glycine max
tgcgaaaagaagagagtgcagcgccaaggcaatgggaaggagcactttggctttggttctcgcgattctgatctctttgcagggaaccccccacgttagatccgatgcctccgatcatcgttacaaggacggagactccgttcctctttacgccaacaaagtcggtccctttcacaaccccagtgaaacgtatcggtactttgacctgccattctgtgtaacaggtcatgagaaagataagactgatgccctcggtgaagtgttaaatggcgatcgccttgttagtgctccttatgaacttagttcaag

SEQ ID NO: 159213 - DNA, 311 bp, Glycine max
gcaaattctggtgcccgtttaggtgtagctgaagaagtcaaatcctgtttcagagttggttggtctgaggaatctaatcctgagaatggctttcagtatgtatatgtaacacctgaggataatgctcggattggatcatcggtgatagcacatgagttaaagcttgagagtggagaaaccagatgggttatagataccattgttggcaaggaggatggccttcgcgttgaaaacttgagtggaagtggggctattgctggtgcttattcaagggcatacaaggaaacttttacactgacatatggactggt

SEQ ID NO: 159214 - DNA, 314 bp, Glycine max
gttttcttcatatcttccttgtcactgcccgtgtgtcgccgccatggccaccgtcaccacccaagcctccgccgcaattttccggccatgtacctcgaaatcgaggtttttgaccggctcttccggtaaacttaaccgggaagtgactatgcggccaatggggtgccctccttctgcctctttcaaggttgaagccaagaagggagagtggttacctggcttggcgtccccaacttacctcaatggcactcttcctggtgacaatggatttgaccctctggggctagctgaggacccagagaactgaggtggta

SEQ ID NO: 159215 - DNA, 305 bp, Glycine max
cagcaatagagtttctaagttcatttcttgtgctgatgttcttctaccctttttgccactcactcgacaacaccataaccataaaccaccccattagagacggcgacgttttggtctccaacggtttaggaaactttgcgctcggtttcttcagcccgcgaaactccacaaaccgttacgttgggatttggtacaacaaaatctcggaacaaacggttgtgtgggttgccaacagagacactcctcttaacgacacttccggtgttctcaaaataagcaacaacggaaaccttgtactccacgac

SEQ ID NO: 159216 - DNA, 292 bp, Glycine max
agaaaaaatgggttcttcttcttctatgtggacggtgtgtgtgattttggcatcactggcctctgcagcactctgtgccaacccacgcaggccagtggatgtacaatttggccgaaactacgtgcccacatgggcctttgatcacatcaaatatttcaatggtggttctgacattcagcttcatcttgacaagtacactggtactggcttccagtccaaagggtcttacttgtttggtcacttcagcatgtacataaagatggttcctggagattctgctggcacagtcact

SEQ ID NO: 159217 - DNA, 313 bp, Glycine max
accctactcattctccatacctcaacgaagaggttaaagagacggcaacactttgctgtccgccttgaccgagcagagcttcgtcttggccctcgattttgccctaaagtactctcagtcacaacagacaccgtcgtcgtcgtcgtcgtcatcaatggcaccgaagcagaccaaggctgagaagaagatcgcttacgatgcgaagtggtgcgacctaatggaggagtacggccagatcctcgttgtgaactccgataacgtgggatcgaaccagctccagaacattcgcaagggtctccgtggcactccgtcg

SEQ ID NO: 159218 - DNA, 315 bp, Glycine max
ctccacccacccagcatatctctctattcctatttattagcacccctcacattaccttgtgtcaccaactactttgactcctttaccataccattacaataattatcaaacctaaccagtaaaaatggtgaccgtggaggaaatccgcaacgctcagcgttcccatggacccgccaccatcttggccttcggcaccgccacgccgtccaactgcgtctcccaagccgattaccctgactactacttccgcattaccaacagcgaacacatgactgatctcaaagaaaagttcaagcgcatgtgtgaaaagtccat

SEQ ID NO: 159219 - DNA, 318 bp, Glycine max
tgtgtatccaattccaaattcacccgtaaaataccttcctttgtctcaccagccatatgtgtatgatggaaggagatgagaatattcaagcatcaacaaagggaaaaaatgtggaaagcttcaccagcttggaggcaccaaggaagaaaagcaagaagatagaaaacaagaggaggtttagtgatgaacagataagatcactagaatgcatatttgagtcagagtcaaagcttgagccaaggaagaagatgcaactggcaagagtcttgggccttcagcctcgccaagttgccatatggttccaaaacagaagggcaa

SEQ ID NO: 159220 - DNA, 290 bp, Glycine max
catgcttcacggactccgtggccttgaaagctgtcatagagcttcgtatagcggacatactagaccgttatggtaaaccactatccttgtcgcaaattgtggagaacatagaagacgcaccctccccagatgcctctcttctccagagagtcctgagagtgatggtgcgcagaaagatcttcagtgcacaagaatcagagacaggagaaaccctcttcggcttgacacgagcctcgaagtggatccttcgcgacacgaaaatgaccctagcacccatgttgctgctggag

SEQ ID NO: 159221 - DNA, 310 bp, Glycine max
tctccatccaacatcgaaacgaggtcgttttgtgttccgccgaaggaccggaggttgtagcaggctagcagctatggatttggcatccaatctcggtggcaagattgacaaagccgaagttctctctgccgttcagaagtatgagaagtatcatgtttgctatggaggtcaagaggaagagaggaaagctaattataccgatatggttaataaatactacgatcttgttaccagcttttatgagtttggctggggggaatctttccattttgcacccagatggaaaggggaatctcttcgaagagcatca

SEQ ID NO: 159222 - DNA, 308 bp, Glycine max
ccagcttagccttcttcgggaatcgtctcttcgcgcttggcgaatccgacctcccttacgtcgttaacgtaacccctgacggcgacatcgaaaccctcggccgtcacgactttgacggaaaactcacgttcagcatgacggcgcaccctaagatagaccccgacacagcggagtgcttcgccttccgttacggccccgtgccaccgttcctcacctgacttccgtttcgacggtaacggcaaaaaacacgaggacgttcctattttctccatgctaacaccttcgttcctccacgatttcgcattacg

SEQ ID NO: 159223 - DNA, 311 bp, Glycine max
gaaaagcaagtagctaaggaaaacaaaaacatcatcacagaaactcacaaaggaaaaacaaacaaacaaacaaaatgtcttctccaagcaagcggcgagaaatggacttgatgaaactgatgatgagtgactacaaggtggagatgattaatgatggaatgcaagagttttatgtgcacttccatggacccaatgagagtaaattctcctttgtttttatctttgttacatgttttgaagctttttgtgaattgttttttgtgaaaaaagttgggttgctattgtgggtatgtggtaattaacatatattg

SEQ ID NO: 159224 - DNA, 271 bp, Glycine max
acaacccaaagatgttagatagaaagtggctttctactgctttgaatgttagaagccaaggattaggaagtgaaacaatagtctttgctcatggctatggaacagaccaatccatctgggacaagatcactccttcctttgctgaaaactaccgggttgtgctgtttgattggcctttttctggagctgtgaaggatccaagcctctatgaccctttgaagtatacctccttggaagcttttgcagatgagtttatcactcttatggatca

SEQ ID NO: 159225 - DNA, 322 bp, Glycine max
  unsure (1)..(322): unsure at all n locations
ccctccaccatgcaacactgcatgcagaatgcttccaagtatggataatagttgcccatgtatgtcggatattacgcagatcattaggaaagctctcattccatgctattgtttgtattttccttgcatcttctgtgtctccccaaatgaaagagcgacattgcacactaacacacaggttgtagcaatggcgagcgctcccactccacgcgaagagttcgtgtacatggcgaagctggcggagcaggccgagcgctacgaggagatggtggagttcatggagaaggtctccgcctccgccgagagcgangagtgaccgtgg

SEQ ID NO: 159226 - DNA, 242 bp, Glycine max
ggcttatcacatcacaatttgtgcattgcctcgtgtcctttttcttctctgcttgccagaaatcttacacacacaggtatctagcaaatgggttctcaccagcaagaaccatggctattggagaatgggaaaccgagggtgttgaccaaggagaataggcatggccgttctgcacacagcatgtcctccacgtctttgcgcaagaagtctagccgatctcttgtgctccaagcttccatgtg

SEQ ID NO: 159227 - DNA, 294 bp, Glycine max
cttagaacgttatcccattctatttccaatatagctacgtttgtactaaaacatcaacggggtttctgtagaaatcctatcgtactcttgtgcattgtattagaatatatgcagttcatttgcctcaataatcttctcagcattgccgttgtaaattgatttgtatgtattattccaagaatagaactaattctctatttttggtttaaataatatttgtatttcctttcaaaaaaaaaaaaaaaaaaaaaaaaaaaaacaaaaaaaaaaaaaaaaaaaagagggggcccccca

SEQ ID NO: 159228 - DNA, 311 bp, Glycine max
ctgtgaggcttcaatttccaattagggtttcgcttagagtaaccaattaccatgggagtcttcacctttgtcgttcgcaaatccggcgccgaatggagcgccaagcaacattccggcgacatcgaggcctccgccgactccacctacgatctccaaaggaagctcgtgcaagccgctctcgccgttgattcctccggtggagtccagtcctccttctctcccgtgtctcctacctccgctgtgttccaggtgatagtgggtggtgctgtattcgttggaggtggcggtggtgctgttgcagtgcacctgca

SEQ ID NO: 159229 - DNA, 308 bp, Glycine max
attagaaaacaaagcctttccgtttcatctcgaattgtgaattgaatattcaatgactaaaaaaatggaataaaaaaacgaagaattcaaagaatgattccaaattgaaggtaggataagaacaaaggttctacatattcacaaaaaaaaactatgtatgtaggtagagacgaaaaaataaatctcgaagtaattcgtagagttcaataactattattattttcaattcggaattcttattaattactttaaaccgaataaatcttgataattgaaaaattgagtcataatttaatggttggttatac

SEQ ID NO: 159230 - DNA, 307 bp, Glycine max
ctcttattagcgacggccattctcgccgttgtgtgctccgccgtgagcggttgctcgccatcggatggggcggcgctgctggcgttccggaaggcgctgagcgagccctaccttggcctcttcaactcgtggacgggctccaactgctgcctcgactggtacggcatcagctgcgacgccaccaccggccgcgtcaccgacatcaacctccgcggggagtccgaagaccccatcttcgagaaagccggtcgctccggctacatgaccggaaaactctcagaggcgatctgcggcatcgcaccctcac

SEQ ID NO: 159231 - DNA, 308 bp, Glycine max
gtggagtgtgcagaagagcgtcgcagtcgcaaccctaatcagaagaagcgcagttgcaagcgagtgacagccaccagccatgggtcgtatgcacagccgcggtaagggtatatcctcttctgctttgccctacaaaaggacacctcctagctggctcaagatctcttcgcaagatgtcgaagaaaatatctgcaagtttgcgaagaaaggtttgaccccgtctcagattggtgtcattctcagagattctcacggtattgctcaggtcaatagcgtcactggcagcaaaatccttcgctcctcaaagc

SEQ ID NO: 159232 - DNA, 271 bp, Glycine max
attagattatctcccactgctgcatcacctatatatcttataaggtgtatgggaccatagtagtgagggctgtgtctttctctttttttcctacttgtcatttatatttatgagcgagagaaatagtgcgtgtatctggttgctaattcgagtgctattagtctgtggtttcgttggtttgtaacccctctgctttggttatgctggattgtatattatccttaaagaaatgaaagattaaattatcaaaaaaaaaaaaaaaaagggcggc

SEQ ID NO: 159233 - DNA, 186 bp, Glycine max
ctcattaattgcaagaatggcacttcgttgcttggtgatgtccctttctgttctcttcactcttggtcttgcgagagaaagccatgccagagacgaagatttttggcatgctgtttggccaaacactcccattccaagttcattgcgagatcttctagagcctggccctgcaagtgttgaaatcga

SEQ ID NO: 159234 - DNA, 309 bp, Glycine max
gaagcaccagcctcaatgtacttcttaagctcatggcggttgagtctcttgtgtttgctcccttggtttgctacacatggtggcctactcttcaagatctaaaggatttgatagaaaaagagtatcgtccatcatttttctacaacgacagaacaaggaaaagccgtccctttaccaatgccttctcgtttttgtgttagtctttaactcatctgtcatgtcaattccattgtttttgaaaccttttcctcccccaccttgaaacaaagtatattttgtctcatgtagttttaagacaattgattaggc

SEQ ID NO: 159235 - DNA, 310 bp, Glycine max
gcaagacctacttggaagtgaaggggacaggaacagcaaaccagtgtccaacaattgatggtggattggagtcatttgccttcaagcaagggaaatacaatgccaagaagttctgccttgagccaacttcattcacagtgaaggcagagggtgtggccaagaacgctccccctgagttccaaaacacaaagctcatgacacgtttgacctacactcttgatgagattgagggaccctttgaggtgtcttctgatggcactgtgaagtttgaggagaaagatggaattgactatgcggccgcacagtccag

SEQ ID NO: 159236 - DNA, 313 bp, Glycine max
tgataaacttcaccatgacagtccttggacatgccctaagtacagagtgacctttgatgcatcagttatatggggtctgattggaccaaagaggctatttggacctggtgggctgtacaggaaccttgtgtggttattcctgattggagcagtgctgccagttcccatttgggtgttgagcaaaatcttccctgagaagaaatggataccactgatcaacataccagttataacctacggctttgctggaatgccaccagcaactccagccaatattgcaagctggctagtgactggaatgacttcaattact

SEQ ID NO: 159237 - DNA, 303 bp, Glycine max
agtttctgaggagagcagctttcttgaagcacaatctttgggtcactccttatgttcccggcgaaatgcatcccggaggggagtttcctaatcagaatccacgcgttggagagggtttggctacttgggttcagaagaatagatcattggaagaagccgatatagttctttggtacgtgtttggtataacacacattccccgattggaagactggccagttatgccagtggaacgcattggctttatgcttatggtattccactcaaagttagcgtatttcattgccattctttctgtgcaaa

SEQ ID NO: 159238 - DNA, 310 bp, Glycine max
ctagtctcaagcttaactctcatattcttcaggagtctactgctaaagagattaatgaaaatcccgaggcaggatgggaggctgctataaatcctcgtttctccaattatacagttgaacaatttaagcgccttcttggagtcaaaccaatgcctaagaaggaacttagaagtacacctgctatatctcacccaaagacgttgaaattgccaaagaattttgatgcgaggacagcttggtcgcagtgtagcactattggaagaattctagatcagggtcactgtggttcttgttgggcattggtgctgtt

SEQ ID NO: 159239 - DNA, 304 bp, Glycine max
cttagctcaaacctcacctcaataatctttcgtgctagctagcttaatcatattccaattccaacagaaccaaattctgctagctagctagtacgtcaaaggaaataaaataatatggcattcagcgggacccaacagaaatgcaaggcttgcgacaaaactgttcacttggtcgaaggtttatctgtcgatggggctgcttatcacaagaattgcttcagatgcagccattgcaatggccttcttgcgataagcaactactcatccaccgaagggttttgtactgcaaggtgcacttgagcag

SEQ ID NO: 159240 - DNA, 304 bp, Glycine max
ggaaatcttccgcactgatggtgaacaagtcctcaagtttccaccacctcatgtcatcaaagttagtaagtctgcatggatgactgatgaagaatttggaagagagatgcttgctggtgttaatccatgcctaattgagtgccttcaagtgttccctccaaagagcaagctagatcccacagtgtatggtgatcaaactagtacaataaccaaagaacacttagagatcaaccttggtggactctctgtggaacaggcactgagtggtaacagattgttcatattagatcaccatgatgcattc

SEQ ID NO: 159241 - DNA, 304 bp, Glycine max
tacactttctatctcatttccaatctcattttcgttcggttcaaacactctcatggcatcagacaagaagattaggatcggcatcaacggatttggaaggattggccgtttggtggccagggttgctcttcagaggaatgacgttgaacttgttgctgtcaacgatcctttcatcaccactgattacatgacatacatgttcaagtacgacaccgttcatgggcagtggaagcattttgatgtgaagctgaaggactctaagacccttctcttcggtgagaagcccgtcaccgttttggattca

SEQ ID NO: 159242 - DNA, 304 bp, Glycine max
gtgccattctactgttgtttctgggtggttctcagcttctcaaacttgctctgggaaatctgggaaagctgtttatttcaacaacccaatgtggccaggagaagcccattcaatcaaagtagaaaagatcttatacaaggaaaagtcggagtaccaagaggtcttggtttttgagtcatcaatgtatgggaatgtgcttgtacttgatggaatagttcaattgactgagagggatgaatgtgcttaccaggagatgatagctcatcttcccctctgttcaattcattcgcccaaaaagttttag

SEQ ID NO: 159243 - DNA, 308 bp, Glycine max
tccttcccatcattctctggcctcaagtcacattctacatgcaaagcagcagcagccacgtcctcgcgtagaaggggtgcttgtccatccaccaacgttgttcgagccgctgcggttgagacactcgaccaaaccaccgaggtttctctggtggagaaatccgtcaacaccattcggtttttggccattgatgcagttgagaaggccaactctggtcaccctggtctccccatggggtgtgctccaatgggtcacattctctacgatgagataatgaggtacaatcctaagaaccccgttggttcaac

SEQ ID NO: 159244 - DNA, 286 bp, Glycine max
ccaaaaaggccttgctagtggtgtcacaggtatggctggtcttggcagaactaaagtttctcttccttctcaatttgcctcagctttcagctttcatagaaaatttgccatttgcttgagttcttctactatgacaaatggtgtaatgttctttggtgatggcccttacaattttggttatttgaactcggatctctccaaggttctaactttcacccctctcatttcaaaccctgttagcactgctccaagttatttccaaggggaggcctcagtggaatacttt

SEQ ID NO: 159245 - DNA, 258 bp, Glycine max
cgcactttgcgttttctgcgtcatctccgattccccgacaatggccacccaaatgagcaagaagagaaagttcgtagctgatggagtgttcttcgctgaactgaacgaggttctgacaagggagttagccgaggacggatactccggcgtggaagttagggttacgccgatgcgcaccgaaatcatcatcagagccaccagaacccaagccgttctcggtgagaagggaaggagaatcagggaacttacctcggtggt

SEQ ID NO: 159246 - DNA, 204 bp, Glycine max
tgacatctggtagagatccaggaattatccccagaaatgctcacccacctgaattagatgaaccattagacataaacacaccatccatggaatgggtaaataatagggcccctaatcttaagctgcccagagtgaaagatgttctagtcaatggccacacagtgaaggtgaaattttgtgatacttgcttgttgtatcgtccac

SEQ ID NO: 159247 - DNA, 251 bp, Glycine max
aaaatcttctgtgcaaccagaaaaaaacggaccttgccctcagtctcttttttccatcatcacttcattaaacattattcactctctttctctgtctctagtttttacaacatggctactgcggtaactgctgcagtgtcctttccagccaccaagtccacttctctttcaagcagaacctctatcactgccccagatagaattgtcttcaagaaggtttcgttgcaatacagagatgtttcaaccagtgg

SEQ ID NO: 159248 - DNA, 249 bp, Glycine max
gcagtgggaggaggctcgggactctgaccgcgtgcctgttgaagaatgagccggcgactcataggcagtggcttggttaagggaaaccaccggagccgtagcgaaagcgagtcttcacagggcaattgtcactgcttatggacccgaacctgggtgatctatccatgaccaggatgaagcttgggtgaaactaagtggaggtccgaaccgactgatgttgaagaatcagcggatgagttgtggttaggg

SEQ ID NO: 159249 - DNA, 249 bp, Glycine max
tggagttgtttctctgatcctcctcttgtacttgtttttgcgtggtggttcatggaagagtggggaagagggtcctccaacagttgcaggtgcatggccaataattggtcacctcccattgttgcttggttcaaagacacctcataaaacattgggtgacttggctgacaagtatggacccatattctcgatcaagattggtgccaaaaacgcagtggttgttagcaactgggaaatggctaaagaatg

SEQ ID NO: 159250 - DNA, 216 bp, Glycine max
tttccattatactaaatgcaatcatgcatgttttaacttttaacaatgctgctgtgaagtgcaaactagaagaaaatatcatcttatctgagtcgcaatttcaattgcagcaagggttagtttttaaaattgcattggccatgtatccaagatatcatttttcctgccaagtcagggcagtataggaaattctagtccacaagctgttatatgacc

SEQ ID NO: 159251 - DNA, 253 bp, Glycine max
actagttctagatcgcgagcggcaaagagggacttaggagtgcggtggattcgagaattccggagatgtatacagaggaagcttgcaaggtgttgagaacagcagtgctgtgcacggggactcttccggctttgagaccaaccatgagagctgtggttcaaaagcttgaggatgccgagccttgtaaattggttgggattgttattaccaaagatgacagtgaaaagaaaataggagtcaacgacaagtaatg

SEQ ID NO: 159252 - DNA, 258 bp, Glycine max
caaaagtgattttcgagaattagcgatgggaattgaaagaggaggcttcaagggattcaggagcgcctggagcgtgccgcccaagccgtgcgattcctgcaagctggcctcggcggcgcttttctgccgccccgattccgcgtttctctgcatcgcctgcgattccaacattcactgctcgtacaaactcgcgtcgcgccacgagcgcgtgtggatgtgtgaggtgtgcgagcaggcacccgctgctgtcacgtgcaa

SEQ ID NO: 159253 - DNA, 257 bp, Glycine max
cataagccaacttgagctgaattactactctaaaagctgcccaaaagctgaagagatcatcaaggaacaagtcacacaactatataacaagcatggaaacactgccgtttcgtgggtcagaaatctcttccacgattgcgtggttaagtcatgcgatgcatcattactgttagcgacggtgagcgatgtagtgtcggagcagacatcggatagaagttttgggatgagaaacttcaagtacgtaaacactatcaaag

SEQ ID NO: 159254 - DNA, 253 bp, Glycine max
atgaacgacccttcattagttctagaaaggttttgatggacttggggccacctataagcaaggaagtccagcttatttcttttcactccgtgtcaaaaggttattatggtgaatgtggacagcgaggtggatattttgaaatgaccaacattcctccagagacagttgatgagatctacaaggttgcatcaatatcacttagtccaaatgttccagcacaaatatttatgggagttatgctccatccacctca

SEQ ID NO: 159255 - DNA, 253 bp, Glycine max
gtcaagcgacgccgtttgggtcctcttccacctcgccttcttctcccaatgccttccctccgcctgggcccactcggcgatcctcctcccgggtcaactcgcccgtgactcaccgcagagctgccccgcccctgaccccaacctctactacaagccagtcatcggaatcgtcagccatcccggcgacggcgcctccggccgcctcagcaacgccaccggcgcctcctacatcgccgcctcctatgtcaaattc

SEQ ID NO: 159256 - DNA, 202 bp, Glycine max
ctgagtgcccgcaatttgctgcccatgaaggccagggaagggaggactactgatgcatactgtgtggccaagtatggcaacaaatgggttcgaaccagaactctgcttgatactctctcccctcgatggaatgagcaatatacctgggaggttcatgatccgtgcactgtcatcacagttggggtttttgacaaccaccaca

SEQ ID NO: 159257 - DNA, 250 bp, Glycine max
gttgaattgagcaagaagctctgcattaagcccgtgattgggcttcgtgcgaagcttagaaccaagcattctgggcatttcggtgggacttcaggagagaaggggaagtttgggctcaccaccgcacagattctgagggttgtgaagaagctggcccacgcaggcatgctggattgcttgcaactgctgcattttcatattggttctcagattccctcaaccgcgttgcttgctgatggcgtgggagagg

SEQ ID NO: 159258 - DNA, 254 bp, Glycine max
gcattacattacattagattggtggcaaagcaatggcatcgtcactacaagcagcagctactttcatgcaacccaccaagtttttgcagctaaagtctactcaggccatatctaaggcttttggtttggaacctgctggagttaataaggtcacatgctcccttcaggctgatcttaaggacttggctcacaagtgtgttgatgctaccaaaattgcaggctttgcccttgccacctctgctctcgttgtttct

SEQ ID NO: 159259 - DNA, 259 bp, Glycine max
gagaacaacagttccatctatggttcgaccccaccaaggacttccacacatactccgtccacatggaatcctgcaagcatcatattctctgtggacgggaccccaataagggagttcaagaatttggagacaaaaggggttccattcccaaagagccaacccatgagaatatactctagtctttggaacgctgaggattgggccacaaggggtgggcttgtgaaaacggattggagcaaggccccattcacagcctcat

SEQ ID NO: 159260 - DNA, 256 bp, Glycine max
gtgctccaagagagattgaaactgagctgtcaactgctgacatcagctcacagtcgtttggagtgccaaacatgcctttcaagccaggttgctcaagtgatgttggcatcaatgatactggggttttaaataataataatggcttgcgggctaaccaaactccacgaatgcgaacatatactaaggttcaaaagcgtggctctgttggaagatgtattgatgttacccgttacaagggatatgatgaactccggca

SEQ ID NO: 159261 - DNA, 143 bp, Glycine max
caaaacactcataacacaaagcacaaagcaaagctcatccttgagttaaaaaatggcagcagcttcttccatggctctctcatccccatccttggctggcaaggccgtgaagctgggcccatcagccccagaagtgggaaggg

SEQ ID NO: 159262 - DNA, 251 bp, Glycine max
caaaaaccctaggtagagagctcttcctccctttctcacagcaatggccgccgcagcacgccctctcgtcaccgtgcaggccctcgacggtgacatggcaaccgatgcctccgccaccgttcccatccctgacgtcatgaaggcctctatccgccccgacatcgtcaatttcgtacactcgaacatctccaagaacagccgccagccatacgccgtcagtcgtcgcgctggtcaccagacctccgccgaat

SEQ ID NO: 159263 - DNA, 250 bp, Glycine max
tgtagggtgaaaccgtacctttcaaaccttatacccaccgttaccatgttccttataaagcatctcaaagtacttcacccttctggtattctatcaagagagcttcagcacacatcattgttttggcctcatattcagcatatggtaatgctagatatgtcttttgcatgatacatacttatgtagagaacactggctgattatatgatttcagatgaacatgattctgtttgtaataatttcaccttag

SEQ ID NO: 159264 - DNA, 249 bp, Glycine max
tatcttccttgtcactgcccgtgtgtcgccgccatggccaccgtcaccacccaagcctccgccgcaattttccggccatgtacctcgaaatcgaggtttttgaccggctcttccggtaaacttaaccgggaagtgactatgcggccaatggggtgccctccttctgcctctttcaaggttgaagccaagaagggagagtggttacctggcttagcctccccaacttacctcaatggcactcttcctggt

SEQ ID NO: 159265 - DNA, 248 bp, Glycine max
caattgttacctatatttcttcattcctcctgtctgattgctacagaactcctgatcctgtcactgggaaaagaaactactcttacatggatgctgttagagtttatcttggttataaaaggacatgtgtagctggcttccttcaatttttgactttgtatggtactagtattgcttatgtactaaccacagcaactagtctgagtgcaattctgagatcaaattgttatcacaagaaagggcatgaa

SEQ ID NO: 159266 - DNA, 248 bp, Glycine max
gcaagaatggcacttcgttgcttggtgatgtccctttctgttctcttcactcttggtcttgcgagagaaagccatgccagagacgaagatttttggcatgctgtttggccaaacactcccattccaagttcattgcgagatcttctaaagcctggccctgcaagtgttgaaatcgatgatcaccctatgcaaattgaagaaacacagtacccgaaaaccttcttctataaagaagaccttcatccagg

SEQ ID NO: 159267 - DNA, 251 bp, Glycine max
gtgccacactagttttttttctacacatacatatatcacaagaaaaattaagcaacgattcaagaagaaaatgggttctgaacttgaagctcccattcacgtcctcatggtgtcctatccagcacaaggacacataaaccctttgctcagactaggtaagtgccttgctgcaaagggcttatttgtaaccttcaccacctcagagaccgctggtaaaaacatgcgaaccgccaataacatcactgacaaat

SEQ ID NO: 159268 - DNA, 254 bp, Glycine max
cggatatctcaaaggtttatccttcagtgaagagaaatggcagctgaggcaaattttgatagcaaaagcagcaggtggtctttgcaggggatgacagctctcgttaccggtggttccaaaggaatcggatatgctatcgtggaggagttggcacaacttggagccactgtacacacttgcgctcgcaacgaagctgaactcaataaatccttaaatgaatggaacacaaaaggatacagagtaactggttcggt

SEQ ID NO: 159269 - DNA, 250 bp, Glycine max
ctcgagccgcggctcctcccttccagataggggctcaaggcagttgggtcgacccaattcagagaatggtggagggcaggacgccaagaatctgagggtcaagcttgttctcttaggtgattctggtgttggtaaaagctgtattgttctacgatttgttcgtggtcagtttgatccaacatctaaggtaactgttggagcttcttttttgtcgcaaacaatagctctgcaagactctacaacagtcaag

SEQ ID NO: 159270 - DNA, 248 bp, Glycine max
cctcgagccgaatcggctcgagcaataattatcaaacctaaccagtaaaaatggtgaccgtgaaggaaatccgcaacgctcaacgttcccatggacccgccaccatcttggccttcggcaccgccacgccgtccaactgcgtctcccaagccgattaccctgactactacttccgcattaccaacagcgaacacatgactgatctcaaagaaaagttcaagcgcatgtgtgaaaagtccatgataaag

SEQ ID NO: 159271 - DNA, 247 bp, Glycine max
ctttaccaccattctagatatcagagaactttgcagctctcttaggtttttaaaaaacaccacgcaaacagcaagatggccacttccgacagtaacatgctactaaattatgttccagtttatgtgatgctcccactcggagttgtcaatgttgacaatgtttttgaagacccagatggccttaaagaacagctcttgcagcttcgagctgcgggtgttgacggggttatggttgatgtgtggtggg

SEQ ID NO: 159272 - DNA, 201 bp, Glycine max
cctatgcatattatgaagacggattcaattgcttcagtgaagctgagaattcaaaccttcaagggattttttgttaaaaagcagaaactggtttttgaagggaaggaattggctcgtaacagatcttgtatccgtgattatggtgttggtgatgggaatgttttgcacctggtgctgaggctttctgatctcaaagctatt

SEQ ID NO: 159273 - DNA, 251 bp, Glycine max
gtgaaaaagcaactaagcatagtgtgtaagaaagggagaaaaacaagtgctgtgtagagagaaaaatggctaggtggtgcatgatcttggtggttcttgctcttgccgtggttgcaagtgccagaaacatgcccaatgacgctggtttggaggaccagaagaacttccttgggtatgggttttcgggagttggcaacaatggccttccctttggtggagtgggttctgggtttgatggtaatatgggtggg

SEQ ID NO: 159274 - DNA, 254 bp, Glycine max
aataagatgaaaatgaaagtgcttgtcttgtttgttgctacagttttggtagcatatgaatgccatggctcagactaccagaagttccctctccaaatgaaaactgggtttggtgggcaatacagcaatgaggtggcatgtgccagttggaggcttggcgtggaagcaaacaacgtagtcaagtggcaaactgttcctgcagcttgcggagagtacatagctgactacgttctaggagaccaatatagatcaga

SEQ ID NO: 159275 - DNA, 251 bp, Glycine max
ctgcgattcatcgacgaccacaactccgcggaggaccgaacctacaagctcggactgaaccggttcgctgatctcaccaacgaggaatacagggccaagtacttgggaaccaagatcgatcccaaccggaggctcggaaagaccccgagcaaccgctacgcgccacgtgtcggcgacaaattgcctgattccgttgattggaggaaggaaggtgcttttcctcctgtcaaagaccaaggaggctgtgggag

SEQ ID NO: 159276 - DNA, 250 bp, Glycine max
caaagtttcttcctttctctgctctttgccttctctgacacatttggtgccttgtagagcgtgttttggcaggaaggtggtatggcgaaggacgttgaggttgctgagcgtggctccttctctgggaaggactaccaggaccctccaccagcaccactcattgatgctgaggagctcacaaagtggtccttttacagggctctcattgctgaattcattgccactttgctcttcctctacattactgtgc

SEQ ID NO: 159277 - DNA, 199 bp, Glycine max
caagggtttaacctttctggctgtgttaatatgcgtttcagcactgtcactgagtccttctgttgcgggggaagggcaaaataatggccttgttatgaacttctacaaggaatcatgccctcaggctgaagacatcatcacagaacaagtcaagcttctctacaagcgccacaagaacactgctttctcctggctcagg

SEQ ID NO: 159278 - DNA, 247 bp, Glycine max
ggattctcaaatactcaactcattagaccttatcttggccttattcctcttcatgattctgatcctaaaactagggagacgactcaagagtactgaattggctctaaacatatcccgaggaccatggaaactggctattataggaaatttactccagcttgttacatcgccaccacaccgaaaattaagagacctggccacaatatacggacccatgatgcatctccaacttggggagatcttcaca

SEQ ID NO: 159279 - DNA, 247 bp, Glycine max
gattaacacaccaacccactagaaacatgaaaacccctaacaaagcctcattactcttattccctctcttgtccctttccttatttatcaaccattcccatgcagcaggaatcgctgtgtactggggccaaaacggtggagaaggcaccttagcagaagcttgcaacacaggaaactaccaatatgtgaacatagccttcttgtccacttttggaaatggccaaaccccacaactcaaccttgctgg

SEQ ID NO: 159280 - DNA, 245 bp, Glycine max
gagagagagagagaaatggcttgcaggcaattgtgggcttcaagagctgcctcttacctgaggatctctgtgtttcacagatgcttttctaatgttattaaagatttcaagtatgttgattctcatgagtgggtgaaagttgatggaaattacgcaaccatcggcataactgatcatgcccaagatcatttgggtgatgttgtatatgttgaattgccagaagtgggagcagctgtgacacaagg

SEQ ID NO: 159281 - DNA, 244 bp, Glycine max
ctccgagccggtgccggagcgcaaggtagccgttctcggcgccgcagcgggaccgggcagcctctctcccttctcatgaagctcaatcccctcgtttcgagcctctccctttacgatatcgccggaactcccggcgtcgcgccgatatcagccacataaacaccagatctgaggtagtggggtaccaaggtgatgaagagcttggaaaagctttggagggtgccgatgttgttataattcctgc

SEQ ID NO: 159282 - DNA, 249 bp, Glycine max
attcacctgagctttttgtgaggattccaaagcatggcttcccttgcagcatccactgctgctgcttcccttggcatgtcagaaatgcttggaaaccccatcaacctcagtggtgccacaaggccagctccatctgcctctagccctgcctccttcaagactgtggctcttttctccaaaaagaaggctgcacctccaaaaaaagctgcagctgctgctcctgccaatgatgagcttgccaagtggtat

SEQ ID NO: 159283 - DNA, 254 bp, Glycine max
gggtttcataggaagagttgggagatatttgggctatggccactgggaagacggttatgtgttcgctgagccagttgcgtccgctaacatgcgcatcgacgtcagcgtcacgattagtgccccagccacccgacctcatcaagtgggtaaccagagaaggtggcttcgtgcaccgcgccgtcaagataacacaactcgactcctccaacggactgggcctggtggccaaggaagaaattccacgtggcagtgat

SEQ ID NO: 159284 - DNA, 250 bp, Glycine max
ctttgctgggagaagaagtctgagaattctgaaattgccatttggcaaaaaactctagacactgaatcatgtcgtagcagacaagaagaatctagtgtaaaattctgtgaatcgacagatgctaatgatgtctggtataagaaaatggaggtctgcgttactccaagtcctaaagtttctggtgattataagccatttccagagaggctatatgccatccctcctagaattgctagtggctctgttcctg

SEQ ID NO: 159285 - DNA, 248 bp, Glycine max
cttagccgaggtcacgaggagcactagctagtttcacaatttccaaatggctaggggattgaagaagcatctcaagaggctcaatgctcctaagcattggatgcttgacaaactgggtggtgcatttgcgcccaaaccctcatctggaccacacaaatctagggagtgccttcccctcatactcatcctacgaaaccggctaaagtatgctctgacttaccgtgaagtcatcgctattctgatgcaga

SEQ ID NO: 159286 - DNA, 248 bp, Glycine max
gtaaaagggaagacgaaggactaaagcaccagctggatgcacttcccccttcttcacataatgctgcacgtaacataaagatctttaccattttattatgatacaaaatagataatgttctgtatcaaatttcagtcagacattggctctgtacatagggttatattatcgatgcactgtatttgtattcaaattccaaatggcgaacatatttgattgctgttagttttcaaggttctgtagattat

SEQ ID NO: 159287 - DNA, 244 bp, Glycine max
gggtttgaagttttggcgctgaaaaaaaatggcggaagagtacgaagaggagggcggtgagattgaacaagagttctccgtttggaagaagaacactcctctcttgtacgatttcttcatttctcaccctcttcaatggccttctctcaccgttcactggcttccttcctctccccatccccactcccacccttccttcaatctccacaaacttcttctcgccactcacacttccgacggcgaa

SEQ ID NO: 159288 - DNA, 244 bp, Glycine max
atccgtcaacgcccttggggaaaatgggcagctgagattcgggatccaagaaagggggttcgtgtctggcttggaaccttcaacactgctgaagaagctgcaagagcttatgatgctgaagcacggaggattcgtggcaagaaagccaaggtgaattttcctgaggcaccaggtacttcttctgtaaaacgttccaaggtaaatccacaggaaaatcttaagactgttcagcccaatctgggtc

SEQ ID NO: 159289 - DNA, 268 bp, Glycine max
ctctgggactttcagaccctgaaggaacaggagggttcattgagccgaaatggctagcatatggtgagataatcaatggtcgttatgcaatgttgggtgcagttggtgcaatagcacctgaaattctaggcaaggctggtctgatccctcaggagacagcactcccatggttcagaacgggtgtgttcccacctgcaggaacctacaactactgggcagactcctacacactgttcgtgtttgagatggcactgatgggatttgcaga

SEQ ID NO: 159290 - DNA, 268 bp, Glycine max
gtattctgatcgctccctgagagagctcgtcgcggcggttgcagaagaagattgcaagatgaagttcaacatcgcgaatcccaccactggatgccagaagaagctcgagatcgacgacgatctgaaactgcgagcattttgggacaagaggatctcacaggaggtcatcggagatgcactcggtgaggaatttaagggctatgtcttcaaaattaccggaggttgtgacaaacaaggatttccaatgaagcagggagtgctgactcct

SEQ ID NO: 159291 - DNA, 262 bp, Glycine max
tgagaaggttatgcgagctctaggtgattaccttggtgtcaaggttcatgcttgtgttggtgggaccagtgttcgtgaggatcagcgcattctccaagctggtgtccatactgttgttggcactcctgggcgtgtatttgacatgctacggagacagtctcttcgtccagatcacataaagatgtttgttttggatgaggctgatgaaatgctttctcgtggtttcaaggaccagatctatgacatcttccagcttctgccg

SEQ ID NO: 159292 - DNA, 259 bp, Glycine max
aggagtgatatctttggggagagaggaattttacttggtgctgttcatggagttgtggaatccttgtttaggagatacactgataatggaatgaacgaagatctggcctataagaatactgttgagtctataacagggattatatctaaaaccatctcaactaagggcatgctagctgtatacaatgctttatctgaagatgagaaaagggaatttgagaaggcttatagtgcttcttattatccttgcatggaaattc

SEQ ID NO: 159293 - DNA, 259 bp, Glycine max
cgcgtcgctccgcaccagtttcaccgcacgaatatcttgctgtgtggagcgatccgagaaaaactctgtaaacatgttggtttaccaggacctccttacaggtgatgagcttctctctgactccttccgttacaaggaaattgagaatggaatgctgtgggaagttgaggggaagtgggttgttaaaggagcagttgatgtagacattggtgcaaacccttctgctgagggtggaggagaagatgagggagttgatgat

SEQ ID NO: 159294 - DNA, 256 bp, Glycine max
cacccagatctcaattttctgcaatttcactcagaccaggaaattaaccatggctcaacctgcaagcctcacaagaataggccttgctggcctggctgtgatgggccaaaaccttgctctcaacattgctgagaaaggctttcccatttctgtctacaaccggaccgcgtccaaggttgatgagacagttgaaagagcaaaacaagaaggaaaccttcctgtgtatggctaccataaccctaaattctttgtccaa

SEQ ID NO: 159295 - DNA, 254 bp, Glycine max
ggaaaaaactaccgtaatagtcctgccttgcgtaaagcttgcaaatttttgttgtcaaagcagcttcctaatggaggatggggtgagagttacttgtcaagccaaaacaaggtatatatattattgcttgaatagcacactagactctgaaaaaagaggtcagtgttaataaatttctatctacacaaatatatcggatgctttctttgccaaacaggtttacacaaatctaaaaggcaacagggcaaacttag

SEQ ID NO: 159296 - DNA, 257 bp, Glycine max
gtgtgcattcttgtttaactcctctttgttcctcagacatcccagaagggaaccaaaaataaaaaataaaaaaataaacacaatcaataaaggggagaaaacaaacatgtcattcacaggaactcttgataaatgcacagcatgtgacaagactgtctatgtggttgacttgttaactcttgaaggaattccttaccataaaaactgcttcaagtgcagtcactgcaagggatgtcttacgatgtgcacatactcct

SEQ ID NO: 159297 - DNA, 267 bp, Glycine max
cttgaagctgaactaactcgtttaggaaagcctgtagcagctgatgctgggggaaagttgtatgcaatcatggaaatatgccgctcatttgatcaaatatttaaagaccatcttgatggcgtgcggcctggaggtgataaaatttataatgtctttgacaatcagctccccgctgctttaaaaaggttgcagtttgataagcagctttcaatggaaaatataaggaaacttattactgaagctgatgggtatcagcctcatcttata

SEQ ID NO: 159298 - DNA, 262 bp, Glycine max
atttgaggccaggcaagccccactcaaccaccacacctctcctcgttcacgctacccctttctgctcttcttctacctttcaagttttaaaagtataaagatggcagagacattcctatttacctcagagtcggtgaacgagggacaccctgacaagctctgcgaccaaatctccgatgctgtcctcgacgcttgcctcgagcaggacccagacagcaaagttgcctgcgaaacatgcaccaaaaccaacttggtcatggtc

SEQ ID NO: 159299 - DNA, 255 bp, Glycine max
cccaaacaaaactcaagtacggtcagacgttgaggcttcggtttaaggtgagcgcgactttggttggggattcggtgtctgttaccatgctggcgccgccatttaacacgcactcgttctccatgaatcagaggctgttggtgctgaagccgcaccatttgagtggggttggagaatcaacgcacgaggttgaagttaccgcgccggcttccgctgttcttgcgccaccgggtttctatctgctgtttgtggtcc

SEQ ID NO: 159300 - DNA, 261 bp, Glycine max
tggcagtgtctcttccctggcttggtttatgtcaaatcaagaaacaagctttgtcacaattggtcaaagagttcttgcaagaccactgaaggtgcgattccactatggtcatccagatgtttttgatagaatttttcacataactcgaggaggaatcagcaaggcatcttgtggcatcaatctgagcgaggatatttttgctggattcaactcaacactaagacgcggaaatattactcatcatgaatatatccaatgcgg

SEQ ID NO: 159301 - DNA, 260 bp, Glycine max
tagcgggtgaaggtttttgcgccgcgccttatatcacaccgtcgtccgaaagcgtcgttgccgtgaaaccctagaaagaaacgacgacgtaaatggaggtggagcccgtggagccgcagtcgctgaagaagctaagcttcaagtctctgaagcgcgctctcgatctcttctctcccatccacggacacctcgctactcccgatgccgaaagcaagaaaatacgcactagccacaaggtgagcgtggagtatggtggaatc

SEQ ID NO: 159302 - DNA, 257 bp, Glycine max
gataactagaaacagtgtgatgaaaatgaaggtccttgttttcttcgttgctacaattttggtagcatggcaatgccatgcgtacgatatgttccctctccgaatgaacactggctatggtgcccgtactccggaggtgaaatgcgcaagttggaggcttgctgtggaagcacacaacatctttggctttgagaccattcctgaagagtgcgttgaagcaacaaaggaatacatccatggcgaacaatatagatcag

SEQ ID NO: 159303 - DNA, 258 bp, Glycine max
agaagatgaaaggagagcaagaattagaagatgaagaaagcttctcgcgtgctatgctgctttgcagctccgttgtggtttccatggcgctgcaatcggcaacggagctgggcgtatttgacgtgttgcaagaagcgggggctaagctctctgcgaaagagatagcatccaagctttcctgcgacaacaaccctgaagcagactcaatgctggatcgccttctagcccttctagcctctcactccattcttaactgtt

SEQ ID NO: 159304 - DNA, 255 bp, Glycine max
tcctctttttttcatttctcttcaacttcctcttctttcaattctcttcagtctctctccgccttcccaaaatggtgaaccctagatgcttcctcgacgtcagcatcggcggcgagttagaaggccggatcgttgtggagctcttccacgacgtcgttcccaaaactgccgagaatttccgcgccctctgcaccggcgaaaagggcatcggtcccaacaccggcgtccccctccactacaaaggcgtgtgtttca

SEQ ID NO: 159305 - DNA, 253 bp, Glycine max
gcaaagatgacaggtgggatgtttggaaggaaggggcaaaagataaaggggacagtggtgttgatgccaaagaatgtgttggacttcaacgccataacctccgtcggaaaaggcagtgctaaggacaccgccaccgatttcttgggcaaaggcttggacgcattaggtcatgcagttgatgctctcactgccttcgctggccatagcatctccttgcagcttatcagtgctactcagactgatggtagtggaa

SEQ ID NO: 159306 - DNA, 253 bp, Glycine max
tggatgaagcaatgaaagtgagagagtccaattatgcgaacgctttgtgatgcttgtgagagtgcggcggctatagttttctgcgccgctgatgaggctgcactttgtcgtgcctgtgatgagaaggttcacatgtgcaataagctagctagtaggcatgtgagggttggtcttgcaagtccaagtgatgtgccacggtgtgacatatgtgagaatgcaccagctttcttctattgcgagacagatggaagtt

SEQ ID NO: 159307 - DNA, 254 bp, Glycine max
cacaaacaactcttgagaaagaaagaatggctgccaacacattgatgagttctgccatctcagccttcccatctctcctttcctcctcaaaatccagatttgccgcagcagttcctctttccagctttgttgtcaccaatgcctcttcttctcgcttttccatgagtgctgactggatgcctggccagcctagacccccctaccttgatggttcagcacctggtgactttggattcgaccctcttcgtcttggt

SEQ ID NO: 159308 - DNA, 258 bp, Glycine max
gtcgggagatccatacaagacattgtttgtggctaaactcagttacgagaccactgagagcagaatcaaaagggagtttgagtcatatggtccaatcaaacgggttcgattagttgctgacaaagatataaataagcccaggggttatgctttcattgagtatctgcatacaagagacatgaaagctgcttataaacaagctgatggtaggaaaattgatggtagaagggtgcttgtggatgttgagcgtgggaggac

SEQ ID NO: 159309 - DNA, 257 bp, Glycine max
aaaaaaggcaaagcttattcccccaagacttagctagcactagcaaacacctctatatctaaaatggtttcaatttctgatcatgaactggttttgatctttggtctcctaggtaacattgtgtcattcatggtgttcttagcacccttgccaaccttctatacaatttacaagaagaaatcatcagaaggatttcaatcaattccatatgcggttgcacttcttagcgcactgttgcttctatattatggcttcat

SEQ ID NO: 159310 - DNA, 256 bp, Glycine max
gaagccgcaaaacaagcttacaagccgaaccccatgaaagttaccgctgagttcaatacacatgtcatcagggcaatgagaggctccaacaactcaagaaggggcttatcaaaccaatacgatggtccatgcaaggcgacaaaccccattgacaaatgttggagatgtgaccccaattgggagaaaaaccgcaagaggctagcagattgtgccctaggctttggccatggcacaacagggggcaaagatggcaaaa

SEQ ID NO: 159311 - DNA, 253 bp, Glycine max
gtttctatattctccggatttaagaaaaccacagcagctaggtggtggcctggaatcgtggtgcggcttctatcagagtataaggccaactcagatgggattgtcacttaatattgacatgtcatcaatggcgtttattgaaccacttcctgtaattgactttgttgctcaaattttgggaaaagatgtgctctcaaagccattgtcagatgcagatcgtgtcaagattaagaaggccttaagaggtgtgaaa

SEQ ID NO: 159312 - DNA, 253 bp, Glycine max
caatatattccattctctctgtgtatttccctacctctcccttcaagatgcagatcttcgtcaagaccctcaccggcaagaccatcacccttgaggtggaaagctctgacaccatcgacaacgtcaaggccaagatccaggacaaggaaggaatccccccggaccagcaacgtctcattttcgccggaaagcaacttgaggacggccgtacccttgctgactacaacattcagaaggagagtactcttcacct

SEQ ID NO: 159313 - DNA, 263 bp, Glycine max
cgttaattccggtcgtcgtcgaccccgtcatcggaaaatcgaggttgttggttacccctaccgtgaaggagcatgccacggagatcgcggagacttggaagagcagcctggaggatcgtggcggcgtggaaaacctgaagacacctgacgtccacactttcttgcagcacgttgttaccttcgggattgtcaagaacgatgactccgatttgtaccggaagcttgttattgcttccgcttggaggaaacagatgccgaagctc

SEQ ID NO: 159314 - DNA, 258 bp, Glycine max
ctcacaaacacacactgaactaaaaaacatcaaaagagacatggctgagcaaaccttcatcatgatcaagcctgatggcgtccaaagaggccttattggcgagatcattagcagatttgagaagaaaggtttctacttgaaaggtttgaaacttgttactgtggaccgtccttttgctgagaagcactatgctgatttgtctgccaagcctttctttagtggtttggtggattacattatctctggccctgttgttgc

SEQ ID NO: 159315 - DNA, 252 bp, Glycine max
tcatggtgcaaggatatgatccagttataaaagttcttgcaaaagatattgacatacgcttgaaccacagggtgaaaaagatatctagtggttacaacaaggtaatggtgacggtcgaggatggcaggaactttgttgctgatgctgctatcataactgttcctattggaatcctaaaagcgaatttgattgaatttgaaccaaaacttcctgattggaaggtttcagcaatttcagatcttggtgtgggca

SEQ ID NO: 159316 - DNA, 250 bp, Glycine max
aattcaacttaagagatcaatatggccaccaccactacccagcctcctctaatatctgttttttccttctgttgttgcttctagcacactttcatttgggcataagccaacttgagctgaattactactctaaaagctgcccaaaagctgaagagatcatcaaggaacaagtcacacaactatataacaagcatggaaacactgccgtttcgtgggtcagaaatctcttccacgattgcgtggttaagtc

SEQ ID NO: 159317 - DNA, 250 bp, Glycine max
gtttcctaggaccatgtccagtgttgctgcttccctttctggactgggaatggctgcaggaaacttggtgtctagttttgtcttcagcgttgtacaaaatgctacttcaagaggggggaaagaaggttgggttttggataacattaacaagggtcgttatgacaagtactactgggttatttctggactcagtgctcttaatatagtgtattatctaatatgcagttgggcttatggacctaccgttgag

SEQ ID NO: 159318 - DNA, 247 bp, Glycine max
cttcccctatggctcgtcactccttgctcttagccctcctcctcttcgccgccgtggccaccgccgcgatggcggtggccgcgtccgacgccgacgacatcctgatccgtcaggtggtgccagatgttggcgaaccgaagaggaggacaacctgctgaacgccgagcaccacttcgcgagcttcaaggccaaactcgccaagacctacgccaccaaggaggagcacgatcatcgcttcggcgtcttc

SEQ ID NO: 159319 - DNA, 224 bp, Glycine max
tttcactgcgttatataaaaaggcgtggctttggtcggaagtaaagggcagaaaggtgtatatataatatcatatcaaagcatcaatcaaataaatggcaactgaacatgaagacgatttcaaggatgagaagaatccccgccccctcgacgaggatgacatcgcccttctcaaaacctatggtttggggccttattccaccagcataaaaaaagccgagaagg

SEQ ID NO: 159320 - DNA, 258 bp, Glycine max
  unsure (1)..(258): unsure at all n locations
cacgtgtcaagcccaatgttgtggttgcccaggatggcactggtcagttcaaaaccgttgccgatgctattgcttcctacccaaaggataacaaaggtagatacattatctacgttaaggctggtgtctatgacgagtacatcaccgttcccaagagttcaaagaacattctcatgtacggtgatggccctgctaagaccatcatcaccggtcgcaagaacttcgtcgatggtgtcaagaccatgcaaactgncactt

SEQ ID NO: 159321 - DNA, 257 bp, Glycine max
ctcatttcaatttgcatttgcatttcatttggcgttttgtttctttctggaagcttcacttcggcatccatggcgtcgttcgaagaagctcctcccggaaactccaagaacggcgagaagatcttcaagaccaagtgcgctcagtgccacaccgtggacaaaggtgccggtcacaaacaaggacccaatctgaatggtttgtttggaaggcaatctggcacaactcctggatattcctattctactgctaacaaaaa

SEQ ID NO: 159322 - DNA, 255 bp, Glycine max
cagaaattgtggcttgctggcttttcaaagggcatacaggaaatgcacagaaaggcatctttggttcttgaagatgcagttaggaatatttacactgttgttgcattttgtgctggtaataaggtgatggaactctaccagttgcagttaaataaaatatttaagcaaagctttcttcatggagtggccattggttttggatttggcttttcacagtttctgctctttgcttgtaatgcccttctactttggtac

SEQ ID NO: 159323 - DNA, 256 bp, Glycine max
gttgaatcgcgtctaataagcaggttctgagatttataagctttcatctcagacagggtgtacataatatctgatggatataagtactctcaatgctgtacagattactgtgctgggatccgcgttttgtgttatgctttccatgcatttcacgacgcagttaatgtctcagcatctcttctattggaagtgtccgccagagctagaggctattatcattatcatccttatggctcctatctatggagctgtctcc

SEQ ID NO: 159324 - DNA, 256 bp, Glycine max
gctagaagcaataagatgataatgaaagtgcttgctttgtatgttgctacagtcttggtagcatatgaatgccatggctcagactaccagaagttccctctccagatgaaaactgggtttggtgggcaatacagcaatgaggtggcatgtgccagttggaggcttgacgtggaagcaaacaacgtagtcaagtggcaaactgttcctgcagcttgcggagagtacatagctgactacgttctatgataccaatata

SEQ ID NO: 159325 - DNA, 255 bp, Glycine max
acaggactttccgttcacgacactcccttttatcgtttcacttccgtcgtcgtcgtcttcaattttggatcttcgaatcgaatcgcatcctatgggtagcagcagaggacacacgctcatggaggttggacccgacggggttgccgtcatcaccatcgtcaaccctcccgttaattcactttcctttgatgtattgcgcagtttaaaggagagttttgatcaggcgatacagagagatgatgtcaaggcaattgt

SEQ ID NO: 159326 - DNA, 251 bp, Glycine max
cgctgaggaggaacatggtgcagaacatgctcagctcaacaagacttaaggagtttcgcagtgttcgggacaatgcgatggacaagctcatcaacagactcaaggacgaggccgagaagaataacggcgtggtttgggtgctcaaggatgccaggtttgctgttttttgcatacttgtggctatgtgttttggtcttgagatggatgaggagacagtggagagaatagatcaggttatgaagagtgttctc

SEQ ID NO: 159327 - DNA, 266 bp, Glycine max
agatgaacaagtccaacgacaacgattggttccgtatctccgccgccaatccggaaggcactcgctggaccggtaaatgctggtacgttcacaacctcctcaagtacgaattcgacctccaattcgatgtccccgtcacttacccttccaccgcccccgaactcgaactccctcaattggatggcaaaacccaaaagatgtataggggtggaaagactgcttgactgtgcacttcaagcctctctgggccaaaaattgccccagat

SEQ ID NO: 159328 - DNA, 263 bp, Glycine max
aacaaaacagagcaaagagagagtgtgtgaaaagtgaaacaaaaaacagaacaacaatggcgacacttaaggttcctcagcctcttccccccgttgcagatgattgtgagcagctccgaaaagccttctcaggttggggaactaacgaggagctgattgtatcgatcttggctcataggaatgctgctcagaggaagcttatcagagaaacttatcccagacctatggagaagatctcctcaaggccttggacaaagaactca

SEQ ID NO: 159329 - DNA, 260 bp, Glycine max
ctcgttcttgctacaagcaacaagatgctatctttgatccatcaaagtctacatcatattccaatattacatgcacatctacgctttgcacccagctctctactgctacagggaatgagccgggatgttcagcctccacaaaagcatgcatatacggcatccagtacggtgacagttcgttctccgttggctacttcagccgcgagcggctctccgtgacgccaccgacatcgtcgacaacttcctcttcggttgcggcc

SEQ ID NO: 159330 - DNA, 271 bp, Glycine max
gggaattaccagccatggcatcgtttggggcggaagagtggtactttttcagcccgagagaaaggaagtacccgaatggcgcaaggccaaacagggctgcaacttcagggtattggaaggccacaggtacagataagcctatatgtagtggaactcaaaaggttggggtgaagaaatctttggttttctatggagggaagccaccaaaaggggtcaaaactattggatcatgcatgagtaccgtgttgctgaaaacaagcctaacaatagg

SEQ ID NO: 159331 - DNA, 270 bp, Glycine max
tgctttggcaagtcctcaacccccctccccccagcataaagagctatagttcccttctcagccacaatatggctttgtaaaatgggaaggactccttgctgcagtcacgaggaattgagaaaaggggcatggacggttcaagaagaccagaaactaattacttacattcagaaacatggcacaggaagctggcgtaccttgccacagaaagcaggtcttaaagatgtggaaagagttgcaggctgagatggtttaactaccttagacctg

SEQ ID NO: 159332 - DNA, 271 bp, Glycine max
gagatttcacaaaggacccaattccttctctagttcaaggtctagaggtcggatctctatggctgttgcagttaatgtatctcggtttgaaggcatacctatggctcctcctgatccaattctcggagtttccgaggcgtttaaggcagacaatagtgatgtcaagctcaatcttggagttggggcatacagaacagaagaactacagccatatgtgcttatgttgttaagaaggtctttgttccgtattttatgtgtcttctgtgatttg

SEQ ID NO: 159333 - DNA, 272 bp, Glycine max
caaaatgactcaagcccagattcaaccagttaaacttggaacccaaggctttgaggtttcaaaattgggattcggatgtatgggccttactggagcgtacaatgaccctctccaagaacaggatggcatatctgttatcaagtatgcgttcagtaagggaatcacattttttgatactgcggatgtttatggagccaatgctaatgaacttttggttggaagctttgaagcagctgcccagagaaaagattcagatagccacaaaatttggt

SEQ ID NO: 159334 - DNA, 268 bp, Glycine max
attcttccccctccacccacccagcatatctctctactcctatttattagcacccctcacattaccttgtgtcaccaactactttgactcctttaccataccattacaataattatcaaacctaaccagtaaaaatggtgaccgtggaggaaatccgcaacgctcagcgttcccatggacccgccaccatcttggccttcggcaccgccacgccgtccaaagcgtctcccaagccgattaccctgactactacttccgcattaccaac

SEQ ID NO: 159335 - DNA, 258 bp, Glycine max
agaagacaggttcaaaccggagcaaaaaaacttgttacgatggtttcttccgacaaggatccacgacatgaagtccttcaaacatggtacatggatgatagtgatgaagatcaaagactcccccaccacaaagaacccaaggagtttgtctcgttggaccaacttgctgagcttggagtccttagctggaaattagatgctgataaccatgaaatgatccagagctgagaaagattcgtgaagagcgtggctacacct

SEQ ID NO: 159336 - DNA, 268 bp, Glycine max
aggttgcacagatagtcactactcactcacgagcatgcacgtcatctaataatgcactcattgatggtactccaccaccttagctttcaacacgggttcgacagaggcactgtgggaactgggtggctgagattagactcccgaagaaccggaccatgctatcgctgggaaccttcgacaccgccgaggaagccgctactggcgtacgacaaggccgcgtcaagctccgaggtgacttcgccaggctcaacttccccaacctccgaca

SEQ ID NO: 159337 - DNA, 263 bp, Glycine max
ttagaattaaaaagcgtgaaggacagtgataggtttggtttggaaggaagaagaaaatgaaggccatagtgataacgaggccaggaggtcccgaagtgctccaacttgaggaagtggaagatcccctagtcggagacgacgagcttctcatcggagtccacgccacttcccttaacagagccgatacctttcagaggaaaggctcctaccctcccccaagggcgccagccttacctcggtctcgaatgttccggaactgtcct

SEQ ID NO: 159338 - DNA, 268 bp, Glycine max
cagcaacaagatgtggaaccaaccattgggaaaaaccgatttggaaagcggttctcgcccgctgtatccgatgatgcttgagagccccgaactgcgctggtctttcatcagaaaagtatactccataatcgccatacagttgctcgtaaccatcgtcgtcggcgccgtcgtcgtcaccgtccgcccaatcagcgtcttcttcgccaccaccggcgccgattggctctctacatcgtcctcatctttgtccccttcatcacattgtgtc

SEQ ID NO: 159339 - DNA, 267 bp, Glycine max
gtttttcttttggttgcatgttcaactcgaatacaacatacatacagatacctcttcttcttcttcttcttcttcttagaaagtcaaaccaatacaatgagtagaagcagaggacacacgatcatggaggttggacctgacggggttgccatcatcaccatcgttaaccctcccgtcaattctctctcctatgatgtattgcgcagttttaaggagattttgatcaggctctacagagagacgatgtcaaggcaattgttgttacag

SEQ ID NO: 159340 - DNA, 268 bp, Glycine max
cacacacaaacacaacaacatatggaggtgctaagggtgcaaaccatagcttccaaatccaaagatgctgccatcccagccatgtttgttagggcagagacagagcaaccaggcatcacaaccgttcaaggggtgaaccttgaggtgccaattattgattttagtgacccagatgaagggaaagtggtgcatgagattttggaggcaagtagggactgggcatgttccaaattgtgaaccatgacatacctagtgatgttataagaaa

SEQ ID NO: 159341 - DNA, 267 bp, Glycine max
tctcaaagaaaagttcaagcgcatgtgtgaaaagtccatgataaagaagcgatacatgcacctgacggaggagtttctgaaagagaacccgaacatgtgcgagtacatggcgccatcgctggacgtgagacaagacgtagtggtgatggaggtgccgaagctgggaaaacaagccgcaacgaaagcgattaaggagtggggtcaaccaaagtcaaagatacacaccttgtgttctgcaccacttcaggcgtggacatgcccggagca

SEQ ID NO: 159342 - DNA, 265 bp, Glycine max
gatgggtaccgttgattcatgcgcgatacatgggtgaggccaagacatttacgcctacccaagtgtttggaatgatgctgtcgaatcttaaggaaattgcggagaagaatctcactacggcagttgttgattgttgcattggaatcccggtttatttcactgatctgcagagaagggcggtgttggatgcggccacaattgctggtctgcacccgcttcgttgattcacgaaatgactgccactgccttggcctatgggatttat

SEQ ID NO: 159343 - DNA, 265 bp, Glycine max
tgttgaaattaagctaaaggagttagaacaaaagtcagctgaagtcagtaccgagtggagtattgtccctggacgtggagggcatcccactctggcttcccttcagccaggtggcactgttagttttgaacatcggaatctgcaagggctgaatagatctattaacggttctataacaacaagcaacttcttgaatcctcaggatgatcttgcattaagctagagtatgtgcatccatatctggatggtgtatactattcacgca

SEQ ID NO: 159344 - DNA, 265 bp, Glycine max
aattaaattagtggttaaggttgttggaggagctctaacaagagatggagacacaaaattggttcgaaagagtgaagcctttagcagctgtggtatcaatgcagtttggatatgcagctatggatgttctatccaaggctgcaatgaacaaagggatgagcaactatgtgtttgtcgtttatcgtcatgctgttgcattctttgttatggccctttggcatggttttttgacaagaaagtaaggccaaagatgacattatcaatt

SEQ ID NO: 159345 - DNA, 268 bp, Glycine max
ctcagcccccgaagtcgggagggtcagcatgaggaagaccgtcaccaagcaggcctcctccggaagcccatggtacggcccagaccgcgtcaagtacttgggcccattctctggcgagcccccgtcctacctcactggcgagttcccaggtgactacggctgggacactgctgggctttcggccgacccagaaaccttcgccagaaaccgtgagctcaagtgatccactccaggtgggccatgctcggggccttgggctgcgtcttcc

SEQ ID NO: 159346 - DNA, 262 bp, Glycine max
cactgtcacaggtgtagcggcgaaactgaggtcgtagaaagaatggcgaaaacgacgtcgttgttgctctttacactgctcctcttcggaaccttagctctcatccaggcgaagaaatcgaaggaggatttgaaggaagtgacccacaaggtttactttgatgttgagattaatggaaaagtagcaggtcgtattgtgatgggtctttttggaaggctgttccaaaaactgcagaaaactttcgagctctttgcactgggga

SEQ ID NO: 159347 - DNA, 260 bp, Glycine max
cagtcaaactgtagtcaagtttgtcggtggattgggtctatcatggcaattatcttttggaattctagtccttctctacttttactctcattacttctttgcaagtggagctgctcatattggtgccatgtttactgcatttttgtctgttgccactgctctggggactccgccattctttggagccatagtgctgtccttcctctccaacctatgggtggccttacgcattatggaattggatcagctcctgtgttttt

SEQ ID NO: 159348 - DNA, 265 bp, Glycine max
gttttcccttcttgtccattcatatatatcacaatttcaactgcaaattttgaacaaaacttaattaagaaatccttctccggagccatggcagatctcaagtccacattcttgaacgtctattctgttctcaaatctgaactcctccacgaccctgcttttgagttctccgatgattctcgtaattgggtcgaccggatgctggactacaatgtccgggaggaaagttgaaccggggactgtcagtaattgatagctacagatt

SEQ ID NO: 159349 - DNA, 263 bp, Glycine max
cttttgctcatttcctttgactcctcattatcaaagaaaatggctctcattgggttgctcttgatgggttttctcacaatgttctcctctgctcatgcctatggtggagggtggactaatgctcatgccaccttctatggagggagtgatgcatctgggacaatgggtggggcatgtgggtatgggaatctctacagccaagggtatggaacaacactgctgctctaagcactgcactgttcaacaatggcttgagctgtggc

SEQ ID NO: 159350 - DNA, 257 bp, Glycine max
tgcgcatcacagatggcaaagctacatatgtttcccgttttatgagaacttactcgccttaaacaagaagaatactttggaggctccaaatttatgaagattggagatctcaaaggtctattcggacttttaatggttaacatacatatgctgagaactaaatggaaagtgctggatgcttcttatggaactggaacagctaatactgctctctatatcaccatgggaaacttctagcactctcagaagcagataaa

SEQ ID NO: 159351 - DNA, 267 bp, Glycine max
ccgacacggaaaccacgcccgaacaaccctccactccgccgcaaacggaggctccgccgcagcccgacccctccgccgccgtctccttcagcatatggccccccactcagcgcacccgcgacgccgtcgtcaaacgcttgatcgagaccctctccgccccctccggtcctctccaagcgctacggcactctctcctccgacgaagcctccgccgccgccgacagatcgaggacgaggccttctgcgccgccaccgcagcctccgctt

SEQ ID NO: 159352 - DNA, 265 bp, Glycine max
caaaaacagtgtaacaaaaagaaaaagaaaaaaaatatgaagttcgctataatcacaatattgttctctttatttcttcttgactttggttttgcacaacagggggatcttgacatatcaagatttggaggaaaaccaaatacaaatataggccaggctttcttaagtgcctggactcaagcatgtgcatcaccaactgctgtcaaaattgtgattcagctggcacataccaaatgggtgcagttgatgtcaaaggtccttgcaa

SEQ ID NO: 159353 - DNA, 253 bp, Glycine max
gggttattgagtgcggcggtccaaacactcttctctgcagcttttgcctacaactcccttcaccatggctgaacaaaccgagaaagcttttctgaagcaaccaaaagtgtttctcagcacaaagaagactgggaagggaaagagacctggaaaaggtgggaaccgctttatggaagtccattgggcttggatttaagactcccatggaagcctcgaaggaacctatattgacaagaagtgcgccttcactggc

SEQ ID NO: 159354 - DNA, 261 bp, Glycine max
ggaaccaaagaatatggttccttgctctgggagcaatcttctggttagagttggacgattgctcccagagccaggaaccaaagcatatggtgaacttaccagtaatcatcaaaaggcttatttgagaacaattacaggaaagactgaggccctactggacctaacagtgatagagatattgtcaaggcatgcttctgatgaggtctaccttggcagagggacaatccaaattggactgatgacacaaaggcaattcaagcc

SEQ ID NO: 159355 - DNA, 263 bp, Glycine max
aacctgattcatgtgccatacccaggttcgatggtgcggctttcctgaacagttggaggggtaagaagataatgtttgtgggtgactcactgagtctcaacatgtgggaatcactgtcctgtatgattcacgcgtcggtgccaaatgccaagaccggctttttgagaaaagaatcactgtccactgtgaccttccaggactatggagtaactaacagctataccgcacaccgtatttggtagacataattcgtgaaaatgtgg

SEQ ID NO: 159356 - DNA, 265 bp, Glycine max
aattccttcgttctaccgtcatcaactagaagaagaagcttcaatttctgcaaaatggatccgtctgcggcattgctgtttaaccacctcaaaggtgcagacccgttcttcctgctagcgggtcctaatgtgattgaatcagaggagcacattctgcggatggctaagaacatcaagactattgcatctgaagttggaataccgttggttttcagtcaagctttgacaaagctaaccgaacatcatcaaaatcatttcgtggccc

SEQ ID NO: 159357 - DNA, 259 bp, Glycine max
ctcacgcatttcctcgtttttttcttcccttttctctttctccggcgacgatctcagattccggccactcctctcgccggcgagcccttactcttccctcctccgtcgagccctctccgattcgaatcgttcccagcctcgcaccaccatgaatcccgaatacgattatttgttcaagcttttgctgattggagattctggtgtaggcagtcatgtcttctcctgaggtttgctgatgattcataccttgacagctata

SEQ ID NO: 159358 - DNA, 269 bp, Glycine max
gtttttgcctacctgagtggcttgatgatccttatttcgagtggctgcactggccacaagcctctattcctttctctgagtatgaaattgactacatttccaagcttgatccttttagggatgctgaggctttgagaaacgagcttccttcgtcgttgagggagtcatccattcgcgttcttattgtttgcaccatcttgttgaagcaagctgccgctgcggcctttgtcttgctgaaatagggcaaatgatgactaggaagttttgtg

SEQ ID NO: 159359 - DNA, 266 bp, Glycine max
gcagaaagcaagctcatcctagagttttaaaaatggcagcagcctcctccatggctctctcttccccatccttggctggcaaggccgtgaagctgggcccatcagcccccgaagtcgggagggtcagcatgaggaagaccgtcaccaagcaggcctcctccggaagcccatggtacggcccagaccgcgtcaagtacttgggcccattctctggcgagccccgtcctacctcactggcgagttcccaggtgactacggctgggaca

SEQ ID NO: 159360 - DNA, 267 bp, Glycine max
aagtttgattgtcctagctttgagcaacatcatgaagatctccattctctttatcacaatcttttcttgtggttttcttggaaatgttgtttcaaatgctagtcctcttccatatgaagctatttttaactttggtgactctataagtgatactggaaatgctgctcataaccacccacctatgcctggcaatagtccttatggttcaacatactttactatccttctggacgtatgtcaaatggacgactaatcatagattttata

SEQ ID NO: 159361 - DNA, 268 bp, Glycine max
gagaagtgcaggaggggtgggaatgattctcactaacactgaagccaatggggaagaactggttgcagattctcacctccttccagcagtagcgataggagagaaagaaggaaaagaactcaaaagttatgtcctatcaagtaaaactgctactgcagctctagcttttaaaggtacaatattaggaataaaaccatctcctgtagtggcagcattttcacaagagggcctaattttctcagccttgaaattctgaagcctgacttag

SEQ ID NO: 159362 - DNA, 251 bp, Glycine max
cgcactttcattctctcttaaaaatctaaatcccttttaggtcttcatcttagcctctgatgcaggtatgggttcgaaacgcatcctgaaggtgctcaaggatttgcagaaggatcctcctacgtcatgcagcgcaggtcatgtggctgaagacatgtttcactggcaagccacgatcatgggacctgctgatagcgcatatgcatgtgtgtattcttagtgtcaattcattttcctcctgactatgcctt

SEQ ID NO: 159363 - DNA, 259 bp, Glycine max
gacactttggtgggattaactaccctcttgggggtgttggtgggatagcaaagtccttagcaaaaggtctcgttgatcagggtagcgagatagtttacaaagcaaatgtcaccagtattataattgagcagggcaaagctgtaggtgtgaggctttcaaatggcagagagttctttgccaaaactataatatcaaatgctaccagatgggtacatttggaaagttactgaagggcgttccacttccgaaagaagaagag

SEQ ID NO: 159364 - DNA, 258 bp, Glycine max
aacaagaacataagggaaccacagcggcggtaacagaagaacaagcagagaatgggtcgagtgagaacgaagacggtgaagaaatcctctcggcaggtgatagagcgtcactactcgcgcatgaccctggacttccacacgaacaagaagcttctggaggaagtggcgataatcccgtcgaagaggctaaggaacaagatcgcggggtctcgacgcacctgatgaagcgcatccagaagggccctgtgcgcggcatct

SEQ ID NO: 159365 - DNA, 259 bp, Glycine max
gcaaaactgcaggctgctgaacagaagaggttgagcatcttgactaaggcccaaatgcgtttagcaagactggatgaattgcgtcaagcagctaaaagtggagtagaaatgcgctatgagaatgaacgtgtgaggcttggaacaaaagttgaatcacgggttcagcaggcagaggctaataggatgcttattctcaaggctctcaggcaagaagggcttctcatagagaaaggtcatctcagacattgatgagaaggat

SEQ ID NO: 159366 - DNA, 262 bp, Glycine max
caataacatagcatagagtgagaagtgagaagagaaaaatggcaatctccatacccagtagacaacttttcatagatggagagtggaaagtccctcttctcaacaatcggtttccgatcatcaaccccgctactgaagacatcatagggcatattccagccgctactaaggaagatgttgaccttgcggtggatgctgctaaaagagcctttcccataacaaaggcaaagattggtcttcagctcctggctctgttcgtgct

SEQ ID NO: 159367 - DNA, 207 bp, Glycine max
gagagtggtttcagtgagtgatcggtgttcacttgatccttcataagtcgtcatcatcatcatcatcatcaccgttgattgaagaagatgccgatcagaaacatcgccatcggaaggcctgaagaggctactcaccccgacacgttgaaggcggggttggctgagttcatctccaccttgatcttcgtgttcgccggttcaggttcg

SEQ ID NO: 159368 - DNA, 255 bp, Glycine max
attagcacttcttcttttcacactgccgctgcaacaatggcttcagagaagaaactttcgaacccaatgagggagataaaagtgcagaagctcgttctcaatatctctgttggcgagagtggagatcgtctcaccagagccgccaaggttcacttcactcattgctcccgcttttttttttttttaatttaaatttctgtttttcttcttgcaggtgttggaacaacttagtggccaaaccccagtgttttccaa

SEQ ID NO: 159369 - DNA, 257 bp, Glycine max
tagctatttccctctcttaacacaattaacaaagatatatcatatcatatcaactccaaatgatgaaaaatattgggttgtttcttcttgtggtggtggctacttttgtggtggcagccacagctggtagcctttaccaagactttgaaataacatggggtggtgagcgtgccaaaatctatgaaaatggaaatcttctcaccctctccctagacagagcctctggctctggctttcgttccaaaaaagaatacttg

SEQ ID NO: 159370 - DNA, 258 bp, Glycine max
ggatgctcttgtcaaggctgggattgaaattgacgaggaagagcttgctcgctttgtggagcatgttgacaaggataataatggaattatcacttttgaagagtggagagattttcttctactttatcctcatgaagcgactattgaaaacatatatcatcattgggagagggtgtgccttgttgacattggagaacaagctgttattcccgaaggcatcagcaagcatgtgcacaggagcagatattttattgcagg

SEQ ID NO: 159371 - DNA, 260 bp, Glycine max
agaaactggtgtctccgtttgcagcgtcactacttgctacaacacgagccatgaaacccaccttcccaatccactccaattcaaatttctcactataaaccacttcttcaaacttccctccgcaattcttaattcattcgaaccatggcagcgtcctcgctctgttcctctttcacctccaaaacatggaacccgcaccggccgcactcatgctatcaccacaaaaccccaagcccgccgtattccacctttcttcgcgg

SEQ ID NO: 159372 - DNA, 257 bp, Glycine max
agtggctataacactacttgcattgagttagactttgatagtttgattagctctaataaggttaaggaccagagaaagagagaaagaaacagaatttggaagaaaaaaagcacaagatgggttattggaagtctaaggttcttcccaagatcaagaaggtttttgagaagatagcaccaagaaagctgcgctgctgaggccaccaagtcctttgatgagtcaaaggaggaatacaacaaagcctttgaagaaaagaa

SEQ ID NO: 159373 - DNA, 258 bp, Glycine max
aaaaaagaagggagagtgtacgagcgaattatctctctctatatatagatagataaatgataaaagcctcgagggtccgtcccatccctgaaaatgctatgaggtgttgggaaatggttgaagtagttgaataggaggatcgctatgactatagctcttggtaaatttaccaaagatgaaaatgatttatgtgatattatggatgactggttgcggagggaccgtttcgtttttgtaggttggtccggtctattactc

SEQ ID NO: 159374 - DNA, 259 bp, Glycine max
gcaaagatgacaggtgggatgtttggaaggaaggggcaaaagataaaggggacagtggtgttgatgccaaagaatgtgttggacttcaacgccataacctccgtcggaaaaggcagtgctaaggacaccgccaccgatttcttgggcaaaggcttggacgcattaggtcatgcagttgatgctctcactgccttcgctggccatagcatctccttgcagcttatcagtgctactcagactgatggtagtggaaaaggaa

SEQ ID NO: 159375 - DNA, 258 bp, Glycine max
agcacaagccaggttgagagatggagggaagtatccggtgctctgccaactacgttcctctcactccaatcagcttcttggaccgcgccgccgtcgtttaccgcgacagactttctcttgtctccggtgacgttacctacacgtggacccagacacaccaacgctgcatcaaacttgcttcttccatttctcaacttggtgtcggtctttctcccctcgatgtggttgctctattggcccctaatgttccagctatgt

SEQ ID NO: 159376 - DNA, 259 bp, Glycine max
gtgttattttgagtatcagcatcaatggctccaattgcagtgggaaacgtgattccagacggcattttggcttacttggatgaagaaaacaaaccccaaactgtctccattcactctctcgccaccggcaagaaagtcatcatctttggggttcccggtgccttcactcctacttgcagcttgaagcacgtcctggcttcattgagagagcagaagagctgaaagggaagggtgtggacgaaataatctgtatcagtgt

SEQ ID NO: 159377 - DNA, 255 bp, Glycine max
gagaaaatctggcatcacactttctacaacgagctgcgtgtggccccggaagagcaccctgttctcctcacagaagcaccacttaatcctaaggccaaccgtgagaaaatgacacagattatgtttgagaccttcaacactccagctatgtatgttgccatccaagcagtgctttctctttatgctagtggccgtacaactggtattgttctggattctggtgatggtgtcagccacacagttccaatctatgaa

SEQ ID NO: 159378 - DNA, 139 bp, Glycine max
atcaaacacaaaatggaaaagaatgtggggattctcgccattgacatctacttccctcccgcttgcgttcagcaggaagcattggagactcatgatggtgccagtgaagggaagtataccattggacttggccaagact

SEQ ID NO: 159379 - DNA, 253 bp, Glycine max
ctcatttttttaggctcataaatcttttttatgggtttcagggtcactactactctgtctctgctctccctgttttggctcttgtccctgcaccaagcaagagctgcaaagttccacaatgtgagtggcttgagagggaaaagccagttgtagcaaatgggtgcaatttgttcctgggaagttgggtggttgacacgtcttatcctctctatgactcttcaacatgccccttcattgatcccgagtttgattg

SEQ ID NO: 159380 - DNA, 254 bp, Glycine max
gaagtaatggcgaacatagacatcgaagggatcttgaagcagcagcagccttatgatgggcgcgttccgaagacgaagatagtgtgtactttgggccctgcttctcgatccgtagaaatgaccgagaagcttctgagggcagggatgaacgttgctcgtttcaatttctctcatggcacccacgactatcaccaggaaaccctcaacaatctcaagactgccatgcacaacactggcatactctgtgccgtcat

SEQ ID NO: 159381 - DNA, 257 bp, Glycine max
gggaagtatccggtgctctgccaactacgttcctctcactccaatcagcttcttggaccgcgccgccgtcgtttaccgcgacagactttctcttgtctccggtgacgttacctacacgtggacccagacacaccaacgctgcatcaaacttgcttcttccatttctcaacttggtgtcggtctttctccctcgatgtggttgctgtattggcccctaatgttccagctatgtatgagatgcattttgctgttcccat

SEQ ID NO: 159382 - DNA, 257 bp, Glycine max
ctcgagccgattcggctcgaggcacggtcgccgaagaagtaagaacaccaatgccagagaacgaaagcgcggcggcggcgacggtggaggaggagaacaacaccgccctgttcggaaaatacgaggttggaaggctcctaggatgcggcgcgttcgcgaaggtgtaccacgcgcgcaacaccgagactgggcagagcgtggcggttaaagtcataagcaaaaagaaactaaactcgtcagggttagcttccaacgtg

SEQ ID NO: 159383 - DNA, 253 bp, Glycine max
cattctctctgtgtatttgctacctctcccttcaagatgcagatcttcgtcaagaccctcaccggcaagaccatcacccttgaggtggaaagctctgacaccatcgacaacgtcaaggccaagatccaggacaaggaaggtatccccccggaccagcaacgtctcattttcgccggatagcaacttgaggacggccgtacccttgctgactacaacattcagaaggagagtactcttcacctcgtcctccgtc

SEQ ID NO: 159384 - DNA, 254 bp, Glycine max
gccaagtgaaagtgagaaacaataaaaatcaaagagcataatgtcagggatcattcacaagattggggagacccttcatgtgggagggcacaagaaggaggaggagcataagggtgagcaccatgctggagaatacaaaggggagcaccatggtgaacacagtagtgagtacaaaggagagcatcaggtgaacacaaagctggagagtaccatggtgagcacaagccagagcacaaagaggggttcctagacaa

SEQ ID NO: 159385 - DNA, 250 bp, Glycine max
ggactgaacatccaagaagcacatgcattttctacaactgatggtttctcattagatgtgtttgttgttgaaggatggccctatgaggaaacagaaaagcttaaagcagctttggaaagtgaagtcttgaagaagattgagagacaggtgaggtctagtccacaatccgtatcttcagttgacgagcctgatcaagcaaagttgtacagtgaactggatcatgtgacaataccaaatgatgggacagatg

SEQ ID NO: 159386 - DNA, 251 bp, Glycine max
aagaaaatgggtagaggagaagatcgagaaggggtcgcagcagccgggggctttttctggtcctacaccgacgaaccccatgccacacgacgtcgtctgatcctctccaaataccctcaaatcaaacaactctttggccccgaccactccgcttttttcaagattagtggagttgttttgcttcagcttggtactggtgctttactccatgatgctggctggctgaagatttttttagtagcatacttttt

SEQ ID NO: 159387 - DNA, 250 bp, Glycine max
cttagctcaaacctcacctcaataatctttcgtgctagctagcttaatcatattccaattccaacagaaccaaattctgctagctagctagtacgtcaaaggaaataaaataatatggcattcagcgggacccaacagaaatgcgaggcttgcgacaaaactggtcacttggtcgaaagttatctgtcgatggggctgcttatcacaagaattgcttcagatgcagccattgcaatgggcttcttgcgag

SEQ ID NO: 159388 - DNA, 240 bp, Glycine max
tgcagatctcaaacgaagcccttttctctctctcttcaatttcacccttttagcatttgtacattcctttcccttccttgaatcgttcttaattgcgagatgggatatcggagaagttgattggcctcccattaattgcaggtctgaatgatctgatggagtctaaagttgggaagaagaatcgtctagtagtaagtcccttttgtacgaagctcctctcgattacaccattgatgacgt

SEQ ID NO: 159389 - DNA, 246 bp, Glycine max
gaaaaaatgggttttcttcttctatgtggacggtgtgtgtgattttggcatcactggcctctgcagcactctgtgccaacccacgcaggccagtggatgtacaatttggccgaaactacgtgcccacatgggcctttgatcacatcaaatatttcaatggtggttctgacattcagcttcatcttgacaagtacactggtactgtcttccagtccaaagggtcttacttgtttggtcacttcagca

SEQ ID NO: 159390 - DNA, 245 bp, Glycine max
ctggactgccaaggtgttctgtgaagaggagctagttgaagcaattgccacagccacaggacccaagatagactccttatgcttcattgaggtgattgttcataaggatgacaccagtaaagaattgcttgaatggggctcaagggtttctgctgccaatagccgtcctcccaatcctcagtaatcttcagaatttatcctatgactaaattgctgcagttgccctttagctctatgaaagtgag

SEQ ID NO: 159391 - DNA, 248 bp, Glycine max
caacagcacaaagcgggttactgtctgttcaagctaccatctctctctctctttcttagtgcctccttgccagaagttaaaatggcccaagaaactttcctattcacatctgaatcagtgaacgaggggcaccctgacaagctctgtgaccagatctccgatgctgtgctcgatgcatgcttggagcaggaccctgacagcaaggttgcctgtgaaacctgcaccaagaccaacatggtgatggtttt

SEQ ID NO: 159392 - DNA, 244 bp, Glycine max
catggatcaggcaaggtcaagatcggaatcaacggtaagtcttctccatccttcgatctctcttctgttgtttcagatcagcttagttattttttctactattccattttcgctgtttttttctctctcaattttatctaaatcgaaatgtaacaggatttggaagaattggccgtttggttgccagagtcgctctgcaaagagacgatgtggagctcgttgccgttaacgaccctttcattac

SEQ ID NO: 159393 - DNA, 247 bp, Glycine max
gcctcgtccctgccatgagaacccttcactcagccctcctagccgagggcataaccgacattaaggtaaccactgctcactctctggcgataatgcggtcatcgataccaccaagtatgggcaggttcaggcccgggtacgcaaagcacgtgttgggcccaatgctgaagtttctgagggagacgagaacacccttgatggtgaacccgtacccgtacttcggttacaacgggaaaaacgtgaactt

SEQ ID NO: 159394 - DNA, 244 bp, Glycine max
ggttcatccgctcccacaacaagaaccgcttgccctacactctctctgttaatcattttgctgattggacttgggaggagttcaaaagacacagactaggcgctgcccaaaattgctctgccactcttaacggcaaccacaagctcactgatgctgttcttcctcccacgaaagactggaggaaagaaggaatagtgagtgatgttaaagatcaaggcagctgcggatcatgctggacattcag

SEQ ID NO: 159395 - DNA, 248 bp, Glycine max
gaaaaccaaaaaccttactctttttcacgcgacgccctagttcatttttcttctccgttctcttctctctctgttcttcactcactctcattcattcaccatgacgaaacaacatgccaattggtctccttacgataacaacggaggatcatgtgttgcgattgctggagcagattactgcgttatcgccgcagatacgagaatgtccaccggttacaacatcctcactcgcgattactccaaaatct

SEQ ID NO: 159396 - DNA, 247 bp, Glycine max
catgatttgggtcctaggaatgtacttgtcaagggtggtgacctccctaattcgttagatgctattgatgtattctttgatggtgaggagttctacgagctgtgttcaccgcgtgtaaatactcgcaatagtcatggtactggttgtaccttggcatcatgcatagcagcagagctggcaaagggttcatcaatgctttctgcagttaagacagctaaacattttattgaggctgccttggattata

SEQ ID NO: 159397 - DNA, 242 bp, Glycine max
gcatcatggagccatatctaagatacttgtatacatatgtttctatatctggtccacacttaggttatatgtatagttcgaactctatattcaattcaggattgtggctcttgaagaagatcaagggcacacaatgcatccatcaactaactttcacagatgatcatgatcttgagataccttcatctacaatctttcaaagaagaagacacttgcaaacttcaagaatgtgattctgttat

SEQ ID NO: 159398 - DNA, 248 bp, Glycine max
ctttctcctaaaacatctccagtgggttcttcttcttctattacaacaacgtcgtccaagaccatgaccatggccatggccacgatcctgctcctgttcacggtcttcgcggtttcatcggccctagacatgtcgataatctcgtacgacaacgcccacgccgccacgtcgcgcagcacgaggagctgatgtccatgtacgagcagtggctagtaaagcacggcaaggtgtacaacgcgctcggagag

SEQ ID NO: 159399 - DNA, 249 bp, Glycine max
agaaaatcaaactacaatcttccaccaggaccctctcttctcaccatcattagaaactctaaacaactctataaaaagccacagcagacaatggccaagcttgccaaaacctatggccccataatgcgtttcaccataggccaatcaaccaccatagtaatctcctcaatagaagccaccaagaggttctccaaacccatgactcattattctcggacagaacaaaccccgacatcacaacctcgtaca

SEQ ID NO: 159400 - DNA, 261 bp, Glycine max
ctaatttatcgaaaggtagggttttgcagagcctcctcctccgttaccagtttcttcttctttatcctctctcctttcttcttccattcctctaacctaagatgggcaagtcaagcaagaaatcagctatcaaggttgacgctgctccagctgtggttccgccatccaagtctgccaagaagggaggcaagcgacaagctcaagatgaaattgagaagcaagtgagtgccaaaaaacagaagatagaggaggttgctcaga

SEQ ID NO: 159401 - DNA, 257 bp, Glycine max
ctcgccagctcgcgaacgttggcgtcgatgtcatcgaaggaagctttccttcagcgtcgcaggaagacttcaatgctgtcaagatgatagcacaagaagttggcaacaactgtgatgctgatggctatgttcccgtcattgccgccctctgtaggtgcaatgagaaggacattgccacagcgtgggaggctctgaaatacgccaagaggccgaggcttatgcctttcatagcagtgagccccattcacatggagtac

SEQ ID NO: 159402 - DNA, 257 bp, Glycine max
cagaggttcaagatgatgagaattctcaactgcaatcagaagaaaagaagagggaagaagtatttttgaaggacaggatacccacctggtttgcagcttctggatatgtgggcttggctgcgatatccatagcaacaataccaattatcttccctcctctcaaatggtacttggttctgtgctcttacatcctcgcccctgcccttgccttctgcaactcttacggtactggcctcacagactggagtctggcatcc

SEQ ID NO: 159403 - DNA, 257 bp, Glycine max
aaaagacacagactaggcgctgcccaaaattgctctgccactcttaacggcaaccacaagctcactgatgctgttcttcctcccacgaaagactggaggaaagaaggaatagtgagtgatgttaaagatcaaggcagctgcggatcatgctggacattcagcacaactggggctttagaagcagcctatgcacaagcatttgggaagagtatctctctttctgagcagcagctagtggattgtgctggccgtttcaa

SEQ ID NO: 159404 - DNA, 255 bp, Glycine max
tctagatcagggtcactgtggttcttgttgggcatttggtgctgttgaatcattgtcagatcgcttttgcattcattttgatgttaatatctctctctctgttaatgaccttcttgcatgctgtggctttctgtgtggatctggctgtgatggaggatatcccttatatgcatggcgatacttagcccaccatggtgttgtcactgaagagtgtgacccatattttgatcaaattggctgttctcatcctggttg

SEQ ID NO: 159405 - DNA, 253 bp, Glycine max
ttctctattgctcccatccctttcgtttcatacacttttcaaagggcgcttcttcctcatagctggcaaaatggcaaatgcagcgtctggaatggctgtgcatgatgactgcaaactgaggttccaggagcttaaagcaaagcgagtctaccgcttcattacattcaaaattgagcaacaacaagttgtggtcgacaaaataggggaatctacggaaagctatgatgattttcaggccagtttgccagctgat

SEQ ID NO: 159406 - DNA, 253 bp, Glycine max
ctcgagcgcttaaaagagcctttgctttttctttaggcctttccgaattaagtacttcgttcattttctctcgaagcaagaaaaatgttcatcgagagtttcaaggttgagagtcctaacgtgaagtacacagagactgagattcagtccgtgtacaactatgaaaccactgaacttgttcacgagaacaagaatggcacttatcagtgggttgtcaagcccaaaactgtcaaatatgaatttaaaaccaaca

SEQ ID NO: 159407 - DNA, 255 bp, Glycine max
gatcactcttcttccatcctttcctctctctctctccctctgcatttcccaagagcagatattagaagatggcagacgctgaggatattcaaccccttgtttgcgacaatggaactggaatggtgaaggcaggatttgcaggagacgatgccccacgtgcagtgtttcctagcattgttggtggcctcgtcacactggtgtgatggttggtatgggccagaaagatgcatatgttggtgatgaggcacaatctaa

SEQ ID NO: 159408 - DNA, 262 bp, Glycine max
aacaaaggcattgttatttctcaaaggaagtacgctttggatattctaaatgaaactggcatgagtggacattgacagtcccatgaattcaaatcaaaagttgatggctgaacagggtgaacccctctcagatcctgagaggtaaggagactagttgggaaactcatttatctcacaatcaccagacctgacatctcttatgcagttggagcagtgagtcaatttatgcagaatccttacactaatcattggaatgctgtca

SEQ ID NO: 159409 - DNA, 254 bp, Glycine max
ttttgcgatcgcctttccttttatggattaccgttattttattttttatttttatattcctacaaaatttacctttccgccgtgggaaagaatcatgagttgtttcagctgttgcgaagaggatgacctccataaggctgctgaaagtggaggaccctatgttgtaaaaaatccagcagggaatgatggaaattatcatgcttctcaaactgcaaagcagggcactcagcctgttaaacctcagcccattgaag

SEQ ID NO: 159410 - DNA, 252 bp, Glycine max
acgacatgcttcctctttcccttctcaagactgcccaaggccaccctatgttggtggaactgaaaaatggggagacatataacgggcatttggttaattgcgacacatggatgaacatccatctgcgagaagtcatttgtacatctaaagacggagatagattttggaggatgcctgaatgctacatacgaggcaatacaatcaagtaccttcgagtacctgatgaggttattgataaagttcaagaagaaa

SEQ ID NO: 159411 - DNA, 250 bp, Glycine max
gacaaatgctccactggaggaagtgcgcaagaatatttggttggtggactcaaagggattgattgtcagttcccgcaaagattcgctccaacattttaagaagccctgggctcatgagcatgaacctgttagaaatcttgtagatgctgttaataaaattaagccaacagtgttgattggaacatcgggacaaggaagaacatttactaaagaggtgattgaggcaatggcttctattaacgagagacct

SEQ ID NO: 159412 - DNA, 250 bp, Glycine max
ggtagtcaaggcctaagatcagaaaacagtgctgaccagaataaaaggcttggtaaaaaaaggaaggaccaaagtgatgaagaagaagaaggtggggaagagaatgaagatgatgaggacccctcagcacagaagaaagctcgtgtggtttggtctgttgagctgcatagaaaatttgttgctgcagttaatcaactgggcctagataaggctgttcccaagaaaatacttgacctaatgaatgttgaag

SEQ ID NO: 159413 - DNA, 251 bp, Glycine max
ctgaatctgcgtgtgtttgtgaattgttgttgagatctgaatcaaaatcagaaacgataatggctacaccggaccacctcttcaacctccgcaacaacttctacctcggcgcttaccaagccgccatcaacagcagcgacgttgccaacctctcccaagaagataccctcgagcgcgacaccctcgtccaccgctgctacatcgccctcggccagctccagttcgtcatctccgagatccacgacgatgct

SEQ ID NO: 159414 - DNA, 261 bp, Glycine max
gctatgggaaagtcttacccaactgtgagtgctgattaccagaaggccgttgagaaggcgaagaagaagctcagaggcttcatcgctgagaagagatgcgctcctctaatgctccgtttggcatggcactctgctggaacctttgacaagggcacgaagaccggtggacccttcggaaccatcaagcaccctgccgaactggctcacagcgctaacaacggtcttgacatcgctgttaggcttttggagccactcaaggcg

SEQ ID NO: 159415 - DNA, 252 bp, Glycine max
ggggttcctaattactgtgcagagcttgtagccatggcattcatagagaaagctgtgtttttcttgatgatgatgatgacagctttccaagtttcacatgcagctgtgcacaaggttggggactctgctggttggaccatcattggtaatatagattacaagaagtgggctgctactaagaacttccaagttggtgacactatcatttttgaatataatgcgaagttccacaacgtgatgcgagtgacgcat

SEQ ID NO: 159416 - DNA, 254 bp, Glycine max
tgagaaaatgccatacctacacgctgtggtgaaggagcttctaagaaagcaccctccaacacactttgtgctaacacatgctgtgactgagcccaccactttgggagggtatgacataccaattgatgcaaatgttgaggtgtacacaccagccattgctgaggaccccaaaaattggttaaaccctgagaagtttgaccctgagagattcatctctgggggtgaggaagcagacataactggggtcacagggg

SEQ ID NO: 159417 - DNA, 251 bp, Glycine max
aaagaaaaataaaaacccttagccaacacaaccatcatggccacctctgctattcagcaatcagcattcactggtcaaactgctctgaagcagctcaatgagttcgtccgcaagaccggtggcgccggcaaaggtcgcactaacatgcgccgcaccgtcaagagtgctcctcagagcatttggtatggccctgaccgtcccaagtacttgggtccattctcggagcagattccatcatacctgaccggaga

SEQ ID NO: 159418 - DNA, 252 bp, Glycine max
agatattataccactgttggagaaaaccactcagttgagagctcctttgcttatcattgctgaggatgtcactggtgaggctttggccacccttgttgtgaataagctacgtggtatccttaacgttgctgccatcaaagctcctggctttggtgagcggcgaaaggccctgcttcaagacattgctatattgactggtgctgagttccaagctagtgatctgggtctgcttgttgaaaacacctcagtgga

SEQ ID NO: 159419 - DNA, 248 bp, Glycine max
acaagattcacgccgagaacaattctctctacaacaccccaccgtgctacgggatttacatgtgtgggttggtttttgaggacttgttggagcagggtgggttgggtgaggttgagaagaagaatgtgaagaaagctgaggttttgtataacacaattgatggaagcaatggtttttataagtgtccggtggagaagtcggtgaggtcgttgatgaatgtgccgtttacgttggagaagccggagctg

SEQ ID NO: 159420 - DNA, 248 bp, Glycine max
caagatcggaatcaacggatttggaagaattggccgtttggtagccagagtggctctgcagagagacgatgttgaactcgttgccgttaacgaccctttcatcaccaccgattacatgacatacatgtttaaatacgacagtgttcatggacactggaagcatcacgatgtcaccgttaaggacgagaagacccttctcttcggtgacaagccagtcactatttttggacacagaaaccctgaagaga

SEQ ID NO: 159421 - DNA, 250 bp, Glycine max
cttcttcttcttcccttttcattgaccttttccttccttcgtgctccaatggcgactgttccgcacccattatccctcgcaagtgtaggttttgctaaccgaacctcctccatctccagatccactctcaaatgctgcgctcaatctccttctccttcactagttgacaacgcccagaagtttctcgaagcttccaagaaggggaacgtcattcctctcttccgctgcatattttccgatcacctcactc

SEQ ID NO: 159422 - DNA, 253 bp, Glycine max
cagaatcaccggcagcaaaaactacgtcgatggcatcaaaacttacaacaccgctaccttcggtgtgaacgctgctaacttcatggcgatgaacatcgggttcgagaacacagcaggagctgagaagcaccaagccgttgccctgagggtaacagcagacaaggctgtattctacaactgcaacatggatgggttccaggacaccctctacacacaatcccagcgtcagttctaccgcgactgcaccgtcacg

SEQ ID NO: 159423 - DNA, 252 bp, Glycine max
agcaaatgttgtacaatcaagtgtgctgcctgctatgtttagggacacatataatgcgatcacccaagggaatcccatgtggaataatttatctgttccaactggcactctttatgcttgggaccctacatcaacttatattcatgagccaccttattttagagatatgagcatgtctcccccaggctctcatggagtgaaagatgcttactgtttgctcaactttggagacagtatcacaactgaccacat

SEQ ID NO: 159424 - DNA, 251 bp, Glycine max
atcgttactccgcatatgaacactgggctaagattgaggttccaaaggacaaggaggagcttgcagccctccaagcaaggctaagaaagcggtttcctgtggatgcatacaataaagcaagaaaggaattggaccccaataggatcctttcgaacaacatgttggaaaagctcttcccacaatcagacaccatataattttgtgttggttgtgtctatattgtccatattttttatgtttactatatattc

SEQ ID NO: 159425 - DNA, 250 bp, Glycine max
agaatattggagattaatgcagatcacccaattatcaaagacttaagtgctgcctgcaagaatgcacctgacagcagcgaagctaagcgagcagttgacctcttatacgacacggctctaatttctagtggattttctcctgacagccctgctgagttaggaaataagatttacgaaatgatggccttggccttgggaggaagatggggtagatcagaagaagaggagggagatgcttctgttgaagctg

SEQ ID NO: 159426 - DNA, 248 bp, Glycine max
accaagcttctctccacgcccttcttgggtaatctgaagtgcagcgatggcggatggattgcactcgcggcatccatcagtagttcagaagttatctggacagtcttatttgttgtctaggcttgcccctactcactcaagaaactattccacaactggtagttacttcaatggaggcttgcagtcttcgggtttggttccagtcatggcacatgcaccggctgagaaaggagtgtctggatttttgt

SEQ ID NO: 159427 - DNA, 248 bp, Glycine max
attttagaagaataccccctcttttgctgcatcagaggagttgtaaattaagagcatggctgcacaagctcttgtatcatcatcttctcttaccttctcagcggaggctgcaagacaaagtcttggaccaagatcactccaatctccatttggcttctccagaaaagcctcctttcttgttaaggcagctgctaccccccctgtcaagcaaggatcagacagacctttgtggtttgcatcaaagcaaa

SEQ ID NO: 159428 - DNA, 247 bp, Glycine max
gcactttggctttggttctcgcgattctgatctctttgcagggaaccccccacgttagatccgatgcctccgatcatcgttacaaggacggagactccgttcctctttacgccaacaaagtcggtccctttcacaaccccagtgaaacgtatcggtactttgacctgccattctgtgtaacaggtcatgagaaagataagactgaagccctcggtgaggtgttaaatggcgatcgccttgttagtgc

SEQ ID NO: 159429 - DNA, 250 bp, Glycine max
aatctttgcgccctgataacatcaggatgtttgtattggatgaggcagatgagatgctctctcgaggtttcaaggatcagatctatgatatttttcagctgctgccacctaagatccaggttggggttttctctgccacaatgcctcctgaagccctggaaatcacaaggaagtttatgaacaaacctgtgaggattcttgtaaaacgtgatgagcttaccttggaggggatcaagcaattttttgtcaa

SEQ ID NO: 159430 - DNA, 253 bp, Glycine max
catatagagaacttcctcttcgtttcgctgattttggggttttgcatcggaatgaggctagtggcgccctgagtggattaacacgtgttaggagattccagcaggacgatgcacatattttctgcagggagtctcagataaaggatgaagtgaggaacagcttgaattcatcaattatgtctataagatatttggtttcacatatgagctgaagctttcaacgaggccagaaaaatacctaggagatattgca

SEQ ID NO: 159431 - DNA, 253 bp, Glycine max
gtggcactgctgcaagtgcaactccaagaagcgcagtgccaagccaccatgtttcaacattcaacagaagcctttttccttccacttttctctttggaattggttcttctgcttaccaggcagaaggagcagcaagtgtagatgggagaggaccaagcatatgggacacctacactagacagcatactgaaaagatttgggatcatagcaccggtgacatgggagctgatttttatcatcgatacaagggtga

SEQ ID NO: 159432 - DNA, 252 bp, Glycine max
cccggaatctgctacggccagctcggagacaaccttccaccgccgcgagaatctgtctccctcataacctccgtccatgcgaagcgcgtgaagctctacgacgcgaacccatccatcctccacgcgcttcaagacacgcgcctgcaagtttccatcatggtccccaacgacctcatcttgaacatctccacgaaccaaaccctgtccgaccagtgggtctccgacaacgtcgtaccctaccacccccgcacc

SEQ ID NO: 159433 - DNA, 250 bp, Glycine max
ctccaattcaaccatggcttcgagactcacggtaacagccttggtgctgatagctttggcaacagtttctctccaaacctcagcttcatcagtgggtaaattcatcgacgaaaccatcacttcccacaagatcgtcattttttccaagacctattgcccgtactgtagaagggcaaaagctgttttcaaagagttgaaccaagttccacatgttgttgagctcgacgagagagaggatggttcaaagatt

SEQ ID NO: 159434 - DNA, 248 bp, Glycine max
cactgctttctttaagtgccatggacatgagcaatttgagatgacgggtttggatcctgagtataataggttgttcaatgagggcatggtgtgcactgctagggttgtgtccaaggctgtgatcactggctacaaagatgggttcaaccagattaagtccttggttgatgttggaggtggcattggagggtctctttcggagattgttagggcttatcctcatatcaatgccatcaactttgacttgc

SEQ ID NO: 159435 - DNA, 248 bp, Glycine max
gaaatagaaaaagcaaaactggtttctcgcatttcctccgaaacaaaccgtttcgctcgtttctcggatctgcaatggaagccccacccaaaggcgctgctggaagaagaggtgacaggaagaagtccgtttccaaatccatcaaagctggcctccaattccccgtcagccgcgtcgccaggtacttgaagaaaggccgttactctcgccgccttggcaccggcgctcccatttatctcgccgccgtt

SEQ ID NO: 159436 - DNA, 246 bp, Glycine max
cagagatcagcactctaaaactcctagcttaatatttgagtatgtcaacagtacagattttaaagttttgtatccaaccgtgactgattatgacatacgctattacatatatgagcttcttaaggccttagattactgtcattctcaaggcataatgcatagagatgtcaagcctcataatgttatgatagatcatgaattacggaaacttcgcttgatagattggggtcttgctgaattttatca

SEQ ID NO: 159437 - DNA, 244 bp, Glycine max
gaacttttggaccacctagacaaccctgtggccaacaatgcttgggtctatgccactaagttttccccagggtcttaaaatgtatatgacttcttcttccctaatccctatgatcccatccctcgtgcttacctttgtgatttatgtgtagattatatgatcacaataattgttggattagtgtacttcttaaggactaaggttcaatttaaacctcggatgtctcttgtttgttaatatagtt

SEQ ID NO: 159438 - DNA, 244 bp, Glycine max
atcaaatacctcaatggtggttctgagattcagcttcatcttgataaatacacaggtactggcttccaatcaaaagggtcctacttgtttggtcacttcagcatgtacataaaattggttgctggtgattcagctggcacagtcactgctttctatttatcatccacaaactcagaacatgatgaaatagactttgagttcttgggaaacagaaccgggcaaccttatattttgcaaacaaatg

SEQ ID NO: 159439 - DNA, 245 bp, Glycine max
cctgccacaacactacactagcaagcacacacctttagcacaatcaccaatggcttcttccgacagcaagcttcccctgagacccatccctgggagctacgggcttcctttctttggacccatgattgacagacatgactatttctacaaccaaggacgcgacaagttctttgccgaacgaattaaaaagtacaactctacggttatacgaccaacaagccaccgggtcctgtcatttcctctaa

SEQ ID NO: 159440 - DNA, 252 bp, Glycine max
gaacaatccagcaaaatatgttgggctcaaaggttatggtttgacaatttccggtaggatcccattggtatcacttatcacaaaagagaacaagcgatacttggagaccaaacgtgtgaaaatgggtcacgtatatggctcggaatttaacagcaaattgaactatcaagacagtggcaatggtaaagtcaatagtgatgatgattctaatgctgctcctggcttataaagctgcttctcttctgccagata

SEQ ID NO: 159441 - DNA, 250 bp, Glycine max
gctggatgcgcccagaggacatggactatgaccgccctgtgactgaatgccatagttgttctgatcttgcagctgagatggctgctgccttggcatctgcttccattgttttcaaggacaacaaggcctattcgaagaaactagttcatggtgctaccacgctgttcaagttttctagggagcagagaggcaggtacagtgcagggagttcggaagcttctatattttacaattctaccagttactggga

SEQ ID NO: 159442 - DNA, 243 bp, Glycine max
ggcgtaacaaaagttgcgtagcatactctgattcattagtgaagaaaaatggcaaccatcatcgccggcatcccaactacatcgatcactcgcgcaggtcttgtgctcaaacgacctgttggagcctcgtcctctaccgttcttggattgccagcaatggctaaggcagggaaagtgaggtgctccatggaggaaaagccttcaagcagctcaaatatagggatgggggcatccttgttagca

SEQ ID NO: 159443 - DNA, 245 bp, Glycine max
ctattattctcgttttcaatatgcagatcttcgtcaaaaccctaaccggtaaaacgattacgctagaggtcgagtcctccgacacaatcgataacgtgaaagctaaaatccaagacaaggaaggcattccaccggatcagcagcgtttgatcttcgccggtaaacaactcgaagacggcagaactctcgccgattacaatatccagaaagaatcgacgctccacctcgtcctccgccttcgcggt

SEQ ID NO: 159444 - DNA, 243 bp, Glycine max
atcattcaccaatgcatgtggcacatgccacccaaaacctaccccttctcctcctcctccatcaggaaagtgccctaaggacacattgaagctaggggtgtgtgcagatattctaggtcttgttactgttgttgttggctcccctgtctccagcaagtgttgtgcattgcttgaaggtttggctgatttggaggctgcactttgcctttgcactgctattaaggccaatgttcttggaatcaa

SEQ ID NO: 159445 - DNA, 243 bp, Glycine max
  unsure (1)..(243): unsure at all n locations
cgtgtcaatttctaaatccaccaccacaccctctcttctattctctattattattatctccacacccttcactctctctcactcttctctcgaatcttccaccgcaatggccaccgctgccgagaaactctccgctctcaaatccgccgtcgccggattgaacgaaatcagtgagaatgagaagaacggattcatcagcctcgtcggccgctatctcagtggcgaangcagcatgtggaatgg

SEQ ID NO: 159446 - DNA, 241 bp, Glycine max
tgatggaagaggtgtcgatgtttacattgccaagggtgctggcatcacggtgcagtttgtgaagaacatcatcatccatgggatcaaggtctttgacatcgtgattcgtgagggtgggatgatcagagattctgagacacattatggtttcaggactaagagtgatggtgatggcatttccatctttggtagcagcaatgtttggattgaccatgtttccatgagaaattgtagtgatgga

SEQ ID NO: 159447 - DNA, 255 bp, Glycine max
cgtacgtgaggtcgggctatgggacttttgtctacactcgccctcttgatgcacaagctccttcctctaaggcacagctttgcgaggagttcgactctatgggggtcgcacttgtccatggagaacttgagcatgaccagattctggcagtgattaggcaagtagacattgtgatatgttctcttccataccctcaagtgatggagcaactcgaaattatagatgctatcacagttgctggtaatatggggggat

SEQ ID NO: 159448 - DNA, 269 bp, Glycine max
gtgatgtggagacaaatgagtgtttggagaataatggtggttgttggcaggataaagtagctaacatcaccgcatgcaaggatacgttccgtgggagagtatgtgaatgccccctggtggatggtgtgcaatttaaaggagacggatatacaacctgtgcagctagtggacctgggcattgcaagataaacaatggaggttgttggcatgaagctaggaatggactgcatattctgcttgttcggatgatggaggggttaaatgcaagt

SEQ ID NO: 159449 - DNA, 266 bp, Glycine max
caagctttccattctcatccctgctattccagctgccatcgttgctgagtgctttggctttggaagaccttggatttttatattaagcttacttggacttacaccacttgctgaacgtgtgagcttcattacagaacaagttgccttttacactggtcccacagttggaggacttctgaatgctacatgtgggaatgttactgagctcataatagcaatatttgcccttagcagtaacaaaattgccgtggtcaagtattctctgt

SEQ ID NO: 159450 - DNA, 254 bp, Glycine max
aaattgagcaatgaatttgtaaatagggcaaaagtaatggataaggaattaatttctctggatatattagaaaaccgaattcgattgtctaatgatgaaactaaaacaaaatatttaactaaaatatatgatcctttcctgaacggacgctttcgtggacaaatcgaaaatgttttttcaacctcaatccaatatgaaaaaaatgaaaaaaaaaataccattttgataaataaaattcatggtatccttatttc

SEQ ID NO: 159451 - DNA, 258 bp, Glycine max
gttccctcttcatccattctcagcctcaaggaaattcatttggtgggaaaatccaagaagagggtggaatttcaagccagggaagatggattatttcaatgcaccaggaagaaaccatctctttgttccggggccggttaacatcccggaccagatcattcgggccatgaacagaaacaatgaggactaccgttctccagcaattccagctatgaccaaacactgcttgaggatgtcaagaagattttcaagaccata

SEQ ID NO: 159452 - DNA, 262 bp, Glycine max
gatgccatgacaaggcattctgaggccacggacttcagagattggtgtgagaatgagtgcgttaggcttattgggacaagagatacaagtttccttgaattttgcttgaagcaatctagatcagaagctgagatgcttcttatagaaaaccttggatcatatgatcctgaccatcaattcattgataaattcctcaattacaaggagttgttaccgtcagacgttttggacatagcttttcagagtaggaatgataagagag

SEQ ID NO: 159453 - DNA, 265 bp, Glycine max
gttagttcattctctttgcgcagttccctacctctcctttcaagatgcagatcttcgtcaagaccctcaccggaaagaccatcacccttgaggtggaaagctctgacaccatcgacaacgtcaaggccaagatccaggacaaggaaggaattgccccggatcagcaacgtctcatcttcgccggaaagcagctcgaggacggccgtaccctcgccgactacacatccagaaggagtcaacccttcaccttgtccttcgtctccgt

SEQ ID NO: 159454 - DNA, 265 bp, Glycine max
ccctaaacgactctatctctcttcgttttgttcttccttgcgctcctcctcgttcgttcgttctccctcgcgtagatcggcaatggcggagaccgagacgtttgctttccaggctgagatcaaccagctcctcagtctcatcatcaacaccttctactccaacaaggaaatcttccttcgtgaactcatcagcaacgcctctgatgctttggacgagattaatttgagagtttgacggacaagagcaagctcgatgctcagccag

SEQ ID NO: 159455 - DNA, 253 bp, Glycine max
cccaagcgcgccgtgagctcttcgacccgaaatccgaacccgaattcggtttcaatctcagagagagagagagagagggagagagcgaaacactgacctagctcgcagaatcgacaaccacttctcactcttcaatcgcgactgtgtctttgatgggtccgaggtatgcgccaccagacccaacactccctaaaccatggcggggtcttgtggatggcaagactgggtatctttagttttggaatcctgagac

SEQ ID NO: 159456 - DNA, 260 bp, Glycine max
  unsure (1)..(260): unsure at all n locations
cttgagcnttatgttgtcccaactcccgcaactgctgcaaattcagcacatgtatatgccgctaacatgacagagaatccaaggtcactaatttgtgggtctggcagcagttcatatcccatcaaggagatgcaggttattgtgcctgatccatctaagatttttcanagttctggaatggttgantccaagtcagttggaacnttttcacctctgcaaaagcaagagagtcagaggggactttttgttgatagaggtgt

SEQ ID NO: 159457 - DNA, 257 bp, Glycine max
tgcgcattcaacctaccttcgctattgcatggtcaaatcttgctggtctgttcatggagtctggtgatttcaacagagcccttcagtattacaaggaagcagtaaaactaaaaccttccttccctgatgcatatctgaaccttgggaatgtatacaaggctttagggatgcctcaagaagctattgcatgttatcaacatgctcttcagacacggcaaactatggcatggcttatggtaatttggccagtatatatt

SEQ ID NO: 159458 - DNA, 255 bp, Glycine max
agcgcggcgaaaaccaatgggttgataaaatttacgagctcatggaagctgtggatgactacattcccatccctcagcgccaaactgaacttccctttttgctggccattgaggatgttttcaccatcaccggtcgtggaaccgtcgccaccggaagggttgagagaggtactattagggttggagagactgttgatattgttggtgtgaaggagataggaacaccactgtgactggggtggaaatgtttcagaa

SEQ ID NO: 159459 - DNA, 253 bp, Glycine max
gttgggttttgtggtcatgtccatgactgtgagagagtatgccccatttatcagaatcagtgtgtgaatgaagaaaagcatcactactctggcactgtgaatggaacagttcatgtggttgttggtggagggggaagtcacctgtcagacttcacaccatcaccccctatttggagtctttatagggacgttgactatgggtttggcaaattgactgctttcaatcattcatatctcttgtttgagtacaaga

SEQ ID NO: 159460 - DNA, 257 bp, Glycine max
ggctacctttccctcccctccttcaccatcttcttcttcttcaattccgtctccaagatctagaatgttttactatgctggaggtgaagaccactatgaggagcctcacttcctccaagcttgttttctttgcagaaaaccactaggccaaagtcgtgacatcttcatgtacagagggaacacaccattttgtagcaaagagtgcagacaggagcaaatagagattgatgaggcaaaggagaaaagttggaagcttt

SEQ ID NO: 159461 - DNA, 217 bp, Glycine max
attcaacttaagagatcaatatggccaccaccactacccagcctccctctaatatctgttttttccttctgttgttgcttctagcacactttcatttgggcataagccaacttgagctgaattactactctaaaagctgcccaaaagctgaagagatcatcaaggaacaagtcacacaactatataacaagcatggaaacactgccgtttcgtgggt

SEQ ID NO: 159462 - DNA, 261 bp, Glycine max
ccattctctctgtgtatttccctacctctcccttcaagatgcagatcttcgtcaagaccctcaccggcaagaccatcacccttgaggtggaaagctctgacaccatcgacaacgtcaaggccaagatccaggacaaggaaggaatccccccggaccagcaacgtctcattttcgccggaaagcaacttgaggacggccgtacccttgctgactacaacttcagaaggagagtactcttcacctcgtcctccgtctccgtgg

SEQ ID NO: 159463 - DNA, 257 bp, Glycine max
ctgggttgcagggaaagagaaaaatgaaatgggttccgatagtagcaacttggagttcttgaaggagatcggtttgggctcctccaacattggttcttacattaatggccgatggaaagccactggttcttctgtcacttctgttaatccttctaacgatcggagcatggctcaagtgactgaagcgactttgcgagattatgaggagggattgaagcttgcagtgaagcagccaagacatggatgactattccggc

SEQ ID NO: 159464 - DNA, 254 bp, Glycine max
tggggttatgggctgcgatatgaatatgggctgtttcgtcagatcatagtggatggctttcaacatgagcaacctgattattggctgaactatggaaacccttgggagatagaacggattcatgtaacatatgaagtgaagttctatgggactgttgaagaggttgagatgaatggagaaaaacatcaagtttgggtccctggagagacggtaaagctgtggcttatgacaacccaatacctggttacgggaca

SEQ ID NO: 159465 - DNA, 253 bp, Glycine max
cccttgctcgcgttcgcgggtttgttcttcctcttccggagagctcaaggcgggcccggtgggctggcgggatgggtgggcccatggactttggacggaacaagtccaagttccaggaagtccccgaaaccggtgtgagcttcgctgacgttgcgggcgcggaccaagcgaagcttgagctccaagaggttgttgatttcttgaagaatccgataagtacaccgcgttgggcgcgaagattccgaaggggtgt

SEQ ID NO: 159466 - DNA, 246 bp, Glycine max
gggaggtggcaataatgagaaggcaagagttatcgaaaccctgctttttgtagccggtattaacacattgttgcaaacgatgtttgggactcgactgcctgcagtgattggagggtcttacacctttgttccaaccacaatctcaattatccttgctggccgattcagtgatgaaccagatcctatagagagattcaagagggtaatgagatgatccaaggtgctcttattgttgcttcgactctt

SEQ ID NO: 159467 - DNA, 254 bp, Glycine max
caaaaatattaagatgataaacattggagcacttgttgtactctttgcatttctcttcctcagttgtgcctatgcacaagacacaacaacccttgtgcctgcaatcataacttttggtgactcagccgtggatgtagggaataatgactatcttcccacccttttcaaggctgattaccctccttatgggagggactttgctaaccaccaactactgggaggttttgcaatggcaaattagctactgattttac

SEQ ID NO: 159468 - DNA, 254 bp, Glycine max
tcgttacacatttctcacctaactttctattcttctcagtctcagatcagaaccttagccatggcagcgttccagaagatcaaggtcgccaaccccatcgtcgagatggacggagatgaaatgactagggttatctggaagtcaatcaaggacaagctcattttgcccttcttggagttggacatcaagtattatgacttaggccttccttaccgtgatgagaccgatgataaagttacaattgacagtgcgga

SEQ ID NO: 159469 - DNA, 254 bp, Glycine max
cctatttatatagaagtgagggttttgtgaagtggatccaagccaagcacccgatccattcggctgcatccacgggcatgtgggagtgcccgggtttttatcccgtttctttgaaagggaaaaacgggttagacatatccgtagttgggagtagtagtattaagcatgttctcaagaatagccttgaccttactaggtatgagtactacacaatggaacatacttcagaaatgaggataagtatattccggata

SEQ ID NO: 159470 - DNA, 251 bp, Glycine max
gtatagcccaagccctatacaaccagaccctaacgcacacccatatgattcagtttccatggctagcctcaaggttgcatctttggctgcagagctctgcgtggttgtgtgtgagtgcacccatggcacgtgcaactatcacgtgcgggcatgttacgaatagcctgaacaattgcatctgttgcctccataacgtgaggaacgccgccgtctggatgctgcaacggtatgaagagcctcaatgccgccgc

SEQ ID NO: 159471 - DNA, 250 bp, Glycine max
acaccttcaatacaccacactcttctagcaccttgcagtggctgactcggatcgctcttctagtgaagtaactacacgttctactgattcatggaagcgacggtcgtccacagttgaattatctgcagatgaggagactcttctcatcaggatgtataaactggtatgggagaggtggtctttaatagctggaaggattcctggaagaacagcagcagagatatagaagtattggactacaagattctcc

SEQ ID NO: 159472 - DNA, 254 bp, Glycine max
ctcgagcaccactctagcgttgttgcattgcagcagcgtctccatcatcttccacgatggccgcgcgaggcctgttgatcagaaaaaccctatacaccgttctccgcgacgacgacgagcacataatctgagctggcatagctgcagctacacatcactcgcgggttgcacgtgtacacgctctccgatctcgattacgacaatagcgctctctagccaccatcatcggcgagatcatgcagctgcaccaccag

SEQ ID NO: 159473 - DNA, 253 bp, Glycine max
ggaagaacgtcgaggacaatgctacctacgagtcgctcttcatcgcgctggccagcgaaggcaccgacgttagggcagttttcgagttgatccttcttcgatcacagtgtgaaggagaggcacacgtgcatagccatatctagaggactcttgagagcgcggcttataccttgaagtatcgtggtagtatgtggggttacaagcgctgtgtcacgagagcactctatagacgtcagactaccttaaagatgat

SEQ ID NO: 159474 - DNA, 236 bp, Glycine max
agcatggttaggcggactacattgaatgatagcaaagagaatgtttgttgtaataacattaaaggaggcgtgtttggagttgttgaattgccgagtttagctgcagaaggtagagagagagagagatggagagcatagagcacagaacggtggaagtgaacggcataaagatgcatgttgcagagaaaagaggaggagcagtggtgttgtgcttgcgacgcttcccagaactctgg

SEQ ID NO: 159475 - DNA, 245 bp, Glycine max
caccaacaatggtgaagcattacagacccccggggaagaaaaaggagggaaatgctgccaaatttgttattaggtcacaggcactcaagcagcttcaaatcagtttaccccttttcaggaaactatgtattttgaaaggtgtaactccccgggagcccaagaaaaagttcaagggaactcatcagacttattaccatgtcaaggagtttccttccttcatcacgagcctttggttgaaatacata

SEQ ID NO: 159476 - DNA, 249 bp, Glycine max
caaggatttggcgtccgaggaaagcttttgggacttgtacgagagatggaggagtcaccacacggtttcgcgaagcctcggtgacaagcacaagcggtttaacgtgtttaaagcaaatgtgatgcatgtccataacactaacaagatggataagccttacaagctgaaactaaacaagtttgctgacatgaccaaccatgaatttgagagtacctatgctggctcaaaggttaatcaccacagaatgtt

SEQ ID NO: 159477 - DNA, 254 bp, Glycine max
gttagtagagtcgtcttgcccgcagaccaaggtgctgaaagtacaatttggctaattgccaaggcatatgttgttgtcgatgactcctgctatcatcgactcatgagccactggttaaatactcatgctgtgattgaaccatttgtcgtagcaacagacaggcatcttagtgtgctccaccctatttataagattttgttgcctcactatcgtgacaccatgaacatcgatggactcgcaagacaatcactcat

SEQ ID NO: 159478 - DNA, 246 bp, Glycine max
tagaagcaataagatgaaaatgaaagtgcttgttttgtttgttgctacagttttggtagcatatgaatgccatggctcagactaccagaagttccctctccaaatgaaaactgggtttggtgggcaatacagcaatgaggtggcatgtgccagttggaggcttggcgtggaagcaaacaacgtagtcaagtggcaaactgttcctgcagcttgcggagagtacatagctgactacgttctaggaga

SEQ ID NO: 159479 - DNA, 241 bp, Glycine max
cttcttctcttgcggctagggttttagcgcagttcttctagatttgaggaagatgggtaaggaaaaggttcacatcagtattgtggtcattggccatgtcgactctgggaaatccactaccactggtcacctgatttacaagcttggaggcattgacaagcgtgttattgagaggtttgagaaggaagctgctgagatgaacagaggtctttcaagtatgcctgggtgctggacaaactta

SEQ ID NO: 159480 - DNA, 244 bp, Glycine max
aactcgaagtgatccactccaggtgggccatgctcggagccttgggctgcgtcttcccggagttgctgtcccgcaacggggtgaagttcggagaagccgtgtggttcaaggccgggtcccagatcttcagcgagggtgggctcgactacttgggcaacccaagcctgatccacgcccagagcatcctcgccatctgggccacaaagttatcctaatgggtgccgttgaaggttaccgtattgct

SEQ ID NO: 159481 - DNA, 240 bp, Glycine max
tttttctcccttttcgctaacctcaaagagagttcagtatttatacaaataagagttttttctttttttatttctggttttcgttttggaatggctgggatttgctgtggagttgttggagaagccgccgagacttcttctcccatcgaacccacctcacgcccttccgcacgccggagtttggaccttttgcccttgaagtacatagctgctgacgtgtcagtcccgccgctggagaac

SEQ ID NO: 159482 - DNA, 250 bp, Glycine max
cgctcagtcaggatgcacgctgagaaaaccggaaacaacgcctatctcaaccttatcccgctccttgttggcaatgtgggattgattttcaccaaaggtgacctgaaggaggtcagtgaggaggttgccaagtacaaggttggagctcctgctcgtgttggtttggttgccccaattgatgttgttgttcctcctggcaacacagggctcgatccctcccagacctctttcttccaggtgctcaactttc

SEQ ID NO: 159483 - DNA, 197 bp, Glycine max
cttggccttgcaatcttggagagaagggcttcaatctgaggcagccgaggccattgcaaatttgtctgtcaatgccaatgtggccaaagctgttgcagaagagggtgggattcagattcttgctggtttggctaggtcaatgaacaagctggtggcggaagaggctgctgggggattatggaatctctctgttggag

SEQ ID NO: 159484 - DNA, 256 bp, Glycine max
caaaactgttcactttgtcgaaggtttatctgccgatggagctgcttatcacaagaagtgcttcagatgcagccattgcaatggccttcttgcgataagcaattactcatccaccgaacgagttttgtactgcaaggtgcactttgagcagcttttcaaggaaactggaacctaccccaagaaatcccagtcgtctggaaagcctccagtcgagctgaatagagcaccaagcaagctttctgccttcttctctggg

SEQ ID NO: 159485 - DNA, 271 bp, Glycine max
caacaccaacacaaaatctcagaatgtgaatgtgaaagctgttgtgactattgaacaaagtgatggtggacttgtgccaaatctcattaattcagcggtagatgggatcaaagagttagctgggaaaacacttgttttggagcttgttagtgatgagcttgatccaaaaacaaatatagagaagaagacaccaaaaagttcggttcaaaatataggaaaaaaggaggatgagatacggtatgaggctcaatttgagttatccacggatttt

SEQ ID NO: 159486 - DNA, 263 bp, Glycine max
ttttcaaccactgaaaaggatgaactatacctcaatttggtacttgaatatgttcctgaaacagttaatcgtgtgatcaaacattacaacaagttaaaccacaggatgccgctgatatatgtgaaactctatacataccagatctttagggcgttatcttatattcatcgttgtattggagtctgccatcgggatatcaagcctcataatctactggtcaatccacacactcagcaggttaaattatgcgactttggaagtgc

SEQ ID NO: 159487 - DNA, 264 bp, Glycine max
cttagctgaaccctcacctcaatcttgcgtgctagctagctttattccaattcctacagaaccaaattattctgctagctagctagtacgtcaaataaaataaaataatcaaatatggcattcagcgggacccaacagaaatgcaaggcttgcgacaaaactgttcactttgtcgaaggtttatctgccgatggagctgcttatcacaagaactgcttcagatgcagccattgcaatggccttcttgcgataagcaattactca

SEQ ID NO: 159488 - DNA, 260 bp, Glycine max
gtgatttcagtgagtgatcggtgttcacttgatctcatcataatcgtcagcgtcaattgaagaagatgccgatcagaaacatcgccgtcggaaggcctgaagaggcgactcaccccgacacgttgaaggcggctttggctgagttcatctcaaccttcatcttcgtgttcgccggctcaggctccggcatcgcctacaacaagctcaccgacaacggcgctgccacccctgccggcctcatctccgcctccatcgcccat

SEQ ID NO: 159489 - DNA, 257 bp, Glycine max
aattcagaaatgttactgcaaacattagctatccctacaatactccttgtgatattcatatgggtggtacaaccaaagcaacgtcatgggaagattgcaccaggtcccaaggcgttgccaattattggtaacctccacatgctagggaaactcccgcaccgcacccttcaaacctttgcaagaaaatatggacccataatgtccttgaagctagggcaagtccaagccatagtggtttcctcccctgaaaccgctga

SEQ ID NO: 159490 - DNA, 256 bp, Glycine max
gatgaatggcctcaaaacgctttgtcgtttgtggttattgagtcctgagtgatcttgtcatccgacctttgccatgacaggtgcgcttgcatggcaggtcaaaaaatgttaataaaaaaagttttattggtttggggagagatcgcacgggggttgcccggggtctcttcctcttgtgtggtgtggtgtttgctgtgctctccttttcgttatgcctactattattacctatctgtcgctccactccgtattacga

SEQ ID NO: 159491 - DNA, 256 bp, Glycine max
gaactcgctgactgaaactcgcaaaaattagggttttgcagtgatggcactgtccaaccgcgtccgatcgggaatctctctcttcaccaaatccacgttcctcacttccgagcgatccactctccaacgattcctcgttgccccttccatttccttcgcctccagaaattacgccaacgtgccggggcaaaaggaaaacaaagttaaggtccctctggctttgtttggaggttcaggaaactatgcctctgctttg

SEQ ID NO: 159492 - DNA, 262 bp, Glycine max
ctcatctgtatgcctatgcttgtttatcattttcttactttcctctcacgctctgccacaaaactccgtctccgcaataacggaataaaaaaacaagtttaattactattatggcgccgagggatcataagacaagcaacgctaaggctaacggtaacggtaacagcggggtgaaggaggtgcattttcgtggagtgagaaagaggccgtgggggagatacgccgcggagatcagagatcccggcaagaagagccgcgtctg

SEQ ID NO: 159493 - DNA, 266 bp, Glycine max
tggatgctgtgtggaagacaaccacaggattttggtatatggctatcttgagaacaacagcctagcacaaacacttattggttcaggccatagtagcatccaattaagttggcctgtaaggaggaacatttgcataggtgttgcccggggccttgcattccttcatgaggaggttcggccacgcattatccatagagacataaaagcaagcaatgtactacttgacaaagatctccagcccaaaatttcagattttggccttgcaa

SEQ ID NO: 159494 - DNA, 257 bp, Glycine max
gcatcactgaactaacaaagcaaccctatgtcgaaggtggtttgtgtcaccggagccagcggcgccagcggatcatgggtggtcctactcctcctccagcgtggttacaccgtccatgccaccgtccaagatatcaaggatgaaaatgagacgaaacatttggaggaaatggaaggagcaaagagtcatctccatttttttgaaatggatcttcttgacatcgactccattgccgctgccataaagggttgttccgg

SEQ ID NO: 159495 - DNA, 254 bp, Glycine max
gcaaagatgacaggtgggatgtttggaaggaaggggcaaaagataaaggggacagtggtgttgatgccaaagaatgtgttggacttcaacgccataacctccgtcggaaaatgcagtgctaaggacaccgccaccgatttcttgggcaaaggcttggacgcattaggtcatgcagttgatgctctcactgccttcgctggccatagcatctccttgcagcttatcagtgctactcagactgatggtagtggaaa

SEQ ID NO: 159496 - DNA, 259 bp, Glycine max
ttggtgtcttagctcaaacctcacctcaataatctttcgtgctagctagcttaatcatattccaattccaacagaaccaaattctgctagctagctagtacgtcaaaggaaataaaataatatggcattcagcgggacccaacagaaatgcaaggcttgcgacaaaactgttcacttggtcgaaggtttatctgtcgatggggctgcttatcacaagaattgcttcagatgcagccattgcaatggccttcttgcgata

SEQ ID NO: 159497 - DNA, 263 bp, Glycine max
tgcaatctctgaaccagacgttatctttgttcatcatcgcctcatatacacatacataccctttagaaagttctttgactcttcctagacatcgccactgcacttttgcgccacttcatagaactcaacaagctaggatttcctgttctgttgcaccaaatgaagtgcaggtgccaactgtgaaaacccaggatcccaagagtaagcctgagtgctatggtgtcttctgccttacctatgatttgagggctgaagaagagaca

SEQ ID NO: 159498 - DNA, 266 bp, Glycine max
gaacaagtgaaaaagttgtttaccaagttgtcaacggatcccactaccacatctcaattagttgctaaagagccagctatttttactggttctgaggttagaatgcttgatgatgatattcccctagcacaatatgctgtggcttttgaaggggcatcttggaaggatcccgattcaattcctctcatggtcatgcaagctattttgggttcttggaataagacagcaggaggtggaaaacacatgggttcggagttagcacagcg

SEQ ID NO: 159499 - DNA, 265 bp, Glycine max
gtcaattctatagagattgcaccatttcaggtaccatcgactttgtgttcggtaatgcactagctgtttttcaaaattgcactttcgtggtccgaaagccaatggagaaccaacaatgcattgtgactgcacaaggtagaaaagagatacaacaaccatctggaatagtaatccaagggggatccattgtgtctgatcctgaattctactcagtgagatttgagaacaaggcttacctagctcgtccatggaagaattactctag

SEQ ID NO: 159500 - DNA, 260 bp, Glycine max
ccatccaacatattcttcagttagctcccccaacctatacacttcaccaccacaccacaaccctaccctctctctctgtcatggtcattggaggagccttccctcgtttcgacccaatcaccaaatgtagcacccaagaccgctccaaccagactatcgcctcggacctcgatggcaccctccttgtctcccggagtgccttcccctactacttcctcgtcgccctcgaagccggcagcgtcttccgagccctccttctc

SEQ ID NO: 159501 - DNA, 256 bp, Glycine max
cttttatttgcgagtacaggtaaaagattcaggatcaggaattaatccacaagatatcccgaagttattcactaagtgtgcacaaaaccaatcattaacaagaaatcctgctggaagtggacttggcctggcaatttgtaggaggttcgtaaatcttatggaagggcatatttgggttgaaagcgaaggtattggtaaaggatgtacagtcacttttattgtaaaacttggaatcccagaccgatcaaatgaattt

SEQ ID NO: 159502 - DNA, 254 bp, Glycine max
cgagcttcctgatgggcaagttatcaccattggagctgagagattccgatgccctgaagttcttttccagccttctatgattggaatggaagctgctggaattcacgagaccacctacaactccatcatgaagtgtgatgtggatattaggaaggatctgtatggtaacattgttcttagtggtggctcaactatgttccctggtattgctgaccgtatgagcaaagaaatcactgcacttgctcctagcagca

SEQ ID NO: 159503 - DNA, 255 bp, Glycine max
caaaacttgtacaacatgggaatgaagaacacctcaacaacgtttgcatcggccaccgttaatgtcatgccagccattacttttataatggcactgatttgcaggttagagacagtgaacttgagaaaaatacccagcgtagccaaggtagttggaacagcagtaacagtctcaggagctatggttatgactttgtacaaaggcccggctcttcagttcataaagggacaagcagcaacccaccatgaaagtggc

SEQ ID NO: 159504 - DNA, 255 bp, Glycine max
gaaatcaacacacacaaacacaacaacatatggaggtgctaagggtgcaaaccatagcttccaaatccaaagatgctgccatcccagccatgtttgttagggcagagacagagcaaccaggcatcacaaccgttcaaggggtgaaccttgaggtgccaattattgattttagtgacccagatgaagggaaagtggtgcatgagattttggaggcaagtagggactggggcatgttccaaattgtgaaccatgaca

SEQ ID NO: 159505 - DNA, 254 bp, Glycine max
tgactataagagagcccgtcattttgaagttgatttgtctgctttccggaatgtacttgagatcgacaaagaacggatgattgcaagagttgagcccctagtcaacatgggtcagatcagcagggtgactgtacccatgaatctttcccttgctgtagttgcagagcttgatgatctaactgtcggtggtctcattaacggctatggtatagaaggaagctcccacaaatatggtttgttcgctgatactgttg

SEQ ID NO: 159506 - DNA, 253 bp, Glycine max
ggttgagaacagcatgtgagcgggcaaagaggactctctcttccactgctcaaaccaccatagagattgattccttgtacgagggtattgacttctacacaaccattacccgtgcccgttttgaagagctaaacatggatttattcaggaagtgcatggagcccgtggagaagtgtttgcgggatgccaagatggataagagtaccgtccatgatgttgttcttgttggtggttctactaggattcccaaggt

SEQ ID NO: 159507 - DNA, 258 bp, Glycine max
cagggccattcccttcaagtccaagtgattcaatcaaacggttcatgcttaatcaagttgggaacaacaacaacaacaaaaatcaagccaatgtttgtgggttttggtttcatttcattaagatgatctgtttatctcttttcttctttttaaaatttaaagtctttgtattttgtatgtaaagatgtaaaattatgattattaggtggtgcatgtgtcgcgtcatgggccaatgttatcctctgcttttaagttgga

SEQ ID NO: 159508 - DNA, 252 bp, Glycine max
gcaaagtcgatcatgtcctcgagcgacccaacgcagcgttttgtctcgccgcggctcggtgcacgctcgcactccgccaaggaatcacgcatcatcttctgcatggaaccgttatccgaagccttgaaaactggctgtcaactcatcaattttcgaaaccgaaaacggtaatttcgataggaatactccgggggaaaaacgacctttctgggagtgtatcttgtatgtcgggcatcggcatcaccgtcgctt

SEQ ID NO: 159509 - DNA, 255 bp, Glycine max
ctagaacgccgcttattatatcaggacctgcagagaaacccagtgatcgatattataaggctgcaaagattgcagaagcctttgaacgagacatacattacactgtagacgaaaaacaaaaatcagttctactttctgagcaaggttatgaagattctgaagaaattttagctgtcaaagatttatatgatcctcgagaacagtgggcttcatatatcctaaatgcaataaaagcaaaagaactatttcttcgag

SEQ ID NO: 159510 - DNA, 249 bp, Glycine max
aaggaacaaaaatattattaagatgatcaacattattggagcacttgttctactctttgcatttctcttcctcagttgtgtgtatgcacaagacacaacaacccttgtgcctgcaatcataacttttggtgattctgctgtggatgtagggaacaatgactatcttcccacccttttcaaggctgattaccctccttatgggagggactttgttaaccaccaacctactgggaggttttgcaatggcaa

SEQ ID NO: 159511 - DNA, 254 bp, Glycine max
caggaattgatcatatgatggcaatgaagatgatcaaccaagcacatgtgaggaaggggaaaataaagtctttcacttcttattgtggtggacttccatctcctgaagctgctaacaatccattagcatataaattcagttggaatcctgcaggagccatccgagctgggcgcaatcctgccacctacaaatggggtggtgaaactgtacatattgatggggacgatctttatgattcggctacaagactaagg

SEQ ID NO: 159512 - DNA, 253 bp, Glycine max
gtcaaattggctgatgaagccgtttgcatcggggaagcgccgagtagccagtcctacttgctgatcccgaatgttctgtcagctgctattagccgcagatgcaccatgttgcatcctggctatggttttcttgcggagaatgcagtgtttgttgaaatgtgcagagaacatggaatcaactttattgggcctaaccctgacagtattcgggttatgggtgacaaagcaactgccagagagacaatgaagaaag

SEQ ID NO: 159513 - DNA, 259 bp, Glycine max
gcaagaatatcaaattggtctcttgtcttcctcctcatctctacactactccacatagagcccagcctctcaagcccaagcccaagcccaagcccaagcccgttcataaaatcctcctgcagcagcacccagtacccagccctctgcgtctcatccctctccgtctacgcctccagcatccaacaggaccctcaccaactggttcagacagcactctccctctccctgaaccgcacccaagccaccaaaaccttcgtgg

SEQ ID NO: 159514 - DNA, 251 bp, Glycine max
cttttagtttctccactttcattctcactcatcgcaccctcttgcacagttaccatgaatttcttcaactgggttcatactttcatcgtttttcatgtctttgctgcaacaccccacttcttcttattagcagattcctccgaacaactccccaccaactttctagatgctgccaagaagcctgaggtatttgattggatggtcagaatcagaaggaagattcatgagaatcctgaattgggttatgaaga

SEQ ID NO: 159515 - DNA, 253 bp, Glycine max
aaaaaaaaagaaaaaggaaggagataggaaagggttaattgaatccaaaaaaaagaagagaaaaacaaaatgggcagggtttggacttcgatgatagcattgttgctttgcctgatgacatcatcggttcggggcgaggacccttacatttactacacatggaacgtgacctacggcaccattgccccattgggtgtcccccaacagggtatcctcatcaatggtcagtttcccggccccgaaatcaactcca

SEQ ID NO: 159516 - DNA, 253 bp, Glycine max
cctgagcagactgccggtgataagccggaggaaggtgaggatgacgtcaagtcatcatgccccttatgccctgggcgacacacgtgctacaatggacgggacaaaggatcgcgatcccgcgagggtgagctaactccaaaaacccgtcctcagttcggattgtaggctgcaactcgcctgcatgaagccggaatcgctagtaatcgccggtcagccatacggcggtgaattcgttcccgggccttgtacacac

SEQ ID NO: 159517 - DNA, 247 bp, Glycine max
cccaatacctactctccgctcccaagagcacgcaccaccactattgcacttcttcctcgttctccctctttttcttcttcttcgctaaacccttttttctatctcactaacacaacaatgggagacgagaagaagggcaagcctgctgcttccggcgtgtggtccaccatcaagcctttcgtcaatggtggagcctccggcatgctcgccacctgcgtcattcaacccatcgatatgatcaaggtga

SEQ ID NO: 159518 - DNA, 254 bp, Glycine max
gcctgccttccccttctcataggagcttctatcactgagcaactatttctcaaggggtttggaggagactatggccatgcttactctagagcaacttctttggctcgtgaagctattgccaacattcgtaccgttgctgcttttggcgcagaagatcgagtctcaacccagtttgcatctgaactgaacaaacccaacaaacaagcacttctacgtggccacatatcaggttttggctatggcataacacagct

SEQ ID NO: 159519 - DNA, 277 bp, Glycine max
catggtgtcacatactctttaactgaggaatttgtgagtgcttatagaatacactcactcttgcctgataacttgcaattgagagacatatctgctaccccaggacctaacaaatctccaccattaatcaaagagattcctatgaaaaatttgattggagtgcaaggagacgaagcattgacaaaaataggagttgaaaggcaacttgtgtcaatgggtcatcaagcttgtggggccctagagctttggaactatccattgtggctcagagatcttg

SEQ ID NO: 159520 - DNA, 265 bp, Glycine max
ccgagctagaagccactttggtttctttgcctttctcaatacattttcttttccatggaggtaggaagtgttcttaactttcttcaggacaagaccattttaattgttggagccactggctttctagccaaaatttttctggagaaaatattgagggttcaaccaaatgttaagaagctttttcttcttttaagagcttcggatgccaaatcagctaattatcgattgcacaatgagatcatagcgaaggacttatttattgtgc

SEQ ID NO: 159521 - DNA, 270 bp, Glycine max
gaagacattcccttttgttgtcactgaaggacctgatggatatccattaattcatgcacggtacttgggtgaagctagaacatttacacccacccaagtatttggaatgatgttatcaaaccttaaagaaatagccgagaaaaatctgaatgctgccgttgttgattgctgcattggaattccactttattttactgatcttcagaggagggccgtcttggatgctgctactattgctggtttgcatccacttcgtctgtttcatgaaac

SEQ ID NO: 159522 - DNA, 279 bp, Glycine max
ctcctccctctctcttccaaacacacatccacaaccatggcagcaccatcttcagagacaaagtcaccatcatcctccaacacgcagcttccgctgaaaccaatcccaggcagctacggaatgccgttttttggagcaataagcgacagacacaactacttctaccaccaaggacgcgacaagttcttcgcgacgaggattgaaaaacacaactccaccgtgatccgaaccaacatgcctccggggcccttcatctcctcggacgctcgtgtcgtcgcg

SEQ ID NO: 159523 - DNA, 279 bp, Glycine max
ccattttcaagctctcaacgccatctccagctgcttccttatcagaagcgcttcgccccagagattctcgcttcctctccttcaatccttcttccaacgctattaattacaaaattaacctctccgcttccctccgatccattcactccctccctcttaaaacctccttgcggatcaaatgctcccaaacagatgggaatggaagtcctgcaaagaggacagtgcttcatgatctttatgagaaagacgggcagagtccatggtatgatcatctctgca

SEQ ID NO: 159524 - DNA, 275 bp, Glycine max
gccaactccaatatgcatatccaagccgaacattcattgacacaggctcctgcagctgcttccaatacaactcaacagctgatgccacctctaacttctgactcttgggctgcaatgactgaatccattgatcattctcactcagaacaaagattgcaatcatcattgttgaatgttgataagcctgcagatgatggctacaactggaggaagtatgggcagaaacaggtcaagggtagtgagtttcctcgaagttattacaagtgcacgaatcc

SEQ ID NO: 159525 - DNA, 277 bp, Glycine max
aaaatattaggatcaagctccgagtatgtccaaagcaatataagccggtatttctctgatccccaatactactttcaagtgaatgaccactatgttaagaacaaattaaaggttgtgttgttcccattcttgcaccggggtcattggactaggattactgaaccagtgggaggtaggctctcttataaaccaccaatttacgacataaatgctcctgacttgtacattccattaatggcatttggtacctatgttgttcttgctggcatctcattgg

SEQ ID NO: 159526 - DNA, 256 bp, Glycine max
cttcagttcggtggagggagggagccgtagcagcggaagctctagcttgggtagcgaatcacaatggcgagaggattaaagaagcatctgaagaggcttaatcgcccaaagcattggatgcttgacaaactgggtggtgcatttgctcctaagccctcatctggaccacacagatcagggaaatgctgccactcatactcattttgcgtaaccggctgaagtatgctctaacataccgtgaagtcattgctattct

SEQ ID NO: 159527 - DNA, 270 bp, Glycine max
catttatgctggtccacttggccctaaatcttgtgaacttattagttatttcgaggcaatcgaaggagttccaaagatcaggtctggatataaccctgctacgtggatgctggaggctacttcttcagttgaagaaaacagactgggagtggactttgcagaaatctaccgaaaatcaagtttatatcaatataacctagagttggttgaaaggttgagcaagcctagtggtaattcaaaagaattgcattttccaacaaagtattgccg

SEQ ID NO: 159528 - DNA, 272 bp, Glycine max
tgtttagctacttacctcaatctttctcatgggaaagtttgccctagccaatatcctcttggtccttctcttgaacttgagcactttgctcaatgttcttgcttgtccctattgcccatacccttctcccaagcctccaaaaaagcctcccgttgtgaaaccaccggttcacaaaccaccaaaaccatgtccaccacccaagtcatctccaaaaccaccccatgtacaccctccctatgttccaaaacctcctcactagcctaaaccaccag

SEQ ID NO: 159529 - DNA, 255 bp, Glycine max
caaacacaacaacatatggaggtgctaagggtgcaaaccatagcttccaaatccaaagatgctgccatcccagccatgtttgttagggcagagacagagcaaccaggcatcacaaccgttcaaggggtgaaccttgaggtgccaattattgattttagtgacccagatgaagggaaagtggtgcatgagattttggaggcaagtagggactggggcatgttccaaattgtgaaccatgacatacctagtgatgtt

SEQ ID NO: 159530 - DNA, 275 bp, Glycine max
ctctttttagcaactgttgctctgctctacgttaaggacaagcaagttgaagcaattcctctggatgatgccactcaaccctcttgtttctttcagcttttcggtgctctgaaagagctcaagagaccgatgtggatgctgatgctggtcacagctgtgaactgggtggggtggtttcttacttccttttcgacactgactggatgggtcgtgaggtctacggtggaactgctggggaggacgcgtacgcgaagggagtgcgcgtgggatcgtta

SEQ ID NO: 159531 - DNA, 271 bp, Glycine max
tgagtttaaccaaatcatattaagccatggccacctccaacttctcaattgttctctctctctccctagccttctttctagtgctactcaccaaggcaaactcaaccaacaccgtttctttcaccgtcagcaagttttccccacgccaacaaaaccttatcttccaaggagatgctgctatctcaccctccggggtgttacgactcaccaaggttgacagcaacgacgtgccaacgacgggatccctaggacgtgccctttatgctgcccc

SEQ ID NO: 159532 - DNA, 265 bp, Glycine max
aatttacacaatattttaagacgcacataaacttcctctgtcactacccactcctctctctgtctccgcctttcgcattgcaagcactctctttctttgcttttacttccccctttcagtttcttcaacgctgcaactatccatggcaatctgctggctcatatccgatgtgtatccactgttcgctgcggttggtgccgctgttgggatctgtggattccaattggttcgtaatatctgcatcaaccctgaagtcagggtgaac

SEQ ID NO: 159533 - DNA, 269 bp, Glycine max
actcgagccgaatcggctcgagcaggaaagggaccaaacatggagaccatggccaacttacaattctcttcacttttaagtacaatagtttttcattgtttcatttaatctacaatggctgcttcaacaatggctctctcttcatcatcattggctggccaagctatcaagcttgccccctccacccctcagcttggtgttggaagggttagcatgaggaaaacagcctccaagactgtttcttctggaagcccatggtacggcccaga

SEQ ID NO: 159534 - DNA, 272 bp, Glycine max
gaattcacatttcaacaaccatagccatggctttctccttctccaaagcacttgtccttgcctgctccttctgcttatttgcgtctttggcttttggacgcgatttctccattgtgggctattcatcggaggacttaaagtccatggataagctcattgaactctttgaatcatggatgtcaaaacatggcaagatttaccaaagcattgaggagaagcttcttaggttcgagattttcaaggataacctaaagcacattgatgagagaaac

SEQ ID NO: 159535 - DNA, 268 bp, Glycine max
caaccaacacttgtttcttcagccatggccagtcaacctgaatcatctgacgcaaagggcacaaaaagggattttagcaccgccatattagagcgtaagaaggctccgaatcggctcgtggttgatgaagctgtcaacgacgacaactctgttgtcgcgcttcatcctgataccatggagaaacttcagctttttcgtggtgacaccatcttgatcaaggggaaaaaaagaaaggatacaatatgtatcgcacttgctgatgagacat

SEQ ID NO: 159536 - DNA, 266 bp, Glycine max
taagaacgggcacttaaaagagtttgaaggagcttcccagagactaactctgcataaggttgacctccttcatcttgactccgttagatctgttattaacggctgtcatggtgtctttcacactgcttctcccgtcaccgataaccccgaagaaatggtggagcctgcggtgaatggagctaagaatgtgatcatagcagctgcagaggctaaagttagacgcgtggtgttcacctcatccattggtgccgtttacatggacccca

SEQ ID NO: 159537 - DNA, 266 bp, Glycine max
caaaaatggcacctgcaacactgtctctgtctctcctcctcctgttctcactcagcatcgccgtaaccgttagatcgagcgactacgactacgattgtgtgtacactgcatacgttagaaccggttcggtgttgaagggcggaacggactctaagatcgggctgaagctgtacgacaagtacggctactacatctacattaaaaacctcgaagcatggggcggcttgatgggcaagggctacgactacttcgagcgcggcaacctc

SEQ ID NO: 159538 - DNA, 90 bp, Glycine max
agtggtttcagtgagtgatcggtgttcacttgatccttcataagtcgtcatcatcatcatcatcatcaccgttgattgtagaggatgccg

SEQ ID NO: 159539 - DNA, 272 bp, Glycine max
tagctatctatttatctatagcaagtgcgtcaagagacacgtggtaccctagctagagtgccattctgtggtttctttctttctttctttctgcatcacatcacaatttgcattgcctcgtgtcctttttcttctttgctctccaaaaatctcacacacacaggtatctagcaaatgggttctcaccaacaagaaccatggctattggagaatgggaaaccaagggttttgaccaaggagaccaggcatggccgttctgcacacagaatgtc

SEQ ID NO: 159540 - DNA, 273 bp, Glycine max
acggatcgaagagatgcattgcattgccgcgctttgaaaattgagcctgcaccttccttttcggtggggcagaaatttcaatttgatgatattatagaagctcaacagtttgatagagatattctcagtgccatttttgaagttgcacggaatatggagaacgttgaaaaggattctcctggtagccagattttaaagggttttcttatggccaccctattttatgagccttctactagaactagactttcatttgagtctgccatgagaaga

SEQ ID NO: 159541 - DNA, 268 bp, Glycine max
acctactgcagtagatgatgaaaagatggatgtttctacttcaaggaagtatggttcagagagctggatgtcaatggggaggaatgagcctacatattcggatcttctttcaggctttgggaccagtggggatccttctcattcatccctgaaggatcaaatgagccctgcttattctgctagaaagcaatcattggatcatgaaggcaaacttcacatgcctcatccgtggcctgtaatgccctctagtctgtcactgaacatcttg

SEQ ID NO: 159542 - DNA, 260 bp, Glycine max
cctactcattctccatacctcaacgaagaggttaaagagacggcaacactttgctgtccgccttgaccgagcagagcttcgtcttggccctcgattttgccctaaagtactctcagtcacaacagacaccgtcgtcgtcgtcgtcgtcatcaatggcaccgaagcagaccaaggctgagaagaagatcgcttacgatgcgaagtgtgcgacctaatggaggagtacggccagatcctcgttgtgaactccgataacgtgg

SEQ ID NO: 159543 - DNA, 265 bp, Glycine max
ggtttacaagcttggcaaagctggagatgaatctcactctgctcttactgagtttgataggaccgagaaagacattaccccaataggtggtttccctcactatggtgttgttaaggatgattatatcatggtcaagggatgctgcgttggtcccaagaaaagggttattacattgcgccaatccctccttaagcagacttctcgtgttgctctggaggagatcaagctcaagtttatcgacacctcttcaaagtttgggcatggt

SEQ ID NO: 159544 - DNA, 255 bp, Glycine max
gcagtagcattaagagtccaagcagataagtccattttctacaattgctcaatggatgggtatcaggacactctttatgtccacaccatgcgtcaattctatagagatcgcacgattatcaggtaccattgacttcgtgtctggtaatgcacttgctattttccaaaattgcactttcgtggtccgctagccattggcgaaccaacaatgcattgtgactgcacaaggtagaacagagatacaacaaccatctgg

SEQ ID NO: 159545 - DNA, 263 bp, Glycine max
gtccactttaaggatgtagcattggcacatattttggtgtatgagaacaaatcagcggctggtaggcatttgtgtgttgaagctatctctcactatggtgactttgtggcaaaagttgctgaactctatccagagtataatgtgcctaagatgcaacgagatacccagccgggattattgagaacaaaggatggagcaaagaaactgatggatttgggtttgcaattcattccaatggagaagattattaaggatgctgtaga

SEQ ID NO: 159546 - DNA, 265 bp, Glycine max
gaaattccaaaaccatgtcgtcccacagtcatctaagtttcgcctttggggttctaggtaacatcgcctccttcgtgtgctttctggcaccactaccgacattttatagagtttgtaagaagaaatcaaccgaagggttccaatcaattccatatgtggctgcactcttcagtgcaatgctttggatcttttatgcctatgtgaagaccggagaaatgcttcttatcaccatcaatgcattcggttgcgtgattgagaccattta

SEQ ID NO: 159547 - DNA, 270 bp, Glycine max
cctcgagccgaatcggctcgaggaagtgagggcaagaactttgcagactaccagcatgagcaagaagctcctccagctcttcagcctactcccattcttcctctacttctacacaatagaagcagacgttggcccattgcaactgacacacccactggaccccttaactcagcaagaaatcaccctcgtcaaaaccatagtcctacaaaagtaccccaagccagccaaccgcgtcttcttccactacgtcggcctcgacgatcctgacaa

SEQ ID NO: 159548 - DNA, 272 bp, Glycine max
ggcttccctccctcctttgaagaaacaaattagaagagtgtgttgtgttgtgttgaagtagcaagctagcaaagatgtttggcatcttaggaggcaataaggggcacaagatcaagggtactgtggtgttgatgagcaagaatgtgttggacttcaacgaaatagtgtccactactcagggtggtttggttggtgctgccaccggcatcttcggtgctgccaccggtattgttggtggagttgtcgatggtgctactgccatcttcagtcgc

SEQ ID NO: 159549 - DNA, 270 bp, Glycine max
atttcctcctctatttaacttcaaacaggaattatctgaagcatctccagtgcttgttaacaaattgatacctgaccacgtgaagcggcaaatagggctgcaatttgttcctccagcaggatcatgatgatgagctttagggggctttagtgtatactagttgataagttaaacaaaagtgacaccgttatttttgtctaaattagcatgttctgtggcctgaccagtgtagtttcaagctgaacctagactgagacttggggtgctgga

SEQ ID NO: 159550 - DNA, 249 bp, Glycine max
aaatattaagatgctaaacattggaacacttgttgtactctttgaatttctcatacacaattatacctatgacacaagacacaacaacccttgtacctgcaatcataacttttagtaactcaaccgtagatgtagaaataatagactatcttcccacccttttcaaaactgattaacctacttatgaaaaggactttagctaacaccaacctactgagaagttttgcaatggaaaattaactactgatt

SEQ ID NO: 159551 - DNA, 266 bp, Glycine max
ctcctcaatcttcattgtcctgttcttcccctaggtgacacacacacgcagagatcatagcttgtgttagtgaggttagaagataaagaaagaatggcatttgcaggaacaacccagaagtgtatggcctgcgacaaaacggtttatctggttgataagttgaccgcggataaccgagtgttccacaaagcttgcttcagatgccatcactgcaaaggaaccctcaagctgagcaactacaactcttttgagggagttctttactg

SEQ ID NO: 159552 - DNA, 263 bp, Glycine max
agcattataaagaatgcctgtccatggcagttgataatcttcctgttcttgatgggaagactccagtccaagtgtaccagagtttctgtgagagcttcaagtcttcattctctccattcatgggctctacaatcagagcatttccatgggtttaggaccagatggtgagctacgttatccatctcaccactggctgccgagtaatggtaaaactcaaggtgctggggaattccagtgttatgaccaaaacatgctcagctttc

SEQ ID NO: 159553 - DNA, 263 bp, Glycine max
gaagtgcaaaaacagtgtaacaaaaagaaaaagaaaaacaatatgaagttcactataatcacaatatttttctctttatttctacttgactttggttttgcacaacagggggatcttgacatatcaagatttggagaaaaccaaatacaaatataggccaggctttcttaagtgcctggactcaagcatgtgcatcaccaactgctgtcaaaattgtgattccagctggcacataccaaatgggtgcagttgatgtcaaaggt

SEQ ID NO: 159554 - DNA, 261 bp, Glycine max
gttcatcgcagactcaacactctctccagacacttccttcatcaaatggcttctcacgacggcatctccgctgcttcttcagattccgtcttcaatcacctcgttcgtgctcccgaagatcctatcctcggggtactgttgcttataacaaagatccaagtccagttaagctcaacttgggagttggtgcttaccgaactgaggaaggaaaacctcttgttttgaatgtagtgaggcgagttgagcagcaactcataaatg

SEQ ID NO: 159555 - DNA, 265 bp, Glycine max
gtttgtttgctcacaaccttatttgcaactgacttctttgagatcaaggctgtaaaggagattgagcctgcattgaagaaacaactcatcatttccactgccctgatgactattgggattgcaattgttagttggatgcactcccaacttccttcactatcttcaattttggagttcagaaagatgtcaagaattggcagctattcttgtgtgttgctgttggtctttgggcaggtcttattattggatttgtaactgagtacta

SEQ ID NO: 159556 - DNA, 263 bp, Glycine max
gcacaatttctctctttctttttgtgtccaaaatggctcctagttctactcacaatactgggttctatgtgcttatgctagttgggatagtgattagcactatggttgctacctgtgctggtagcttctaccaagactttgatctaacatggggtggtgaccgtgctaagatattcaatggtggccagcttctatctctttcccttgacaaagtctctggctctggcttcaaatcaaagaaagaatacctatttgggaggatt

SEQ ID NO: 159557 - DNA, 263 bp, Glycine max
atttgaggccaggcaagccccactcaaccaccacacctctcctcgttcacgctacccctttctgctcttcttctacctttcaagttttaaaagtataaagatggcagagacattcctatttacctcagagtcggtaacgagggacaccctgacaagctctgcgaccaaatctccgatgctgtcctcgacgcttgcctcgagcaggacccagacagcaaagttgcctgcgaaacatgcaccaaaaccaacttggtcatggtctt

SEQ ID NO: 159558 - DNA, 262 bp, Glycine max
ggacactttaccgtgatatttccaagtacaatcaattagagactcaggaggcagctcaggaagagtcagggtggaaacttgtccatggagatgttttcaggcctccttcaaactcggatttactctgtgtatatgtggaactggtgttcagttttttgggatgattcttgtcaccatgatttttgctgcacttggattcctctccccctcaaatagaggggggttgatgactgccatgctcttgctctgggtccttatggga

SEQ ID NO: 159559 - DNA, 261 bp, Glycine max
atcatacacatatactaaactgaacgaagttgtctaagaagagaagaacaatggctgctggcatgggcttccgcagtcacaaatctttgttaacaattcttttcggttttcttggattgttctcctttacagttgagcagccacaaaaaaataccaatttgatattcaagtaaagaatgtgagtagattatgtcatgcaaaacccattgtaacagtaaatgggaggtttccagggccaacaatttatgttagagaaggaga

SEQ ID NO: 159560 - DNA, 263 bp, Glycine max
gcgcaagtgaggaacaagcaagtgcttctaaaggactatgttaccggttttcccaaagaatccgacatgaatattgtcgaaagtaccataacattgaagcttccacaaggttccaatgatgtcttgctcaaaaattgtacttgtcttgtgatccgtatatgaggaatctcatgaacaagcccgaaggccctcccaatagtcgtgcttacactcctggctctccattaataggatatggtgtgtctaaagtcctggcatctggg

SEQ ID NO: 159561 - DNA, 261 bp, Glycine max
gcctttctgactcggcctggcccggtcgccctacgcgactggcgcttcaaaaggtagttgacttgcttactcgttagagtaggggtcgcgagagagcagagcgtaccgccctgccatagtcgcgagtctgtttaagtcgcgactgttgtcatagtcaacaaggttgaaacttccaggaaaaaacttcgaattgggagggcgatcctcccggtgaactgaccgtaccccaaaccgacacaggtgaacaagtagagtatacta

SEQ ID NO: 159562 - DNA, 266 bp, Glycine max
caaggggtgttttgaaaagatggagcagaaagaaaatcatgctagaaggaaaaagggagggctcatcacaatgcccttcatctttggtaatgaggtttgtgagaagctggctgtggtaggtttcaacacaaacatgttagctacttgacaacacagcttcacatgccattgaccaaagcagctaacaccctcactaactttggtggaactgcaagcttgacaccattgcttggtgctttcattgctgattcttatgccggaaagtt

SEQ ID NO: 159563 - DNA, 269 bp, Glycine max
gtttgatctaaaaccataaacctctgtctcgttagatctccttcttccgttctctaaacctctcctccgatccgatctgatccaaaatggcgacgatgacgagcttgattggtctcatcaataagatccaacgagcctgcaccgttttgggagatcacggtggcgagggcttgtcgctctgggaggctcttccctctgtcgccgtcgtcggtggacagagttcagggaaatcgtcggtgctagaaagtgttgtcgggagagattttctc

SEQ ID NO: 159564 - DNA, 264 bp, Glycine max
ctcattaattgcaagaatggcacttcgttgcttggtgatgtccctttctgttctcttcactcttggtcttgcgagagaaagccatgccagagacgaagatttttggcatgctgtttggccaaacactcccattccagttcattgcgagatcttctaaagcctggccctgcaagtgttgaaatcgatgatcaccctatgcaaattgaagaaacacagtacccgaaaaccttcttctataaagaagaccttcatccaggcaaaaca

SEQ ID NO: 159565 - DNA, 262 bp, Glycine max
tacaagcattcttgacaacaacaagtctgattttgagagagtgataagtgttaacttggttggtccttttctgggaacaaagcatgctgcaagggtcatgattcctgctaaaaagggatgcataatcaacacagtagtgttgctggatgcataggtggaggtgctacacatgcctacacaagttcaaagcacgcactaattggactgacaaaaaacactgcggtggagcttggacaacatggtattagggtaaattgtttgt

SEQ ID NO: 159566 - DNA, 249 bp, Glycine max
ctcttttttctctctcttgcaaaacctaattttcatttcttccctcaaatttcaaaatgcgtgagatccttcacatccagggtggccaatgcggcaaccagatcggcgccaagttctgggaggtggtttgcgcgagcacgggatcgaccctaccggaaggtacggtggggactcggagttgcagctcgagacgatccatgtctactacaaagaggccagttgcggacggttcatgcgcacgcagtactc

SEQ ID NO: 159567 - DNA, 263 bp, Glycine max
ccttgttcttctttctctattgtctatagtcatctccattgttctcttcattacccacacacacaaaagaaacaacactccaagaggaccaccaggtcctccacctcttcctctcatcggcaaccttcaccaacccacaactcatccccacatctctgcctatggcaactcgccaaactccacggtcctctcatgtcgtttcgcctcggcgccgtgcaaaccgtcgtggtttcatcggccagaatcgccgaacaaatcttgaa

SEQ ID NO: 159568 - DNA, 264 bp, Glycine max
gtgcctgttgctgtgaactgcaagcagaacatgttctttggaaccaccgttcgtggcgtcaagttctgggacccttacttcttcttcatgaaccctaggcctgtgtacgaggttaccttccttgatcctttgccgaggagatgtcggttaaggctggggggaagtcgtccattgaggtggccaaccacgtgcagaaggtgctgggggatgtgttagggtttgagtgcaccgggttgactaggaaggataagtatatgttgttgg

SEQ ID NO: 159569 - DNA, 264 bp, Glycine max
ctctctctcacaataaccactaattctcccaactcaatttttctctcaaccggcccaatttagcataagcccagcatggccaccgcaacagcagcagccacctcgtccttcatggggacgcgcctcctggaggcccatccggggcggggcgggtgcaggcccggttcgggtttggcaagacgaaagccgccgccccgaagacagtttccagggggtcgggctctagctccgataggcccctgtggtatccgggcgccaaggcgc

SEQ ID NO: 159570 - DNA, 263 bp, Glycine max
ccgagaaccgccactacgcccacgtcgactgccccggccacgccgactacgtcaagaacatgatcaccggcgctgcccagatggacggcgccatcctcgtcgtctccggcgccgacggcccaatgccccaaaccaagaacacattcttttggccaaacaagtcggcgttcccaacattgtcgtcttcctcaacaaacaggaccaggttgatgacgcggagcttcttcagttagtagaattggaggtccgggagcttctttcca

SEQ ID NO: 159571 - DNA, 263 bp, Glycine max
atcttcgtgaaaaccctaaccggcaaaacgattacgctagaggtagagtcctctgacacaatcgataacgtgaaagcgaagatccaggataaggaaggtattccaccggatcagcaacgtcttatcttcgccggaaagcagttaggaagacggcagaaccctcgccgattacaatattcaaaaggaatcgacgcttcatctggtgcttcgtctccgcggagggatgcagatcttcgtgaagacgctcaccggaaaaacgatta

SEQ ID NO: 159572 - DNA, 261 bp, Glycine max
gagaaaggagagggtccagtggtgttgttcctccacggcttccctgagctctggtactcatggcgccatcagattctctctctcagctccctcggctaccgcgccgtcgctcccgatctccgtggctacggtgacaccaaagcaccaccttcaatcagcagctacaactgcttccacatagtgggtgatctcgttgcgcttattgactctctgggtgtccaacaagtgttccttgtggctcatgactggggagccatcata

SEQ ID NO: 159573 - DNA, 261 bp, Glycine max
tcctgatatcagaaaaagaaaaaagaaaaaaatgtctctagtgactgcagagatcaaagccaaagcagaggtgtatcatggagatgaactctgccaagagaagtcaaagttgctgctaaaggaggtagggctactaatgggcttttgccattgaaggacattgaggaatgtgggtatgagagggatagtgggtttgtgtggctgaagcagaagaagagcacaaaccacaagtttgagaagattgggaagctggtttcctat

SEQ ID NO: 159574 - DNA, 260 bp, Glycine max
tctatttctcagtctctgtgtttgcggctgaggattccgaacgagtgaccttcttcgtttctcgcaaagtttaagtaatcatgggtaaggaaaaggttcacatcaacattgtcgtcattggacatgtcgactcgggaagtcaactaccactggtcacttgatctacaagcttggaggtattgacaagcgtgtgattgagaggttcgagaaggaggctgccgagatgaacaagaggtcattcaagtatgcctgggtgctcg

SEQ ID NO: 159575 - DNA, 261 bp, Glycine max
atctcaatgagaagtatattgtagggtatggtgcctctagtactgtgtacaagtgtgttttaaagaattcccggccaattgcaattaaacgactatacaaccagcatccacacagctcaagggagtttgagaagaacttgaaactattggcagtatcagacacaggaatcttgtcactttgcatggttatgctctaactcctaatggaaatcttcttttctatgactatatggagaatggctctctgtgggatcttcttca

SEQ ID NO: 159576 - DNA, 261 bp, Glycine max
tgagaacaatgcaactacagaatcagacattgaagaaactctcaagaaacttgtatttgacttgaagaagtctcctcaggaagtttttgatgcactgaaaaaccagactgttgatttagttcttactgctcatctactcaatcaattcgtagatctttgcttcaaaagcatggacggataaggaattgtttatctcaattgtatgccaaagacattactcctgatgataagcaggagcttgatgaggctctacaaagggag

SEQ ID NO: 159577 - DNA, 265 bp, Glycine max
atttatagtttactattgaaagatgggtttgaaaatggcaatactgatcctaggcctgctggccatgttccttttggtctcctcagaggtggcatccacgaattcaaaagaggtgacaaatggagttgaagatgcaaatatcctggtggaggctatggtgggggttacccaggcaatggcggtggtggctatcctggccgtggtggtggctaccctggtcgtggtggtggctatccaggtcgcggtggtggttaccctggtcgtg

SEQ ID NO: 159578 - DNA, 259 bp, Glycine max
atcctccatggttcttatgaagatgaaggagattgcggaggcgtatctaggttccaccataaagaatgcggttgtcactgtgcctgcttacttcaacgactcacaacgtcaagccaccaaggacgctggtgtctttctgggctcaacgtgatgcgaattatcaacgagcctaccgcggctgccattgcttatgggctcgacaaaaaggccactagctctggggagaagaatgttctcatttttgatctcggtggtggga

SEQ ID NO: 159579 - DNA, 260 bp, Glycine max
tggaattgtcatcgcccttgaagagcaaagagattgaaccattttcgagggttgatcttgagggtgaagcccccacggtgcttactccgacccagtttgcgacattgtggcctcttgcttcgcttaatgggtcgaatgctaacttgttggggtttgagaaactcttacattctgtgttgggggctaaggctgagaagaaaggttcctttaggttgttgaaggctgatgtttctgctcagacttacgtgaagatgggtttt

SEQ ID NO: 159580 - DNA, 260 bp, Glycine max
  unsure (1)..(260): unsure at all n locations
gcgcctcatgatgtatcagcagggctgcttcgccggcggcaccgtactccgcctcgcgaagganctcgccgagaacaacaagggtgcgagggtgctcgttgtctgctccgagataaccgccgtgacgttccgcgcccctcggacacgcacctcgactcgctcgtgggacaggcactgttcggagatggcgccgcagcgttgatcatcggatcagaccccgacccagcagtggagcggccgatattcgagatgatatcggc

SEQ ID NO: 159581 - DNA, 262 bp, Glycine max
cacctctaaagaaggatatagttttgaagagatatgcatcaagaaagaagcgtttgagggagaagagaagttttgtgcaaaatccttgggaacagtaattggttttgccatttcaaagctgggaaagaacattcaagtactttcaagttcctttgtcaataagcaagagcaatacactgtggaaggagtgcagaatcttggagacaaagcagtgatgtgtcatgggctaaatttcagaactgcagtattttactgccataaa

SEQ ID NO: 159582 - DNA, 258 bp, Glycine max
gaaagataaagcattccatagcctcccataaaaatgaagaatactatcttctctgctctctttctactttgtgccttcaccacctcatacctaccttcaaccaccgcggtggtcgataccgacggtgatattttcagaatcctggcacatactttatcttgtccgtttttcgacccggcggcggagtagaattcgccgccactggaaacgaaattgccctctcactgtcgtgcagactctcttcgggaggggctttcc

SEQ ID NO: 159583 - DNA, 261 bp, Glycine max
ctttattctctcacacaaaataatggacaagaagcttggcaacacgtctcatgatcctgaagtgagaaaggggccatggacaatggaagaagacttaatcttgatcacctatattgccaatcacggggaagggtttggaactctttggccaaggctgctggacttaaacgtaccggaaagagttgccggctccggtggctaaactacctccgtcctgatgttagaagagggaatattacacccgaggaacagcttttgatc

SEQ ID NO: 159584 - DNA, 279 bp, Glycine max
  unsure (1)..(279): unsure at all n locations
atccgcagctgcttttattcgcaccgcaaacagtgagccatggccgtcggaaagaacaagcgcatctccaaggggaagaagggtggcaagaagaaggcagctgatccctttgccaagaaggattggtatgacattaaggctccttctgtttattcaagttgaaaaatgcttggcaaatacccacgtacactgcgtactcaggggtaccaagattgacttcgtgaagggactcatagcatagagtgtnttgagggtctccttgagctgatcttcaagggg

SEQ ID NO: 159585 - DNA, 259 bp, Glycine max
ggcccttcaagctgccctttcaacaggagttttgcagctggtaggaactgatcattgtgcctttaattccacccagaaagctcttggaattgatgacttccggaaaattcctaatggtgtcaatggtattgagaaaggatgcatttggtatgggatatcatggtggaatctggccaaatatctgtcactgactatgtccggttgacaagcactgaatgtgctagaatcttcaatatatatccaaggaaaggagctattc

SEQ ID NO: 159586 - DNA, 260 bp, Glycine max
attcaatactacaacttctgaatcacttagttgaattgaattatcttcaaaatgagagaaatccttcatgttcaagctggtcaatgtggcaaccaaattggaggcaagttttgggaggtgatgtgtgatgaaatgggattgatgccactggaaattacgtaggcaattcccatcttcaacttgagagggttaacgtgtactacaatgaagcaagtggaggacgctatgttcctcgagctgtgcttatggaccttgaacca

SEQ ID NO: 159587 - DNA, 260 bp, Glycine max
gtcggtctggcctgattctgagtggcgatcattaaaggtgcaatgggatgaaccatcctcaattttgcgtcctgacagagtttcatcatgggaattggagccacttgtgtctaccactcttgcaaactcgcgccaacccaaagaaacaagagggcacggcctctcattctaccttctacaatgcccgattcttctttgcaaggcatatggaaatcatcagttgaatctacctctttctcttattgtgacccccaacaagg

SEQ ID NO: 159588 - DNA, 259 bp, Glycine max
  unsure (1)..(259): unsure at all n locations
ggttgcttggcggggataagattaaagattcaacaatgggcctctgcttctgctactcttctcaagtcatctcctgttcttgncaagtgcgagtgggtcaaaggccagacccttcgccaacctctcgtgagtgtaacccttcctcagcatcagctctcaccatcaaagctgcttcctatgctgacgagctcgtcaaaaccgccaaaacagtggcctcaccggggcgtggtattttggcgatggatgagtcaaatgcaac

SEQ ID NO: 159589 - DNA, 257 bp, Glycine max
aaagaactggacacccatttaggaaaagaaagatgggtccaagaatctgacatagaaaacctcacttatctacaagccattatcaaagagacccttcgtttgtaccctccagcacctttaactgggataaggaagttatggaggattgttgtgtggccgggtaccatgtcccaaagggaacacgtttgcttattaacctatggaacttgcaaagggatccaaaagtttggcccaaccctaataagtttgaacccgag

SEQ ID NO: 159590 - DNA, 257 bp, Glycine max
aaattagggtttgtagtgtagcaggaacaagcagcaatggcgccgaaggtaacacgcaaggttagcagaaaccccgaattgataaggggaattggaaagtactcgaggtcgcagatgtaccacaagaggggcatttgggctatcaaggccaaaaatggtggcgttttacctcgccacgaccctaaacccaaacctgaaacacccgctgaaaaaccacccaaattttaccctgctgatgatatcaagaagccccttgt

SEQ ID NO: 159591 - DNA, 252 bp, Glycine max
cagtcattgacagctacagattgttgaaagaaggacaggcattaaatgatgacgaaattttccttgctagtgctcttggttggtgtattgaatggcttcaggcatattttcttgttcttgatgacattatggataactctcacacacgccgcggccagccatgctggtttagagtgcccaaggttggaatgattgcagccaatgatggagttctactaagaaaccatattccacggatccttaggaagcact

SEQ ID NO: 159592 - DNA, 250 bp, Glycine max; identical to SEQ ID NO: 109929

SEQ ID NO: 159593 - DNA, 249 bp, Glycine max
tctgtctattgcacaatggatgcagatgcagctcctttgcacatagcaatgtatccatggtttgctatggggcacctcaccccatttctccaccttgccaacaagttagccaaaaggggacacaaaatctccttcttcatacccagaagaacacaagccaagttagaagacctcaatcttcacccaaacctcatcacctttgtccccatcaatgttcctcacgttgatggtcttccttatgatgcagaa

SEQ ID NO: 159594 - DNA, 249 bp, Glycine max
tctgtctctgtgtttgcggctgaggattccgaacgagcgaccttcttcgtttctcgcaaagtttaagtcatcatgggtaaggaaaagactcacatcaacattgtcgtcattggacatgtcgactctgggaagtcaactaccactggtcatttgatctacaagcttggaggtattgacaagcgtgtgattgagaggttcgagaaggaggctgctgagatgaacaagaggtcattcaagtatgcctgggtg

SEQ ID NO: 159595 - DNA, 248 bp, Glycine max
ggcggggataagattaaagattcaacaatggcctctgcttctgctactcttctcaagtcatctcctgttcttgacaagtgcgagtgggtcaaaggccagacccttcgccaacctctcgtgagatgtaacccttcctcagcatcagctctcaccatcaaagctgcttcctatgctgacgagctcgtcaaaaccgccaaaacagtggcctcaccggggcgtgtttttttggcaatggataactcaccccc

SEQ ID NO: 159596 - DNA, 256 bp, Glycine max
gttgaagtccttgactacttcagcaactgctgatggaattgaggaatgccgcaaactatgtggtggccatggttacctttgcagcagtggtctccctgagttatttgcagtctacattcctacctgcacatatgaaggagacaacactgtgctgcttttacaggtggctaggcatctcatcaagactatttctcagttgggctccagaaacaagcctgttggtacaacatcttacattggacgagtggaacagctt

SEQ ID NO: 159597 - DNA, 254 bp, Glycine max
tggaagttgatagtaggtttctgaacactggcctcctccttgtggccacaatccttgtggtcaagctcatctcagccttcatagtgcccaaatccagaaagagggtacccccaattgtgaaggggtggcccttaattggaggactcatccgtttcctcaaaggtccaatctttatgctccgtgacgagtaccctaagcttggaagtgtcttcactctcaaactcttccacaagaacatcaccttcctcattggc

SEQ ID NO: 159598 - DNA, 248 bp, Glycine max
aaattcgcaaaactgcaaactctaatcctccgtcaagacaagcctcaactagaggataatgctgttgagactattgcaaaatgctgtcatgaactgcagatcctggacctcagcaaaagtttcaagctaactgatcgttcactctatgagctcgcccttggttgtcgcgatcttacaaaacttcgcatcagcgggtgttcagcatttagtgacaatgctctggcttaccttgccagcttctgcagaaa

SEQ ID NO: 159599 - DNA, 247 bp, Glycine max
ctgggcttcttggtgatggctttggttccacgccagaaatgtgcaaaaagaacttgatatgggtggttactcggatgcaggttgtggtggaacgctatcctacatggggtgacatagttcaagtggacacttgggtttctggatcagggaagaatggtatgcgccgtgattggcttttacgtgactgcaaaactggtgaaatcttgacaagagcttccagtgtttgggtcatgatgaataagctaac

SEQ ID NO: 159600 - DNA, 249 bp, Glycine max
tcaaatcttcttattgacaatgaaggaacacttaagattgctgactttggactggcttctattttcgatccaaacaataagcatcccatgactagtcgtgtagtaaccctttggtatcgacctcctgagttgcttcttggtgccacagattatggtgtgggtgtagacctctggagtgccggatgtattttaggagagttattggctgggaagccaatcatgcctggtcgtacagaggtggaacaattg

SEQ ID NO: 159601 - DNA, 257 bp, Glycine max
acttcactctcaagcttcaaacatgactcctttttacttcctcctatttgccttcatccttttcctctccataaacttcttgatccaaacaagaaggttcaaaaaccttcctccgggaccattttctttccctataatcggaaacctccaccaactcaagcaacccctccaccgcacgttccatgccttctcacaaaaatatggccctattttctccctctggttcggctcccgttttgtcgtcgtcgtttcgtcgc

SEQ ID NO: 159602 - DNA, 254 bp, Glycine max
gcaatgggtgtgaactcttactccaacagcatgaagatccaagccgagatacaaatgccacccttagaaatccacaaggttcgtttgccaccagaacgcaccaccttgcagaaactcagacacagactctctgagatcttcttcccagatgatccactccacagggaatcagctatgctaagcttgcaaacttgccacctattcttggattatattccagttttgtgcccccgttgatatattccctgcttgga

SEQ ID NO: 159603 - DNA, 254 bp, Glycine max
atctcagaattctctaaaagagatctttttctgctctttgaagaaagaagggtctttgcttgattttggagatgtctctgctctcagatctcatcaaccttaacctctccgataccaccgagaaggtgatcgcagagtacatatggatcggtggatcaggaatggacctgaggagcaaagcaaggactctcccaggaccagttagcgacccttcagagcttcccaagtggaactatgatggttccagcacaggt

SEQ ID NO: 159604 - DNA, 251 bp, Glycine max
ctctttctccggcgacgatctcagattccggtcactcctctcgccggcgatcccttattcctccggcctccgtcgagtcctttccgattcgaatcgttcccagccttgtgccaccatgaatcccgaatacgattatttgttcaagcttttgctgattggagattctggtgtaggcaagtcatgtcttctcctgaggtttgctgatgattcataccttgacagctatatcagtaccattggagtggacttta

SEQ ID NO: 159605 - DNA, 247 bp, Glycine max
atcgtagcaaagaaagaaagatagaaaaccctagcttaccttttcaactttcaagaacttggggcatgtattgtgtattgtatacagatgcaaatcttcgttaagacactcactggtaagacaatcacccttgaggtggagagttcagataccatagataatgtaaagtccaagattcaagacaaggaagggatcccaccagaccagcaacgtctcatttttgctagcaagcagcttgaggatagac

SEQ ID NO: 159606 - DNA, 247 bp, Glycine max
atggaactggagagcgcaaggaatgggataggatctatgattatgatgtctacaatgacttgggcaacccggatagcggtgataaatatgcacgccccgttcttggtggttcagccttaccttaccctcgcagaggaagaaccggaagaggaaaaactagaaaagatcccaacagtgagaagccgagcgattttgtttaccttccaagagatgaagcatttggtcacttgaagtcatcagattttct

SEQ ID NO: 159607 - DNA, 247 bp, Glycine max
atccacacaaactcagggtagggcagagagagagagagagagagagagagagagagagaatgggagggtgggctatcgcggtgcatagtggcgctggtgtcgaccctaatctcccactcgagcgacaagaagaagcgaaacaacttctcacgcgctctctcaatctgggaatctctgctctaaattctaatcttcgcgacatagatgtcgtcgaacttgtggtgagggaattggaaacggatccgct

SEQ ID NO: 159608 - DNA, 247 bp, Glycine max
cagtactgtatataaggcacgggatgtgattaaccaaaagtttgtagcattgaagaaagtacgctttgacaatctggatcccgagagtgtcaagtttatggcaagggaaatccatgttctgcgtaggcttgaccatccaaacataattaaattggagggcttgattacatcacgaatgtctcgcagcctgtaccttgtttttgagtatatggagcatgatcttacgggacttgcatcaaatcctgat

SEQ ID NO: 159609 - DNA, 258 bp, Glycine max
tccgcatccgctagctcgcgcaggcaccagcaggtgaggttattgtgatttgaatggagggaagtggaggtggcggtgcttcaccgtctgcaccgttgaagcaatacttacaggaattctcgaagctgtttcagtactatctggataaatccactccccatcccccctacaggtggattgggactttcgtcattgcatccatctacgttttgcgtgttgtttatgtgcaagaggtttacatggtccttagggcctcgg

SEQ ID NO: 159610 - DNA, 257 bp, Glycine max
ggaaaaggcgtcttcataaacgccgcccaaaacttctcatacccttttattcattccattcgtttctagggttttcttttctttgccgagaaaatgagagagtgcatttcgatccacattggccaggccggtatccaggttggaaacgcctgctgggaactctattgccttgaacacggcattcagcccgatcgacagatgccgagtgacaagaccgttggcggaggagacgacgccttcaacacatttttcagcga

SEQ ID NO: 159611 - DNA, 255 bp, Glycine max
gcaaaaagaaagaatcccaggcgaggagaaagatggaggggaaggagcaggatgtgtcgttgggagcgaacaagttccccgagagacagccgattgggacggcggcgcagagccaagacgacggcaaggactaccaggagccggcgccggcgccgctggttgacccgacggagtttacgtcatggtcgttttacagagcagggatagcagagtttgtggccacttttctgtttctctacatcaccgtcttaaccg

SEQ ID NO: 159612 - DNA, 250 bp, Glycine max
gtccgaattgtgaaagtaagcaaagatggctttcacggaatcgtctctcctccttcctatcggtttcaggaaccaacaagaacaagaacaaggttccagaagacaaatggtatttagcctacattgtgtattttaccctgggtctcggttaccttctcccatggaacgctttcatcaccgccgttgattacttctcctttctctaccctgacgccagcgttgaccgcatcttcgccgtggtttacatgat

SEQ ID NO: 159613 - DNA, 246 bp, Glycine max
gtcaacgggcgagtaaacccgtaaggcgcaaggaagctgattggtgggatccccctgtgggttgcaccgccgaccgaccctgatcttctgtgaagggttcgagtgagagcatacctgtcgggacccgaaagatggtgaactatgcctgagcggggcgaagccagatgaaactctggtggaggcccgtaacgatactgacgtgcaaatcgttcgtctgacttgggtataggggcgaaacactaatcg

SEQ ID NO: 159614 - DNA, 260 bp, Glycine max
attgctcaatagtttcaactgtagattttggaaaggtggcatttgttgcaattggagctacaatggttggtagcattacttttacaaagaaaaagggcgactatgttaagaagggagatgagtttggatatttctcattcggtggaagcactgtaatttgcgtttttgaagagaattcaattgcaattgatgaagaccttttagcaaatagcgccagatcactggagaccttggtgtctgtagggatgagattgggtgtc

SEQ ID NO: 159615 - DNA, 251 bp, Glycine max
gtgggacactcctattcatgttgatgcagcaagtggtggcttcattgccccatttctttacccagagcttgagtgggacttccggttaccactagtgaagagcatcaatgttagtggccacaagtatggtttggtctatgctggaatcggttgggttatctggagaagcaaggaggacttgcctgaggaactcatctttcacatcaactatcttggtgctgatcaacccaccttcacccttaacttctcca

SEQ ID NO: 159616 - DNA, 252 bp, Glycine max
gcacgcataagggtgccgatgaccgcagcttcaggtgtgtgtaccaagaggaagatgagcaaaaactaaagggactaaagatcagcaaagacttaattgaaattggtggtgatgctctaaaaaccaacatcaccacactaggacccttggtgctacccttttctgagcagcttctcttctttagcacccttgtgtggaggcacttatttggcagcaaaaatgatgggaattcaccctcaatgaagaagccat

SEQ ID NO: 159617 - DNA, 246 bp, Glycine max
caaaaggaatcaaccctccatctcgtgcttcgcctcaggggtggcatgcaaatctttgtcaagactttgaccgggaagaccatcacccttgaggtggaatcctcggacaccattgataatgttaaggccaagatccaggacaaagagggcatccccccagatcagcagaggctgattttgcccggtaaacaacttgaggatggaagaacccttgctgattacaacattcagaaggaatccaccctt

SEQ ID NO: 159618 - DNA, 245 bp, Glycine max
gccggggagcggaggtgcggcgtcggcgcagaacgaagccatagaccggcgagagcgtctccggcgattggctctggagaccatagacctggcgaaggatccctatttcatgcgcaaccacctcggaagctacgaatgcaaactctgtctcactctccacaacaacgagggcaactacttggctcacactcagggaaagcgccaccaaaccaacttggccaaacgtgcagctcgcgaggccaagg

SEQ ID NO: 159619 - DNA, 244 bp, Glycine max
gcagaggccactcaagagaaccattgcaatcgccaagcaacgcgcgtgcttttcctctctcctaccctccgccgctgccgccgccgccgccgataccgtcgcgcctccgcagctccccccgttcgatcaccagccgcacccttacaacggtccctccgccgatgaagtcttcgccaagcgcaaaacgttcctcggtccttccgtcttccactactataagaaacctctgaatatcgtggaaggg

SEQ ID NO: 159620 - DNA, 241 bp, Glycine max
gtcagtagtatgtggaagttgaagatagcagaaggaggagatgggttaatctctgtgaacaatttcattggacgtcaacactgggagtttgatcctaatgctggaactccacaagaacgtgctcaagttgaaagggtacgagaggaatacaaaaagaaccggttttgcattaagcaaagcggtgacctactcatgagaatgcagctcacaaaggagaaccgtgtgggcccattctagcaag

SEQ ID NO: 159621 - DNA, 266 bp, Glycine max
atccgcagctgcttttattcgcaccgcaaacagtgagccatggccgtcggaaagaacaagcgcatctccaaggggaagaagggtggcaagaagaaggcagctgatccctttgccaagaaggattggtatgacattaaggctccttctgtttttcaagtgaaaaatgttggcaaaaccctcgtctctcgtactcagggtaccaagattgcttctgaaggactcaagcatagagtgtttgaggtctccttggctgatcttcaagggga

SEQ ID NO: 159622 - DNA, 252 bp, Glycine max
gggagctcattgaagagacaaaaaacaatggctgaaacaaagttgagcatgatgaaggacaaaagatggtcactccgtggaatgactgctctcgtcacaggagccacccgaggcatagggcatgccattgttgaagaattggcagactttggagcaactgttcatatatgtgcacgtaatcaagatgatattgataagtgtttagaagagtggaaaaacgagggacttaatgtgactggctcagtatgtgat

SEQ ID NO: 159623 - DNA, 257 bp, Glycine max
ctttactgacctttttgatttctttccgttgactgcattggttgagtccgaaatattttgtttgcatggtgggctttcaccttcaattgagactcttgataacataaggaacttcgatcgtgttcaagaggttcctcatgaagggcccatgtgcgatctgttgtggtctgatccagatgataggtgtggctggggaatttctcctcgtggtgctggatatacatttggccaggatatatccgaacaatttaatcaca

SEQ ID NO: 159624 - DNA, 251 bp, Glycine max
caaagagattgggtggatttacggctcggtcacagaagatattttgactggattcaagatgcactgcagagggtggaaatcagtatattgcatgccaaagcgaccagcattcaagggatctgccccaataaatctatcagatagattgcaccaagttctgaggtgggctcttggctctgttgaaatttttcttagtcgtcattgcccgttgtggtatggctatggaggaaaacttaagtacctacagagga

SEQ ID NO: 159625 - DNA, 249 bp, Glycine max
gttttgtttatttgaaattaacaagtagcaaagatgtttggaatcatcggaggaaacaagggtcacaagataaaggggaacttggtgattatgcgaaagaatgtgttggatatcaacagcattaccagtgttaagggtgtcatcggaaccggcattaacatcattggaggagtcgtcgacaccgttactgctttggcgtcccacatctccatccagctcattagtgccaccaaggctgatggacatggg

SEQ ID NO: 159626 - DNA, 246 bp, Glycine max
cgaggagtgagaccggatcagcaattggttaagattgtacatgatgaacttgtacgattgatgggtggagaagtttctgaactggtttttgccaaatctgggcccactgtcattttattggctggacttcagggagttgggaagacaacggtttgcgcaaagttggcaaattatctcaagaaacagggaaaaagttgcatgctagttgctggggatgtttacagacctgctgctattgaccagctt

SEQ ID NO: 159627 - DNA, 246 bp, Glycine max
caaatcttgatgttttcagcaacatttcctgttactgtaaaggatttcaaagataggtatcttcgaaaaccttatgtcatcaaccttatggatgagctaactctgaagggtattactcaattttatgcattcgtggaagagagacagaaagtccactgcctaaatactctattttctaagctgcaaataaaccagtctatcatcttctgcaattcagtgaatcgggttgaacttcttgccaagaaa

SEQ ID NO: 159628 - DNA, 244 bp, Glycine max
ggactaatcataagagggtgggcgcctcaagtgttgattcttgaacaccaagcgattggcacgtttgtgacacattgtggatggaattcaacgttggaagcagtgactgcaggggttcccatggtcacttggcctattttcgccgaccaatttttcaatgagaagttggtgattgaggtccttaaaattggggtacctgttggtgctaaaacatggcttggaatgcagggagatagtatttcat

SEQ ID NO: 159629 - DNA, 246 bp, Glycine max
tgggtgctctggatcacatctctgagctctttgactgctcccataccagctccaagctcaagaagaagcgcaaacaattccagacggtggaggtgaaagtgaagatggactgcgaagggtgtgagagaaaggtgaagaaatcggtggagggaatgaaaggggtgacagaggtggaggtggatagaaaggccagcaaggtaactgtttccggctatgtggaaccctcaaaggtggtttctcgcatcg

SEQ ID NO: 159630 - DNA, 261 bp, Glycine max
gaaggatgccacaatcgagcaacttctgcctattttcctttctcttttgaaagacgagtttcctgatgtcaggctaaatattatcagcaagcttgatcaagtgaaccaggttattggtattgatttgttatctcagtctctgttgccagccatagtagaactagctgaggatcggcactggagagttcgacttgcaatcatagaatatatacccttattggcaagccagttgggtgttagtttttttgatgataagcttgg

SEQ ID NO: 159631 - DNA, 256 bp, Glycine max
ctttcgcaaacctaattactgctattacgagacgacgcagatttagttcggattgttcgattgcgatggctaggaagatgcttatcgatggtgaagctgaattggctcaaggtggtggagaagaagtgtcgaattttgacttcgacttgtttattattggggctggaagtggtggcgttcgtgccgctagattttcatccaattttggagctaaggtggggatttgtgagcttccatttcatccaattagttcaga

SEQ ID NO: 159632 - DNA, 256 bp, Glycine max
ttaaaaatgaaaaatatttactgttttttgtaatttttttattctgtttaaattttaaaagtattgcctccacaaggtgaaaattcaaaaaaacctggggctgctcataatgttcgactatattcaattgcttccacaaggtatggggacttttttgatggaaaaactgccagcttgtgtgtgcgtcgtgctgtttattatgatcctgtgacaggaaaggaagatccttccaagaatggcatttgtagcaattttt

SEQ ID NO: 159633 - DNA, 247 bp, Glycine max
tttttgaagtagatcaggaagagttcctggtgtgggcctggtacatctcccactttccttattacctgggccatttcctgaaagtcattggaagcaagggtgcgaattagctcctatatttaatgaacttgttgatcgggtgagtttggatgggaaatttctccaggaatctctctccagaactaagaatgcggatgaatttacctcaagacttttagatattcattctaagatgctacagattaac

SEQ ID NO: 159634 - DNA, 252 bp, Glycine max
catcatacaacattctaggaaaatatagaagggatgttctccttggcattgggggcctttacggtgcatctgctcttagcaacaccaaccctttagccatggctgcagctcctattcttcaacctgacctagaacattgttgtataactgatgatgtaccacctaaaggggtcatcgaggcacaagtctattgttgcccaccaagatcttcttgccctcctatagatttcaagttgcctaaaggaacacccc

SEQ ID NO: 159635 - DNA, 249 bp, Glycine max
ggtgtgcagaagagcgtcgcagttgtaaccctaatcagaagaagcgcacttcaagcgagtgacagccaccagccatgggtcgtatgcacagccgcggtaagggtatatcctcttctgctttgccctacaaaaggacacctcctagctggctcaagatctcttcgcaagatgtcgaagaaaatatctgcaagtttgcgaagaaaggtttgaccccgtctcagattggtgtcattctcagagattctcacg

SEQ ID NO: 159636 - DNA, 249 bp, Glycine max
ggagcagaagaaggcaaagatagtggcagagctccaagctgtgaagcacaacagtggcaagtcctacaatcagttagcggaggagactggactcaccaacgtctatgttgctcagcttctcaggagacaggctcagctcaatccccaaactgcccctctacttcgggcagcgctgcccgacctgccccaagaccttgtttctgagatgatgagaccccctttgaggtcttatgaccctaatctcatcca

SEQ ID NO: 159637 - DNA, 248 bp, Glycine max
  unsure (1)..(248): unsure at all n locations
acggagccctctcttcaggtcaccatctagactgcaatcatggctgatggaccacagcatccatcagttgttcagaagctagctggacagtcttacctggtgtccaggcttagccccaactttaactctaggaattattctgcaactggttcttacgtcaatggcggactgcactcgcctgggttggctgttggctcacctgtatctccagttactntgcatgctncagcagagaaaggagtgagtgg

SEQ ID NO: 159638 - DNA, 257 bp, Glycine max
cttgaacttgaactatcgtgtcttcttggctttctctgttcaggatcaacatggatattgtatcacgagctttgctatttccgttggctatacttgtgctcatattaagcacaccttgctcaggtgcttttgggaagagtggaactaatgtgaaaacagctatttttctgtcccccaagtttgaacttggaccaggatcggtagccaataaatatgattatgacgctgattttccaagaggtcatatagcacttaag

SEQ ID NO: 159639 - DNA, 255 bp, Glycine max
aaggcttatggtggatacctaggcacccagagacgaggaagggcgtagtaagcgacgaaatgcttcggggagttgaaaataagcgtagatccggggattcccgatataggtcaacctttcgaactgctgctgaatccacgggcaggcaagagacaacctggtgaactgaaacatcttagtagccagaggaaaagaaagcaaaagcgattcccgtagtagcggcgagcgaaatgggagcagcctaaaccgtgaaaa

SEQ ID NO: 159640 - DNA, 253 bp, Glycine max
ctcgagccgaatcggctcgaggcgacgacgatccaagtgatagacactcgtcgcgatggaaagtgtagctgaatccgagcgagctctgtacccatacgtgactggatcctctgtagtcgctatcaaatacaaagatgggattctaatggccgctgacatgggaggttcgtatggatctaccctgcggtacaagagtgttgagcgtatcaagcctattggaaagcattctcttcttggtgctagcggggagata

SEQ ID NO: 159641 - DNA, 253 bp, Glycine max
ctatggtatgtttcaaatatctgctagcgatggcgaaactttcatatcagctgatgatttacgaataaatctttggaacctggaaattagcaatcaaagttttaatattgttgatgtaaagcctgcaaatatggaggatctgaccgaggttataacatcagcagaatttcaccctacacattgtaatacattggcatatagcagttcaaagggttcaattcgtcttgttgacttgcggcagtcagcattatgt

SEQ ID NO: 159642 - DNA, 252 bp, Glycine max
atcactttaatcacgcactatcagtacaacaactcactcactaagctaaacaatttcatcaagcctgccatggcttcctcgtgtgcttcctctgccattgcagctgttgccatctccacaccaagttcccagaagaatggatcactcttgggaagcacaaaagcttcttttcttagtgggaggaaactgaaggtgaacagttttacagcaccagttggagcacgatccagcactacagtgtgtgcagttgct

SEQ ID NO: 159643 - DNA, 240 bp, Glycine max
ttgcgagttgcagagagagcaatgagtcaggaatcgtttatatagagcttcgtggctcgggggacgatggtgttagccgagtacaccgagttcactgggaacttccctgcaattgcagctcagtgcctccagaaactaccctcttccaataacaagttcacctacaattgcgaccaccacaccttcaattttctcgtcgaagaggttacgcttactgtgttgttgccaaggaatctgtta

SEQ ID NO: 159644 - DNA, 252 bp, Glycine max
ctcgagtcaaaggttaatgagaccaaggccatggtgaagttccagcttaagaaggtgctttgcatgggagtagccgtggggaatgttagcatggaggaaaagcaaatcttccaaaatgtacaactgagtgttaacttccttgtctctttgttgaaaaagaattggcagaacgttcgctgcctgtatctgaagagtaccatggggaaatcgtaccgtgtcttttgaggagttgttcttaaattcagtgaattt

SEQ ID NO: 159645 - DNA, 250 bp, Glycine max
ccgagtttgggcgtttagatcagaaccaaatcgtgttctcttccattggcaaacatggcaactcaaatgagcaagaagagaaagtttgttgcggacggagtgttctttgccgaactgaacgaggttctgacacgtgaattggcggaggacggttactccggcgtcgaagttagggttacgccgatgcgcaccgagatcatcatcagagccaccagaacccaagccgttctaggtgagaagggaaggagaa

SEQ ID NO: 159646 - DNA, 249 bp, Glycine max
ggaattgtagttaatattccaactagattgacaggagatggacacagtgttggggagagtggtaccgggctgagggacgagtacaaaagcaggggtttcaatccggttcgagtcactcctttgtggaatttccggggtcactctggaattgctcttgtggaattcaacaaagactggtcaggcttggataatgcgttggcatttgaaagggaatatgaattagatcatcatgggaaaaaggactggttt

SEQ ID NO: 159647 - DNA, 253 bp, Glycine max
gatgaaatcaactccaatggaaatgcaacgaaaatcaagagtcttgatgagcttgatcctaagatacagaacattgtattgctaagtgacgcttatggggctgaaggtgaactgggtgtggttttatctgacaagttcattgaacatgatgcttactgtatgtttgatgctttaatgaatggggcacgtggttcaattgcaatggctgatttcttctcttattctcctttgcctgggtcccatactggcttgc

SEQ ID NO: 159648 - DNA, 252 bp, Glycine max
cacaaagcacaaagcaaagctcatccttgagttaaaaaatggcagcagcttcttccatggctctctcatccccatccttggctggcaaggccgtgaagctgggcccatcagccccagaagtgggaagggtgagcatgaggaagaccgtcaccaagcaggtctcctcaggaagcccatggtacggcccagaccgagtcaagtacttgggcccattctctggcgagcccccgtcctacctaaccggtgagttcc

SEQ ID NO: 159649 - DNA, 251 bp, Glycine max
ttcagcttttccctcgttgaaatgaaaatgggttcttctttgtggactttgtgtctaattttggcttcactagcctcttctgcattctgtgcctttccacggaggccagtggatgttccattcggcagaaactacgttcccacttgggcttttgatcacatcaaatacttcaatggaggttctgagattcaacttcatcttgacaagtacactggtactggcttccagtccaaagggtcatacttgtttgg

SEQ ID NO: 159650 - DNA, 249 bp, Glycine max
cggagttaatgttccgagaggcgtggctgtttcctctgttgaagaggtcagaaaggccatcaaggaccttttccctaatgaaaatgagttggtggttaagagtcaaattttagccggtggaagaggtttgggaactttcaaaagcggccttaagggaggagtgcacattgttaagactgaccaggttgaagacatagctgggaagatgcttgggcagatactagttaccaaacagactggtcctcaggg

SEQ ID NO: 159651 - DNA, 250 bp, Glycine max
gaagatgctgataaaagtgaagacgaagaaaaaaagcccaagacaaagacggtgaaggaaacaacttatgaatgggaacttttaaatgatgtgaaagctatatggctgaggaatccaaaggaggttacagaagaagaatacaccaaattctaccactctcttgccaaggatttcagtgatgagaaacctttagcatggagtcatttcactgctgagggcgatgtcgagttcaaggcagtcctgtttgtac

SEQ ID NO: 159652 - DNA, 249 bp, Glycine max
ctgatatcattgttctgatgaaagacaaaagatggcagacaatgaggatggaagggataagactactcgtgggaatgaatgggaggttgtatctctgacagcatcgacatatgcagctgctcctggtcctgatgaagttgagatgaaggatgatgggaacgaagatgtatatggacaagatgaaggagaaacgtcacatgctttatttatgtctcgtcactttgtctttcctcccagtcagcatgaaaa

SEQ ID NO: 159653 - DNA, 248 bp, Glycine max
caagattcgatttgagagtcttacagacaagagcaagcttgatgctcagccagagttgttcattcacattattcctgacaagaccaacaacacattgtctatcattgacagtggtattggcatgactaaggctgatttggtgaataacctcggtactattgcaaggtctgggaccaaggaattcatggaagccctggctgctggtgctgacgtgagcatgattgggcagttcggtgttggtttctact

SEQ ID NO: 159654 - DNA, 251 bp, Glycine max
tattattcaagccacgatgactgagcttgccaaactctttcctgatgaaatttctgcagaccaaagcaaagctaagattctcaagtaccatgttgttaaaacaccaaggtcggtttacaaaactgttccaaattgtgaaccttgtcgacccattcaaagatctcctatagaaggtttctatttagctggagattacacaaaacaaaaatatttagcttcaatggaaggcgctgttctttctgggaagcttt

SEQ ID NO: 159655 - DNA, 253 bp, Glycine max
aagattctgaacataagagttcatagaagagcatctcattggcaggtatggttgaatttattgggttgatcaaggtcaatgtggttaaaggcactaaccttgctatccgtgatgtaatgagtagtgacccttatgtcatcatatctcttggtcaccaatcagtgaagacacgtgtcgtaaagagtagtttaaatccaaattggaatgatagcttaatgttgtcaattcctgcatcacattccacctcttaaag

SEQ ID NO: 159656 - DNA, 252 bp, Glycine max
atttatcaactcactcatcaatctcgtttgttctcactaactattacttcatcatgtcgtcgagcacagttggtcaagtcatcaaatgcaaagctgcggtttcatgggaggcagggaagccacttgtgattgaagaagtagaggtggcaccaccacaagctggtgaagtgcgtttgaagatcctctacacctctctttgccacactgatgtttacttctgggaagccaagggccaaactccattgtttcctc

SEQ ID NO: 159657 - DNA, 249 bp, Glycine max
gttgattcatgtcttcacgaactgctacattggccgttccgagatgtatgcttaagagagtgtcagggtctttatgatcttatggctgcagatacaagtgatgcagagtttgcaaccttgctagagttgaatggctctgatatgcattcaaaatctctggcatttgttccgctccgtgccagacatattctaaatgccatgattgattgtaagatgcctcaatctatttatacaaaggatgaaggaagt

SEQ ID NO: 159658 - DNA, 249 bp, Glycine max
caacaacttctccttcaccggtggcttccccaacaacatcacgaccttccctttcttcttcgagcttgacctaagtaacaacaaagtcagtggccagttccccacgcaagcgattcagaacaaccagttagtcttcctggacctcaggttcaaccagcttaccgggccgatagacccgaaactcttccagagggacctcgatgtgatctttgtcaacgataaccagttcaccgggtgcctcccggagaa

SEQ ID NO: 159659 - DNA, 249 bp, Glycine max
cgccggagccacattgggcgttctgctacacaatgctccacaaggtttctcgaagtttcgccctcgtcattcagcaactcggcaccgagcttcgcaacgccgtttgcatattttatttggttctgcgagctctcgacaccgttgaggatgatactagcatagaaacagatgtcaaggtgccaatactgatagcctttcaccgtcatatttatgatcgtgattggcacttttcatgtggcacaaaggagt

SEQ ID NO: 159660 - DNA, 240 bp, Glycine max
gtgcatattcctgcgaactgcaaccacaacatactctacggaaacaatatacgtcgcgtcaagttctgggacccttacttcttcttcatgagacctaagcctgtgtacgaagttaccttccttgatccttatgccggatcagatatctgttaaggctgcgaggtactcgtccatttaagtcgccaaccacgtcgcatcaagtacttgatgatctgtaagggtataagtacacctggctca

SEQ ID NO: 159661 - DNA, 252 bp, Glycine max
atcaaagctgagaagtgtaatgtacaaagggttcacctctgagctatttgtgccatacatggatcccacacaagattggtactttaagacatacatggatgctggtgagtatggatttgggttgcaggcaatgccactagaccccttgaatgattgccccaagaatgcttactacatggatggtgtctttgcctcttccgatggaacaccatatctccaacccaacatgatttgcatttttgagagttatgc

SEQ ID NO: 159662 - DNA, 250 bp, Glycine max
  unsure (1)..(250): unsure at all n locations
caactactactactataggtacttactactttgcctagctcctctttctctctcttcccttttgcactgaacttcactctctcttctatatcaagggttgatcacataacctcaatatatttctaataataattgatatagtntgagtnattgtttcgnnnnnnnnnnnnnnnnnnnnnnnnnnnnnatgggtagagggagagttgagttgaagaggatagagaacaaaatcaaccgccaagtaactttc

SEQ ID NO: 159663 - DNA, 250 bp, Glycine max
aagaaaaggtcaagtggggtatatgcatcactatccgagagagagagaggagagtattattcccagagaccgccaactccgctactagacaccgtcaactatcctattcatatgaaaaatctctctaccaatgtacgctgctcactctaactcaaacccatctacattataatattatataatggttatgtcaaaggattgattgatgcaggagctgaaacaactcgcagatgaactgcgttctgatgtt

SEQ ID NO: 159664 - DNA, 248 bp, Glycine max
cggattttgagagggatttgaagaagggtgaggctctttcgttgccgaggatcaagctctcaaggattgaccttgagtgggtccatgtcctcagcgaaggatgggccacacccctgaaaggcttcatgagagaagccgagttcctccaaacgcttcatttcaactcgctccgactcgatgatgggtcggtcgtgaacatgtcagtgcccatcgtgctggctattgatgatgcgcagaagcatcggatc

SEQ ID NO: 159665 - DNA, 248 bp, Glycine max
caatttttctctcaaccggcccaatttagcataagcccagcatggccaccgcaacagcagcagccacctcgtccttcatggggacgcgcctcctggaggcccactacggggcggggcgggtgcaggcccggttcgggtttggcaagaagaaagccgccgccccgaagaaagtttccagggggtcgggcttcagctccgataggcccctgtggtatccgggcgccaaggcgcccgagtacctggatggg

SEQ ID NO: 159666 - DNA, 248 bp, Glycine max
tcctgccagtagtcatatgcttgtctcaaagattaagccatgcatgtgtaagtatgaactaattcagactgtgaaactgcgaatggctcattaaatcagttatagtttgtttgatggtatctactactcggataaccgtagtaattctagagctaatacgtgtaacaaaccccgacttctggaagggatgcatttattagataaaaggtcaacacaggctctgcctgttgctttgatgattcatgata

SEQ ID NO: 159667 - DNA, 255 bp, Glycine max
aaaagttattaagagcttttgcttttctttctgcgcgcttttcccaattaagtagttcttccttttctcaaagcaaaaaaaatgttcatcgagagtttcaaggttgagagtcctaacgtgaagtacacagagactgagattcagtccgtgtacaactatgaaaccactgaacttgttcacgagaacaataatggcacttatcagtgggttgtcaagcccaaaactgtcaaatatgaatttaaaaccaacacccat

SEQ ID NO: 159668 - DNA, 251 bp, Glycine max
tggtcaagttgcatcagatcgtttggggccaggaaagatggaacttggtcttggaattcatggagaacctggggcagctgtggctgatattcagcccgtaaatgtggtggtttctcatgttctacagcaaatattgtccacggaaacaaactatgtaccgataactcgaggagaaagagtggtccttatggtcaatgggttaggtgccactcctacaatggaactaatgattatagctggaaaaacagttc

SEQ ID NO: 159669 - DNA, 241 bp, Glycine max
tttcccctagattcagccacagtttcggaggagaagaaaatagtcgttcgagatggcccgtacgaagcaaactgctcgtaagtccacaggaggaaaggctcctaggaagcagcttgcaaccaaggctgcacgtaagtctgcaccaactactggtggtgtgaagaagccacatcgttaccgtcctggtaccgttgctcttcgtgagattaggaaataccagaagagtaccgagcttttgatc

SEQ ID NO: 159670 - DNA, 250 bp, Glycine max
atggccacctctgctattcagcaatcagcattcgcaggtcaaactgctctgaagcagctcaatgagttggtccgcaagaccggtggcgccggcaaaggtcgcaccaacatgcgccgtaccgtcaagagtgctcctcagagcatttggtatggccctgatcgtcccaagtacctgggtctattctcagagcagattccgtcatacctgaccggagaattccccggtgactacggatgggacactgctggac

SEQ ID NO: 159671 - DNA, 245 bp, Glycine max
gcccttgcacagagaaaagaagacagaagagcaaggttacaggctcagttttcacagatgaggcctgttgcaataacgccttctgttgcgccccgtatgcctctctaccctcctggtgctcctggtcttggacaacaatttttgtatgggcaaggacccccagccatgatgcctccacaagctggatttggataccagcagcaactagttcctggaatgagacctggtggtggtcccatgccaag

SEQ ID NO: 159672 - DNA, 246 bp, Glycine max
agggtatgtagctccagaagtatggaatagaaattttggcggaatttcgcagaaatctgatgtttacagctatggaatgatgctactagaaatggtgggagtgaagaagaatattaatggaaaagccagtcagacaagtgagtacttcccagattggatatacaacaggctagagcagggcatagatttgacaactgatggggtgatagccacacaagagaaagagatagcaaggagaatgactat

SEQ ID NO: 159673 - DNA, 254 bp, Glycine max
agaaccggaagaggaaaaactagaaaagatcccaacagtgagaagccgagcgattttgtttaccttccaagagatgaagcatctgatgacttcaagtgaccaaatgcttcatctcttggagtcatcagattttctcgcttttggaatcaaatctgtatcccaagatgtcttgcctgtcttgactgatgcattcgatggaaatattttgagccttgagtttgataattttgctgaagtgcgcaaactctatgaag

SEQ ID NO: 159674 - DNA, 246 bp, Glycine max
acctagcaggacctaaggatggcatagccttaaagttaagggcgaggttcaaacgaagaaaggcttatggtggatacctaggcacccagagacgaggaagggcgtagtaagcgacgaaatgcttcggggagttgaaaataagcgtagatccggggattcccgatataggtcaacctttcgaactgctgctgaatccacgggcaggcaagagacaacctggtgaactgaaacatcttagtagccaga

SEQ ID NO: 159675 - DNA, 244 bp, Glycine max
gagaatccgaggcgaagagaagagaaaaattaagatggaggggaaggagcaggatgtgtcgctgggagcgaacaagttcccggagagacagccgattgggacggcggcgcagagccaagacgacggcaaggactaccaggagccggcgccggcgccactggttgacccgacggagtttacgtcatggtccttttacagagcagggatagcagagtttgtggccacttttctgtttctatacatc

SEQ ID NO: 159676 - DNA, 243 bp, Glycine max
accgttttctccgccaccgatgccaaacgtaacgccagagactctcacgtccccattttggcacctttgcctattgggttcgcggtgttcttggttcacttggcaaccatccctatcaccggcactggtatcaaccctgctcgtagtcttggtgctgctatcatcttcaacaaggaccttggttgggatgatcactggatcttctgggtgggacctttcattggtgctgcacttgcagcactc

SEQ ID NO: 159677 - DNA, 242 bp, Glycine max
cgtccatcaaatgagacccttgcttctatctatgttgaagccattgaggtgggttaccgtcattttgacactgctgcagtgtatggaacagaggaagccataggcctagccgtggccaaagccatagacaaaggccttataaagagtagagatgaagttttcatcacttcaaagccttggaacacagatgcacaccgtgaccttattgtcccagctcttaagaccacattaaagtacatata

SEQ ID NO: 159678 - DNA, 252 bp, Glycine max
gtggttgaaagttaagaagtagcaaagatgtttccattcacgcacaagggtcaaaagataaaggggactatggtggttatgcagaagaatgtgttggatatcaacagcatcaccagtgttgacgggatcgtcggcaccggcttagacttcttaggcagtgcactcgatacagttacttttttagcctcctccatctccatccaacttattagtgctaccaaggctgatggtgggaaaggaaaagttggaaag

SEQ ID NO: 159679 - DNA, 247 bp, Glycine max
caacacagagagaagcgtcttaataaacgctcttctctgaaaaacctgatttcttctcttcttctcttctctttcgtttcgatcttcgatctctgaaaatgagagagtgcatttcaatccacatcggtcaggccggtattcaggtcggaaacgcctgctgggagctctactgcctcgaacacggcattcagcctgatgggcagatgccaagtgataagactgttggtggaggtgatgatgctttcaa

SEQ ID NO: 159680 - DNA, 243 bp, Glycine max
gcaaagatgctgctggacaagttcgtggttctccaaatgaatttgctggaataggctccacatcagcccttctttggctggctagaaggtttgcaattctatctgggcctaccattcctattattggcgagggtgatgaagaggcaaatgataggtatgtagaacaattagttgcaagtgcagaggctgctgtggaggaagttatccagcgtggggtggctgatccgaagaaaatagctgttg

SEQ ID NO: 159681 - DNA, 239 bp, Glycine max
gaagaaacataagagggagttataagatattcacagaagcagcaaaaatgcttatgcaacaagttcatgtatcaaatccaagttcatcttgtctcatccttcaaaagccatgcctccgtgacattactcacccttcttttcagctttggtcaaggccatcatcgttcccaaaccaaaggaagcaaaaaagggtttcttatggatgcaggagtaatggcaacaaaatcaaagctgtggct

SEQ ID NO: 159682 - DNA, 236 bp, Glycine max
gaaattctcgtcctcttcctacataagtcttctcttatcataaacgcgtgttgctcggataaggttgtgctgcggtgattcactcgtactttgcttaatatggcggttgagaagttgagcattgcaaaagatgtgactgaattaattggcaaaactccattggtatatctcaaccgcatcgtggatggctgtgttgccaaagttgctgcgaactagaaatgatggaaccttgctcc

SEQ ID NO: 159683 - DNA, 250 bp, Glycine max
ttcggctcgaggtgatttggagtttggagcgactgaactaatcattaatttgcactcgctgtttcagcttcatcacccttcttttgcatcatttatatctcttgagaaatggcacaagaaacctttctattcacatctgaatctgtaaacgagggtcaccccgacaagctgtgcgaccagatctctgatgcagtacttgatgcgtgccttgaacaggaccctgacagcaaggttgcctgtgagacatgca

SEQ ID NO: 159684 - DNA, 248 bp, Glycine max
gccaagtgaaagagagaagaaaagtcaaagacaatgtcagggatcattcacaagattgaggagacccttcatgtgggaggccacaagaaggaggaggagcacaagggtgagcagcaccatggtggagaatacaaaggggagcatcatggtgaacacagtactgaatacaaaggagagcatcatgttggtgagcacaagccggagcaccatggcggagaagagcacaaagaggggttcctagacaagat

SEQ ID NO: 159685 - DNA, 245 bp, Glycine max
aaagggtaaaatgcaggtcggtgcccattattttgaggaaggaaatgtgcagttagatgcaaaacatgaatgcaaagatgcaactctttttcaggcccctgaagattgtgcacttgccataacaagcattattcgtcaccatgaaacagagtaccttgcttctcttgaggcatcatatctaaaccttcctgattctactttcaaggatcttcggagaaagcttcctgtcacccgcacgttatttc

SEQ ID NO: 159686 - DNA, 245 bp, Glycine max
ctttctcatttcaaactccttcaagcaataatgaattctcgaatcaaagttcttctctgaagcagcagattctggagctagctaatagtcccagaacggtgaaatggatgaagagaataaggagggaaatccatgagcacccagaacttgcatatgaagagttcagaacaagtgctatcataaggcgtgagcttgacctgttgggtgttggttacaagtggcctgtggctgggactggtgtggtg

SEQ ID NO: 159687 - DNA, 242 bp, Glycine max
ctccggtttatcattctttttcaatcaggtcaagtttgaacctgttaaaatttcgcttaaggattgtttggcatgcagtggatgcgtcacatcagcagagacagttatgctggagaagcaaagtttggatgagtttctgaacaatattaattcaggaaaggccgtgattgtgtctctttctccccagtcaagggcttctattgcttttcattttggcatttctccaattcaggctttcaaaa

SEQ ID NO: 159688 - DNA, 242 bp, Glycine max
cccttctcctctcacactaattaacacactcatcaaaaaacccttctttctttcaggttcattacttgatcagtgtcaaaagggtagttgcaaattgcaatggctaagcatgatgttgagggtggttccttctcagcaaaggactaccatgatcctcctccagcacctttgattgatgctgaggaactcacacagtggtccttctacagggctttgattgctgaattcattgccacattact

SEQ ID NO: 159689 - DNA, 239 bp, Glycine max
cttccggcgccatatcgcgtatctttctctgttctattcctacgatggagttttggggtgccgaggttaaggttggtgagtctgttaaggtagatccagccgaattcgaggcatgcatacacctttctcaggctgctcttggtgaggcaaagaaagacaaatcaaatgaaccagttgttctctacttgaaagttggtcaacagaaatttgtcttgggaaccctttccagggagaaaatt

SEQ ID NO: 159690 - DNA, 239 bp, Glycine max
cacttcaccaccacaccacaaccctaccctctctctctgtcatggtcattggaggagccttccctcgtttcgacccaatcaccaaatgtagcacccaagaccgctccaaccagaccatcgcctcggacctcgatggcaccctccttgtctcccggagtgccttcccctactacttcctcgtcgccctcgaagccggcagcgtcttccgagccctccttctcttaaccttcgtccccttc

SEQ ID NO: 159691 - DNA, 242 bp, Glycine max
gtctcagaccctttctcaccaccatcttctttctcacactcacagtgctcaaggtttcagcatcatcctcagtgattttctacaacaagtgccagcacccagtgtggcccgggatccagcccagcgtaggaaagcccgttctggcccgcggaggcttcaagctcgccccaaaccgggcctactccctccagctccccgctctatggtccgggcgcttctggggccgccacggctgttccttc

SEQ ID NO: 159692 - DNA, 241 bp, Glycine max
cttcttcccaaccactactactcactcactgcagatctcaattgcatcgctgtccatggctaccatcgttagcatcaaggcccgctagcatcttcgacagtcgtggcaatccaactgtcgacgtggatctgacttgctccgatggtacttttgccagagctgctgttccaagtggtgcatccactcggatttatgacgcccttgaattcagagatggcggatctgcactaccttcgaaagg

SEQ ID NO: 159693 - DNA, 237 bp, Glycine max
attgaatctcagaattctctaaaagagatctttttctgctctttgaagaaagaagggtctttgcttgattttggagatgtctctgctctcagatctcatcaaccttaacctctccgataccaccgagaaggtgatcgcagagtacatatggatcggtggatcaggaatggacctgaggagcaaagcaaggactctcccaggaccagttagcgacccttcagagcttcccaagtggaa

SEQ ID NO: 159694 - DNA, 247 bp, Glycine max
ttgtactcactactgtgttcaccatggtgagcacaagccagagcacaaagaggggttcctagacaaagtcaaggacaagatccatggtgagggcggcgccgccgagggcgagaagaagaagaaggagaagaagaagaaggagcatggccatgagcatggccatgacagcagcagcagcagtgacagtgattaaactgctgcatcacctatatatttaaaaggtttatgggaccatagtagcgagggc

SEQ ID NO: 159695 - DNA, 239 bp, Glycine max
gtcaagtacagagaagaagaattgaagaatgtaagaggggatggaactggtgagcgcaaggaatgggataggatctatgattatgatgtctacaatgacttgggcgatccagataagggtgaaaagtatgcacgccccgttcttggaggttctgccttaccttaccctcgcagaggaagaaccggaagaggaaaaactagaaaagatcccaacagtgagaagcccagtgattttgttta

SEQ ID NO: 159696 - DNA, 239 bp, Glycine max
tttgaaagtgagtgtggcgtaccgtgtacgtatctgcagaaagtgaatgaatggtaatgggggaagaagggtgcaaggtatgtgttacaggaggcagtggttacattggttcctggctcatcaagaagctactggccaagggctacacagttcatgcaactctcagagacttgaagaatgagtcaaaggttggcctcttaaagagccttccacaatcagaaggaaaactggtgctgttt

SEQ ID NO: 159697 - DNA, 239 bp, Glycine max
ctttctcgtcactagctctgtgcattcttctctcgctctctgccttccatcacactcggcatttcctttcccaagatagtagaagatggcagacactgaggatattcaacctcttgtttgtgacaatggaacaggaatggttaacgctggattttctggagatgatgccccacgtgctgtgtttcccagcattgtaggtcgtcctcgtcacactggtgtgatggttggcatgggccaaa

SEQ ID NO: 159698 - DNA, 244 bp, Glycine max
cttctatggaaccatttctcatcaaattctttcccggtgtttataaacaaatgcaagatgatgttggccatagaagccaatattgcaaatttgacaacgagctccttacactcttcacctcttccttgtatcttgctgcattagtagcttctttctttgcttccaccactacaaggatgatgggacgcaaggcctccatgttcttaggaggcttgtttttccttgtgggggcattattaaacgg

SEQ ID NO: 159699 - DNA, 240 bp, Glycine max
caatttcatcaagcctgccatggcttcctcgtgtgcttcctctgccattgcagctgttgccatctccacaccaagttcccagaagaatggatcactcttgggaagcacaaaagcttcttttcttagtgggaggaaactgaaggtgaacagttttacagcaccagttggagcacgatccagcactacagtgtgtgcagttgctgagcctgataggcctctgtggttcccaggcagcacccc

SEQ ID NO: 159700 - DNA, 239 bp, Glycine max
tgctgacttcctctttgttttctgatctatggcttccaaggagttctctggtctttgctccttggctccttcactatctgagagcattttgtgcactactgggttgaaaatgtatatgctggagagcaaaggaggtgccatagcatgcatgttcttgtctcttttcttcttggggacatggcctgctcttttgactatgttagagaggcgtggtcgtcttcctcagcatacctaccttg

SEQ ID NO: 159701 - DNA, 239 bp, Glycine max
ctttcaatggcgaagtgcatgaccagttcttcttcttcttcctatgcactgcttctctttttcttctgctttctacaactggaggctattttggaccctgctgatttcctcgctctgcaaaacattcgtaaagctctgcaagacatgcctgcttccgatttcttctcttcctgggatttcaccgcagacccatgcaacttcgccggcgtttactgcgactccgacaaggtcatcgcgct

SEQ ID NO: 159702 - DNA, 238 bp, Glycine max
ctgggatgacatggaaaagatctggcatcacacattttataatgaacttcgtgttgctcctgaggagcacccagtgcttctcactgaggctcctctcaacccaaaggccaacagagaaaagatgacccaaatcatgtttgagaccttcaatgtgcctgccatgtatgtggccatccaggctgttctctccttgtatgccagtggtcgcacaactggtattgtgttggactctggtgat

SEQ ID NO: 159703 - DNA, 250 bp, Glycine max
atttctttcacttcccttcaattttccaacgcaaaagttccttcaagctcagagcaaggttaaggttattgcatggattgggttggtggctttaattctgcacattggaatgctctggttcttaatttatgtgttagattttggcttagctggtgcagctttggcatttgatatcacgagttgggggatcacagtggctcaacttgtttatgttgtgatctggtgtaaggatggatggaatggattgtca

SEQ ID NO: 159704 - DNA, 247 bp, Glycine max
agaatccacacaaactcagggtagggcagagagagagagagagagagagagagagagagagaatgggagggtgggctatcgcggtgcatggtggcgctggtgtcgaccctaatctcccactcgagcgccaagaagaagcgaaacaacttctcacgcgctgtctcaatcttggaatctctgctctaaattctaatcttcccgccatagatgtcgtcgaacttgtggtgagggaattgagacacggatc

SEQ ID NO: 159705 - DNA, 247 bp, Glycine max
cacgcacgtctctctctctctctcgccatggctatggctatgcaaagcggaatcggagtctccaagatcctcatcatagcaggagcaggttacaccggcaccgtcctcatcaaaaacggaaaactctcggatttaatcggcgagcttcagttgctggtgaagggattggaaaaatctggggagcatgctgaaggtgaaggtgaatatgctgatgccatagctgctcaggtgcgtcgcctggcgaatg

SEQ ID NO: 159706 - DNA, 245 bp, Glycine max
cataacttcaacaacttctttcttctcgatctcacgatggctcatttggccctgtctcagatggctgtaactgttcctgttggcaacgatttgtctctcagaagatctgcagttaaggcccctaacttgaacttttgggataaatcatgggcaccagtatttactttggacttgaagccaaacaacccaagtttaagaagtcgtcatgtggtatgcatgtccgtgcaacaagcaagtgtatccaa

SEQ ID NO: 159707 - DNA, 246 bp, Glycine max
cggcttttcaacatgatcaatgaactgccaacaatatttgaagttgttactggtgcagcaaagaagcaagttaaggagaagtcttcagtttcaaaccacagtggcagcaagtctaagtccagctctaagcgagcttcggaatctcaggctagactgccaaagccattgcaatcaaaagaagaggatgaagaactggacgatcaagatgacgatgaacatggagagaccttgtgtggggcatgtggt

SEQ ID NO: 159708 - DNA, 245 bp, Glycine max
gctgaagtgtctgcttcttccgattccggcacgcccccatcaccatggtgaacgttccgaaaacaaagaagacatactgcaagagtaaggagtgcaggaagcacaccctgcacaaggttacccaatacaagaagggtaaagatagcattgctgcccaaggaaaacgccgttacgatcgcaaacaatctggttatggcggacaaactaagcccgtcttccacaagaaggctaagaccaccaagaag

SEQ ID NO: 159709 - DNA, 246 bp, Glycine max
ctcatcacaatgatgtagaaattgtcgaacctgctgagccaaaagctaaagagttcaagccgtgtgatgtgaaatatactgattatacaccttgccaagagcaagaccgagcaatgacatttcccagagagaatatgatctatagagaaaggcattgtcccgctgaaaaggagaaattgcgctgcctcattccagcccccgaagggtacacaactccttttccgtggcctaaaagccgtgattatg

SEQ ID NO: 159710 - DNA, 261 bp, Glycine max
cggctcgactgacaaccaagatgccattgatgcatcaattgttggaatgttagatgaccgtaaggaggcaagagcaggaatcaccgaggtgcatttcttgccttttaatcctgtggacaagcgcactgctattacgttcattgacaacaatggtgactggcacagaagcagcaaaggtgctcctgaggaaatcattgaactttgtggcctcaagggagagactctgaaaaaggcccacaaggttattgatgagtttgctaa

SEQ ID NO: 159711 - DNA, 251 bp, Glycine max
tgaattctccagagagaagaagaaacttaatcgatcatcacttcacttcactaatacatcatggcagacgagacccagaacaagtatgagagctctgaggttgaggtccaggatcgtggtgtttttgactttctcggtaagaaaaaggatgaagaagacaagcctcatcctcaggaggaggtcatcgccaccgagtttcaaaaagtcactgtctcagaccaaggagagaacaagcacagcctcttagaaaa

SEQ ID NO: 159712 - DNA, 248 bp, Glycine max
ataacacaaagcacaaagcaaagctcatccttgagttaaaaaatggcagcagcttcttccatggctctctcatccccatccttggctggcaaggccgtgaagctgggcccatcagccccagaagtgggaagggtgagcatgaggaagaccgtcaccaagcaggtctcctcaggaagcccatggtacggcccagaccgagtcaagtacttgggcccattctctggcgagcccccgtcctacctaaccgg

SEQ ID NO: 159713 - DNA, 244 bp, Glycine max
catctttctctcttctctctccacccaaaccctaactcccgaccctgttcccctctcgtatccgtcatgaaaggaggaaagtccaagaccgaatctaagagagccgatcccaaacttgctgtgaataagaagggagccgccaccaaggctaggaaacccgccggcaaggggaaggcagcgaaagaccctaacaagccaaagaggcctccaagtgctttcttcgttttcatggaggagttcagga

SEQ ID NO: 159714 - DNA, 246 bp, Glycine max
aaaaaaaatctcaaaataaaacaaccaaaccacacacttcacaccctcttcaacatcctcagcaagtacaagaacaagaagaaacaatgtcttgctccaatctcacaatgttggtgtcctcaaaaccttccctttccgatccctccaatctctccttccgctctgtcctcaacccttttcagctcccttcacaaaacccaacttcatgcactccttcacgctcctcaaccacccaaattcagtgtg

SEQ ID NO: 159715 - DNA, 247 bp, Glycine max
gccgaagctgggaaaacaagccgcaacgaaagcgattaaggagtggggtcaaccaaagtcaaagatcacacaccttgtgttctgcaccacttcaggcgtggacatgcccggagcagattaccagctcacgaagcttctcggcctgaggccctccgtgaagcgcctcatgatgtatcagcagggctgcttcgccggcggcaccgtactccgcctcgcgaaggacctcgccgagaacaacaagggtgcg

SEQ ID NO: 159716 - DNA, 245 bp, Glycine max
ggaacaattgacttcatcttcggctactccaccaccttgatccagaactcaaagatcttggtgaggaaacccatgccaaatcaacagaatatagtggtggctgatggcacaggccagaagaacatgcccactggagtagtcctccaaaactgcgcgatcatgcctgacgcttccctcttcgctgaccgcatgatcgtgaagacttacttggccaggccatggaaggcattctcaagggcagtgtt

SEQ ID NO: 159717 - DNA, 243 bp, Glycine max
gttccggaagaaaaactccgacaaaacggtgaaccagtactgccaatacgacagccagacactgacgatgttcacgtcgtccttgtacctcgccgctttgctgtcgtcgttggttgccgccaccgtcacgcgtaaattcggccggaaactctccatgcttttcggaggcttgcttttcctcgtcggtgccctcatcaacggtttcgcccaacacgtttggatgttaatcgtgggtcggatctt

SEQ ID NO: 159718 - DNA, 246 bp, Glycine max
cggctcgaggcagaaagcaagctcatcctagagttttaaaaatggcagcagcctcctccatggctctctcttccccatccttggctggcaaggccgtgaagctgggcccatcagcccccgaagtcgggagggtcagcatgaggaagaccgtcaccaagcaggcctcctccggaagcccatggtacggcccagaccgcgtcaagtacttgggcccattctctggcgagcccccgtcctacctcactg

SEQ ID NO: 159719 - DNA, 243 bp, Glycine max
gcgtcttggtttgtgagagagacagaggcacagagagaaaatggtttcggggtcaggaatctgcgcgaagagggtagttgtggacgcgcggcaccacatgctggggaggctggcatcgatcgtggcgaaggaacttctgaatgggcagaaggtggtggtggtgcgctgcgaggagatttgcatctccggtgggctcgtcaggcagaagatgaagtacttgcgtttcctccgcaagcgcatgaa

SEQ ID NO: 159720 - DNA, 246 bp, Glycine max
ggaaagctttgagatttgttggacattttagagtggtgagaggatggtgggtgttatttcgttggtaacaggaatggctggtccaagtgggtttggatcagcttcaactgcagaacaggttactgaaggagttgatgccagcaacctcactgcaattatcacaggaggagcaagtggtataggattggagacagcacgagtgttggctcttcgaaaggtccatgtcatcattgcagtacgaaacat

SEQ ID NO: 159721 - DNA, 247 bp, Glycine max
cgaactcatcatttctaattgttctgatccatatatatcatactttctttgtaataacttaaagaaccccacaaaaacaccaaccatgtccacaattgcaaagagagatttgagttctaatgaagaagagagtgagctgagaagaggtccttggactcttgaagaagacagcttactcatacactatattgctcgtcatggtgaaggccgttggaatatgttagccaaaagtgcaggattgaagagg

SEQ ID NO: 159722 - DNA, 242 bp, Glycine max
ggagttaataaggtcacatgctcccttcaggctgatcttaaggacttggctcacaagtgtgttgatgctaccaaaattgcaggctttgcccttgccacctctgctctcgttgtttctggggcaagtgctgaaggagtaccaaagcggctaacctttgacgaaatccagagcaagacctacttggaagtgaaggggacaggaacagcaaaccagtgtccaacaattgatggtggattggagtc

SEQ ID NO: 159723 - DNA, 242 bp, Glycine max
cacaggaatagtcctccataactgcgagatcatgccggaccctaccctcttggcagaccgcttgagcgtgaagacttacttggccaggccatggaaggcattctcaagggcagtgttcatcgagaatgttatcggggacttgattcagccagatggttatattccatggaacccaattgaaccaaacacacaggattgctacttcgctgagtttggcaacactggaccaggttccgttgctc

SEQ ID NO: 159724 - DNA, 243 bp, Glycine max
agagaatacaccaaaacccaacatgaaaacccttaacaaagcctcacttattttattccctctcttgttcctttccctattcaagcattcccatgctgcaggaatcgctatctactggggccaaaacggtggagaaggcaccttagcagaagcttgcaacactagaaactaccaatatgtgaacatagccttcttgtccacttttggcaacggccaaactccacaactcaaccttgcaggtca

SEQ ID NO: 159725 - DNA, 245 bp, Glycine max
gtgagtgatcggtgttcacttgatccttcataagtcgtcatcatcatcatcatcatcaccgttgattgaagaagatgccgatcagaaacatcgccatcggaaggcctgaagaggctactcaccccgacacgttgaaggcggggttggctgagttcatctccaccttgatcttcgtgttcgccggttcaggttccggcatcgcctacaacaagctcaccgacaacggcgccgccactcccgccggc

SEQ ID NO: 159726 - DNA, 250 bp, Glycine max
gttggggttctcacgatttcgattcaccctttctcccacacactccgattctccttgtaaacagcggtgccagaagttgatataggatgggggcaatgatgtcgagattctggttcatgttattccctgcaaaagagtataagattgttgttgttggattggataacgctggaaaaaccactaccctttataaattgcatctgggtgaggttgtaactaccaaccctactgttggtagcaacgtcgaaga

SEQ ID NO: 159727 - DNA, 245 bp, Glycine max
gggacaaatggaagccagttggcatctgtggcattctccagactacaaaaagagattgctaaagatggtagagaaccgaatgtgatttccaagggggtgcctaacaaatcgatttctagaaaaggttctgatgcaggagcctctgccacaacaggagaggagagtgctctatcacaattttgtgtggatctcactgcccgtgcgagtgaaggaagaattgatccagttgttggccgagaagttga

SEQ ID NO: 159728 - DNA, 249 bp, Glycine max
agacactgcaccaaacaccaacaacgctttagctctctctcttctctccataaccgccaccggcgatctggcactaacagatcgccgctgctacatctgaacccgatccagccaacagatctctccaattcaaatggagaatctaatctctttggtcaacaaaatccagagagcttgcaccgccttaggtgaccacggcgaaaacagtgcactccccacactatgggactctctccccgccatcgccgt

SEQ ID NO: 159729 - DNA, 246 bp, Glycine max
gcagcattgggagatagaaagagagagagaaagagagagagagaaagacccttacccttctctatcgctcgctttcctttgacgcttctgacccttgctttgtctgcgtcttccttctttctttctttctttctctgtgtgtcgtaatggctctcccagactcttcttcccgtcgcaactccctgatcccctccttcatctactcctcttcctccaaaacgctccctctccaccacatgctcaaca

SEQ ID NO: 159730 - DNA, 248 bp, Glycine max
ctctgggaagtccactaccactggccacctgatctacaagcttggaggcattgacaagcgtgttattgagagatttgagaaggaagctgctgagatgaacaagaggtctttcaagtatgcctgggtgcttgataagcttaaggctgagcgtgaaagaggaatcacaattgatattgccttgtggaagtttgaaaccaccaagtactattgcacagtcattgatgcccctggacacagggatttcatca

SEQ ID NO: 159731 - DNA, 245 bp, Glycine max
tggttgtacagcaatattgaagccatctgaattggcatctgtgacctgtttggagctggctgaaatatgcagagaagttggccttcctccaggggtattaaacattgttactggattaggcaatgaagctggtgctcctttgtcatctcatcctgacgtagacaagatttcctttactggaagctctgcaactggaagcaggattatgacagctgcagcacagctaacgaagcctgtttctctag

SEQ ID NO: 159732 - DNA, 247 bp, Glycine max
ggcctgggtgactctggtcccgccaacgaacccatcaaaaccttattcacttcttcccaattcagagacaccaaatggtccttcccttctgccccttccgcccctgtcacttgcaactatggttctgtaatgccttcatggtttgacattcttgagattcccgtggcagctgattctccaaatgacgagagtagtttacttaaagctgttcgaaatgtgcatgctactatagacaaggaaatagctg

SEQ ID NO: 159733 - DNA, 243 bp, Glycine max
tggagaagaagaagggtgagctaaagtcaattttccttcctttcctttccactagtcacataatcccgctagtggacatggccagactcttcgccttgcacgacgtcgacgtcaccatcatcaccaccgcacataacgccaccgttttccaaaagtccatcgatttagatgcgagtcgcggtcgccccatcagaacgcacgttgtcaacttccccgccgcacaagtgggtctccccgttggga

SEQ ID NO: 159734 - DNA, 239 bp, Glycine max
ggaaaggtttggcttgaccccaatgaagtcaacgaaatctccatggccaattctcggcaaaacatcaggaagttggttaaggatgggtttatcatcaggaagccaaccaagattcactcccgctcacgtgctcgtaggatgaaggaggcaaagaggaagggccgccactccggttatggtaaacgtaagggtacaagggaggcaaggcttcccaccaagatactctggatgagaaggat

SEQ ID NO: 159735 - DNA, 242 bp, Glycine max
ttcggttccgaagggacaaccaacgaccaccctctcttctgactcacttctcgaaccttccaaacatggaacgcatcgttggcggcaagtacaagctcggccgcaagatcggaagtggatccttcggcgaaatctacctcgcgacgcatattaataccttcgagatcgtcgccgtcaagatcgagaatagtaaaacaaaacatccacaactgctttacgaggcaaagctatacaatattctt

SEQ ID NO: 159736 - DNA, 130 bp, Glycine max
caaaaccacaatctaagtaagtgttgagagaagagtgcgtttgtctgtttgaaattaagtagtaaagatgtttggaatcatcggaggaaacaatggtcacaagataaaggggaacttggtgattatgcgg

SEQ ID NO: 159737 - DNA, 242 bp, Glycine max
ctctctctctctctctctctgaagatggcttcacgcaggctcgtatcttctctgattcgatcctcccttcgtagatctcaatcgaagccctcaatttccgcatcgacatcgatatacacgtcatccaaccgtgcctcaccgcacggatacttgctgaaccgcgtcgccgagtacgccaccgccgcggctgctgctaccactcctccctctcctcctcctccggggaagaaggagctcggcgg

SEQ ID NO: 159738 - DNA, 245 bp, Glycine max
ctagactcttccttttctcttctctgtctaaggggtgccctgagatcacattgaacaatggtgaaggctgtggccgttcttggcagcagtgagggtgtcactggaactattcacttcgttcaggagggaagtggtccaaccaccgtaactggatctcttgctggtcttaagcctggtctccatggtttccatgtccatgccttgggggacactaccaatggttgcctctcaactggatcacattt

SEQ ID NO: 159739 - DNA, 242 bp, Glycine max
tacctctgcatttttctctcgctctctgccttccatcaccctcgccatttcccttcccaagatagtagaagatggcagacgctgaggatattcaacctcttgtttgtgacaatggaacaggaatggttaaggctggttttacctggagatgatgccccacgtgctgtgtttcccagcattgtaggtcgtcctcgtcacactggtgtgatggttggcatgggccaaaaagatgcatatgttgg

SEQ ID NO: 159740 - DNA, 239 bp, Glycine max
aatcagatagcaaaagcaaaagaagaagctttaagccgaaaagatatattggacaaggttgagaaatggatgtcagcatgtgaagaagagagttggcttgaagactataaccgggtacttaaaatctcgcttcggctttatttctctttcttagtttgaataattggttgtgcacagccgtggatagagaggtgaagtagtagtattatgatcagaacatttactatcatgttaacaaa

SEQ ID NO: 159741 - DNA, 243 bp, Glycine max
tggggtttcacacgtgcgcaatttgaaggtattattggaggagagagtgtaaatgaagaaaccaacaaccgacgcaattagtatggggaaaaggagcctggagggtggagaagatgaccagcctgaacgaaagaggcctgctcttgccagtgtaattgtggaagctctgaaggtggacagtttgcagaagctttgctcatctttagaacccattcttcgtagagttgtcagtgaagaagtgga

SEQ ID NO: 159742 - DNA, 251 bp, Glycine max
gttacaagtcaacaaggatacagatgatgaagtagcccttgaagcctgtgaattttggtctgcttattgtgatgctcaactgccacctgaaaacttaagagaattcttgccccgtcttattccagtattggtgtcaaacatggcttatgcagatgatgatgaatcagttattgaagctgaggaagatggttctcatcctgatcgagatcaggatcttaaacctcgattgcacgtatcaaggtttcatggat

SEQ ID NO: 159743 - DNA, 268 bp, Glycine max
aattgacctatttgtatatacaatatgatgagtttgataatgctgcaactaccatcatgaaccattcacctgaagcatgggatcacatgcaattcaaagatgttgttgttaaagttgccaatgtggagttgtactacaaggctgttcacttctacttggaagagcatccagatcttatcaatgatgttctgaacgtccttgcacttcgtgtggaccatgcacgtgttgttgacatcatgcggaaggctggtcacctcggtcttgtgaa

SEQ ID NO: 159744 - DNA, 267 bp, Glycine max
caatggcaatggcatttccgtccgtaacctctgtaactgtggagaacgtgacattccctcccaccgtgaagcctccctgctcccccaacaccttcttcctcgccggcgccggcgtcaggggcctccaaattcatcacgctttcgttaaattcactgccatctgcatttacctccaatacgacgccctttccttcctctccgttaagtggaaaaccaagtctgctcaccagttaacggaatccgaccaattcttctcagatatcgtta

SEQ ID NO: 159745 - DNA, 265 bp, Glycine max
agagaacaaacaacgacaacaacaacaacaacaagctcaattgatgaaatgaaaaggatactgaagagtctgaatcattatgatgcccttggatttagccgccacaagaagattgatgctgcagttttgaaaaaggaatacaggaaaaaggctatgcttgtgcatcctgataaaaatatgggaagttctttggcaagtgaatcatttaagaagcttcaatgcgcatatgaggttctttctgactctgtgaagaagcgagattatg

SEQ ID NO: 159746 - DNA, 261 bp, Glycine max
agaaaacactaagagactctgcagtggctgcaaagtcgtttgcaccatagcttgttttgcctgtgacaagtatgatttgactctttgtgcgaggtgttatgttcgtggcaattatcgagttggtgtgaactcttcggattttaggcgagtggagataagtgaggagacaaagacggattggaacgaaaaggagaccacgaatcttctggaagctattacgcattacagtgatgattggaagagggtttctcagcatgttcc

SEQ ID NO: 159747 - DNA, 267 bp, Glycine max
tctcttctttctcttcttcttcctcttcttagcctccgccgccgccagcgtccccgcccacaacatcacccgcatgcttgccaaacaccccggcttctccaccttcaaccactatctctccctcacccacctcgccgaagagatcaaccgccgccagaccatcaccgtcctggccctcgacaatgccgccatgtcctccctcctcgacaagcacctctccctccccaccatcaaaaacgtcctctccctccacgtcctcgtcgacta

SEQ ID NO: 159748 - DNA, 261 bp, Glycine max
caagacctcttgcttcggctcacttttgacaacatatgcggcttggctttcggccaagacccgcaaaccctagccgtggggctcccagataacgctttcgctctctccttcgatcgagccaccgaggccactctacaacgctttattttacccgagatcttgtggaagctgaagcgatggctcaggctcggaatggaagtgagcctgagccggagcctgaaacacatcgacaattacctctcccacatcatcaagaaccgc

SEQ ID NO: 159749 - DNA, 260 bp, Glycine max
agccccgagaggagcttaccagaatgctttatcgggtaagtttgttccagcgttggaaacgtgcgctcggattaaaataaccgacccgaacccgaaatgggatatggaaacaatgcccggtgctagagtcatgagtgacatggttttactcccgaacggcgacgttttgattgttaatggagcagccgtagggactgcgggctgggaattgggccgtaacccgctactgagtccgtttctttataaaccaaataatcggg

SEQ ID NO: 159750 - DNA, 261 bp, Glycine max
ccaaaacgctccatactcgatatagcttacaccacttgggccatcaaaccccaaccaattctaaccatttcttttcgttccgatcagtttttcgtctctctctgttttccgaaaccttaatctcttgcccgataagggaaaattatgaatcccgataagttcacccacaagacaaacgaagctctggtgagtgcccacgaaatagcaacaagcaacggtcacgcgcagttcacccctcttcacctggcgtcctctctgatt

SEQ ID NO: 159751 - DNA, 258 bp, Glycine max
ataggattctcttctttattccttttgtaatttcattcattcttaatctttgtgaaaaataatgttcatcgagaattttaaggttgagtgtcctaatgtgaagtacaccgagactgagattcagtccgtgtacaactacgaaaccaccgaacttgttcacgagaacaggaatggcacctatcagtggattgtcaaacccaaatctgtcaaatacgaatttaaaaccaacatccatgttcctaaattaggggtaatgct

SEQ ID NO: 159752 - DNA, 256 bp, Glycine max
cgtatctattctttgcgtttggtttttggttgattgaaggcattcacagcgtaattcgttgctgcattttaatcgatttatctaaccaggactgaatgacctaatggagtctaaaggtgggaaaaagaagtctagtagtagtagtagtaaatcaattttttacgaagctcccctcggatacagcattgaagacgttagaccaaacggtggaatcaagaaattcagatctgctgcttactctaactgttctcgcaaa

SEQ ID NO: 159753 - DNA, 266 bp, Glycine max
acaagtgtcgtgctgctaggcgaacagcagagaatgctgcaccctagatggcgagagtccagtagccgaaagcatcactagcttacgctctgacccgagtagcatggggcacgtggaatcccgtgtgaatcagcaaggaccaccttgcaaggctaaatactcctgggtgaccgatagtgaagtagtaccgtgagggaagggtgaaaagaacccccatcggggagtgaaatagaacatgaaaccgtaagctcccaagcagtgggagg

SEQ ID NO: 159754 - DNA, 259 bp, Glycine max
actaaatgcaaggaggttcaaaaaattgtatgctgacaaggaagatatctttgttcctgatgttttctgggactatacaagtgctaaagtactaacaatggattgggttgatggggtcaaactaaatgagcaagaagcaattgagagacaaggattaaaagtcttggatctggtaaatgcaggcatacagtgcagtctcagacagttactcgagtacggatattttcatgcggatcctcatcctgggaatcttttggca

SEQ ID NO: 159755 - DNA, 264 bp, Glycine max
cttaagagatcaatatggccaccaccactacccagcctccctctaatatctgttttttccttctgttgttgcttctagcacactttcatttgggcataagccaacttgagctgaattactactctaaaagctgcccaaaagctgaagagatcatcaaggaacaagtcacacaactatataacaagcatggaaacactgccgtttcgtgggtcagaaatctcttccacgattgcgtggttaagtcatgcgatgcatcattactgt

SEQ ID NO: 159756 - DNA, 236 bp, Glycine max
ggaaggggatcacgttattattggtcaatgcaggcctctctctaagacagtgaggttcaatgtcttgaaagtgatcccagctggatcttctagtggtgcaaagaaggcttttactggaatgtgagcttcgatttccagtttttattgaagaaaaatgttaccttgttatttagtagatctgatttcttttctggaaggtgacatattaaaaccttatcaattttggattttctttg

SEQ ID NO: 159757 - DNA, 257 bp, Glycine max
cacacacatactaagaagcaacaattcttctacaatggatctcctccttctggaaaagaccctcataggtctcttcctcgctgcggtggtcgccatcgccgtctccaccctccgcggccggaaattcaagctcccaccgggcccactccccgtcccaatcttcggcaactggctccaagtcggcgacgacctcaaccaccgcaacctcaccgatttggccaaaaaattcggtgacatcttcctcctccgcatggggc

SEQ ID NO: 159758 - DNA, 255 bp, Glycine max
gaagagcgtcgcagttgtaaccctaatcagaagaagcgcagttcaagcgagtgacagccaccagccatgggtcgtatgcacagccgcggtaagggtatatcctcttctgctttgccctacaaaaggacacctcctagctggctcaagatctcttcgcaagatgtcgaagaaaatatctgcaagtttgcgaagaaaggtttgaccccgtctcagattggtgtcattctcagagattctcacggtattgctcaggtc

SEQ ID NO: 159759 - DNA, 257 bp, Glycine max
ctttgcgcagttccctacctctcctttcaagatgcagatcttcgtcaagaccctcaccggaaagaccatcacccttgaggtggaaagctctgacaccatcgacaacgtcaaggccaagatccaggacaaggaaggaattcccccggatcagcaacgtctcatcttcgccggaaagcagctcgaggacggccgtaccctcgccgactacaacatccagaaggagtcaacccttcaccttgtccttcgtctccgtggtg

SEQ ID NO: 159760 - DNA, 256 bp, Glycine max
gcacttagaaggttgaggactgcttgtgagagggccaagagaacattgtcatccactgcccagaccaccattgaaattgattctctctatgagggaattgatttctactccactgttactcgtgccagattcgaggaactgaacatggatctctttaggaagtgtatggagccggtggagaaatgtttgagggatgctaaaatggacaaaagaagtgttgatgatgttgtccttgttggtggttctaccagaattc

SEQ ID NO: 159761 - DNA, 262 bp, Glycine max
cgctgttaggcttttggagccactcaaagcggagtttcctattttgagctacgccgatttctaccagttggctggcgttgttgccgttgaggtcaccggtggacctgaagttcccttccatcctggaagagaggacaaacctgagccaccaccagagggtcgcttgcccgatgccactaagggttctgaccatttgagagatgtgtttggcaaagctatggggcttagtgaccgagatatcgttgctctgtctgggggtcac

SEQ ID NO: 159762 - DNA, 262 bp, Glycine max
tgctgctctggcttcaaggaagtcttctccaagagtgaccaacgaggctgttcagaaggctgctgctgcattgaagggttcagatcatcgccgtgcaacaaatgtcagtgccagactggattctcaacaaaagaagctcaaccttccaatcctgccaaccaccactattggatccttccctcagactgtagaactgaggagggtacgccgtgaattcaaggctaacaagatctccgaggaagagtatgtaaagtcaattaag

SEQ ID NO: 159763 - DNA, 260 bp, Glycine max
cgacaattgtccaaatggcagggttccatgctaatgaattggctcttcttctatcccttatagttgccggcatgaatgcagccggaacaattcttggcatttaccttatcgaccatgctggacgaaaaaaattagctctttctagtctgggaggagtaattgtatctttggtcatcttggcctttgcattttataagcaatcatccacgtcaaatgagttgtatggatggcttgcagttgtaggcttagccttgtatatt

SEQ ID NO: 159764 - DNA, 260 bp, Glycine max
gaaagaatcccaggcgaggagaaagatggaggggaaggagcaggatgtgtcgttgggagcgaacaagttccccgagagacagccgattgggacggcggcgcagagccaagacgacggcaaggactaccaggagccggcgccggcgccgctggttgacccgacggagtttacgtcatggtcgttttacagagcagggatagcagagtttgtggccacttttctgtttctctacatcaccgtcttaaccgttatgggagtcg

SEQ ID NO: 159765 - DNA, 256 bp, Glycine max
cgggtttgacgttgttcacaatcactttctgcgcttcactcactcccttcgtgcggttttctttctttgtcgaactcgtgcgaaaatgcgtgagattcttcacatacagggagggcaatgcggaaaccagatcggagcgaagttctgggaggtggtgtgcgcggagcacgggatcgattccacggggaggtaccagggggacaacgagttgcaactcgagcgagtcaacgtctattacaatgaagcgagttgcgga

SEQ ID NO: 159766 - DNA, 258 bp, Glycine max
ggagaaaggagatactttatgatgaagaggatgaggatgaggattctaggaagagatggcgcagaagtgtgatagaggagaagagaaagaagaggctgcgtgagaaggaagatgacctggttgaccgacaaaaagaagaggaagaaattgctgaggccaaaaagaaggctgaggaggaacaaaagcgacaaagagatgcattaaagcttttatctgagcatgtggtaaatggtggtaaggaaaatatgattactgaag

SEQ ID NO: 159767 - DNA, 256 bp, Glycine max
aaaatatattcaattttgcgtttctctgcctaaaaggattgaaagatgggtcaagcattcggttgctaccaagtcgatcagtcaaatgtggctatcaaggagcattttggaaaatttgatgatgtcctagagcctggatgtcactgcctgccttggtgtcttgggtaccagattgctggtagtctgtcgctgcgagtgcagcaacttgatgttcgatgtgagacgaaaaccaaggacaatgtctttgtcaatgtgg

SEQ ID NO: 159768 - DNA, 255 bp, Glycine max
gagctttccagttctgtaagcaatataagcggacaacagagttccgcagactgtgcgaaatcattagaaatcatttggctaatcttaataaatatcgtgaccaacgagaccgacctgatctttcagctcctgaaagcttgcaactgtatcttgatacaagatttgagcagctgaaaattgctactgaacttggactctggcaggaagccttcagatcagtggaggatatacatggactgatgtgcttagtcaaga

SEQ ID NO: 159769 - DNA, 253 bp, Glycine max
gaagaaaggtattggagcgaatgaattgctgtcccatctttcagcacatcctgcacctgctcaagaaaagatgagtgctctggttgaagctctattcgagggaactgagaaaggttttgctaaagaagctgataagaagaagaactactttgctgctgctgttgccgaagagggatcccagctgttattgcttcatgctattgaagaattttcttgcaagtctacttccaatgctttgaaggaggttgccctg

SEQ ID NO: 159770 - DNA, 266 bp, Glycine max
ggaacaatggcgggtagggtttcgacgtgcttcttcttcgtgtttgctctttctctccttcttccttttcagatctccgctgaggaatcatcggagaaagagttcgtactcacattggatcactctaactttcacgacactgtcagcaagcacgatttcatcgtcgtcgagttctacgctccatggtgtggccactgtaagaagcttgctcccgagtatgagaaagctgcttctatcttgagtagtcatgatcctccggttgtttt

SEQ ID NO: 159771 - DNA, 262 bp, Glycine max
cggagttccccaacaaagcgttaacgagcacgcgtttttccgacctgaatccaccactctctgaaccggttctccaagccctatcacactctggcttcgagttctgcacccctgtccaagctgccactattcctctgctctgcagcttcaaggacgtcgccgtcgacgccgccaccggttccggcaaaactctagcttttgtcgttcctctcgtcgagattctacgccgctcctcttctcatcccaagcctcaccaggtgct

SEQ ID NO: 159772 - DNA, 257 bp, Glycine max
ggtcaatgtggcatgctttcatccttttgctgggggaggactagtttatggaacaaaggaaggaaagcttagggtcctccagtatgacggtgctcatgcagtgaatggcactggaccaagttactttcctgaggagaccatcgttggtgtcagtcagtgagcaaggtttagacgaatgattggacatgtaattcaaacatctgcttcacattacttactgtacaactcatatgctgtctctgctgatgatctgcaca

SEQ ID NO: 159773 - DNA, 254 bp, Glycine max
ttttatttacaacaacaatggcttctgtgcctcaaccaaaaatctcccttctaaccttattcttcttctcgtccttcaccatcattgcgcatgcaattgttcctcaaaacgaaaccttcaaatttgagaactcaggtgaacttggaccctacatcgttgagtacggtgcagattacagaatgataagcatcttcaactctccattccaagttggtttctacaacaccaccccaaatgccttcactctagctttg

SEQ ID NO: 159774 - DNA, 251 bp, Glycine max
cggcaaccttcccgatgccttccatattgccgagactaccaaaatcttcctcccagctcttcgagactgcaacaggttaaccatttcggagccatttcctgagtgggagagcgagttgatgccttcagggagaacaatgggagaccttttggtcctccccaatggggacctcttgctcatcaatggtgcaaccatgggtacggctgcatggtgggatgctgacttgcctaactacacgcccgtgttgtaca

SEQ ID NO: 159775 - DNA, 254 bp, Glycine max
gcagaaagcaagctcatcctagagttttaaaaatggcagcagcctcctccatggctctctcttccccatccttggctggcaaggccgtgaagctgggcccatcagcccccgaagtcgggagggtcagcatgaggaagaccgtcaccaagcaggcctcctccggaagcccatggtacggcccagaccgcgtcaagtacttgggcccattctctggcgagcccccgtcctacctcactggcgagttcccaggtgac

SEQ ID NO: 159776 - DNA, 255 bp, Glycine max
ctcctatggtatgggaggtgctgctgtacatgtacatcctctactctccagattggcattaccgcagtacaatgcccatcttcctcttcgtgtatggtgctctttttgcagttgcccattcagtgtttcattttggtattggcttcaaagtgcattatatcattctcattcttctctgcgttccgagaatgtacaagtattacatttacacacaagatgtttctgccaagcggcttgcaaagttatttttaggta

SEQ ID NO: 159777 - DNA, 262 bp, Glycine max
ctccgtttgcagcgtcactacttgctacaacacgagccatgaaacccaccttcccaatccactccaattcaaatttctcactataaaccacttcttcaaacttccctccgcaattcttaattcattcgaaccatggcagcgtcctcgctctgttcctctttcacctccaaaacatggaacccgcaccggccgcactcatgctatcaccacaaaaccccaagcccgccgtattccacctttcttcgcggcgacgttcagctcc

SEQ ID NO: 159778 - DNA, 257 bp, Glycine max
gcaaattctggtgcccgtttaggtgtagctgaagaagtcaaatcctgtttcagagttggttggtctgaggaatctaatcctgagaatggctttcagtatgtatatttaacacctgaggataatgctcggattggatcatcggtgatagcacatgagttaaagcttgagagtggagaaaccagatgggttatagataccattgttggcaaggaggatggccttggcgttgaaaacttgagtggaagtggggctattgc

SEQ ID NO: 159779 - DNA, 252 bp, Glycine max
tgcatttcaatccacatcggtcaggccggtattcaggtcggaaacgcctgctgggagctctactgcctcgaacacggcattcagcctgatgggcagatgccaagtgataagactgttggtggaggtgatgatgctttcaacaccttcttcagtgaaactggggctggaaagcacgtgcctcgtgcgatttttgtagatctcgagcctactgtgattgatgaagttaggactgggacataccgccaactattt

SEQ ID NO: 159780 - DNA, 250 bp, Glycine max
gcaccgtcaaccactccgtcaccgacggcacctcgttttggcacttcttcaacacctttgccgccgtcaccaaaggcggcgccgccaaaaaagtcctccgagcaccggactttactcgcgacaccgtcttcaactccgccgccgtcctcaccgtcccctccggcggccccgccgtcacgtttgacgtaaagcagccactccgggaacgcgtcttccacttctcccgcgaacaattcagaaactcaagcaa

SEQ ID NO: 159781 - DNA, 252 bp, Glycine max
tgccaaggcaatgacattccagaacactgccggtgctgagggacaccaagccgttgcattcaggaaccaaggagacatgtccgctctcgttggttgccacatcttgggttaccaagacaccttgtacgtccagaccaacaggcaattctaccgcaactgcgtcatctccggcacagtcgacttcatcttcggcacctcctccaccgtgatccagcactccgttatcatcgtgaggaagcccctggacaacca

SEQ ID NO: 159782 - DNA, 260 bp, Glycine max
gcaatgtagaggttaaaccacagggtgttagcaagggactagtggccacacgcctactttctgccatggaagaaaaggggatgtgccctgattttgttttgtgtataggcgatgacaggtctgatgaagacatgtttgaggtaatcaccagttcgatggggagtccgatcgcggcaaaggccgaggtattcgcgtgcacggtttgtcgaaaacccagtaaggctaagtactacctggatgatacaactgaaatagtgaga

SEQ ID NO: 159783 - DNA, 258 bp, Glycine max
gtgaagtgttcggattgcggcgacgtgagcggttcgctgcccgcgacgtagtgagaagtccactgaaccttatcatttagaggaagaagaatacatccagcctgctccagttttggctgctaatgatattgaggtccctgttgcttgaaaagttatacactggagaagtaattcatagtagctgagtgcctagtttttcttgtgtgcaatgtttgttgtcaaagacatgttcaaaattttgtagtttcttgaattttg

SEQ ID NO: 159784 - DNA, 253 bp, Glycine max
caaaaggagagtgcaataactcgttgtacattcctagtgtgtgggagagacatggctaagatgtgtgttttggtgttggttcttgctctggctgtggccacaagtgccagaaacgttcccaaccccaaggatgctggtcttaaggaccagaagaacttcatcagctatggtggagttggtggttattccgggattgggaacaatggactgccttttggaggagctggtgccggaataggtggtggttttggcg

SEQ ID NO: 159785 - DNA, 256 bp, Glycine max
cgcgattgttctgttgtgcgactgaaagaagagagatcgaaaatggcgttggctttcgacgagttcggaaggcctttcataatcctgaaggaacaggagcagaagagcagacttcgaggtttggacgctcagaaagccaacatctccgccggcaaagccgtcgctcgcatcctccgaacctccctcggccccaaaggcatggacaagatgctccagagccccgacggcgacgtcactatcacgaacgacggtgcca

SEQ ID NO: 159786 - DNA, 252 bp, Glycine max
ggagcttctgatgcaaattctgtcccttgtggatgatcagacggtgatcatagcttctggagtttgtcgtggatggagagatgctatttactttggccttgctcgtttatcactctcatggtatattgttttctctcttgatgtcttgaggatccttttctgtttctctccaattggggattttgttatggtgggagttttctttgttctttttgcttgtttgtgtgagttgattttgctatgctgtaattt

SEQ ID NO: 159787 - DNA, 252 bp, Glycine max
attttatccaattgaaattttaaaaatgactgggataaacttaagaattcaattattgaaattgaataagtaaacaatttaattggattggtcgaatggtatcaaaaaaatggagtactaactcccatttcttatttattattgaattaaccgatcaacttgctttgttatcgaacatttctttttgatttcaaaaattttccggaaaaaatttgaatctatttttatatgcgaatcaatcctactacttct

SEQ ID NO: 159788 - DNA, 249 bp, Glycine max
caacagctaacgtgcaagttccaaggcagagaaaacaataatggccaccacctcggagagggatatggagaacaagagtgatcaagaagaactgaagcatcttgggtttgtgaagattgcggcaattaaagcctttgtgtgtgtgtcgaatctctacgacttcgcaaagcaaaactcgggacctttgagatctgctgttggaaccgtggaagacactgtaaccaccgttctgggtcccgtctaccacca

SEQ ID NO: 159789 - DNA, 248 bp, Glycine max
gatcaaacgcacacagttacgctcttcaaatcaatctcttctcagaaatgggtgtggctcaaaacattcccgatgcggaggagggaaccttggagattggaatggaatacagaactgtgtctggagttgctgggccattggtcattcttgataaagttaagggacctaagtttcaagagattgttaatattcgcttgggagatggaactactcggcgtggacaagtgctagaagttgatggtgaaaag

SEQ ID NO: 159790 - DNA, 258 bp, Glycine max
ctcgagcgattcggctcaggccgagcgctacgaggagatgagtggagttcatggagacatgtctccgcctccgccgagtgcgaggagctgaccgtggaggagcgcaacctcctctccgtcgcctacaagaacgtaatcggcgctcgccgcgcctcctggcgcatcatctcctccattgagcagaaggaggagagccgcggcaacgaggaccacgtcgccgtcatccgtgactaccgctccaagatcgaggccgagctc

SEQ ID NO: 159791 - DNA, 254 bp, Glycine max
atttttctcagttctcgctatcccgcaccccccaacccccgcgtatggcttcctctgcaacagacgataacccaagatctgtaaaaagagtagctgttgttggtgctggggtaagtgggcttgctgcggcttacaaattgaaatcacatggtctggatgtcactgtatttgaagctgagggaagagctggagggaggttgagaagtgtttctcaggatggtctaatttgggatgagggagctaatacaatgact

SEQ ID NO: 159792 - DNA, 253 bp, Glycine max
tcttcttctcttaaaagagcctttgctttttctttaggcctttccgaattaagtacttgtttcattttctctcgaagcaagaaaaatgttcatcgagagtttcaaggttgagagtcctaacgtgaagtacacagagactgagattcagtccgtgtacaactatgaaaccactgaacttgttcacgagaacaagaatggcacttatcagtgggttgtcaagcccaaaactgtcaaatatgaatttaaaaccaac

SEQ ID NO: 159793 - DNA, 255 bp, Glycine max
gtcaaacccttttcacttctctctagggttttagcactctctctctctctcgttttcgttcttcctttctgcctctctcagtcacacaccttctcgatgaccaacgacaacatcgccgtgacagatctcacttctgccctcaatgaagataatcgcgccgacctagtcaatgctctcaagagcaagattcagagtctggctggggcgcattctgatgttctagagactctatccccgaatgtcaggaagcgtgtt

SEQ ID NO: 159794 - DNA, 261 bp, Glycine max
aacaaagacggcaccgcaattaggaagctccagagcggtgtgaacaagctcgcggatctggttggggtcacgcttggtcccaagggaaggaatgttgttctcgaaagcaagtacggctcgccgaaaatcgttaacgacggtgtcaccgtcgccaaagaggttgagttggaggatccggttgagaatattggcgccaagttggtgagacaagcagctgccaagacaaacgacttggctggtgatggaaccacgacttcggtt

SEQ ID NO: 159795 - DNA, 260 bp, Glycine max
attacttgcaagactggcacttcgttgcttggtgatgtccctttctgttctcttcactcttggtcttgcgagagaaagccatgccagagacgaagatttttggcatgctgtttggccaaacactcccattccaagttcattgcgagatcttctaaagcctggccctgcaagtgctgaaatcgatgatcaccctatgcaaattgaagaaacacagtacccgaaaaccttctactataaagaagaccttcatccaggcaaaa

SEQ ID NO: 159796 - DNA, 250 bp, Glycine max
tcatcacatggacttgtctttctcttactctgacggggtccttccttttcttcttctccttcatattttctctctcaccattctcttcttcttctccctttcttagattctccctcttttctctctgccctccgccatgactgaggataaggagatgtcttcctctgtcaccaatggcgatgattccctcactggtcacatcatatctacaactattggaggcaaaaatggggaaccaaacagactatta

SEQ ID NO: 159797 - DNA, 253 bp, Glycine max
gcacacaaagtaatggacaaaaaaccatgcaactcatcatctcatgatcctgaagtgagaaagggaccatggaccatggaagaagacttgatcttgataaactatattgcaaatcacggtgaaggtgtttggaactccttagccaaagcttctggtctcaaacgaacgggaaagagttgtcgactccgttggctaaactaccttcgtcctgatgttagaagaggaaacattacacccgaggaacagcttttga

SEQ ID NO: 159798 - DNA, 253 bp, Glycine max
agtggtttcagtgagtgatcggtgttcacttgatccttcataagtcgtcatcatcatcatcatcatcaccgttgattgaagaagatgccgatcagaaacatcgccatcggaaggcctgaagaggctactcaccccgacacgttgaaggcggggttggctgagttcatctccaccttgatcttcgtgttcgccggttcaggttccggcatcgcctacaacaagctcaccgacaacggcgccgccactcccgccg

SEQ ID NO: 159799 - DNA, 252 bp, Glycine max
tagcggttcttccatttgactcttgttctgaacgacttttcaagagaatcaaaccatggcagtgaaagtatacggtccccactgtgcttccaccaagcgggtgctggtttgtctggttgagaaggaagtcgaatttgaggttgtccctgttgatgtcactaagggggagcagaaggatcctgagtacctcaaactacagccatttggagttgttcctgtcatcaaagatggagattataccttatatgaatc

SEQ ID NO: 159800 - DNA, 252 bp, Glycine max
gcacttagaaggttgaggactgcttgtgagagggccaagagaacattgtcatccactgcccagaccaccattgaaattgattctctctatgagggaattgatttctactccactgttactcgtgccagattcgaggaactgaacatggatctctttaggaagtgtatggagccggtggagaaatgtttgagggatgctaaaatggacaaaagaagtgttgatgatgttgtccttgttggtggttctaccaga

SEQ ID NO: 159801 - DNA, 264 bp, Glycine max
tcttctcgacgttgtaacctctctcttcaaccctaacttagggtttatgttctaaaacccttttcaggttgattggaggagataaaaatgctcgtgttgtttgaaacccctgcgggttatgccctgtttaaagtgctggatgaaggcaagctttctaaagttgaggacttgtggaagaacttttccagtgcagatactgctagacaggtggtcaagttgaaagcattttctaaatttgagaacacttcagaagctctagaggca

SEQ ID NO: 159802 - DNA, 251 bp, Glycine max
gatgctgcaactagtactggagctcctttctggtctgcaccaaaaagattccctcgtccactacaattctcagcctctgatttgggtcatctaaattttgtgtcgtcagcttctattttacgggcagcaacatttggtatcccaatccctgactggggtaagaaccctaggaagatggctgaagctgttgatagggtgatagtacctgactttcagcctaagaaagatgtgaaaatagtgacagatgagaa

SEQ ID NO: 159803 - DNA, 253 bp, Glycine max
tcactttccattctcttcaacctaacgcagcatcgctatactcttcattccatggctttgcccaatcagcaaaccgtggattaccctagtttcaaactcgttatcgtcggtgatggtggcacaggaaagacaacctttgtgaaaaggcatctcaccggagaattcgagaagaaatatgagccaaccatcggtgtggaggttcacccattggattttttcacaaactgtggaaagattcgattctactgctggg

SEQ ID NO: 159804 - DNA, 248 bp, Glycine max
ctgggccaaggggcactacacggagggcgccgagctcatcgactccgtccttgacgtcgtgcgcaaggaggccgagaactgcgactgcctccaggggttccaggtctgccactcgctcggcggaggaaccggctccgggatggggacgcttttgatttccaagaacagagaggagtaccctgacagaatgatgctcaccttctccgtttttccttcccccaaggtctctgatactgtggttgagcctt

SEQ ID NO: 159805 - DNA, 254 bp, Glycine max
gaacataatggagaaccctgcttggtacactcagtacacaccttaccaggctgagatatctcaggggaggcttgagtcattgctgaattaccaaaccatgatcaccgacctcaccggcttgcctatgtcgaatgcttcattgcttgatgagggtactgctgctgctgaagcaatgtctatgtgtaataatattcagaaagggaagaagaagaccttcattattgcaagtaactgccaccctcagacaattgata

SEQ ID NO: 159806 - DNA, 256 bp, Glycine max
cgccgccagatctcagacgagactcagtcacactttctctctttctcttccacaatgcagctcctccgggcggtgctcgcggcggcgctgctcctcctcgccactctctccgacgcccacaacatcacaaccatcctctcctagcaccctgagttctccaccttcaaccactacctgaccctgacccacctggccccggaaatcaacggcaaaaccaccatcaccgtctgcgccgtggacaacgccgccatgtcgg

SEQ ID NO: 159807 - DNA, 249 bp, Glycine max
caagggtgcgagggtgctcgttgtctgctccgagataaccgccgtgacgttccgcggcccctcggacacgcacctcgactcgctcgtgggacaggcactgttcggagatggcgccgcagcgttgatcatcggatcagaccccgacccagcagtggagcggccgatattcgagatgatatcggccgcccagacaatcctgcccgactctgacggtgctatagatgggcaccttcgggaggtgggactcac

SEQ ID NO: 159808 - DNA, 252 bp, Glycine max
cttcatctattttttcttcgcccccttttgtgtttcttttttaggttgtttgttctttcttctcgttcgtcgctttgtgatctctctctgcaaccatgtccgccgagaaagagagagagacccaggtttacttggccaagcttgccgagcaggccgagagatacgaagaaatggttgagtgtatgaagaaagtagcaaaacttgatcttgatctaactgtggaagaaaggaacctcctctcagtgggataca

SEQ ID NO: 159809 - DNA, 251 bp, Glycine max
tgggcactgtgctcctgtaacttgccttggtctttcacctgatagtaattacctagttacaggatcccgagacacaacagtattactctggagaatacatagggcactttcatctcactcaagtgccgtatcagaacactccactgggacaggcacattgtcttcaaccagtaatagttcatcgcacttgatagaaaaagaccggagacgtcgaatcgagggtcctatacaggtacttcgggggcaccaca

SEQ ID NO: 159810 - DNA, 252 bp, Glycine max
caaaccatggcttccgaaacaaaccagtccaagaatgtgtgtgtaattggagctggaccctcggggctattggcagcgagggagctgagaaaagaaggtcacaaggtggttgtgttggagcagaaccatgatattggaggtcaatggctatatgacccaaatgtacaagaggaggatcccttaggaagagacccttggctaaaggtgcatagcagcatctatgagtctttaaggttcatgtctcccagagag

SEQ ID NO: 159811 - DNA, 236 bp, Glycine max
cgcagagcagagagagagaaaacgcaaaggcattatttggtcttggatccctttcgatccgacgacttcgttcgttccttctccttccaagttctaaccatttcccactgtcttcgattttagggcattaaatctgccatggcagcagcacccgctagagctcgtgccgattacgattacctcatcaagcttcttcttatcggcgacagcggtgtggggaagagttgtctactttt

SEQ ID NO: 159812 - DNA, 247 bp, Glycine max
aaagaagaaagaaacaaagatataaggaaaaagggaaaatattttgaataaggaagatataaggcaatatataaaaatattagtatttgataataattaggtgtagaaatattatggggaggggaagagtggaactcaaaaggatagagaacaagataaacaggcaggtaacgtttgcaaagaggagaaatgggctctcaagaaagcctatgagcttctgttctctgtgatgctgaggttgccctca

SEQ ID NO: 159813 - DNA, 247 bp, Glycine max
catcaacctcctttttttttaattaattttttgtttccgttttgctgatttgtttaattggttgcttgattctcagggtaatgcttgtgggttggggtggaaacaacggctcaaccctcaccggtggtgttattgctaaccgagagggcatttcatgggctacaaaggacaagattcaacaagccaattactttggctccctcacccaagcctcagctatccgagttgggtccttccagggagagga

SEQ ID NO: 159814 - DNA, 256 bp, Glycine max
cagcagagtgtgctcgtaatgctttgttggagaaggttgtggacaataaagcagattctgagaaattcaggtcagacttattgaacattgcatgactactttgagctccaagattctctcacaggacaaggagcattttgcaaaattagctgtggatgctgtaatgagactaaagggaagcaccaatttagaatctatccagattataaagaaacctggaggctcattaatggattcattcttagatgaaggattc

SEQ ID NO: 159815 - DNA, 250 bp, Glycine max
gaaacttgcagagcagcttctagacttgctatgcgagaatctgggcctggagaaagggtacctgaagaaggtgttctacggatccaagggtccaaattttgggacaaaagtgagcaactaccctccttgtcccacccctgatctgatcaagggactaagagctcacactgatgctggtggcataattctactcttccaagatgacaaggtgagtggcttgcagctcctcaaggatgaccagtggatcgat

SEQ ID NO: 159816 - DNA, 251 bp, Glycine max
gaagcattgaaggacgtagctgctatggctcgaggaaagatccagatcaagaggatagagaacaccaccaaccgccaggtcacttattctaaacgacggaatggccttttcaagaaggccaacgagctcaccgttctatgcgatgccaaggtttctattattatgttctccagcactgggaaactccacgagtacatcagcccctccacctcaacaaagcagttcttcgatcagtaccagatgactctagg

SEQ ID NO: 159817 - DNA, 247 bp, Glycine max
ccaaaacctgatttcatattcaccccactggatgactctcaagtccaagcagcagtggtttgtgcaaaaaagcttggtattcacatgagagtgcgaagtggagggcatgactatgaagggctctcttatgtttccctcattgagaagcctttcatgatcctagacttggccaaacttcgtgcagtgaatgttgatattgcgcgaaacacggcttggatccaagccggtgctactattggtgaagttt

SEQ ID NO: 159818 - DNA, 250 bp, Glycine max
gcaacctacaagggccaacaaattactggtgatacccctgtgccacccttttatcaaggccaagaagagagtaatctcataacagcttctttggtgggaaatgctttacccgtggctccgtctcttggctatgaacttggtcgtgatcaaattgttggaagactagtcttgaatctcaaagccaatggaaagcttcgttggaaagtgggaacatgggtctctggacgttacaggttcaatgttaattgtg

SEQ ID NO: 159819 - DNA, 258 bp, Glycine max
gcggaatcggagtctccaagatcctcatcatagcaggagcaggttacaccggcaccgtcctcatcaaaaacggaaaactctcggatttaatcggcgagcttcagttgctggtgaagggattggaaaaatctggggagcatgctgaaggtgaaggtgaatatgctgatgccatagctgctcaggtgcgtcgcctggcgaatgaagttcggcagctagcatcaaacaggccaatcacagtactgaatgggggttctgaac

SEQ ID NO: 159820 - DNA, 255 bp, Glycine max
catattcaaagctacttaatcagggacgtagcaaccttcagcccttttgtccaccaaaacctgatgacattgcaaccatttgctacacaagtggtacaactggaaccccaaaaggtgctatcttgacccatggaaactttattgcaagtgttgctgggagtactatggacgagaaattcggtccttctgatgtttatatatcctatctccctttggcacacatttatgagcgagcaaaccaggtcatgacagtac

SEQ ID NO: 159821 - DNA, 249 bp, Glycine max
atcacaatttgtgcattgcctcgtgtcctttttcttctttgcttgccaaaaatcttacacacacaggtatctagcaaatgggttctcaccagcaagaaccatggctattggagaatgggaaaccgcgggtgttgaccaaggagaataggcatggccgttctgcacacagcatgtcctccacgtctttgcgcaagaagtctagccgaactcttgtctccaagcttccatgtgccacactcagaagcatcc

SEQ ID NO: 159822 - DNA, 250 bp, Glycine max
caacaacattcattcattcacagctgtcacgccgtgaacggcacatggcaacggcgagacgcagtttcccgcctatcaccgtatgcaacgggacgacaccgtgcgagtctgtggccgccgacctcgacggtatgctcctcatctcccgttgctcgtttccgtacttcatgctcgtcgccgtcgaagtcgtcagcctcctccgcggcctcatcctcgtcctctcacttgcgttcgtcatcatcgcctatct

SEQ ID NO: 159823 - DNA, 250 bp, Glycine max
catcgttaccatggtcaacaagaatgaaaattgcagctggagctgcaaagggtctagcctttctacatgaagcaaagaaaccagtcatctatagagattttaaagcttcaaacatcttgttagactcggattataatgcacaactttccgattttggcttggccaaagatggtcctgaaggagatgacacacacgtttcaactagagtcatgggcacacaaggctatgcggccccagaatacatcatgac

SEQ ID NO: 159824 - DNA, 250 bp, Glycine max
aacgggcccaaatgattgaaactggggaagatattgactggggatttgcagaggcgcttgcttatgctaccttgcttattgaaggtaaccatgttcgattaagtggtcaggatgttgaaagaggaacttttagtcaccgccatgctgtagttcacgatcagacaacaggagagaaatattgtcccctggacaatgttataatgaaccaagatgaagagatgtttaccgttagcaatagttcactttctga

SEQ ID NO: 159825 - DNA, 250 bp, Glycine max
ctcctctctctgcatcgctgcgttttccgaatcgaaaggtgaggttagtaagtaacaatggtggagaaggccaagggtaggaaggaggaggttgtcactcgagagtacaccatcaacctccacaaacgcttgcatggctgcacatttaagaagaaggctcctaaagcaattaaggagataaggaagtttgctcagaaagcgatggggacgaatgatgtaagagtggatgtgaagctcaacaaggctgtgt

SEQ ID NO: 159826 - DNA, 253 bp, Glycine max
gacaattcaactacgagttttaccccaagacacaagccaagaatacttacagtttaccttttcttgctcaaaccaacgacgctaacgctgaaaacaatctctacccgtttgtttttctaaacgtcgatggcaacctttttatctttgccaacaaccgcgctatcttgttcgattacaataagaacagtgtcgtgagaacctaccctcaaatacccggtggagatccatggtgttatcctagcaccggttccgc

SEQ ID NO: 159827 - DNA, 269 bp, Glycine max
tggactgatgatggacttggttattatgagtttctccaacttgcagaggacttgggtgcttcaccaatatgggtatttaataatggtgtcagtcataatgatcaagttgatacatcggcggtcttacctcttgtgcaagaagcccttgatggaattgagttcgcgagaggtgatcccacttcaaaatggggttcccttagagctgctatgggacatcctgagccatttgacctcagatatgttgctgttgggaatgaagattgtggaaa

SEQ ID NO: 159828 - DNA, 268 bp, Glycine max
tgcaaatgttggggactccagagctgttatatgcaggggtggaaatgccattgctgtttctcgggatcacaagccagatcaaactgatgagaggcgaaggattgaagatgcaggtggctttgttatgtgggctggaacttggagagttggtggagttcttgctgtttcacgtgcatttggtgatagactcctgaagcagtatgttgttgctgatccagaaatccaggaagaaaaggttgatagctctcttgagtttcttatattggct

SEQ ID NO: 159829 - DNA, 270 bp, Glycine max
gtggactttatattcaacaagttttctgtcaaacccgggtcagaggaggctcagatcatgaagaatactattagtgagtgtgaagagggtggaatcaaaggagaggaaaagtactgtgccacttcgcttgaatccatggttgatttcagcacttccaagcttggaaataatgttgaggttgtgtccacagaagtggacaaggaaacgggattgcagaaatacaccgtagcaccgggagtgaagaagttatcaggggacaaggctgttgtg

SEQ ID NO: 159830 - DNA, 270 bp, Glycine max
gcagatcttcgtcaagaccctcaccggaaagaccatcacccttgaggtggaaagctctgacaccatcgacaacgtcaaggccaagatccaggacaaggaaggaattcccccggatcagcaacgtctcatcttcgccggaaagcagctcgaggacggccgtaccctcgccgactacaacatccagaaggagtcaacccttcaccttgtgcttcgtctccgtggtggcatgcagatcttcgtcaagactctcactggcaaaaccataaccct

SEQ ID NO: 159831 - DNA, 267 bp, Glycine max
gctagccacaatgcagatattcgtgaaaaacctaacggggaagacgataaccctagaggtagagtcatcggacacaatcgacaatgtgaaggcgaagatccaggacaaggagggcatcccgccggaccagcagcgcctgatcttcgccggtaagcagctggaggacggccgcaccctcgccgactacaacatccagaaggagtccacgcttcacctcgtcctccgcctccgcggcggcgccaagaagcgcaagaagaagacctacac

SEQ ID NO: 159832 - DNA, 265 bp, Glycine max
actgaggaggcacaccttcaggagcagtcatggttctcaaaaccgagctgtgccgattcagcggtgccaagatctacccagggaaaggcatcagatttgttcgtggtgattctcaggttttcctgtttgctaactcaaaatgtaagaggtatttccacaacaggttgaagccgtcaaagctcacgtggactgcaatgtaccgaaagcagcataagaaggatattgctcaagaagctgtgaagaagagaagacgtgctaccaaaaa

SEQ ID NO: 159833 - DNA, 268 bp, Glycine max
cgaacaactcatctccggcaaggaagatgccgccaacaactttgccagaggccactacaccgttggcaaagagatcgtagatctgtgcttggatcgcgtccgaaagctcgcagacaatctgcactggtctccagggcttcctcgtcttcaacgctgtcggcggtggcaccggttccggtctcggatctctcttgttagagcgtctctccgtcgattacggcaaaaagtccaaattagggttcaccatttacccttcccctcaggtttc

SEQ ID NO: 159834 - DNA, 265 bp, Glycine max
aaacaccaggctttcatcgtggaaggtgaccttaacgacacccccctgcttgagaagctcttcgacgttgtccccttcacccacatcctccacctcgccgctcaggctggcgtccgctacgccatgcagaacccccaatcctacgtcaccgccaacattgctggcttcgtcatccctcctcgaggctgccaaatccgccaatccccaacccgccatagtctgggcttcatccagctccgtctacggcctcaacacccaaaaccct

SEQ ID NO: 159835 - DNA, 263 bp, Glycine max
ctttttacttcccctatggctcgtcactccttgctcttagacctcctcctcttcgccgccgtggccaccgccgcgatggcggggccgcgtccgacgccgacgacatcctgatccgtcaggtggtgccagatgttggcgaagccgaagaggaggacaacctgctgaacgccgagcaccacttcgcgagcttcaaggccaagttcgccaagacctacgccaccaaggaggagcacgatcatcgcttcggcgtcttcaagtccaac

SEQ ID NO: 159836 - DNA, 264 bp, Glycine max
gaaatttaactcgaccttgtatgatgaatgggttaacaagggcaatgcaccggcactgcccgagactcttaagaattacaacaagctggtgtctcttggcttcaagattatattcttgtcaggaagaacactggacaaacaggccgtaacagaagcaaacttaaagaaggctggctaccacacatgggaaaaattaattctcaaggatccacaagatccttccactccaaatgcagtttcatacaaaacagcagcgagagagaa

SEQ ID NO: 159837 - DNA, 263 bp, Glycine max
ttctgtgtctgtgtttgcggatgaggattccgagcgagcgacctacttcgtttctcggaactattgagtcatcatgggtaaggaaaagactcacatcaacatcttcgtcattggacatgtcgactctgggcagtcaactaccactggtcatttgatctacaagcttggaggtattgacacgcgtgtgattgagaggttcgagaaggaggctgctgagatgaacaagaggtcattcaagtatgcctgggtgcttgacaagctca

SEQ ID NO: 159838 - DNA, 261 bp, Glycine max
atggcaacagaaacaaaagtggcagtattaggtggcatcaccgaagtgcagggagctgccaacagcgtcgagatcaacaatctcgctcgctttgctgtagaggaacaaaacaaaagagagaattcagttctggagtttgtgagggtgattagtgcaaagcagcaagtggttgctggagtgaattactacataacattggaagcaaaagatggtgagattaaaaatgagtataaagcgaaggtttgggagagggaatcccaa

SEQ ID NO: 159839 - DNA, 265 bp, Glycine max
gcatttccatatatcagtccatgtcctccttaatgctcaatggagctcatcaaaatccaaacctcattagtggcatagctccaaatggccttaactttcacaacaagtgtttattccaaaagggtgtgctgtctcatggtaacaagttaagggtggtcagaaaaaacttcactcccaaaggcagcatgtcagcatcatcatcatcatcatctaggcctggttctcagccaaggttcatccagcacaagaaggaggcattttggtt

SEQ ID NO: 159840 - DNA, 261 bp, Glycine max
gttttgatccatgccactgtccaaaagattgtttttgatacaaaaggaaaaagaccaaaagctacaggggttattttcaaggatgaaaatgggaagcagcatgaggcatatctaggaaatgacaggcagagtgaggtgattgtgtccagtggggcacttgggactcctcaattgctattgctgagtggaattggcccaaaagcagagcttcagaaattgaacatccctgttgtgcttgataatcaatttgttgggaaaggc

SEQ ID NO: 159841 - DNA, 263 bp, Glycine max
tgccaataatatatgagcgtggattattcggtatttatcatgattggtgtgaatcattgaatacttaccctagatcatatgatcttctgcatgccgactctatattctcaacacttaaggaaaagtgcaacatactggcagtgattgcagaagttgataggatcctgagaccagaaggatatttggtcataagagacaatgttgaaactattggcgagatagagagcatggctaaatctctacactgggatattcagttgaca

SEQ ID NO: 159842 - DNA, 247 bp, Glycine max
cgcaaattaaagcgcaaaaaccattctccttcggtgctcttgaaaacatgggaaaacagagcacagaattctctgccctcaactgcatcgacctctccaaccctgacatcaaccaatccgtcaatttactcaaacaggcatgtttggattccggttttttctacgttgtcaatcatggaataagccaggaattcatggaagaggtttttgcacagagcaagaaattcttctctcttcctcacaagga

SEQ ID NO: 159843 - DNA, 264 bp, Glycine max
ttcagagaggtccttaacttgattaagcctgttgcatctgttaaaaagttatcactcacttcacatgtagcctcagatttgccaatgtatgccattggtgatgaaaaacgtctcatgcaaactattctgaatgttgttggtaatgctgtgaagttctcaaaagagggttgcatttccatcactgctttcgttgcaaagcctgaatcctttagagatgctagaattcctgactttcttccagtgccaagtgataaccacttttat

SEQ ID NO: 159844 - DNA, 262 bp, Glycine max
gtccatatggaaaacacttggtgggaaaagaagggattttactgattcagattggttagaatctgcgtttctcttctacgatgagaacaagaaccttgtgcgtgtgaaggtcaaggattctcttgacactagaaaactagggtatgtttaccaagatgttgacattccatggttaaattctaagcccacgccgcgtaggtcaagggttcagaaggtagcattagcacaaaattttggtgttggtgcagcacatgctgctgag

SEQ ID NO: 159845 - DNA, 264 bp, Glycine max
gcaatgtgaaactgacaggttaactcacttctacacattcattctcatgccagatgccacatacagtgtcctggttgacaatagagagagagattccggaagcatgtatacagattgggatattcttcctccacgaaaaatcaaagatgtcaaggccaaaaagcctaaagactgggaagaaagagaatacattgaagaccctaatgatgtcaaacctgagggatatgattcgatcccaagagaaattcctgacccaaatgctaa

SEQ ID NO: 159846 - DNA, 260 bp, Glycine max
tgagaatcttatggagcttctcataatgattgatgcctgcaggagggcttcagccaaaaatattactgctgtcattccatattttggatatgccagagctgatagaaagacccaaggacgtgaatccattgctgccaagcttgtagcaaatttaattacagaagcaggtgcaaatcgtgtacttgcttgtgacctccattctgggcagtccatgggctattttgatattccagttgatcatgtgtatggccagcctgtta

SEQ ID NO: 159847 - DNA, 261 bp, Glycine max
ctggatatcgggtacggactgctgcacatggaccggagtagaatgccactataacagcacccgggtccaaagattattcttaacgggtcaaaaacccgaaaccatcttatcgggtaccatctcacccaccctctcaaaactcaaactcctcgatggactctacctcataaacctcatcaacatttcgggtcccttcccaaattttcttttccaacttccaaatctccaatttatctatctagaaaacaacaatctctcggg

SEQ ID NO: 159848 - DNA, 258 bp, Glycine max
ctaaacactcaactgatactcgggttgaggatcttgttagcaggatgactcttgaggagaaaattggccaaatgttgcaggttgagcgcaagtatgtatctgctgatttacttaagaagtattttattggggctgtattgagtgagggagggagtattccagctccacaggcttctgctgaaacctggattgacatggtgaatgaatttcagaagggtgccttatcaacccggctcggaattccaatgttttatggga

SEQ ID NO: 159849 - DNA, 261 bp, Glycine max
gtcgaaaagttcctctctctctcacacacacacatcccagccatgagcctcttcggtataggcagaaaccagagaacattccgcccgaaaaaaagtactccttctggaagtaagggagctcaacttcgaaaacatattgatgccacgttaggtagtggaaatctgagggaagcagtaaagctacctcctggggaggatttaaatgagtggctagctgtcaacactgttgatttcttcaatcaggtgaatctgctttatggt

SEQ ID NO: 159850 - DNA, 259 bp, Glycine max; identical to SEQ ID NO: 114531

SEQ ID NO: 159851 - DNA, 256 bp, Glycine max
cgtaacctctgtaactgtggagaacgtgacattccctcccaccgtgaagcctccctgctcccccaacaccttcttcctcgccggcgccggcgtcaggggcctccaaattcatcacgctttcgttaaattcactgccatctgcatttacctccaatacgacgccctttccttcctctccgttaagtggaaaaccaagtctgctcaccagttaacggaatccgaccaattcttctcagatatcgttacaggtccattc

SEQ ID NO: 159852 - DNA, 258 bp, Glycine max
aagcagcgttgcaacgctgtttcctttctgtttcttttcttcttccttccgacgagatctacaacgttgttgttgtttagatcttgaatagtgttttggtgttcggtgagatggaagaaaggaagcaatcacgttatgtgaagttgactaaagatcagacacctctcgaagacattacccctggcgaactcaaccagccaattcaggttcctcagttggacgttcgcaagtgccctgaatgtagacagccgctacctg

SEQ ID NO: 159853 - DNA, 256 bp, Glycine max
cgggaggttgtgaagaaggggtgcgaggctctgcatagatgcgaggacatggtcaataacctaggtttgttctctcccaacgagaccaaagaagatatcagcaccaccaatctcaagtacattctggtgccattttatcttgcggagttgacagaaaaattagcacaggatgacaggatacatattctaaaggcttcccaggcaaaactaaaggagtttatttcattttgcgaacaatggagctggtcccaaaaga

SEQ ID NO: 159854 - DNA, 256 bp, Glycine max
gtcgacattgaggatgattgttttgttaaattttgggggattttgcacaattgtcctcttaacccacctactagcaaaaggagaagaagcccgtgtcaagcttctaggatggatttgcgtagtctttgccactagtgtttttgcagcacctttaagcattattagggtggtaattcggacgaaaagcgtagagttccttcctttccctctttcacttctccttctgataagcgcaattatgtggctcttatacggt

SEQ ID NO: 159855 - DNA, 217 bp, Glycine max
ctcgagccgctcgagccgcgcgggtgaggtagaacccttccacggtggtgactgcgcgatgggtgcctacaagtatgtttcagagctatggcgcaagaagcagtctgatgtcatgcgcttcttgcagcgggtgaggtgctgggagtataggcagcaaccttccattgttcgcttgacaaggtcgacccgccctgacaaggctcgtcggttgggcttc

SEQ ID NO: 159856 - DNA, 258 bp, Glycine max
agaaaatgaagaacaatgccattgtttgcaacattggtcactttgacaatgagatcgacatgctggggctggagaactaccccggcgtgaagcgcatcaccatcaagccccaaaccgacagatgggtcttccccgagaccaatgtcggcatcattgtcttggccgagggtcgtttgatgaacttgggatgcgccacaggacaccctagttttgtgatgtcctgctccttcaccaaccaggtcattgctcagcttgagt

SEQ ID NO: 159857 - DNA, 237 bp, Glycine max
gaaaaagctactgatttttcttctcatcgaggttgttttctttgctgccgttgctcttataacaatgctggcattgcatggcactcgccaaaggtcgttagtggttggtgttctctctgatatcttcaatgttatgatgtatgtctcccctcttacaattatggcaaaggttataaaaactaagagtgtgaaatacatgccaatctggctctctctgggtaacttccttaatggtgc

SEQ ID NO: 159858 - DNA, 270 bp, Glycine max
agtggactttatattcaacaagttttctgtcaaacccgggtcagaggaggctcagatcatgaagaatactattagtgagtgtgaagagggtggaatcaaaggagaggaaaagtactgtgccacttcgcttgaatccatggttgatttcagcacttccaagcttggaaataatgttgaggttgtgtccacagaagtggacaaggaaacgggattgcagaaatacaccgtagcaccgggagtgaagaagttatcaggggacaaggctgttgt

SEQ ID NO: 159859 - DNA, 252 bp, Glycine max
ccactattgcacttcttcctcgttctccctctttttcttcttcttcgctaaacccttttttctatctcactaacacaacaatgggagacgagaagaagggcaagcctgctgcttccggcgtgtggtccaccatcaagcctttcgtcaatggtggagcctccggcatgctcgccacctgcgtcattcaacccatcgatatgatcaaggtgaggattcaacttgggcaaggatcagctgcgcaggtcacttcca

SEQ ID NO: 159860 - DNA, 254 bp, Glycine max
ccaaaacaatttgctcacaaaggaggaaaaatggcacctttcgtttccctctctttgttgcttctctttctcaaccaccccctcctttccctctcaaccaaccctgaagggaacgctctgcatgctttgagaagcaggctttctgatcccaacaatatgttgcagagttgggacccaacactggttaatccctgtacttggtttcatgttacctgtgactccaacaatcatgtgattcgcttagacttgggcaa

SEQ ID NO: 159861 - DNA, 252 bp, Glycine max
gaaagtttgtggcggatggagtgttcttcgccgaactgaacgaggttctgacacgtgagttggcggaggacggttactccggcgtggaggttatggttacgccgatgcgcaccgagattatcatcagagccaccagaacccaagccgttctcggtgagaagggaaggagaattagggaacttacctcagtggtgcagaagaggttcaaatttcccgagaacagtgtcgagctttatgctgagaaggtcaaca

SEQ ID NO: 159862 - DNA, 254 bp, Glycine max
tcaattataagcatgggtttgtggaacacaacgaatgcagtgtcttgccgctttcacaagtttggtgatgaccaaaagaatctggtcttccaaggtgatgccacgtcttcttccaggggcatagtactcacaaagttagtacggtggaggaataccagtgggtggcagtgtggggagagtgttatactcttctccagtgcacctttgggaaagctctacagtggtcgcaagctttgaaaccgacttcacctttt

SEQ ID NO: 159863 - DNA, 254 bp, Glycine max
  unsure (1)..(254): unsure at all n locations
cgaacaactcatctccggcaaggaagatgccgccaacaactttgccagaggccactacaccgttggcaaagagatcgtagatctgtgcttggatcgcgtccgaaagctcgcagacaacggcactggtctccagggctntctcgtcttcaacgctgtcggcggtggcaccggttccggtctcggatctctcttgttagagcgtctctccgtcgattacggcaaaaagtccaaattagggttcaccatttaccctt

SEQ ID NO: 159864 - DNA, 252 bp, Glycine max
ctcgagcgaatcggctcagggcgtaccgtgtacgtatctgcagaaagtgaatgaaaggtaatgggggaagaagggtgcaaggtatgtgttacaggaggcagtggttacattggttcctggctcatcaagaagctactggccaagggctacacagttcatgcaactctcagagacttgagagaatgagtcaaatgttggcctcttaaagagccttccacaatcagaaggaaagatggtgctgtttgaagctga

SEQ ID NO: 159865 - DNA, 255 bp, Glycine max
ctttctctcttctctctccacccaaaccctaactcccgaccctgttcccctctcgtatccgtcatgaaaggaggaaagtccaagaccgaatctaagagagccgatcccaaacttgctgtgaataagaagggagccgccaccaaggctaggaaacccgccggcaaggggaaggcagcgaaagaccctaacaagccaaagaggcctccaagtgctttcttcgttttcatggaggagttcaggaaggtattcaacaaa

SEQ ID NO: 159866 - DNA, 252 bp, Glycine max
ggaaagtcaaggtagaggccggtttcttggatctgtacacggacagggagccagggtgcgggtactgtaagtactctgcgagggaacaggttttgggagaggtgaagcggttgatggagaagtatgcggacgaggaggttagtgttacgatagccggacatagccttgggagtgcgatggcggtattgagtgcctttgatattgttgaaactggggtgaatgtggggaaggatgggagaaaagcgcatgttt

SEQ ID NO: 159867 - DNA, 251 bp, Glycine max
ggtgtttttgaaacgtgcttaaaccgtgatgggtgctgttgtggagtgctacgcgccgcctcgcacggcggtgctgtccctcaacacgctgccgttagggttccgtttccgtcccaccgatgaggagcttattgactactacctgcgctcgaagatcaacggaaatagtgacgatgtttgggttattcgtgagattgatgtctgcaaatgggagccttgggacttgcctgatttgtcagtggtacggaaca

SEQ ID NO: 159868 - DNA, 252 bp, Glycine max
gagttttatggaaaggtcaacaccaaacatgcagtacaaagcttggcgtcacgatcctgagacaggtcctactgtttactgtagtagaactgtcttcgatgatgcaactccagagttggtgagggatttcttctgggatgatgactttcgtcctaaatgggatgctatgcttgcatactgcaaagtattggaggaatgccctcgtaatgggacaatgatttctcactggattaaaaagttcccctttttttg

SEQ ID NO: 159869 - DNA, 251 bp, Glycine max
gttgtccgtgctcttcgagctgcctacaacaaccctgagagagctgttgaatatttgtatacaggtatccctgagcaagctgaagctccacttgtagcccgggcgcctgtaagtgctcaacctacaaatcctcctgctgatgctccacaaacagcacaacctgctgcagttacctcagctggacctaacgctaatcctttagacctttttccccagggtctccctaatgtgggttctggtgctgctggtgc

SEQ ID NO: 159870 - DNA, 252 bp, Glycine max
ggcgagtagggaagagcgaagagtgaggagaatggctcccaagggtttaacctttctggctgtgttaatatgcgtttcagcactgtcactgagtgcttctgttgcgggggaagggcaaaataatggccttgttatgaacttctacaaggaatcatgccgtcaggatgaagacatcatcacagaacaagtcaagcttctctacaagcgccacaagaacactgctttctcctggctcaggaacatcttccatga

SEQ ID NO: 159871 - DNA, 255 bp, Glycine max
ccttcagcttgtttgcctattaccattgatgtgggtacaaacaatgagaagctgctgaatgatgaattatacattgggctaaagcaaagacgagcaactgggcaggaatatgctgaacttatgcacgaatttatgacagcagtcaagcatactctatggggataaagttctaattcagtttgacgactttgcagaccactatgcttttgatctgcttgacgtatatagatctacacatctggtctttaatgatga

SEQ ID NO: 159872 - DNA, 250 bp, Glycine max
ggatccccctgtgggttgcaccgccgaccgaccctgatcttctgtgaagggttcgagtgagagcatacctgtcgggacccgaaagatggtgaactatgcctgagcggggcgaagcagaggaaactctggtggaggcccgcagcgatactgacgtgcaaatcgttcgtctgacttgggtatagggggcaaagactaatcgaaccgtgcagtagctggttccctccgaagtttccctgaggatagctggagc

SEQ ID NO: 159873 - DNA, 225 bp, Glycine max
tcgccgaactgaacgaggttctgacacgtgagttggcggaggacggttactccggcgtggaggttagggttactccgatgcgcaccgagactatcatcagagccaccagaacccaagccgttctcggtgagaagggaaggagaattagggaacttacctcagtggtgcagaagaggttcaaatttcccgagaacagtgtcgagctttatgctgagaaggtcaaca

SEQ ID NO: 159874 - DNA, 247 bp, Glycine max
taaaaatgctatcaaggaggaatcagagggcaagttgaagggaattcttggttacactgaagatgatgtggtctccactgactttatcggcgtgagcagatcaagtatttttgatgcaaaggctggaattgcattgaataagaactttgtgaagcttgtttcttggtacgacaacgagtggggatacagctcacgtgtcattgatcttcttgtattcgttgccaagaagtctctttaaggtgttact

SEQ ID NO: 159875 - DNA, 251 bp, Glycine max
atatagcccaagccctatacaaccaaaccctaacacacacccatttgattcagtttccatggctagcctcaaggttgcatttttggctgcagtgctctgcatggttgtggtgagtgcacccatggcacatgcagctatcacgtgcgggcaggtgacgaatagcctgatcaattgcatcggttacctccagaacggaggaacgccgccgtcgggatgctgcaacggagtgaagagcctcaatgccgccgcca

SEQ ID NO: 159876 - DNA, 255 bp, Glycine max
tgatgagtttttgaaacctaggattgcagattttggacttgctaaggttattcaggccaacgttgtcaaggattcctccactcatgtcattgccggaacccacggatacattgctcctgaatatggctacacgtacaaagtgaatgagaagagtgatgtgtacagctttggagtggtgttgatggaactagtaactgggaaaaggccaactgaaccagaatttggggaaaataaggacatagtgagctgggttca

SEQ ID NO: 159877 - DNA, 247 bp, Glycine max
gtgcttttgacagttaagccacaatatggatttggtgagaaggggaagccagaacaaggggatgaaggtgcagtgccaccaaatgcaacattgcagattactcttgaattagtttcatggaaaactgtttcagaagtaagtgatgacaagaaggtcataaagaagatcctcaaggaaggggaaggatatgagcgtccaaatgagggggccattgttaaagtgaaactaattggtaagctacaagatg

SEQ ID NO: 159878 - DNA, 245 bp, Glycine max
atctgatccaaaatggcgacgatgacgagcttgattggtctcatcaataagatccaacgagcttgcaccgttttgggagatcacggtggcgagggcttgtcgctctgggaggctcttccctctgtcgccgtcgtcggtggacagagttcagggaaatcgtcggtgctagaaagtgttgtcgggagagattttctgcctcgtggatctggtattgttacacggaggccactagtgctgcaacttca

SEQ ID NO: 159879 - DNA, 247 bp, Glycine max
caaagagacaattcaacttaagagatcaatatggccaccaccactacccagcctccctctaatatctgttttttccttctgttgttgcttctagcacactttcatttgggcataagccaacttgagctgaattactactctaaaagctgcccaaaagctgaagagatcatcaaggaacaagtcacacaactatataacaagcatggaaacactgccgtttcgtgggtcagaaatctcttccacgatt

SEQ ID NO: 159880 - DNA, 251 bp, Glycine max
gggagactgaatccagaaacctacaaattttttgatgcggttgagaagcattatggaattcacattgagtacatgttccctgatgcggttgaggttcaggcattagtaagaactaaagggctcttctcattttacgaggatgggcatcaagagtgctgccgagtaaggaaggtgaggcccttgaggagagcccttaagggtctcaaagcatggatcactggacagagaaaagatcagtctcctggtactag

SEQ ID NO: 159881 - DNA, 247 bp, Glycine max
ctgatcgctccctgagagagctcgtcgcggcggttgcagaagaagattgcaagatgaagttcaacatcgcgaatcccaccactggatgccagaagaagctcgagatcgacgacgatctgaaactgcgagcattttgggacaagaggatctcacaggaggtcatcggagatgcactcggtgaggaatttaagggctatgtcttcaaaattaccggaggttcgtcacaaacaaggatttccaatgaagc

SEQ ID NO: 159882 - DNA, 248 bp, Glycine max
aaaaatgaaagcccaaagtgcttctctcctctgtctttttctctctcttgctatccttttggctagtggcactgctgcaagtgcaactccaagaagcgcagtgccaagccaccatgtttcaacattcaacagaagcctttttccttccacttttctctttggagttggttcttctgcttaccaggcagaaggagcagcaagtgtagatgggagaggaccaagcatatgggacacctacactagacagc

SEQ ID NO: 159883 - DNA, 246 bp, Glycine max
ggaatgcaggacattctcctgtttacttgttttcatctagagtgaacgacggaatttgtgattgctgtgatggaaccgatgaatacgatggtcaagtaaagtgtccaaatacctgctgggaggctggtaaagttgctagagacagactgaaaaaaaagattgccacttatcaagagggtgtcaaattgcgaaagcaagaaattgaacaagctaaagtagctatggagaaggatgaggccgaacttt

SEQ ID NO: 159884 - DNA, 246 bp, Glycine max
tggccactttcttcacccaaacctccttcccctcccactctctctccaaaactttcgatacccatttcgcaccatccacgaaagtcaacgtatttgcgaacttcccggcgaggaggcacgtgggggttcgagtttcgaacgcgctgatcgaaccagacggagggaagctggtggagcttgtggtgagggataattcagaaagagacttgaagaagggtgaggctctttcgttgccgaggatcaagc

SEQ ID NO: 159885 - DNA, 245 bp, Glycine max
ctagagcgagaaagtgagaggagagagaaagtagcagatcctccatggcctccaccaaggaacgtgaaaacttcgtctacgtcgccaagctcgccgaacaagccgaacgctatgaagaaatggtggaagcaatgaagaatgtggcgaactaaacgtggaattgacggtagatgagcggaaccttctgtcggttgggtacaagaacgtggtgggtgctcgtaggccttcgtggaggattctttcct

SEQ ID NO: 159886 - DNA, 263 bp, Glycine max
gtccagattagtaccacaaaaatggagaaatagaataactgaatatcgtatagctcaaaataaagatttaaccaaatgcaattcatatgaaaaaagcagattaattctttacaaagaacaacaagtgaaacgcattaaaaaacaaaaattatgaaaacaatatcagagtacgatctttctatcctcataattttgatcaattgatgcagatcaagagaagagctcatacgatttacatggataatagatccctatttacaagt

SEQ ID NO: 159887 - DNA, 244 bp, Glycine max
caattccgctcccttttcctaacctcaccggcgggtgctcgtactgctactgtcgatgcctagaagggcggcggtcatcgtgtcggcggcgacggcggagacccgaagaagaagggcgaatcgaaacggttcgtggaagagatgaggttcgtggcgatgaggctgcacacgagggaccaggccagggagggcgagaaggaggtcaagcagcccgaggagaaagccgttaccaagtgggacccat

SEQ ID NO: 159888 - DNA, 247 bp, Glycine max
cttttctaacatggctgctgggactggactctttgcagagattgtggatggagatgtgtacaagtactatgctgatggagaatggaagaaatctgcttctgggaaaagtgttgccatcatcaaccccactaccagaaagactcaatacaaagttcaagcttgttcacaagaggaggttaacaaggtcatggacttggcaaaatctgcccaaaagttatgggcaaagaccccactatggaaacgtgct

SEQ ID NO: 159889 - DNA, 253 bp, Glycine max
aggataaggaaggtattccaccggatcagcaacgtcttgtcttcgccggaaagcagttggaagacggcagaaccctcgccgattacaatattcaaaaggaatcgacgcttcatctggtgcttcgtctccgcggagggatgcagatcttcgtgaagacgctcaccggaaaaacgattactctggaggtggagagttctgatacgatcgataacgtgaaggcaaagattcaggataaggaggggattccaccgga

SEQ ID NO: 159890 - DNA, 246 bp, Glycine max
cctgacccgaaccaagttcccaaggagttcacctgccccatttccggctcactaatgtccgaccctgtcgtcgtagcctcgggccaaaccttcgaacgcctcgccgttcaactctgcaaagacctcaacttctccccgaagctggacgacggcacccgacccgacttctccaccataatccccaacctcgccatcaaaacgacgatcctccactggtgcgacaattcccgcacccaacccccgctc

SEQ ID NO: 159891 - DNA, 244 bp, Glycine max
gtattaggctactccatcttcatgggcttgtctgtgtcacagtacttcaatgagtacacagcaattaatggttatggtccagttcacaccaaagcaagatggttcaatgatataatcaatgtcccattccaatcaaaagcatttgttgcgggttgtgtggcatatttcttggacaacacactacacaagaaggaagctgctattaggaaagatagaggaaaacattggtgggacaagtaccgtt

SEQ ID NO: 159892 - DNA, 247 bp, Glycine max
tgctcccttcgctttcccttcattcacatttcgcagggcgcttctttctcattgctggcaaaatggcaaatgtagcgtccggaatggctgtgcacgatgattgcaaactgaggtttcaagagcttaaatcaaagaggagctacaggttcattgtgttcaaaattgaagaacagcaagtggtggttgagaaattaggggaccccacggaaagttatgaggactttagtggccagttttccagctaatg

SEQ ID NO: 159893 - DNA, 240 bp, Glycine max
gctagaagcaataagatgaaaatgaaagtgcttgtattgtttgttgctacagttttggtagcatatgaatgccatggctcagactaccagaagttccctctctcaatgaaaactgggtttggtgggcaatacagcaatgaggtggcatgtgccagttggaggcttggcgtggaagcaaacaacgtagtcaagtggcaaactgttcctgcagcttgcggagagtacatagctgactacgtt

SEQ ID NO: 159894 - DNA, 238 bp, Glycine max
  unsure (1)..(238): unsure at all n locations
acagccaacacatgtatggtagggagttccaatcgatgttggacggactcgacgaggaagggtgtgttgaagaaccggggtatcaatctgagaagaagcgtcgtctaagtgtggatcaagtgaaggctttggagaagaactttgaggttgaaaacaagcttgaacctgagaggaaggtgaagcttgcccaagaacttgggttncaacctagacaggtagccgtatggttccaaaaccg

SEQ ID NO: 159895 - DNA, 239 bp, Glycine max
gcacaagagtctccaatcccaactctctctctctctccacttgccaaaggaaaaaggctaaagagaaacccacacacacacacacacacagaaatatgtcttccccaagcaagcgccgagagatggacttgatgaaactgatgatgagtgattacaaggtcgagatgattaatgatggaatgcaagaattttatgtgcaattccatggacccaatgacagtccttatcatggtggtgtg

SEQ ID NO: 159896 - DNA, 234 bp, Glycine max
ggagataagatattgaagtagtgctaagtgcctaacacctgcagtgaacaatggcctctgcatcagcatctcttctcaagtcttcacttgttcttgataagtctgagtgggtgaagggacaaacacttcgccaaccttctgctgcatcagttgtgagatgcaaccccaccaccccatcaggcctcaccatcagagctggttcctatgctgatgagctcgttaagaccgcgaaaa

SEQ ID NO: 159897 - DNA, 236 bp, Glycine max
caaactttgtaacttcaaaacatactcctctgttctctctgtttctcttcaatcttcctgaaaaaaacaaaaacacgaaaaatcatccaccctctcacattctctctctctctcctttcaactaatatggaaattgaaaaccaagacaacactgtcagagaaatcaagccaaagaacaggagaatcatgggtgctggaggccctgatgatgacgacaataggtggccaccgtggtt

SEQ ID NO: 159898 - DNA, 235 bp, Glycine max
caaagggacaccggagtatgtgcggtcgtgttgtgaagcaagcttgaaacgccttgatgttgaatacattgatctctattatcagcacaggattgaccaaacagtacctatagaggaaacagtgggtgaacttaagaaacttgtggaagagggtaaagtgaagtatatagggttatctgaagcgagtccagatacaataagaagagcacatgcagttcatcccatcactgcttta

SEQ ID NO: 159899 - DNA, 237 bp, Glycine max
ggcaagatgtcgaagagaggacgcggtggttcggcggggaacaagttccggatgtcgctgggtctgccggtggcggcgacggtgaactgcgccgacaatacgggggcgaagaacctctacatcatatcggtgaaagggatcaaagggcgtttgaaccgtctcccctcggcttgcgttggcgacatggtgatggccaccgtgaagaaggggaaacccgatctgaggaagaaggttttg

SEQ ID NO: 159900 - DNA, 238 bp, Glycine max
cattgattcccaaaaccctaattgaagttctctcctccacactatatattgcagattttgagtgagtctatcccttaaaggctctctcttgcagtcgcagaggaaaaccctagctagtagtctcagttcgtttgagagagaaaaaatggcagagggtctcgttctccgcggaaccatgcgcgcccacaccgacgtcgtgacggcgattgccactcccatcgacaactccgacatgatc

SEQ ID NO: 159901 - DNA, 235 bp, Glycine max
atttctatctatctcttgtttcaatttcaacaacggttactcctttttcgttttgagtttcaatcaagccatcatcatgtctaccgcatcgcaacccaaggccaagaaaacggcgtcgtccaagaagcccctctcccaccctcccttcgccgtgatgatagcagaggcgattgcgagtctgaaagagagaaccggttcgagccaatacgcgataaccaaatacatcgaagggaag

SEQ ID NO: 159902 - DNA, 226 bp, Glycine max
ctgccagtagtcatatgcttgtctcaaagattaagccatgcatgtgtaagtatgaactaattcagactgtgaaactgcgaatggctcattaaatcagttatagtttgtttgatggtatcttctactcggataaccgtagtaattctagagctaatacgtgcaacaaaccccgacttctggaagggatgcatttattagataaaaggtcaacacaggctctgcctgt

SEQ ID NO: 159903 - DNA, 239 bp, Glycine max
cgaccgcgttcttttctacggagcctcgaccaagaagaatcgcagagagaagagggtcagagtgagaaagagagagagagagagagaaactgagagaaattcgcaaaccctaatttcggaaagatcggcgatggctgcctccaaggatcgcgagaacttcgtctacatcgccaagctcgccgaacaggccgagcgatacgaagagatggtggaatcaatgaagaacgttacgaatctcg

SEQ ID NO: 159904 - DNA, 240 bp, Glycine max
cgcaattgcgaaatctctggaacaattgatttcattttcggatactccaccaccttgatccaaaactcgaagatcttggtgaggaagcccatggcaaatcagcagaacatagtggtggcagatggcacagggcagaagaacatgcccacaggaatagtcctccataagcgcgagatcatgccggaccctaccctcttggcagaccgcttgagcgtgaagacttacttggccaggccatgg

SEQ ID NO: 159905 - DNA, 234 bp, Glycine max
catgactatttcaaaagatcgagtaaaaccatcacatctgccggatagctgtaagctagctgagatatttacaactagcgttgtgcttggcagttacttggcaatgatgacagtcatattcgtttgggcagcatagaaaaccaatttcttcccgcgagtatatggagattctactcttgagagaactgctcatcatgagttccgactacttgcctctgcaatctagcttcaagt

SEQ ID NO: 159906 - DNA, 234 bp, Glycine max
aaaagatgaagggaataaggaaaagaaggacaaagaaaaaggagacggtgatggtgaagagaagaaggaaaagaaagataaagagaaggagaagaaaaaggaaaagaaggataaagatgaagaaacagacacattaaaggaaaagggaaaaaatgatgaaggtgaggatgatgaaggaaataagaaaaagaaaaaggataagaaggagaaagagaaggatcacaaaaaggaaaa

SEQ ID NO: 159907 - DNA, 229 bp, Glycine max
caattctcctaattgctggctataatgtgtttgatcttgttggcaagtgtctgactgcagtttacctcctacacaatgcaaaagttgccataggtggttgcatagcaagattgttgtttttccctctcttcttaggttgcatgcatggtcccaaattcttccggactgagattcccgtgacaatactgacttgcctgttagggcttactaatggctacctaaccagtgc

SEQ ID NO: 159908 - DNA, 237 bp, Glycine max
gttggtaagaatacgatcaaaacacttgtgtaaacatggcttaaggggataagatcttttggttttcagatgtggaatttgctagggagactttggcaggtgtcaacccatatagcatccaattggttaaggaatggcctttaacaagtaaactagacccgcaaatatatggtccacaggaatcaacaataactagggaagtcattgagccacaaattatcacttatggaacaattg

SEQ ID NO: 159909 - DNA, 234 bp, Glycine max
acaaaggttgctgtaggagataagattgcagtagtgctaagtgctaacacctgcagtgaacaatggcctctgcatcagcatctctgctcaagtcttcacttgttcttgacaagtctgagtgggtgaagggacaaacccttcgccaaccttctgcatcagttgtgagatgcaaccccaccaccccatcaggcctcaccatcagagctggttcctatgctgatgagctcgttaaga

SEQ ID NO: 159910 - DNA, 233 bp, Glycine max
gaaaaaattcaggattgaagtttttgatatatgggaggacaggttggataggggggttgttgggaaagctttgcgaagaagagagaattgattgggaatatgggagaggaagattggaagataggaaatcacttatgaaggatatgagaagggtaatgccaacccatgtgttgagtgcagctggtgttactggaaggcctaatgttgattggtgtgaatcacacaaggttgaa

SEQ ID NO: 159911 - DNA, 214 bp, Glycine max
cacccttgaggtggagagctctgacaccattgacaatgttaaggccaagattcaggacaaagagggtatcccaccagatcaacagacggtgatctttgctgggaagcaacttgaggatggccggactcttgctgactacaacatccctcatcgagtacactcttcaccttgtactccgtcttcgtggtgggatttaaaagtctgagaacgctct

SEQ ID NO: 159912 - DNA, 231 bp, Glycine max
acgagttccgagttgcgagttgcagagagagcaatgagtcaggaatcgtttatacatagcttcgtggctcgggggacgatggtgttagccgagtacaccgagttcactgggaacttccctgcaattgcagctcagtgcctccagaaactaccctcttccaataacaagttcacctacaattgcgaccaccacaccttcaattttctcgtcgaagacggttacgcttactgt

SEQ ID NO: 159913 - DNA, 231 bp, Glycine max
ctgttttccagttgaagtctttccctagccaatggccactgatcgtttgacccgggttcacagtctccgtgagaggcttgatgaaaccctcactgccaacaggaacgaaattttggcccttctgtcaaggatcgaagctaagggcaaggggatcctgcaacaccaccaggtcattgctgagtttgaggaaatccctgaggagaacaggcagaagcttactgatggtgcctt

SEQ ID NO: 159914 - DNA, 239 bp, Glycine max
agtttgggtctatatcacctgaccttgggaagctagagaatctgagggttcttgctcttcataacaacaacttctatgggtcaattccaccagagttgggaaaatgcactgaattggagggaatatttttacagggtaattaccttagtggagcgattccaagtgaaataggaaacctttcacagcttcaaaatttggatatatcaagcaattccctcagtgggaatattcctgcatca

SEQ ID NO: 159915 - DNA, 233 bp, Glycine max
ctcaagtccaacctacccctttttcttctcccaccaacttcaccgtcatcttcctcgatcatgtctcacttcaagggcaagtaccatgatgagcttattgccaatgctgcttacattggcactcctggaaagggtattcttgctgctgatgagtcaacagggacaattggcaagcgtttggccagcatcagtgtagagaatgttgaatccaacaggcgtgctcttagggagct

SEQ ID NO: 159916 - DNA, 231 bp, Glycine max
aaaatgctcactttttttcttccaacgctccgcctccttctcatagccttcgccagctctgtcaccggccgccgtgacctcgtcggagactcgctccggctgaccgtcgcaactgataacgacgccaacttcacgagcagcccgtgggccgtcctcctcgccggttccaatggttactggaataactgagatcaggctgatgtttgtcacggctatcaaatagcgagggaa

SEQ ID NO: 159917 - DNA, 222 bp, Glycine max
atctgcatttgcatttgctctctgtcagtttgtaagaatcttaagctatgggaaagtcttagtcaagcgtgagcgctgattactagaaggccgttgagaaggcgaagatgaagttcagaggcttcatcgctgagaaattgagcgctcctctaatgctccgtttggcatggcactctgctggaacttacgacgtgagctcgaagaccggtggtcccttcggaa

SEQ ID NO: 159918 - DNA, 230 bp, Glycine max
atctccatttccatttcctctctctcagtttccaagaatcttaagctatgggaaagtcttacccaaccgtgagcgctgattaccagaaggccgttgagaaggcgaagaagaagctcagaggcttcatcgctgagaagagatgcgctcctctaatgctccgtttggcatggcactctgctggaacttacgacgtgagctcgaagaccggtggtcccttcggaaccataaag

SEQ ID NO: 159919 - DNA, 230 bp, Glycine max
actcgagccgaatcggctcgaggtggtgggacctttgatgtcaacatcttgacaattgataacggtgtttttgaagttcttgctacaaatggagatactcatcttggaggtgaggattttgatcaaagaataatggagtacttcattaaattgatcaagaaaaagcatggaaaggatattagcaaggacaacagagcacttggaaagctgaggagagaggctgagcgtgc

SEQ ID NO: 159920 - DNA, 234 bp, Glycine max
caattttctagggtttatacaattttcgatggcttcttcagatgttgagtaccgttgctttgtcggtgggctcgcttgggccactgacgaccaagctctcgagagagccttctctcagtacggcgaaatcgttgaaacgaagattatcaacgatcgtgagactggaagatccaggggttttggatttgtgaccttcgcctcggagcagtccatgaaagacgccatcgaagggat

SEQ ID NO: 159921 - DNA, 231 bp, Glycine max
ggcacttccttcccaaggggcattccggcctgaacttacccaaattatgaaccaactggttcagtttctcaactcaaatggttccccatttgttgttaatatctacccctttcttagcctttataacaatggagatttcccccaagagtatgcgttctttgagggaactacccatgccgtccaagatggttccaatgttgacactaatgcatttgatggaaactatgacac

SEQ ID NO: 159922 - DNA, 232 bp, Glycine max
ctgatgcagcaaagcataggcaatcccaagagcaggcaaggagaaaaaagatgtcaagagcccaagatggaatactgaagtacatgctgaagatgatggaggtttgcaaggcacaatggtttgtttatgggataattcctgagaaggggaagccagtgaccggagcatcagataatcttcgcgaatggtggaaggataaagtcaggtttgatcgaaatggtcctgctgccat

SEQ ID NO: 159923 - DNA, 227 bp, Glycine max
tgaaaatacacttatcacaaaattttttggtctgcacaggattaaaccttcaagtggtcaaaagtttcgctttgttgtaataggaaatatgttctgcacagacttaaggatccatcggaggtttgatttaaaaggttcttcccttggaagatcatcagacaagatagaaattgatgagagtactacgctcaaagatttggatctgaactacagcttctacctggaac

SEQ ID NO: 159924 - DNA, 228 bp, Glycine max
gcacaccacacaaaaaagcaaaacagagagaacaactgttactcacacacgccatgggtaaatgaatggtttttgagcaacagcagttaaaagagaaaagggattcagcgaagatgacatcggttggtgtggcaccaacttcgggtttgagagaagccagtgggcatggagcagcagctgcggatagattgccagaggagatgaacgatatgaaaattagggatgata

SEQ ID NO: 159925 - DNA, 230 bp, Glycine max
ggagtctatgacagtagatcgtgtgaataggcttcccaacattaacccaaaggtagagacctttgcagaagcccgggattgtcttcttccaatgggaatcacttctgagaatgtagcacaacgttatggtgtgacaaggctagagcaagatcaggctgctcttgagtctcacaagcgagctgcagctgcaacagcagctggcaagttcaaagaagaaatccttccagttt

SEQ ID NO: 159926 - DNA, 233 bp, Glycine max
gtgccggcgcgcgctgaagtttgctaggttcatgagcaggttcgggaagagttaccgaagcgatgaagagatgagggagaggtacgagatattctcgcaaaacctcaggttcatccgctcccacaacaagaaccgcttgccctacactctctctgttaatcattttgctgattggacttgggaggagttcaaaagacacagactaggcgctgcccaaaattgctctgccactc

SEQ ID NO: 159927 - DNA, 236 bp, Glycine max
cttttccaaggtcgtccatttgatatgcttgatgctgctttatacagatacagttgccaaattccctgttgatatccagccatttaaagatatgatagatggaatgagactggatcttaagaagccaagatacaaaaactttgatgaactatatctttactgttactatgttgctgggacagttggtataatgagtgttccaatcatgggcatttcaccaaattcccaagccacaa

SEQ ID NO: 159928 - DNA, 255 bp, Glycine max
ctcttggcatggggggaatcccctgggttataatgtctgagatatttcccattaatgtgaagggctctgctggaagtcttgtgactttggttagctggttgtgttcttggattgtatcatatgcttttaacttcctcatgagttggagttccgcgggaacctttttcatattctctagcatatgtggcttcaccattctattcgtggcaaaactagtaccagagacgaaggggcgaactctagaagaagttcaag

SEQ ID NO: 159929 - DNA, 259 bp, Glycine max
ggagagaacaagcacagcctcttagaaaagcttcaccgatctgacagcagctctagctcttcaagtgaggaggaaggagaagatggagagaaaaggaagaagaagaagaaggaaaagaaagggctgaaagagaagatcgaggagaaaatagagggtgatcatcatcatcacaaggatgaggacacaagtgtccctgttgagaaagttgaggttgttgaaacagcacatgctgaggaaaagaaggggttcctcgacaaga

SEQ ID NO: 159930 - DNA, 255 bp, Glycine max
cagaaagcaagctcatcctagagttttaaaaatggcagcagcctcctccatggctctctcttccccatccttggctggcaaggccgtgaagctgggcccatcagcccccgaagtcgggagggtcagcatgaggaagaccgtcaccaagcaggcctcctccggatgcccatggtacggcccagaccgcgtcaagtacttgggcccattctctggcgagcccccgtcctacctcactggcgagttcccaggtgacta

SEQ ID NO: 159931 - DNA, 283 bp, Glycine max
cgtaagctcggccaaaaataacaaagcagaatcatcaacctatcgtgcagatgaagacggatttcaactgccaagagtcgtatacatggcacgcgaaaaacgacacaactaccctcaccacttcaaagtcggagcggttaatgcattgatacgagtgtcttccgagataagcaacgcccctttcattctcaacttggattgtgatatgtactccaataatgcaaatacaattcaagaagtattatgcttcttcttggatgaaacaaaaggccacgatatagct

SEQ ID NO: 159932 - DNA, 255 bp, Glycine max
ggaagatgttaacgttggagcaaacaagttctcagaaaggcaaccaattggtacagcagctcagggtggtggtgacaaggactacaaggaggcacccccagctcctttgtttgaacctggtgagctcaaatcatggtccttctacagagctggaattgctgagtttgtggcaactttcttgttcctctacattaccatcttaactgtcatgggtgtcaacaggtcaccctccaagtgtgcctctgttggcattca

SEQ ID NO: 159933 - DNA, 253 bp, Glycine max
caaagctcgactgttgcaatttgtgacaggcacatccaaggtgcctttggaaggctttagcgctcttcaaggaatttcaggctcccagaagtttcagatacacaaagcatatggaagtcctgatcacttgccttctgctcatacttgcttcaatcaattagatttgccggagtatccatctaaacaccatttagaagagaggttactgctggcaattcacgaagcaagtgagggttttggctttggttgagaa

SEQ ID NO: 159934 - DNA, 253 bp, Glycine max
ctcccaagtgtgctcaccacaacaatcatcatgaaggtttcatgaatttcattcacagggatgaggaggttaattacttcccttcaaggtatgatcctgttcgtcatgcagaaacgttccccatacctcctgctatctgcagtggaaggcgtgaaaagtgtggaattgagaaggagaacaactttaagcagcccggagagagataccgatcttgggcacctgacaggcaagatagatttaatcgccgatgggt

SEQ ID NO: 159935 - DNA, 255 bp, Glycine max
cttcaactctgcttcccctggcaaccttcttcttagttctctaccgcttcttatctccagattgctggggcgaaagcacaaccgttgactagtctcaagcttaactctccgatccttcaggagtctattgctaaagagatcaatgaaaatcctgaggcaggatgggaggctgctataaatcctcatttctccaattatacagttgaacaatttaagcgccttcttggagtcaaaccaacgcctaagaaggaactg

SEQ ID NO: 159936 - DNA, 252 bp, Glycine max
gtaagctcccaagcagtgggaggaggctcgggactctgaccgcgtgcctgttgaagaatgagccggcgactcataggcagtggcttggttaagggaaaccaccggagccgtagcgaaagcgtgtcttcacagggcaattgtcactgcttatggacccgaacctgggtgatctatccatgaccaggatgaagcttgggtgaaactaagtggaggtccgaaccgactgatgttgaagattcagcggatgagttg

SEQ ID NO: 159937 - DNA, 256 bp, Glycine max
agttgctaaagctggtgcactcgtctcttacaaactgggcactggtttggttgttgctcgaagctcagatggatcatggtctgcaccgtcagcaatattctccctgggtttaggatggggtgctcagattggtggtgaacttatggattttatagttgttcttcgtgatatgaaagctgtaaagacattctgcagtcatatgcatttttctcttggtgctggttgtagtgctgcagcagggcctgttgggagagtg

SEQ ID NO: 159938 - DNA, 256 bp, Glycine max
cgctcgagcgaatcggctcatcacattctctttctctcttcaacatcttcccctctcactcttcctttgccttgtctccgtgtgaaagatcacaactccaccgtcaccgatttccaaggttgagttatttgctggtctaacttaaccatactgtctattttgactcctgagattgctagtgagtcatggggcatagacatttatatagctcatctccaatgtttgagggtgaacctgaccagaactggaatcatat

SEQ ID NO: 159939 - DNA, 255 bp, Glycine max
gaaaaagctactgatttttcttctcatcgaggttgttttctttgctgccgttgctcttataacaatgctggcattgcatggcactcgccaaaggtcgttagtggttggtgttctctctgatatcttcaatgttatgatgtatgtctcccctcttacaattatggcaaaggttataaaaactaagagtgtgaaatacatgccattctggctctctctggctaacttccttaatggtgcgtgttggacaacatatgc

SEQ ID NO: 159940 - DNA, 253 bp, Glycine max
aaattctacaacaatgtcatcgttgagatcctagcaaatggtttaaaaccttttgtcactctttttcattgggactttccacaagctcttgaagatgagtatggaggattccgtagtcctaaagtagtggcggattttcgtggctacgcaaacttctgcttcaagacctttggagacagagtcaaatattgggtcactttgaatgaacccttatcatttagtctcaatggctacaatggtggcacctttgcac

SEQ ID NO: 159941 - DNA, 252 bp, Glycine max
gaaaaaaagaaaaagaagatcaaggaagtgtcacatgaatggtccttggtgaacaagcagaagcctatttggatgaggaagcctgaggagatcacaaaagaggagtattctgctttctacaagagtcttaccaatgactgggaagagcatttggctgtcaagcacttctctgttgagggtcagttggagtttaaggctatactctttgttcccaagagggcaccttttgacctctttgacacaaggaagaag

SEQ ID NO: 159942 - DNA, 251 bp, Glycine max
ataataatgggttcacaaaattgtatggataggaagcactatgttctggtgcatggggcatgccatggagcttggtgttggtataagctcaagccacgcttggaatctgcaggccataaggtcacagtacttgaccttgcagcttctggaaccaacatgaagaaaattgaagatgttgatactttctcagagtattctgcgcctttgttgcagctaatggccacaattccctcaaatgagaagttagttct

SEQ ID NO: 159943 - DNA, 259 bp, Glycine max
ttcggctcgaggaagaggtcctcttccaatttgaagctagcgaggatagacaagtccagttctttccaaatgctccagttgatgttgacaattcttccagctttgttgccatcaatgtcagtcctattgagtatgggcatgttttgctgattccgcgcattttcgagtgtttgcctcaaaggattgaccgtgagagcttcctccttgcacttcacatggcagtggaagctgataatccatattttcgattgggttacaa

SEQ ID NO: 159944 - DNA, 251 bp, Glycine max
gctctatcttcccaaaatcatataattctctttcatctgaattttccctttcaaatctcttcctttgaagttttcgtagttctctgcatcatggagatggaacgcgtcttcgagtttcctcacactcacatggatcggcgcccgagaaagagagcgagattgggctgggacatccctgaggtccccaaggctcaggtaggattgttttgtggacaagatgttgggactatttcaagctttgctccttcaag

SEQ ID NO: 159945 - DNA, 260 bp, Glycine max
attgacctcgggcggtttaggcgcttatagtgactcccgcggccttccaggagtgaggaaggaagtggctgagttcatactcaggcgtgatggttatccaactgatccagaactcatatatctcactgatggtgccagcaagggggtgatgcagatattaaatactatcatcagaggtcaagacgatgggattttggttccagtcccacaatacccactctactcagcaacaattgctctgcttggtggtacccttgttc

SEQ ID NO: 159946 - DNA, 257 bp, Glycine max
ctttctctcttctctctccacccaaaccctaactcccgaccctgttcccctctcgtatccgtcatgaaaggaggaaagtccaagaccgaatctaagagagccgatcccaaacttgctgtgaataagaagggagccgccaccaaggctaggaaacccgccggcaaggggaaggcagcgaaagaccctaacaagccaaagaggcctccaagtgctttcttcgttttcatggaggagttcaggaaggtattcaacaaaga

SEQ ID NO: 159947 - DNA, 251 bp, Glycine max
gcattagcaaaagcaagaagaactagtctaagcagaaatggcctcttcagtgatggcatctgtggccctcaaacctgcccctttcactgttgagaagtcctcagttagaggccttccctccctctcaaggaactcctcttcattcagagttgtggccagtggtggcaagaagatcaagactgacaagccttatggaattaatggtggcatggctttgagggaaggagttgatgcatctggcaggaaaggaa

SEQ ID NO: 159948 - DNA, 254 bp, Glycine max
gttccagtttccaaagaaccagcaggagaaaataccaagatggaaactgatgaagctcctgccaatgttgctgcacctcctagcaccaatgacaatgatgttaacatgcaagatgctaattccaaggcaactgctgatgcccctgggtccgaaaatgggacccctgaggcaggagataagcctgtgcaaatggatactgataccaaggttgaggctccaaagaaaaaagttaagaaaataaacattcctgtggt

SEQ ID NO: 159949 - DNA, 257 bp, Glycine max
ccagtagccgagattccgtgagttgcaaaaatgaagacgattctttccaccgagaccatgaacatcccggacggcgtgagcatcaaagttcatgccaaggtcatcgaagttgagggcccccgcggaaaattggtgcgagacttcaagcatttgaatctcgattttcagctcattactgacgaaaacggtaaaagaaagctgaaaatcgacgcgtggtttggttctcggaaaacatccgccgccattcgcaccgcctt

SEQ ID NO: 159950 - DNA, 263 bp, Glycine max
gttggaaagctcacaggcttggcactcgatgtcgtgtcagggattacacacattctccagtccttggacttggaccttgctctcaagcccgcctctcgtcgccttcttgacgttgatgatgatggcttccccacttgggtctcctctgctgatcgcaagctcttggccaacgatcctgttttgccccatgctactgttggcaaggatggtagtggtcaatttcatactgttttggacgctattaactcctaccccaagcatca

SEQ ID NO: 159951 - DNA, 260 bp, Glycine max
gtgagtttgttgatcgagataactagaaacagtgtgatgaaaatgaaggtccttgttttcttcgttgctacaattttggtagcatggcaatgccatgcgtacgatatgttccctctccgaatgaacactggctatggtgcccgtactccggaggtgaaatgcgcaagttggaggcttgctgtggaagcacacaacatctttggctttgagaccattcctgaagagtgcgttgaagcaacaaaggaatacatccatggcga

SEQ ID NO: 159952 - DNA, 259 bp, Glycine max
ttccgtctgccttcttggatgctataatggatgatgttctcaactctgcagatgccattacctgcatcccccagtgtttggatgccttatgcttaaatagtaatggcctgcaggctgtgaaagatagaaactctctgaggtgttttgtgaaagtgtttacttctagaacatatttgcgtgctcttgcaggggacacacctgcatctttgtctagtggactggatgaattaatgcgccatgcttcctcattgcgtggccc

SEQ ID NO: 159953 - DNA, 257 bp, Glycine max
ctcccgagtatgtaaaagctggtcaactcaccttgaaatcagacgtatacagtttcggagttgtcttgctagagctcataactggacgaagagccattgacacctcaaagccaaacgaagagcagaatcttgtttcatgggcaacacccttgttcagggaccccaagagatatcctgaaatggcagatccacttcttaataagaacttcccagaaaaagatctgtctcaagttgttgcaatagcatccatgtgctta

SEQ ID NO: 159954 - DNA, 247 bp, Glycine max
gaagaggtcctcttccaatttgaagctagcgaggatggacaagtccagttctttccaaatgctccagttgatgttgacaattctcccagctttgttgccatcaatgtcagtcctattgagtatgggcatgttttgctgattccgcgcattttcgagtgtttgcctcaaaggattgaccgtgagagcttcctccttgcacttcacatggcagtggaagctgataatccatattttcgattgggttaca

SEQ ID NO: 159955 - DNA, 251 bp, Glycine max
ctgtaaccatggcatccaccactctatcccctacaaccccttctcagctatgctcaggaaagagtgggattttcagtccctcacaggcacttcttgtgaagccagtgaagaggcagatgatggggaagagcaagggaatgagaattgcatgccaagccaccagcattcctgctgatagagtccctgacatgggcaaaagacagctcatgaatctgcttcttcttggtgccatttcactcccctctgctgga

SEQ ID NO: 159956 - DNA, 253 bp, Glycine max
ctcaatcatccatagacatggccaccgtcacttctgcagcagtttctattccctcattcactggcctcaaggcaagcgcaggcaaagtgagtgccgccgcagttaaagtctcagctccccaagccacaaggttctgcggcatcaaggcttccctcaaagacgttggagtcgctgttgtggccactgctgcgagcgcagttctagctagcaacgccatggccattgaagtgttactgggcactgatgacgggtc

SEQ ID NO: 159957 - DNA, 255 bp, Glycine max
gttgttttcaagtcaactcaatggcacttccctcaggtttagtttccatgttgatagtactttttggtatggttttggtagttggggttgaggcaaaggcaagggctttctttgtatttggagactcactggttgacagtggtaacaacaattacttagcgaccactgcacgggctgattcccctccttatggcactcactatccaactcgtagaccaaccggtcgtttctccaatggcctcaacattcccgatc

SEQ ID NO: 159958 - DNA, 257 bp, Glycine max
acttttcctgtgaggaaaagaatgttcggtcgtgcttggcccctacgagctctcatgagagatggaattgtaccaacttggccacaactgatgaatagtaaatctgctccaccatgcacggacgatgaggttgcaaattcatggttaaacaatgaagcagtcaggacagcaattcatactgcacagaaaagtgtggtcagtagttgggatttatgcactgacagaatttacttcgatcatgatgcttggagcatgat

SEQ ID NO: 159959 - DNA, 261 bp, Glycine max
attatcctaagtctttgggaatagtgctgcaatggcttcaagtcaggaggaggtgacccttttgggagctactggaagcccatttgtgtgcagggttcatattgccctcaagttgaagggagttcaatacaaatatgtcgaagaaaatttgaggaacaagagtgaactgcttctcaaatccaacccagttcacaagacggttccagtgtgtattcacaatgagaagcccatagcagagtctcttgtgacagttgaatacat

SEQ ID NO: 159960 - DNA, 262 bp, Glycine max
gttgaaagtcattaactatgggaatgatagaggaggttgaaaacgaaaacggagacctaaacgacgccgttcttgttccaccccctaacttctccatggtcgaggactgcattttccgatccggcctccccaacccttccaatttcccctttctccaaaccctaaaccttcgttccatcatatacctgtgccctgagccttatccggaagaaaatctggacttccttcgttcgcagaatattcgcctttttcaatttggaat

SEQ ID NO: 159961 - DNA, 258 bp, Glycine max
gggagagttcagttccagcaggaggtggaagtgctgagttgcataaggcatccaaacatggttcttctgctgggtgcgtgtccagagtatatgtgtctggtgtacgagtacatggccaatggaagcttggacgactgtctgttcccaagaggaaaatcacggccacctctcccatggcagctgaggttccaaatcgctgcagagatagccacaggtctccttttccttcatcagactaaaccggagccactggtccac

SEQ ID NO: 159962 - DNA, 256 bp, Glycine max
atcagagctgattttcgcggctgttaccggtcaccggagattctatcctaaatcgttttccgatgacgataaaaactgttaaagtcagtaacgtttccttgggagcaactgagcaagacattaaggagttcttttcattttctggtgatattgcatatgttgaactacggagccatgatgaacgatctcaaatagcttatattaccttcaaggattcacagggagctgagactgcactactgctttcaggggcaac

SEQ ID NO: 159963 - DNA, 220 bp, Glycine max
gccaagtgaaagtgagataaaataaaaatcaaagagcataatgtcagggatcattcacaagattggggagacccttcatgtgggagggcacaagaaggaggaggagcataagggtgagcaccatgctggagaatacaaaggggagcaccatggtgaacaccgttttgagttcaaaggctatcattatggttcccacagagctggaaagtaccattgtgag

SEQ ID NO: 159964 - DNA, 261 bp, Glycine max
tggatgttggtcttgggtttgcatcattagattctgatactgctggtgcttattttagctggctgctaaaatacccatcagcacttacatcttttgatcaaatcacaaactatgcaaaagggaaaagaattgcgttgtttatggattatgatggaactctttcaccgattgtggatacatcctgactgtgctttcatgtccgacaatatgcgtgctgctgttaagaaggtggcagaatattttccaacggcaataattagt

SEQ ID NO: 159965 - DNA, 184 bp, Glycine max
cagactcttcagttcaaaacgacaagaagctgtggccgtttaagatcgtggctggccctggcgacaagcccatgatcgtggtaaattacaaaggcgaggagaagagattctccgtcgaagagatatctgccatggtgttgggcacgatgtggaaagtcgcaaaggcgattctatgggacgccgt

SEQ ID NO: 159966 - DNA, 253 bp, Glycine max
ctttgttcactcttcttctcatgcggctagggtattagcgcacgtcttctagatttaaggaagatgggtaaggaaaaggttcacatcagtattgtggtcattggccatgtcgactctgggaaatccactaccactggtcacctgatttacaagcttggaggcattgacaagcgtgttattgagaggtttgagaaggaagctgctgagatgaacaagaggtctttcaagtatgcctgggtgctggacaaactta

SEQ ID NO: 159967 - DNA, 258 bp, Glycine max
ctaattctatataagcaaccttctccagcaattcttctaccacatcaactcatcaagggttgtgaaagcagagaagtgagatacactaagttatcctcataaatacactctaattaggtggcaagataagtgtctaaccttagtaacattgccacatattgtgttcattttggaattgtgccactaaaattctattcaattcatccatggctgcctcttcttatgctatgcaatcaatcctggcaaaccctttgatcc

SEQ ID NO: 159968 - DNA, 253 bp, Glycine max
agagaacattcttgtggggtaggtactctttggaaatgtctgctgttatttacaaggattgggcttacaccgatcaagcattgcctaatgatcttgtcaagagaggagttgctgttaaggatccatctgctccccatggagttcgacttttgatcgaggactatccttatgcttctgatgggctagagatatgggatgctatcaagtcttgggtggaagaatatgtctcattctactacaagtcagatgagga

SEQ ID NO: 159969 - DNA, 254 bp, Glycine max
agatgactacccttatgctgttgatggactagagatatggagtgctatccagacatgggtcaacgtctacgtctccttgtactatgccacggatgatgcagttaagaaagactcagatctccaatcttggtggaaggaagctgttgagtacggtcacggtgacttgtaaagacaagccatggtggcctaagttgaactctctctcaagatctgattcacatttgctgcattattatatggactgcttcagcact

SEQ ID NO: 159970 - DNA, 265 bp, Glycine max
tcggacttcggcttcggctcgagctccggcgtcgatctcagagtccggccactcctctcgccggcgatcccttatacctccgtcctccgttcgagtcctttccgattcgattcgttcccagccttctgcgaccacgaatcccgtctacgtttacatgttcatagctatgctgcttggagattctggtgtaggcaagtcatgtcttctcctgaggtttgctgatgattcataccttgacagctatatcagtaccattggagtggac

SEQ ID NO: 159971 - DNA, 241 bp, Glycine max
cacaaacccgtccctcacactctccaaaccctagcggcactacacactagttctatcgctatctccccaagatgtcgagcgccgatcccgagcacagagaagaggaggaggcacccgccgttggcgacgacgaggacaccggagctcacgtcgctccaatcgtcaagctcgatgaggttgctgtcaccaccggcgaggaggacgacgatgcaatcctggatctcaaatcgacgctttaccg

SEQ ID NO: 159972 - DNA, 255 bp, Glycine max
ccggttatggaatgttcatactggaatatgcattttaatatttgtcggagctggaggacatcgtaatgaagttttaagtgttgattttcacccatcagatatatatcgtattgctagttgtggcatggataatactgtaaaaatatggtctatgaaggagttctggacatatgtagaaagatcatttacatggactgatcttccctctaagtttcccacaaaatatgttcagtttcctgttatacaatgcttcag

SEQ ID NO: 159973 - DNA, 255 bp, Glycine max
ggttcaagctgctcgtgatgaaatgcaatggggtgaggagggcccacctccattgctggtaaaaatagctccagatttgtcagaagaagaccttgaagatattgctgcagtcgccttggctcttcacttggatggactgattatatcgaacacacccatttcaagaccagatcctaccagttggaatccattggcttcagaaactggttgcttgagtcggaagcctctcttcaatctcgccaccaacatcttgca

SEQ ID NO: 159974 - DNA, 257 bp, Glycine max
tcgagctctgcgagatcttcattcgccgattttaaaagatgagtaagcttctgagtgatgctttgcgtgaagccatttcaggaatcatggccgattccaaggagaagaatcgcaaatttgtggagaccatcgaactccaaatcgggttgaaaaactacgatccacagaaggacaagcgtttcagtggctctgtcaagctgccccacatccctcgccccaagatgaaaatttgcatgcttggtgatgctcagcatgtt

SEQ ID NO: 159975 - DNA, 271 bp, Glycine max
aattctgctcgatggatgttagacttgggtttgcatcatctaattctgatactgctggtgcttatgctacctggctgctagaatacccatcagcacttacatctcttgatcatatcacaaactatacaagagggaaaagaattgcgtgctttatggattatgatggaactctttcaccgattgtggataatcctgactgtgctttcatgtccgacaatatgcgtgctgctgttaagaaggtggcacaatattttccaacggcaataattag

SEQ ID NO: 159976 - DNA, 248 bp, Glycine max
cggcacagaggggaagaagaagatggtgtccttgaagcttcagaagcgactcgccgctagcgtacaaaagtgcggcaagggcatcgtctggcttgatccaaatgaagtcaatgaaatctccatggccaattctcgacaaaacataaggaagttggttaaggatgggtttattatcaggaagccgactaagattcactctcgctcccgtgctcgtcgaatgaaggaggccaagagaaaggggcgtcact

SEQ ID NO: 159977 - DNA, 227 bp, Glycine max
cacttgtccccggcgagaaaatcgacataatgctgtagatgcatagcagcttgtctggcaccctcatcaaagccaagatcttggtcgtgatctgcggtgagcagaggatcttctacaccgaaaagatatattccatactccggagtcacaatgagaggagtggcatatgtcgttctcggacacgccgtgaagaacgctggtgtaactgtccctgcgtagctcaacga

SEQ ID NO: 159978 - DNA, 254 bp, Glycine max
ctcaaatactcaactcattagcccttatcttgcccttattcctcttcatgattctgatcctaaaactagggagaaaactcaagagaactgaattgtctctaaacataccccgaggaccatggaaactgcctattataggaaatttacaccagcttgttacatcgacaccacaccgaaaattaagagacctggccaaaatatacggacccatgatgcaattgcaaattggggagatcttcacaatcgttgtttcc

SEQ ID NO: 159979 - DNA, 254 bp, Glycine max
aaaggttgggaggttgatctagatgctgttgaagctcttgctgatcagaacactgttgctttggtgattataaatcctgggaatccttgtgggaatgtgtacagttaccatcatttggagaagattgctgaaactgcaaaacgggttggaacaattgtgattgctgatgaagtttatggccatcttgcatttgcgggcacgacttttgtgccaatgggagtttttggctctattgttcctgttctgactcttgg

SEQ ID NO: 159980 - DNA, 246 bp, Glycine max
gtaaatcaaacgaattcgttgattccatatcgattcgcatttgcgtacacccctgaccccttgatttctctcagttccgttctgcatcatagagtatgtccagccactatcttcgattcttcgagttgaacacaggcgctaagataccttccgttggtttgggaacgtggctcgctgaacctggcgttgttgctcgcgccttggccactgcaataaacgttggatatcggcatatagattgtgcgc

SEQ ID NO: 159981 - DNA, 249 bp, Glycine max
gcgtttcggaagcagacacagatggctcgtacgaagcaaaccgctcgtaagtccacaggaggaaaggctcctaggaagcagcttgcaaccaaggctgcacgtaagtctgcaccaactactggtggtgtgaagaagccccaccgttatcgtcctggtaccgttgctcttcgtgagattaggaaataccagaagagtaccgagcttttgatccggaagctccccttccagaggctggttcgtgaaattgct

SEQ ID NO: 159982 - DNA, 248 bp, Glycine max
caaccatatctatctattgagaaacatgatgaaggtttcacccttggcattttccattctctttttggccttcaccatagaacatattattggcattgctgcagcagcaccagaagcagtgcttgacacctcaggccagaagctgagaacaggtgtcaagtactacattctgccagtgttcagaggcaaaggtggaggcctaacagtttcaagcagtggcaacaacacatgccccctctttgtggtgc

SEQ ID NO: 159983 - DNA, 281 bp, Glycine max
gtgagaagccgagcgattttgtttaccttccaagagatgaagcatttggtcacttgaagtcatcagattttctcgcttttggaatcaaatctgtatcccaagatgtcttgcctgtcttgactgatgcattcgatggaaatattttgagccttgagtttgataattttgctgaagtgcgcaaactctatgaaggtggagttacactacctacaaactttcttagcaagatcgcccctataccagtgatcaaggaaatttttcgaactgatggcgaacagttc

SEQ ID NO: 159984 - DNA, 273 bp, Glycine max
tggccacctctgctattcagcaatcagcattcgcaggtcaaactgctctgaagcagctcaatgagttggtccgcaagaccggtggcgccggcaaaggtcgcaccaacatgcgccgtaccgtcaagagtgctcctcagagcatttggtatggccctgatcgtcccaagtacctgggtccattctcagagcagattccgtcatacctgaccggagaattccccggtgactacggatgggacactgctggactatcagctgacccggaaaccttcg

SEQ ID NO: 159985 - DNA, 271 bp, Glycine max
gtttggggtaggaataatatcttacacggtgcctgtgtacatagctgagatatcacctccaaacttgagggggggtttggtttcagttaaccagctctctgtcaccattggaattatgctggcatatctgctggggatttttgttgaatggagaatccttgcaattataggaattttaccctgtacaatattgatacctggcctatttttcattcccgagtcccctagatggctggcaaaaatgggaatgacagaagaatttgaaacttcc

SEQ ID NO: 159986 - DNA, 268 bp, Glycine max
ctcttcaggtcaccatcttgactgcaatcatggctgatggaccacagcatccatcagttgttcagaagctagctggacagtcttacctggtgtccaggcttagccccaactttttctctaggaattattctgcaactggttcttacctcaatggcggaatgcactcgcctgggttggctgttgtgtcacctgtatctccagttactgtgcatgctccagcagagaaaggagtgcgtggatttctagtggattttctgatgggtggagt

SEQ ID NO: 159987 - DNA, 261 bp, Glycine max
  unsure (1)..(261): unsure at all n locations
cttcgtctcaaacctcttcgttccttcgattcattccatttcttccaaaatggccaaagacccagttcgcgttctcgtcactggagccgcagggcaaattggatatgctcttgtccctatgattgctaggggagtgatgctgggtcctgaccagcccgtgatcctccacatgcttgacattcctccagcagtagagttctagantggggttaaaatggaattggtggatgctgcattccctcttcttaaaggtgttgttgc

SEQ ID NO: 159988 - DNA, 263 bp, Glycine max
aggcgttcgggttctactacaaaaagacaccactgaagcgaagaaaggggcgtacggttctgttgtggttggagatccgaattttgattatcgaatcgcaaaattctgaatcaatcaatcaatcaatcagtaatcagagccatcaacgactgcaatggtctgcgagaagtgtgagaagaaattatcgaaggtgatagtaccagacaagtggaaagaaggggccagcaatactaccgagggtggtggccgcaagatcaacgaga

SEQ ID NO: 159989 - DNA, 264 bp, Glycine max
ctcaagccctccgcctccgtcgcactccaccgccactccaacgcgctcgtcgacgttcttccgccggagccgactccagcatctcgctcctcagccagtccgagaagcctgacgtcacttataatgacattggaggatgtgatatacagaaacaggaaatccgtgaggctgtggagctaccccttacacatcatgaactatacaaacaaattggtattgatcctccccgtggtgttttactgtatggaccccctggcactggca

SEQ ID NO: 159990 - DNA, 266 bp, Glycine max
  unsure (1)..(266): unsure at all n locations
attcaaaagtttttgaaatgttgtcaccccttcttctatttctatgcctaactcttcctttgtttttgttgtccttcttcaaataccgtaaaaccttcaagaatccaccacttccaccaggtcctagagtccatcncataatagggaatcttcatcaactagatagtccttctcttcatgagcagctatggcatctctcaaagaaatatggtcctttattttcacttcaatttggattaaggccagccatagttgtttcctctcca

SEQ ID NO: 159991 - DNA, 270 bp, Glycine max
caaccctcgttgttccgtgttcaggtgaaacgacaccgttttacccttcctcttctcggcacagcatctagcaggttgtagaaaatatggccaagcatcatcctgatttgattatgtgccggaagcagccagggattgccattggacgactgtgcgagaaatgtgacggcaagtgtgtgatctgtgactcttatgtgcgtccttgtacgcttgtccgagtttgtgatgaatgcaactatggatcatttcagggtcgatgtgtcatatgcg

SEQ ID NO: 159992 - DNA, 260 bp, Glycine max
agaatatgtatgctcagttgttgcctcttgctttgcccgcaccaccaatgcctggaatgggaggaggctttgcgcctccccctccaatgggtgcattggggatgcctccaatgcctccttttggaatgccacccatgggcagctactgacatataagttctcggcaatgaactcaagtgtataccgagagcagcgtagcaacttgggagttttcaaacattttcttctggggttttaatgcagtattctttccttgcttc

SEQ ID NO: 159993 - DNA, 264 bp, Glycine max
aaaaaaatgggttcttctctgtggacctgtctgattttgttatcacttgcttctgcttccttcgccgccaacacaagagaaacaattgatgtgccatttggcagaaactatgtgcctacctgggcctttgatcacatcaaatacctcaatggtggttctgagattcagcttcatcttgataaatacacaggtactggcttccaatcaaaagggtcctacttgtttggtcacttcagcatgtacataaaattggttgctggtgat

SEQ ID NO: 159994 - DNA, 267 bp, Glycine max
  unsure (1)..(267): unsure at all n locations
ctgcttttgtctcctgcctcccacatttcaccaccccctttatccntatctcctnctcttcattgttctgctcttccccttaacaaacaataactctatttaaagcacacacaaagggatcatatatcttggttgcaccttggtaaggtgagaaaatatggcatttgcaggaacaactcagaagtgcatggcttgtgacaaaacagtttatctggttgataagtcgaccgcagataaccgagtgtaccataaggcttgcttcagatg

SEQ ID NO: 159995 - DNA, 263 bp, Glycine max
ggaacttactcatcttgaagtgaatggatgccacaatattggaactttggggctagaatctgttggaaaatcctgccaacatctctctgagttagcattgctttactgccaaagaattggtgatgctggtcttgtccaggttggacagggatgcaaattcttgcaagcacttcaattggtagattgttcaagcattggagatgaagccatgtgtggcatagctagtggctgtaggaatctaaagaaacttcatattcgtcgct

SEQ ID NO: 159996 - DNA, 269 bp, Glycine max
gctcgtcactccttgctcttagccctcctcctcttcgccgccgtcccaaccgccgcgatggcggtggccgcgtccgacgccgacgacatcctgatccgtcaggtggtgccagatgttggcgaagcgacagaggaggacaacctgctgaacgccgagcaccacttcgcgaccttcaaggccaagttcgccaagacctacgccaccaaggaggagcacgatcatcgcttcagcgtcttcaagtccaacctccgcagagccaggctgcacgc

SEQ ID NO: 159997 - DNA, 267 bp, Glycine max
cccagtcataaatgttcacatatggtttgacagacaactgaagaacacatatgatcaccttctctttagcagaagtccccttctgagtgtatatgctgacatgtcagtaacttgcaaggaatattatagcccaaaccagtcaatgttagagttggtttttgcaccagccgaagaatggatttcacgtagtgacgatgatattattcaagccacgatgactgagcttgccaaactctttcctgatgaaatttctgcagaccaaagcaa

SEQ ID NO: 159998 - DNA, 266 bp, Glycine max
tggaaagcctctccattacaaaggtagctcattccatagaattattcctagatttatgcttcaaggaggtgattttacacaaggaaatggaatgggtggagaatcaatttacggagagaagtttgctgatgagaacttcaagttaaagcatactggaccaggacttctatcaatggcaaatgctggtcctaataccaatggttcacaatttttcattacaactgtgacaactagctggttggacggaaggcatgttgtttttggta

SEQ ID NO: 159999 - DNA, 262 bp, Glycine max
cttctctatctaaaatggagtttgttctaaattacctaaatgccactgccattggagttctttctataaccctcttctttttgtttttgtataatcccttcaaatttgcattaggtatcaaagaggctcccaaagttgcaggtgcatggccaatacttggtcacctaccactattgagtggttcagagacacctgatagggttttgggtgctttggctgataagtatggacccatattcaccatcaactatggtgtcaaaaa

SEQ ID NO: 160000 - DNA, 254 bp, Glycine max
gttgaaatgaaaatgggttcttctttgtggactttgtgtctaatttaggcttcactagcctcttctgcattctgtgcctttccacggaggccagtggaagttccattcggcagaaactacgttcccacttgggcttttgatcacatcaaatacatcagtggaggttctgagattcaacttcatcttgacaagtacactggtactggcttccagtccatagggtcatacttgtttggtcacttcagcatgaacat

SEQ ID NO: 160001 - DNA, 279 bp, Glycine max
  unsure (1)..(279): unsure at all n locations
tcggagttcggcacgaggcatctttaccatttcagtcctaaaaccctattcttcttcgctcattcatcagcactgccatcagccccaacctccccacaaggtcacaggccacanagaggtgtaccaccatgtcggacgatgaccgggaggagaaggagttggatctctcttctgcagaagttgtaaccaaatacaaaaccgcggctgcgatcgttaacaaggccttgaagctagttatttcagaatgtaaaccagaggcgaagattgtggatatttgtg

SEQ ID NO: 160002 - DNA, 264 bp, Glycine max
atactcactagtcactatagctcacccttgaagaagtgcaatttcatcctctaactcttccaaatcatggctagctcactgcttgtcatgaaggttacaagctgcatggttgcggtgttgatggttagttttggacacataattcccttggcagaagctgaaattccatgtggcagggtgcaaatcacagtggctccatgcatagggtacctaaggggtcctggtggaggtgtccctgcagcatgctgcaatggggttaggagc

SEQ ID NO: 160003 - DNA, 262 bp, Glycine max
gtttttatcagaagcttgtgatttagtttttgatgcagcaagtgagggaaaacaattcttaattgttggtacaaaaaaaaaagcagcggatttagtagcacgggctgcaataagagctcggtgtcattatgttaataaaaagtggctcggcggtatgttaacgaattggtatactacagaaacacgacttcaaaagttcagggacttgagaatgcaacaaaagacggggagactcaatagttttccaaaaagagatgccgct

SEQ ID NO: 160004 - DNA, 261 bp, Glycine max
tgccgattacaacatccaaaaggaatcaaccctccatctcgtgcttcgcctcaggggtggcatgcaaatctttgtcaagactttgaccgggaagaccatcacccttgaggtggaatcctcggacaccattgataatgttaaggccaagatccaggacaaagagggcatccccccagatcagcagaggctgatttttgccggtaaacaacttgaggatggaagaacccttgctgattacaacattcagaaggaatccaccct

SEQ ID NO: 160005 - DNA, 258 bp, Glycine max
caacttcaacctcaccaaaggaactaagaatttcattgaggctagagaaagtggtgatcaatatgtcaaagaatccaaaagttttctttgatattctaattggaaagatgaaagctggacgagtagtgatggagttgtttgccgatgcaaccccaaaaacagctgaaaacttcagggctctctgcactggggaaaaggggattggacgatctgggaaacctttacactacaaaggttctgtatttcatcgtattattc

SEQ ID NO: 160006 - DNA, 267 bp, Glycine max
gtttgttccatttcttgcttcttaatttcttgatcatgtcacttgctggtaaaatcagcattgaaattggggtgcatgcaagcgctgcaaagtggttcaacctctttgcaacgcaactccatcatgttcaaaaccttaccgaaagagtgcatgaaaccaagctacatcatggtgatgactggcatcacaacgaatcgatcaaacactggacttgtaccatagatggtaaggttacaacatatcacgagagtaacgaatccgttgatg

SEQ ID NO: 160007 - DNA, 265 bp, Glycine max
gattttaagtacagaagcattgatggtgatcttgttggtgttgttggagactcatgggtgttggaaaccaatgctattcctgtgacatggtattctaacaaaggtgtggacaaagagtcttatggcgagattgtctcggcgcttgttaaggatgttcgagcgctgaattcttcagcaataggaacaaattcatcttatttctatgggaagcaggttggaagggcggcgaggttggtgttgatagcggaagaagtgtcgtatccta

SEQ ID NO: 160008 - DNA, 261 bp, Glycine max
agaagaagaaaaaaaccacaaccaccaccatctagggtttttctttttctcatggctagtttgtcaactaggattttcttcatcatgtcccttgtgtgcctggctctcggtccaatggcacaaggggaaatgacatgtggccaggttgtgagcaacctgaccccatgcatctcctatgtggtgtatggtggaaccaatgttcctgaacagtgctgcaatgggataagaaatctctatggcatggctcagaccaaaccagac

SEQ ID NO: 160009 - DNA, 259 bp, Glycine max
accggcgctgccggcttcgtcggctcccacgtctccctctcgttaaaacgacgcggagacggcgtcgtcggactcgacaacttcaacgactactacgatccgtctctgaaaaaagcccgcaagtccctcctcgccaagcatgacgtcttcatcgtcgatggcgacctcaacgacgccaagctcttggcaaagctcttcgatgtggtcgctttcacccacgtgatgcacctcgcggcgcaggccggggttcgctacgcca

SEQ ID NO: 160010 - DNA, 232 bp, Glycine max
gcactcttagaaggcattactgatacacttggaaccgaactactcgaaagcttgttaaaaatggcaccaagcaaggaggaagaacgcaaattgaaggaacataaagatgattctccaaccaaacttggtcctgctgagaaatttttgaaggcagtgcttgatgtacctttcgcatttaaaagggtggaagcaatgctttacatagccaattttcactccgaagtggagtatc

SEQ ID NO: 160011 - DNA, 254 bp, Glycine max
atttaatcctatcctatcgtagcaaagaaagaaagaaagaaaaccctagcttaccttttcaactttcaagatgcaaatctttgttaagacactcactggtaagacaatcacccttgaggtggagagttcagataccatagataatgtaaagtccaagattcaagacaaggaagggatcccaccagaccagcaacgtctcatttttgctggcaagcagcttgaggatggacgtacacttgctgattacaacattc

SEQ ID NO: 160012 - DNA, 252 bp, Glycine max
gggcttactattgggcacatgatgagaagcttctcatcagtgatcacatctccaatggcaatttgactcatgcccttagagggagacatggccaaccatctacaaatcattcatggtccaccaggctgagaatcaccaaaggaacagcgaggggcctggcctatctccacgaatgcagtccaaaaaaattcgtccatggcgatatcaagccctccaacattcttcttgacaacgacttccaaacctacatat

SEQ ID NO: 160013 - DNA, 257 bp, Glycine max
cctcgagccgattcggctcgagcataaacccggcggtgacgttcggactgtttttggcgaggaaggtgtcgctgacaagagctgttgggtacatggtggctcaggtgttgggggccataagtggggtggggcttgtgaaggctttgcagaagagctactacaacaggtacaaaggtggcgtgaacatgctcgctgatggttacagcaaaggaaccggtttgggcgctgagattattggcacctttattcttgtctac

SEQ ID NO: 160014 - DNA, 256 bp, Glycine max
ctctcactcgctctttcagcttcgactttggtggaaactaaagactagtcaaaatggtgaagttcacagctgcagagctgcgtcgcattatggactataagcataatatccgtaatatgtctgtcattgctcatgttgatcacggataatcaaccctgactgattctcttgtggctgctgctggtatcattgctcaagaagttgcaggtgatgtccgtatgactgatacccgtgcagatgacgctgagcgtggtat

SEQ ID NO: 160015 - DNA, 258 bp, Glycine max
agaaagttcatccaatctccgaagcccttcaccgcattgcaaccatgtcgagaagaaaggttagagagccaaaggaagaaaacacgactctgggcccagctgttagagatggcgaacatgtctttggcgtcgctcgcatctttgcctccttcaatgataccttcattcatgtcactgatctgtccgggagggaaacacttgtccgcatcacaggtggaatgaaggttaaggctgacagagatgaatcgtctccctatg

SEQ ID NO: 160016 - DNA, 258 bp, Glycine max
ctcgtgcctctagggttatcatatctccatttccatttcctctctctcagtttccaagaatcttaagctatgggaaagtcttacccaaccgtgagcgctgattaccagaaggccgttgagaaggcgaagaagaagctcagaggcttcatcgctgagaagagatgcgctcctctaatgctccgtttggcatggcactctgctggaacttacgacgtgagctcgaagaccggtggtcccttcggaaccataaagcacccc

SEQ ID NO: 160017 - DNA, 251 bp, Glycine max
agaagacaaaccaatctcatatgaaaaagcaaagaaatactttgctcaagatccttcccaaaagtgggcagcatatgttgcaggggcagttttggtcttaatgactgaaatgggtgttcaatttgaagacagtatcagcatgctggtttcatctgcagtcccagaaggaaaaggcgtatcatcttctgcatctgtggaggttgctagtatgtatgctattgcagctgctcatggattaaatatcagcccaa

SEQ ID NO: 160018 - DNA, 251 bp, Glycine max
  unsure (1)..(251): unsure at all n locations
tttttgcaaaatcagttactatttagggtccgacttactgagatcagattctcttgttggtgacatgatgctgaaacaactgtngcatcaccaggatgccattctatgctgttcactgaagtcattgccagtgttcatatttgcaaatcaagctggccttgacatgttggaaacaaccctagttgccttacaagatatcacattggataaaatatttgatgaggctggacgcaaggcattgtgtacagact

SEQ ID NO: 160019 - DNA, 253 bp, Glycine max
gtgaaagaaaggcagcgatggaagaagacttcgacatccccggcggcgaggaaatggatctcggcgaagacgaggtcggcgaggagagggagatcggctctggcggcctcaagaagaagctcctcaaggaaggtcaaggctgggaaacccccgaagtcggtgacgaagtccaagttcattacacggggactttgctcgacgggactaagttcgattcgagccgcgacagggattctcccttcagcttcacgct

SEQ ID NO: 160020 - DNA, 255 bp, Glycine max
attgggaaggatctttctggagtttgtctccctgtttattttaacgaacctctgtcttcattgcaaaagtgttttgaagacctagagtattcatacctggttgatagagcattggagtggggaaagcaggggaatgacttgatgagaattctaaacattgcagcttttgctgtgtctagctatgcgtcaactgaaggtcgacaatgtaaaccttttaatcctttacttggggagacctacgaagctgactatcca

SEQ ID NO: 160021 - DNA, 266 bp, Glycine max
cgatgtggatgctgatgctggtcacagctgtgaactgggtggggtggtttccttacttccttttcgacactgactggatgggtcgtgaggtctacggtggaactgctggggaggacgcgtacggaagggagtgcgcgtgggatcgttagggctgatggtaaacgccgtcgtgttgggcttcatgtcgttggcggtggagccgttggggaagatggttgggggagtgaagaggctttgggcgattgtgaactttattctcgcgattg

SEQ ID NO: 160022 - DNA, 255 bp, Glycine max
gagtactcgaatgaagattgctgttggagctgctcgtggccttgaatatctccattgtaaagcagatccacctgatatatacagggacttgaaatctgcgaacatcttgttagataatgaattcaacccaaaactgtcagattttgggcttgctaaacttggacctgttggagacaatacccatgtttcaaccagagtgatgggaacatatggttactgtgcaccagagtatgccatgagcggcaaattaactct

SEQ ID NO: 160023 - DNA, 251 bp, Glycine max
ccggaggtgtaaatgtggttgccactcttgtttccatcttgactgtggacaaggttggaagaaaagttttattccttgaaggtggtgttcaaatgttgatttgccagattgctactggagtcatgattgctatgaagttcggggtgagtggcgaaggctcgttttcctccggagaagccaaccttattttgttctttatatgtgcatttgttgctgcatttgcatggtcttggggtccactagggtggttg

SEQ ID NO: 160024 - DNA, 255 bp, Glycine max
ggaaagttttggttagaataaaatggtaccctgtctgcaatgcttcttgggtgagtggcacagccccgtttggcacggattttgcacggaacagaatctgaaaactgcagaaacttctcaatggcagctatttcagctgaagtatttggcaaactcaactgatgggccaaaggagcatgagtctgtcctgtttcattctgatgaacaacaaaaattcatgtcaatgcgaggcacatccataaattctgggtcctc

SEQ ID NO: 160025 - DNA, 253 bp, Glycine max
aggaaatccaagttgggatgggaccagcaggtgagttgcgttacccttcgtacccagagcaaaatgggacatggaaattcccaggaattggtgctttccaatgctatgacaagtatatgttgagtagcttaaaagctgctgctgaagctcacggtaagcctgaatggggaagcacaggccctactgatgctggccactataacaactggccagaagacactcaatttttccgcaaagaaggtggtggatggga

SEQ ID NO: 160026 - DNA, 251 bp, Glycine max
attgcaacacaacttcctcaagctgttggagctgcttattcccttaaaatggatgggaaaagtgcatgtgcagtcactttttgtggggatggtgccaccagtgagggagattttcatgctgctatgaattttgcagcagtaatggaggcccctgttgtttttatctgtcgtaataatggatgggcaatcagtacacctgtggaagaccaatttcgaagtgatggtattgtagttaagggtaaagcttatgg

SEQ ID NO: 160027 - DNA, 258 bp, Glycine max
tggagactgagaaaacagaactatacaaaatggaagatacactttctgcgttgaggtctttgatgctttctcagtctccaccgcttgatgccttagttgttccttctgaagattatcaccggagcgaatatgtgtccgcacgagacaagcgccgcgaattcgtttccggcttcactggaagtgccggcttggcacttataacaaagaatgaagcactgctgtggacggatggacgatattttttgcaggctgagcaag

SEQ ID NO: 160028 - DNA, 249 bp, Glycine max
ggaacaagtgacaaacctttgcatcaatgcactattttcataccgtaaattttgtgctactgtatcctcatctggacaacttattcttccggaggcattaaagcttttgcccctgtacacacttgcattaactaagagtacagggttgcgaacagaaggaaagatagatgaacggtcattttggataaactatgtatcctctatctctgctccattagcaataccacttgtgtatcctaggatgatggc

SEQ ID NO: 160029 - DNA, 258 bp, Glycine max
ggtagctatttctacttcccatctcttggaatgcacaaagctgctggagcatttggtggcatcagaatttggagccggcctcaaattcctgtcccttttccttctcctgccggggacattaccatacttgctggagattggttcaagcttgaccaccgaagactgagacgactcctagagaatggtcataatctccccttccctgatggccttcttatcaatggacgtggttggaatggaaacaccttcactgttgat

SEQ ID NO: 160030 - DNA, 246 bp, Glycine max
gagataactagaaacagtgtgatgaaaatgaaggtccttgttttcttcgttgctacaattttggtagcatggcaatgccatgcgtacgatatgttccctctccgaatgaacactggctatggtgcccgtactccggaggtgaaatgcgcaagttggaggcttgctgtggaagcacacaacatctttggctttgagaccattcctgaagagtgcgttgaagcaacaaaggaatacatccatggcgaa

SEQ ID NO: 160031 - DNA, 253 bp, Glycine max
ggaaggcatagtacacaggacagttgaagtgaatggcataaaaatgcatgttgctgagaaaggtgaaggtcccgtggtcttgttcctccacggcttcccggagctctggtactcctggcgccaccagattctggctctcagcaatctcggctattgcgccgtggctccagatctccgcggctacggagacaccgaggcaccagcttcaatcagcagctacaccatcctccacttagtttctgacatcgtcgcg

SEQ ID NO: 160032 - DNA, 256 bp, Glycine max
ttgcaacctagcaatggaggcgattaggaagagtaggattcttatatttggaggaactggttacatagggaagtatatggtgaaggcaagcgtcacgttaggccatccaacttttgtctacactcgccctcttgatgcacaaactccttcctctaaggcacagctttgcaaggagttcaactctatgggggtcacacttgtccatggagaacttgagcatgaccagattctggcagtgattaaacaagtagacatt

SEQ ID NO: 160033 - DNA, 245 bp, Glycine max
gcaagaggttattcttggcaccaagctttccattctcatccctgctattccagctgccatcgttgccgagtgctttggctttggaagaccttggatttttatattaagcttacttggacttacaccacttgctgaacgtgtgagcttcattacagaacaagttgccttttacactggtcccacagttggaggacttctgaatgctacatgtgggaatgttactgagctcataatagcaatatttg

SEQ ID NO: 160034 - DNA, 246 bp, Glycine max
  unsure (1)..(246): unsure at all n locations
cttcggttagaccttgctggccgtgatttaacagagtacttggtgaaaatccttaccgagagaggatactccttcagcacctctgccgacaaggcaattgtccgtgctgtgaaggagaaattgggatacgtggcccttgatttcgagcaagacatggagactactaattgtagntctgcagtgganaagtctaangaanngnctgatggacaggtcattacaataggatctgagagattccgttgt

SEQ ID NO: 160035 - DNA, 244 bp, Glycine max
aaaatggccaaatcaatcaaattctttgagttgaacacaggggccaagattccttctcttgggttagggacttggcaagctgaacctggtgttgtagctgaagctctcaccacagccattcaggttggatacaggcatattgactgtgctagtgcgtataagaatcaagcagagattggttctgctcttaagaagctttttgatgatggtgtggtgaagcgtgaggacttatggatcacttcca

SEQ ID NO: 160036 - DNA, 248 bp, Glycine max
cacaactccactcttagctgccattggtttttcttcttccatttctcttcctttctaagcttttttcgattacccatttggagattctgtcctaatggctcttgctccttccaaagtttcctccttttccgggttttctcccaaacccagtgttggggatgctctgaaaaacccaacttgctctgtttctctgagctttgcgaatgtgaaacttggaagcagaaaccttagggtttgtgcctcaactg

SEQ ID NO: 160037 - DNA, 245 bp, Glycine max
gtcggagactacgggttcgatccgcgtgggctagggaagcccgcggagtacctgcagttcgagctggactcgctggaccagaaccttgcgaagaacgtggctggggacatcattggaaccaggaccgagctcgcggacgtgaagtccacgccgtttcagccctacagcgaggtgtttgggctccacaggttccgtgagtgcgaactcatccatggaaggtgggccatgctcgccactctcggagc

SEQ ID NO: 160038 - DNA, 258 bp, Glycine max
aaatgcccttgacaattcttctctaaactcggaagcaaaacaaaaagccatagctatgagtggtgaagcgcgatcctgtgactactgtggccactccacagcacttctttactgcagagccgattcagccaaactctgtttctcgtgcgatcgcgaggttcactccaccaaccagctcttctcgaaacacacgcgcacgctgctctgcgacgcatgcgatcattcccctgccaccatactctgttccaccgacacctc

SEQ ID NO: 160039 - DNA, 253 bp, Glycine max
gaacatctttgcttgctggtccaactcctgttgtggctgaaatcaaccatgctattggagctgaaggagttctcagtgtagaatgtaaggaagttgtttctcaatatggagagttgatatgggatctcttggtatcaggggtgaagcctgattacatatgttcacaagttggtttatgttcttccaaaaggcatgaatctaagagtgctggaattgaaatggtgactgaaaaggagcagggagagttgacggc

SEQ ID NO: 160040 - DNA, 221 bp, Glycine max
tggagaaatcaattgggatgaccagatcttgttcaatgggatcatattttatataggttatatgttagttccagagagttctcacattaacttgtggagaacagatggtgtacttatcactgctcttatacatgctggaccagtggagtttctttattactggttacatagggcacttcatcaccacttcctctattcccgctatcattctcatcaccatt

SEQ ID NO: 160041 - DNA, 245 bp, Glycine max
acaaagagttggtatcggattgtttcaagtgttgcaccgaagactccaacgatgccactaccaaggttacttactctggagctgtgttggaagtctgcatgaggaaacttgttttctatcctgaagttgtaagctttattgaagatgaaaaagatcaatttccatcagttaaagttcaatatgtttttaactctccaccaaagctaattatgctggatgatgcgggtcagcaaaaagaaacaatc

SEQ ID NO: 160042 - DNA, 247 bp, Glycine max
gccgttgtcaagaagtatgacattctttttattgcagatgaggtaatatgtgcctttggaaggcttgggataatgtttgactgtgacaagtacaacattaagccagaccttgtatccctggctaaggcactatcttctgcatatttgccaattggagctgtccttgtaagcccggaaatatcagaagttatacatgatcaaagcaacaaactaggttcattttctcatggttttacttattctggac

SEQ ID NO: 160043 - DNA, 266 bp, Glycine max
  unsure (1)..(266): unsure at all n locations
gggcgttcagtgttcaccacagtttacacacgagtacccattttctcttctcaatttctcagagtgtgcagagaaaatcatggtggacgcagcagaacgtaggtacttggaggatgacgattcatcactcatgaaaactattaagggggcaacaactggtttagttgctggcactatctgggggaccgtagttgccacctggtatgatgtccctcgtgtagagagaaattgttgctcttccacgggctnngagttaggactttcaa

SEQ ID NO: 160044 - DNA, 256 bp, Glycine max
gtggcactgcagaaatacttcaactttgagatattgcatgctcggtgggctatgcttgcatccgtcggtgctctgattcctgaaatattagacctattgggagcctttcactttgtagaaccagtgtggtggcgtgttggatattgcaaagctcaagggagatactctagattaccttggtatccaaggtcttcactttgctggaagtcagggagtggtcgtgattgctatttgccaagcactccttatggttgga

SEQ ID NO: 160045 - DNA, 250 bp, Glycine max; identical to SEQ ID NO: 135572

SEQ ID NO: 160046 - DNA, 239 bp, Glycine max
gagagcttcctttgatggattcttgcttgtattgcttgctggaggtccctcacgtgcttttacccggaaggactctcagatcatagaggatgatttcaaatttctcaaggagttgttttgggcaaatggggatggcttgccttctgaactaatagataaattttcaactactgcaaggtctatccttcccctcttcagaaccgacacagagaccctcattgagcagttcagacggttga

SEQ ID NO: 160047 - DNA, 251 bp, Glycine max
gggagaagggaaggtgagtagtaatggtcatggatgttgcaaatcagggccaggctatgcttccccactggcagccatttctggtcccagagagtctctcatttatgtaacctctgtctacacagggaccggaatagagaagccagactatttggcgacagtggatgtggatccaaactctccaacttattccaaagtcatccataggcttcctgttccttatttaggtgacgaattgcatcacacaggct

SEQ ID NO: 160048 - DNA, 263 bp, Glycine max
cgctattatccccagacgccaccgccgcagcaccagaagaagaagaagagtgatggctgagtacgacctaactccgcggatggcgccgaatctcgacaggcaccttgtgttccctctcctggagttcctgcaggagcggcagctctacgacgacgaccacatcctgaaggcgaagatcgaccttctcaacaacaccaacatggttgactacgctatggacatccacaagagcctctaccacaccgaggacgtcccgaacgata

SEQ ID NO: 160049 - DNA, 264 bp, Glycine max
  unsure (1)..(264): unsure at all n locations
gttcactcttcttctcttgcggctagggttttagcgcacntcttctagatttaaggaagatgggtaaggaaaaggttcacatcagtattgtggttattggccatgttgactctgggaagtccactaccactggccacgcgatctacaagcttggaggcattgacaagcgtgttattgagagatttgagaaggaagctgctgagatgaacaagaggtctttcaagtatgcctgggtgcttgataagcttaaggctgagcgtgaaa

SEQ ID NO: 160050 - DNA, 262 bp, Glycine max
attcaaagacattgttggaagtgcatattacattgctcctgaggtcttgaagaggaaatatgggccagaagttgacatatggagtgttggtgtcatgctatacattcttctaagtggtgtccctccgttttgggcagaatccgaacatggtatattcaatgccatcttaagaggtcacattgattttacaagcgatccatggccttcaatatccaatgcagcaaaggatcttgtaaggaaaatgttgactacagaccccaaa

SEQ ID NO: 160051 - DNA, 220 bp, Glycine max
acgctcgtcccaaatccaggtgcaacaggaataccacagttgtacacggcgacgaagatgagatttatcctccacaatcacggcggccagtgcggcaaccagatcgctacgacgaactgggacctcatctgcgatgatcacggcatcgaacacaccggacagtacagcggcgactccgaactccaatatcaacgcgtgaatgtctactacaacgaggcca

SEQ ID NO: 160052 - DNA, 260 bp, Glycine max
  unsure (1)..(260): unsure at all n locations
gaagggtctcgntgtgtctaatgataattacaccgcttctctggcgaggaaacagaacaaccttgaaggatcacgctaaggggaacgatgaatcgatggagtctctgatgaagtgtgatttttttgatggagagtgggttaaggatgatgcatatcctctctataagccagattcttgctctttgattgatgaacagttcaattgtattaggaatctaangcctgataaggattatcagaaatatatgtggaagccaaag

SEQ ID NO: 160053 - DNA, 286 bp, Glycine max
gcgtacgtttcctctcgatgcttgtaagaatttctggtattgtgatacgttgttcagatgttaaaccattgatgaaagtggctgtatacacatgcgaggattgtggatttgaaatttaccaggaagtaactgctcgggtcttcatgcccttgtttgaatgcccatcaaagcgctgtgatacaaacagaagaaaggggaatgttatccttcaactaagagcatcaaaatttttgagatttcaagaggccaaaattcaagaattagctgaacatgtccccaaaggcca

SEQ ID NO: 160054 - DNA, 266 bp, Glycine max
tcaaaatgtcctccatggcttcctccaccgctttcttcacacccctccatgatttcactcaagccagaacaaccccatcaccccctttgcctttcatcaaatcctcctttgcttcctccaagtcaaccttttttcaccctgccctttgcctacaaacctcttccaactttcccaggctttttggaaagcctaagtttttctctgttcatgcaagggctgccacagaaaaaaccatttatgattttactgtcaaggatattgacaga

SEQ ID NO: 160055 - DNA, 262 bp, Glycine max
tacaaattctctgtgttgtgttgtgtacttgtgttaattgtgttgttgttgtaggaaatttaagtgaagagagaatgatgatgaagtctgctatgtgtgcattggtgcttgtggcactggttgtggttgaagtggggcccatggctgaggctgcggtgacttgcaacccaacacagttgactccttgtcttccggcaattaattcaggttctgcaccttcgagtgcttgttgccagaagctgaaggagcaaaagccatgctt

SEQ ID NO: 160056 - DNA, 261 bp, Glycine max
gcagaaagcaagctcatcctagagttttaaaaatggcagcagcctcctccatggctctctcttccccatccttggctggcgaggccgtgaagctgggcccatcagcccccgaagtcgggagggtcagcatgaggaagaccgtcaccaagcaggcctcctccggaagcccatggtacggcccagaccgcgtcaagtacttgggcccattctctggcgagcccccgtcctacctcactggcgagttcccaggtgactacggct

SEQ ID NO: 160057 - DNA, 258 bp, Glycine max
aaggccgttgcgaaactaggatacctcctttctgtgacaatggttctaaacagtgttcaaccagtggtttcaggtgttgctattggaggtgggtggcaagccctggtggcctacatcaacataggttgttattacttatttgggcttccactggggttcgttcttggttatacagcaaatttgggggttgagggactttggggtggtatgatatgtggaattgttctccagaccttgctgctcttgttgatactttac

SEQ ID NO: 160058 - DNA, 257 bp, Glycine max
gggttgtgaaagcagagaagtgagatacactaagttatcctcataaatacactctaattaggtggcaagataagtgtctaaccttagtaacattgccacatattgtgttcattctggaattgtgccactaaaattctattcaattcatctatggctgcctcttcttatgctatgcaatcaatcctggcaaaccctttgatccgcatttccagcgggtctagggtgaaccaatttggcgttcctgctttgcacatgag

SEQ ID NO: 160059 - DNA, 258 bp, Glycine max
aaatacttgaagccctctgttgcaggattcctaatgcagaaggagcttgattatctagttggggctgtgtcaaaccccaagagaccatttgctgctattgtcggtggatcgaaggtgtcttccaagattggagttattgaatccttgttggagaaagttaatgttctcttgcttggtggaggaatgatctttaccttttacaaggctcagggttattcagttgggtcatctcttgtggaggaagacaagcttagcctt

SEQ ID NO: 160060 - DNA, 259 bp, Glycine max
ctcgagccgaatcggctcgagatgtttgcaagattctctgattgctgagaaagtttcagggaaaattgttatatgtgagacgaggtgggaatccgagagtggaaaagggtttggtggttaagcttgctggaggtgctggaatgatattggcgaatagtgaagcctacggagaagagttagttgctgactctcatcttcttcctgctgcgtctttgggacaaaaatcaagcgagattttgaagaactatgtttcatcttc

SEQ ID NO: 160061 - DNA, 249 bp, Glycine max
gcgaggtgaaatattagggtggaatccatgacttgccggggttaccagctggagtgaagtttgacccagatgaccaagaaatattaggacatttggaggcaaaagtggcgtctgatgaatgcaagcttcatccccttattgaagagttcataccattcgcttgaaggcgaaaatgggatctgttatacacacccataaaagctaccaagtgttagctcagatagacagatccgccacttcagtcacagg

SEQ ID NO: 160062 - DNA, 255 bp, Glycine max
  unsure (1)..(255): unsure at all n locations
gatttgatcagcagatagagattgaacatttgcagcgaaaaggganagatagagaaaatcatgtcaacagcagaagctcctccttctttccaagaagcagcgcgatgcgttgtctgcaattgcagtttcaacactttcagaagaaggcaccactgtcgatcctgtgggagaacattgtgtaatgaacattcatcaaatcaaatggctttaccacaatttggcctttactcaaatgtccgagtatgtgctgattgt

SEQ ID NO: 160063 - DNA, 253 bp, Glycine max
aatttttcatatcaggtctagcaggggatgacataatactcaactgtgttttggaagcactatacaggcgtattttgcaagcccacaaagatcagaaagattttagagttataattgtgatgcccctcttgcctggtttccagggtggtctggatgatggtggtgctgctactgtaagagccttaacacactggcagtatcgaacaatttctagagataatcactccatattagacaatcttgaagctatact

SEQ ID NO: 160064 - DNA, 260 bp, Glycine max
caaaaaaagaaagtaaaaaagaaaaccctagaggagaagaagccaaaaaaaagaagccaaaaaaaaggctccaaagatgggtttcaaaagctcttctcttctatgcctagctcttttgcttgcatgctcttcggctattcatgcctttgacatcacacaactgctaggccaatatccagagttttccacattcaacaaatacctaacggaaaccaagctcgcagacgaaatcaacagccgcaacaccatcactgtcctcg

SEQ ID NO: 160065 - DNA, 260 bp, Glycine max
cgctcgccttgcttcgccacacaacagcaactgcagcaatggctcccaaacgaggtggaaaggctccggctcttgccgctaagaagaagcctgagaaggtttcgaatccgttgttcgagaagcgtccaaagcagttcggaatcggaggggcgttgcctccgaagagagacttgactcggttcgtgaagtggccaaagaatgttcaaattcagaggaagaagaggattctgaagcagaggttgaaggttcctccagctttg

SEQ ID NO: 160066 - DNA, 255 bp, Glycine max
attaaagcagctgcacgcagtgatacagaggtagtttctgaaaccacaaaggctggtggcctacgtggaaaattgaataaggtggtgttggcttacagtggtggcttagacacatcagtcattgttccatggctgagagagaattatggttgtgaagttgtttgcttcactgctgatgttggccaaggtataaaggaattggaaggtttagaacagaaagccaaagccagtggagcctgtcaattagtggtaaaa

SEQ ID NO: 160067 - DNA, 256 bp, Glycine max
cgcaaaactgcaaactctaatcctccgtcaagacaagcctcaactagaggataatgctgttgagactattgcaaaatgctgttatgaactgcagatcctggacctcagcaaaagtttcaagctaactgatcgttcactctatgagctcgcccttggttgtcgcgatcttacaaaactcaacatcagcgggtgttcagcatttagtgacaatgctctggcttaccttgccagcttctgcagaaaactgaaagttcta

SEQ ID NO: 160068 - DNA, 254 bp, Glycine max
cggtggactctcggatgatgagattgaaaagatggtcaaagaagcagaattgcatgctcagaaagaccaagagagaaaggctctcattgacattagagacagtgctgacactaccatctatagcattgagaagagtttaggtgaatacagagagaagattcccagtgaagtggccaaagaaattgaggatgcagtttcggatttgagacaggcgatgtcaggggataatgttgatgaaatcaagtcaaagcttg

SEQ ID NO: 160069 - DNA, 256 bp, Glycine max
gccaacaacgtgatcaagggcacaaagcaagagcaagttcagcaaatcatcgaagacatcaaggcgtttaaggaagccaccaaagtggacaaggtggttgtcctgtggactgccaacacagagaggtatagcaatttggttgtaggccttaatgacaccatggagaatctcttggctgctgtggacagaaatgaggctgagatttctccttccaccttgtatgctattgcctgtgtgatggaaaatgttcctttca

SEQ ID NO: 160070 - DNA, 252 bp, Glycine max
aagcaagctcatcctagagttttaaaaatgagagcagcctcctccatggctctctcttccccatccttggctggcaaggccgtgaagctgggcccatcagcccccgaagtcgggagggtcagcatgaggaagaccgtcaccaagcaggcctcctccggaagcccatggtacggcccagaccgcgtcaagtacttgggcccattctctggcgagcccccgtcctacctcactggcgagttcccaggtgactac

SEQ ID NO: 160071 - DNA, 252 bp, Glycine max
tggaaagcaagtctatctgttaccacagtgttatgcagagaaacaagctcttggagaagtggatgctgagcttcttgacacccaagtgaatcctgctgtgtgggaaattagtgggcacatggttctaaagaggaagaaggattatgatgaggcatctgaaggcaatgcttggaggcttcttgcagaggtgtccctctctcaagagaggtttcaagaagtcaatgatcttatttttgaagccattggctgtgg

SEQ ID NO: 160072 - DNA, 257 bp, Glycine max
acaaaaacaaagaagaaaaaaaacccttagccaacacaaccatcatggccacctctgctattcagcaatcagcattcactggtcaaactgctctgaagcagctcaatgagttcgtccgcaagaccggtggcgccggcaaaggtcgcactaacatgcgccgcaccgtcaagagtgctcctcagagcatttggtatggccctgaccgtcccaagtacttgggtccattctcggagcagattccatcatacctgaccgga

SEQ ID NO: 160073 - DNA, 283 bp, Glycine max
aacactcattaattgcaagaatggcacttcgttgcttggtgatgtccctttctgttctcttcactcttggtcttgcgagagaaagccatgccagagacgaagatttttggcatgctgtttggccaaacactcccattccaagttcattgcgagatcttctaaagcctggccctgcaagtgttgaaatcgatgatcaccctatgcaaattgaagaaacacagtacccgaaaaccttcttctataaagcagaccttcatccaggcaaaacaatgaaagtacaatt

SEQ ID NO: 160074 - DNA, 277 bp, Glycine max
agagagtgagagagtgagtgagatagagagagacgcttcgcaaatctcaatcgaatctcagaaaaatgagagaaatcatcagcattcacataggtcaggccgggatccaggtcggaaactcctgctgggaactctactgcctcgaacatggcatccagcccgacggcatgatgccttctgactccaccttcggtgtagcccacgacgccttcaacaccttcttcagcgaaaccggatctggcaagcacgtcccccgtgctgtcttcgtcgacctcga

SEQ ID NO: 160075 - DNA, 277 bp, Glycine max
acgtcaaggaccaaggggcgtgtggttcgtgttggtctttcagtacgacgggagcgttggaaggagctcattatctggccactggtgagctcgtgagccttagcgagcaacagcttgtggattgcgatcacgtgtgtgatccagaagaatatggagcgtgtgactcaggctgtaatggtgggttgatgaacaacgcatttgagtacatacttcagtctgggggagtacagaaagaaaaggactatccatacaccgggagagatggcacctgcaaatt

SEQ ID NO: 160076 - DNA, 279 bp, Glycine max
aaaatttaaagaaatcaacacacacaaacacaacaacatatggaggtgctaagggtgcaaaccatagcttccaaatccaaagatgctgccatcccagccatgtttgttagggcagagacagagcaaccaggcatcacaaccgttcaaggggtgaaccttgaggtgccaattattgattttagtgacccagatgaagggaaagtggtgcatgagattttggaggcaagtagggactggggcatgttccaaattgtgaaccatgacatacctagtgatgtt

SEQ ID NO: 160077 - DNA, 278 bp, Glycine max
agggcagcacgcttgtccgggagcagagtagatgccatggaagaactggatagcgaagataaacgagtcttgagtcgaatcaagtgctggtttctatcacactcgcaacatctgaatttctttactattctagtgcttgcttcggttccaaatcctctatttgaccttgctggcattatgtgtggacaatttggcattccattttggaaattttttcttgcaaccttgattggaaaggcaatcattaaaactcacatacagacgatattcatcatctc

SEQ ID NO: 160078 - DNA, 277 bp, Glycine max
catgatgcttgtgaagaatcctgcacttttcgatgtactagtgatgcctaacctttatggtgatattatcagtgacctttgtgctggcttgattggaggattgggcttaacaccaagctgcaacattggtgagggcggtattgcacttgctgaggctgtacatggttcagcacctgatattgctggaaagaatttggctaatccaactgctttactgctgagtggtgttacaatgttgcgccatttggacctccacgacaaagcagaacagattcag

SEQ ID NO: 160079 - DNA, 276 bp, Glycine max
cagcatcatcacatgcacccgcgattcctacgatcccttcccatggtctcttctctgcaccctcgctttaccttctagaaccttccctcagatctcaattccccttccgctttctcctttcatggaaatggcttccactccccgcaccgtcccagagatcttcaaggactacaccgcccgcagaaccgccatcgttcgcgctctctctcaagatgtggatgaattctacggactctgcgatccagataaggagaattgtgcctctatggacatccg

SEQ ID NO: 160080 - DNA, 228 bp, Glycine max
acaaggcagaaagcaagctcatcctagagttttaaaaatggcagcagcctcctccatggctctctcttccccatccttggctggcaaggccgtgaagctgggcccatcagcccccgaagtcgggagggtcagcatgaggaagaccgtcaccaagcaggcctcctccggaagcccatggtacggcccagaccgcgtcaagtacttggggcccatctctggcgaagcccc

SEQ ID NO: 160081 - DNA, 274 bp, Glycine max
attctctcgcatctcaatacccttttgatttgtgaaaggatcgcaaacatgcttgatcaggtccaacaccctacaatcatggacaaggttgctggccagctccatctccgttctggtgtttctggtattaggagttatgaaggagcctactgccaccccacaatgtaccatcctcctcttttgggaattactcgaatgctgcattgcagtatcctgtgatgccctcatgcaaagctactatggatttgtctgctgctgcaacaactgcctcccc

SEQ ID NO: 160082 - DNA, 222 bp, Glycine max
gtgatttcagtgagtgatcggtgttcacttgatctcatcataatcgtcagcgtcaattgaagaagatgccgatcagaaacatcgccgtcggaaggcctgaagaggcgactcaccccgacacgttgaaggcggctttggctgagttcatctcaaccttcatcttcgtgttcgccggctcaggctccggcatcgcctacaaaaagctcaccgacaacggcgctg

SEQ ID NO: 160083 - DNA, 276 bp, Glycine max
acataaacaaaaaaaataaactggggagaagcatgttgttgatgttgggactatgcttcctattgttctctgcatttccacttgcgttctctgacagatgccacccacaagacacgaaagcgttgctccaactccagaaggacctcggcaacccttatcacatcatatcctggaacgcaaaggaggattgctgcgagtggttctgctgcgttaagtgtgacgagaaaacaaaccgcgtcattagcgttgccttatcatccccttttccagacacca

SEQ ID NO: 160084 - DNA, 274 bp, Glycine max
ggtttggttgcgatgcggtgtgttgcgaatcactgtccaatcccgatcgcttgatccagacagtgaatcagactcagaatcagaatcagaatcagagagaaacgatgagggcagtaagtgcgttaatggtggctcggatgttgacgcgggaccactcgctccctgtccttggcaacgaaagcatacccttcggatcggtgtggtggttcgcctatgccggcgtctcctgtttcctcgtcctcttcgctggcatcatgtccggtctcaccctcgg

SEQ ID NO: 160085 - DNA, 273 bp, Glycine max
aggctacagagttgaggcttggtcttcccggattccaatcgcctgaaacggtaccggatcttttctctttaagctcaccaaagcttgatgagaagccactcttccctttgcttcctactaaagacgggatttgctcgtcggggcagaaagctgttgtttctggcaacaaaagaggttttgctgataccatggatgggttttctcaggggaagtttgctggtaatacagggatgaacgcggtgctatcacctagaccttctggagctcaacctt

SEQ ID NO: 160086 - DNA, 273 bp, Glycine max
aagatcgtgactatcttctctctccaactggggctcaggtgaaagtttctgatcttgaagggaaagtagtgggtctattattcgctgcgaattggtacccaccttgccgtggattcacccaagtcctagctggaatctacgaggagctaaaaagcagagtccctcaatttgagattgtgtatgtgtcctcagatgaggacttgaatgcctttaatagcttctatggaagcatgccctggattgcaattccgttctctgatttggaaacaaaga

SEQ ID NO: 160087 - DNA, 274 bp, Glycine max
gcttcttccgcatggggtgttccgcggttctgctttccaaccgtcgaagggactatagccgcgcaaagtaccgccttgaacacattgttcgcacgcataaccgtgccgatgaccgcagcttcaggtgtgtgtaccaagaggcagatgagcaaaaactaaagggactaaagatcagcaaagacttaattgaacttcgtggtgatgctctaaaaaccaacatcaccacactaggacccttggtgctacccttttctgagcagcttctcttctttag

SEQ ID NO: 160088 - DNA, 269 bp, Glycine max
ctcgagcgaatcggctcgagaaaatttctcttccgttcgccggaaacaaaaaacctctgtcggctccaattcgaaggcggttcaatgtcattgctatggctccccctaaacccggtgggaaggccaagaaagtggttggacttataaagctggctcttgaagctgggaaggctacacctgctcctcccgttggccctgctcttggttccaagggtgtcaatattatggctttctgtaaggattacaacgctagaaccgccgacaagccc

SEQ ID NO: 160089 - DNA, 136 bp, Glycine max
aagccagattatgcgtacctcaaaaggatatttcgtgacctgtttatccgtgaaggattccagtttgattatgtctttgactggaccattttgcagtatcagcaatcacagctagccactcctccaacacgggcca

SEQ ID NO: 160090 - DNA, 224 bp, Glycine max
cacacaccgtttgttctattcttaactcaacttctgctacccactctcttcttccaagtccaaccacgctcttctctacagtcatgggcaaggtcaagatcggaatcaacggatttggaagaattggccgtttggttgccagagtcgctctgcaaagagacgatgtggagctcgttgccgttaacgaccctttcattaacaccgattacatgacatacatgttt

SEQ ID NO: 160091 - DNA, 274 bp, Glycine max
ctttgcgcagttccctacctctcctctacctcctgcagatcttcgtcaagaccctcaccggaaagaccatcaccctcgaggtggaaagctctgacaccatcgacaacgtcaaggccaagatccaggacaaggacggaattcccccggatcagcaacgtctcatcttcgctcgaaagcagctcgaggacggccgtaccctcgccgactacaacatccagaaggagtcaacccttcaccttgtccttcgtctccgtggtggcatgcagatcttcgt

SEQ ID NO: 160092 - DNA, 273 bp, Glycine max
aaaatttaaagaaatcaacacacacaaacacaacaacatatggaggcgctaagggtgcaaaccatagcttccaaatccaaagatgctgccatcccagccatgtttgttagggcagagacagagcaaccaggcatcacaaccgttcaaggggtgaaccttgaggtgccaattattgattttagtgacccagatgaagggaaagtggtgcatgagattttggaggcaagtagggactggggcatgttccaaattgtgaaccatgacatacctagt

SEQ ID NO: 160093 - DNA, 172 bp, Glycine max
caaagatcccgaggctaaacaaccagaagattgggatgacaaagaatttattcctgatcccgaggataagaaaccagaggggtatgatgacatcccaaaagagctcccagatcctaaagccaagaagcctgaagattgggatgatgaggaagatggtgagtggacaccccta

SEQ ID NO: 160094 - DNA, 273 bp, Glycine max
atgaaaggaggaaagtccaagaccgaatctaagagagccgatgccaaacttgctgtgaataagaagggcgccgccaccaagactaggaaacccgccggaaaggggaaggcagcgaaagatcctaacaagccaaagaggcctccaagtgctttcttcgttttcatggaggaattcaggaaggtgttcaacaaggaacatcccgacaacaaagcagtgtctgctgtgggcaaagctgctggagcaaaatggaagacgatgtctgatgctgaaaaa

SEQ ID NO: 160095 - DNA, 270 bp, Glycine max
gctgctgaggagttcaagtcagggtggctttatgatgtctcagacttctctgctcttccaggaaggggcatccagtgctttatagacgggaggcgtattttggttggtaaccggaagctgctggaggaaaatggcataaatatttctacagaagtggaaagttttgttgtagagattgaagaaagtgcaaagacagggatactagtagcatatgatgatatattaattggagtcttagggattgcagacccactaaagagagaagctgct

SEQ ID NO: 160096 - DNA, 267 bp, Glycine max
  unsure (1)..(267): unsure at all n locations
gtgcatattgttgggatgtggaaactggtaaagtganaatggtattcaaggggcacatggactatttgcattgtatagttgctcgcaactcatcaaatcagatcataacaggttcggaggatgggacaacacgaatttgggattgcnaaagtggaaagtgtacgcaagtnattgatccagcaagagatttgaaattaaagggatctgcttcatgggttggttgtgttgctttagatgcaagtnagagctggttggctgcagtagtgg

SEQ ID NO: 160097 - DNA, 263 bp, Glycine max
gccgatctcgctgagagtctcgaatcgcaccggtgaccggaggagatggtgaattccatggtggaacgcgccacgagcgacatgctcatagggcctgattgggccatgaacatcgagatctgcgacatgctcaatcatgaccctgggcaagcaaaggatgttgttaaaggtatacagaagcggattggaagtacaaattcgaaagttcaacttcttgcactaactttgttggacgaaatcatacagacatgtggagatattgt

SEQ ID NO: 160098 - DNA, 264 bp, Glycine max
gtggagaggatctgatagaacagataaaagcagggttcatggagtttgataaactaattgcttctccagatatgatgcctaaggttgctagcctagggaagattctgggaccaagaggactgatgccaaacccaaaagctggcactgtaacaccaaatattccccaagctatagcagaattcaagcaggggaaagttgaatacagggcagacaaaactggaatcgtgcacttaccttttggaaaagctgactttccagaagagg

SEQ ID NO: 160099 - DNA, 265 bp, Glycine max
gcaaattaatcaaacatggctagggttagtgctttgtttcactctttgctcttgatttcttcccttgtattggcttctcaaatccatgtttcctctgggaaactagtccctggactatcatggaattactatttgttgacatgtcccaagcttgagaggattataaggaagcatcttgaggatgtcttcgagaaggacagtggagtagctcctggcatacttcgactcttcttccatgactgctttcctaatggatgcgatgcgt

SEQ ID NO: 160100 - DNA, 141 bp, Glycine max
cgcttatggtggatacctaggcatccagagacgaggaatcgcgtagttcgcgacgaaatgcttcggggagtgcgaaataagcgtatatccggggattcccgctataggtcagacctttcgaactgctgctgacatccacgg

SEQ ID NO: 160101 - DNA, 238 bp, Glycine max
gccagaaagacttgcttggtacaactacaagcttcttggaataagggtcattaggaagggtatccctccacccccagcaaagaagggccaaagtggagtcctatttgtatgcaaccacaggacagttttagaccctgtggttacagctgttgcattaggaaggaaaattagctgtgtcacatatagcataagcaaattcactgaaataatttcaccaatcaaagctgtggcactctct

SEQ ID NO: 160102 - DNA, 271 bp, Glycine max
ggttccgatactctgaagaccgtgaagtactctagggttttgactaacgtgggagctccgggaacgtacaaagcttcggtgatgtcgttgggggattcgaatgtgaagactgtggtggaaccgaatacgttgagtttcacggaattgtacgagaagaaggactatacggtgtcgtttacatacacttcgatgccgtctgggacgaccagcttcgcacgtttggaatggacggatgggaagcataaggttggtagtccaattgcgttcagct

SEQ ID NO: 160103 - DNA, 273 bp, Glycine max
aatttctcagttctcacactcattccgtgctctaaatctcaaattctagggttagggttcccaatttctccgccaatcagaagatgagttccaccggtggttctaccaagggcggaaggggcaagcccaaagcctccaaatccgtttcaagatcgcagaaagctggtctccaattccccgttggaagaatcgctcgattccttaaggctgggaaatacgctgagcgtgttggtgctggtgctcctgtgtacctctctgcagtgctcgagtatc

SEQ ID NO: 160104 - DNA, 270 bp, Glycine max
acaaattctcaaatccaaatccaattccaattccaattcccaatcttctcaaaccctaattcctcatcttgaaaatgacagaaatcttgcacatccagggagggcaatgcgggaaccagatcggagcgaagttctgggaggtgatatgcgacgagcacggcatcgaccacaccggaaagtacagtggcgactctgaactccaattggaacgcatcaatgtttattacaacgaagcgagtggcggaaggtacgttccacgcgccgtcctca

SEQ ID NO: 160105 - DNA, 270 bp, Glycine max
agaccatttaaaagacttgggttgtgctgcatggactgtttttcactttgccattactaccctgcatgccctgaaccagatttaactttttgaaccacaaagcattctgataattgtttcctcacagtgcttctccaggatcatattggtggcctgcaggttctttaccagaacatgtggattgatataaccccagaacctggggctcttgttgttaacattggtgatcttctacagcttataacaaatgacagattcaagagcgtagaa

SEQ ID NO: 160106 - DNA, 272 bp, Glycine max
actacttcctcttgcttgttctcgtcggtgcaactacagcttctggggctgaactatgtgcagacttttactcatgcacctgcccaaacttgttgcctatagtgaagaaaggagtggccaaagccattcagaaagaaccacgcatgggcgcttccttactccgattgcatttccatgactgctttgtaaacggttgtgatgcatctatactgttggatgatacaagcaacttcattggggagcaaacagcagcagctaacaaccaatcagct

SEQ ID NO: 160107 - DNA, 269 bp, Glycine max
gcagcctacagccatgaatgcatttgagttaatctccatgtccaaaggactgaaccttgaaaacttgtttgatactgagcagggatttaaaagggaaacaagattcacctcaaaatcccctgcggatgagataatcaacaagattgaggaagccgcaaaacctcttggctttgatgtgcagaagaaaaattacaagatgaggcttgcaaatgtgaaagctggaaggaagggaaaccttaatgttgccacagagatatttcaagtggcac

SEQ ID NO: 160108 - DNA, 266 bp, Glycine max
agctactctgatcaaaacaaggggacatctttgtttgtgatgagcatgaacatgaacatggctctgtgtctgatgttccttgttctgcacatagcttggcttgtagcatcatcggatctccgagctggcttttactcaaaaacatgtccaaaagcggaagtcatagtccgagatgtgatgaagaaagcccttattagggaagccagaagtgttgcctctgtcatgcgcttccagttccatgattgctttgtgaatgggtgtgatgg

SEQ ID NO: 160109 - DNA, 266 bp, Glycine max
  unsure (1)..(266): unsure at all n locations
ccgagtcgccatggcgtcgcaggagagtatcganaagatgcaggcacggcagaattaccggaatttatggcacaccgatctcatgagatccattcaggccgatactccttattgttgcctcgcgttgtggtgtgcaccatgtgtgtcnaccttcttcgcaaacgagctctctatgatgatatgtcaaggtacacatgttgtgctggctacatgccttgcagtggtaggtgtggagaaagtaaatgtcctgaatttgcctttgcact

SEQ ID NO: 160110 - DNA, 266 bp, Glycine max
tccaaatcctaggacgtacattggctctggcaaggtttctgaaattaagagtgcaattcatgcattgggcgttgaaactgttatctttgatgatgagctgtcagctgggcaattgcgcaacttggagaagatttttggtggagatgtgagagtttgtgatcgaactgctctcatccttgatatatttaatcaacgagcagcaacacatgaagcgtctttacaggtttcattagcacaaatggaataccaactacctcgtctaacta

SEQ ID NO: 160111 - DNA, 270 bp, Glycine max
gcttttccctcgttgaaatgaaaatgggttcttctttgtggactttgtgtctaattttggcttcactagcctcttctgcattctgtgcctttccacggaggccagtggatgttccattcggcagaaactacgttcccacttgggcttttgatcacatcaaatacttcaatggaggttctgagattcaacttcatcttgacaagtacactggtactggcttccagtccaaagggtcatacttgtttggtcacttcagcatgaacataaaga

SEQ ID NO: 160112 - DNA, 269 bp, Glycine max
caagaagctcaactcagctgcaacgagtcttcaaaagcaacttcctggtcttaagattgcggttttcgacatttacaagcctctctatgaccttgttcaatccccttcaaaatctggttttgtggaggcaaacagaggatgctgtggtaccgggactgtagagacaacatccttgttgtgtaatccaaaatcaccaggaacttgttctaatgccacacagtatgtgttttgggacagtgtccatccttcacaagctgctaaccaagttc

SEQ ID NO: 160113 - DNA, 127 bp, Glycine max
tcaagatccgcagaaagctggtctccaattccccgttggaagaatcgctcgattccttaaggctgggaaatacgctgagcgtgttggtgctggtgctcctgtgtacctctctgcagtgctcgagtat

SEQ ID NO: 160114 - DNA, 263 bp, Glycine max
ggcggggctaccgtgagtttaagcatatcaataagcggaggaaaagaaactaacaaggattccctcagtaacggcgagcgaaccgggaaaagcccaccatgaaaatcggtcgccctcggcgtccgaattgtagtctggagaagcgtcctcagtggcggaccgggcccaagtcccctggaagggggcgccagagagggtgagagccccgtcgtgcccggaccctgtcgcaccacgaggcgctgtcggcgagtcgggttgtttgg

SEQ ID NO: 160115 - DNA, 262 bp, Glycine max
ggggctacccgctgagtttaagcatatcaataagcggaggaaaagaaactaacaaggattcccttagtaacggcgagcgaaccgggcaaagcccaccatgaaaatcggtcgccctcggcgtccgaattgtagtctggagaaggcgctaaaggagttgaaagccaaggcgcaacagaagggaagctttggaggttctgggctcaagaaaagtggaaagaaataagggctctttatcatgattgtatacatccaatattgagcc

SEQ ID NO: 160116 - DNA, 262 bp, Glycine max
cactgctttctcctggctcagaaacatcttccatgactgtgctgttcagagttgtgatgcttcactgttgctggactccacaagaaggagcttgtctgagaaggaaacagatagaagctttgggttgagaaatttcaggtacattgagaccatcaaagaagctttggaaagggaatgcccaggagttgtttcctgtgctgatatcctcgttctctctgccagagatggcattgtttcgctaggaggtcccatatccctctta

SEQ ID NO: 160117 - DNA, 265 bp, Glycine max
gttgagtggaaacgtgaaattagggttcatcgaggaggaagaagaagaagaagatgtcgtacctgttgcctcacttgcactctggatgggccgtcgatcaagcaatcctcgccgaagatgagcgtctcgtcgtcatccgtttcggccacgactgggacgaaacctgcatgcagatggacgaggtgttggcgtcagtggcggagacgataaagaactttgcggtgatatacctggtggacatcacggcagtgccggatttcaacac

SEQ ID NO: 160118 - DNA, 265 bp, Glycine max
tttttaaataatgtttttgtgtctctctccgtatatcatgaacacaataatagacaacccctgttaaattaaatcaactttaggacaaaacttgtcccttaaaaagagatagtaactccaactccaagtcacatcggtgacaaagttagaaacaaggagaaagaaagaagatggcaggaaagaaaatcccagatgtgttgctgaattcaggacacaaaatgccagttataggcatgggaacttcagtggagaatcgtccatcaaa

SEQ ID NO: 160119 - DNA, 258 bp, Glycine max
ctagcacataaaacttgctacgcgcagtaagctataactcatttgaggctctgggagaattgagaaatggcttgagatgttgaggttcaatagcaaggaggagagtactctgccaaagactaccatgaccctcctccagcacctttgttcgacccagaggagctcacacagtggtccttctatagagctctcatcgctgagttcatagcaagccttctcttcctttatgtcactgtgctcaccattattggctacaaa

SEQ ID NO: 160120 - DNA, 260 bp, Glycine max
catagttggtgttgctgggtggggaactggtctcaaactcggaagtgactcggttggtattaagtataacacccatagagcactcgggatcaccctcttctgccttggaacccttcaggtttttgctctgctcttgaggcccaacaaagaccacaaaatcagaatctactggaacatttaccactacgccgttggatactccaccataatcatcagcatcatcaacgtctttaaagggtttgatgcattggagacttctg

SEQ ID NO: 160121 - DNA, 255 bp, Glycine max
ctcgagccgttaaagcgcaaaaaccattctccttcggtgctcttgaaaacatgggaaaacagagcacagaattctctgccctcaactgcatcgacctctccaaccctgacatcaaccaatccgtcaatttactcaaacaggcatgtttggattccggttttttctacgttgtcaatcatggaataagccaggaattcatggaagaggtttttgcacagagcaagaaattcttctctcttcctcacaaggagaaga

SEQ ID NO: 160122 - DNA, 260 bp, Glycine max
ggcagactagtatccgatcctctgtcctctcgaagctttcatcgttcaacatattctcatcatctcagtcatgggcctgctatcttgttttaggtctaccgtcctgagaaaatgttccaaaggaagctctggcatgtcaagattcctgtatacgaacaattttcaacgaaacttgatttcgtctggtggcaatgaatcgtattatgggtattttaacaggagatcatacacttcactttatatgggaactggaactgtgg

SEQ ID NO: 160123 - DNA, 264 bp, Glycine max
gtgtttctgtaaccatggcatccaccactctatcccctacaaccccttctcagctatgaccaggaaaaagtgggattttcagttcctcacaggcacttcttgtgaagccagtgaagaggcagatgatggggaagagcaagggattgagaattgcatgccaagccaccagcatttccgctgatagagtccctgacatgggcaaaagacagctcatgaatcttcttcttcttggtgccatttcactccccactgctggaatgctta

SEQ ID NO: 160124 - DNA, 124 bp, Glycine max
atacgatacaaattttgaatgacacaatgacttctgaattcccgatgcatttaccataaagaacttcatgcaagttcagttctatctcaaatctctaactctcgaacacattccaaaccaccca

SEQ ID NO: 160125 - DNA, 220 bp, Glycine max
gtaagggcattcttgctgctgatgagtcaacatggacaatttgcaagcgtttggtcagtatcgatgtagagtatgttttctccaataggcgtggtcttagggactatgcatttcacggatcgctgtgctcttaaatatcacagtggtggcatcctctctgttgatactctgtaccagtgtacagtggcaggtactctctacagttctgactatcctcatt

SEQ ID NO: 160126 - DNA, 261 bp, Glycine max
gctacaagcactccttggaagaagatgttgcagctcatacctctggccatctacgccagcttttagtggggttggtgacctcatataggtatgttggtgatgagatcaatccaaaattggcacaaactgaggctgaaattcttcatgatgctgtgaaagagaagaagggtagctatgaagagaccattagggtcttgaccacaaggagcaggacccaacttgttgcaactttcaaccgctacagagagatccatggcactt

SEQ ID NO: 160127 - DNA, 253 bp, Glycine max
cctcttagtcccaattttctagggttttattcattttccgatggcttctgcagatgttgagtaccgttgctttgtcggtgggctcgcttgggccactgacgaccatgccctcgagagagccttctctcagtacggcgaaatcgttgaaacgaaggtctgtttgttgcaggcatcacatctgatctcacacgattcggattcggaattttctcgatcccgttctgatctgtgatctctgatctgtttgcgttac

SEQ ID NO: 160128 - DNA, 253 bp, Glycine max
cttatgatgttgatctcttgggccactgggattgctgaagccccaaagactgatcctgagttttggaagtctttgttccctgttgctgttgcacatacaattggacatgtagcggcaacagttagcatgtcaaccgttgcggtatcattcacacacattatcaagcgtggtgaacctgcttttagtgttctggtttcaagatttcttttgggtgagagctttcctgtgccagtctatctgtctttaattccaa

SEQ ID NO: 160129 - DNA, 252 bp, Glycine max
gctgttttgactatacaaatgctttagctgacttagtggttggatatatgggagtgccaaaatattctggaatcggcatgacacaacatccacaatatgtaacagtaaggaatgaacgtggaagagagatgttgagtcttatagagaacttactggagattactccaacaattagtactggggataggcgaccatttgtcatggagactgttaaggctgatgatgaagctaagttaggaagaggtccttctc

SEQ ID NO: 160130 - DNA, 252 bp, Glycine max
catcaaactcatcaaaatgaatctgtaccactcctccaccaccaccaccacccgcaccatcttcaccgtcatattcctcctccttgcaatattattcactctcacaccccacaaggccaacggtgccacgtgtcaccctgaggaagaagcgggcctgttgggcttcaaatccggtatccgatccgacccgtccggcctgctcagtaactggatatcgggtacggactgctgcacatggaccggagtagaatg

SEQ ID NO: 160131 - DNA, 248 bp, Glycine max
gattgctgaaactgcaaaacgggttggaacaattgtgattgctgatgaagtttatggccatcttgcatttgcgggcaagccttttgtgccaatgggagtttttggctctattgttcctgttctgactcttggctcattttctaagagatggatagttcctggatggaggcttggttggtttgtgacaaatgatccatctggcacttttagaaatccaaaggtagatgagcgcttcaaaaagtactttg

SEQ ID NO: 160132 - DNA, 250 bp, Glycine max
gtgagattctgaaccaagacaaagaaagggttaagtacattaactcaaggatctcaaagaacttgggccaagatagtagtgtgagtgaattggactcagttacactaccagccaagtctggtagccttattgggtctgggaattactttgtggttgttggtcttggaacacccaagagggacttgtcactcatctttgacactggcagtgatctcacttggactcagtgtgaaccatgtgctcgttcttg

SEQ ID NO: 160133 - DNA, 149 bp, Glycine max
  unsure (1)..(149): unsure at all n locations
cgaatatcgcattcgcgaaatcatgcaggagtcggtaaaatgcatgcgccattcaaagagaacttntcttactacagaggatgtggatactgcacttgcattgagaaatttggagccaatatatgggttcacatctaatgatcctccac

SEQ ID NO: 160134 - DNA, 246 bp, Glycine max
gttctatgctgaccttgctgaaaaattggacgcacagcaaaaggctcatgtgtctcttcccatggacacattcaagagttatgttcttaaggagccgattggagtcgttgctttaataactccttggaattatctctctgttgatggctacgtggaaggttgctcctgctctggcggccggctgtgctgcaatattgaagccctctgagttggcatctgtgacatgtttggagctcgctgaaattt

SEQ ID NO: 160135 - DNA, 248 bp, Glycine max
tggtgatggatttggtgagatggagagcgggcgactacacaaggaagatttagaagtggatggagattcaaaaggagagaaggatctacaagttggggtcactccctccctttttgctggctttcggtggtaatgttgaggccattgaacatagatggaaccaacatggtcttggaggggataatgtaagaaatagttgtaggactctgcatcctggtccagttagtttgctacattggagtggtaaa

SEQ ID NO: 160136 - DNA, 248 bp, Glycine max
gatcaatatggccaccaccactacccagcctccctctaatatctgttttttccttctgttgttgcttctagcacactttcatttgggcataagccaacttgagctgaattactactctaaaagctgcccaaaagctgaagagatcatcaaggaacaagtcacacaactatataacaagcatggaaacactgccgtttcgtgggtcagaaatctcttccacgattgcgtggttaagtcatgcgatgcat

SEQ ID NO: 160137 - DNA, 248 bp, Glycine max
ttcttttcatctttgctcttctatccttcacttcccatgcttctaatgtcaatgacttctgtgtggcagacctgaagggtccagatagccctactggctatcactgcaagccacctaaaacagtaacatcacatgactttgtgttccatttaggccctggaaccacttcaaacgtgttcaagtccgcaataacctctgcatttgtcaaagattttcctgctgtcaacggtcttagcctttctgtagca

SEQ ID NO: 160138 - DNA, 250 bp, Glycine max
attggtttctctctctagcttggacgagtgaattagattcatcatcaagatgtcgtctctgatagcagaagatgtgaagagcagatcagaggtgtaccacggggacgaaatgtgccaagtgaagtccaaggagcttctcaaggaaatcgccctccccaacggccttcttcccctcaaggacatggaggagtgcggctacgacagacaaaccggcttcgtctggctcaaacaaaagaagagttacacccac

SEQ ID NO: 160139 - DNA, 246 bp, Glycine max
caaaaagattcaatttcaaggtttgtagtggaagttatgatgatggttatgtgattggtgaagaggaagcaagggatatttcagggttagaggaccctgtaacaaccaaggttctgattccaggtctgcttgatgattcaaaaggtgaatctggtgctccaataagtagttgtttttggggatggaaacctaaactcaatgtgcactatgagaaggccgggtgcgataacgtcaatgatttgcctc

SEQ ID NO: 160140 - DNA, 245 bp, Glycine max
aactgttcttctcagttgtgccttcctatacgacatcttctgggtgtttgtctctaaatggtggttccatgagagtgtgatgatagtggtagctcgaggtgataggagtggagaagatggtatccctatgctactcaagataccacgtatgtttgatccttggggtggttacagcatcattggttttggggacatcatcttaccagggcttctagtagcattttcactaaggtatgattggttgg

SEQ ID NO: 160141 - DNA, 245 bp, Glycine max
gcttgttgaagaatgggcagttcccttgaaaagcattgaagatatatatgagaggtttagactgtattgtcttggaaagttgagaagcaatccttggtcagaactagatggtcttcagccagagacaaagataataaatgagctgctggaaaagattcacacaaagggcttcctcaccatcaatagccagccagctgtcaatggggaaaagtcagattctcctactgttggctggggtggaccag

SEQ ID NO: 160142 - DNA, 244 bp, Glycine max
atgggaatggattttagggatgcctgctggtccttacttatatgcggatgatctgattgaagtcttgaagaaaaaacatgcttctggaacgtataaaaacctagtattttatctggaggcatgtgaatctgggagtatctttgaaggtcttcttcccgaagatatcaatatttatgcaaccacagcttccaatgcagaagaaagtagttggggaacatattgccctggggagtatcctagtcct

SEQ ID NO: 160143 - DNA, 247 bp, Glycine max
cgcagagagagagagatccatcgatcaattaatttccaatggccgatcagctcaccgacgaacagatctctgagttcaaggaagcctttagcctcttcgacaaggacggcgatggttgtattaccaccaaggaacttgggactgtgatgcggtcgcttgggcagaacccaactgaggctgagctgcaggacatgataaatgaggttgatgctgatgggaatggttccattgatttcccagaattcct

SEQ ID NO: 160144 - DNA, 241 bp, Glycine max
ctttctccgatggctaatccctcactcttgttcttcagtctccacctattatccgccaccgtagccgccgccgaacggatcgacgatgaagacgaccttctgatccgtcaagtggtgccggatgcggaggaccaccacctgctcaacgcggagcaccacttctccgccttcaagacaaagttcggcaagacctacgccacgcaggaggagcacgaccaccgcttccgtatcttcaagaaca

SEQ ID NO: 160145 - DNA, 242 bp, Glycine max
caattcttccccctccacccacccagcatatttctctattcctatttattagcacccctcacattaccttgtgtcaccaactactttgactcctttaccataccattacaataattatcaaacctaaccagtaaaaatggtgaccgtggaggaaatccgcaacgctcagcgttcccatggacccgccaccatcttggccttcggcaccgccacgccgtccaactgcgtctcccaagccgatt

SEQ ID NO: 160146 - DNA, 246 bp, Glycine max
acggtggattacctccagaagccaactacttgtttttgtggggattatgtggatcgagggaagcaaagtttagaaacaatttgccttctccttgcttataaaataaaatatcctgagaactttttcctgttaaggggaaaccatgaatgtgcttctataaaccggatatatggattttatgatgagtgcaagagaaggttcaatgtaaggttatggaagacatttacagactgcttcaattgcctg

SEQ ID NO: 160147 - DNA, 244 bp, Glycine max
tcgacacagaagaagcatatccctacaccggaaaagatggtgtctgcaaatttacagctaaaaacgttgctgttcgagtcattgactctatcaatatcactttgggtgctgaggatgaattgaaacaagcggttgcttttgttcggccagttagtgtggcatttgaggtagcgaaggacttccgattctacaataatggagtttacactagtaccatttgtggtagcacgcccatggatgtaaa

SEQ ID NO: 160148 - DNA, 223 bp, Glycine max
gcagcattgggagatagaaagagagagagaaagagagagagagaaagacccttacccttctctatcgctcgctttcctttgacgcttctgacccttgctttgtctgcgtcttccttctttctttctttctttctctgtgtgtcgtaatggctctcccagactcttcttcccgtcgcaactccctgatcccctccttcatctactcctcttcctccaaaacgct

SEQ ID NO: 160149 - DNA, 241 bp, Glycine max
caccaggcgcacgttagcacaaactatcatggccacggcaacagcagctgccacctcgtcctttatggggacgcgtctcctggaggctcactccggagcggggcgagtgcacgcccgattcggcttcggcaagaaaaaggctcccgccccaaagaaagcctccaggggatcgggccgagacaccgacagacccctttggtatccgggcgccaaagcgcccgaatacctcgatgggagtctt

SEQ ID NO: 160150 - DNA, 237 bp, Glycine max
caaaaaacccttctttctttcaggttcattacttgatcagtgtcaaaagggtagttgcaaattgcaatggctaagcatgatgttgagggtggttccttctcagcaaaggactaccatgatcctcctccagcacctttgattgatgctgaggaactcacacagtggtccttctacagggctttgattgctgaattcattgccacattacttttcctttacatcacagtgctcactgtg

SEQ ID NO: 160151 - DNA, 237 bp, Glycine max
agtaaaggaggtacataaaattactgttttggacataagactggcaaatgcagataggcatgctgggaatattttgatcagcaaagaggaggacaacaaccagtctgttctgattccaattgatcatggatactgcttgcccacaagttgtgaagattgcacctttgaatggctttactggcctcaagctcgccagccatactcctcaggaactattgactacataaagtcactgga

SEQ ID NO: 160152 - DNA, 249 bp, Glycine max
ggcttatggtggatacctaggcacccagagacgaggaagggcgtagtaagcgacgaaatgcttcggggagttgaaaataagcgtagatccggggattcccgatataggtcaacctttcgaactgctgtgaatccacgggcaggcaagagacaacctggtgaactgaaacatcttagtagccagaggaaaagaaagcaaaagcgattcccgtagtagcggcgagcgaaatgggagcagcctaaaccgtga

SEQ ID NO: 160153 - DNA, 246 bp, Glycine max
caccagcagtggcgcttcgcgtacaaggtgaccgttcggccttcttcgactgtgccatacatggttaccaggacacactatacgcccacgctcaccgtcagttctaccgtaactgcgaaatctccggacagtggacttcattttcggctacgggacaaccttgatccaaagctccaaactcatagtgaggaagcctgacccgtatcaacagaacatagtggtggccgatggcacggaccagaagaa

SEQ ID NO: 160154 - DNA, 249 bp, Glycine max
gacaaatgcaaggtgttggtcaacattgagcaacagagcccggatatcgcccagggtgtgcacggccacttcaccaagcgcccagaggaggttggtgctggtgaccagggtcacatgtccaggtatgcaccgatgacacccccgagtacatgcccctcagccatgtccttgcaaccaaacttggtgctcgcctcacagaggttagggagaattggcacctgtgcttggttgaggcaagatggtaagaca

SEQ ID NO: 160155 - DNA, 248 bp, Glycine max
aagattaaagattcaacaatggcctctgcttctgctactcttctcaagtcatctcctgttcttgacaagtgcgagtgggtcaaaggccagacccttcgccaacctctcgtgagatgtaacccttcctagcatcagctctcaccatcaaagctgcttcctatgctgacgagctcgtcaaaaccgccaaaacagtggcctcaccggggcgtggtattttggcgatggatgagtcaaatgcaacctgcggg

SEQ ID NO: 160156 - DNA, 250 bp, Glycine max
ctccgaaagaggatgactatgattatctcaaggaaggaaggaagcagagtgaagtaaagttcaaaaaggccctttcacgggtgaagtccatggttcagtatccagaggcacgggctcaataccggcggggctaaatgtagttgaggacttccgtcaaaccaagggaggtaatttgaatttgataaattcggaagagacagttgatggtgtggaggatttgattgatattgacatgcttttagatgatgaa

SEQ ID NO: 160157 - DNA, 227 bp, Glycine max
ggtgaatgatttcgttatcagcacagattggtgattggtaatgtataactaggatgcaatggaggacttatggactatgcgtttgagttcattatcaacaatggcggcattgattctaagaggattacccttaccgtggtgttgatggtagatgtgacacatataggaaaaatgctaaggttgtttctattgatgactacgaagatgttcctgcctatgatgagtta

SEQ ID NO: 160158 - DNA, 249 bp, Glycine max
gccaagtgaaagagagaagaaaagtcaaagacaatgtcagggatcattcacaagattgaggagacccttcatgtgggaggccacaagaaggaggaggagcacaagggtgagcagcaccatggtggagatacaaaggggagcatcatggtgaacacagtactgaacccaaaggagagcatcatgttggtgagcacaagccggagcaccatggaggagaagagcacaaagaggggttcctagacaagatca

SEQ ID NO: 160159 - DNA, 251 bp, Glycine max
gacgaaggtggctttgcccctaacatccaggaaaacaaggaaggcttggaattgctgaaatctgccatcgccaaagctggttacacaggcaaagttgtcattggaatggatgttgcagcttctgaatttacaaggaagacaaaacatacgatttgaacttcaaggaagataacaatgatggctcccagaggatctctggagatgctttgaaagatctgtacaagtcatttgtgtcagagtacccaattgtt

SEQ ID NO: 160160 - DNA, 250 bp, Glycine max
ttctctctctgtctttcgcactttcattctctcttaaaaatctaaatcccttttgggcttcatctgggggtctgacccaggtatggcttcgaaacgcatcctgaaggtgctcaaggatttgcagaagatcctcctacgtcatgcagcgcaggtcctgtggctgaagacatgtttcactggcaagccacaatcatgggacctgctgatagcccatatgcaggtggtgttttcttagtttcaattcattttc

SEQ ID NO: 160161 - DNA, 244 bp, Glycine max
cagattgttcatattagatcaccatgatgcattcatcgcatatctgaggaagatcaatgaccttcccactgcaaagtcttatgccacaaggaccatccttttcttgaacgatgatggcaccttaagccattggccatcgaattaagtttgccacatcctaggggagatgagtttggtgccgtttctagagtcgtcttgcccgcagaccaaggtgctgaaagtacaatttggctaattgccaagg

SEQ ID NO: 160162 - DNA, 247 bp, Glycine max
ggcgagagtgtggcttgggacattcgacactgccgaggctgcggccagagcctacgatgaagccgcattgaggttcagaggtaacagagcaaaacttaatttccccgaaaacgttgtaccggttcacctcctcctccggttcccgatttaccggcaagtgcggtagccggttccgattccatttccggttccggttcagtggtggcaggtttttcgccgacgctgatgcagggagcgccgtttcagg

SEQ ID NO: 160163 - DNA, 243 bp, Glycine max
gcgaagaatatgtattctagagattcatggggtggaccgttggagataaacgcgacggactcggcgacggaggacgagcggagcggaacctgcaggacgtcgacagggcagcgctgtcgcgtccttggatgagacgcagcagagctggctccttggccccggcgagcagaagaagaagaagtacgtcgatctcggctgcatcatcgtcagccgcaagatcttcaagtggaccctcggcacaat

SEQ ID NO: 160164 - DNA, 246 bp, Glycine max
cccagagatggtaccatgtacctcgatcttggttgaagccagatcataacctgttagttgtttttgaggaacttgggggagatccttcaaaaatttcacttgtaaagagatcagtgagcagtgtcttgctgatgtgtctgagtaccacccaaacattaggaattggcacattgatagctacggaaaatcagaagagttccatcctccaaaagttcacttgcattgtagtcctggccagaccatttc

SEQ ID NO: 160165 - DNA, 246 bp, Glycine max
aagcccctcaggcttccccttcaggatgtgtacaagattggaggtattggaactgtgccagtgggacgtgttgagaccggtgtcttgaagcctggaatggtggtgacttttgcaccaactggacgacaactgaagtcaagtctgtggagatgcaccatgaatctcttacagaggcacatcctggtgacaatgtgggattcaatgttaagaatgttgctgttaaggatttgaagcgtggttatgttg

SEQ ID NO: 160166 - DNA, 242 bp, Glycine max
taactagaaacagtgtgatgaaaatgaaggtccttactttcttcgttgctacaattttgctagcatggcaatgccatgcgtacgatatgttccctctccgaatgaacactggctatggtgcccgactccggaggtgaaatgcgcaagttggaggcttgctgtggaagcacacaacatctttggctttgagaccattcctgaagagtgcgttgaagctccaaaggaatacatccatggcgaac

SEQ ID NO: 160167 - DNA, 239 bp, Glycine max
ccgagtcgaaccatcatgctcgcaaactctgctccttatatcaatggccagcagaggtacgccgtcaacggtgtctcatacaatgcaccagataccccattgaaacttgctgactacttcaactcccgggagttttctacgttggaagcattcctacctatcctaacgggggcaataatgcctatctcccaacttctgtcatgggggctaatttccatgaattcgtggagattgtgttc

SEQ ID NO: 160168 - DNA, 241 bp, Glycine max
cctgttcctgctgatggtaaaactgttggtgagattgtgatgcggggtaattctgtgatgaaaggctacttaaagaaccctaaagctaacgaggagacctttgcaaatggatggtttcatccggggatcttgctgtgaagcatccagatgggtatatagaaattaaagacagatcaaaggacatcataatctctggtgctgaaaacatcagcagtgtagagatagagaatactctttactc

SEQ ID NO: 160169 - DNA, 240 bp, Glycine max
gaacaattggacatatagcaccagagtacctctcaactggaaagtcttcagagaagactgatgtttttggatatggtgtgatgcttcttgaactaataactggacaaagggcttttgatctactcgacttgccaatgatgatgatgtcatgttgctcgattgggttaaaggacttctcaaagacaggaaattggaaacactggtagatgcagatttacagggcaactataatgatgagga

SEQ ID NO: 160170 - DNA, 240 bp, Glycine max
gaagattctggtgaatgcgtagaaaaggaaaataaagaaattagcgtgaaaaatgttgggtgtgttcagcagctccatagtgtcgccgccggaggagctcgttgccgccggcagccgtacacgtcgccgaagatgacggcggcggcgctgcggaagtggttcgaggagaagaacccctccgcagtgtcggtggaggtcggagagcatgtccagctcgcttatacccaccagaacgagtcg

SEQ ID NO: 160171 - DNA, 262 bp, Glycine max
aactgcaactacaacaacattcattcattcacagctgtcacgccgtgaacggaaaatggcaacggcgagacgcagtttcccgcctatcaccgaatgcaacggaacgacaccgtgcgagtctgtggccgccgacctcgacggtacgctcctcatctcccgtagctcgttcccgtacttcatgctcgtcgccgtcgaagccggcagcctcctccgcggcctcatcctcctcctctcccttccgttcgtcatcatcgcctacctc

SEQ ID NO: 160172 - DNA, 196 bp, Glycine max
  unsure (1)..(196): unsure at all n locations
cccttacttcaatttcatcaacacaaccatcaatttcatcaaccatcgcataataatagtattatcatgatagccgtggcccgaaaggacatggaccggatcaagggcccgtggngcccggaggaggacgaggcccttcagaagcttgtggagcggcacgggcccagaaactggtcgctcatcagcaggtccattc

SEQ ID NO: 160173 - DNA, 257 bp, Glycine max
gttaacgagcacgagtacaagccagagcttgatattatttccaatgctagctgcacaaccaactgccttgctccacttgctaaggttattaatgacaggtttggcattgttgagggtttgatgaccactgttcattccatcactgccacccagaagactgttgatgggccatcagccaaagactggagaggtggaagagctgcttcatttaacatcattcctagcagcactggagctgccaaggctgttggaaaagt

SEQ ID NO: 160174 - DNA, 257 bp, Glycine max
gaaaaactgaagcaaaagaaattagtggcgttattggagaagttagttagcaaagaatggccaacagctaagctttatctctatggatcatgtgctaattcgtttggtgtttctaaaagtgacattgatgtttgccttgctattgaggaagcagacatggaaaaatctaagattataatgagattggcggatattttgcaatcagataatctgcagaatgtgcaggcattgacgcgtgcacgtgttcccatagtaaa

SEQ ID NO: 160175 - DNA, 254 bp, Glycine max
cttccaacgctcctcctgcttctcatagccttcgccacctctgtctccggccgccgtgacctcgtcggagactttctccggctgccctccgaaactgataacgacgacaacttcaagggcacccggtgggccgtcctcctcgccggttccaatggttactggaattacagacatcaggctgatgtttgtcacgcctatcaaatattgaggaaaggtggtctgaaagaagaaaatattattgtttttatgtatga

SEQ ID NO: 160176 - DNA, 259 bp, Glycine max
cggggagtggaaggaacgattacgggttcaaagcggagatagagacggtggggaagataaggcacaggaacataatgaggcttttgggttacgtgtcgaacaaggagacgaacttgcttctgtatgagtacatgccgaatgggagcttaggggagtggctgcatggtgccaagggaggtcatttaaagtgggaaatgaggtacaagattgcggtggaagctgcaaagggactatgctatttgcaccatgattgttcccc

SEQ ID NO: 160177 - DNA, 260 bp, Glycine max
ctaaggttattaatgacaggtttggcattgttgagggtttgatgaccactgttcattccatcactgccacccagaagactgttgatgggccatcagccaaagactggagaggtggaagagctgcttcatttaacatcattcctagcagtactggagctgccaaggctgttggaaaagtccttcctgctttgaacggaaaattgactggtatggcattccgtgttcccaccgtggatgtctctgttgttgacctcacagtg

SEQ ID NO: 160178 - DNA, 262 bp, Glycine max
cgcccctataccagtggtcaaggaaatttttcgaactgatggcgaacagttcctcaagtatccaccacctaaagtgatgcaggtggataagtctgcatggatgactgatgaagaatttgctagagaaacgattgctggtgttaatccaaatgtcattaagattcttgaggagttcccaccacgtagcaagctagattctcaagcctacggtgatcatacctctataataacaaaacaacacttggagcctaacttgggtggg

SEQ ID NO: 160179 - DNA, 256 bp, Glycine max
ggaagttggaagtcatggcagcaacattgatggcagcaacaacaagttctggtactcttaaagcaactcctttccttggccaaggcaagggtgccaatgccaatgctcttagggatgttgtctccatgggaactgggaagtacaccatgggcaatgatttgtggtatggaccagacagagtgaaatacttgggacccttctcagctcagaccccttcatacttgaaaggagaattccctggggattatggatggga

SEQ ID NO: 160180 - DNA, 256 bp, Glycine max
tgataacccataaccgaccgtaccaccgttttcctttgctttgcgttctacaatgtcgaaaacctcagagattcttacatgcaaagctgctatttgctggggaataggaaaacctgtgactgtggaagagatacaagtagaccctcccaaagccaccgaagttcgagtttagatgctttgtgccagtatatgctccacagacatctctactccgaaaaggattcccacataccaattttcctatagcacttggaca

SEQ ID NO: 160181 - DNA, 251 bp, Glycine max
  unsure (1)..(251): unsure at all n locations
attgattccgaagagaaaagaaaagatgtttgagccacaacagctatacacccgcgcgaagaccgaggacttcgacctcgaatcaggagaaaccctctacccagggctgagcgtcggcgagaaccagctccgatggggtttcatccgcaaggtctacggcatcctctccgcgcagatcgtcctccgcancctcgtccccgtcancancgttttctatactccaatcaatgacctcctcaagggcaattcca

SEQ ID NO: 160182 - DNA, 256 bp, Glycine max
gtaacatactaacatgttaatgcagatatttgtcagttgtaccatcttttagtttatgaactcgagcaggttgtccttgcatttggtgctgaaagtgatagaagtcttggtattccaggggagaacttgaaagggatacattcagctagagagtttgtttggtggtataatgggcacccatatggacaaaatcttgagccagacctaaagagcactgatacagctgtaatccttggccagggaaatgttgctttag

SEQ ID NO: 160183 - DNA, 257 bp, Glycine max
gtttttcatttcatcgtgcattcaatggccaccacagcagctctatccggaaccatggtgagcacctccttcatgaggaggcaacctatgaccaccacaagcctaaagacattccccaacgttggtgaagctctttttggtctgaaaagtggacgaggtggtcgtgtcacttgcatggcctcgtacaaggtgaagctcataaccccagaaggagaagtggagtttgaatgcccagatgatgttttcattgttgacaa

SEQ ID NO: 160184 - DNA, 255 bp, Glycine max
gaattatcaaaggtgaaacgaagaagccctaactacgcacgcattcgtgagataactcaatattcgtcgctcatggcactctcttctcgtctcttttccaaatccaaattgatctatggcagtcaaatacttctacaaaaggagcatgctattccagttcgtcactttgctaaagagtctgcccctcctgcccttaagggagacgagatgctgaagaacatttttgtggaggtgaagaacaaatttgagaccgcc

SEQ ID NO: 160185 - DNA, 252 bp, Glycine max
cgttcactcttcttccatcctttcctctctctctcaccctctgcatttcccaagcagagctgatattagaagatggcagacgctgaggatattcaaccccttgtttgcgacaatggaactggaatggtgaaggcaggatttgcaggagacgatgccccacgtgcagtgtttcctagcattgttggtcgtcctcgtcacactggtgtgatggttggtatgggccagaaagatgcatatgttggtgatgaggca

SEQ ID NO: 160186 - DNA, 248 bp, Glycine max
gtccctaatcctcaagattcactgtggatgatgaatttgaggactggggaatcaatggattctggatcttatctggagcgtccaggggagccggattgttcttattacatgagaacaggcctttgtagatttggtgcaacgtgtcgatttaatcatcctcctaacaggaagcttgctattgcctctgcaaggatgatatgcgagttcccagaaagaatagggcaaccagaatgccagtactatctgaa

SEQ ID NO: 160187 - DNA, 254 bp, Glycine max
ttggaatccaaaaatgagagtaatcatcagcattcacataggtcaggccgggatccaggttggcaactcctgctgggaactctactgcctggaacatggcatccagcccgatggcatgatgccaagtgactcctccttcggtgtagcccacgacgccttcaacaccttcttcagctcgaccggatccggcaagcacgtccctcgcgccgtcttcgtcgatctcgagcccaccgtcatcgacgaattccgttgtg

SEQ ID NO: 160188 - DNA, 256 bp, Glycine max
cgggtttgtaagagaaagagaaaagaggcgcaagatgagtggtagggtttctgggaaggtgaagtggttcaacgatcagaaggggtttggattcataacccctgacgatggcagcgaggaactcttcgttcaccaatctcagatcaaatctgacggtttccgaagcctagctgaaggagagtccgttgagttcgctattgaatctgaatctgacggacgcgccaaggctgttgatgtcactggccccgacggcgcc

SEQ ID NO: 160189 - DNA, 255 bp, Glycine max
tggagggtgagctaaacccagatgggaccagagtaaatcaatggagacttgtcagcatccaacaagtagaagaggttaaatgcttagcaagaattatcccaatttgggcagcagggattcttagtctcatttccatgactcaacaaggaacatttactgtgtcacaagcaatgaaaatgttccgtggaacaacccaagcttgtttcacagctcagcaacaatggcttctatcccatgcatcacccaccaccatca

SEQ ID NO: 160190 - DNA, 254 bp, Glycine max
atcaatgtaagcagggcatggaagagatacaatttgagcttaggtcttggactgaacaaagttgctgggaaggttttcagaattggacatcttggcaacttgaatgagttgcaactgttgggatgtctagctggtgtggagatgatactgaaagatgtgggctatcctgtaaagcttggaagtggagttgctgctgccagtgcatacttacaggacactattcctatgatcccttccaggatttgagtcacaag

SEQ ID NO: 160191 - DNA, 255 bp, Glycine max
aaaatgcttgttcgcgaccctagaaggcggctgactgcacatcaagtattatgtcatccttggattcaagttgatggtgtagctcctgacaaaccacttgattctgctgtattaagtcgcttaaagcaattttctgctatgaacaagctcaagaaaatggcccttataattatcgcagagagcttatctgaagaagaaatagctggcttaaaagaaatgttcaagatgatagatgcagacaacagtggtcaaatc

SEQ ID NO: 160192 - DNA, 252 bp, Glycine max
gcgcaccgtatcgtgttttcattagacgctgcaatcgttcttctcttgagtttggtcgtctgggatcagatctgctctctccgtttggattcaattcgacactttcctcgccttaaagattatgcgaacaacatggttgtccttgctgcatccattgtgagcaaatctgggaaagtgctagtttctagacagtttgtggatatgactcgcataagaattgaaggtcttctagcagcatttcccaagttggta

SEQ ID NO: 160193 - DNA, 252 bp, Glycine max
ctcttcttcgtctcaaacttctttgtcccttcgattcattccatttcttccaaaatggccaaagacccagttcgcgttctcgtcactggagccgcagggcaaattggatatgctcttgtccctatgattgctaggggagtgatgctgggtcctgaccagcccgtgatcctccacatgcttgacattcctccagcagcagagctcatgaatggggttaaaatggaattggtggatgctgcattccctcttctt

SEQ ID NO: 160194 - DNA, 251 bp, Glycine max
ctcattctccatacctcaacgaagatgctaaagagacggcaacactttgctgtccgccttgaccgagcagagcttcgtcttggccctcgattttgccctaaagtactctcagtcacaacagacaccgtcgtcgtcgtcgtcgtcatcaatggcaccgaagcagaccaaggctgagaagaagatcgcttacgatgcgaactgtgcgacctaatggaggagtacggccagatcctcgttgtgaactccgataa

SEQ ID NO: 160195 - DNA, 253 bp, Glycine max
  unsure (1)..(253): unsure at all n locations
caattgaccattctaacatggtcgntctttcaactcaaacttctggngccttgaccagggattggagcccaatgagtatatgtcctcctcatggaagggtgtcatcatcagangcaaatgcttttaatcacgaggcaagtcatttccttattggaagcagttctagtaatgctcctgtagatgttggaggttttcataatgaatttggaactagtagaaatcctactgctcctcaaagttttcataataatct

SEQ ID NO: 160196 - DNA, 252 bp, Glycine max
tgcgaatccctctctctatctctcacacacactttctctctctctctctctcacccagatcttgtagcaatggcgagcgctcccactccacgcgaagagttcgtgtacatggcgaactggcggacaggccgagcgctacgaggagatggtggagttcatggagaaggtctccgcctccgccgagagcgaggagctgaccgtggaggagcgtaacctcctctccgtcgcctacaagaacgtgatcggcgctcg

SEQ ID NO: 160197 - DNA, 255 bp, Glycine max
cactatagtaaaaaaaggacattcattcatctatggctacccttattgctcccagcaaccactctccccaagaagatgctgaagctctcagaaaggcttttgaaggatggggaactgatgagaacactgtcatagtaattttgggtcatagaactgtgtatcagaggcagcaaatcagaagagtttatgaggaaatttaccaggaggatcttgtgaagcgcctagagtctgagatcaaaggagactttgagaaag

SEQ ID NO: 160198 - DNA, 254 bp, Glycine max
gttgttgttctaaagcactcatccacacattctccgtcgccacgacaacaatggctccaaagaaaggtgcgaaaggtggagttgtagcagcaaagaagaaggttcaggagaaggtaacgaaccctttgttcgagaagcgtccgaagcagttcgggatcggaggcgcgctgccgccgaagcgggacctgacgcgcttcgtgaagtggccgaagaacgtccaaatccaacgcaagaagcgcatcctcaagcagagg

SEQ ID NO: 160199 - DNA, 247 bp, Glycine max
ggtgcaaaaaatattaagatgataaacattggagcacttgttgtactctttgcatttctcttcctcagttgtgcctatgtcacaagacacaacaacccttgtgcctgcaatcataacttttggtgactcagccgtggatgtagggaataatgactatcttcccacccttttcaaggctgattaccctccttatgggagggactttgctaaccaccaacctactgggaggttttgcaatggcaaatta

SEQ ID NO: 160200 - DNA, 253 bp, Glycine max
ccttgttctcctgctgtgctacattgttattggggcatgcttcttcgtacaaagaacaccctttaataaccaagctgatgttactaacatcacacttaaaccagccactaatgcagttttaagcgcttaattagtaggctttggcctatttcttgtcctttcctgagatgaagaatggtggtatcgatccaaacccaaaatcagattcaaattcaatggattggttattgtttcattctgatcacattgtcat

SEQ ID NO: 160201 - DNA, 254 bp, Glycine max
gcttgacattcctccagcagcagagtctttgaatggggttaaaatggaattggtggatgctgcattccctcttcttaaaggtgttgttgctacaaccgatgtggttgaggcatgcactggggtcaatattgcagtgatggttggtggattccctagaaaagaaggtatggagaggaaggatgtgatgactaagaacgtctccatttacaagtcccaggcttctgcccttgaaaagcatgctgctgccaactgca

SEQ ID NO: 160202 - DNA, 258 bp, Glycine max
caagaatatcaaattggtctcttgtcttcctcctcatctctacactactccacatcgccgcccagcctctcaagcccaagcccaagcccaagcccaagcccgttcataaaatcctcctgcagcagcacccagtacccagccctctgcgtctcatccctctccgtctacgcctccagcatccaacaggaccctcaccaactggttcagacagcactctccctctccctgaaccgcacccaagccaccaaaaccttcgtg

SEQ ID NO: 160203 - DNA, 251 bp, Glycine max
cttttgctcatttcctttgactcctcattatcaaagaaaatggctctcattgggttgctcttgatgggttttctcacaatgttctcctctgctcatgcctatggtggagggtggactaatgctcatgccaccttctatggagggagtgatgcatctgggacaatgggtggggcatgtgggtatgggaatctctacagccaagggtatggaacaaacactgctgctctaagcactgcactgttcaacaatgg

SEQ ID NO: 160204 - DNA, 252 bp, Glycine max
ggaatgcatctgcacaacatgctgctctcaactttggccagtacccttatggtggctatgtgcctaatcgtccaccactgatgagaaggttaataccagaagagggtgatccagaatatgcaagtttccatgctgaccctcagaagtattttctgaatgcattgcctagcttgctgcaagccacaaagttcatggctgtggttgacacactctccactcactcacctgatgaggagtacttgggggagaggc

SEQ ID NO: 160205 - DNA, 245 bp, Glycine max
gctggtcatgcatacacaaattgggctgcaaagatggccgttggattagccacaggtgtcccctgggtgatgtgcaagcaagatgatgccccagatccagtgataaatacatgtaatggattttattgtgattatttctctccaaataaaccatacaagcctagcctttggactgagtcttggagtggctggtttacagaatttggtggtccaatttatcagcgaccagttcaagatctagcatt

SEQ ID NO: 160206 - DNA, 248 bp, Glycine max
agagagagagagagagagaaccgacaagcaaacgaaaagtaaatcaatcaatcgttggaatctctcaacttatcgcttcttcctgatttgggggtttccgtttcaatggacgacggcgagctggatttctcgaaccatgaagtgttttcgagtccgaacatgggggagcttccgagcagcggttcaatggacagtttcttcgacgagcttctcaaggacacgcacgcgtgcacccacacccacacgtg

SEQ ID NO: 160207 - DNA, 192 bp, Glycine max
tcgtacgttaggtccgaattcagactcaggttggtgagagagggatacaactctcaggagggcaaaagcaaaggattgcaatatctcgtgcaatcgtgaagaatccatcaatccttttgttggacgaagcgagagtgcactggatgctgagtctgagaagagtgtacaagaggctcttgatcgtgtcatggt

SEQ ID NO: 160208 - DNA, 259 bp, Glycine max
atcaaagtttcttcctttctctgctctttgccttctctgacacatttggtgccttgtagagcgtgttttggcaggaaggtggtatggcgaaggacgttgaggttgctgagcgtgctccttctctgggaaggactaccaggacctctccaccagcaccactcattgatgctgaggagctcacaaagtggtccttttacagggctctcattgctgaattcattgccactttgctcttcctctacattactgtgctcacagt

SEQ ID NO: 160209 - DNA, 252 bp, Glycine max
gaaaactgggcagcctcgtggattcgggtttataacatatgcggatccctctgtggtcgataaagtgattgaggcacctctggtcatcaatggcaaacaagttgagattagcggacgataccgaggggagctgttggctctaaggattttaggacaaagaaaatttttgtaggtggaattccttcaaatgtgactgaagatgaatttagagacttctttacacgctacggcgaagttaaagatcaccaaata

SEQ ID NO: 160210 - DNA, 173 bp, Glycine max
aggccttgagggctcaccagatttgaaggctgcaaaagaagttgctgactatctaggcactgtccaccatgagtttaccttcactgttcaggatggaatagatgccattgagatgttatctaccatgttgaaacatatgatgtgactacaattagagctagcacacccatgtt

SEQ ID NO: 160211 - DNA, 256 bp, Glycine max
gtcagagtgacatctactacatcaccggtgaaagcaagaaggctgttgagaactccccattcttggagaagttgaagaagaaagggtatgaggttcttttcatggttgatgcattgatgaatatgctgttggccagctcaaggaatttgagggcaagaagcttgtctctgccaccaaggagggtctcaaacttgacgagagtgaagatgagaagaagaagcaagaggagttgaaggagaagtttgacaacctatgc

SEQ ID NO: 160212 - DNA, 256 bp, Glycine max
atcctgtatgggttggaaagcagctgtgaaactcattaggcactggaaaattctcagaggagataatgttatgataacaaggggcaaagataagggtgagaccgggattctaagcgtgtcattcgctctcaaaatcgtgtcattgtagagagtaaaaacctggtaaagaagcatataaagcaagggcaaggtcatgaagggggcatctttacagtggaagccccactgcatgcctccaatgtgcaagttcttgacc

SEQ ID NO: 160213 - DNA, 252 bp, Glycine max
gaagaagattaaatgggttcctctatgcagacttgtctgattttgttatcacttgcttctgcttccttcgccgccaacccaagaacaccaattgatgtgccatttggcagaactatgtgcctacttgggcctttgatcacatcaaatacctcaatggtggttctgagattcagcttcatcttgataagtacactggtactggcttccaatccaaaggatcctacctgtttggtcacttcagcatgtacataa

SEQ ID NO: 160214 - DNA, 238 bp, Glycine max
ctacaccgaaacaggtttcctataaaatcccgcacgtgccgttgcagatgagctgaaatcgagaagaagaagaagaagaagatggagaagtatcagatctggagcaggagatagcgttggcagcgtttgcgtttgctctgctgttccaatcggcctcagcagacgacgtcgttgtgctctctgaagataacttcgagaaggaagttggtcaggacagaggactccccgtgaagtccaa

SEQ ID NO: 160215 - DNA, 250 bp, Glycine max
  unsure (1)..(250): unsure at all n locations
cctttctcctaaaacatctccagtgggttcttcttcttctattacaactacgacatcaaagaccatgaccatggccatggccacgatcctgctcctgttcacggtctcgcggtttcatcggccctagacatgtcgataatctcgtagnacaacgcccacgccgccacgtcgcgcaggagtagcgagctgatgtccatgtacgagcagtggctagtaaagcacggcaaggtgtacaacgcgctcggagaga

SEQ ID NO: 160216 - DNA, 254 bp, Glycine max
attgctcacaggatctgttcaccctacaagggatgaaaatggcaacttactcgtgactgagtttggattgtgcaaatacaaagatcatcaaactttgtccattcaagagttcccgagaattctgctcctggtcaactcccaagaacagtggatgtcattgcagaagacgatcttgttgattcttgcaagcctggagatcgagtggcaattgtggggatatataaggctcttgcagggaaaagcaaaggcagtgt

SEQ ID NO: 160217 - DNA, 253 bp, Glycine max
ggagcggcagagtctgaaataaagaaaaagtataggcgactttctattcaataccatccagataaaaacccagatccagaggcacacaagtacttcgttgagtacattgcaaagcttatcaagctcttacagatccaacagctcgtgaaaattatgaaaaatatggccatcctgatggcaggcagggattccaaatgggtatagctcttcctcaattcctgctaaatattgatggggcatctggtggaatact

SEQ ID NO: 160218 - DNA, 244 bp, Glycine max
aatagaacaaccactcaccccctctccgatctaatggccaccgtaatcgacggcaaagccgttgcgcaaatcatccgatctgaaatcgccgacgaggtgcgcctctctctcaaaaatacggcaaggttccgggactagcagttgtgatagtagggaacagaaaggattcacaaagctacgtgggaatgaagagaaaggcatgcgccgaattgggaatcaaatccttcgatgtggaccttcccga

SEQ ID NO: 160219 - DNA, 254 bp, Glycine max
atggctgctgggactggactctttgcagagattttggatggagatgcgtacaagtactatgctgatggagagtggaagaaatctgcttctgggaaaagtgtttccacatcaaccccactaccagaaagactcaatacaaagttcaagcttgttcacaagaggaggttaataaggtcatggacttagcaaaatctgcacaaaagttatgggcaaagaccccactatggaaacgtgctgcgtcttcacaaagcagt

SEQ ID NO: 160220 - DNA, 251 bp, Glycine max
acacacgatacaacttggactacctgcgacagttaaagttgctgcaaaccttgtccggcttctcgcatataacaataagaatttcttacagaccgggttaattgttgtggttgggataaatatgaaggtggacaaatttatggagttcctctgggtggaacaatagtacagcaaccttttgctatcggaggatctgggtccagttacttgtatggtttctttgaccaagcctggaaagagggaatgaccaa

SEQ ID NO: 160221 - DNA, 251 bp, Glycine max
cctgcacccaggggtgttcctcagattacagtgtgctttgacattgatgccaatggtatcttgaatgtctctgccgaagataaaaccactggccagaaaaataagatactatcaccaatgacaagggtagattgtcaaaggaagatattgagaagatggttcaagaggctgagaagtacaagtctgaggatgaagagcacaagaagaaggttgaggccaaaaacgctttggaaaactatgcatacaacatg

SEQ ID NO: 160222 - DNA, 245 bp, Glycine max
ctcttggctataaaataccagaatttaatgagttagtataccaaaattttgcggcatgaagcattagagaggcttcttgaaacaaataactttccagagtttatggtcgggtgtgcccagcaccttgtgaaggttcttgtgttcttggtattattgagaatcccgtatccattaaaagcattgaatgtgccatcatagacaaggcttttgaggagggttggatggtgccacgacctcctgtccag

SEQ ID NO: 160223 - DNA, 245 bp, Glycine max
cagctttgaacgccgaagaaggttcatccaatccccgaagtccttcaccgcattgccaccatgtcgaggagaaaggtcagagagccaaaggaagaaaacgtgctctgggcccagctgttagagatggtgaacatgtctttggcgtcgctcgcatctttgcctccttcaatgataccttcattcatgtcactgatttgtctgggagggaaacgcttgtccgcatcactggtggaatgaaggttaag

SEQ ID NO: 160224 - DNA, 172 bp, Glycine max
gcaatagctagctgttagaaatgaaccactactgtgaaagatgttgaatcatacgtacgtgtgttctatcagagaagctgcttttgatcttgtgttactacggagatgccaaatgagtggccgttgttcttgtttgagtttgctttagtaagaatccctttttcagttacaa

SEQ ID NO: 160225 - DNA, 249 bp, Glycine max
gagaatctgaaagacatgcctctgtctttgggggttatatagggtttttggctgagtagcaatttgttgttgttgcaaccaatttttgaagaaaagatgggggaacagcagcttccaatcctgctttgcaagtgtctgtttcatttggtagatttgagaatgattccttgtcttgggagaaatggtctgctttctcaccaaacaagtacttggaagaagttgagaagtgcgccactcctggatcagttg

SEQ ID NO: 160226 - DNA, 250 bp, Glycine max
agagaggaaagtagtagaagaatacagggcagagctgcagccaacaccacccatggctgaatccgtttcagtggacatggagatgatctttctcggcggaaaggacatcatattcaaactggctgtggttctgtatctgtaatagtctgtggggatcaagaaaaaccagctctgatcacttatccagatatagcgctaaattatatgtcatgtttccaaggattatttttctgtccagaggcaacttctt

SEQ ID NO: 160227 - DNA, 165 bp, Glycine max
ctttgtggtaacaaggttgatgtcaagaacaggcaagtgaaggcaaagcaggttaccttccacaggaagaagaatttgcagtattatgagatttcagcgaagagaactacaatttcgagaagcctttcctctatttgaacttcctgcaagtttcctggccaaata

SEQ ID NO: 160228 - DNA, 242 bp, Glycine max
ctcaattttccttctctttcagccatgaatccttctgagcaatttgtggaacatggaatgtctcagcagaatttaaagagaacatcttgtgcaactgtgccactctagcataccaaagtcttggaatagtttatggtgacctcagcacttctcctctttatgtttacaagaccacgttctcagggaaattgaggctcaaagaagatgaagaggaaatttttggcgtgctttcatttatcttc

SEQ ID NO: 160229 - DNA, 241 bp, Glycine max
gtaaattaagagcatggctgcacaagctcttgtatcatcatcatctcttaccttctcagccgaggctacaagacaaagtcttggaccaagatcactccaatcccatttggcttctcaagaaaagcctcctttcttgttaaggcagctgctactccccctgtcaagcaaggatcagacagacctttgtggtttgcatcaaagcacagtctttcctacttggatggcagcttccgggtgacta

SEQ ID NO: 160230 - DNA, 247 bp, Glycine max
cgcaaaaatggcacctgcaacactgtctctgtctctcctcctcctgttctcactcagcatcgccgtaaccgttagatcgagcgactacgactacgattgtgtgacactgcatacgttagaaccggttcggtgttgaagggcggaacggactctaagatcgggctgaagctgtacgacaagtacggctactacatctacattaaaaacctcgaagcatggggcggcttgatgggcaagggctacgact

SEQ ID NO: 160231 - DNA, 267 bp, Glycine max
tagagatactgttggtcgttgtatggatgtaagcaaaggtttcacattttctgaaataaattctgtacgtgcaagcactaacaaagttgtctgttgccatttctcatctgatgggaaattgcttgctagcggtggccatgacaaaaaggctgttttatggttcacagattctctaaaacagaaagccactcttgaagagcatgcatatttaatcactgatgtccgtttcagtccaagcatgcctcgtcttgcaacatcttcatatga

SEQ ID NO: 160232 - DNA, 250 bp, Glycine max
cgttaagctagtggcgatcggatccagctacagcatagagatcaaggaaggaaggaaggaagatgttgggtgttataaggcacaagagtattcgccctgccttctccgcaatcagacacttgtcttctgcagctaaagagattactgtcagggaggctctgaactccgcactcgatgaggaaatgtcagctgatcctaaagtgttcttgatgggtgaagaggttggggaatatcagggtgcatacaagat

SEQ ID NO: 160233 - DNA, 247 bp, Glycine max
tcgagccgctcgagccgattcggctcgagtcccgagctcatacccttgagccatgtcagtgccacgacgctcggtgccaagctcaccgaggttcggaagaacgggacatgcccttggctgagacctgatggcaagacccaagtcactgttgagtactacaatgacaagggtgccatggttccaatccgcgtccacactgtgctcatctccacacagcatgatgagcctgtcacaaatgatgagattg

SEQ ID NO: 160234 - DNA, 256 bp, Glycine max
gcgcgatcctcgtgactcgcgacccctcgggtttaaatcccctgcgacgcagcacaggctactacttcaccatcgccggataaaatggtcgacgacggagcaacctcggcggcgacgagccggagaaagccgtcgtggagagaaagagaaaacaacaggagaagagaacggaggagaagagcaatagctgcgaaaatatactctggacttcgagctcaggggaacttcaacttgccaaagcactgcgacaacaacg

SEQ ID NO: 160235 - DNA, 259 bp, Glycine max
cgagcaacaatcggttactggtttcccaaatgtcgacgattccaatagttactggattgtaagacctgagccaggaacttctgctaaacaaggtgaccccattaaaagtggcacaatcattagattgcagcacatgagaacaaggaagtggctgcacagccatttgcatgcatccccgatatcaggcaatcttgaggtcagttgttttggaggagaatccgaatctgacaccggggactattggaagcttataatagaa

SEQ ID NO: 160236 - DNA, 253 bp, Glycine max
ctcgcaagcaaaaagaaagaatcccaggcgaggagaaagatggaggggaaggagcaggatgtgtcgttgggagcgaacaagttccccgagagacagccgattgggacggcggcgcagagccaagacgacggcaaggactaccaggagccggcgccggcgccgctggttgacccgacggagtttacgtcatggtcgttttacagagcagggatagcagagtttgtggccacttttctgtttctctacatcaccg

SEQ ID NO: 160237 - DNA, 195 bp, Glycine max
attcggctcgagtagggttatcatttctccatttccattttctctctcactgttcaagaatcgtaagctatgggaaagtcttacccaactgtgagtgctgattaccagaaggccgttgagaaggcgaagaagaagctcagaggcttcatcgctgagaagagatgcgctcctctaatgctccgtttggcatggcac

SEQ ID NO: 160238 - DNA, 255 bp, Glycine max
gtcaaaaccaccactaccgttgatgaagctctggaggctcttgtaaactacagaatcagtggtcttccggtaatcgatgaggtctggaatctggttggagttgtatctgattatgacttgttagctattgattcgatatcaggaggtcctcaaagtgatgcaaacttgttccccaatgttgatagtacttggaaaacattcaatgagttacaaaaactgcttagtaagactaatggccaagttgtcggtgacttg

SEQ ID NO: 160239 - DNA, 238 bp, Glycine max
atccaaccccaagcatcatagaatctgaccaagagctccaagcatggtggagagaaatcaaaacagtgggtcatggagacaaatctgaagaaccatggtggccaaatcttaacacatcaaaagatcttattgacatcataaccacaatagcttgggtagcatctggtcatcatgcagctgtgaacttttctcaatatgcttatggaggctatttccctaaccgacccacaattgcaag

SEQ ID NO: 160240 - DNA, 115 bp, Glycine max
attatgatgtctataatgatttgggtaacccagacaagagcaatgatctagctcgtcctgttcttggagggtctagtgcctatccatatcctcgcaggggaagaactggtagaaa

SEQ ID NO: 160241 - DNA, 243 bp, Glycine max
cttctattctattctaaactcgaaacaatcttagagaaagaagcagaagaaaatgccgatttctagaattgccattggaaattcttcggagttgaaccaatctgatgcacttaaggctgcactagctgagttcatctcaatgctcatctttgtttttgccggggaaggctctggaatggcttataataagctgacaaacaatggctcagcaacaccagcagggttagtggcagcatcactgtc

SEQ ID NO: 160242 - DNA, 157 bp, Glycine max
catcacattacattagattggtggtaatggcagcgtcactacaagcagcagctactttcatgcaacccaccaagttgagcaggagcaacactttgcagcaaaagtctactcagtccatttccaaggcttttggtttggaacctgttggagctaaaaa

SEQ ID NO: 160243 - DNA, 145 bp, Glycine max
atggctcctaagggtttaacctttctggctgtgttaatatgcgtttcagcactgtcactgagtgcttctgttgcgggggaagggcaaaataatggccttgttatgaacttctacaagggatcatgccctcaggctgtagacatca

SEQ ID NO: 160244 - DNA, 122 bp, Glycine max
ctgcaaatggagttgggaggaaaagatgcctgcattgtacttgaagatgctgacctggatttggttgctgcaaacattataaagggaggtttttcatacagtggtcagagatgcactgctgt

SEQ ID NO: 160245 - DNA, 143 bp, Glycine max
catggccacctctgctattcagcaatcagcattcgcaggtcaaactgctctgaagcagctcaatgagttggtccgcaagaccggtggcgccggcaaaggtcgcaccaacatgcgccgtaccgtcaagagtgctcctcagagca

SEQ ID NO: 160246 - DNA, 164 bp, Glycine max
cggctcgaggcttggtggtgtcacatcgcttatttgtggattccttggaatgaaaattgcaacttacgccaatgggagaaccaccctggaggcaagaaagggtgttgggaaggctttcattacggcttttagatctggtgcagttatgggttttctccttgctg

SEQ ID NO: 160247 - DNA, 237 bp, Glycine max
cgcagagaagaacagagagagatccatccatcaattccaatggccgatcagctcaccgacgaacagatctccgagttcaaggaagccttcagcctcttcgacaaggacggggatggttgtattaccaccaaggaacttgggaccgtgatgcggtcacttggccagaacccaactgaggcagagctgcaggacatgataaatgaggttgatgctgatgggaatggtaccattgatttc

SEQ ID NO: 160248 - DNA, 237 bp, Glycine max
ggaggaggcggtggaggagatgatgaggattcacagatcccttcgagcccggccagggatagacgaagtcgaagtggctagaggtttgatcgggaatgttgagaaagaagaccaggcgatgctccaagccatagcgcggcagagcaagggcgttcatgtgccccaagagctcttcatggtgctccacgagatgcagaggaacttcctttggtcaccagagcaaggagcagataagag

SEQ ID NO: 160249 - DNA, 235 bp, Glycine max
ccaaccccaagcatcatagaatctgaccaagagctccaagtctggtggaaacaaatcaaaacagtgggtcatggagacaaatctgaagaaccatggtggccaaatcttaacacatcaaaagatcttattgacatcataaccacaatagcttgggtagcatctggtcatcatgcagctgtgaacttttctcaatatgcttatggaggctatttccctaaccgacccacaattgcaa

SEQ ID NO: 160250 - DNA, 155 bp, Glycine max
cattggtgagactctcgaacagcgtgaagctggtccaacaacggctgttgtttctgagcaaacaaaagcaattgcagctaaaatatcaaattgggacaatgttgttttggcctacgcgccagtttgggccattggaacaggcaaggttgctactc

SEQ ID NO: 160251 - DNA, 254 bp, Glycine max
caagcctcttaccggatcacctcgcacagaaacatcaatcattaatggaacttataggggatttatggaagttatactgcagaacaatgatactaagatgcatacttatcacatgagtggatatgcattttttgtagtcgggatggattttggtgattggtctgagaatagcaggggtacatataacaagtgggatggaatagctcgcactacagtacaggtctatcccggagcatggacagcaatttggtttc

SEQ ID NO: 160252 - DNA, 262 bp, Glycine max
cgagtgcaattgaagttgaagtcttgcccttctctcttcaactccaaacacaagacatcatcatccatggctgcctccgtctccactgtcggagctgtcaacagagctcttttgaacctgaatgggtctggacctggggtttcagctcccagttcatccttctttgggagcagcttgaagaaggttattggctcaagggtccccaacacaaagatttcctctggaagcttcaagattgttgctgtagaagagaagaaagaga

SEQ ID NO: 160253 - DNA, 257 bp, Glycine max
gcagaaagaccactgagtctaggggatgtaacagccaagaacttaaaggaggttggattcaacacatgggagaagttaattctcagggatccatctgagtactctggtaagttatcatttgaatacaaatcagctgagagagagaagctggagaaggagggatacagaatcattggaaacgttggagaccaatggagtgacctcctgggaagcaacaaagggactaggacttttaagctgcctaatcccttgtacta

SEQ ID NO: 160254 - DNA, 229 bp, Glycine max
gtagtgaagaaaatgaaagtccttgttttctttgttgctatagttctagcagcatggcattgccatggctcagaccatgaccatgaccatggccacacctaccaaattttccctctgagaatgaaaactggccatggtggccactacattccggaggtatcatgccaaagttggaggcttggtgtggaagcacacaacgtcattgactggaaaaccgttcctcaagatt

SEQ ID NO: 160255 - DNA, 257 bp, Glycine max
cggggttcaacatcattcacgcgataaacgcgtgggaggaggacgagggaagaacggtggtgctggtggcgccgaatattctttcgatggagcacgcgctggagagaatggagctagttcacgcgatggtggagaaggttcggatcgagctggacacagggataatcacgcggcaaccggtgtcggcgcggaatctcgatttcgcagttataaaccctgcgttcgtggggaagaagaacaggttcgtttacgcggcg

SEQ ID NO: 160256 - DNA, 230 bp, Glycine max
gggggttactgtctgttcaagctaccatctctctctctctttcttagtgcctccttgccagaagttaaaatggcccaagaaactttcctattcacatctgaatcagtgaacgaggggcaccctgacaagctctgtgaccagatctccgatgctgtgctcgatgcatgcttggagcaggaccctgacagcaaggttgcctgtgaaacctgcaccaagaccaacatggtgat

SEQ ID NO: 160257 - DNA, 256 bp, Glycine max
tcgaggaagaattaaaaggaattgaagaagatccaagataggttcatatggagaggtataccatgctgactggaatggcacggaggttgctgtgaagaaatttttggatcaggatttttcaggcgctgcattatcagaattcaaaagagaagtgcggataatgcgtaggctacgtcatccgaatattgttctttttatgggtgctgttactcgtcctcccaatctgtcaatcatttcagagtatctaccaagagga

SEQ ID NO: 160258 - DNA, 251 bp, Glycine max
ttctttcgttgtttctcatgctgatgggaatttgtacgtatatgaaaagaacaaagatggcgctggtgattcttctttcccagttgtaaaggatcaaactcagttttcggttgcccatgcacgttacagtaagagtaatcctatagcgagatggcatatatgccagggttcaattaatagtatttctttctcgatggatggggcattcttagcaactgttgggcgagatggttatttacgagtgtttgatt

SEQ ID NO: 160259 - DNA, 261 bp, Glycine max
cggtccgaattcggctcgtgatcctatcatcatggtggccaactgggaatgcagaatagaggcctcaaattggtctacctaaagatcaaagccctccaccttacacgagaccagatgacctcaagacggcatggaaggttggtgttctcactgcggtcatcaagcatatgtcccctgatattgccaaaattcgcaagcttgtgaggcagtctacgtgtcttcaagacaaaatgactgcaaaggctagtgctacctggcttg

SEQ ID NO: 160260 - DNA, 183 bp, Glycine max
gcaagaatggcacttcgttgcttggtgatgtccctttctgttctcttcactcttggtcttgcgagagaaagccatgccagagacgaagatttttggcatgctgtttggccaaacactcccattccaagttcattgcgagatcttctaaagcctggccctgcaagtgttgcaatcgatgatcac

SEQ ID NO: 160261 - DNA, 201 bp, Glycine max
gaatttatgggttttgactctgcgagaaatattgcttggatctcgtcattattctacgccagttgatgtttggtcagtgggatgtatatttgcagagatggtaaaccgacgacctctattccctggggactctgagattgatgaattatttaaaatattcagaatcttgggtaccccaaatgaagacacatggcctggtgt

SEQ ID NO: 160262 - DNA, 254 bp, Glycine max
gtttgtgagaaaatggaagctgcgatgggactgatgcggaggattcctccgaaacacacagaaacagctctgtcagcgcttctgagccttatgcctgacaactcctccgatctcctctctcaagtcgatcagcccctccaggttctgtgcgatgtggaatgcggcaaggagttcattttgtgcgaatacaatcgagatgccgactcttacagatcaccttggtccaataaataccatccaccattagaagatgg

SEQ ID NO: 160263 - DNA, 255 bp, Glycine max
ctggaggccaaattcatgtaccaatatatgtcactggcattatcaaagtcagcaatgcggaaattgctgttcttgacagtgatcttggaagtgttgaaacccaaaaaacgctagatttggctggaaatgatgttgtttcactctcagctaaccacttgcaaaagttgcgcttttctttccaattgacaacacctcatgatcatgcttttaagcctcttcaggcatttttcaagttgaagcatgagacaaagcatg

SEQ ID NO: 160264 - DNA, 247 bp, Glycine max
acggacgtgacgacatggagcccggcggggaggctgttccaggtggagtacgcgatggtggcggtgaagcagggctcggctgcgatagggctccgatccaagacccacgtggtcctcgcatgcgtcaacaaggctaactccgaactttcatcgcaccagaagaagatcttcaaggtcgacaaccacatcggcgtcgccatcgccggcctcaccgccgacggccgcgtcctctcccgctacatgcgat

SEQ ID NO: 160265 - DNA, 173 bp, Glycine max
attcggctcgaggaaagtgcttgtgttgtttgttgctacagttttggtagcatatgaatgccatggctcagactaccagaagttccctctccaaatgaaaactgggtttggtgggcaatacagcaatgaggtggcatgtgccagttggaggcttggcgtggaagcaaacaacg

SEQ ID NO: 160266 - DNA, 245 bp, Glycine max
gttctttggaagctgtactgttatgtgttcctgttgattatcaatgtgtggatctgtctttgtacaaggatagtcaaatcgtcctgttactaaacaaagctactaatacatctgaaagtgctggagatggttgtatgatgattctgcaagtaagtgatctaccatatgtctctatgtcaagatctgcttgtatagatgtttggaggttaccagaactaaaggattctgtcgcttacctgaatatt

SEQ ID NO: 160267 - DNA, 96 bp, Glycine max
aaaatggctaggggactaaagaagcatttgaaaaggctcaatgctcctaagcattggatgcttgacaaactgggtggtgcatttgcgcctaaaccc

SEQ ID NO: 160268 - DNA, 247 bp, Glycine max
cttagaaatcttgatgaggccaaggttgcttttccttgatgaaccaaccagtggacttgacagtgcttcagctttctttgtgacgcagacactacgtgccttggcaagggatggaagaaccgtgatagcctctattcatcagccaagcagtgaagtgtttgagctatttgaccaattatacttgctctctagtggcaaaactgtttattttgggcaagcttccgaggcatatgagttctttgcacaa

SEQ ID NO: 160269 - DNA, 239 bp, Glycine max
ggaaagggtgtgagaagagaatggagagtaaagaggaagatgttaacgttggagcaaacaagttctcagaaaggcaaccaattggtacagcagctcagggtggtggtgacaaggactacaaggaggcacccccagctcctttgtttgaacctggtgagctcaaatcatggtccttctacagagctggaattgctgagtttgtggcaactttcttgttcctctacattaccatcttaact

SEQ ID NO: 160270 - DNA, 243 bp, Glycine max
caaattctttgagttgaacacaggggccaagattccttctcttgggttagggacttggcaagctgaacctggtgttgtagctgaagctctcaccacagccattcaggttggatacaggcatattgactgtgctagtgcgtataagaatcaagcagagattggttctgctcttaagaagctttttgatgatggtgtggtgaagcgtgaggaacttatggatcacgtccacactctggtgttcag

SEQ ID NO: 160271 - DNA, 207 bp, Glycine max
caatgtcattaatggtggatcacatgctggaaacaaacttgctatgcaggagtttatggttcttcccgtgggagcttcctctttcaaggaagccatgaagatgggtgtagaagtatatcacaatttgaagtctgtgattaagaagaaatatggtcaagatgcagtaaatgttggtgacgaaggtggctttgcccctaacatccagga

SEQ ID NO: 160272 - DNA, 250 bp, Glycine max
aagaaaggttagagagccaaaggaagaaaacgtgactctgggcccagctgttagagatggcgaacatgtctttggcgtcgctcgcatctttgcctccttcaatgataccttcattcatgtcactgatctgtccgggagggaaacacttgtccgcatcacaggtggaatgaaggttaaggctgacagagatgaatcgtctccctatgctgctatgcttgctgcacaggacgttgctgccagatgcaaggaa

SEQ ID NO: 160273 - DNA, 237 bp, Glycine max
  unsure (1)..(237): unsure at all n locations
ctcccctcttccccacccaaccttctctcnatcacacacacaagtcaatggataaaaaacaacagtgtaagacgtctcaagatcctgaagtgagaaaagggccttggacaatggaagaagacttgatcttgatgaactatattgcaaatcatggggaaggtgtttggaactctttggccaaagctgctggtcccaaacgtaacggaaagagttgccggctaaggtggctaaattacc

SEQ ID NO: 160274 - DNA, 262 bp, Glycine max
ggatggcttcggtgtcaacacctacacccttatcaacaaggccggcaaagcactctatgtcaaatttcattggaagaccacctctggcgaaaagtctcttttggacgacgaggccatcagggttggaggatccaaccacagtcatgccacccaggacctttacgattcaattgctgctggaaactatcctgagtggaaactctacatccaaacattggatcccgaaaacgaagacaggcttgactttgacccccttgatgtt

SEQ ID NO: 160275 - DNA, 239 bp, Glycine max
atctatctatccatctatcttttctaacatggctgctgggactggactctttgcagagattttggatggagatgcgtacaagtactatgctgatggagagtggaagaaatctgcttctgggaaaagtgtttccatcatcaaccccactaccagaaagactcaatacaaagttcaagcttgttcacaagaggaggttaataaggtcatggacttagcaaaatctgcacaaaagttatggg

SEQ ID NO: 160276 - DNA, 231 bp, Glycine max
gtgacacaaatctagggagcgctactctaaaagttctattagattcttcaaaacatggccatgcatcgcgagtcttgggcttttgtcttcggcgttatgggcaacatcatctcctttggagtgttccttgctccattgccaaccttttaccaaatctacaagaagaaatccactgaagggttccagtcacttccttatgttgttgcactgttcagtgcaatgctttggatt

SEQ ID NO: 160277 - DNA, 229 bp, Glycine max
ggaggtgccgaagatgaagtcgactgtgccggagatgacgcagttgcggtagaacatggctacaggaatcgtgatccagggttgcaacatcgtcccagaagccgaacttttccctacaaggttccaagtgaagtcataccttggaaggccatggaagcaattctcaaggacggttgtgatggaatccaccgtgggtgacttccttcaccccgaaggatggtgcccatgg

SEQ ID NO: 160278 - DNA, 238 bp, Glycine max
caagaacattagtttcactgtctgggatgttggtggccaggacaagattcgtcccttgtggaggcactacttccaaaatacacagggtctcatttttgttgttgacagcaatgacagggacagagttgttgaggccagagatgagttgcacaggatgttgaatgaggatgaactgagagatgcagtattgcttgtatttgctaacaaacaagatcttcccaatgcaatgaatgctgct

SEQ ID NO: 160279 - DNA, 237 bp, Glycine max
ggtggagctgccacagctttaacgtacgatgaagccctgggacaacctttgagcctccctggtgctggggactttgatgtgaacggttttgtggagagtgtcactggctttgcagctgaaaaccctgcaattcttgctgggggagtagctgttttggcagtgccattggttttgtctcaggttcttttcaagaagcctaaggcttgcgggtgttgagtctgccaagaatgcttatgc

SEQ ID NO: 160280 - DNA, 227 bp, Glycine max
cctcattctacttaaaactcccaccagtgatggcaggtttggctccagagggaacacaattcgatggtcgccaatatgatgctaagatgagtgaattgctttccactgatgggcaagaagtcttcacctcttatgatgaagtgtatgacagctttgatgcaatgggattgcaagagaatcttctgcgaggcatatatgcttatggttttgagaggccttctgctata

SEQ ID NO: 160281 - DNA, 159 bp, Glycine max
gctctcaccaacttccgctacttcctactccaaccactttcttgtttcccgcagtcatgggcaaggtcaagatcggaatcaacggatttggaagaattggccgtttggtggccagggtggctctgcagagagacgatgttgaactcgttgccgttaacg

SEQ ID NO: 160282 - DNA, 227 bp, Glycine max
cacccagagacgaggaagggcgtagtaagcgacgaaatgcttcggggagttgaaaataagcgtagatccggggattcccgatataggtcaacctttcgaactgctgctgaatccacgggcaggcaagagacaacctggtgaactgaaacatcttagtagccagaggaaaagaaagcaaaagcgattcccgtagtagcggcgagcgaaatgggagcagcctaaaccgt

SEQ ID NO: 160283 - DNA, 141 bp, Glycine max
ttcattctcatctttcgctcttctctctccacccaaaccctaactcccgaccctgttcccctctcgtatccgtcatgaaaggaggaaagtccaagaccgaatctaagagagccgatcccaaacttgctgtgaataagaagg

SEQ ID NO: 160284 - DNA, 273 bp, Glycine max
cagatattgtgtttgtcgtttgcctttgtgcaagatttcagtcttatccaaaaatttctcatgttactgcagttaaaaggatcttaagatatcttgttggaactactaatcattgtctatggtttaagaaaaggtctgagtttgatcttttaggatattgtgatgtttattttgctggtgataaagtagaaaggaagagcactagtagaaatggatgacccgttgtggcgagtgtctctaaacttcaagtctttagctttgtagattgttgtg

SEQ ID NO: 160285 - DNA, 221 bp, Glycine max
  unsure (1)..(221): unsure at all n locations
gtagagtggacaccctcattgacaaggcccttgagnaaattggcaccccagtggcccttaatctacgcgggaaggcagcggtagcccaagcagcattggcttaccagctctaccaaaggaaattttctggtccaaggtgggaagctctagttaaaaagggggccaagaagcaaaggctcctctgggcctcaaccagtgtaaagaatcctgcctattctgac

SEQ ID NO: 160286 - DNA, 268 bp, Glycine max
ctcaatttcatgaagcgcaaagaacagcttcagaggcatatgaggaaatgtgatcttaagcatccccctggtgatgagatatacagaagtggtacactgtcaatgtttgaggtcgatggcaaaaagaacaaggtttatgggcagaacctttgttatttggccaagttatttcttgatcacaagaccctctattatgatgtagacctgtttctgttctatgttttgtgtgaatgtgatgatcgaggatgtcacatggttggctatttct

SEQ ID NO: 160287 - DNA, 263 bp, Glycine max
caaccagcttgcagaagcagatgagtttgaggacaaaatgaaggaattggaaagcatctgcaatccaatcattgccaagatgtaccaaggtggtgctggtccagacgtgggtggtgctggtgcagcagaggatgagtatgctgctcctccttctggtggaagtggtgctggccccaagattgaggaagtggactaaatgtagttgctttcctccagatacctgttttaaaaacttattttactttatgcttttttaattggat

SEQ ID NO: 160288 - DNA, 265 bp, Glycine max
agagaacttcaactgagggtgagagtgacacaaatctagggagcactactctaaaagttctattagattcttcaaaacatgaccatgcatcgcgagtcttgggcttttgtcttcggcgttatgggcaacatcatctcctttggagtgttccttgctccattgccaaccttttaccaaatctacaagaagaaatccactgaagggttccagtcacttccttatgttgttgcactgttcagtgcaatgctttggatttactatgctt

SEQ ID NO: 160289 - DNA, 272 bp, Glycine max
  unsure (1)..(272): unsure at all n locations
tttctgctgagatttctttgtctccccggtattctgatccagcagccggttctgtgttttcccctactcacaaatcagctgttctcaatcagtttcaacagctccaaagtatgttatcacctataaatactaatttgctgtctcctaagaatgttgagcatcctctttttcaggcttcttntgggtgtctctccttctgganggatgtcaccaagaagtgttgaaccaatctctccaatgagtgctcgtttatctgcattgctcagcgagag

SEQ ID NO: 160290 - DNA, 271 bp, Glycine max
gagagtggtttcagtgagtgatcggtgttcacttgatccttcataagtcgtcatcatcatcatcatcatcaccgttgattgaagaagatgccgatcagaaacatcgccatcggaaggcctgaagaggctactcaccccgacacgttgaaggcggggttggctgagttcatctccaccttgatcttcgtgttcgccggttcaggttccggcatcgcctacaacaagctcaccgacaacggcgccgccactcccgccggcctcatctccgctt

SEQ ID NO: 160291 - DNA, 262 bp, Glycine max
tggggaaagcatatcagggttgttctagatgttggctgtggtgttgctagctttggtggctatctgctggacaaaaatgttattactatgtcatttgccccaaaagatgaacatgaagctcagatacaatttgctttggaaagaggaattcctgcaacactttctgtcattggaacacaaaagttgacttttcctgataatgggtttgatttgatccattgtgcacgatgcagggttcactgggatgcagatggtgggaagc

SEQ ID NO: 160292 - DNA, 266 bp, Glycine max
cttcgttccttcgattcattccatttcttccaaaatggccaaagacccagttcgcgttctcgtcactggagccgcagggcaaattggatatgctcttgtccctatgattgctaggggagtgatgctgggtcctgaccagcccgtgatcctccacatgcttgacattcctccagcagcagagtacttgaatggggttaaaatggaattggtggatgctgcattccctcttcttaaaggtgttgttgctacaaccgatgtggttgagg

SEQ ID NO: 160293 - DNA, 265 bp, Glycine max
cactcataacacaaagcacaaagcaaagctcatccttgagttaaaaaatggcagcagcttcttccatggctctctcatccccatccttggctggcaagcccgtgaagctgggcccatcagccccagaagtgggaagggtgagcatgaggaagaccgtcaccaagcaggtctcctcaggaagcccatggtacggcccagaccgagtcaagtacttgggcccattctctggcgagcccccgtcctacctaaccggtgagttcccagg

SEQ ID NO: 160294 - DNA, 261 bp, Glycine max
agctaattaacagaacaaattaggtaataaattacttatcatagaaacatggcagccctcaaacaagtttcatccctcttgctattccctttgtttctcatttttgccctattcaaatcctctcatgctggtgggattgcagtctatctggggtcaaaacggcaatgaaggctccttggaagaagcttgcaacactgacaactaccaatatgtgaacataggtttcttgaacgtttttggcaacaaccaaatcccacaact

SEQ ID NO: 160295 - DNA, 260 bp, Glycine max
caggaggagagatatgaggatagcgtttagtgtcagtgcaaaagagaccgtgacatttaaatttcgactgaatagatattttagtccgtgatatttaaatttctcattcactttattattttcgcttctcttttcatttttatcaccctgccacacattcacatttccacttcctatgtacaattttatataattatatcctatcatgtcagtttctccttgaattattaattatttaatatgaccaaaataattattca

SEQ ID NO: 160296 - DNA, 260 bp, Glycine max
gccggcgccgctggttgacccgacggagtttacgtcatggtcgttttacagagcagggatagcagagtttgtggccacttttctgtttctctacatcaccgtcttaaccgttatgggagtcgccggggctaagtctaagtgtagtaccgttgggattcaaggaatcgcttgggccttcggtggcatgatcttcgccctcgtttactgcaccgctggcatctcagggggactcataaacccggcggtgacatttgggctgt

SEQ ID NO: 160297 - DNA, 164 bp, Glycine max
caaatatcttcataagaagacctctgtccaagattttgtcaaacagtatgaagcaatcttgcaagacaggtatgaagaggaagcaaaagcagattctgatacatggaataaagtggcaaccttaaaaactccttctcctttggagaagagtgttgcagggattt

SEQ ID NO: 160298 - DNA, 264 bp, Glycine max
gcataggcatagactagagagagagttgcaatggccgtttctttggcagtgaaccgtcctctgcttggtcttcacgagaatgtaccattagctgttgctcatccccaattcctcccgttcaaatggccacccaagtccaaactcccctccgtcgtcggaattcgatgctcctcctcccctttcaacgacaaaaccctcatttccatcacacctaacacttcccacctcaatcccaaccctctcgcttgtcgctttcacgcttcc

SEQ ID NO: 160299 - DNA, 263 bp, Glycine max
gctcgtcactccttgctcttagccctcctcctcttcgccgccgtccccaccgccgcgatggcggtggccgcgtgccgacgccgacgacatcctgatccgtcaggtggtgccagatgttggcgaaccgaagaggaggacaacctgctgaacgccgagcaccacttcgcgcgcttcaaggccaagttcgccaagacctacgccaccaaggaggagcacgatcatcgcttcggcgtcttcaagtccaacctccgcagagccaggct

SEQ ID NO: 160300 - DNA, 261 bp, Glycine max
gccattatttcctggagaaaaccaagtggaccaacttgtggaaattatcaaggttcttggtactccaacacgcgaggaaatccgttgtatgaacccaaattatacagagtttagattccctcagattaaagctcatccttggcacaaggttttccacaagcgaatgcctcctgaagcaattgaccttgcatcaaggcttctccaatattcacctagtctccgctgcactgcgctggaagcatgtgcacatcctttctttga

SEQ ID NO: 160301 - DNA, 257 bp, Glycine max
tcataagcgaagaagaagccacagagaactagtcttctactctcacccgcaatagagaaatcccatctcacatcgttggatacccccgtatgggtcccaagagagagctcaagttcgctctcgagtctttctgggatggcaagagcagcgccgaggatttgcagaaggtgtcttctgatctcagggcatccatctggaagcagatggctgatgctgggatcaagtacatccccagcaacactttctctcactatgac

SEQ ID NO: 160302 - DNA, 259 bp, Glycine max
tttctctctttgatcaaattcccttcccatggtctctctctcttcaattaattccatttagctttccccaaatcccaaaccccttttcgcttagatcccaatccaattgggttatggacatggcttccagtccccgcaccgtagaagacatcttcaaggattacagcgccagaagaacctctgttattcgcgctctcactcacgacgttgatgaattttacggcctctgtgatccagataaggataacctgtgcctcta

SEQ ID NO: 160303 - DNA, 266 bp, Glycine max
tggagatatcagaagtgagaatgctgacatgagtaacgataaatcctgtgaaaaacacgatcgcctgccagtggaaggctttctgcgttcagtcaatctacgcagagtgaatcggtccctaaggaagccccgaccccgaaagggctgccgtccgatgggtacacgaaagtgacgaagttgctttgactacagaaccatgcctgtctgttggagtgaattggatgatcgggccgagggctgccccctcttcccctcactctcctttc

SEQ ID NO: 160304 - DNA, 262 bp, Glycine max
gtttgattggaggagatgactttaagagtggtcagaccaaaatgaaatctgtgttggtggatttccttgtgggggccggcatcaagccaacatctatagtgagttacaaccatctgggcaacaatgatggcatgaatctctcagcccctcaaaccttccgctctaaggaaatctccaagagcaatgttgttgacgatatggtcaacagcaacgccatcctctatgagcccggtgaacatccagaccatgtggttgtcattaa

SEQ ID NO: 160305 - DNA, 261 bp, Glycine max
gataatccaatatatcaaagcaagaaaaaatggggtccgcaaaatttgctttgatattaacaattgttattatctcaatgtgtagcatttccttggcacaaaattcgcccaaagatttccttgacgcgcacaatgcagctcgtgcagaggttggtgttgagccactcgcatgggacgacaccgtcgcagcctacgctcagcaatatgcggactcgaggatcaaagagtgccaagtagtgcactctcaggggccttatgggg

SEQ ID NO: 160306 - DNA, 258 bp, Glycine max
agccattgagaggatatgttcttgtggcccgtgaaactagtttcgatgcctccgtgttagaatctcctgctctggaaaagccacttaactactcgttaatatggagcctggattcacatgatgagtgtgtttacttttggttgccaaaccctccaacaggttataaagccatgggcatagtagttactagcagtcctaaggaacctgaagttgaagaagttagatgcgtgcgagatgatctcacagaaacttgtgaga

SEQ ID NO: 160307 - DNA, 258 bp, Glycine max
attcctaattgtttaaacctaattctcatttcttcatcgttcgattcttctcctcctaaagatgcagatcttcgtgaaaactttgaccggtaagaccatcacccttgaggtggagtcctccgacaccatcgataacctgaaagctaagattcaagacaaggaagggatcccacctgaccagcagagacttatctttgcgggtaaacagcttgaggatggtcgaacccttgccgactacaacatccaaaaggaatccac

SEQ ID NO: 160308 - DNA, 256 bp, Glycine max
gttgaaatgaaaatgggttcttctttgtggactttgtgtctaattttggcttcactagcctcttctgcattctgtgcctttccacggaggccagtggacgttccattcggcagaaactacgttcccacttgggcttttgatcacatcaaatacttcaatggaggttctgagattcaacttcatcttgacaagtacactggtactggcttccagtccaaagggtcatacttgtttggtcacttcagcatgaacataa

SEQ ID NO: 160309 - DNA, 260 bp, Glycine max
tggttttgttgttggtgggtttcagcgttccgcttcaacttcaaattctcagtgaaaccaattcagttcagtccaaatcccaaatccgaagtgagatttgcgatggagaggcttcagcgaatgttcgcaggtgcaggtggagctctagggcaccctcccccagattccccaactctcgattcctccgagcaggtctacatctcctcactcgctctcctcaagatgctgaagcacggaagggctggggttcccatggaagt

SEQ ID NO: 160310 - DNA, 214 bp, Glycine max
ctgaacttatcgcttcttcccggtttgaatttgggtgtttccgtttcaatggatgacggcgagcttgatttctccaaccatgaagtgttttcgagtcccaacatgggtgagcttcccagcagcggttcaatggacagtttcttcgacgagcttctcaaggacacgcacgcctgcacccacacccacacctgtaaccctcccggccccgatttct

SEQ ID NO: 160311 - DNA, 259 bp, Glycine max
tggccactctcctctgagaaagcctccagcctctcctccaaagtcccctgcggttcgttcggttattcttcgaaccgttgtctgaagtttacaactcaaaacttcaccgaacgcatttcattcaccaattcgtccaagtctcgtatcaatcaatcagcctatccgtcttgcggttggagagatcggaggggagagcagccatggcgcatcgagtagaccacgactatgactatctgttcaagatcgtattgatcggaga

SEQ ID NO: 160312 - DNA, 256 bp, Glycine max
cagttagtacaaaaaagggttacttcagcttccacatatcttgaagaattgatcaatgggcaagtctgtagttgagaagctactttggatggcaattgtgtgcttggtgctgggtgtaatttccattactcccaaggcccaagcagcagtgacatgcaaccaggtggtgagcaacctcaccccatgcatttcttatgtgctcaatggtggcaaaaccgtgcctggcccttgctgcaatgggatcaagaccctcttt

SEQ ID NO: 160313 - DNA, 253 bp, Glycine max
agcgaagagaatggctcccaaggatttaatctttttggctgtgttatgcttctcagcactgtcactgagtcgttgtcttgcggaggataatggacttgttatgaacttctacaaggaatcatgccctcaggctgaagacatcatcaaagaacaagtcaagcttctctacaagcgccacaagaacactgctttctcctggctcagaaacatcttccatgactgtgctgttcagagttgtgatgcttcactgttg

SEQ ID NO: 160314 - DNA, 253 bp, Glycine max
cgatccccttctccttctctctctctttttcgcctcattccattttcatctatcaatggctccagtagcagcagcatcttcagattcaatcaagccaagagatgtttgcatcgttggtgttgcacgtacaccaatgggtggatttcttggtactctgtcatctctatctgccaccaagctaggctctatagctattgaagctgctcttaaaagggccaatgttgatccatcccttgtggaagaagtatttttt

SEQ ID NO: 160315 - DNA, 256 bp, Glycine max
ctgaaacgacacacacaaaaaaaagctttagtttaggatgacccaagtgaggaacaagcaagtggttctaagagattatgtcaccggattccctaaagaatccgacatgaacattgttgaaggcaccataatattgaaggttccagaaggttccaatgatgtccttctaaaaaatctctacttgtcatgtgatccatacatgcgactcctcatggccaaggaccgttctttcggagatggctccttcacccttgcc

SEQ ID NO: 160316 - DNA, 254 bp, Glycine max
gttcctggctcatcaagaagctactggccaagggctacacagttcatgcaactctcagagacttgaagaatgagtcaaaggttggcctcttaaagagccttccacaatcagaaggaaaactggtgctgtttgaagctgatatttacaacccaaatgattttgaccttgcaattgaaggctgcaagtttgtgtttcatgttgctactcccatgatccatgaacctggctcccagtacaaggatactagtgaagcg

SEQ ID NO: 160317 - DNA, 257 bp, Glycine max
ggcagaaagcaagctcatcctagagttttaaaaatggcagcagcctcctccatggctctctcttccccatccttggctggcaaggccgtgaagctgggcccatcagcccccgaagtcgggagggtcagcatgaggaagaccgtcaccaagcaggcctcctccggaagcccatggtacggcccagaccgcgtcaagtacttgggcccattctctggcgagcccccgtcctacctcactggcgagttcccaggtgacta

SEQ ID NO: 160318 - DNA, 252 bp, Glycine max
cgacactgtcagcaagcacgatttcatcgtcgtcgagttctacgccccatggtgtgatcactgtaagaagcttgctccggagtatgagaaagctgcttctatcttgagtagtcatgatcctcctattgttttggctaaagtagatgccaatgaggagaagaacaaagaccttgcatcacaatatgatgttaagggattcccaacaattaatattctgagaaatgggggaaagaatgttcaggaatacaaagg

SEQ ID NO: 160319 - DNA, 258 bp, Glycine max
cgtaataagttctatcattgaggaagtttcctgtgcatcgtctccgaaaatgaacgacgcagatgtctcaaagcaaatccagcagatggtgcagttcatccgccaggaagctgaggaaaaggccaacgagatctctgtctccgccgaagaggaattcaatatcgagaagctgcagttggtcgaagccgacaagaagaagatcaggcaagaatacgaacgcaaagagcgccaagttgaaattcgcaagaagattgagta

SEQ ID NO: 160320 - DNA, 262 bp, Glycine max
gtacttgttggtggttccaccagaattcccaaggtgcaacaactcctgcaagatttctttaatgggaaggagctctgcaagagcatcaatcctgatgaggctgtggcatatggtgctgcagttcaagctgctatcttgagtggtgagggtaatgagaaggttcaggatcttctccttcttgatgtcacccctctctctcttgggctggaaactgctggtggggtgatgacagtcttgatccccaggaacactactatcccaa

SEQ ID NO: 160321 - DNA, 256 bp, Glycine max
aaaaattccttctgacttaatagttgaacaattgggtattaaggagtatttgcctgcatatttggatccgaatctcaaatctagtgatcttgttaccggcgtctgctttgcctccggtgcttcaggatacgatcctttgacacccaaaataacgtcagttctatcgttatctactcaactagacatgttcagggaatacataggaaagctgaaaggcattgttggagagagcagaacaaactacatcctatccaat

SEQ ID NO: 160322 - DNA, 212 bp, Glycine max
ctatgatcaaacagatggtgctgatggctatgtttctgttgaactatctcccaggctcgctgatgacactgagggaaccatagaagctgcaaaatggcttcataaagtggttgatcgccccaatgtgtatattaagattcctgctacagaggcatgtgtgccttcaattaaggaagttattgctaatgggataagtgtgaatgtgacgctga

SEQ ID NO: 160323 - DNA, 255 bp, Glycine max
cattcagacttcccactttccagtatggcatgctgcataatcgtcaggctcaagactcaacctgatatggttcgcgctgctcttcgttgtcggattgttaacgattctcaaattggctttcgttgttttcagatgggtctacgtcaatttcctccgaccaccgaagaatctcaaaaagtacggatcttgggcagtggttactggacccactgacggcattggaaagagcttcgctttcgagctcgctcgcaaggg

SEQ ID NO: 160324 - DNA, 256 bp, Glycine max
cgaggaggaatatttggcaagagtcaattggatgcatggaaatattctcactgctcagatcttgaacaggcaccacactaaaataaagattgttaagtttgatattagaacaggtcaaaggaaaaatatattggtggaagaaaacagcagttggatcaatatacatgactgtttcacacctcttgataaaggagttaccaaattttcgggtggatttatctgggctagtgagaaaacaggatttagacacctttat

SEQ ID NO: 160325 - DNA, 251 bp, Glycine max
aaggctttcgacattattgtgtctcttgatgtgtggaaatttgtgagaaatcgagacaccgtacttgaaatgctgaaggacaaaatcaaggaggaggcattgaggacatacctctttaccttctcttcatcttatgaatcgttgagcctggatcaactcacaaaattttttgatctctctgtttgtcgcactcatagcattgtcagtaggatgatgatcaatgaggagcttcatgcaagctgggatcagcc

SEQ ID NO: 160326 - DNA, 252 bp, Glycine max
ctaaacgactctatctctcttcgttttgttcttccttgcgctcctcctcgttcgttcgttctccctcgcgtagatcggcaatggcgcagaccgagacgtttgctttccaggctgagatcaaccagctcctcagtctcatcatcaacaccttctactccaacaaggaaaccttccttcgtgaactcatcagcaacgcctctgatgctttggacaagattagatttgagagtttgacggacaagagcaagctcg

SEQ ID NO: 160327 - DNA, 252 bp, Glycine max
caactagaaacagtgtgatgaaaatgaaggtccttgttttcttcgttgctacaattttggtagcatggcaatgccatgcgtacgatatgttccctctccgaatgaacactggctatggtgcccgtactccggaggtgaaatgcgcaagttggaggcttgctgtggaagcacacaacatctttggctttgagaccattcctgaagagtgcgttgaagcaacaaaggaatacatccatggcgaacaatatagat

SEQ ID NO: 160328 - DNA, 252 bp, Glycine max
aaggcttttgacattattgtgtctcttgatgtgtggaaatttgtgagaaatcgagacaccgtacttgaaatgctgaaggacaaaatcaaggaggaggcattgaggacatacctctttaccttctcttcatcttatgaatcgttgagcctggatcaactcacaaaattttttgatctctctgtttgtcgcactcatagcattgtcagtaggatgatgatcaatgaggagcttcatgcaagctgggatcagcca

SEQ ID NO: 160329 - DNA, 233 bp, Glycine max
ggctcgagcgaatctcgacgttgaactgaacgtggaggagcggaaaccgctttctgttgggtacaagaatgtgattggtgctcgcagaggtcctggaggatcctgtcttccattgagcagaaggaagaaacaaaagggaacgagttgaatgcgaacggattaaggagtacagacagaaggttgaattggagctatcgaacatctgtaatgatgttatgagagtgattgatgag

SEQ ID NO: 160330 - DNA, 258 bp, Glycine max
acttgatctctttggtgatgagacagaggaggataagaaggcagcagaggaaagggaggctgctaaaaagcctgccaagaaaaaagagagtggcaagtcttctgtccttctcgatgttaagccttgggacgatgagaccgacatgaagaagctggaagaggctgtccgtagtattgagatgcctggtttattgtggggagcatccaaactagttcccgtgggatatggtatcaagaagttgcagatcatgatgactat

SEQ ID NO: 160331 - DNA, 249 bp, Glycine max
caaagatgtctttgtcttggacgttgacgacactactctctctaatctccagtattttgctaaccatggatttcgtgtggaaccacacaatacgacggcgtttaagaactgggttcttgatggcgaggcattcgcactgccagagactcttaaaatgtacaacaaactgttggctctcggcatcaagattgtattcttatcagaaagaccactgagtctaggggatgtaacagccaagaacttaaagga

SEQ ID NO: 160332 - DNA, 250 bp, Glycine max
ctggaaagaaatgtgaggcaggcgtctcgagctctgaagcaagggaagactttaattgtatctggtttagctgaatcaaagaaagaacatggagttgaactgcttaacaagctggaagctggtatagatgagcttgaactgatagtacaggataggaatcgagatgcagttgcaccaaaacagaaagagcttcttcaatatgttggaggctgagatgttcctggggcattgcatttctgcagtgttgaag

SEQ ID NO: 160333 - DNA, 250 bp, Glycine max
agagagtgctggaacactgcaaagaccctacaacacaacagaaagttatggatgaaattttaggagcagttagcatgttggctcaggatcaatatggcaactacgttgttcagcatgttctggaacatgggaagcctcatgagcgttcttctataataaaggaattagcagacaagatagttcaaatgagtcaacagaagtttgcctccaatgttgtggagaaatgtttgacctttggaggtccttctga

SEQ ID NO: 160334 - DNA, 247 bp, Glycine max
actgaatcatgtggaaggataccttgaattgtcagcaaagacaaaaacctactttgccactgctgtgaacttatgggatgctgatttctatgtcaaagttgatgatgatgttcatgtaaatatagcaacactgggacaaactctagttagacatcgatcaaaaccacggatatacattggatgcatgaaatctgggcctgtcctatcccaaaaaggggtaaggtaccatgaacctgagtactggaag

SEQ ID NO: 160335 - DNA, 250 bp, Glycine max
atttctccatttccattttcactctcactcttcaagaatcgtaagctatcggaaagtcttacccaactgtgagtgctgattaccagaaggccgttgagaaggcgaagaagaagctcagaggcttcatcgctgagaagagatgcgctcctctaatgctccgtttggcatggcactctgctggaacctttgacaagggcacgaagaccggtggacccttcggaaccatcaagcaccctaacgaactggctca

SEQ ID NO: 160336 - DNA, 253 bp, Glycine max
gcaagctcatcctagagttttaaaaatggcagcagcctcctccatggctctctcttccccatccttggctggcaaggccgtgaagctgggcccatcagcccccgaagtcgggagggtcagcatgaggaagaccgtcaccaagcaggcctcctccggaagcccatggtacggcccagaccgcgtcaagtacttgggcccattctctggcgagcccccgtcctacctcactggcgagttcccaggtgactacggc

SEQ ID NO: 160337 - DNA, 250 bp, Glycine max
cagaaaggtgctgttatgaaagctatctgtgctggttttgaagaaactactgaaccagctgtttgtttgagcagtgatgtggagacaaatgagtgtttggagaataatggtggttgttggcaggataaagtagctaacatcaccgcatgcaaggatacgttccgtgggagagtatgtgaatgccccctggtggatggtgtgcaatttaaaggagatggttatacaatctgtgcagctagtggacctgggc

SEQ ID NO: 160338 - DNA, 248 bp, Glycine max
aagagattagatagcctcaactcaagtaaggactagctctttgagaaaatcgtatcttacaccttttggtgaccactttgagtgagagaagagaaattaagagagatactcaaattagattcaagagagatggccatcaaccatgaaacttgggctttcattttcggtcttctaggcaacgtgatctcctttatggtgttcctcgctccattaccaactttttaccaaatctagaagaaaaaatctac

SEQ ID NO: 160339 - DNA, 205 bp, Glycine max
ccgcagtttctccactccatgcctcccatgggctacaatgccaggaggggaagacttcacgtcttcttctcatccaagggttgagattgttggtggaagtgaagctcctccagtgcatgctctagttgttgaggttgccatagccatggcctcaggtgttcatcctatacccctcccaagtggcctaggtggtgcctatgttttc

SEQ ID NO: 160340 - DNA, 204 bp, Glycine max
aggaaatatatttattaagaatttggatagggcaattgaccacaaggcattgcatgataccttttctacatttggaaatatcctttcgtgcaaggtagctacggattcatctgggcaatcaaaaggctatggctttgttcaatttgataatgaggaatctgcccaaaaagctatagagaagctgaatggtatgctgttgaatga

SEQ ID NO: 160341 - DNA, 247 bp, Glycine max
gtggaaagaaatgtgaggcaggcgtctcgagctctgaagcaagggaagactttaattgtatctggtttagctgaatcaaagaaagaacatggagttgaactgcttaacaagctggaagctggtatagatgagcttgaactgatagtacaggataggaatcgagatgcagttgcaccaaaacagaaagagcttcttcaatatgttggaggctgagatgttcctggggcattgcatttctgcagtgttg

SEQ ID NO: 160342 - DNA, 203 bp, Glycine max
agagagtgctggaacactgcaaagaccctacaacacaacagaaagttatggatgaaattttaggagcagttagcatgttggctcaggatcaatatggcaactacgttgttcagcatgttctggaacatgggaagcctcatgagcgttcttctataataaaggaattagcagacaagatagttcaaatgagtcaacagaagttt

SEQ ID NO: 160343 - DNA, 206 bp, Glycine max
actgaatcatgtggaaggataccttgaattgtcagcaaagacaaaaacctactttgccactgctgtgaacttatgggatgctgatttctatgtcaaagttgatgatgatgttcatgtaaatatagcaacactgggacaaactctagttagacatcgatcaaaaccacggatatacattggatgcatgaaatctgggcctgtcctat

SEQ ID NO: 160344 - DNA, 247 bp, Glycine max
atttctccatttccattttcactctcactcttcaagaatcgtaagctataggaaagtcttacccaactgtgagtgctgattaccagaaggccgttgagaaggcgaagaagaagctcagaggcttcatcgctgagaagagatgcgctcctctaatgctccgtttggcatggcactctgctggaacctttgacaagggcacgaagaccggtggacccttcggaaccatcaagcaccctaacgaactggc

SEQ ID NO: 160345 - DNA, 252 bp, Glycine max
gcaagctcatcctagagttttaaaaatggcagcagcctcctccatggctctctcttccccatccttggctggcaaggccgtgaagctgggcccatcagcccccgaagtcgggagggtcagcatgaggaagaccgtcaccaagcaggcctcctccggaagcccatggtacggcccagaccgcgtcaagtacttgggcccattctctggcgagcccccgtcctacctcactggcgagttcccaggtgactacgg

SEQ ID NO: 160346 - DNA, 249 bp, Glycine max
agaagaagcagaaagagaagcattagcaaaagcaagaagaactagtctaagcagaaatggcctcttcagtgatggcatctgtggccctcaaacctgcccctttcactgttgagaagtcctcagttagaggccttccctccctctcaaggaactcctcttcattcagagttgtggccagtggtggcaagaagatcaagactgacaagccttatggaattaatggtggcatggctttgaggcaaggagttg

SEQ ID NO: 160347 - DNA, 243 bp, Glycine max
aaggccatgtcggaggtttacttagggaagcaaatctgcaacgtggtggcgtgcgagggaatggaccgcgtggaaaggcacgagacgctgaaccagtggcggaaccggttcggttcgaccgggttttctccggttcacttgggttcgaacgcgtacaagcaggccagcatgttgctatcgcttttcgggggtggggatgggtatagagtggaagagaacaatgggtgtctcatgttgggatgg

SEQ ID NO: 160348 - DNA, 245 bp, Glycine max
cgcgtgcatagcagagtcagagacagagacgcagccatgaggcggagacctgcgaggtgttataggcaaattaagaacaagccataccccaagtcacgtttctgccgtggtgttcctgatcccaagatcaggatttatgatgttggtatgaagaagaagggtgttgatgagtttcctttctgtgtccatctggttagttgggagaaggaaaatgtttcaagtgaggccctggaagctgctcgcat

SEQ ID NO: 160349 - DNA, 245 bp, Glycine max
attgctgatggctacaacaatggtactgctttgggtgctgagattattggtaccttcgttcttgtctacactgtcttctctgccactgaccctaagaggaacgctagggattcccatgttcctgtactggcgccacttcctattggatttgccgtgttcatggttcacttggctacaatcccaattactggtactggcattaacccagcaaggagtttcggagcagctgtaatctacaacgaaga

SEQ ID NO: 160350 - DNA, 245 bp, Glycine max
attgagtttggtaagctagagcttgaggctgtgctcttcgacatacgggcaattttggatgatgtattgtctctattttctgagaagtctcaaggaaaaagagtagagttggcagtttatgtgtcagatcatgttcctgaattacttataggtgatccaggaagatttcgacaaataattaccaatctcatgggtaactcaattaagttcacggacaaaggacatatttttgtcacaatccatct

SEQ ID NO: 160351 - DNA, 246 bp, Glycine max
ctcactcacaaacgcacactgaattcaaaaacatcgaaagagagaggcatggccgagcaaaccttcatcatgatcaagccagatggcgttcaaagaggccttattggcgagattattagcagatttgagaggaagggtttttacttgaaagggttgaaactcgttactgtggaccgtccttttgctgagaagcactatgctgatttgtctgcaaagcctttctttagtggtttggtggattacatt

SEQ ID NO: 160352 - DNA, 264 bp, Glycine max
atccaattgaaattttaaaaatgactgggataaacttaagaattcaattattgaaattgaataagtagacaatttaattggattggtcgaatggtatcaaaaaaatggagtactaactcccatttcttatttattattgaattaaccgatcaacttgctttgttatcgaacatttctttttgatttcaaaaattttccggaaaaaatttgaatctatttttatatgcgaatcaatcctactacttctggtcctgaggtttctgc

SEQ ID NO: 160353 - DNA, 263 bp, Glycine max
ataaactaagagaagctaatccaggaaatgcccttcttgagttgcgtggaaatgcaggaagccacgatcttgctttatctgttgaaactctactggctttaaccaaattgacaagagaagttgctaaaggcggattgcctgttgatgatgcagtctgcattcaatgggagaggtgatcgtgctgatccttcaaggtggccagaagttgaaggcccgatgacggttgtgttgttcgaaggttggatgcttggtttcaagcccct

SEQ ID NO: 160354 - DNA, 259 bp, Glycine max
cttcaactcatctgcttcccctagcaaccttcttcttactactctccgcttcttatctccagattgctggggcgcaagcacaaccgttgactagtctcaagcttaactctcatattcttcaggagtctactgctaaagagattaatgaaaatcccgaggcaggatgggaggctgctataaatcctcgtttctccaattatacagttgaacaatttaagcgccttcttggagtcaaaccaatgcctaagaaggaacttag

SEQ ID NO: 160355 - DNA, 260 bp, Glycine max
caatataattcgcttcaaggaggtggttttgacccccacccatttggccatagtgatggagtatgcggctggaggagagctctttgagaggatatgcaatgctggcaggttcagtgaagatgaggctagatatttctttcagcagctgatttctggtgtacattactgtcatgccatgcaaatatgtcacagagatttgaagctagaaaatacccttttagatggaagccctgcaccccgcctgaaaatttgtgactttg

SEQ ID NO: 160356 - DNA, 253 bp, Glycine max
actcaagttacttagaaaattccatcgattgggtaccacgcatcaaagaaattcgattaaaggacttgcctagcttcatgagaaccacaaacccacaagatctcatgatcatggatttcatatatagccagtgtgagagagctcaaaaagcttcagcaatcattgtgaacacgtttgatgcattagagcatgacgttttggatgcattctcatccatattgttgcctcctatctattccattggccccttaaa

SEQ ID NO: 160357 - DNA, 258 bp, Glycine max
ccttgggctttgtcaagggtattgtggattccgaagatctaccactcaacatttcaagcgaaatgttgcaacagaacaagatcttgaaggtcatcagaaagaacttggttaagaagtgccttgagctcttctttgaaattgcagagaacaaggaggattacaacaagttctatgaggctttctccaagaacttgaagccaggtatccatgaggattcacagaacaagggaaagattgctgaattgctcaggtaccact

SEQ ID NO: 160358 - DNA, 263 bp, Glycine max
caaatttaaagaaatcaacacacacaaacacatcaacatatggatatagtaagggtgcaaaccatagcttccaaatccaaagatgctgccatcccagccatgtttgttagggcagagacagagcaaccaggcatcacaaccgttcaaggggtgaaccttgaggtgccaattattgattttagtgacccagatgaagggaaagtggtgcatgagattttggaggcaagtagggactggggcatgttccaaattgtgaaccatga

SEQ ID NO: 160359 - DNA, 261 bp, Glycine max
cagttagtacaaaaaagggttacttcagcttccacatatcttgaagaatagatcaatgggcaagtctgtagttgagaagctactttggatggcaattgtgtgcttggtgctgggtgtaatttccattatccccaaggcccaagcagcagtgacatgcaaccaggtggtgagcaacctcaccccatgcatttcttatgtgctcaatggtggcaaaaccgtgcctggcccttgctgcaatgggatcaagaccctctttaacct

SEQ ID NO: 160360 - DNA, 262 bp, Glycine max
actcaacaagcttcgaaccaaatcttattgagaaaatgtctggtcgtggaaagggtggaaagggtttgggaaagggaggtgccaagaggcacaggaaggttcttcgtgacaacatccagggcatcacgaaacctgcgattcgtaggttagcgagaagaggtggcgtgaagaggatcagtggtttgatctacgaggaaaccagaggagttctgaagatattcttggagaacgtgattcgcgatgctgtgacctacactgagca

SEQ ID NO: 160361 - DNA, 260 bp, Glycine max
  unsure (1)..(260): unsure at all n locations
cctcactcgcatttgaagacgcagcaatctttcccgtgaaaagggaccatggaggcaaattcaggtgccagcgaccgaatttcgagaatcgccggccacctccgcccccagagagaggatgatgtttgtttgaagcgtacgngttgccgtgcaaaaggtggggtctccggattcaaggtggccatattgggtgccgcaggaggcatagggcaacctctggcgatgttgatgaagatgaatccactcgtttcacttctcca

SEQ ID NO: 160362 - DNA, 255 bp, Glycine max
attgggagctctcgttgtttcggagttagggaccttacgcagccatggccactgctacgaatgccgccgccgccccaccacgccagctctcccagaaggaagctgacatccagatgatgttggccgccgacgtccacctcggcaccaagaactgcgacttccaaatggaacgttacatcttcaagcgccgcaacgacgggatttacattattaaccttgggaagacgtgggagaagcttcagctagcagctaggg

SEQ ID NO: 160363 - DNA, 249 bp, Glycine max
ctatttttgtttttctttgttcacagctctgcgagatcttcattcgccgattttaaaagatgggtaagcttcagagtgatgctttgcgtgaagccatttcaggaatcatggccgattccaaggagaagaatcgcaaatttgtggagaccatcgaactccaaatcgggttgaaaaactacgatccacagaaggacaagcgtttcagtggctctgtcaagctgccccacatccctcgccccaagatgaaat

SEQ ID NO: 160364 - DNA, 257 bp, Glycine max
tgcaactacaacaacattcattcattcacagctgtcacgccgtgaacggaaaatggcaacggcgagacgcagtttcccgcctatcaccgaatgcaacggaacgacaccgtgcgagtctgtggccgccgacctcgacggtacgctcctcatctcacgtagctcgttcccgtacttcatgctcgtcgccgtcgaagccggcagcctcctccgcggcctcatcctcctcctaatacatccgttcgtcatcatcgcctacc

SEQ ID NO: 160365 - DNA, 249 bp, Glycine max
ggatgagtacgtttaccatggtacatcatactgcaccgcatataccattcaaatactcagaagagtggaatgctgcgcaacacagcttaatggaactgttcattgtgattatcctaaatggatcgagatcctatgtcacgatattaatgtccatattccacaccacatatccccagaggataccaagctataatttaagagcagcccataagtctctccaagaaaactggggacagtatctgaatgagg

SEQ ID NO: 160366 - DNA, 255 bp, Glycine max
ctaagagcaagtgttccactgtgggtatccaaggcattgcttgggcttttgggggaatgatctttgctcttgtttattccactgctggaatctcagggggtcatattaacccagcagtgacgtttgggctgttcttggcacgcaagctctctctgacaagggcaattttttacataatcatgcagtgcttgggagctatatgtggtgctggtgtagttaaggggttcgagccacacctctatgagaggcttggtg

SEQ ID NO: 160367 - DNA, 262 bp, Glycine max
cggctcgagcgcaacaaaaagaaagaatcccaggcgaggagaaagatggaggggaaggagcaggatgtgtcgttgggagcgaacaagttccccgagagacagccgattgggacggcggcgcagagccaagacgacggcaaggactaccaggagccggcgccggcgccgctggttgacccgacggagtttacgtcatggtcgttttacagagcagggatagcagagtttgtggccacttttctgtttctctacatcaccgtct

SEQ ID NO: 160368 - DNA, 258 bp, Glycine max
caacggtgcacaggctggtttgacgtattggagtcctaatgtgaacattttccgtgacccgcggtggggctgtggccaagagactcccggcgaggacccgacattggccgcaaaatacgccgccagctatgtcaaaggactccaaggcgatggtgccggaaatcgcctcaaggttgctgcttgttgtaaacactacactgcctatgatcttgataattggaatggtgtggacaggtttcatttcaacgccaaggtgag

SEQ ID NO: 160369 - DNA, 258 bp, Glycine max
caaagaaagaaagaaagaaaaccctagcttaccttttcaactttcaagatgcaaatctttgttaagacactcactggtaagacaatcacccttgaggtggagagttcagataccatagataatgtaaagtccaagattcaagacaaggaagggatcccaccagaccagcaacgtctcatttttgctggcaagcagcttgaggatggacgtacacttgctgattacaacattcaaaaggagtccactctacacttggtg

SEQ ID NO: 160370 - DNA, 251 bp, Glycine max
gtgagagagagagcgagcagtttctgacacagagagaggggtttgggattggagggattgacgctgcgtctcttcctcttctctttcgatccatccctcattcctaatcctccaatccaaccacctcagcctcacactcacatatacacatatctgaacgcgtatcgtccctcctatggcttcaaagcgcatcctcaaggagctcaaggacttgcagaaagacccaccaacttcttgcagcgctggtccag

SEQ ID NO: 160371 - DNA, 256 bp, Glycine max
cgcaacaaaaagacagaatcccaggcgaggagaaagatggaggggaaggagcaggatgtgtcgttgggagcgaacaagttccccgagagacagccgattgggacggcggcgcagagccaagacgacggcaaggactaccaggagccggcgccggcgccgctggttgacccgacggagtttacgtcatggtcgttttacagagcagggatagcagagtctgtggccacttttctgcttctctacatcaccgtcttaa

SEQ ID NO: 160372 - DNA, 250 bp, Glycine max
tgacccttttgggagctactggaagcccatttgtgtgcagggttcatattgccctcaagttgaagggagttcaatacaaatatgtcgaagaaaatttgaggaacaagagtgaactgcttctcaaatccaacatagttcacaagaaggttccagtgtttattcacaatgagaagcccatagcagagtctcttgtgattgttgaatacattgatgagacatggaagaacaaccccatcttgccttctgatcc

SEQ ID NO: 160373 - DNA, 249 bp, Glycine max
cgaagttctgattctgtatctgaaattggggatgaccttaacaaaactccagcctcagcacgacacaaaagaggctgtaattgcaagaaatcaagctgcctaaagaaatattgtgaatgctatcagggtggtgttggttgctccgtaagctgtagatgtgaaggatgcaagaacacatatggtagaaaggatggttctgttccttctggattagaagccgaacctgaagaagaaacagaagcatgcgaa

SEQ ID NO: 160374 - DNA, 247 bp, Glycine max
  unsure (1)..(247): unsure at all n locations
gtttttatttctctcttctctctgcatcgcttcaggttcttctgaaaagatgtctcgcgtgtcntgttggtaacttggattcacgagtcaccgagagagatctcgaagacgaattccgtgttttcggagttattcggagtgtttgngttgcacgtagaccacctggtnatgcttttattgactttgatgaccgcagagatgcacaggatgctatccgtgaattggatggtatgtttagaagaattat

SEQ ID NO: 160375 - DNA, 247 bp, Glycine max
aaagctattaagcccaaacaaggcaacaactctgaatccaaatgcagcagagtttgttccttttgccctcagatcatcgtcattatctggaactaccagctcggtagatgcaacagcaaagctttctgctgctggagctcttgggaaagcagtttttgatagatcagaatcatccatttcaaataattctgatgatgaggtacaccaatactggcgatgtcagctccctgatgatatcacccctgat

SEQ ID NO: 160376 - DNA, 171 bp, Glycine max
tctcaagttggctgatgctcttgacatagctgtgaaatctgtgaggtacactcgtggaagcttcattttccctggggcacagtcttttcctcaccgcagtttttccgaggaggtttctgttcttgacagctatttcagcaaccttggttctggtagcaaagcatatgttat

SEQ ID NO: 160377 - DNA, 228 bp, Glycine max
acacactgtaagtaaatagaatcgaaatttagacaagacatcatgggtggggtaacatcgttactaatgttgctatgtctcttcgcaggggctatgtcccctgtgaagggtgaagacccttacttctttttcacatggaatgtcacctatggcaccctttctccagccggtgtgccccagcaggttattctaatcaacaatgaattccctggacccaacataaattcc

SEQ ID NO: 160378 - DNA, 244 bp, Glycine max
ctattcttaactcaacttctgctaccactctgttcttccaagtccatccacgcttttctctacagtcatgggcaaggtcaagatcggaatcaacggatttgagagaattggccgtttggttgccagagtcgctctgcaaagagacgatgtggagctcgttgccgttaagggccctgtcattaccaccgattacatgacatacatgattggatacgtcagtgttcacggacactggaagcatcac

SEQ ID NO: 160379 - DNA, 239 bp, Glycine max
agctatttctttgttttcttgcttggaggcattcttgactgaagaacctcttggaccagatgacatgtggtactgccctagatgcaaggaacacagacaagctacaaagaagcttgacttgtggaaattgccggagattcttgtttttcacttaaaacgattctcatacagcagatacctgaaaaacaaacttgacacttttgtaaattttcccattcacaatctggatttaaccaaat

SEQ ID NO: 160380 - DNA, 238 bp, Glycine max
aggtggagctgcttttgggttccagagactcctgaagatgctgccagagtggggcttgtcagtgggaaggataatataatagatcgtagtattcaagatgcttatgttaatgccattcgacgtgcgaaaaatttcatctatattgagaatcagtatttccttggaagcagttatgattggagtgctgatggaattaagcctgaagccatcgatgctttgcatattatcccgagagagc

SEQ ID NO: 160381 - DNA, 237 bp, Glycine max
gattaacaagctatgtgccccatatattgataccgttgggtatcgggtgttcttgggcttgaaccagtactttgttgcttcagatgttggccatgggaagatgcagtggtatgctttccatggggaacccccttcaagtgaccctttcccagaaggtaagaagaagaggcttttggatctctttggtaattggtgcgatgaagtgattgcactcatatcagaaattcagaacatatg

SEQ ID NO: 160382 - DNA, 244 bp, Glycine max
cacaatgtctgaagtgaatgcgaccctgaaattcctcaaagcaacaccatctacatcagcaacctcaacgagaaaattaagattgatgagttgaagaagtctctgaacgctgttttcactcagttcgggaagatacttgaggtgttagcattcaaaaccctaaagcacaaaggtcaagcttgggtggtctttgaagatgcatcttctgcttccaacgccctaaggcaaatgcaagagaatacag

SEQ ID NO: 160383 - DNA, 197 bp, Glycine max
gctcccggtattatttcgagacgttccgtatatgagcctctccaaacaggacttattgatattgattcgatgatccccataggacgtggccaacgagaattaattattggagacagacaaacgggtaaaacagcagtagccacagatactattctcaatcaacagggacaaaatgtaatatgtggttatgtagctat

SEQ ID NO: 160384 - DNA, 240 bp, Glycine max
gatggatccagacgcgttggcaaaggcattcgtggagcactactacagcaccttcgacaccaacaggaacggcttagcgaatctctaccaggagggttccatgctcactttcgaagggcagaagatccaaggcgcttccaacatcgttgccaagctcacctccctcccttttcagcagtgccaccactcaatctccaccgtcgactgccagccctccggcgtcaacgccggcatgctcgt

SEQ ID NO: 160385 - DNA, 240 bp, Glycine max
aattgatgctgctatacatgtatggaggctgaaggaccataagaaacatctaagttcagcaaaatccagacggtcttggggtggaaaggtgaagggacttgttgctgatggtgagaagaacaagaacaactttcttgcccaacgggctgagacgcttctagaaagcttgaaacacagatttccagggctccctcagactgcactagatatggccaaaattcaatataataaggatgttgg

SEQ ID NO: 160386 - DNA, 191 bp, Glycine max
ggagaaaagaagtagtacggtttacgtgcctagagacgaaagcttctcggaagttaagcaactaacgttttcgacaaagacgttatcgtcggggttgaaagcgatcgtgccggcgctgaagacattgatagttgacaagaatctagggtttcctgtgttctcggacatagatgaccttttcgatgaaggcc

SEQ ID NO: 160387 - DNA, 238 bp, Glycine max
ctctcaggaactttctttcaaatttgcaagacggtattcttggcaccaagctttccattctcatccctgctattccagctgccatcgttgcatagtgctttggctttggaagaccttggatttttatattaagcttacttggacttacaccacttgctgaacgtgtgagcttcattacagaacaagttgccttttacactggtcccacagttggaggacttctgggtgctacatgtgg

SEQ ID NO: 160388 - DNA, 235 bp, Glycine max
aggaatagtaatccaaggcggatccattgtgtctgatcctgaattctactcagtgagatttgagaacaaggcttacctagctcgtccatggaagaattactctaggaccattatcatggacacatacattgatgatttgattgacgcggatgggtatttgccatggcaaggactagagggtccttctggtatggatacttgcttctatgccgagtaccacaacattggccctggt

SEQ ID NO: 160389 - DNA, 244 bp, Glycine max
ccactctgaagccatccgccacttctccaaaatcctcgagggccgccgcggcgcccctcaggtcttcctcgcagagtgctacaagcacagagtctccgcaaatcgctccgccgggcgaatcgccgactcaatcgccgactgcaaccgtaccctcgccctggaccccaccagcatccaagccctcgaaacccgagcctcactcttcgaatccattcgctgcttcccagactccctccacgacctc

SEQ ID NO: 160390 - DNA, 233 bp, Glycine max
atatttccctacctctcccttcaagatgcagatattcgtcaagaccctcaccggcaagaccatcacccttgacgtggaaagctctgacaccatcgacaacgtcaaggccaagatccaggacaaggaaggaatccccccggaccagcaacgtctcattttcgccggatagcaacttgaggacggccgtaccctggctgactagaacattcagaatgagagtactcttcacctcg

SEQ ID NO: 160391 - DNA, 223 bp, Glycine max
gataatctaatatgtcaaagcgagaaaaaatggggtccgcaaaatttgctttgataataacaattgttattatctcaatgtgtagcatttcctaggcacagaattcgcccaaagatttccttgacgcgcacaatgcagctcgtgcagaggttggtgttgagccactcgcatgggacgacaccgtcgcatcctacgctcagcaatatgcggactcgaggatcaa

SEQ ID NO: 160392 - DNA, 236 bp, Glycine max
aaaaagattaacacaatggcttcctcaccatcaatagccagccagctgtcaatggggaaaagtcagattctcctactgttggctggggtggaccaggcgggtatgtttaccagaaggcatatgtagagttcttctgctctaaggaaaagctggatgcacttgttgataaatgcaaggatcggacatctttaacttatatggctgtggataaagacgggagctggaaatctaatgtg

SEQ ID NO: 160393 - DNA, 232 bp, Glycine max
cgaaattgcggctgacctcaaggagcatgtgatcaagcctgtgatcccggagaagtaccttgacgagaagaccattttccacttgaacccctctggccgttttgtcattggaggtcctcacggtgatgctggtctcaccggccgcaagatcatcatcgatacttatggaggatggggtgctcatggtggtggtgccttctccgggaaggatcccaccaaggttgataggagt

SEQ ID NO: 160394 - DNA, 233 bp, Glycine max
atctgaacccattctgaagctaacgatgaacctgttaaagtggtagttgggaacagtcttgaggacattgttttcaaatctgggaagaatgttctgcaggagttttatgctccctggtgtggtcattgcaaacagttggctccaatattggacgaagttgctatctcatatcaaagtgatgctgatgttgttattgcaaaactggatgcaaatgccaacgatatcccaagtga

SEQ ID NO: 160395 - DNA, 238 bp, Glycine max
aaagaagaaaaaaaccttagccaacacaaccatcatggccacctctgctattcagcaatcagcattcactggtcaaactgctctgaagcagctcaatgagttcgtccgcaagaccggtggcgccggcaaaggtcgcactaacatgcgccgcaccgtcaagagtgctcctcagagcatttggtatggccctgaccgtcccaggtacttgtatccattctcggagcagattccatcatac

SEQ ID NO: 160396 - DNA, 233 bp, Glycine max
acacaattaagctaccttgtatctgccgacatggcacatgcactacacccaaattacatggacaagcatgaagcaaaccatcagcccaaactacatggaggacttgtcattaaaaccaatgcaagccaacgctatgcaaccaatgttgtcacatccttcatattcagggagatagcatcaaaacataaacttcccgttcaggactttgtggtgcgcaatgacatgtcatgtgg

SEQ ID NO: 160397 - DNA, 231 bp, Glycine max
attacaaggactgggttttcactgatcaagcattgcctaatgatcttgtcaagataggagttgcggttaaggatacatctgctccccatggagttcggcttttgattgaggactatccttatgcttctgatgggctagagatatgggatgccatcaagtcctgggtgcatgaatatgtatcattctactacaagtcagatgcagcaattcaacaagatcccgagctccaag

SEQ ID NO: 160398 - DNA, 236 bp, Glycine max
attttgtccgaaagcttgaatttttcgcctaccctttacaatgatctcttcatttagacaacctgttgtagggatcagtggttcatatcttctttagaggcaaagacatgcaaccctaattaaggcaaggtccaatttacactctttgtcaagagaaaagggtcaaagatctcttgtttcagttcaaaagccacttcacattgctgcttctcttggtgttggaaattttgtgtcag

SEQ ID NO: 160399 - DNA, 237 bp, Glycine max
aacaagttctgtggtatcaaccaaaacacggtcatagggcagttggactttttccttagagagtgtcccaaagggatgaaaacaatgagcacgggattgttcttgagcacactctctttggggtttttctttagcaccttgttagtgtctatagtgaacaaaatgacagcacatggtaggccatggctcgcaaataatcttaaccaagggaggctctatgacttttactggctcttg

SEQ ID NO: 160400 - DNA, 269 bp, Glycine max
ctcttttttctctctcttgcaaaacctaattttcatttcttccctcaaatttcaaaatgcgtgagatccttcacatccagggtggccaatgcggcaaccagatcggcgccaagttctgggaggtggtttgcgcggagcacgggatcgaccctaccggaaggtacggtggggactcggagttgcagctcgagaggatcaatgtctactacaacgaggccagttgcggtcggttcgtgccgcgcgcggttctcatggacctcgaaccgggc

SEQ ID NO: 160401 - DNA, 271 bp, Glycine max
cttttgtctgaggtgtgtgcattcttgtttaactcctctttgttcctcagacatcccagaagggaaccaaaaataaaaaataaaaaaataaacacaatcaataaaggggagaaaacaaacatgtcattcacaggaactcttgataaatgcacagcatgtgacaagactgtctatgtggttgacttgttaactcttgaaggaattccttaccataaaaactgcttcaagtgcagtcactgcaagggatgtcttacgatgtgcacatactcct

SEQ ID NO: 160402 - DNA, 269 bp, Glycine max
gagaaacagttttccgcggaagagatatcctccatggttcttatgaagatgaaggagattgcggaggcgtatctaggttccaccataaagaatgcgcttgtcactgtgcctgcttacttcaacgactcacaacgtcaagccaccaaggacgctggtgtcatttctgggctcaacgtgatgcgaattatcaacgagcctaccgcggctgccattgcttatgggctcgacaaaaaggccactagctctggggagaagaatgttctcatttt

SEQ ID NO: 160403 - DNA, 268 bp, Glycine max
caataagctgtcggagggcaaatatctcaacactcaggagctctggttcgaccaaaccctcgatcacttctctccctatgatcaccgacaattccggcaacgttactatgagtttctagactatttccggattcccgatggaccaatttttttggtaataggtggtgaaggtatattgaatggggtagcaaatgactatcttgctgtactggcaaagaagtttggagcagctatggttactcttgaacatcgctactacggaaagagt

SEQ ID NO: 160404 - DNA, 265 bp, Glycine max
ggaaggagaagtttagggctgatgctaagcaggttatggaagttcttatgtcccttcaagtatctcaaatggagacagatgatccaacaacaagttacatgctacaggcatgggctagactctgcaaatgtctgggacaagattttcttccttacatggagtttgtcatgcctccactacttcaatctgccgcacttaagcccgatgtaaccattacatcagcagattcagacatcgtcattgaggattctgatgatgaaagtat

SEQ ID NO: 160405 - DNA, 267 bp, Glycine max
agatgatgtcttcatcacttgtggatgcacacaagccattgatgtttcggtggcgatgcttgctcgccctggtgcaaacatcttgcttccaaggccaggcttcccaatctatgaactttgtgctgcatttagaggggttgaagtgaggcattatgatctgcttccagagaaaggttgggaggttgatctagatgctgttgaagctcttgctgatcagaacacagtggcgttggcgatcataaaccctgggaatccttgtgggaatgt

SEQ ID NO: 160406 - DNA, 267 bp, Glycine max
aatattatgtggaggaatttgctgatacaggcaatgtaccaagtgtctgtcatgcttgtgctcaatttccgaggcataagcatactgggtctgagccatgacagaaaagctcatgcaatcaaagtgaagaatactttgatattcaatgcatttgttctctgtcaaatctttaatgaatttaatgctcgaaagccagatgaattcaacatattcaaaggagtcacaagaaactacctctttatgggtatcattggattaacggttgtg

SEQ ID NO: 160407 - DNA, 266 bp, Glycine max
gaaactacttctgtatggctagaggtatctgaagtcaaagggcaagatgttgtttgtattataaagaacacagctacattggctgggtcattgttcactttgcatgcctctcaaattcatattgatttgcctactctcactgagaaagacaaggaggttataagcacctggggtgttaaaaacaaaattgattttctgtcactgtcatatactcggcacgctaaagacgttcgccaggctcgcgaatttctttccaagttaggtga

SEQ ID NO: 160408 - DNA, 264 bp, Glycine max
cctgctttcagagtcggatcttcaagcatggattttgcaatcacctttacagatttcatgttctttatatgcaggaatcggaatagcggttagcttcttcattcaatcctggtgcatctcagaaagaggtcccctgtactgtgcaatgttcaaccctttggcaacagtcatcactgctttgataagtgcaactttcctagaggaagaggtgtacgttggaagtttggtaggggctgttggagttattgccggtttatatgttgt

SEQ ID NO: 160409 - DNA, 263 bp, Glycine max
accaaaaggagagtgcaataactcgttgtacattcctagtgtgtgggagagacatggctaagatgtgtgttttggtgttggttcttgctctggctgtggccacaagtgccagaaacgttcccaaccccaaggatgctggtcttaaggaccagaagaacttcatcagctatggtggagttggtggttattccgggattgggaacaatggactgccttttggaggagctggtgccggaataggtggtggttttggcggaggtggt

SEQ ID NO: 160410 - DNA, 264 bp, Glycine max
caaaggattctacccgccgctcgatgggaattgcgcttcaagacgtctcgtagggctaatccgcctcacgagggtcaccaacggcacgtccctttggggggccgaagccccctactgctggtcggcaaacggacggcgggcgcacgcgtcgcttctagcccggattctgacttagaggcgttcagtcataatccaacgcacggtagcttcgcgccactagcttttcaaccaagcgcgatgaccaattgtgcgaatcaacggttc

SEQ ID NO: 160411 - DNA, 261 bp, Glycine max
tgaaggagttgaagcttacatttggttactggcaaaggcttacgttgttgtgaatgatgcttgctaccatcaaatcattagccattggctaaacactcatgcggttgtggagccattcgtcatagcgacaaacaggcatctgagcgtggttcaccctatttacaaacttctgtttcctcactatcgtgacaccatgaacattaattcacttgcccgcaaatccttggtcaatgccgacggtattatagagaaaacattctt

SEQ ID NO: 160412 - DNA, 259 bp, Glycine max
ctttaatttgtctcaacgttgaagtgaattgcttcaagtccaaaaatggagcagtatgaaattcttgaacagattggaagacgttcctttgcttcagctctacttgtcaggcacaggcacgaaaacagaaggtatgtccttaagaagatacgtcttgcacgccagactgatagaactcgtagatctgctcaccaggagatggagcttatctctaaagttcgcaatccatttatcgtagagtataaagattcctgggtgg

SEQ ID NO: 160413 - DNA, 243 bp, Glycine max
gcaagaacatgaataacttggtcctatctcttgttcctaaattcgcaaaactgcaaactctaatcctccgtcaagacaagcctcaactagaggataatgctgttgagactattgcaaaatgctgtcatgaactgcagatcctggacctcagcaaaagtttcaagctaactgatcgttcactctatgagctcgcccttggttgtcgcgatcttacaaaactcaacatcagcgggtgttcagcat

SEQ ID NO: 160414 - DNA, 262 bp, Glycine max
cagcatcttgcatgcccccatgtctttctttgacaccacgccatctgggagaattctaagcagggcatccactgatcaaaccaatgttgatgtctttatccccttgttcatcaattttgtggtggctatgtacattacagtgatcagcatcttcataatcacgtgtcaaaattcttggccaacagctttcttgttaattcctcttgcttggttaaacatttggtaccggggttattttcttgcttcatctcgcgagttaact

SEQ ID NO: 160415 - DNA, 260 bp, Glycine max
caagtttggtgtgaggccattgagacatagccccgatgaaatgatggcagccttataccttcaagtcagcataattagccaggctctaatcttcgtcacaaggtcccgcagctggtcttttgttgaaagacctggtcttctcctactaggtgcattttttattgctcagttggtggcaacttttatagcagtgtatgctaactggggctttgcaagaataaagggaatgggatgaggttgggctggtgtaatctggctgt

SEQ ID NO: 160416 - DNA, 261 bp, Glycine max
aacaactgtgaaatctgtggaatcaaaggggcaagctgagaagtgtgccaagagaaagaggaagaaccagtatcgcggaatccgccagcgtccatggggaaagtgggctgctgagattcgcgacccaagaaagggggttcgtgtttggcttggaactctcagcactgctgaagaagctgcaagagcttacgatgctgaagcaaggaggatccgtggcaagaaagccaaggtgaatttccctgatgagccttcaggcgctgc

SEQ ID NO: 160417 - DNA, 260 bp, Glycine max
atatatggatggtgccaacatgaatgctcaggtgggactcacaagcccaggttggataggagcagatgtatgccatctcaatctccacaagacattttgcacccctcatggaggaggtggccctggcatgggtcctataggtgtacagaaacacttggcaccatttttaccatcacaccctgtgatagcaactggtggaattcctgcccctgacaaacctcaaccacttggtaccatcgctgccgcaccatggggctcag

SEQ ID NO: 160418 - DNA, 253 bp, Glycine max
acaacttacggctaaattctcaaagatttaaactttgtctcagagtttccaaattcacccaaccccagagacaaaatgtctctaatcccaaatttcttcggtggcagaaggagctacgttttcgatcctttttccctcgacgtctgggaccccttcaaggattttcctttcccaaacactctttcttcagcttcctttcctgaattttctcgggaaaattctgcattcgtgagcactcgtgtggattggaagg

SEQ ID NO: 160419 - DNA, 259 bp, Glycine max
cacagagaataagctactggatttaatggacccatctctttgtgaaacatgcaacgaaaatgaattcattaagtgtgcagtcattggactcttatgcgtacaagatgaaccaagtgatcgacccactatgtcaaatgttttgttcatgctcgacatagaggcagcaagcatgccaattcccacgcagccaaccttttttgtgaaaaagcatctttctagctcagcttcctcttcgagcaaaccagatataggtcagtat

SEQ ID NO: 160420 - DNA, 258 bp, Glycine max
catctcacaattcattcaccttttaattcatctcactcacaaatcacaatgctcttcctttcttccttaataataataccataataatctgttacgttacggggcccaaatgtctgttacggagctcaaggagcgtcactctgctgccaccgacaccgtcaacaatctcagacaccgtttaaagcagaagcgcctttcgttgctcgacacagatatttctgggtatgcaaggtctcagggtagaacgcctgtgacctt

SEQ ID NO: 160421 - DNA, 150 bp, Glycine max
tctctgtctctctctctctctatcgatcaatcatggctgtgcccaatcagcaaaccggcgattaccctagtttcaaactcgtcatcgtctgtgacggtggtacaggagagataacgttcgtaaaaaggcatcttaccggtgaatatgaga

SEQ ID NO: 160422 - DNA, 258 bp, Glycine max
cactccctcctcttcacacattttcttacccctctccaacaatccctctcgttcacactttcagattgtatgaagatgggggctggtggccgaactgctgttcctcctgccaacaggaagtcagaggctgaccctttgaagcgggtaccatttgaaaaacctcagtttagtctcagccagattaagaaggccattccacctcactgtttccagcgctctgttctccgctcattctcctatgttgtttatgacctcacc

SEQ ID NO: 160423 - DNA, 255 bp, Glycine max
agcgaaccggtgatactatcgacgatggagagactcggactgggttcaccacacctgccatggaagtcaccacattcaatcgaaccactttcaccgatgctgctgactttcccgtttgggaaaagattggtgctgtcgtcagactcagttatggcctcgggatttatggtgccatggcagttgcggggagttttatatgttcaatcacgggaattgactctctggggggtttccatctatcgttagatgccattt

SEQ ID NO: 160424 - DNA, 261 bp, Glycine max
cagcggagtgcttcgccttccgttacggccccgtgccaccgttcctcacctacttccgtttcgacggtaacggcaaaaaacacgaggacgttcctattttctccatgctaacaccttcgttcctccacgatttcgccattacgaagaaatacgcgatcttctgtgatattcagctcggattgaaccctcttgacatgatctccggtggctcccccgtcggctccgtcgcctccaaggtcccaaggatcggaatcctccctc

SEQ ID NO: 160425 - DNA, 258 bp, Glycine max
ccgcgctctctttgtccaaaccaatgtctggtcctcctccggttcggtctctcccgacggaacattagtccaaaccggtggcttcaacgacggctaccgtgcggtcagaaccttcaccccgtgccgctcgtgcgactgggcagaagttcagcatggactcgcggcgcagagatggtacgccaccaatcacatcttgccagatggacgtcaaataattatcggaggaagacgacaattcaactacgagttttaccccaa

SEQ ID NO: 160426 - DNA, 257 bp, Glycine max
gctgaagtttcggtgtctttgggaggaggtccttcatggaacgtactactaggaagaagggacggtttgattgcaaaccaatctagtgcgaacacatccattcccaatccaacagaaagccaggccaatgtcactgccaaatttgctgccgttggcctaaacataactgatctcgttgcattatctggtgcacatagttttggtcatgcgcagtgtagatttttcaaccagagactgttcaacttcagcggcacagg

SEQ ID NO: 160427 - DNA, 255 bp, Glycine max
caactcactcccaagagtgacgtttattcatttggaattttgcttttagaaattgtgacagcccgccgtcctgttgagttgaagaaaactgtcgcagagcgggttacactcagatgggccttcaggaagtataatgaaggaagtgtggtggaacttgtggatcctttaatggaagaagctgtaaacggagatgttctgatgaaaatgcttgatttggcgtttcaatgtgcagcccccattcgaacagatagacct

SEQ ID NO: 160428 - DNA, 253 bp, Glycine max
aagaagagggggtcagagtgagaaagagaaagagagaattcgtaaaccctaatttcggaaagatcggcgatgactgcatccaaggatcgcaagaacttcgtctacatcgccaaactcgccgagcaggccgagcattacgaagagatggtggaatcaatgaagaacgttgcgaatctcgacgttgaactgacggtggaggagcggagattgctttctgttgggtacaagaatgtgattggagctcgcaggcgtc

SEQ ID NO: 160429 - DNA, 253 bp, Glycine max
gattgatggtggtgtgcatgagtatgagatgggagattacaatcaccctgaggcggaggaaatatttgtcgaattggctgaggtgatggataagataagaaaagaagggtatgatcccagagtttcggaggtcttgcttgagatggatgatgaggaaaaggccgttcagttgcttcaccatagtgagaagctggctcttgcttatggtctaatcaggataggtcatgggtctacaatctggattgtgaaaaac

SEQ ID NO: 160430 - DNA, 256 bp, Glycine max
gttacttgcgatacggtatgctagcagctcgtgcagaggctttaaaggttcgtgattctgaaaatccttgtattttggctggctttgatgggtattacgtatatggaggagtgcagtataaggccaaagctcccccttctggctcaagcttcagccaatgccaaaatgttgttgttgaagcactccatgttaatgcaacatgctcttacaaggattgcactttcggagggatatggaatggtggtgggggagctgg

SEQ ID NO: 160431 - DNA, 264 bp, Glycine max
ccaccacacaatttcatttcatttttccttttcacttcactttcccccaattttctttctcaacaatggccgcagcaacacaactccacttaccccctggattccgattccaccccaccgatgaagaactcgtcgttcactatctctgccgcaaatgcgcttcgcaagaaatcgcagttccaataatcgccgaaatcgatctctacaagtacgacccatgggaccttccaggaatggctttgtacggagagaaagagtggtatt

SEQ ID NO: 160432 - DNA, 260 bp, Glycine max
cctaattctcatttcttcatcgttcgattcttctcctcctaaagatgcagatctacgtgaaaactttgaccggtaagaccatcacccttgaggtggagtcctccgacaccatcgataacgtgaaagctaagattcaagacaaggaagggatcccacctgaccagcagagacttatctttgcgggtaaacagcttgaggatggtcgaacccttgccgactacaacatccaaaaggaatccactctccacctcgtgcttcgc

SEQ ID NO: 160433 - DNA, 258 bp, Glycine max
aaaaaagaaaaaagaagacagaggaaagaaaggagagctggaatcacatggacttgtctttctctttctgggtctccattaaatttttcttctctcccttctttctctctctctctctctgaccattctcttcttcttctttttcttctcctctctctctctcccctccgccatggctgaggataaggagatgtctacctctgtcatcaatgggaatgattccctaactggtcacatcatatctacaactattggagg

SEQ ID NO: 160434 - DNA, 259 bp, Glycine max
ctctttttcttctctctcaacaacttcaccttcttcctcctcgatcatgtctcacttcaagggcaagtaccatgatgagcttatcgccaatgctgcgtacattggcactcctggaaagggtattcttgctgctgatgagtcaacagggacaattggcaagcgtttggccagcatcagtgtagagaacattgaatccaacaggcgagctcttagggagctgcttttcactgctcctggtgttcttcaatatctcagtggt

SEQ ID NO: 160435 - DNA, 261 bp, Glycine max
caaggactactttaatgattaaaaacattcctaacaagtatacgtcgaagatgctgcttgctgcaattgatgagaatcaccagggtacttatgacttcctctacttgccaattgacttcaagaataagtgtaatgtgggttatgcttttatcaatatggtgtctccttcacacatcatcgccttctacaaggcctttaatgggaaaaagtgggagaagttcaacagtgaaaaggttgcttcactggcatatgcacggatac

SEQ ID NO: 160436 - DNA, 257 bp, Glycine max
gtgagatacactaagttatcctcataaatacactctaattaggtggcaagataagtgtctaaccttagtaacattgccacatattgtgttcattttggaattgtgccactaaaattctattcaattcatctatggctgcctcttcttatgctatgcaatcaatcctggcaaaccctttgatccgcatttccagcgggtctagggtgaaccaatttggcgttcctgctttgcacatgagaaggaatgttggcctgaga

SEQ ID NO: 160437 - DNA, 257 bp, Glycine max
atgtcacagttgggtttatgtgcttttcgggttggactgatttctgaagcccatggctgcctgtctgaactgtactctggtgggagggtgaaagagttacttgcacaaggtgtgtcacaaagtcgctatcatgagaagactccagaacaggaaaggttggaaagaagacggcaaatgccttatcatatgcacatcaatcttgagctcctggagacagtacatcttgtatctgctatgctgctggaagttcctaatat

SEQ ID NO: 160438 - DNA, 257 bp, Glycine max
aagaacagttggtgctcttattgggctctatgaacgagcagtaggaatttatgcttcccttgtcaacataaatgcttatcatcaacctggtttaggcaatatggcttgtgggagaggtatgctgaattgtatccaaatgaagacctagtttacactgttggcattagtgactacagaaaagattggttctttgcacaggttaacaggaagaaagacaatggcactgacataggaaccacatggcaaattaatttcaa

SEQ ID NO: 160439 - DNA, 259 bp, Glycine max
gcttcttgcaagaagtttctgagcttttatatcctctatatatagttctctggcaattaaggtctcatccaaataagcacaaatgggtagccagagttacttcaaggctttgattatttgccttatagcactaattggatcaactcaagctcaattgcagcttggtttctatgccaaaagttgtccaaaggctgagcaaataattctgaagtacgttgttgagcatatccacaacgctccatcactagcagctgctctc

SEQ ID NO: 160440 - DNA, 259 bp, Glycine max
gtggaattaacactgctatggaacgacagataacattgctacatgaactgatgtccactgttaaggatatgttacgcaacacagaggttgctgttcgttcctttatgatgctacgccctaggttccttcatccgagtgggggtacatcaagtgccactgccccatcacagactcctggtgcaactatagcacctagttcgagtagccaaccaacaactgcttctatagtgcctgtttttgatttctacagtggtcttcc

SEQ ID NO: 160441 - DNA, 256 bp, Glycine max
gtaactttttgcattgtaaacccatgagttgcaaacaaagtgaatggttccatgatttggaatgtcttcaagagtgacaaaagggatcgcattttctttgctaataagacatatcttccaaatgaaactccaactccactagtgaagtacagaaaagaagaattggaaaatctaagaggagatggaaaaggagagcgcaaggaatatgataggatctatgattatgatgtctataatgatttgggtaacccagaca

SEQ ID NO: 160442 - DNA, 256 bp, Glycine max
cacagcctcacaagtaacaaacttataacacacactctctctctctctctctgcaatggctggaatggttcccctttgcattgcatcattggtcactctttttgttgcaacaagtgctagaattcctggggttttcaatggtggtgcatggcagggtgcccacgccactttctacggtggaaatgatgcctctggaacaatgggtggggcatgtgggtacgggaacctatacagccaagggtatggcgtgaacacc

SEQ ID NO: 160443 - DNA, 258 bp, Glycine max
cacttataaaaccctcttttctgcttcttcgtccattggcattggctttcaatggcgaagtgcatgaccagttcttcttcttcttcctatgcactgcttctctttttcttctgctttctacaactggaggctattttggaccctgctgatttcctcgctctgcaaaacattcgtaaagctctgcaagacatgcctgcttccgatttcttctcttcctgggatttcaccgcagacccatgcaacttcgccggcgtttac

SEQ ID NO: 160444 - DNA, 257 bp, Glycine max
ctcggaagcgtgcattaaatttcccgaaaggctaaaatatccaatgcacctttctcttcctccgatggctaatctctcactcttgttcttcggtctcctcctattctccgctgccgtagccaccgtcgaacgaatcgacgatgaagacaaccttctgatccgtcaagtggtgccggacgcggaggaccaccacctgctcaacgcggagcaccacttctccgccttcaagacaaagttcgccaagacctacgccacgc

SEQ ID NO: 160445 - DNA, 253 bp, Glycine max
cagcaagaagccatgaataaagtggtagaagttttgagtgtagcaccaattttggaatcagaagagttaccaactcaaacatcgcttcccctcaccttctttgatatactatggttaaggttaccacctgttcaacgcatcttcttctatgaatttcctcacccaacccatctcttctttgatacccttcttcccaaactcaaacactctctttctcttgcacttgcctactttttccctcttgctggacacc

SEQ ID NO: 160446 - DNA, 253 bp, Glycine max; identical to SEQ ID NO: 152472

SEQ ID NO: 160447 - DNA, 253 bp, Glycine max
gaaaaagcaactaagcatagtgtgtaagaaagggagaaaaacaagtgctgtgtagagagaaaaatggctaggtggtgcatgatcttggtggttcttgctcttgccgtggttgcaagtgccagaaacatgcccaatgacgctggtttggaggaccagaagaacttccttgggtatgggttttcgggagttggcaacaatggccttccctttggtggagtgggttctgggtttgatggtaatatgggtgggcctt

SEQ ID NO: 160448 - DNA, 249 bp, Glycine max
agttgccacactacaccgagattccccctaaacccgtttgcgttgttgtttgcgaagaaatggcgactaagaggagcgtgggaacgttgaaggagggtgatttgaaagggaagagggtgttcgtgagggtcgatctgaacgtgcctttggatgacaaccttaacatcaccgatgacactagagtccgtgctgctgttcccaccatcaagtacttaactggtcatggagccaaagtgatcctttctagcc

SEQ ID NO: 160449 - DNA, 258 bp, Glycine max
gccagtgtgtcaccaccatggccaccgtcacaacccaagcctccgccgcgattttccggccatgtgcctcgaaatcgaggtttctgaccggctcttccggtaaactcaaccgggaagtgactatgaggccaatggggtgccctccttctgcctctttcaaggttgaagccaagaagggagagtggttacctggcttggcctccccaacttacctcaatggcactcttcctggtgacaatggatttgaccctctgggac

SEQ ID NO: 160450 - DNA, 251 bp, Glycine max
ttgagtctggaagattggcttcactcttctgctcctgctgatatctatgttcttgggtttcaagaaattgtacctctcaatgcgggtaatattttgggcacagaagacaatggccctgccagaaagtggctagctcttattaggaagaccctgaatagtcttcctggaacaagcggggaatgccacactacttcaccgcttcctgaccctattgtagagttagatgctgattttgagggatcaatgaggca

SEQ ID NO: 160451 - DNA, 253 bp, Glycine max
  unsure (1)..(253): unsure at all n locations
gtgagttgcaggcagtgtcatctctcctttgacgacaagatgagcatcccaattccccatcggcagttattcatagacggagactggaaagtccccgtcctcaagaatcggattcccatcatcaacccttccacccaacacatgatacagggntatcccagcagctactaaggaagacgttgatctcgctgtcgctgccgccaaagctgccctctcccgcaacaagggcgccgattgggctngggcttccggc

SEQ ID NO: 160452 - DNA, 250 bp, Glycine max
gacgggcatcgtgggcaacagcctcgccgagatcctccctctcgccgacacccccgccggtccatggaaggtctacggcgtcgcacgccgcccccgtccgccgtggaacgccgaccatcctgtcgagtacatccagtgcgacgtctccgatcccgccgacgccgaagccaaactctccgccctaaccgacgtcactcacgtcttcttcgtgtcgtggaccaaccgctccaccgaagcagaaaactgcgaa

SEQ ID NO: 160453 - DNA, 250 bp, Glycine max
ctacacatccctagctctgtcgttccgtcgttgacgatggcgtttcgggtgcgaaccctgacctccgctctctctttcttctctctctcttgtccatcgctttcgccaatgtcttcttctaagagcgtttcgatgacgggtgggaaaatcgatgggttaaatcagattggaaaaaagatgagaacgtggctggggagtggaaccacacctctggtcaatggaatggagacgctaatgacaaaggtattca

SEQ ID NO: 160454 - DNA, 249 bp, Glycine max
ctctgctcgtgcctctagggttatcatatctccatttccatttcctctctctcagtttccaagaatcttaagctatgggaaagtcttacccaaccgtgagcgctgattaccagaaggccgttgagaaggcgaagaagaagctcagaggcttcatcgctgagaagagatgcgctcctctaatgctccgtttggcatggcactctgctggaacttacgacgtgagctcgaagaccggtggtcccttcggaa

SEQ ID NO: 160455 - DNA, 253 bp, Glycine max
ctctttctctagtcctgttatttctcagcgcgtaaagcatggctttgttggtggagaaaaccacgagtggtcgcgagtacaaggtcaaggacctttcccaggccgacttcggccgcctcgagatcgagctggccgaggttgagatgtccggcctcatggcctgtcggaccgagttcggcccctcccagcccttcaagggggcccgcatcaccggctccctccacatgaccatccagaacgccgttctcattga

SEQ ID NO: 160456 - DNA, 246 bp, Glycine max
  unsure (1)..(246): unsure at all n locations
tttccccactcactctctcatctttctcctaaaacatctccagtgggttcttcttcttctattacaacaacgtcacacaagaccatgaccatggccatggccacgatcctgctcctgttcacggtcttcgcggtttcatcggccctagacatgtcgataatctcgtacgacaacgcccacgccgccacgtcgcgcagactnaggagctgatgtccatgtacgagcagtggctagtaaagcacggca

SEQ ID NO: 160457 - DNA, 247 bp, Glycine max
ggatttcttgcgcggtttatcatgggggatagtcagtattcgtattctctcaccacatttagcccttctggaaagcttgttcagattgagcatgctttgacggctgtcgggtctggacaaacgtctttgggaattaaagctgcaaatggagttgtcattgctaccgagaagaaattgccatctatattggttgatgaagcatcagtccagaaaattcagttattaacaccaaatataggtgtcgtat

SEQ ID NO: 160458 - DNA, 250 bp, Glycine max
tctcgttcttcatggccgtcggcaacgtgcttgggtatgctgcagggtcctacagcggtctccacaagatcttccccttcacggagaccaaggcctgtgacgtcttctgcgcaaacttaaaaagctgtttctttttctcgatcctactgcttctctttttagcaactgttgctctgctctacgttaaggacaagcaagttgaagcaattcctctggatgatgccactcaaccctcttgtttctttcagct

SEQ ID NO: 160459 - DNA, 262 bp, Glycine max
cgcgttggtgcaaagcatccttcgcttcaatctctctctctctctttgcgctttctgcaaaccgaacatttcatctccaaagggatcaacaggtcgaaggagaaatggggctgacattcacgaagcttttcagccggcttttcgcgaagaaggaaatgcgaattctgatggttggtcttgatgctgctggtaagaccactatcctctacaagctcaagctcggagagatcgttactacaattcctaccattgggttcaatgt

SEQ ID NO: 160460 - DNA, 261 bp, Glycine max
cgagggaaacagaaccgggcaaccttatatttcccaagatctcaaagtctatttcatcatgttctgagtttgtggatgataaatagaaagcagtgactgtgccagctgaatcaccagcaactcagaacatgatgaaatagactttgagttcttgggaaacagaaccgggcaaccttatattttgcaaacaaatgtgttcaccggtggcaagggtgacagagaacaaagaatctacctctggtttgacccgtcaagagaata

SEQ ID NO: 160461 - DNA, 262 bp, Glycine max
ttcggctcgaggcgattgtttcagtcgaaccatgaaggatgaaggggtgattgctctttggagaggaaacactgctaatgttatcacatacttccctactcaggctctcaactttgcttttaaggattatttcaagaggcttttcaatttcaaaaaggataaagatgggtactggaaatggtttgctgggaatttagcatctggtggggctgctggggcttcctctctgttgtttgtctattctttggactatgcccgaaca

SEQ ID NO: 160462 - DNA, 250 bp, Glycine max
tggggatcaatgagaaatctgtcaagtcaatgccttttgaacagcttgctcttctgattgaatcggcttctactcttcagactgtgtaaactttacttgaccggtttgagagccgccttaaagtgtctacagcagtggctcctgccaagaatttgtctagcttggataacatcgatcatcttcttaaacgggttgcttcccccaagaaaagggctactccccggagttctgtgagaagcaggcaggcaaa

SEQ ID NO: 160463 - DNA, 248 bp, Glycine max
ctcgagccgaaagaataatggttggaagtgcaacaaaggttgctttcaccctcttggccactttcgccattgtcattccatgccttgaggctggcattgctgagtttgacgattttctcaaagcccaagctgatgaagcccataaaattgctcttgattcctatgtcccagagccccacgatgtcgcccatgaactcaatttccatgttcatatggcactggaaaactccacaaggagggaactaagg

SEQ ID NO: 160464 - DNA, 244 bp, Glycine max
ccctggtcttgctatggctcgggcatttggagatttttgccttaaggactttggattgattgctgttccagatatctcgtatcaccgtcttaccgacaaggatgaatttgtcgtgttagcaacagatgggatttgggatgttttatcaaatgaagaagttgtggacattgtagcacctgctccacggtctagtgctgctagagcactggttgagtcagctgttcaggcatggaatacaaaattt

SEQ ID NO: 160465 - DNA, 244 bp, Glycine max
cggctcgaggagagcgagcagtttcagacacagagagaggggtttgggattggagggattgacgctgcgtctcttcctcttctctttcgatccatccctcattcctaatcctccaatccaaccacctcagcctcacactcacatatacacatatctgaacgcgtatcgtccctcctatggcttcaaagcgcatcctcaaggagctcaaggacttgcagaaagacccaccaacttcttgcagcgc

SEQ ID NO: 160466 - DNA, 247 bp, Glycine max
cttaacaacagcacaaagcgggttactgtctgttcaagctaccatctctctctctctttcttagtgcctccttgccagaagttaaaatggcccaagaaactttcctattcacatctgaatcagtgaacgaggggcaccctgacaagctctgtgaccagatctccgatgctgtgctcgatgcatgcttggagcaggaccctgacagcaaggttgcctgtgaaacctgcaccaagaccaacatggtgat

SEQ ID NO: 160467 - DNA, 248 bp, Glycine max
atcttgttctgattatggaacagctgaagccaagtgctgctaactcttcccctctcactcccctcggcttcttggacagagcagccaccgtccacggcgacgtcccttccgttgtttataacaacaccaccttcacgtggtcccagacgcgccgccgatgcctccagctggcctccgccctctcctcccttggtatccgccgcggcagcgtcgtctccgtcgtggcccccaacatccccgccatgtac

SEQ ID NO: 160468 - DNA, 249 bp, Glycine max
cttgggagaagaggtcgagtttcacagcagcaatggtgtacgtcaaggctcagaaatcagaagcctacttcaagagatatcaagtcaagttgaagagaagaagagagggaaaaaccgattaccgtgccaggattcggttgattaatcaggacaagaacaaatataacactccgaaataccgatttgttgttcgctttagcaacaaggacattgttgcacaaataatatctgctagcattgctggcgata

SEQ ID NO: 160469 - DNA, 245 bp, Glycine max
gatcctcttctcggtgatcctcaggtctatccagagaaaggaacagttgctttttctgctggtttgcacggctgggcttttaccctgactaactttgccaagatgtatgcatctgagtttggagttgatgaaggaaaaatgatggaaaggctctggggtgaaaacttctttgatccagccacaaagaaatcgtccggcaagaatcatggctctgctacctgcaagcgtgggtttgttcagttctg

SEQ ID NO: 160470 - DNA, 245 bp, Glycine max
cgaggatgtgctactctgtgtgttgcctatgtttcatatctatgcgctcaattccattttgctctgcgggattcgttccggtgcggccgtgcttattttgcagaagtttgagatcactactctgttggagctcatcgagaagtacaaggtgacggttgcgtcgtttgtgccgcccatcgttttggcgttggttaagagcggagagactcatcgctacgacctgtcgtctattcgcgctgtggtca

SEQ ID NO: 160471 - DNA, 249 bp, Glycine max
gttcatcagcgtgtgtctcagccatggcgtttccctacatggaagccgttgtcggatttatgatattaatgtacatttttgaaacttacttggatgtgcgacaacatagggccctcaaacttcctactcttccaaagactttagaacgtgttatcagccaagagaaatttgagaaatctagagcctatagtcttgataaaagccacttccattttgttcacgagtttgtgacaatagtgacagactcta

SEQ ID NO: 160472 - DNA, 255 bp, Glycine max
ttttagaactttaatctcaaaatgtattcaatattcttttgaaaatataattcataaacgattttaaaacaccacctcgccgaggccgccatgggaaatgccttcctcctccagggcggagactgtgccgagagcttcaaggagttcaatgccaacaacatccgtgacaccttccgcatcatcctccagatgagcgtcgtcatgatgttcggcggccaaatgcccgtcatcaaggtggggagaatggcggggcaa

SEQ ID NO: 160473 - DNA, 252 bp, Glycine max
atccccttcttcaacccctctctctctctccaaaacgccaaaccaaaaaatggctcagaaggccgagaaaaacgacaccgactttaaggtccccgaaaccatcatcaccccctgcaccaccaccaccgccacctcgattaccgaaccttctagattcttcgacgcaaccacccccgccacgtcatcgcgctcccccaagcgatccctccccctcgacgacgaatctcagacggaccaaacggcgtcgtcgga

SEQ ID NO: 160474 - DNA, 240 bp, Glycine max
tgatggcgaagtttggcgagggcgacaagcggtggatcgtggcggacgtcccgacggcactaacgtgcacaactggcactgggcggagaccaactgcctcgagtggtccagaaccttcttcaagaacaatttcagtaacgtcgccgtcggtggcggcgacggcgatgccaccatcacgatcaagaaggtggagaagctcgatggcgaggcctacgtgaacgtccgcaaggggaaggtgat

SEQ ID NO: 160475 - DNA, 242 bp, Glycine max
cagacttaacaacagcacaaagcgggttactgtctgttcaagctaccatctctctctctctttcttagtgcctccttgccagaagttaaaatggcccaagaaactttcctattcacatctgaatcagtgaacgaggggcaccctgacaagctctgtgaccagatctccgatgctgtgctcgatgcatgcttggagcaggaccctgacatcaaggttgcctgtgagacctgcaccaagaccaa

SEQ ID NO: 160476 - DNA, 255 bp, Glycine max
attagagatccactcagccacttggaccgatccgccgtacgataccgcgacaggacttctcttgtctccggtgacgttacctacacgtggacccagacacaccaacgctgcatcaaacttgcttcttccatttctcaacttggtgtcggtctttctcccctcgatgtcgttgctgtattggcccctaatgttccagctatgtatgagctgcattttgctgttcccatgtcaggggctgttctctgcacgctaaat

SEQ ID NO: 160477 - DNA, 239 bp, Glycine max
gagagagagaaatagagagagaacttcaagtgagggtgagagtgacacaaatctagagagagcactagtactctaaaagtctattatattcttcaaaatatgaccatgcatcgcgagtcttgggcttttgtcttcggcgttatgggcaacatcatctcctttggagtgttccttgctccattgccaaccttttaccaaatctacaagaagaaatccactgaaggtttccagtcacttcc

SEQ ID NO: 160478 - DNA, 237 bp, Glycine max
aaacgacattcattcatctatggctaaccatattgctccgagcaaccactctccccaagaagacgctgaggctctcagaaaggctttcgtcggatgggggactgatgacaaaactgtcatagtaatattgcgccacgcaactgtttatcagaggcagcaaatcagaagagtctatgacgaaattttccaggaggatcttgtgaaacgcctagagtctgagatcaaaggagactttga

SEQ ID NO: 160479 - DNA, 243 bp, Glycine max
atccagttgggcctgcaatggttcacccatctgagaccgcttcaaaagggccaagttggaaagctcttcttgaaccaggggttaagcatgcattgattgttggagttggaatacaaatacttcagcagttttcagggataaatggggttctatattacacacctcaaatccttgaagaggctggtgttgaagttcttctttcagatataggcattggctcagagtctgcatcattccttatca

SEQ ID NO: 160480 - DNA, 245 bp, Glycine max
aaaaaatgggttcctctttgtggacttgtctgattttgttatcacttgcttctgcttccttcgccgccaacccaagaacaccaattgatgtgccatttggcagaaactatgtgcctacttgggcctttgatcacatcaaatacctcaatggtggttctgagattcagcttcatcttgataagtacactggtactggcttccaatccaaaggatcctacctgtttggtcacttcagcatgtacata

SEQ ID NO: 160481 - DNA, 255 bp, Glycine max
cggatcaacttttgaagatgaaccatctcaaaatggaagttcagtacatgctcctcaaaatggggtacataatagacctcagacagttgttaatcaaactatgtctatcttacctatatctaccacaagtgctcctggagcagttcctggtcccacaactaatttaaatataggaatggattattggggcacaccaacttcgtccaccattcctgcattgcatggaaaggttccttctactgcagttgctggagg

SEQ ID NO: 160482 - DNA, 249 bp, Glycine max
ccccaccctatctgtgccttttcctatgtgtgtgaatttaaatgataactgaagaaaactaaggaaggaaggaagagtgagcgtgaaagatgccttgggtgaggctttcagagtctccaaggctcgacgttgctattgacatgggtaatccatttctcaatctcactgttgatggtttccttaagatcggagctgtcgcagccacgcgatcagctgctgaagatacttatcatattatccaaaagggta

SEQ ID NO: 160483 - DNA, 246 bp, Glycine max
  unsure (1)..(246): unsure at all n locations
gcatacaactacaaaggttgctgtaggagataagatattgaagtagtgctaagtgcctaacacctgcacngaacaatggcctctgcatcagcatctcttctcaagtcttcacttgttcttgacaagtctgagtgggtgaagggacaaacacttcgccaaccttctgctgcatcagttgtgagatgcaaccccaccaccccatcaggcctcaccatcagagctggttcctatgctgatgagctcgtt

SEQ ID NO: 160484 - DNA, 242 bp, Glycine max
  unsure (1)..(242): unsure at all n locations
aaacgacattcattcatctatggctacccttattgctcccagcaaccactctccccaagaagaccgtgagngtctcagaaaggcttttgaaggatgggggactgatgagaaaactgtcatagtaatattgggtcatagaactgtttatcagaggcagcaaatcagaagagtctatgaggaaattttccaggaggatcttgtgaaacgcctagagtctgagatcaaaggagactttgagaaag

SEQ ID NO: 160485 - DNA, 238 bp, Glycine max
cgcagagagagagagatccatcgatcaattaatttccaatggccgatcagctcaccgacgaacagatctctgagttcaaggaagcctttagcctcttcgacaaggacggcgatggttgtattaccaccaaggaacttgggactgtgatgcggtcgcttgggcagaacccaactgaggctgagctgcaggacatgataaatgaggttgatgctgatgggaatggtaccattgatttccc

SEQ ID NO: 160486 - DNA, 238 bp, Glycine max
attctctctgtgtatttccctacctctcccttcaagatgcagatcttcgtcaagaccctcaccggcaagaccatcacccttgaggtggaaagctctgacaccatcgacaacgtcaaggccaagatccaggacaaggaaggaatccccccggaccagcaacgtctcattttcgccggaaagcaacttgaggacggccgtacccttgctgactacaacattcagaaggagagtactcttc

SEQ ID NO: 160487 - DNA, 236 bp, Glycine max
gtcactccttgctcttagccctcctcctcttcgccgcagtggccaccgccgcgatggcggtggccgcgtccgacgccgacgacatcctgatccgtcaggtggtgccagatgttggcgaagcgcagaggaggacaacctgctgaacgccgagcaccgcttcgagagcttcaaggccaagttcgccaagacctacgccaccaaggaggagcacgatcatcgcttcggcgtcttcaagt

SEQ ID NO: 160488 - DNA, 243 bp, Glycine max
aactcagtgaaagagaatccgaggcgaacagaatagactgattacgatggacgggaaggagcaggatgtgtcgatgggatcgaacaagttcccggagagacagccgattgggacggcggcgcagagccaagacgacggcaatgactaccaagagccggcgccggcgccactggttgacccgacggagtttacgtcatggtccttttacagagcagggatagcagagtttgtggccacttttct

SEQ ID NO: 160489 - DNA, 239 bp, Glycine max
ctatcctatcgtagcaaagaaagaaagatagaaaaccctagcttaccttttcaactttcaagatgcaaatgtttgttaagacactcactggtaagacaatcacccttgaggtggagagttcagataccatagataatgtaaagtccaagattcaagacaaggaagggatcccaccagaccagcaacgtctcatttttgctggcaagcagcttgaggatggacgtacacttgctgattac

SEQ ID NO: 160490 - DNA, 239 bp, Glycine max
cttcttcaccctcttagggtttgcatcagattcccctaattcttgattgattttgcgctttcgctagattttcttcaaaatgactcaagatctagagatgaaggatcgctcaacgccttccaactccgtttcttcgcctgctccatctactctgcagcatttgaaggagatagcgtctcttatcgagaccggttcgtactcgaaggaagttcgtagaattgctcgcgctgttcgcctta

SEQ ID NO: 160491 - DNA, 117 bp, Glycine max
ctcagtctctgtgtttgcggctgaggattccgaacgagtgaccttcttcgtttctcgcaaagtttaagtaatcatgggtaaggaaaaggttcacatcaacattgtcgtcattggaca

SEQ ID NO: 160492 - DNA, 234 bp, Glycine max
cgtgattccgttagagagacttggatgcctcaaggtgaacaacttctccaattggagcgggagaagggaattgttatcagattcatgattggtcacagtgcaacttccaacagcattctagatcgagctattgattcagaagaagctcagcacaaagacttccttcgcctagaacatcttgaagggtatcatgagctgtctgcaaagataaagattttcttttccactgctgtt

SEQ ID NO: 160493 - DNA, 240 bp, Glycine max
cattagcagcgttaaagaagagagaagaaaaatgcgaaagttcgatccatggcccgttttcttcaagcgcgagtggaaacgcaactggcccttcctcgttggattcgcagtcaccggagctctaatcaccaaactttcccttggccttaccgaggaagatgctaagaattccaaattcgttaaggcgcacaaaaggtgatttctgaatcgtgacatctgcctggctttgcactttatgtt

SEQ ID NO: 160494 - DNA, 243 bp, Glycine max
atctcattgaggagaaagaagaagaaggatgtggcacgaggcgagaaggtcggagaagaaggtccacgacatgatggacgcggctcggaagagagcgcaacgacgcgccgtttacctcgccaagagacgcggcgatcctcagcaatccattcagctcgtcggctttcctagccgaacctatcgcgacgacgctctctaccaagcctcacaggatcagcagggcctgataccttggaatgggaa

SEQ ID NO: 160495 - DNA, 260 bp, Glycine max
cattctccctttcctctccgaaccctcgatcactctcacgcgctcctatattcgctcctccaccgtcgctctctcgaacaaccacaacaccatcttcatcacatggcaaacgcagcatctggtatggcagtccatgatgactgcaagttgaggtttttggagctgaaggcaaaaaggacacaccgtttcatagtttttaagattgaggagcagcagaagcaggtcattgtggagaagcttggtgagcctgcccagggcta

SEQ ID NO: 160496 - DNA, 127 bp, Glycine max
cgctctccgtttcgccatctctctctctcaacactctcttcttcgacaaagcgcttcctctatctcgtacctcacttctctctctccctctccccaaatccctcctctctctctccacgcgccgccg

SEQ ID NO: 160497 - DNA, 260 bp, Glycine max
caaaaccaagggatcttccagtacctgggcgggagctgtcaggagttcattttgctatggagtttcttcatgcaaatactaaaagcttgcttgatagcaatctccaggatggcaacttcatttctgccaagggaaagaaagttgtggtcattggtgggggtgacacgggcacagattgcatagggacatccattcggcatgggtgtagtagcattgtaaatctggaacttctccctcagccaccacaaactagagcccca

SEQ ID NO: 160498 - DNA, 262 bp, Glycine max
gagaagcaatagtggatggccccgatttaggtcgaagtgtatgactactgaggaaattgagaatattcttagaatgcagcttgtagcaacacacagtaatgatccatatgttgatgactattaccaccaaggctgtcttgcgaaaaagtcatctggtgctaaattgaggcatcacttttctccagctcaaataaaggaactccctctacgaccctcttctaatgctgaaccacatgcttttcttcaggttgatgcactaggg

SEQ ID NO: 160499 - DNA, 262 bp, Glycine max
ccggcgttgactatctttctttgagagagtaacgcaatggaacaaccactcaccgaagccgtggaatccttatccgtctccgaccctgagatcccccaatcatccaatcccaatccaactcatctgttgacccccgatgagaagtttcaaattgtgaggagcgtcggagaagagtgcattcaggaagacgaactccttaacctcctcaccaaaaagcccgaacccgtttgctacgatggcttcgaaccctccggacgaatgc

SEQ ID NO: 160500 - DNA, 266 bp, Glycine max
cgacacccttaacacttctcataataaaatgttgcgccccacctccaaggaacaagtggtggggtggccgccggtgagggcaagcaggaaaaatgctatgaagatgagttgcaagttggtgaaggtggcggtggatggagctccttatctaagaacagtggatcttgaaatgtacgagacttatgagcatttgatgagggaattagagaccatgttttgtggcttagccattcgtaatcatttgatgaatgagaggaaactgatgg

SEQ ID NO: 160501 - DNA, 267 bp, Glycine max
aaggatcagtggcagttagcatgtcaattgaaggaacaagtttttgttttgtagcagcacacctagcatctggggagaagaagggtgatgaagggagaaggaaccatcaggtagcagaaatttttaggagaacctctttttctaggaccacaaaagaccatcatcattttcctctaaccatcttaggccacgaccgtatattctggttcggggatctgaactataggctatacttggaggacaattttgcgaggcatttgataagaa

SEQ ID NO: 160502 - DNA, 270 bp, Glycine max
ttcggctcgagaaaatattattaagatgatcaacattattggagcacttgttctactctttgcatttctcttcctcagttgtgtgtatgcacaagacacaacaacccttgtgcctgcaatcataacttttggtgattctgctgtggatgtagggaacaatgactatcttcccacccttttcaaggctgattaccctccttatgggagggactttgttaaccaccaacctactgggaggttttgcaatggcaaattagctactgatttcac

SEQ ID NO: 160503 - DNA, 250 bp, Glycine max
gttccctacctctcctttcaagatgcagatcttcgtcaagaccctcaccggaaagaccatcacccttgaggtggaaagctctgacaccatcgacaacgtcaaggccaagatccaggacaaggaaggaattcccccggatcagcaacgtctcatcttcgccggaaagcagctcgaggacggccgtaccctcgccgactacaacatccagaaggagtcaacccttcaccttgtccttcgtctccgtggtggc

SEQ ID NO: 160504 - DNA, 257 bp, Glycine max
ggacaaagaaaatttttgtaggtggaattccttcaaatgtgactgaagatgaatttagagacttctttacacgctacggcgaagttaaagatcaccaaataatgcgggaccactccaccaaccgatctcgtggctttgggtttatcacatttgaatctgaagaagcagttgatgatcttctgtccatggggaacaaaattgactttgctggagctcaggtggaaatcaagaaggctgaaccaaagaagccgcactca

SEQ ID NO: 160505 - DNA, 259 bp, Glycine max
tcgtgttgtagctagctcctcgaaaatgctggcacgcctcgccgcgagtcgcttcaacgagatccgtcagattttccgtcagccttctagggctttctcgaccgctctgaactaccaccttgacacaccggacaacaaccctaaacttccatgggaattcaccgaggccaatcaagcaaaggttaaggagattttgtctcactatccatccaactataagcaatctgctacaattcctcttttggatcttgcccagcag

SEQ ID NO: 160506 - DNA, 259 bp, Glycine max
aacaaaacaaattaagtaataaattacttatcatagaaacatggcagccctcaaacaagtttcatccctcttgctattccctttgtttctcattttttccctattcaaatcctctcatgctggtgggattgcagtctattggggtcaaaacggcaatgaaggctccttggaagaagcttgcaactctgacaactaccaatatgtgaacataggtttcttgaacgtttttggcaacaaccaaatcccacaactaaacctt

SEQ ID NO: 160507 - DNA, 263 bp, Glycine max
  unsure (1)..(263): unsure at all n locations
ctaaaacatctcaatgggttcttcttctattacaacatcgccctccaancatgaccatggctgcgatcgtgctcctgttcacggtctttgccgtttcctccgccctagacatgtcgataatctcgtacgacagcgcccacgcggacaaggccgccacgttgcgccccgaggaggagctgatgtccatgtacgagcagtggctcgtgaagcacgggaaggtgtacaacgcgctcggcgagaaggagaagcgcttccagatcttc

SEQ ID NO: 160508 - DNA, 258 bp, Glycine max
gacgaagcggacgcgtggggataaagagggacgaagcgtgccacaatcttgtgttcatgttatcgttcaacgcgcagggtgggttagtgaaccagtttccgattttgatcaagtggctaggactggctggggagggtttacacaagcagctcgcggaggagatcaggaccgttgttaaggacgaaggaggggtgagtctccgggcgttggatcagatgactttgaccaaatcagtggtgtatgaagtcctgaggatag

SEQ ID NO: 160509 - DNA, 263 bp, Glycine max
gaaagacaagacaaaacaagagagaatgagtggcggaggaggaggagaagaggaagcaactctggagttcactccgacgtgggttgtggccgccgtttgcacagtcatcgtcgccatatctctcgctgctgagcgcctccttcattatggcggaaagtttctcaaagccaaggaccagaagtcgctctacgaagctctccagaagatcaaagaagagctgatgcttctgggcttcatttccctgcttctcacggttacacaaa

SEQ ID NO: 160510 - DNA, 253 bp, Glycine max
  unsure (1)..(253): unsure at all n locations
ggtttttctttttctcttctcactgcatcgcttcnggttcttctgaaaagatgtctcgcgtgtatgttggtaacttggattcacgagtcactgagagagatctcgaagacgaagtccgcgttttcggagttattcggagtgtttgggttgcacgtagaccacctggttatgcttttattgactttgatgaccgcagagacgcacaggntgctatccgtgaatggatggtatgttcagaagaattatgttgttg

SEQ ID NO: 160511 - DNA, 208 bp, Glycine max
gcctgctgggagctctactgcctcgaacacggcattcagcctggtgggcagatgccaagtgctaagactgttggtggaggtgatgatgctttcaacaccttcttcagtgaaactggggctggaaagcacgtgcctcgtgcgatttttgtagatctcgagcctactgtgattgatgaagttaggactgggacataccgccaactatttc

SEQ ID NO: 160512 - DNA, 255 bp, Glycine max
aaaaaagggttacttcagcttccacatatcttgaagaattgatcaatgggcaagtctgtagttgagaagctactttggatggcaattgtgtgcttggtgctgggtgtaatttccattactcccaaggcccaagcagcagtgacatgcaaccaggtggtgagcaacctcaccccatgcatttcctatgtgctcaatggtggcaaaaccgtgcctggcccttgctgcaatgggatcaagaccctctttaacctcgct

SEQ ID NO: 160513 - DNA, 254 bp, Glycine max
cgcacacgaggagcagcctcaggaggagaaggatgtctcacaggaagttcgagcacccaaggcacggttcactgggatttcttcccaggaagcgtgctgctcgtcacaggggaaaagtgaaggcattccccaaggatgacccatccaaggcacccaagctcactgcattcttgggttacaaggccggtatgactcacattgttagagaggtcgcaagccaggatcaaagcttcacaagaaggacacttgtgagc

SEQ ID NO: 160514 - DNA, 250 bp, Glycine max
ccgtgatagagatggtagactgtgggtacgtgtagttaagctgagagaaatgccattgctcgtatccaattgcgctaaatcctttatcctctccacgctcccaaagtccaagcaaatgtcccgtcaagctcccggcgtcgtcaaaacgcgcctgatgggcgtcgttttcgacatggacggcaccctgaccgtcccggtgatcgattttccggcgatgtatatggcgatgctgggcgacgacgcatacctg

SEQ ID NO: 160515 - DNA, 262 bp, Glycine max
acttggtcccataccctagaatccatttcatgctttcctcctatgcaccagttatctctgctgagaaggcctaccatgaacagctctcagtggcagaaattaccaacagtgcttttgagccatcgtccatgatggccaagtgtgatcctcgtcacggaaagtacatggcgtgttgcctgatgtaccgtggtgatgttgtgcccaaagatgtaaacgctgctgttgccaccatcaagaccaagaggaccattcagtttgtgga

SEQ ID NO: 160516 - DNA, 235 bp, Glycine max
agaatatgcaaagcttccaccagggcctcgtccatttcctatcataggaaacatcttggaacttggcacaaatccacacatagcactcagcgaattctcaaagatttatggacctcttatgacttttaaacttggcagaataaccaccatagttatctcctctcctcaagtagccaaagaagtactacttgaaaatggtcaagtcctttctagcagaacaattccacattcagtc

SEQ ID NO: 160517 - DNA, 253 bp, Glycine max
ctcgagccgggaccttttcatgaatggtgcaaagttcgtcacttcaggctcacccatcaagatgacatacaaaaagggtctcatcatgaagccaagagatggaactcatgtcagcaggttgacacgacatgctggtgccctaaactgcttcgttggcaagccttgttagagaacaacaaacattaatgttgttgttgttgttcgctttttctttttttttttggaaagaaaaaaaaaaccacattgcccagaa

SEQ ID NO: 160518 - DNA, 257 bp, Glycine max
agtaaattaactatgaagcctaccctactattatccctttccttcctgcctctctttgctttcctggctctttcagaagatgttgaacaagttgtggacataagtggcaaccccattttcccaggtggcacatattacattatgccatcaacttggggcgctgccggtggtggattgaaactaggccggacaggaaactcaaactgcccagttactgttttgcaagattactcagaaatcttccgtggcacaccagt

SEQ ID NO: 160519 - DNA, 256 bp, Glycine max
cccaccattactcagcactgccattcttcaatcacactactggctgtcaccttctcagatcttcacaccgaagagggcatcaaatccctcgatcaattcctttctgggaaaacctatatctctggggatcaattgacaaaggatgatatcaaagtgtatgcagctgttgtggaaaagccaggagactcttttcctaatgctgctaagtggtacgatgccgtctcttctcaacttgctccaagcttccctgggcacg

SEQ ID NO: 160520 - DNA, 260 bp, Glycine max
cggtgagttcccaggcgactacggctgggacactgctgggctttccgcagacccagaaaccttcgccaagaaccgtgaactcgaagtgatccactccaggtgggccatgctcggagccttgggctgcgtcttcccggagttgctgtcccgcaacggggtgaagttcggagaagccgtgtggttcaaggccgggtcccagatcttcagcgaggtgtgctcactacttgggcaaccaaggcctgatccacgcccagagcatc

SEQ ID NO: 160521 - DNA, 251 bp, Glycine max
aagaaccatgccaaatagaagcatgcctgcctcaccttatcccacaccaggtgcccttctaatgggagatgccttcaatatgcgtcaccctttaaccggaggaggaatgactgtggctttatctgacattgttgtgctaagggacttacttaaaccccttcatgatctccatgatgcttctgctctttgcagataccttgaatcattctacaccctacgcaagcctgtagcatctacaataaacacactag

SEQ ID NO: 160522 - DNA, 250 bp, Glycine max
cgctcgagccgattcggcccagcaattggaacgagggaagtgttcacgccatgggaatggagcgagtgcagtgtgcctatgcctctctggacgaagcgttcgaaatagggaaagaggcgtatcaggggcagcagtacagccagatttacttcgcgcgccttcatttgctgcgaacacttttatattccctcgttcctcattggaggcccaattttcccgtgtgcacagtgctgggattggaagaagggaa

SEQ ID NO: 160523 - DNA, 250 bp, Glycine max
aaacaaccaaaccacacacttcacaccctcttcaacatcctcagcaagtacaagaacaagaagaaacaatgtcttgctccaatctcacaatgttggtgtcctcaaaaccttccctttccgatccctccaatctctccttccgctctgtcctcaacccttttcagttcccttcacaaaacccaatttcatgcactccttcacgctcctaagacacccaatttcagtgtggtctgagagatctcagcccccg

SEQ ID NO: 160524 - DNA, 253 bp, Glycine max
ctgacttgtacaagaattctgatctatataggagacacaagcagcttatacaagaactgggtcagcccgctcccggttcaaaggatctttatttccctactcaatactctctgtcattcttggtccaatgccaagcttgcttatggaagcaacgttggtcatattggcgtaatccaccatacactgctgtgaggtttttcttcactactttcatagccctgatgtttggaacaatgttctgggacctcggaag

SEQ ID NO: 160525 - DNA, 252 bp, Glycine max
attcattcaagattcagcaagtgcgttttggaagcagagaccgaaatacttcgagatggcccgtacaaagcaaactgctcgtaagtcaactggaggaaaagctcccaggaagcagcttgcaaccaaggctgcacgtaagtctgcaccaacaactggtggtgtgaagaagcctcatcgttatcgccctggaactgttgctcttcgtgagattaggaaataccagaagagcactgagctcctaatcaggaagtt

SEQ ID NO: 160526 - DNA, 249 bp, Glycine max
cccaaatggactcaaagtggcctctgaaacatcaccgagtcccactgcgtcaataggtttatatgtagattgtggttcaatatatgagagtccgataagttttggggctacgcatctgcttgaacgaatggctttcaagaccactagaaaccggagtcactttcgggtagttcgtgaggtagaggcaattggtggcaatgtgcaggcctcagcttctagagagcagatgggttacacttttgatgcttt

SEQ ID NO: 160527 - DNA, 161 bp, Glycine max
tgtttcttcgtctttacaagaaaaaggagtaattaactgtgacacgttcactaaaaaaaaatccttttgtagcgaatcatttattaagaaaaataaataaacttaacacaaaagcggaaaaagatatattaataacttggtcaaaagcatctgccattata

SEQ ID NO: 160528 - DNA, 254 bp, Glycine max
ccatcatcatcaactacctcaaaattctaagcacaatttctctgagttgttttgtgagataatagcacatagcataacaagggaaggagtattaacaaccgcaaacctgaagagaaaaagagcagcagaagaagaaacaccaacgatgggtgtggattactacaagatcttgcaggttgataggagcgccaaagacgatgacttgaagaaggcttataggaaacttgctatgaaatggcaccctgataagaacc

SEQ ID NO: 160529 - DNA, 247 bp, Glycine max
catctcactcccacgagtgacgttaactaaattggacttttgcttttagaaattgtgacagcccgccgtcctgttgagttgaagaaaactgttgcagagcgggttacactcagatgggccttcaggaagtataatgaaggaagtgtggtggaacttgtggatcctttaatggaagaagctgtaaacggagatgttctgatgaaaatgcttatcttggcgtttcaatgtgcagcccccattcgaacag

SEQ ID NO: 160530 - DNA, 249 bp, Glycine max
ctttctctctctctctctacaaaacttagctctctttttaattataccttgcattctcttgtattaagatggaagcaactaccatcaccaatgggagccaaaacggttcgttttgcttgtccactactaagggaagtagtgatccgttaaactggggagcggcggcagaggcgatgaaggggagccacctggacgaggtgaagcgcatggtggccgagtaccgcaagccggtggtccggctcggcggag

SEQ ID NO: 160531 - DNA, 254 bp, Glycine max
ctcgagccgctcgagccggcagtttggactggggataacactgctgattgggatcacctaagagtttctatcccaatggttttgacccttggtcttactgggatgtcattctctggtgctgatattggtggattttttgggaatcctgaacctgagttattggttcggtggtatcagctaggagcttactatcctttctttagggcccacgcccatcacgacacaaaaagacgcaccccatggttgtttggaga

SEQ ID NO: 160532 - DNA, 253 bp, Glycine max; identical to SEQ ID NO: 160236

SEQ ID NO: 160533 - DNA, 239 bp, Glycine max
tgggtagaggagaagatcgagaaggggtcgcagtagccgggggcttcttctggtcctacacagacgaaccccatgccacacgacgtcgtcagatcctctccaaataccctcaaatcaaacaactctttggccccgaccactctgctttcttcaagattagtggagttgttctgcttcagcttgtacgggtgctttacttcatgatgctggctggctgaagatatttttagtagcatact

SEQ ID NO: 160534 - DNA, 248 bp, Glycine max
ctccgcactccgtcttcatcaatcagcatcaccaccgctccaacacaggggaaaatgagggagatccttcacgttcagggagggcaatgcgggaaccagatcggttcgaagttctgggaagtggtgtgcgacgagcacggcatagatccgacggggaagtacgtcggaaactcagatctacaactcgagcgcgtgaacgtgtactacaacgaagcttcctgcgggcggtttgtcccacgcgcagtgct

SEQ ID NO: 160535 - DNA, 255 bp, Glycine max
ttcggctcgagggaaaatcggtacaaggtgccatctttgtttgttatacatgaccatggccatgcccctgtttctgatgttccttcttctgcacatagcttgggtggcatcgtcggatctccgacctgggttttactcaaaaacatgtccaaaagcggaactcatagtccgagatgtgatgaagaaggcccttatgagggaacccagaagtgttgcctctgttatgcgcttccagttccatgattgctttgtcaa

SEQ ID NO: 160536 - DNA, 243 bp, Glycine max
tgcccgtaaaatacataacaggtgagttggacatggtatacaactcgctgaacttgaaggagtatatccacggcggagggttcaagcaagatgtgccaaatttagaacaagtgattgtgcagaaaggagtggctcacttcaataatcaagaagcagcagaggaaatcgataattacatatacgattttatcaacaagttctgatcttgtccaaaaacgaattcaaccagatataaagtcgcag

SEQ ID NO: 160537 - DNA, 242 bp, Glycine max; identical to SEQ ID NO: 117292

SEQ ID NO: 160538 - DNA, 242 bp, Glycine max
agacacgcgaatggaggaaactcatgaacctgttaggaacaatccccttcccattgctcggcgctaccaagatcagatggttccaagcatcacttcttccttgttgagagtggaagaggaagaaacgtcttctgatcttcgaaactcagcagaagagagcagcagagctgaagtgccagtaactgcaaatgcacaacaaaatgcaggagttgcattgaacgaacggatgttgcagaccacta

SEQ ID NO: 160539 - DNA, 238 bp, Glycine max
atcggaacagcgatgggttgtgtaattgctcctctcacattctggatgttttggactgcctttgatattggctcacctgatggcccttacaaagcaccatacgctgttatattcagggaaatggccatacttggtgttcagggattctcagagcttccgaagtactgcctggaaatgtgtggtggtttctttttggcagccttagttatcaaccttctaagggatgtcactcctaaga

SEQ ID NO: 160540 - DNA, 238 bp, Glycine max
aaacggatctcttcttcagtggtggaagctactagaacactagtttgttgagcactgcgatgaggaagtggacggttgcttccgctctccttcttctctctctcctctttctctttgcagatcaaggtcgaaagtttcaggcgaatgccgagggagattccgacgagcttgtagatcctccgaaggtggaggacaagatcggtgctgtgcctcatggcctttccaccgattcagatgt

SEQ ID NO: 160541 - DNA, 239 bp, Glycine max
ctagggttttaggaaaagacactgtctcgcgagtgaacacaggttacagcaatggctttctttggtagaattgggaatttattaagacagacagcaagcaggcaggttagttcagaattgcgatcatccccttcgttttttcaggctatacgcagtatgtcatctgctccaagcacaaagctgtttatcggaggtgtttcatattctactgacgagcaaagtttgagggaagctttttc

SEQ ID NO: 160542 - DNA, 244 bp, Glycine max
tacaaagcaagacgcaagccactcatgaacatcaaaggttatgtactcgcgagcccagctgttgacgggtttcgagagcagaacatgaaagttttatatgcataccaaaggagtcttataccagaagcgctctacaagtcaatgaaagaaaattgtaacggggattatataaacattgatccagaaaacacaaagtgtgtctcagattatagtgtttatgttgagcttgttcgttacataaacg

SEQ ID NO: 160543 - DNA, 239 bp, Glycine max
caaagagacaattcaacttaagagatcaatatggccaccaccactacccagcctccctctaatatctgttttttccttctgttgttgcttctagcacactttcatttgggcataagccaacttgagctgaattactactctaaaagctgcccaaaagctgaagagatcatcaaggaacaagtcacacaacagtataaccagcatggaaacactgccgtttcgtgggtcagaaatctctt

SEQ ID NO: 160544 - DNA, 239 bp, Glycine max
ctcgcaagcaaaaagaaagaatcccaggcgaggagaaagatggaggggaaggagcaggatgtgtcgttgggagcgaacaagttccccgagagacagccgattgggacggcggcgcagagccaagacgacggcaaggactaccaggagccggcgccggcgccgctggttgacccgacggagtttacgtcatggtcgttttacagagcagggatagcagagtttgtggccacttttctgtt

SEQ ID NO: 160545 - DNA, 241 bp, Glycine max
gtcccaaagagctaacaagagattcaagaccggcatggctaatgaagaggaacagaaaaaccacctcttcggcatcaaagatctcggtcacaagactctccttcagagtgatgcactctatcagtatatacttgaaaccagtgtctatccaagagagcacgagtgcttgaaagagatacgcaagatgactgcaaaacacccactgaacatcatggcaacaccagcagacgaaggacaactt

SEQ ID NO: 160546 - DNA, 239 bp, Glycine max
agaacctcctcctcacagctccaaagctacaagcctcctccgacctccccgaaggcaccaactggcgctacagcgagttcttgaacgccgtcaagaagggtaaagtcgagcgagtcaggttcagcaaagacggttccgccctccagctaaccgccattgacggccgtcgcgcctccgttattgtccccaatgacccggacctcatcgacatcctcgccatgaacggcgtcgacatttcc

SEQ ID NO: 160547 - DNA, 242 bp, Glycine max
caatcaatcttctgagagtgtttggttgaaagtagcaaagatgtttcctttcgggcaaaagggtcaaaatataaaggggactatggtggttatgcagaagaatgtgttggatatcaacagcatcaccagtgttggagggatcgttgaccaaagcttaggcttcataggcagtgcagtcgatgcacttacttttgcagccaccaaaatctccatccagttgattagtgctaccaaggctgatg

SEQ ID NO: 160548 - DNA, 237 bp, Glycine max
ctcgagccgctccgcagcagccacacttcttcgccgtttcagctgaagagccatccgcaggtaagcaatggttaagcataataatgttatccccaatgggcacttccggaaacactggcaaaactatgtgaagacttggtttaatcaaccagcccgaaagaccagaagacggttggctcggcagaatcaggctgtcaagattttccccaggcctactgctggatctctcaggcctat

SEQ ID NO: 160549 - DNA, 182 bp, Glycine max
cgtcatcatcatcatcatcatcagcgttgattgaagaagatgccgatcagaagcatcgccatcgtaaggcctgaagaggctactcaccccggaccgttcaaggcggggttggctgagtgcatctccaccgtgatcttcgtgttcgccggttcaggttccggcatcgcctacatcgagctcac

SEQ ID NO: 160550 - DNA, 238 bp, Glycine max
aaagaaatataactaatattctttagaataatcaaaaagaatattaaattcaaataaattttagatagaaaaaagacttaaaaaggaggatttgaaatgcgagatctaaaaacatatctttccgtggcaccagtagtaagtactctatggttcggggctttggcgggtctcttgatagagatcaatcgtttttttccagatgcattgatattcccttttttttcattctagttattga

SEQ ID NO: 160551 - DNA, 234 bp, Glycine max
gcaacctagcaatggaggcgattaggaagagtttgattcttatagttggaggaactggttacatagggaagtatatggtgaaggcaagcgtcacgttaggccatccaacttttgtctacactcgccctcttgatgcacaaactccttcctctaaggcacagctttgcaaggagttcaactctatgggggtcacacttgtccatggagaacttgagcatgaccagattctggcag

SEQ ID NO: 160552 - DNA, 233 bp, Glycine max
cgccctcttcttgaggttgaccctccaaacacttctgctagctctgatcaaaagatttcagagaagccccttgagcaggaacctaggtttgctgcaagagtcacaattgaggatggtctttgtcttcttcttgatgtggatgatattgatcgttacctacagttgaatcagccacaagatagtggaacacatttaagacgaagaaggcaagtcctgttggaaggactagcaac

SEQ ID NO: 160553 - DNA, 235 bp, Glycine max
ataaccctaagcttcaaacgggtaagtgtcgctgggacttcaatggcagtgaccgaagctcaaaatcctcttcttggagaaaacacatgtggttccttgttaaaaaagcttcaggaaatatgggatgaggttggtgagagcgatgagcaacgagacaagatgcttcttcagttagaacaggagtgcttggatgtgtacaagagaaaggttgagcaggctgcaaagtcaagggcgc

SEQ ID NO: 160554 - DNA, 233 bp, Glycine max
acgaaatatggcttcaactcatctgcttcccctagcaaccttcttcttacttctctccgcttcttatctccagattgctggggcggaagcacaaccgttgactagtctcaagcttaactctcatattcttcaggagtctactgctaaagagattaatgaaaatcccgaggcaggatgggaggctgctataaatcctcgtttctccaattatacagttgaacaatttaagcgcc

SEQ ID NO: 160555 - DNA, 231 bp, Glycine max
agtcaggccatgaatgagaatagagatattgcaaagacccttcttctgtactcaaggtggacgcattacactgggcagaaacaaaaggaagatgtaataagtctttatactagggtgagggaactgcaacccaaatgggagaaagggttcttttatattgctaagtattgtgatgaagtgcttggtgatgccaggaaacgccaggaggaactgcttggtgatgccaggaaa

SEQ ID NO: 160556 - DNA, 231 bp, Glycine max
ggctcgaggtactcagctgggataacaagcttgctggtgctcaggttcttctgagtcgtttgaggttgttcttgagtcctgggtatccatatgaagaaattttgaggacctttcacaatcagacaagcataatcatgtgctcctatctaccagttttcacaagctttaacagaaccaaaggtggcttgattcaattaaaccatggtaggcctcagcctctccaatatgtgg

SEQ ID NO: 160557 - DNA, 229 bp, Glycine max
actccgtgccctagcttcttcttcctcctcctcctctgccattgcagcaaggcacacacctcaggctccaacccatttcacgagtgatcggattcgctcgccatcatggggaagaagaagaagagagtttcctcgaaggtgtggtgttattactgcgatcgcgaattcgacgacgagaagatcttggtgcagcatcagaaagccaagcactttaagtgccatgtctgcc

SEQ ID NO: 160558 - DNA, 229 bp, Glycine max
aaaagaaagaatatcttttatgtatccaccaaatttatcaacttttcataaaatgatggaaaccaaattttatctcttcacaaaagataaaatttcctatgatgaattgtctaattattggagctatactaatgaagaaaaaagaaacaaattgagcaatgaatttgtaaatagggcaaaagtaatggataaggaattaatttctctggatatattagaaaaccgaatt

SEQ ID NO: 160559 - DNA, 232 bp, Glycine max
  unsure (1)..(232): unsure at all n locations
ctttattctctcacacaaaataatggntggagaagcttggcaacacgtctcatgatcctgaagtgagaaaggggccatggacaatggaagaagacttaatcttgatcacctatattgccaatcacggggaaggggtttggaactctttggccaaggctgctggacttaaacgtaccggaaagagttgccggctccggtggctaaactacctccgtcctgatgttagaagagg

SEQ ID NO: 160560 - DNA, 232 bp, Glycine max
tgatatcactcaaaaaaaacaaaaacagaaacaaaagatggttcatcagaggcaaaacaacatccatgttcttgttcttccataccctgcccaaggccacatcaacccccttgcccaattcgcaaaaagattagcttcaaagggtgtcaaagccacagttgccaccacccactacactgccaactccatcaatgcacccaacatcacggtcgaagccatctccgatggtttc

SEQ ID NO: 160561 - DNA, 230 bp, Glycine max
gatcgatcgaacaagtgaattagctagaagcattgaaggacgtagctgctatggctcgaggaaagatccagatcaagaggatagagaacaccaccaaccgccaggtcacttattctaaacgacggaatggccttttcaagaaggccaacgagctcaccgttctatgcgatgccaaggtttctattattatgttctccagcactgggaaactccacgagtacatcagcccc

SEQ ID NO: 160562 - DNA, 225 bp, Glycine max
caaggcgcttggagtggataccattcccgtactcgttggccctgttacatacttgttgctctccaagcctgccaagggagtcgagaaatccttttctctcctctctctccttcccaaggttcttgctgtctacaaggaagttattgctgaccttaaggcagctggtgcttcatggattcaatttgatgagcctacccttgtcttggaccttgaatctcacaagtt

SEQ ID NO: 160563 - DNA, 227 bp, Glycine max
  unsure (1)..(227): unsure at all n locations
cagcaataagttcaggtggaaggagaagcatgttgaagctggcacagcgcatgacgaacaacttctgtgctggtgtgtgtgcctcaacagtgcacaagtggaacaagctgaacgcgggaaacgtnggggaggacgtganggtgatgacgaggaagagcgtggatgaccccggtgaaccgccggggatcgtcctcagtgccgccacctcggtgtggcttcccgtctcg

SEQ ID NO: 160564 - DNA, 228 bp, Glycine max
ttaaacgatggcaggaggagcttatgtagattcgggaaatgcaaagcaatttgatgggaaggtcacggcattcgtattggttacatgctttgtggcagccatgggaggcttactcttcggttatgatcttggaataaccggaggagtgacttctatggaaccatttctcatcaaattctttcccggtgtttataaacaaatgcaagatgatgttggccatagaagcca

SEQ ID NO: 160565 - DNA, 232 bp, Glycine max
cagcaataagttcaggtggaaggagaagcatgttgaagctggcacagcgcatgacgaacaacttctgtgctggtgtgtgtgcctcaacagtgcacaagtggaacaagctgaacgcgggaaacgtgggggaggacgtgagggtgatgacgaggaagagcgtggatgaccccggtgaaccgccggggatcgtcctcagtgccgccacctcggtgtggcttcccgtctcgccaca

SEQ ID NO: 160566 - DNA, 236 bp, Glycine max
cttgtcctgcttttccatccatttatgtgacaaaggaaaaattgcctgagctggttcaatcactatggaatcctgcaattgtattgacccacaagtgccagctgatgacttattgatgaaataccaatatatctctgatttcttcattgcccttgcttatttctcaatccctttggagcttatctactttgttaagaaatcagcagtatttccatatagatgggtccttgttcagt

SEQ ID NO: 160567 - DNA, 272 bp, Glycine max
ctctcatttttttaggctcataaatcttttttatgggtttcagggtcactactactctgtctctgctctccctgttttggctcttgtccctgcaccaagcaagagctgcaaagttccacaatgtgagtggcttgagagggaaaaagcagttgtagcaaatgggtgcaatttgttcctgggaagttgggtggttgacacgtcttatcctctctatgactcttcaacatgccccttcattgatcccgagtttgattgccaaaagtatggaagac

SEQ ID NO: 160568 - DNA, 260 bp, Glycine max
gcttgatcagttcatgacccattatgttctgttgctctgtgcctttaaagaacaactgcagcagctcgtccgtgttcatgccatggaggcagtgatggcttgttgggatctggagcagtctctgcaaagcttgacaggtgatctcctggtgaaggaacgggtgcaacaatgtcagacgatgaagatgaccaggcagagagcaatgccaacttatacgaaggaagccttgatgggggtgaaatcttggatttggtcctctt

SEQ ID NO: 160569 - DNA, 260 bp, Glycine max
ttctctttcgaggaatggggtggtggagaaggtggcaaatgacaattcaagtgaataatggagaacaactacaacaaccacaacctcatcgtccctaatcctcaagattcactgtggatgatgaatttgaggactggggaacaatggattctggatcttatccggagcgtccaggggagccggattgttcatattacatgagaacaggcctttgtagatttggtgcaacgtgtcgatttaatcatcctcctaacaggaag

SEQ ID NO: 160570 - DNA, 257 bp, Glycine max
aactactactcacactcactgcagatctcaatccatggctaccattgttagcatcaaggcccgccagatctttgacagtcgtggcaatccaaccgtcgaggtggatttgacatgctccgatggtacttttgctagagcgctgttccaagtggtgcatccactgggatttatgaggcccttgaattgagagatggaggatctgactaccttggaaagggtgtatcaaaggctgttgacaatgtgaacaccattattgc

SEQ ID NO: 160571 - DNA, 258 bp, Glycine max
gatcgttggactgacgggtggaatagcgtctggaaagagcaccgtttccaatctgttcaagtcccatgatgtgcccattgtagatgctgacgttgtcgctcgcgaggtgttaatgaaagggagtggtggttggaagaaatcgttgcagcttttgtggacgaaattcttcttgaaaatggagaagtcaatagacccaggcttggccaaattgtcttctccgatccggataagcgtcaatttctcaaccgattgctagct

SEQ ID NO: 160572 - DNA, 259 bp, Glycine max
caaaaggtcttgaatatctatacaaggacatgccaagcctaattgcaccccatggaaatctcaagtcctctaatgttctcttgactgaatcattcgagccactcctcacagactatggcttagtcccagtgataaaccagatctggctcaggacatcatggtgatatacaagtctcctgagtacttgcaacaaggaagaattacaaagaagactgatgtgtggtgccttggaatactaattcttgagattctaactggg

SEQ ID NO: 160573 - DNA, 259 bp, Glycine max
gtggattttatccatgctaaagcaaaacacctgactctgaacgccgtcgtttcaccgtctctcgttgatgttcacccttgctttaaggaggagtttttcgcttacgacatgacaatctcctacgccggccacaacaccccctcgccgccgtccaggtgacggaactcgccgacggcgtcttcgtcggctgcaccgtcaaccactccgtcaccgacggcacctcgttctggcacttcttcaacacgttcgccgccgtcac

SEQ ID NO: 160574 - DNA, 263 bp, Glycine max
cgagccacttattgtgagagacgggaacagaaggctaatgcaagacatagattgtggtgggttgtgcaagacgaggtgcagtgcacattcgagacccaacttgtgcactagggcgtgtggcacgtgctgtgtgaggtgtaatgtgtcccacctggcacatctggaaatagggaactatgtggaacttgctacactgatatgactacccatggcaacaagaccaagtgcccttagagaaaaaacccattgggaaatttgtgctt

SEQ ID NO: 160575 - DNA, 268 bp, Glycine max
gtgacacagaaattaagctagagcttcatagtttcttcttcttttctcaccttccttctctcccttcagacaaagggacaaaaaatcagtgtgtgagagagagagagagaaattccaaaaccatgtcccacagtcatctaagttcgcctttgggattctaggtaacattgcctccttcgtgtgctttctggcaccactaccaacattttatagagtttgtaagaagaaatcaaccgaagggttccaatcaattccatatgtggctgca

SEQ ID NO: 160576 - DNA, 259 bp, Glycine max
ctctgccttgctcatttacacacctctccaacctttcactttcagctttatttgaatccctctctctcctttccaaatggccagcgttgaggttgcacatcaaacaccaacaacagttccagaaaatgaaacaaccgagtaatcaagacccaggaaacaaccccggaaccagtaccagccactgaggctcctgcaacagaacaagcagcagctgaggttcctgctcaagaagaacaacaagcaactgaggttcctgccc

SEQ ID NO: 160577 - DNA, 252 bp, Glycine max
gcaggtctggaagggccaaggatcaagaaagtggaaacatgcccagagtgatggtttctttgttcaatttgagtcaccttccctgcgaaagttgtggtttatacccagttcgaatgaaaagggacagacctggtgcaggtttctctcccacttttactcgcaacacttatttactgaatataagttttgtagtttatggagggtgatattgcgaggattgattgttcttttatcaaaatgaaaaacaaggag

SEQ ID NO: 160578 - DNA, 253 bp, Glycine max
ggaaggttgcttgtattggtgcctggcatcctgcaagagtttcattcactgttgccagggctggtcagaatggataccaccaccgaactgagttgaacaagaaggtttacaagcttggcaaagctggagatgaactcactctgctcttactgagtttgataggtaagtgttttgttgattatggttttgtgcaataaatttagcaggaagtattgtgtttgtaagtcaaactaacccctctacttgttttctg

SEQ ID NO: 160579 - DNA, 255 bp, Glycine max
tggagagaaatcgaaagacatcaggttccaagtctgatggatctgcaagacggatgaaggaagttgcatgtcccatttgcactgtccatctgcaggttcaggtgcctagctcgggttcagagacaattgagtgtgagtttgccagcacccatttcttgtgagcgctcattgagttcagataaacatgaatacggaagcggtgtctacgtgtttcataagtttaaaatgcatttgttctactgatctatctcttgc

SEQ ID NO: 160580 - DNA, 250 bp, Glycine max
ttaacaacagcacaaagcgggttactgtctgttcaagctaccatctctctctctctttcttagtgcctccttgccagaagttaaaatggcccaagaaactttcctattcacatctgaatcagtgaacgaggggaccctgacaagctctgtgaccagatctccgatgctgtgctcgatgcatgcttggagcaggaccctgacagcaaggttgcctgtgaaacctgcaccaagaccaacatggtgatggttt

SEQ ID NO: 160581 - DNA, 253 bp, Glycine max
aaaggactcaccgatgcatcaaagatagccattttgaatgcaaactacatggcaaaacgattggagaattattacccgcttcttttccgtggagtcaatggaacagttgctcatgaattcatcattgacttgaaggctttaagaatactgctggaattgagcctgaagatgttgcaaagcgcctcatggactacggttttcatgcaccaacaatgtcatggcctgtgcctggcacactcatgattgagcctac

SEQ ID NO: 160582 - DNA, 252 bp, Glycine max
tgcagatgcagcctatgatggcagcctactaccccaacaacgtcactactgatcacattcagcagtatctggatgagaacaagtccttaattctgaagattgttgaaagccagaattcaggcaagcttagcgatgtgccgagaaccaagcaaggcttcagagaaatctcatgtacttagctgcaatagctgattctcaaccccaaccacccaccatgcctggtcagtaccctccgagtgggatgatgcagca

SEQ ID NO: 160583 - DNA, 247 bp, Glycine max
gagagaagagtgagggtagtggaaatgacaattctttgaattctattggaaatgctgctgatagaggggcaaaattagagaatgctgttttgtcatggtcaaagggcatctctaaggacacacgcagggtggggctacagaaaaatccgatcagaatccaaatgctggtaaatttcctccattaaggagaagaaaacatctgtttgtcattgctgtggattgtgataccacttcaagccttcttgaa

SEQ ID NO: 160584 - DNA, 251 bp, Glycine max
acagaagcgtaaaaacaaaaggcttgactagagaaagagagagagagagcttcgaatcgaaactcagacgtagaaagaaacacaaatcacaatcgctatggctaggtacgaccgagcaatcaccgtgttctcccctgacggccatctcttccaggtcgagtacgccctcgaagccgtccgcaagggcaacgccgccgtcggcgtccgcggcaccgacaatgttgtcctcggcgtcgagaagaaatccaccg

SEQ ID NO: 160585 - DNA, 244 bp, Glycine max
acaaaaacaaagaaaaaaaaaaacccttagccaacacaaccatcatctccacctctgctattcagcaatcagcattcactggtcaaactgctctgaagcagctcaatgagttcgtccgcaagaccggtggcgcggcaaaggtcgcactaacatgcgccgcaccgtcaagactgctcctcagagcatttggtatggccctgaccgtcccaagtacttgggtccattctcggagcagattccatca

SEQ ID NO: 160586 - DNA, 249 bp, Glycine max
catagagatggcaaagctatttttgaaacaggcaaagcaatacgcagatgcaagaccaagctatcctccacaactcttccaattcattgcttccaagactccctctcactacctcgcttgggacgtcggcactgggacggccaagctgccaaatctttagctgcaatatacaagaatgtgatagccacagatgctagtgacaaacaacttgaatttgcagccaagctcccaaatgtgagataccaacac

SEQ ID NO: 160587 - DNA, 249 bp, Glycine max
  unsure (1)..(249): unsure at all n locations
gcaataactcagccacagccacaacacacaaacacaaacccttcgttcctctctcgttcccttcttcaattcgatcaaacacagaatagtacttttttattatgatggccgtggcccgaaaggaaatggaccggatcagggcccgtggngcccggaggaggacgaggctcttcagaagctcgtggagcggcatgggcccagaaactggtccctcatcagcaggtccattccgggccggtctgggaaatt

SEQ ID NO: 160588 - DNA, 249 bp, Glycine max
gtcatgctttccttgtttgatggaaaaacaatttatggcatagatgcggataccatcatcaaatccaatttactgacaataatttcaggaggaactgaatcaatcactactactcttacatgggcagtatgtttgatatgagaaatcctattgtattggaaaaagttatagcagaacttgacttccaagttggaaaagagagatgtataactgagtctgatataagtcagttaacataccttcaagctg

SEQ ID NO: 160589 - DNA, 244 bp, Glycine max
ggcaacttgaatgagttgcaactgttgggatgtctagctggtgtggagatgatactgaaagatgtgggctatcctgtaaagcttggaagtgtgagttgctgctgccagtgcatacttacaggacactattccttgatcccttccaggatttgagtcacaagtcattcttgtctttacttcctttttttctgctctttcggaaattctgtaaaatatatattaccctcttttacactcctttgaa

SEQ ID NO: 160590 - DNA, 246 bp, Glycine max
caagccccactcaaccaccacactactctctctgttcttcttctacctttcaagtttttaaagtattcagatggcagagacattcctatttacctcagagtcagtgaacgagggacaccctgacaagctctgcgacaaatctccgatgctgtcctcgacgcttgccttgaacaggacccagacagcaaggttgcctgcgaaacatgcaccaagaccaacttggtcatggtcttcggagagatcacc

SEQ ID NO: 160591 - DNA, 244 bp, Glycine max
ctttttgattcctaaattctctaaaattcgaaattctaatttcgttaggggaaagagattgtttgtgtgtgagtgagtatggctggaaaaggcgagggtcctgctatcggaatcgatttgggaacgacgtactttgcgtcggcgtgtggcaacacgatcgtgttgaaatcatagccaacgatcagggtaacagaactaccccatcctacgtggctttcaccgacacagaacggttgatcggcga

SEQ ID NO: 160592 - DNA, 246 bp, Glycine max
cgagatatggcttcaactctgcttcccctggcaaccttcttcttagttctctccgcttcttatctccagattgctggggcgaaagcacaaccgttgactagtctcaagcttaactctccgatccttcaggagtctttgctaaagagatcaatgaaaatcctgaggcaggatgggaggctgctataaatcctcatttctccaattatacagttgaacaatttaagcgccttcttggagtcaaaccaa

SEQ ID NO: 160593 - DNA, 245 bp, Glycine max
ttttcgttctgttttggcttcttcgctgcaactctctaccttccctctttttccgaatctgaatagaaatggcttcggagactgagacgttcgcttttcaggccgagatcaaccagctcctcagtctaataatcacaccttctacagcaacaaggagatgtttcttcgtgagctcatcagcaatgcctctgacgctttggacaagattcgatttgagagtcttacagacaagagcaagcttgatg

SEQ ID NO: 160594 - DNA, 247 bp, Glycine max
gcagatcttcgttaagacactcaccggcaagaccataaccctagaggttgaaagctccgacaccatcgataacgtcaaggccaagatccaggacaaggagggtatccccccggaccagcaacgtctcatcttcgcggaaagcagctcgaggacggccgcaccctcgccgactacaacatccagaaggaatcaacccttcacctcgtcctccgtctccgtggtggcatgcagatcttcgttaagaccc

SEQ ID NO: 160595 - DNA, 248 bp, Glycine max
gaaagaatcccaggcgaggagaaagatggaggggaaggagcaggatgtgtcgttgggagcgaacaagttccccgagagacagccgattgggacggcggcgcagagccaagacgacggcaaggactaccaggagccgcgccggcgccgctggttgacccgacggagtttacgtcatggtcgttttacagagcagggatagcagagtttgtggccacttttctgtttctctacatcaccgtcttaaccgt

SEQ ID NO: 160596 - DNA, 246 bp, Glycine max
attcccaattcctaattgtttaaacctaattctcatttcttcatcgttcgattcttctcctcctaaagatgcagatcttcgtgaaaactttgaccggtaagaccatcacccttgaggtggagtcctccgacaccacgataacgtgaaagctaagattcaagacaaggaagggatcccacctgaccagcagagacttatctttgcgggtaaacagcttgaggatggtcgaacccttgccgactacaa

SEQ ID NO: 160597 - DNA, 246 bp, Glycine max
ggtacagcacgggtgttggattgggtgctgagatcattggaacctttgttttggtctacactgtgttctctgcaactgaccccaagaggaatgctagagattctcatgtgccggttttggctccacttccaattgctttgctgtgttcatggttcacttggcaaccatcccagtaacaggcactggcattaaccctgctaggagtctaggagctgctgtcatgtacaaccaacagaaggcctggga

SEQ ID NO: 160598 - DNA, 242 bp, Glycine max
gcaagagaaaatgaccaagatcttctttgtattgctgctatgtctaatcatagcatcttcttctgggtttgtgaattgctctgatgttgagaaggaggaaaagattggaatatttgagctcaagaaaggtgactttctttgagggtcaccaactggggtgcttcaattttgtccctggtgattcctgataagaatggaaagttgggtgatgttgttcttggatatgattctgttaaggatta

SEQ ID NO: 160599 - DNA, 237 bp, Glycine max
aatgcccactttttttcttccaacgctcctcctccttctcatagccttcgccacctctgtctccggccgccgtgacctcgtcggagactttctccggctgccctccgaaactgataacgacgacaactcaagggcacccggtgggccgtcctcctcgccggttccaatggttactggaattacagacatcaggctgatgttattcacgcctatcaaatattgaggaaaggtggtctg

SEQ ID NO: 160600 - DNA, 239 bp, Glycine max
gccgaactcggtcatgtaacacaaaatgaaataagtgccagaggtcagccagagccatctggatggttaattggtggcttacagaaccttgggtttgacaattttcatcttggagttttgtgcttgataggaactgcatttgcatggctgcatttctagccattcaggcatcggtattaaaaaaatatcctgcaaacctatctgtcacagcgtgttcatacttctttggagcttgactg

SEQ ID NO: 160601 - DNA, 245 bp, Glycine max
gcaaataaagcacagaacagttgaagtgaatggcataaaaatgcatgttgcagagaaaggagagggtccagtggtgttgttcctccacggcttccctgagctctggtactcatggcgccatcagattctctcttcagctccctcggctaccgcgccgtcgctcccgatctccgtggctacggtgacaccgaagcaccaccttcaatcagcagctacaactgcttccacatagtgggtgatctcgt

SEQ ID NO: 160602 - DNA, 244 bp, Glycine max
gaagtagtgaagaaaatgaaagtcattgttttcttcgttgctataataattttaggtgcagaatggcaatgcaatgggtcagagcatgagcatgagcatggccacagctaccaaattttccctttgcgaatgaaaccggccccggtggccactacattccggaggtatcgtgcaaaagttggaggcttggtgtggaagcacacaacgtcattgactggagaaccattcctcaagattgcgaggg

SEQ ID NO: 160603 - DNA, 244 bp, Glycine max
tgaatcgtgaaaatgttcagaaaccagtacgacacggacgtgacgacatggagcccggcggggaggctgttccaggtggagtacgcgatggaggcggtgaagcagggctcggcggcgatagggctccgatccagacccacgtggtcctcgcatgcgtcaacaaggctaactccgaactctcatcgcaccagaagaagatcttcaaggtcgacaaccacatcggcgtcgccatcgccggcctcac

SEQ ID NO: 160604 - DNA, 242 bp, Glycine max
gaggcacaagccaagcctcccacagcgaaggggctatcatataacttctacgacaaaagctgtcctaagcttaaatctatcgttagatcagagctcaaaaaggtcttcaacaaggacattgctcaagctgctgcttgcttcgccttcacttccatgactgctttgttcagggttgtgatgggtcagtgttattggatggatcagcaagtgggccgggtgagaaagaagcaccaccaaacttg

SEQ ID NO: 160605 - DNA, 241 bp, Glycine max
atgcctcctaagaacatggaggcctgtttttccttgtgggggcattattaaacggcttcgccgtcaacattgaaatgatcatcatttggaagcccatgttaagtgcaaatcttatcaactatggaacttccaactagaaaacggatggagaatttctttgggtgtcggagctgttcctgccgtcttgttatgttttggagctcttttcttaggagacacacctaattccctgattgaaaga

SEQ ID NO: 160606 - DNA, 244 bp, Glycine max
  unsure (1)..(244): unsure at all n locations
cgtgcacacaaaataatggacaaaaaaccatgcgactcatctcatgatccagaagtgaganagggaccatggatcatggaagangacttgatcttgataaactatatngcaaatcacggtgaaggtgtttggattctttagccaaagcttctggtcttaaacgaacgggaaagagttgtcgactccgttggctaaactaccttcgtcctgatgttagaagaggaaacattacacccgaagaaca

SEQ ID NO: 160607 - DNA, 94 bp, Glycine max
ccatttgtttttgctttttgagatttcatcatcctgtatttttggtttctgttttcggacttcaatggaaattaatggatgagaactaatgaat

SEQ ID NO: 160608 - DNA, 240 bp, Glycine max
gtgatgcaggtcgacaagtctgcatggatgactgatgaagaatttgcaagagaaacaattgctggtttgaatccaaatgtcatcaagattattgaggagttcccactaagtagcaagctagatactcaagcctatggtgatcatacctgtataataacaaaagagcatttggagcctaacttaggtggtctcactgttgagcaggctatccaaaacaagaagttgttcatcttagatcac

SEQ ID NO: 160609 - DNA, 243 bp, Glycine max
gtgaaagagaatccgaggcgaagagaagagaaaaattaagatggaggggaaggagcaggatgtgtcgctgggagcgaacaagttcccggagagacagccgattgggacggcggcgcagagccaagacgacgcaaggactaccaggagccggcgccggcgccactggttgacccgacggagtttacgtcatggtccttttacagagcagggatagcagagtttgtggccacttttctgtttcta

SEQ ID NO: 160610 - DNA, 241 bp, Glycine max
attttgtggggttgcagagatgattggacctgttgacttcaataaggacatggacttttggcagcaagataaatggagtgggagcttccctgtaaagtggcacatcataaaagatgtgccaaatgcaaatttaggcacattatactagagaacaatgagaacaaacctgtcactaatagcagagacacacaagagataatgtatagtaaaggtttggaaatgctgaaaatattcaaaaacc

SEQ ID NO: 160611 - DNA, 238 bp, Glycine max
aacaaaacagagcaaagagagagtgtgtgaaaagtgaaacaaaggacagaacaacaatggcgacacttaaggttcctcagcctcttccccccgttgcagatgattgtgagcagctccgaaaagccttctcagttggggaactaacgaggagctgattgtatcgatcttggctcataggaatgctgctcagaggaagcttatcagagaaacttatgcccagacctatggagaagatctc

SEQ ID NO: 160612 - DNA, 241 bp, Glycine max
ggaaaaactgtgcttattatggaacttattaacaatgttgcaaaagctcatggtggtttctctgtgtttgctggtgttggagaacgaacccgagagggtaatgacttgtacagagaaatgattgagagtgtgtcattaagcttgatgataagcagagtgaaagcaagtgtgctacttgtgtatggtcaaatgaatgagccccctggtgcccgtgcccgtgttggtcttactgggcttactg

SEQ ID NO: 160613 - DNA, 258 bp, Glycine max
attcgtgaaaatgtggggcgagtgcttacattggactccattgttgctggaaatgcgtggaaaggcatggacatgctgattttcaactcgtggcattggtggacccacactggaaaatctcaggggtgggattatattagagatggacccaatcttgtgaagaacatggaccgtttggaggcctacaataaaggattaaccacttgggctaattgggttgatcagaatgttgatccctccaaaactaaagtcttcttt

SEQ ID NO: 160614 - DNA, 257 bp, Glycine max
aaaacgatgagggcaccaggtgggccgttttagttgccggttccaatggctactggaattacaggcaccagtctgatgtttgccatgcatatcaactactgaggaaaggtggtgtgaaagaggaaaatattgttgtatttatgtatgatgacattgctttcaatgaagagaacccacggcctggagtcattattaacagtccacacggaaatgatgtttacaagggagttcctaaggattacgttggtgaagatgtt

SEQ ID NO: 160615 - DNA, 255 bp, Glycine max
aagagttctttcaaaatgcaaacagccttaaccttcgctgcccccaacgttgtgccattggcacccacaaagagtgtctcccatattaccatctttcctaccaaattgaaagccccgcgctcctcacctcgttactctccgattagggttgcaaccgtggagcccgacacttcaactgtcgactacaactctgcgttctcagtgtttcctgcagaagcatgcgaaactgtaggaggggaagcctgcatggcggag

SEQ ID NO: 160616 - DNA, 248 bp, Glycine max
ggaagactctgttagagaatgatcagttgtgtatagagcagaggcaaggtcgagtctttgaaggatggaatgaagggaaaatatattttcctccgacttataagtattcagacaattcagacagctatgcaggtgatgacagacgctcaaaacaaaagtgaagaactccagcatggtgtgatcgtatcttgtggtatggaaggggccttcaccaattatcatatgttcgtggggagtcaaggttttct

SEQ ID NO: 160617 - DNA, 249 bp, Glycine max
cttataacacaacacaacccacggccccgacctccgcattcctcctccttcccctcctcctgctgctccacctcgccatcgccgctcacggcatcggcatcaactacggcacgctcggcgacaaccttccaccgcccgcggcgtgtccgaacttcctgaagacgaagacgaccatcgaccgcgtgaagatctacgacgtgaacccggacatcctgcgggccttcgccggcagcggcatctccgtgacgg

SEQ ID NO: 160618 - DNA, 253 bp, Glycine max
cagtttcgggggaagagatccagcagcaatggtgtacgtcaaggctcagaaatcaaaagcctacttcaagagatatcaagtcaagttcaagagaagaagagagggaaaaaccgattaccgtgccaggattcggttgattaatcaggacaagaacaaatataacactccgaaataccgatttgtggttcgctttagcaacaaggacattgttgcacaaataatatctgctagcattgccggcgatttagttctt

SEQ ID NO: 160619 - DNA, 256 bp, Glycine max
attcattctagttctggattccgactagccgcgttgactcggttccgtttttcattctcgcggatctaatattaaggaatagcttaagggcacattacaatgaaggcattgattctggttgggggatttggaacaaggctgaggccactgacactcagtttccctaagcctcttgttgattttgctaacaagcctatgattttgcatcagatagaagcccttaaggccattggagtgactgaggtagtgctagcca

SEQ ID NO: 160620 - DNA, 250 bp, Glycine max
attaattaagcactctaaaacatatctttatttccttgtctacatatcttgaaaaactcaatcatggctagtgtttcttcggttttagctccatttagaaggcttgatgggaaggtggcgattatcactggtggtgcgagtggtctaggtgcagccactgcaagactcttctctaagcatggagcatatgtagtcatagctgatattcaagacgacttgggtctctctgttgccaaagagttagaatctg

SEQ ID NO: 160621 - DNA, 250 bp, Glycine max
gcagatcttcgtcaagaccctcaccggcgagaccatcacccttgaggtggaaagctctgacaccatcgacaacgtcaaggccaagatccaggacaaggaaggaatccccccggaccagcaacgtctcattttcgccggaaagcaacttgaggacggccgtacccttgctgactacaacattcagaaggagagtactcttcacctcgtcctccgtctccgtggtggcatgcagatcttcgttaagacactc

SEQ ID NO: 160622 - DNA, 247 bp, Glycine max
gaaaattgttgcctatgaagctgtgcaccctattagcaaccttctagatcttaagagaagactgggaattggccgtcgttgttttggatatttacatccagctattcctggtgaacccctaattttcattgaagttgcactactgaaggatgttgctcagactatacaggaagttttgtgggatagtcctcctatacctgaaggtgaggcaacatgtgccttgttctactccatatcatcaactcag

SEQ ID NO: 160623 - DNA, 254 bp, Glycine max
cttgctcagggtcttatagcggaaggtgtcaaggttgttgcagctggggccaaccctgtgctcatcacacgtggcattgagaagacagcgaaagctcttgtatctgagcttaaacagatgtcaaaagaggttgaagatagtgagttggcagatgtggcagcagtcagtgcagggaacaattatgaagtaggaaatatgattgctgaagcattgagcagagttggtagaaagggtgtcgtgacccttgaggaggg

SEQ ID NO: 160624 - DNA, 250 bp, Glycine max
ggtcttagttgtggctcatgctatgagataaggtgtgtgaatgaccataggtggtgcctccctggctccattatggtcactgccaccaatttctgccctccaaacaatgccttacccaacaatgcaggaggctggtgcaaccctcctatgcaccattttgacctctctcagcctgtcttccttcgcattgcacaatacagagcaggaattgtgcctgtgtcctacagaagggtaccctgcaggagaaggg

SEQ ID NO: 160625 - DNA, 249 bp, Glycine max
accagtgcctggcgtcgcggacacagaacagagcttgcagaagcgatttctcatttctcattcttaacaacacacttcaacaatggccaaaaccttcaaatacatcatcctcggaggaggagtttccgctggttatgcggcgagggagtttgccaaacagggcgttaagccaggggagttggctatcatttccaaagaagcggtagcaccttatgaacgtcctgctctgagcaaggcttacctttttcc

SEQ ID NO: 160626 - DNA, 242 bp, Glycine max
gttacatcgaaggcatcggacgaggatggggactttgccgagctaatagtgtttaaatggacatcacttctcatccctcctacaacagtgcttattgtgaatttggttgggattgtggctggtgtatcctatgccataaacagtggttaccagtcttggggtccactatttggcaagctgttctttgctatctgggtcattgcccatctatacccattcttgaagggtctcttgggcaggca

SEQ ID NO: 160627 - DNA, 248 bp, Glycine max
ctccgagctctacaccgaagaacggagccatggggaagacacatggaatgggagctgctcgcaagctcaagtctcaccgcaggaggcaaaggtgggctgataagtcatacaagaaatcccatcttgggaatgaatggaagaaaccttttgccggttcatcccatgccaagggaattgtccttgaaaagataggtattgaagctaagcagcccaactctgctattcgtaagtgtgccagagttcaactt

SEQ ID NO: 160628 - DNA, 252 bp, Glycine max
ctcgagccgtttgatgtatgggtaggaaatgtgcgtggaacaggtggagccatgggcatatatctttattagagaagaaaaagcaattttgggattggagttggcaggaattagccctgtatgatgttgcagaaatgatcaattacattaattcagtaacaaactcaaagatatttgtagttgggcattcacaggggacaattatatcttttgctgccttcactcaaccggagatagtagaaaaggttgagg

SEQ ID NO: 160629 - DNA, 249 bp, Glycine max
tattgctaccctggctttcccttcattcacattttgcagggcgcttctttctcattgctggcaaaatggcaaatgcagcgtccggaatggctgtgcacgatgattgcaaactgaggtttcaagagcttaaatcaaagaggagctacaggttcattgtgttcaaaattgaagaacagcaagtggtggttgagaaattaggggatcccacggaaagttatgaggactttatggccagttttccagctaatg

SEQ ID NO: 160630 - DNA, 247 bp, Glycine max
cggagctgtgtctggggaaatttgcgttgtttttcgcggtacagctcacacacactgaacggtaagtatggcggacaaggctgttacaatccgaacccgaaagttcatgaccaacaggcttctttccaggaagcagtttgtcgttgatgttcttcatccagggagggcaaatgtttccaaggctgaacttaaggagaagctagctaggatgtatgatgtgaaagaccctaatactgtatttgtcttc

SEQ ID NO: 160631 - DNA, 241 bp, Glycine max
atcaagtcctgaatctggtgggcaaatatggagctttgttggcaaacatccatccatggttcttgaagaagcatggagataaaggggtgtgagagggtcctcaccactcacactcctccacttaaaacagtttgttttggcttagctttggcttctctaatcatcaagggatgtgttctaacattctctcttgagtggcagaagcagatatgcattctccaaaggaggagaggctttggct

SEQ ID NO: 160632 - DNA, 242 bp, Glycine max
attagagaagggtgttcctccaccatggtggccaactgggaatgaagaatggtggcctcaaattggtctacctaaagatcaaagccctccaccttacaagaaaccacatgacctaaagaaggcatggaaggttggtgttctcactgcggtcatcaagcatatgtcccctgatattgccaaaattcgcaagcttgtgaggcagtctaagtgtcttcaagacaaaatgactgcaaaggaaagtg

SEQ ID NO: 160633 - DNA, 251 bp, Glycine max
ctttgttttcaattaggtttttttgttgctctccttcaaactccatctttccaaatcctctctttgcgattgtgttttgatctgcttcctactgcgatagtttctctactgttacatggccatggcggtttccgcaattggttttgaaggtttcgagaaaaggttggaaatatcctttttccagccgggactttttgctgaccctgaaggaaggggtctaagggctcttacaaaatcccagttgggtgaga

SEQ ID NO: 160634 - DNA, 248 bp, Glycine max
ccgcaacaatgcaaatgaacagaatgaacagagaagaacatctttatactgccttccaatactttgataaagataacagtgggtttattaccactgaagaactagaacaagccctccgtgagtataacatgcatgatggcagggacatcaaggaaatccttcaagaagttgatggagataatgatggacgcattaactatgatgagtttgcggcaatgatgagaaaaggaaatccagaagttatgaca

SEQ ID NO: 160635 - DNA, 245 bp, Glycine max
agaaaacataataatgggttcacaaaattgtatggataggaagcactatgttctggtgcatggggcatgccatggagcttggtgttggtataagctcaagccacgcttggaatctgcaggccataaggtcacagtacttgaccttgcagcttctggaaccaacatgaagaaaattgatgatgttgatactttctcagagtattctgcgcctttgttgcagctaatggccacaattccctcaaatg

SEQ ID NO: 160636 - DNA, 240 bp, Glycine max
ctcaaatggcactcgatgttctcaggcttggtttcttgattgactttatgtcccatgcttccattgtcggattcatggatagagctgccattactattgcactacaacaacttaacgcttttcttggcataaaaacattcaccaagaacactgatattgtttctgtcatgcactcggttttcaatgcagcacatcatgggtagaattgcaagacaatagtcattgcagtagcattcttgg

SEQ ID NO: 160637 - DNA, 239 bp, Glycine max
aactcacttgccttatttttggttttgagattgagctaaaggccaactcaaccatcgaatttgttggtgattgaaagagaaggaagaagaagcaggaaatggaagcagtgagagctggtcgagaaggagcaataggtctaggtcaaggtgatggcgtagccaaggacagcactgagactgaactcaccaaaatccgtctcctcagggcaattgttgaaacccgtgatccctcttccaag

SEQ ID NO: 160638 - DNA, 241 bp, Glycine max
cagaaagcaagcctccaagcttcgagaacaggtcgctcgccagcaacaggctgtcctgaagcagtttgggggtggcggttatggaggttcagataatgtggttactgatggagtggagctccagctacacccgagacttgagaaactttatatatcgacacgtgcggggaagcattatcaaagggatattgttcgaggtgtagaaggttatattgttaccgggtccaagcaagtggaaata

SEQ ID NO: 160639 - DNA, 241 bp, Glycine max
tttgaagggaaacagacacgtggtgggttggaataaaatttgccatgtttacgacaagctctgtaggcatgttggtgcctccatagcagtggctttgtttggaagcgttgtgacagtcttgctcatttggctttcagcttacagcattcatagccgagtccccaagtagatggaaggaacatggatcatgcattctgcatatttgatcatacatcttcatttattgtttataaagttagtg

SEQ ID NO: 160640 - DNA, 163 bp, Glycine max
  unsure (1)..(163): unsure at all n locations
cactctcactctttccgcgagaggtttgatgnaactctcactggtcacaggaatgaaattttggcccttttgtgcaaggcttgaagccaagggcangggaatcctncaacaccaccaggtggttgcagagtttgaagaaatccctgaggagagcagaaanana

SEQ ID NO: 160641 - DNA, 236 bp, Glycine max
  unsure (1)..(236): unsure at all n locations
ctcttcttctcttgcggctacggttttagcgcacntcttctagatttaaggaagatgggtaaggaaaaggttcacatcagtattgtggtcattggccatgtcgactctgggaaatccactaccactggtcacctgatttacaagcttggaggcattgacaagcgtgttattgagaggtttgagaaggaagctgctgagatgaacaagaggtctttcaagtatgcctgggtgctgga

SEQ ID NO: 160642 - DNA, 237 bp, Glycine max
gcagaagagcgtcgcagttgtaaccctaatcagaagaagcgcagttgcaagcgagtgacagccaccagccatgggtcgtatgcacagccgcggtaagggtatatcctcttctgctttgccctacaaaaggacacctcctagctggctcaagatctcttcgcaagatgtcgaagaaaatatctgcaagtttgcgaagaaaggtttgaccccgtctcagattggtgtcattctcagaga

SEQ ID NO: 160643 - DNA, 234 bp, Glycine max
ctcttccttttctcttctctgtctaaggggtgccctgagatcacattgaacaatggtgaaggctgtggccgttcttggcagcagtgagggtgtcactggaactattcacttcgttcaggagggaagtggtccaaccaccgtaactggatctcttgctggtcttaagcctggtctccatggtttccatgtccatgccttgggggacactaccaatggttgcctctcaactggatc

SEQ ID NO: 160644 - DNA, 251 bp, Glycine max; identical to SEQ ID NO: 146206

SEQ ID NO: 160645 - DNA, 245 bp, Glycine max
cacaaattagtactctcgttaattattttgctaattgctaattgggcacaatggaaaagcttcatgctgtgtgcatcccatacccagcacaaggccacataaacccaatgctcaagctagcaaaactccttcatgttagaggcttccacatcacctttgttaacacagaatacaaccacaaacgccttctcaaatcaagaggttctgattccctcaatagtgtcccatcatttcaatttgaaacc

SEQ ID NO: 160646 - DNA, 238 bp, Glycine max
agcttttccctcgttgaaatgaaaatgggttctcctttgtggactttgtgtctaattttggcttcactagcctcttctgcattctgtgcctttccacggaggccagtggatgttccattcggcagaaactacgttcccacttgggcttttgatcacatcaaatacttcaatggaggttctgagattcaacttcatcttgacaagtacactggtactggcttccagtccaaagggtcat

SEQ ID NO: 160647 - DNA, 240 bp, Glycine max
attggttgctgttgattccctctctatatgcatgaatatcaatgggtgggaagccatgctcttcattggagtaaatgcagctgtcagtgtcagagtttccaatgaacttgggcttggacatccaagagctgccaagtactctgtctatgtgacagtctttcagtcgcttttcttgggaatctttttcatggctattattttggcgactagagattattatgccatcatttttacaaacag

SEQ ID NO: 160648 - DNA, 245 bp, Glycine max
tgctcgagcgaatcggctcacggctcgaggattgctagaatggaatttcgatgctcagtcatctcttttaccattcgcttctctcttgctcttgcaggagagagccatgtccatgcatcgctacctgaggaagattattgggaagctgtttggccaaacactcccattcccactgcactgcgagagcttctaaagcctctccctgcaggtgttgaaatcgatgaactccctaagcaaattgatga

SEQ ID NO: 160649 - DNA, 240 bp, Glycine max
cacgatctcttttttctctgagaaatacttgtaccaatactatgtctcaatctgataattcctctccttttaccacacccagattggttttcaagaaggttttggccaaatctcaacatgaaggggatggagctgttgtcagaagaggcattggaaggagcgagttgaagaacttggatcccttcctaatgttggatcacttctcagtatctcccccagcaggatttcccgatcatccac

SEQ ID NO: 160650 - DNA, 241 bp, Glycine max
cacattttcttagctctctccaacaatccctctcgttcacactttcagattgtgtgaagatgggggctggtggccgaactgctgttcctcctgccaacaggaagtcagaggctgaccctttgaagcgggtaccatttgaaaaacctcagtttagtctcagccagattaagaaggccattccacctcactgtttccagcgctctgttctccgctcattctcctatgttgtttatgacctcac

SEQ ID NO: 160651 - DNA, 241 bp, Glycine max
cccatctaatgagattgattcgagaccatcaagctgacttccttcgcctgataaatgaacctgcagaaggtgctgaagggaacatattggggcagatggcttctgcgatgccacaagcagtaaccgtcactcctgaggagcggcaggcaattgaacgtcttgaagcaatgggttttgatcgtgcaatcgtattggaggtgtacttcgcttgtaacaaaaatgaggaattggctgccaacta

SEQ ID NO: 160652 - DNA, 245 bp, Glycine max
cattctctctgtgtatttccctacctctcccttcaagatgcagatcttcgtcaagaccctcaccggcaagaccatcacccttgaggtggaaagctctgacaccatcgacaacgtcaaggccaagatccaggacaaggaaggaatccccccggaccagcaacgtctcattttcgccggaaagcaacttgaggaccgccgtacccttgctgactacaacattcagaaggagagtactcttcacctcg

SEQ ID NO: 160653 - DNA, 247 bp, Glycine max
gtttgtccaacgtggcaccgtggataacaactgtgggagcgggaactatcgaccgcgatttccctgcttacataaccctcggaacagggaaaacatacaccggagcttctctttatagcggtaaacccttgtcggattcgccgcttcctcttgtttacgctgggaacgcgagtaactcttctgtagggtatctatgtttgcaagattctctgattcctgagaaagtttcagggtcaattgttatatg

SEQ ID NO: 160654 - DNA, 232 bp, Glycine max
ggaaaagtgaagtaaaaacgtagtgtttcatctcttccatttcgctctatcgctcaacggatctaaggcttcagtgtagtctgtaatcatgtcaggcaagtatatcatttctgctattcttggatcatttggagttgcatgggtttgtgattattatgtttcagacaaaaagctatttggaggttctacccctggaactattacaaacaatgagtgggcagaagagactgac

SEQ ID NO: 160655 - DNA, 243 bp, Glycine max
cccatctccaccacccccagtctacaagtacaagtctccaccacccccagtttacaagtacaaatctcctcctccaccctataagtatccatctcctccaccaccaccatacaagtacccatcaccaccacccccagtttacaaatacaagtctcctcctcctcctgttcattcaccacctcccccagtttacatctatgcatcccctcctcctccatatcactactaggttatttctgaaga

SEQ ID NO: 160656 - DNA, 243 bp, Glycine max
gttctttctctcgcaatcttcactacattcaccggttagataccctctctctctctctctggaaagcatttgcattcacattgaatatggctgagactacacaatctaatgctgagttgttggagtggcctaagaaagataagcgccgcttcctgcatgttgtgtatcgtgttggtgatcttgatcgcaccattaagttttatactgaatgttttgggatgaagcttttgaggaaaagagata

SEQ ID NO: 160657 - DNA, 240 bp, Glycine max
ggtatggagggcaaatatacctcatacccatcttgcaactgagaaatctgaccagagatggatggttgtaaaaggtgaaaagataggttttcctggtggaggaacccacttccattatggcgctggcaagtatattgcatcaattgccaatgtaagctagttactcctatccggtatggcactaaaataatcaccaaaacatgaaactcttatatgactggaaaaagttataagtttgta

SEQ ID NO: 160658 - DNA, 239 bp, Glycine max
ctcatcaagggttgtgaaagcagagaagtgagatacactaagttatcctcataaatacactctaattaggtggcaagataagtgtctaaccttagtaacattgccacatattgtgttcattttggaattgtgccactaaaattctattcaattcatctatggctgcctcttcttatgctatgcaatcaatcctggcaaaccctttgatccgcatttccagcgggtctagggtgaaccaa

SEQ ID NO: 160659 - DNA, 238 bp, Glycine max
gtgagtgctgaatcgaatcgaatcgattctccgaacatggcggcgagcgatcgcacagtgttgcaattctcttcatcatcttcttcttcttcgcagatcttgtccgcgaaggtccaccctctggtcatcttcaacatctgcgattgctatgttcgacgccctgaccaagccgaccgcgtcatcggaaccctactcggctccgtccttcccgacggaaccgtcgatatccgaaattcct

SEQ ID NO: 160660 - DNA, 225 bp, Glycine max
tctttgtttaagaaagagaagcatcttttttttttcttttttaaattaatacaaattttcttattgtctttttttttctatatcttccattgaacaatgacttttttactagaaaaaaaaaaaaaaaaaaaaaaaaaaaaaaaaaaaaaaaaaaaaaaaaaggggggggccccgcacaaggggtctcgcgccccggggaattattgcgggggggggctcgggggg

SEQ ID NO: 160661 - DNA, 240 bp, Glycine max
actccctcctcttcacacattttcttagctctctccaacaatccctctcgttcacactttcagattgtgtgaagatgggggctggtggccgaactgctgttcctcctgccaacaggaagtcagaggctgaccctttgaagcgggtaccttttgaaaaacctcagtttagtctcagccagattaagaaggccattccacctcactgtttccagcgctctgttctccgctcattctcctatg

SEQ ID NO: 160662 - DNA, 245 bp, Glycine max
cgagataactagaaacagtgtgatgaaaatgaaggtccttgttttcttcgttgctacaattttggtagcatggcaatgccatgcgtacgatatgttccctctccgaatgaacactggctatggtgcccgtactccggaggtgaaatgcgcaagttggaggcttgctgtggaagcacacaacatctttggctttgagaccattcctgaagagtgcgttgaagcaacaaaggaatacatccatggcg

SEQ ID NO: 160663 - DNA, 243 bp, Glycine max
agaatgaagcggagggtgaagaggaaagtgcctgaagctaactccaacactatgataatcattcggatacaggggtgagtgaagaaaaaagacatgcatcctaggactaggaaggtgttgtacagcttggggttgaggagaaggttcagtgctgtgtttgtgaagccaagtgagggaataatggccaagctgcagagggtggaaccatatgtcacctatggatatcctaatcttaaaagcata

SEQ ID NO: 160664 - DNA, 181 bp, Glycine max
tattcttcaacccagagagatttgtaataataaattacaacaacttaaacgatggcaggaggagcttatgtagattcgggaaatgcaaagcaatttgatgggaaggtcacggcattcgtattggttacatgctttgtggcagccatgggaggcttactcttcggttatgatcttggaataa

SEQ ID NO: 160665 - DNA, 239 bp, Glycine max
ctcacttgccttatttttggttttgagattgagctaaaggccaactcaaccatcgaatttgttggtgattgaaagagaaggaagaagaagcaggaaatggaagcagtgagagctggtcgagaaggagcaataggtctaggtcaaggtgatggcgtagctaaggacagcactgagactgaactcaccaaaatccgtctcctcagggcaattgttgaaacccgtgatccctcttccaagga

SEQ ID NO: 160666 - DNA, 238 bp, Glycine max
caaaaacctgattgaggtttttgccaagggtgttgagaaggactatgttatccttcttgctgcaagggcttctaggactgagcatcaggatgctatagatgctgcaattgttggtatgcttgctgatccaaaggaggcacgagctggtatcagggaggtccactttcttccattcattcctgtggagaagaggactgctctaacttacattgattctgatggaaattggcatcgatct

SEQ ID NO: 160667 - DNA, 241 bp, Glycine max
attagcaaagaaactccaactccactagtgaagtacagaaaagaagaattggaaaatctaagaggagatggaaaaggagagcgcaaggaatatgataggatctatgattatgatgtctataatgatttgggtaacccagacaagagcaatgatctagctcgtcctgttcttggagggccaagtgctaatccatatcctcgcaggggaagaactggtagaaaaccaccaccaaaagactcta

SEQ ID NO: 160668 - DNA, 245 bp, Glycine max
tctcattccatatttgaggaaaataaatgcaactaccacaaagacttacgcttaaagaaccatatttttcttgaaaagtgatggaaccttgacgccattggccattgagttaagtaagccgcatcctcagggtgaaggatatggtcctgttagcgaagtctacgtgccttcgagcgagggagttgaagcttacatttggttactggcaaaggcttatgttgttgtgaatgattcgtgctaccatc

SEQ ID NO: 160669 - DNA, 247 bp, Glycine max
cttcttcttttacgttcattctgttttcatagtgaggatcttctgaagaaatggcaaatcaccctttgacacactctcactctttccgcgagaggtttgatgaaactctcactggtcacaggaatgaaattttggcccttttgtcaaggcttgaagccaagggcaagggaatcctgcaacaccaccaggtggttgcagagtttgaagaaatccctgaggagagcagaaagaaactccaaggtggtgt

SEQ ID NO: 160670 - DNA, 237 bp, Glycine max
gtgctgggattatttgaagataatagatacaaatcagaagcaaagaaatcaacactaaggtccattgactttattggtcttgggacaggacctgaactggagaagaaactgaagtacgcaggagatgtttcttccggaattatctttggaagggagcttgtaaattctcctgctaatgtgctcacaccaggggtgttggcagaagaggcagctaagattgcttccacctacagtgat

SEQ ID NO: 160671 - DNA, 240 bp, Glycine max
gagaagtgcaaaaacagtgtaaaaaaaaggaaaagaaaaccaatatgaagttcactataatcacaatatttttctctttatttctacttgactttggttttgcacaacagggggatcttgacatatcaagatttggaggaaaaccaaatacaaatataggccaggctttcttaagtgcctggactcaagcatgtgcatcaccaactgctgtcaaaattgtgattccagctggcacatacc

SEQ ID NO: 160672 - DNA, 241 bp, Glycine max
gagataactagaaacagtgtgatgaaaatgaaggtccttgttttcttcgttgctacaattttggtagcatggcaatgccatgcgtacgatatgttccctctccgaatgaacactggctatggtgcccgtactccggaggtgaaatgcgcaagttggaggcttgctgtggaagcacacaacatctttggctttgagaccattcctgaagagtgcgttgaagcaacaaaggaatacatccatg

SEQ ID NO: 160673 - DNA, 243 bp, Glycine max
  unsure (1)..(243): unsure at all n locations
aagcattgcattctgctattcaattccactacgtacacaaaacaaaaactcaaagacaacaatggcaccaacagccaagactctgactcanctggcccaggagaaaaccctagaatcgagcttcgttcgggacgaggaggagcgtcccaaggttgcctacaacgaattcagcgacgagatcccagtgatttctcttgccggaatcgacgaggtggatggacgcagaagagagatttgtgagaa

SEQ ID NO: 160674 - DNA, 245 bp, Glycine max
ggccaacggctttcaagcttttcacaggttcggcatggatggcactgtcaaaatctttcattgattactgcatatggggatgggacaacctacctcgaaccgtactcatgtactattcaaatttcatatcttcccctgaaggatacttccacacagttatttgcaatgcacaagagttcaggaacacaactgtgaacagtgatttacatttcatttcttgggacaatcctcccaagcagcatcct

SEQ ID NO: 160675 - DNA, 268 bp, Glycine max
atcatattaagccatggccacctccaacttctcaattgttctctctctctccctagccttctttctagtgctactcaccaaggcaaactcaaccaacaccgtttctttcaccgtcagcaagttttccccacgccaacaaaaccttatcttccaaggagatgctgctatctcaccctccggggtgttacgactcaccaaggttgacagcaacgacgtgccaacgacgggatccctaggacgtgccctttatgctgccccaatccagatt

SEQ ID NO: 160676 - DNA, 267 bp, Glycine max
ctctcttgttcctttccctattcaagcattcccatgctgcaggaatcgctatctactggggccaaaacggtggagaaggcaccttagcagaagcttgcaacactagaaactaccaatatgtgaacatagccttcttgtccacttttggcaacggccaaactccacaactcaaccttgcaggtcattgtgaccccaacaacaatggctgcactgggttgagcagtgacatcaaaacttgccaagaccttggcatcaaagtgttgctct

SEQ ID NO: 160677 - DNA, 263 bp, Glycine max
agctcaactacattgagtccaaggggaggatgaagaagggtgatagggtgtggcagatagcgtttgggagtggctttaaatgcaacagtgctgtgtggaagtgcaacagaagcattaagacaccggttgatgggccttgggctgattgcattgatcgttacccggtcgatattcctgagatcgttaagctctaggatggagaattgttcaagaacaagaagataattgcttattttatgaaaaaaaaaaatagatgagttctc

SEQ ID NO: 160678 - DNA, 262 bp, Glycine max
tggtgagagaaacaggctttgatatttcagttgctagtgagattatggctgttttggcactgacaacatccttagctgatatgcgagagaggcttgggaaaatggttattgggaatagcaagagtggtgaccctgtaactgctgatgatctaggtgttggaggtgctttaacagttttaatgaaggatgccattcaccctacccttatgcagactctggaaggaactcctgttcttgttcatgcaggtccatttgcaaatat

SEQ ID NO: 160679 - DNA, 261 bp, Glycine max
cttggaggggtcattcagaaacttcaagacactagggagcagcgcatagaagaacctattctttacattaagatgcaaatagcaatattcaagcttgagcaaggtgatcaaaaggaatgcaagaaacttctagaagatgggaagagtacactcgacagcatgacagatattgatccatctgtatatgctagctattactgggtatcatctcagtttcataagacatgccaagaatttgctgagttctacaaaagtgccctt

SEQ ID NO: 160680 - DNA, 260 bp, Glycine max
cttgaatttttcaacaacatcctccgtgagaagctccactcctttctccttagccgtctgatatgctgaccatgatcttatgtaggtcaagaaatcatccaaatccatcattgtttccgtcacaaactcaaagggtcctgtgtgatcagctccatccacgggctcaaatggaaaatcaatgcttctataattgtcatcaacccatttacgagctgggtcccaataagggcttacattagtggaatagaattggtcaaaga

SEQ ID NO: 160681 - DNA, 261 bp, Glycine max
aacaagtagttgagaactaagaaggagaagcaaatggcttcctcaatgatctcttccccagctgttaccactgtcaaccgtgccggtgccggcatggttgctccattcactggcctcaagtccatggctggcttccccaccagaaagaccaacaatgacattacctccattgctagcaacggtggaagagtgcaatgcatgcaggtgtggccaccagttggcaagacgaagtttgagactctttcctacctgccagacctt

SEQ ID NO: 160682 - DNA, 263 bp, Glycine max
gaaaactgtacacaagagggattccaaaaccaagtgctgagaaaagggtgtcaaaatcttggcctcaaagttgactatgtgccaagaaactcctcagggaatcactactgtggctcatgtggttatggctgtccgaaaggagagaaacaagggactcaagctacatggcttgtagatgcagttgaaagagatgcagtaataataacaggatgcaaagctgagaggttcttgttggaaagcaacaggagtggaaatggcagaaa

SEQ ID NO: 160683 - DNA, 261 bp, Glycine max
gcttcatggatatacagtaagagcattatacagagcatttcaaacgtcagctgaacaggagactctagttcgagttacagtgtggtgcattggggagtatggtgacatgttagtcaatatggtgggattgctagacatagaagatccaataacagtgactgagtccgatgcagttgatgtcatagagattgctatgaaacgccatgcatcagatcttaccacaaaagcgatggctttggttgcactattaaagctctcttc

SEQ ID NO: 160684 - DNA, 264 bp, Glycine max
  unsure (1)..(264): unsure at all n locations
ctcgcacattaagttatataacacatatttgcttgcttagaaatactattattgaagatatggggagtgtagattatgagtaccctttgggcatgaacaactttgagagagtgcaccaagtcgaggttccaccgccacagccgtacttcaagtctctaaagtactctttgaaggagactttcttccctgatgaccctttgaggcagttcaagaacaagccagcttccaagaagttctgnttttggccttcagttcttcttcccc

SEQ ID NO: 160685 - DNA, 258 bp, Glycine max
gtgtcatcatgttatgtgtaaaaatgtcttcttcttcttcttctcctgctgttctctcaaaatgcaccgttttccctcaccggaactccactctgggggacctcaagctctctatctccgaccttaacatgtttttatctcactacatccaaaaaggctgtctcttcaccactccttcacttccctctcactctcacactctcatccctcacctcaaaaacgcgttttcccaaaccctctctctcttccctcccctcg

SEQ ID NO: 160686 - DNA, 267 bp, Glycine max
tattcaacgagaacgatgcagttagtactaggaaagctccatatgaggattcttctggcatattttgggataatgacagtttatcagctttattggcattggaattaaaagctgatcttcttattttgttgagtgatgtagagggtctctatagtggccctccaagtgatccacgttcaaaacttattcatacatacattaagtccaagcatcaaagtgaaattacttttggagacaagtctagagtgggaagaggtggaatgactg

SEQ ID NO: 160687 - DNA, 260 bp, Glycine max
cagctcttccagttgatgagttgattgagaaggctgatggatttgcaggagtatttcctgaacacaaatatgaaattgttaagaggctgcaagagaggaagcatatatgtggaatgacgggagatggtgtaaacgatgcccctgcattaaagaaagcagatattggaattgctgttgccgatgctacagatgctgctagaagcgcttctgatattgtcctcactgaacctggtctgagtgtcattattagtgcagtgctc

SEQ ID NO: 160688 - DNA, 255 bp, Glycine max
tccagatctggcagactagtatccgatcctctgtcctctcgaagctttcatcgttcaacatattctcaccatctcagtcatcggcctgctatcttgttttaggtctaccgtcctgtgaaaatgttccaaaggaagctctggcatgtcaagattcctgtatacgaacaatcttcaacgaaacttgatttcgtctggtggcaatgaatcgtattatgggtattttaacaggagatcatacacttcactttatatggg

SEQ ID NO: 160689 - DNA, 258 bp, Glycine max
ctcaatcaatcagttttagatacttgatacagcgctccgcatcttcagcagattccattgtaacaaaagcaaaaccacgagaaatctgctgaagatgcggagcgctgtatcaagtatctcaatcaatcagttttagagggtcgttacatcactgttgagcggtcacgaagaaaacgtgcaagaactccaaccccagggcaccatcttggactgaaaaacacaagggagtatggctatcgtggtgaccgaggtggtgac

SEQ ID NO: 160690 - DNA, 257 bp, Glycine max
ccatcttcttctcttttcacgtcattatcctaaacttgcagattttcacatcccaagcaacatgaaggggcggttcatgtttctgtcggtgctcctttgtgccacctttcatgtctccttctccattactgacggcttagtagcaaacggcaacttcgagctgggtccgaagccctccgccctgaaaggaactgtggtgattggtggcagccactcgatcccagaatgggagatctctggcttcgtggagtacataa

SEQ ID NO: 160691 - DNA, 260 bp, Glycine max
atgctttctcggagaaagctttttttctttctttgttgacttcacctagcaagcctcgaatccaaatcctttctactttctgctcttacgctatttcgtctttctatagaatacgaagagaggaccttctttcgggctgtctacgaacccttcttctcgtatgcaattttctattctttcttttaaccaaaagagaaagggaaaacactggccaatttcacactttctgaatgtgccatttgaccgaatgtgaaagcgaa

SEQ ID NO: 160692 - DNA, 232 bp, Glycine max
aattaactttctctctctctctctacaaaacttagctctgtttttaattattccttgcattctcttgtattaagatggaagcaactaccatcaccaatgggagccaaaacggttcgttttgcttgtccaattactaagggaagtagtgatccgttaaactggggagcggcggcagaggcgatgaaggggagccacctggacgaggtgaagcgcatggtggccgagtaccgca

SEQ ID NO: 160693 - DNA, 258 bp, Glycine max
gtgagctcaagagacaacttgaggattttaatgaatcttcttagagagtcaagcaagagcatacagattgaagcatttcatgttttcaagctatttgctgccaaccaacataagccagctgatatcgtcagtatatttgttggaacaacagtaagatgctgagactattggaagacttcaaaattgataaagaggatgaacaatttgaagccgacaaagctcaagtgatgagggaaattgaagctctttaaacaaggg

SEQ ID NO: 160694 - DNA, 262 bp, Glycine max
gagttcttcaaggatgcactgaataaagttctgccatatatggactacgtttttggtaatgagactgaagcaagaacattttctaaagctcaaggctgggagactgataatgttgaggaaatagctttgaagatttctcagttgccaaaggcatcggaaacacataaaaggattacggttatcacccaaggtgcagatcctgtttgcgttgccgaggatggaaaagtgaaaatttaccccgtgataccgttacctaaagaga

SEQ ID NO: 160695 - DNA, 268 bp, Glycine max
  unsure (1)..(268): unsure at all n locations
tcaaattggtctcttgtcttcctcctcatctctacactactccacatacagnccagcctctcaagcccaagcccaagcccaagcccaagcccgttcataaaatcctcctgcagcagcacccagtacccagccctctgcgtctcatccctctccgtctacgcctccagcatccaacaggaccctcaccaactggttcagacagcactctccctctccctgaaccgcacccaagccaccaaaaccttcgtggctaactgcaacaaattca

SEQ ID NO: 160696 - DNA, 267 bp, Glycine max
ctcgagccgcttggaggttcgtagagaacaagttgagttcttagttccaattatagaacaacgaagaagagcaatccaaaacccgggttcagatcacaccgccacaacgttttcctacctagacacactttttgatctcaaagttgaagggaagaaatcagcaccttctgatgcagaattggtttcactgtgctcagagtttctcaacggtggcacagacacaacagcaacagcggttgagtggggcatagcacagctcatagcaaa

SEQ ID NO: 160697 - DNA, 260 bp, Glycine max
agaaaagcatggcatgttggtccaatgtttcttttcaacagggttaaagaagaaaaagcacatagaggaatggatgcatctattaatgatgagcatgagtgcttaaagtggcttgacacgaaggaaccgaattcagttgtttatgtgtgctttggaactacaacaaagttaactgattctcaacttgaggatattgccattggtctagaggcttcagggcaacaattcatctgggtcgtgaggaaaagcgaaaaagatgg

SEQ ID NO: 160698 - DNA, 260 bp, Glycine max
gagagagagagagagagaggagagagtattggcgcttcatcaagatgggtatttctagggattccatgcacaagaggcgtgccactggtggcaagaaaaaggcttggagaaagaagagaaagtatgagcttgggcgtcaggcagcaaacaccaagttatcaagcaacaagacaatcaggaggattcgtgttagaggtggcaatgttaaatggagggcattgaggctggatactggcaattactcatggggtagtgaagca

SEQ ID NO: 160699 - DNA, 257 bp, Glycine max
tgaagcgtgcgatatatgggtcctaattgccaaaattgtgaatggagggaatacgacaacatattcggagccgacaaataagtatgcaactcaacacatccttccacacggagaattcatcttcggtaggaagggcgtagatcattcagctatgagttcatcccagtagaaggccaaaggggcgagaaaccctactttttcccattcttatacgaaacgtcagacatagatgagaacaatctctacccttttgtgca

SEQ ID NO: 160700 - DNA, 254 bp, Glycine max
tgaaacttgcttttgttcccgattttctcaaattgctttcggttttcgttctgattctgcaaaatcatggagatggagcgcatcgttgaattccctcacacctacatggatcgacccccaagaaagagagcgcgtttgggctgggacatcgctgaggcccccaaggctcaggtaggattgttttgtggacaagaggttgagaatatttcaagctatgctccttcagaacatccccctagttctctgtttaaggg

SEQ ID NO: 160701 - DNA, 265 bp, Glycine max
gtacttccttaatttgccaccctaacctactgcattattattctcttccccttaatttctatctccaatccctcagcaaaacgcagcaaatgggtcggcttaatctcctacttgtgtggtcactctcattaacactgtccctttattatctacacccaatctctgctcagctcagtccaaaccactatgctaaaacatgccccaatcttgaaagcatcgttagacaggccgttaccaagaagttccaacaaacctttgtcaccgt

SEQ ID NO: 160702 - DNA, 257 bp, Glycine max
ggctgataagattgcactaaagttagttggaccaggtggatttgtagttactgaagctggttttggtgctgatattggagctgaaaagtttatgaacattaagtgtcgttatagtggtttgacacctcaatgtgcgattattgtggcaactatcagagcactaaaaatgcatggtggagggcctgcagttgttgctggaagacctcttgaccatgcatatttgactgacaatgttgccctggttgaggctggttgtg

SEQ ID NO: 160703 - DNA, 207 bp, Glycine max
ggtggctttgcggatattgaaacgagttacacgtgtgtcatgaagtttggcggctcctctgttgccaatgcagaaaggatgagagaggttgccaaccttattctgagcttcccggaagagaggcctataattgttctctctgccatgggaaagacaactaacatgctgttgctggctggagaaaaagctgtaagctgtggaataact

SEQ ID NO: 160704 - DNA, 256 bp, Glycine max
gctaacagcaagactgtgccggcatcaagcatcccagatgggtggatggggttggatattggtcctgattccatcaagacatttggtgaagcattggatacgactcagaccattatttggaatggaccaatgggtgtttttgagtttgataagtttgccacaggaacagaggctatagccaagaaactggcagagctgagtgggaagggagtgacaaccatcattggaggaggtgactccgttgccgctgtggaga

SEQ ID NO: 160705 - DNA, 264 bp, Glycine max
ggaagaagacaattcaactacgagttttaccccaagacacaagccaagaatacttacagtttaccttttcttgctcaaaccaacgacgctaacgctgaaaacaatctctacccgtttgtttttctaaacgtcgatggcaacctttttatctttgccaacaaccgcgctatcttgttcgattacaataagaacagtgtcgtgagaacctaccctcaaatacccggtggagatccacggtgttatcctagcaccggttccgcagtt

SEQ ID NO: 160706 - DNA, 263 bp, Glycine max
ctcagtgaaagagaatccgaggcgaagagaagagaaaaattaagatggaggggaaggagcaggatgtgtcgctgggagcgaacaagttcccggagagacagccgattgggacggcggcgcagagccaagacgacggcaaggactaccaggagccggcgccggcgccactggttgacccgacggagtttacgtcatggtccttttacagagcagggatagcagtttgtgggccacttttcctgtttctatacatcactgtctta

SEQ ID NO: 160707 - DNA, 257 bp, Glycine max
caaggagctcacatgcagtggagggaaatcagctattgaagttgcaaactacattcaaagggttcttgcagggactttgggatttgagtgcacaaatttgactaggaagagcaaatatgccatgcttgcaggcacagatgggacagttccatctaaggagaaggcttgaaaagggagagaaattaagttctcccttttgattattctgtattggtgcccaatgtgtttccaaaacacttagaattatgatagaaata

SEQ ID NO: 160708 - DNA, 254 bp, Glycine max
gcaccaacgcatagccagaccatggtgaaagaactggtggtttttatgcttgcaatcgttatgaagcagctaaacaagaaggagtgtatgatgatactgaaagaagaagggaaatggcaaagaattcgctggagagatacactcattattatgagcggtgggccagcaatcaatcttcaaggcaaaaagctcttgcagatctacagcagatgcaaactgttcatattgagaagcttagtgacatacagtgtcag

SEQ ID NO: 160709 - DNA, 261 bp, Glycine max
ggttatctctaaggtcctaaacaatcctctttcaaaaacataccgagacaagtgtggaaatgacgacaccatcattggtagagtctctagttcttcaactccatgagatctcagctgtcaaatttggcaacttcaagctcaaatctggcatcttctcaccaatctacatagacctccgcctcatcatatcttacccttctctcctccaacagatctctcaaacccttatttcttcagtctcttccacttcctttgacctcg

SEQ ID NO: 160710 - DNA, 256 bp, Glycine max
ctgaaatttccgattcgggatggagaaatacgagctcgtgaaggatataggatctgggaatttcggtgtggccaggctcatgcgacacaaagacaccaaggagcttgttgccatgaaatacattgaacggggtcacaagattgatgagaatgttgcgagggaaatcataaaccatagaagtcttcggcaccccaatattattcggttcaaggaggtggttctgactccaacccatctgggtattgttatggagtat

SEQ ID NO: 160711 - DNA, 259 bp, Glycine max
ataactagaaacagtgtgatgaaaatgaaggtccttgttttcttcgttgctacaattttggtagcatggcaatgccatgcgtacgatatgttccctctccgaatgaacactggctatggtgcccgtactccggaggtgaaatgcgcaagttggaggcttgctgtggaagcacacaacatctttggctttgagaccattcctgacgagtgcgttgaagcaacaaaggaatacatccatggcgaacaatatagatcagact

SEQ ID NO: 160712 - DNA, 261 bp, Glycine max
caatgacaagggtagattgtcaaaggaagatattgagaagatggttcaagaggctgagaagtacaagtctgaggatgaagagcacaagaagaaggttgaggccaaaaacgctttggaaaactatgcatacaacatgaggaacaccgtgaaggatgacaagattggtgagaaacttgacccggctgacaagaagaagattgaggatgcaattgagcaagcaatccagtggttagacagcaaccagcttgcagaagcagatga

SEQ ID NO: 160713 - DNA, 261 bp, Glycine max
cagaaaatctgaatcatgtcgtggcaagcgtacgtggatgatcacctgctgtgtgaaatcgaaggtaaccacctcactcacgccgctattatcggccacgacggcagcgtttgggctcagagcgccaacttccctcagttcaaagctgaggaaataactgctatcatgaatgactttaacgagcctggatcacttgctccaactggattgtttctcgctgccaccaaatacatggtcatccagggcgagcctggtgccgtc

SEQ ID NO: 160714 - DNA, 236 bp, Glycine max
catgaatctcttacagaggcacatcctggtgacaatgtgggattcaatgttaagaatgttgctgttaaggttttgaagcgtggttatgttgcctcaaactcaaaggatgaccctgcaaaggaggctgctaacttcacagcccaagtcatcatcatgacccaccctggtcagattggaaatggctatgcccctgtcctcgactgccacacttctcacattgctgtcaagtttgctga

SEQ ID NO: 160715 - DNA, 240 bp, Glycine max
ggctcgaggtactcagctgggataacaagcttgctggtgctcaggttcttctgagtcgtttgaggttgttcttgagtcctgggtatccatatgaagaaattttgaggacctttcacaatcagacaagcataatcatgtgctcctatctaccagttttcacaagctttaacagaaccaaaggtggcttgattcaattaaaccatggtaggcctcagcctctccaatatgtggtcaatgcgg

SEQ ID NO: 160716 - DNA, 243 bp, Glycine max
ctctagcgtgcacacaaaataatggacaaaaaaccatgcgactcatctcatgatccagaagtgagaaagggaccatggatcatggaagaagacttgatcttgataaactatattgcaaatcacggtgaaggtgtttggaattctttagccaaagcttctggtcttaaacgaacgggaaagagttgtcgactccgttggctaaactaccttcgtcctgatgttagaagaggaaacattacaccc

SEQ ID NO: 160717 - DNA, 243 bp, Glycine max
acaaattctgcccttataatacagttctgttttctcatagtgatccatcaatcaatactgtgttgacagcaccaactgataaacctggagtggcattgcttgattttgtcattttcccacccagatggctggttgctgagcatactttccggcctccatattatcatcgcaattgcatgagtgaatttatgggcctcattcatggtggttatgaggccaaggctgatggatttcttcccggtg

SEQ ID NO: 160718 - DNA, 247 bp, Glycine max
tgatatttctgaccagagtagcgagaagattcataggaagcagatcaagcatttgttccttgacctattcgttgcggggccggtggtggccgtgaagaggttgaaggatgtgacaatttccgagaaggaatttaaggagaagattgaggcggtgggagcgatggatcacgagagtttggtgcctctcagggcttactatttcagcagggatgagaagctccttgtctatgattatatgcccatggga

SEQ ID NO: 160719 - DNA, 94 bp, Glycine max
gttccatgtgaacggcacttgcacatgggttagtcgatcctaagggacgggggaagcccgtctgatagcgctctgtgcgcgtactccgaaaggg

SEQ ID NO: 160720 - DNA, 240 bp, Glycine max
gaaaggctgtggttatccatgtcccctacagactaaggaaaggattccggaagattcatgtcaggcttgtgagagaacttgagaaaaagtttagtggaaaagatgtaatcttgattgccaccaggaggatagtaaggccaccaaagaaaggttctgctgttcagcgcccccgcaccagaacactcactgctgtacatgaggcaatgctggaagatattgtattgcctgctgagattgttg

SEQ ID NO: 160721 - DNA, 231 bp, Glycine max
cttcttcttcttcttctttctaacgccatgtctgggagccaccaagagcagccactgttagagaactcgttcatagaagaagacgagccgcaagaaacagcttatgattcgtcggagaagatagtggtggtcggagtcgacgagtccgatgacgaggagaattgggggagagtgccccgattctcgtggaagaagctatggctgttcaccgggccgggctttctgatgagc

SEQ ID NO: 160722 - DNA, 242 bp, Glycine max
gcaagatttctcgcagagtatagatttgatgtctcaaaattggagccagtggtggccaagcctcattctccggataatcgtgctttggcaagagagtgcaaggatgtgaaaagtaacagagtatacataggatcttgtacaggtggcaaaacagaggatttcatggctgcagcaaaagtttttctggcatcaggtaaacaggtcaaagttcctacatttcttgtgcctgcaacacaaaaggt

SEQ ID NO: 160723 - DNA, 241 bp, Glycine max
gttgaaacaatttgcactaagggcattggctagcacacttaatgaaggagagttgtctgatctaaaagatcagtttgatgcaatagatgtggacaaaaatggttctattagtcttgaggacatgagacaggctcttgctaaagatcaaccttggaagttgaaagaatcacgtgtgctagagatattgcaagcgatagacagcaacacagatgggctagtggatttcaccgagtttgtggca

SEQ ID NO: 160724 - DNA, 239 bp, Glycine max
tcggctcgagtacagattctctgtgttgtgttgtgtacttgtgttaattgtgttgttgttgtaggaaatttaagtgaagagagaatgatgatgaagtctgctatgtgtgcattggtgcttgtggcactggttgtggttgaagtggggcccatggctgaggctgcggtgacttgcaacccaacacagttgactccttgtcttccggcaattaattcaggttctgcaccttcgagtgcttg

SEQ ID NO: 160725 - DNA, 240 bp, Glycine max
ctttgcgcagttccctacctctcctttcaagatgcagatcttcgtcaagaccctcaccggaaagaccatcacccttgaggtggaaagctctgacaccatcgacaacgtcaaggccaagatccaggacaaggaaggaattcccccggatcagcaacgtctcatcttcgccggaaagcagctcgaggacggccgtaccctcgccgactacaacatccagaaggagtcaacccttcaccttgt

SEQ ID NO: 160726 - DNA, 237 bp, Glycine max
ctctcattccccatttcctcacctccttcaaccgctgctaaattctagggttccgaaatggacgctggcggaaagatcaagaagggcgccggaggtagaaagggcggcggcccaaagaagaagccggtttcaaggtccgtcaaagccggtctccaattccccgtcggaagaattggccgttatttgaagaaaggaaggtacgctcagcgtgtcggtaccggtgctcccgtatacttg

SEQ ID NO: 160727 - DNA, 236 bp, Glycine max
ctgggatgggaaccaaaggtcaagttgcgtgatggccttcctcttatggaagaggatttccgtcagaggcttggggttcccaagagcaactaagcttgttttactccttcacttcatatcatataatcataatgaatattttgatagtaactgggatgaatctgtacagtgttaagatgatttatattgaaaattatgtagaggattgcttctccacccaacttctatggtaaata

SEQ ID NO: 160728 - DNA, 236 bp, Glycine max
ctcaaagtcctcctccaccatctcccactcctcatcctccctactactacaaatcccctccaccaccaacgtcgcatcctccaccttaccactatgtgagccctccaccaccttctccatctcctcctccaccataccattacacatcaccacctcctccttccccagctcccgctcccaagtacatttacaaatcacctccacctccagtttacatatatgcttccccacctcca

SEQ ID NO: 160729 - DNA, 120 bp, Glycine max
gagatggcaaagaatgtggggattctcgctatcgacatctacttccctcccacctgtattcagcaggaattgctggaggctcatgatggtgccagtaaagggaaatatactattggactt

SEQ ID NO: 160730 - DNA, 121 bp, Glycine max
ctgattctgaggaggagctgaaagaggcattccgggttttcgacaaggatcagaatgggttcatctctgctgctgagctccgtcatgtgatgaccaacctcggggagaaactcaccgatga

SEQ ID NO: 160731 - DNA, 128 bp, Glycine max
tgatcaaggccacgttcttgaggcgtgtaaagacagtctcaagaagcttcagttaacgtatctagatttatatcttgttcactttcctgttgccgtaaggcatactggggttgctaatacttctagtc

SEQ ID NO: 160732 - DNA, 230 bp, Glycine max
gggaaagtctttataaggcggtaagactcaccgttaccacacgaaatgaattacagttgccattctcatcctcctctgtctctctctctccaccattgccatggatccttacaagctccggccatccagcgccttcaattctcccttctggactacaaattctggtgctcctgtttggaacaacaactcctctttaaccgttggagctagaggtccaattctgcttgagg

SEQ ID NO: 160733 - DNA, 232 bp, Glycine max
ctctctctctctatcccctttctgccgacgattttgtttgtcccctttggatcagttcgtgcccttgttgttggtttgtagcttttgctgaaatctagcaataatgaagaaggttattggtcaaactgttagggaccttaaaagagaagtaaataagaaagtgctgaaagttcctgggattgaacagaaggttcttgatgctaccagcaatgaaccatggggtcctcatgga

SEQ ID NO: 160734 - DNA, 235 bp, Glycine max
gtgactatccggagagtatgaaatcttcagtaggttctaggctcccaaaattcacaaaagctgaatctgaaggtctaaaaaattccatagattttcttggtgtgaattactacaccacttattatgcggaacatgctgaacctgtcagtgccaaccgaaccttctacacagacatactagccagtctcagtacggaaaggaatggtctacatgttggaaccccgactgatttgaa

SEQ ID NO: 160735 - DNA, 227 bp, Glycine max
cctttacatactctgatctctctcagagcaatagcaacaatggcttccctcaccccaggcaccctgctgaaaatgctgcaggccatgaacaccaacacccgcgtcaccggcgaccaccgctccccgctcctccaggtcatcggcatcgtccccgccctcgccggctccgacgtctggtccaaccagggcttctatttaaacctctccgactccgtcaactccaccta

SEQ ID NO: 160736 - DNA, 230 bp, Glycine max
gaatcatgtcaaaggagaaaagatgattctagtgtggaattttgcgagtcctcagatgccgatgatgtctggtataagaaaatggaggcctgcattactcccactcctaaagttactggcgggaatcttaaaccatttccaagcaggctatatgccattcctcccagaattgctagtggcttagttcctggactttcctctgagacataccaggatgataacaaaaagtg

SEQ ID NO: 160737 - DNA, 228 bp, Glycine max
gatcgagataactagaaacagtgtgatgaaaatgaaggtccttgttttcttcgttgctacaattttggtagcatggcaatgccatgcgtacgatatgttccctctccgaatgaacactggctatggtgcccgtactccggaggtgaaatgcgcaagttggaggcttgctgtggaagcacacaacatctttggctttgagaccattcctgaagagtgcgttgaagcaac

SEQ ID NO: 160738 - DNA, 229 bp, Glycine max
aacggagcacctctcttcaggtcgccatctagactgcaatcatggctgatggaccacagcatccatcagttgttcagaagctagctggacagtcttacctggtatccaggctaagccccaactttaactctgggaattattcctcgactggttcttacttcaatggaggactgcactcttctgggttggctgttgtgtcgcctggatctccagttactgtgcatgctcc

SEQ ID NO: 160739 - DNA, 217 bp, Glycine max
cctacttcatctcctggttacagcccatcatccccaggctatagtccctcatcacccgggtacagtcccacttcacccggatacagccccacgtcacccgggtacagtcccacgtcacctgggtacagtcccacctctccgacttatagtcctagctctccgggatatagtcctacaagtccagcttattcgcctaccagtccatcctactctccca

SEQ ID NO: 160740 - DNA, 231 bp, Glycine max
gtgagttttgtttatttgaaattaacaagtagcaaagatgtttggaatcatcggaggaaacaagggtcacaatataaaggggaacttggtgattatgcgaaagaatgtgttggatatcaacagcattaccagtgttaagggtgtcatcggaaccggcattaacatcattggaggagtcgtcgacaccgttactgctttggcgtcccacatctccatccagctcattagtgc

SEQ ID NO: 160741 - DNA, 118 bp, Glycine max
gacaaacccaacattgtcactggagccaacgttcaggtttgctgggagaaatttgcaaggtactttgaggtggagttaaaggaggtgaagctccgtgatgattattatgtaatggacc

SEQ ID NO: 160742 - DNA, 268 bp, Glycine max
ccccggttcagctcggcgagatcacggcggaggagctcaaggcctacgacggcaccgatcccgagaagcccttgctcatggccatcaaggcccagatctatgatgtctcccagagcaggatgttttatggacctggtggaccttatgccctatttgctggcaaggatgctagcagagccttagcgaagatgtcttttgaagagaaagatctgactggggatatttctggtctcggcccattcgagattgatgccttacaagactggga

SEQ ID NO: 160743 - DNA, 226 bp, Glycine max
ctgaaacaagaaccaaaatggagaattcgaccgaagaatcccatctccgatcggaaaactccgtcacttacgagtccccttaccctatctacggcatgtcattctccccctcccacccccaccgcctcgccctcggcagcttcatcgaagaatacaacaaccgcgtcgacatcctctctttccaccctgacaccctttcggtaactccccacccttctctctcctt

SEQ ID NO: 160744 - DNA, 264 bp, Glycine max
cacctccttaatatccatcactgcctagctagctagctcgcacatttaattatattacacatattttgctagccaagaaatactatcattgaatatatggggagtgtagattatgagtaccctttaggcatgaacaacgttgagagagtgcaccaagtggaggttccaccacctcaaccgtttttcaagtctcttaagtactctttgaaggagactttcttcccagatgaccctttgaggcagttcaagaacaagccagcttcc

SEQ ID NO: 160745 - DNA, 260 bp, Glycine max
attaattgcaagaatggcacttcgttgcttggtgatgtccctttctgttctcttcactcttggtcttgcgagagaaagccatgccagagacgaagatttttggcatgctgtttggccaaacactcccattccaagttcattgcgagatcttctaaagcctggccctgcaagtgttgaaatcgatgatcaccctatgcaaattgaagaaacacagtacccgaaaaccttcttctataaagaagaccttcatccaggcaaaa

SEQ ID NO: 160746 - DNA, 262 bp, Glycine max
gtgcagtatagaatgcacccccagattcgggatttcccttctaggtacttctatcagggacgccttactgatagtgaaagtgtggctaaattgcctgatgagccatactacaaggaccctttacttagaccatatatattctatgacatcagacatgggcgcgagtctcacagaggtggatcagtgtcttatcaaaacatacatgaagcacaattttgtctccgactgtatgagcatgttcagaaaacagtgaagtctttgg

SEQ ID NO: 160747 - DNA, 261 bp, Glycine max
cttgaactatcgtgtcttcttggctttctctgttcaggatcaacatggatattgtatcacgagctttgctatttccgttggctatacttgtgctcatattaagcacaccttgctcaggtgcttttgggaagagtggaactaatgtgaaaacagctatttttctgtcccccaagtttgaacttggaccaggatcggtagccaataaatatgattatgacgctgattttccaagaggtcatatagcacttaagagtttcaatg

SEQ ID NO: 160748 - DNA, 259 bp, Glycine max
agcaaataaagcacagaacagttgaagtgaatggcataaaaatgcatgttgcagagaaaggagagggtccagtggtgttgttcctccacggcttccctgagctctggtactcatggcgccatcagattctctctctcagctccctcggctaccgcgccgtcgctcccgatctccgtggctacggtgacaccgaagcaccaccttcaatcagcagctacaactgcttccacatagtgggtgatctcgttgcgcttattga

SEQ ID NO: 160749 - DNA, 258 bp, Glycine max
agcgaggtagggttttcgttgttcccccgtctttgaattcagttcgcgacgatggggtccatccccgatccaggcgagttgagcgagttgactcagccgagcttcgacgagttccagcgccaaacttccctcatgaccagctgcaccctcctctggaaggagctctccgaccacttctcctccctcgagcaagacctcaaccacaaatccgaagccctcaaacgcaagattcgcaccctcgacaacactacttccgac

SEQ ID NO: 160750 - DNA, 255 bp, Glycine max
tgcaaatccagcggtgtccaaaagaacttcttcaggtccagcagtgggttggcctccaattcgttccttcaggaagaacattgcaagtggaagcacttctaagttgccttctgggtcccaccagcaacatcaaaatgttgttccatacaaggttgctagccaaaaacctactgacaaatctggtaaaggcttgtttgtgaagatcaatatggatggtgtccccattgggagaaaagtggacatcaatgcttatga

SEQ ID NO: 160751 - DNA, 256 bp, Glycine max
aacttaagagatcaatatggccaccaccactacccagactccctctaatatctgttttttccttctgttgttgcttctagcacactttcatttgggcataagccaacttgagctgaattactactctaaaagctgcccaaaagctgaagagatcatcaaggaacaagtcacacaactatataaccagcatggaaacactgccgtttcgtgagtcagaaatctcttccacgattgcgtggttaagtcatgcgatgca

SEQ ID NO: 160752 - DNA, 256 bp, Glycine max
tgatgatggagatggcgaacgaaacgctgtcgttgcggcactcgcggcgttggtgctactcgcggcgagtgtggcggtggatgctcaggagaactcggacgtgaagacgctggtgaagtacaagcacgggaagaagtactgcgacaaaggatgggaatgtaagggctggtcaatttactgttgtaacctcaccattaccgattatttccagacctaccagttcgagaatctgttctccaagcggaactcgccggtg

SEQ ID NO: 160753 - DNA, 264 bp, Glycine max
tggggatgtaagatccgagtggaagtcctataagacgcgtcagaaggaacatgatgagaatgtgaagaaggttatcaaacgtctcaaacagaggaatccatcaaaagatggtcttgtctgtactgctcgtaagccctggattgctgttgggatgcgaaatgttgactataagagagcccgtcatttcgaagttgatttgtctgctttccggaatgtacttgagatcgacaaagaacggatgattgcaagagttgagcccctagt

SEQ ID NO: 160754 - DNA, 262 bp, Glycine max
tggaaaactccacagaatctttttctcctgtagcacttaaagaatttggagagaagagacaagggactgcaaatggctgtagactctttaggattcagttacatgacaattctaattctaatgaagaaagtctaccaatggtcactttgtcaggaaggatgggtgatgatggcccccttccatctttggatgctgagtctgaccagcattctgaaccatcaaatgttaatcgatctgatatcccttcggtaagctgtgatgc

SEQ ID NO: 160755 - DNA, 260 bp, Glycine max
agagagagaaactgagagaaattcgcaaaccctaatttcggaaagatcggcgatggctgcctccaaggatcgcgagaacttcgtctacatcgccaagctcgccgaacaggccgagcgatacgaagagatggtggaatcaatgaagaacgttgcgaatctcgacgttgaactgactgtggaggagcggaatttactttctgttgggtacaagaatgtgattggtgctcggagacatcgtggaggatcctgtcttccattga

SEQ ID NO: 160756 - DNA, 257 bp, Glycine max
ggacaagagcgtttacggcgggaagggtgttcttaacgccgttaggaacatcaacgaggtcttggctcccatactcgttggcgtcgacgttaggaatcaagctgatgttgatgctattatgcaggaaattgatggaactcctaacaaatcaaaactaggggctaatgcaatattgggagtttcgctgagtgtatgtagagctggtgcaggggcaaagggagtgcccttgtacaggcacatccaggagatttcaggaa

SEQ ID NO: 160757 - DNA, 255 bp, Glycine max
aaaaaaagttgtgctgtgccgcctcttccgtaggcagcagcaatggcctcaaatcccaaaactttgacctttgaggaggtagctaagcacaacaacaaaaaggattgctggattattatcaatggaaaggtgtatgatatcacaccatttttggatgagcatccaggaggtgatgaagttttgctgacgtcaacagggaaggatgccaccattgattttgaagatgtgggccacagtgattctgctatagaaatg

SEQ ID NO: 160758 - DNA, 256 bp, Glycine max
aatcacaccactcatcttacaatttacgagaagagttgtttactcaaccttatgatatagttaattggaataaagcgcgtcaccaatgtgtaaatcaagatctttactatccccatcctttgatacaagacctaatatgggatagtttatacatattcactgaaccgctacttactcgttggcctttcaacaagttgattagagaaaaggcccttcaagtaactatgaaacatattcattatgaagatgagactag

SEQ ID NO: 160759 - DNA, 114 bp, Glycine max
tgaaagttaagaagtagcaaagatgtttccattcgggcacaagggtcaaaagataaaggggactatggtggttatgcagaagaatgtgttggatatcaacagcatcaccagtgt

SEQ ID NO: 160760 - DNA, 261 bp, Glycine max
gaaacaaccttttccatgtgttcagttcattggaggggatggaggagatgttggattttacatgtttagatcagagaatgatgctaagaaaatgacagggtctagagagaccattcatgttccaaatgttgagcttctgagggtcacatatgaagtggagtctttgatgttcccttctaaccggaagatgatcaagtctttgtcattggaagcatcaggctcagatcggtttccagttattgatgttgcacgatgcacgcc

SEQ ID NO: 160761 - DNA, 264 bp, Glycine max
ggaaatcttcattctttgttccatcaacagatggctatgccaaagcaggtgtgaaatggataggctatgagcctcgttgcacaccatactggccgcatactcttctttgggctgtggcattctcattgcccgagtttgttgttgatgcttggcgcctgtggttttgcttgggtattcgaaagaggggacagcgcaaagagtccatgaagaaggaataaaaggatgcttggttctgatgtgtaggccaatagacgctactcatct

SEQ ID NO: 160762 - DNA, 259 bp, Glycine max
cactcttctccgccacttctgaatctattgaatcaacaatcatgtcggacgaagagcaccatttcgagtccaaggccgacgccggagcctccaaaacctaccctcaccaagccggtaccatccgcaagaacggctacatcgtcatcaaaggccgcccctgcaaggttgtggaagtttcgacttccaaaactggaaagcacggtcacgctaagtgtcactttgttggaattgatattttcactgccaagaaacttgagga

SEQ ID NO: 160763 - DNA, 258 bp, Glycine max
ctcagggaagcactcagtgatcctggtgattttctgctgagtgatttttcgaagtttgatcgcccacctctactgcatttagcattccaggctttggataagttcgttactgagatagatcgcttccctgttgctggttcagaggatgatgcacagaaacttatatctattgccagtaatattaatggtagcttaggtgatggaagattggaagatgtgaatccaaaacttctacagcaatttgccttaggcgctagg

SEQ ID NO: 160764 - DNA, 261 bp, Glycine max
gtgcagtatagaatgcacccccagattcgggatttcccttctaggtacttctatcacggacgccttactgctagtgaaagtgtggctaaattgcctgatgagccatactacaaggacccaagacttagaccatatatattctatgacatcagacatgggcgcgagtctcacagaggtggatcagtgtcttatcaaaacatacatgaagcacaattttgtctccgactgtatgagcatgttcagaaaacagtgaagtctttg

SEQ ID NO: 160765 - DNA, 255 bp, Glycine max
gctatagtaagctacacttatttgaggttggagaaatatggctaaagatgttgaggttcaagagcaaggaggagagtactctgcaaaagactaccatgaccctcctccagcacccttgttcgacccagaggagctcacacagtggtccttttatagagccctaatcgctgagttcatagcaacccttctcttcctttatgtcaccgtgctcaccattattggctacaaaaggcagactgatgccacgctaggtgg

SEQ ID NO: 160766 - DNA, 263 bp, Glycine max
gagaaagggagaaagggtgtgagaatggagagcaaagaggaagatgtaagggttggagcaactaagttctcagaaaggcaaccaattggtacagcagctcagggtgacaaggactacaaagaaccacccccagcacctttgtttgagcctggtgagctaaagtcatggtccttctacagagctggaattgctgagtttgtggccactttcttgttcctctacattaccatcttaactgtcatgggtgtcaacaggtcaccctc

SEQ ID NO: 160767 - DNA, 213 bp, Glycine max
gagagagagaaaatatagcacgccgaaaaacacgctcccacttgtaacttagtataacgacctccaacaactgatacatacaatctcctttccttcgtgttggacaacaacaatggcggcgaaatctagttcgagttcgacaacaaacgtggtgactctgaaggcggcgtgggttctcccgcagcgcacgcagaacatccgtgaggtgtacga

SEQ ID NO: 160768 - DNA, 251 bp, Glycine max
gtctgcttcaaatcttccggatggtgctgggcgttcttttgctacgtcattctctggttctattcagggattgcacaacattcatgggaactttaatgtacccaatatgcccagtacactcacatcaagaaactcaacaataaatagtgttccaactgggggaggagttcagcaaccttcggcaagcctttctagtggaagatttgcatcaaataatctacctgttgctctgtcacagctatctcatggaa

SEQ ID NO: 160769 - DNA, 252 bp, Glycine max
aaggaatcgacgcttcatctggtgcttcgtctccgcggagggatgcagatcttcgtgaagacgctcaccggaaaaacgattactctggaggtggagagttctgatacgatcgataacgtgaaggcaaagattcaggataaggaggggattccaccggatcagcagcgtcttatcttcgcagggaagcagcttgaggatggacgcacgcttgcagattataatattcagaaggagtccacgcttcaccttgtc

SEQ ID NO: 160770 - DNA, 259 bp, Glycine max
taaagacaaatgtgattggcacactgaacatgcttgggcttgcaaagcgagtaggagcaaggattttgcttacatcaacttcagaggtatatggggatcctcttgtgcatccccaacctgaaagttattggggcaatgttaaccctattggagttcgtagttgctatgatgaggggaaacgggtggccgagacattgatgtttgattaccataggcagcatgggattgaaatacgcattgcaagaatctttaacacata

SEQ ID NO: 160771 - DNA, 262 bp, Glycine max
gtagaatgtaaggaagttgtttctgaatatggagaattgttatgggatctcttggtatcaggggtacgacctgatgatgtatgctcacaggttggtttatgtttcaaaagggctaaatcagagaggttaggatttggtcttttaaatttgtaagaagcattttttatatatcaatgttttgtatgctctttttgtcatatttgattcagtatacttcgattgagtaatgatttaaagatgtttgatggatgcttaataattc

SEQ ID NO: 160772 - DNA, 261 bp, Glycine max
gcgttggtgcaaagcatccttcgtttcaatttctctctctcagcgctttctgcaatcgaacctttcatctccaaagggatccacaggccgaaggagaaatggggctgacattcacaaagcttttcagtcggcttttcgcgaagaaggaaatgcgaattctgatggttggtcttgatgctgctggtaagaccactatcctgtacaagctcaagctcggagagatcgttaccacaattcctaccatcgggttcaatgttgaga

SEQ ID NO: 160773 - DNA, 255 bp, Glycine max
gaggccttctgcaatccagcagaggggaattgttcctttctgcaatggtctggatgtgattcagcaggctcagtctggaactggaaagacagcaacgttctgttcaggaattttgcagcagcttgactatggattggttcagtgtcaggctttggttttggcaccaacaagggagcttgcacagcagattgagaaggttatgcgagctctaggtgattaccttggtgtcaaggttcatgcttgtgttggtgggac

SEQ ID NO: 160774 - DNA, 255 bp, Glycine max
attaggctttcacaacacctcagcgtcactgtaccagttggaaatggagacaataacagagaacggatcagatggtgtgagtttggcaagaaatacatccaacaacgcccgtcgagggttgccaatgatccaaacaaacatgaagccaacggattcggaattccaagtgtgccacgacgacagcaccccgccggtcagagcccaaaccattcacgagctccattctctgcagaagaaaaagtcaaccccttccac

SEQ ID NO: 160775 - DNA, 251 bp, Glycine max
gcagaaagcaagctcatcctagagttttaaaaatggcagcagcctcctccatggctctctcttccccatccttggctggcaaggccgtgaagctgggcccatcagcccccgaagtcgggagggtcagcatgaggaagaccgtcaccaagcaggcctcctccggaagcccatggtacggcccagaccgcgtcaagtacttgggcacattctctggcgagcccccgtcctacctcactggcgagttcccaggt

SEQ ID NO: 160776 - DNA, 249 bp, Glycine max
cgggcattgagaaggaaggatgctttcagaggcgaaaggccatggggagataccgtctgtgatccatggatctccgatcgggaaaccgtatccaagctccgcggctagtctgcgctctttggacttttaaaacttagcgaactgaaacatcttagtagctaaaggaagggaaaagcaaatacagaaaaaaagagtcaagcggcgagcaatggcgacatcgctggtgcgatcgggttttcttcgaagcgc

SEQ ID NO: 160777 - DNA, 253 bp, Glycine max
attcactacttatgcggagaagaggattgtggaggctgtccaaggagaacaaagagccgcgttgaatattggaatcggttggaggggtttgaatgaggacgttgagaggttcaaggacaacttggagtttacaaagctcaaaaataatcaggaaggaattgaccctgataatgtctattctcaggttccctatgagaaaggttttcagttcttatggcgcattgagcgacaggttgggagacctgcatttgat

SEQ ID NO: 160778 - DNA, 250 bp, Glycine max
cctctttctagctatttccctctcttaacacaattaacaaagatatatcatatcatatcaactccaaatgatgaaaaatattgggttgtttcttcttgtggtggtggctacttttgtggtggcagccacagctggtagcttttaccaagactttgaaataacatggggtggtgagcgtgccaaaatctatgaaaatggaaatcttctcaccctctccctagacagagcctctggctctggctttcgttcc

SEQ ID NO: 160779 - DNA, 249 bp, Glycine max
ggaacctcctctggttacagcaaacactgttctttcaatcttagccatggattacccggttgataagatatcatgctacatttctgatgatggagcttcaatgtgtacatttgagtccttatcagaaactgcagagtttgctaggaagtgggtaccgttttgtaagaaattttccatagaacctcgggatcttgagatgtacttcagtgagaagattgactacctaaaggacaaagtgcaacccacctt

SEQ ID NO: 160780 - DNA, 247 bp, Glycine max
ggaactttgagttgtttttctacacccaccaattatatgtagtctttattgtctttttggccctgcatgttggtgactttgttttcactatggctgctgggggaatatttctctttgtgcttgatcgatttctgaggttctgccaatcacgaaggacagttaatgtgatctcatctagatgccttccatgtggcactgtggaattggttctgtctaaacctcaaagtttgagatacaatgcactaag

SEQ ID NO: 160781 - DNA, 247 bp, Glycine max
gccgaaccttggctgattacaacatccaaaaagaatctaccctccacttggtgctccgtctgcgcggtggtatgcaaatctttgtgaagacccttactgggaagaccattactttggaggtagagagctcagacacaattgacaatgtgaaggcaaagatccaagacaaggagggtatcccaccagaccaacagaggctcatttttgctggcaaacagcttgaagatggccgaaccttggctgatta

SEQ ID NO: 160782 - DNA, 247 bp, Glycine max
atcagaaagggctttctcataaacgagttagaaaggccaaggagaagaagtcatcagatgttgatagggtccctgaaaagaatatcaaatgcttatcttgtggtgcaaatgtcttgattactcttggtgataagggttggagagaatccggggcccatgttgtactagagctgtttgaccacaatgagtggagactttctgtgaaacttctaggaattactaggtattcatacaaagcacatcagtt

SEQ ID NO: 160783 - DNA, 248 bp, Glycine max
caataattatcaaacctaaccagtaaaaatggtgaccgtggaggaaatccgcaacgctcagcgttcccatggacccgccaccatcttggccttcggcaccgccacgccgtccaactgcgtctcccaagccgattaccctgactactacttccgcattaccaacaaactacacatgactgatctcaaagaaaagttcaagcgcatgtgtgaaaagtccatgataaagaagcgatacatgcacctgacgg

SEQ ID NO: 160784 - DNA, 261 bp, Glycine max
ggaacagagaacaacagttccatctatggttcgaccccaccaaggacttccacacatactccgtccacatggaatcctgcaagcatcatattctctgtggacgggaccccaataagggagttcaagaatttggagacaaaaggggttccattcccaaagagccaacccatgagaatatactctagtctttggaacgctgaggattgggccacaaggggtgggcttgtgaaaacggattggagcaaggccccattcacagcc

SEQ ID NO: 160785 - DNA, 260 bp, Glycine max
atcttaaggaaattgcggagaagaatcttactacagcggttgtggattgttgcattggaatcccggtttattttactgatctgcagagaagggcggtgctggatgcggccacgattgctggtctgcacccacttcggttgattcaggaaatgactgccactgccttggcctatgggatttataaaacggaccttccagaaaacgatcagctcaatgttgcgtttgttgatgttgggcatgctagcatgcaagtgtgcatt

SEQ ID NO: 160786 - DNA, 266 bp, Glycine max
ccaccatttaagcctatgaagaaatctcaggttgctaagcttactaaagagcagcagaaagcatattttgaggagtacgattatcgggtgaaacttctacagaaaaagcaatggagagaggagttgagaaggatgagagagatgaagaaaaaaggtaacactaaagaaaatgactatggttacacggaagaagatgatcaagagaatggaagtccagcagcagtgccagttccattgcctgatatggccctgccaccatcctttga

SEQ ID NO: 160787 - DNA, 257 bp, Glycine max
tacagagccgccatagctgagttcatagcaacactcctttttctttacatcaccgtgttgaccattattggctacaagagacagagtgacaccaaaatccccggtaacaccgaatgtgacggcgttggcattttgggcatcgcttgggccttcggtggcatgatcttcatccttgtttactgcactgccggaatctctgggggacacatcaaccctgcggtgacattcgggttgttccttggacgcaaggtgtcttt

SEQ ID NO: 160788 - DNA, 256 bp, Glycine max
cagaaatgcttggaaaccccgtgagcctgagaggcgccaccaggtctgctccatcaccgtctacacctgttactttcaagaccgttgcgcttttctccaagaagaaggcagcaccacctcctccaaagaaaaagcctgctgctgtatcccccgccaatgaggaactcgccaagtggtatggtcctgacagaaggatcttcttgcctgagggtctcttggaccgatcagagatccccgagtacttgaccggagaagt

SEQ ID NO: 160789 - DNA, 256 bp, Glycine max
gtttcctctgcgtcgatggcttcgaattcgatcgacggcgacgccgttacggggtcgggactgtgcataaacgacgtgttaagggacgacgagctgcgttccatatctggggcgagtggagagcgagaaggacaaggaaacgttcgggttggtctgcaagcgatggcttcggttgcagagcacggaaaggaagaaactcgccgcacgtgcgggtccccacatgctccgaaaaatggccgataggttcacacgctta

SEQ ID NO: 160790 - DNA, 259 bp, Glycine max
aagaagaggagatgaatgggtcatagttaagcctgtcccaaatgcattcgtcatcaacattggtgaccaaattcaggtgctgagcaatgcaatatacaagagtgtagagcacagggtgattgtgaactcaaacaaagatcgtgtgtccttggcattgttctataatccgagaagtgatttactcattcaacctgccaaggagcttgtgacagaggagaggccagccttgtactcaccaatgacctatgatgaatacaga

SEQ ID NO: 160791 - DNA, 258 bp, Glycine max
agcattttcagaggaaaatggcgggtacggtttcgacttgtttcttcttcgtgtttcttctttctctccttcttccttttcagatctccgctgaggaatcctcggagaaggagttcgtactcacattggatcactctaactttcacgacactgtcagcaagcacgatttcatcgtcgtcgagttctacgccccatggtgtggtcactgtaagtggcttgctccggagtatgagaaagctgcttctatcttgagtagtc

SEQ ID NO: 160792 - DNA, 256 bp, Glycine max
ttcgatcccgctggtgctcacttcgatcccgttggcgctctcttcgattcagtttagcaggttgtgctgaggcttaattgacccttgaagcatatttcggagttttatcagagaacaaatgggatatattggggctcatggtgttgcagctctgcacagatataaatatagtggagtagatcattcctacgtggccaaatatgtactacaacccttttggagtcgctttgttaattttttccccctatggatgcct

SEQ ID NO: 160793 - DNA, 256 bp, Glycine max
ggagtttctgaaagagaacccgaacatgtgcgagtacatggcgccatcgctggacgtgagacaagacgtagtggtgatggaggtgccgaagctgggaaaacaagccgcaacgaaagcgattaaggagtggggtcaaccaaagtcaaagatcacacaccttgtgttctgcaccacttcaggcgtggacatgcccggagcagattaccagctcacgaagcttctcggcctgaggccctccgtgaagcgcctcatgatg

SEQ ID NO: 160794 - DNA, 251 bp, Glycine max
tgagaggtggacatcaagcacgggtaggttcactgtcttggaacaatcatattctcacaacaggagggatggatggtagaattgttaacaatgatgttagagtgagacatcatattggtgaatcttataggggacatcagcaggaggtttgtgggctcaggtggtctccctccggacaacaattggcaagtggaggcaacgataatgttattcacatatgggacagggctatggtttcctcaaattcaccg

SEQ ID NO: 160795 - DNA, 253 bp, Glycine max
cacttttctactttgagtcttcttgatccttctttttctccttgaactcaaacatggcagatgaggtggttctgctagatttctggccaagtccatttgggatgagggtcaggattgcacttgctgaaaagggtatcaaatatgagtacaaagaagaggacttgaggaacaagagtcctcttctcctccaaatgaacccggttcacaagaagattccggttctcatccacaatggcaaacccatttgtgaatc

SEQ ID NO: 160796 - DNA, 258 bp, Glycine max
ctccaccagaaagaaaatatagtgtctggattggaggatcaatccttgcatccctcagcaccttccaacagatgtggatttctaaaggtgaatatgatgagtctggcccatccattgtccacaggaagtgcttctaacttctaagtacaaaatatgcttcaatggtgaaatatttttcgcaccagttgtttttatgggtctgtgtcatgtcatgttaacgatattgccatggataagaggtgaggaagtatcattaaa

SEQ ID NO: 160797 - DNA, 258 bp, Glycine max
ggaaagtcttacccaaccgtgagcgctgattaccagaaggccgttgagaaggcgaagaagaagctcagaggcttcatcgctgagaagagatgcgctcctctaatgctccgtttggcatggcactctgctggaacttacgacgtgagctcgaagaccggtggtcccttcggaaccataaagcacccctccgaactcgctcacggcgctaacaacggtcttgacatcgctgttaggcttttggagccactcaaagcggag

SEQ ID NO: 160798 - DNA, 255 bp, Glycine max
gatttgtcgttggattgagttgcgcctttactagcgagaaagttattctggaagctgtcatattgactgctgtggtggtgattggtctgactctatacacattttgggctgcaaggagaggccatgatttcaacttccttggccccttcttgtttggtgctgtgctagttctcatggtctttgctctgattcaggttctgtttccactgggtaaattgtccgtgatgatctatggttgcttggcagccattatat

SEQ ID NO: 160799 - DNA, 203 bp, Glycine max
agaaggcccagatgaagacgatgtatggcctcatctcgacctacaagttgaaccgccaattcagatggatatcctctcagatgaaccgcgtgaggaacggagagctctaccgtgtcatctgtgacacaaggggtgcctttgtgcagcctgcagtttatgaggcctttgggttgactgtggttgaggccatgacttatgggtta

SEQ ID NO: 160800 - DNA, 256 bp, Glycine max
cagaaacacaaaatggctgagcagaggcaaaacaacgtccacgttcttgttctgccataccctgcccaaggccacatcaaccccctcctccaattcgcaaaaagattagcttcaaagggcgttaaagccacagttgccaccactcactacactgcccactccatcaattctcccaacatcacgacctatgccatctccgatggcttcgaccaagcgggcttcgcccaaacaaacaacaacatgcagctcttcctgg

SEQ ID NO: 160801 - DNA, 253 bp, Glycine max
ctcataacaggagcagcaggcttcattgcatcccatgtatgcaacaggatagtgcgaaactaccctgactacaaaatcatagtccttgacaagctcgattactgctcaaatctgaagaatctcattccctcgcgttcatctccgaatttcaagttcatcaagggagacattggaagtgctgatttagtaaactacatcctcctcacagagtccattgacaccatcatgcactttgcagcacaaacccatgtag

SEQ ID NO: 160802 - DNA, 248 bp, Glycine max
ccgaaacaggtttcctataaaatcccgcatgtgccgtagcagttgagctgaaaccgagaagaagaagatggagatgtatcagatctggagcaggagaatagcgttgggagcgttcgcgtttgttctgcttttcctatcggcctcagcagacgacgtcgttgtgctctctgaagataacttcgagaaggaagttggtcaggacagaggagctctcgttgagttctatgctccttggtgtggacactgca

SEQ ID NO: 160803 - DNA, 254 bp, Glycine max
ttctcaaatactcaactcattagcccttatcttgcccttattcctcttcatgattctgatcctaaaactagggagaaaactcaagagaactgaattgtctctaaacataccccgaggaccatggaaactgcctattataggaaatttacaccagcttgttacatcgacaccacaccgaaaattaagagacctggccaaaatatacggacccatgatgcatctccaacttggggagatcttcacaatcgttgttt

SEQ ID NO: 160804 - DNA, 251 bp, Glycine max
aagcaataagatgaaaatgaaagtgcttgttttgtttgttgctacagttttggtagcatatgaatgccatggctcagactaccagaagttccctctccaaatgaaaactgggtttggtgggcaatacagcaatgaggtggcatgtgccagttggaggcttggcgtggaagcaaacaacgtagtcaagtggcaaactgttcctgcagcttgcggagagtacatagctgactacgttctaggagaccaatata

SEQ ID NO: 160805 - DNA, 256 bp, Glycine max
caatgcagagatccttttccgtgaggatgctacagtggatgatctcatagatgtcattgaaggaaaccgaaaatacatgaagtgtgtatatgtctacaacaagatagatgttattggtattgatgatgtggacagattagcccgtcaaccaaattctgttgtcattagctgcaatttgaagctgaacttagacagactgcttgcaaggatgtgggatgaaatgggtctggttagagtttacacaaaaccacaaggc

SEQ ID NO: 160806 - DNA, 249 bp, Glycine max
agtaaacctgctgatgaacttataacacttaacccaacaagtgaatatgcacctggtttggaagacaccctcattctcaccatgaagggtattgctgctggcttgcaaaacactggctaaatctgagtttttgtcttctctttggttccacttttattttctgtttcctttatcagaaataacgagtttagctgcatgcaccaaagggtgtttttccctcccctgtacccatgtttccattataagata

SEQ ID NO: 160807 - DNA, 248 bp, Glycine max
gtcatctttgtcatattccaaaattaagcttgcattattcaccagaatggctaattcatatgaaaacaacttcccccctcagaagcaagacactcagcctggcaaagagtacctcatgaatccaccaccccaatacaagcagctcccaatacaagccatcaaataaacttcagggaaagatagctgtagtaaccgggggtgattctggaattggacgagccgtgtgcaacttgttttcattagaaggt

SEQ ID NO: 160808 - DNA, 251 bp, Glycine max
ctacgattcgttttgccccttttgttgccctaatttcaaccatgcctcgccgtagctccggtggaagatctgcccgtcctgctcctcgggcagctcctcgtcctgctccagttcaccatgctcctcctccagcccctgctcagagtggtggtggatctatgcttggtggcattggttcaaccatagctcaaggtatggcttttggcaccggaagtgcagtggcacacagggctgtggatgcagtcatgggt

SEQ ID NO: 160809 - DNA, 247 bp, Glycine max
ggagaagagagggtatgagctagttgaggagggtgatgatgtacagcaccatcttacacagacaaagaaacctaaactacccgttttagccagtgtgattgtggaagctttaaaggtggatagtatgcagagactttgctcatctttggaaccccttctcagaaaaattgtcagtgaagaagtggagcgtgctttggcaaaactcggccatgctaaactggctgaaagatctccaccaccaagatta

SEQ ID NO: 160810 - DNA, 247 bp, Glycine max
tttcgatgctcagtcatctcttttaccattctcttctctcttgctcttgcaggagagagccatgtccatgcatcgctacctgaggaagattattgggaagctgtttggccaaacactcccattcccactgcactgcgagagcttctaaagcctctccctgcaggtgttgaaatcgatgaactccctaagcaaattgatgatacacagtacccaaaaacattcttctataaagaagaccttcatccag

SEQ ID NO: 160811 - DNA, 244 bp, Glycine max
agagttggttaaaagtaggaaatgaaagtgagggagagagaatggaggaagaggcagggatctaccgtctagcggaggacagcctccggcagatattctgcaggctgccactgagggaaataatgatatgccgctcagtgtcaaaattcttcctgcagctgctctcaacaccttcgttcctccgggtcctctccagctcccatccgcccctccagctcctgggcctccgcaaccgccaccacac

SEQ ID NO: 160812 - DNA, 267 bp, Glycine max
ctttatctctgttcgacgaaattgcgatcttggtcatcgagaaggactccacgcagatgtccgtgctagctctctatggttcaggtcttcgtgaagctcgtgaactaccagcacctcatgcccacgcgctacacgctcgacgtggatctaaaggacgctgttacccccgatgttctagccaccaaggacaagaaggttaccgctctcaaggagaccaagaagcgcctcgaggagaggttcaagaccggcaagaataggtggttcttc

SEQ ID NO: 160813 - DNA, 245 bp, Glycine max
ctcatcaaaatgaatctgtaccactcctccaccaccaccaccacctacaccatcttcaccgtcatattcctcctccttgcaatattattcactctcacaccccacaaggccaacggtgccacgtgtcaccctgaggaagaagcgggcctgttgggcttcaaatccggtatccgatccgacccgtccggcctgctcagtaactggatatcgggtacggactgctgcacatggaccggagtagaatg

SEQ ID NO: 160814 - DNA, 250 bp, Glycine max
gagtttatgtggttgcgcctctgcctgtaagagtgaaaaaaccttctcttttccttctctcaagtctcaagagatttcatcatggctccaaagaaggacaaggctccaccaccttcctccaagcccgccaaatctggcggtggcaagcagaagaagaagaagtggagcaagggaaagcaaaaggagaaggtgaataacatggtgctgtttgatcagggcacctatgataagctcctttctgaagctccca

SEQ ID NO: 160815 - DNA, 243 bp, Glycine max
aaaaaatagcaacaaaaacaagaaaaaaggttacctctttcaattttatcccttgttgtgagcttaattcaatttctgctcacacataatggcttgcacgctcgctgattcattactcctattcaagggttcttatcagaaaccagttctgaggagagacattgctgcccggtactccccgggtatatttagtctaaacagtaatgggcttatccagaaaaggttcaggcgtcaaaggaattt

SEQ ID NO: 160816 - DNA, 246 bp, Glycine max
cgggtcgacctggtggactcgactcgtttaaaaactactccgagggagagaatattccggtgaacgatttccggcgatatagtcgcgactccgccgggcataaagatggttttctgagctacggcacgaacggcaacgtggtgcagcagagcttccatacctacgccgccggagccaccggcggcaccggcgagttcaagcactacgccgacgaaaccaacgtcccgaacctcggcttcacctcct

SEQ ID NO: 160817 - DNA, 265 bp, Glycine max
taacttcaggaaaacaacactgaagcttgctcctattgcatacttcagtatgtaccgtggatcaatatctcatttaccgactagctacatgtggagtcctcatgttgttcccaaaccaagtgactggggccctttagttgatgtgttggttattgtttcttgagccttgcatcaaagtatcaaccccaggaagattttgtccaatggattcaaaaaggaccacctcctttatattttgggtttgggagcatcctcttgaagatcc

SEQ ID NO: 160818 - DNA, 261 bp, Glycine max
tatcaactctttcaaaagggagaagaaaaggaaaggaaacaaaacgcacaaaggattattatagcaatggcagaacaaaaccaaaaccagacaactgaagctggaaggcaccaagaggttggccacaagagccttctccaggtgatgctctttaccagtatattctggagaccagtgtctacccaagagaacctgaatccatgaaagaactgagagagttgacagcaaaacacccatggaacatcatgacaacctctgcag

SEQ ID NO: 160819 - DNA, 259 bp, Glycine max
cattttcttcccaaccactactactcgctcactgcagatctcaattgcatcgctgtccatggctaccatcgttagcatcaaggcccgccagatcttcgacagtcgtggcaatccaactgtcgaggtggatttgacttgctcgatggtacatttgccagagctgctgttccaagtggtgcatccactgggatttatgaggcccttgaattgagagatggaggatctgactaccttggaaagggtgtatcaaaggctgttg

SEQ ID NO: 160820 - DNA, 261 bp, Glycine max
ggatatgttccgtctaatactgaaaagtatccccttggaggcatcatctctgccattgagaatgcttttcacgcatctcctcaaatagtttgctcgaaagattctgttgaggaacttcgcctatgcttttataaggacttcagccacgagattgtgctcttggatctgacattaaaatcaacatggttacttctaaaaaatcttgtcccaaatatgttagcttgccggagccggtatcagtgagtaagacaggcacaatgg

SEQ ID NO: 160821 - DNA, 264 bp, Glycine max
aaagatgttgctggttgtgatgaggcgaacatagaaattatggagtttgtccacttcctcaagaacccaaagaaatatgaagaactcggtgcaaagattccaaaaggtgctctcttggccggtcctccaggcacaggaaaaaccttttagcaaaagctacagcaggggagtctggtgtaccctttctttgtttatctggttctgatttcatggaaatgtttgttggtgttggaccatctagggtgagaaacttgtttcaggaag

SEQ ID NO: 160822 - DNA, 262 bp, Glycine max
agaacatcgaagcatctaggatgacactgcaccgctttggcaacacctctagcagcagcatttggtatgagttggcttacatggaagcaaaagagagtgtgagaagaggagaccgcgtttggcaactcgcatttggctcagcttcaagtgcaacagcgtggtttggcgcgccatgcgccgagttaccaagccttctaggaacccttggcttgattgcatcaacagatatcctgcacctctcaacaactgaagcaaaattcta

SEQ ID NO: 160823 - DNA, 259 bp, Glycine max
ggcattgttgggtatatttgcttagccttattgttctttccggtcacgagagggtcttcaattttgcggttcattggcttaacttcagagggaagcatcaagtatcatatctggctaggacacattgcaatgaccctctcacagcccatggtctaggttatattattttttggggaaagacacatcaaatcttggagatattcaaatggaacaaaattggcgtctcaaatgtggctggagctgtttctctgctagctgg

SEQ ID NO: 160824 - DNA, 258 bp, Glycine max
agtttttcttgtcagctcgctgcaatatggaccagcaaaatgcatctcattgctttgggcttttcttagcagtgcaattcaagggatcagtatctcttcatgttgactatgaatttgctgctagatcaaaatcgactgagagtatataagcaggtgcaagggagattatactttcacggcgggcaaggctgtagggtataggaacctgtttggtattccatggactgcattcatagcagacgatagccatttattcat

SEQ ID NO: 160825 - DNA, 177 bp, Glycine max
ccagagaggttcacggcttcactttcacatcaccaaacacctctctcaaggctagctagcttcaatctctttccttctgcttctttttcctctcctcactgcatttattttcttttggacttttccactcatgcaccctcattcccctctatttaaccctctctatcttcttctcct

SEQ ID NO: 160826 - DNA, 264 bp, Glycine max
cagttccctacctctcctttcaagatgcagatcttcgtcaagaccctcaccggaaagaccatcacccttgaggtggaaagctctgacaccatcgacaacgtcaaggccaagatccaggacaaggaaggaattcccccggatcagaacgtctcatcttcgccggaaagcagctcgaggacggccgtaccctcgccgactacaacatccagaaggagtcaacccttcaccttgtccttcgtctccgtggtggcatgcagatcttcg

SEQ ID NO: 160827 - DNA, 270 bp, Glycine max
ggcattgttccaaatgatcacttctgctgttctcttctaaatgttctgactcaaacaccaaaagaagagcttggtaagctaacagattgcattgagaaggctaatacaaagcttgggactgtggtaagatatttgatggaagagctgagggtgatgaagcctttagaaaggaagcattagaacttttaaattcaattgatgctgaagtaaagaagcctttatgcaattgtctaattgatctttgtgtcaagctgaatgtgcctgaaagag

SEQ ID NO: 160828 - DNA, 260 bp, Glycine max
ttccggtttctctctctctctctctctcatggcgaatctagcacacttctccaagagagccctaagaagcgcacacgcgctcgcaaggcaccacgtgcagccgcagctgctggcagcggaacgcgcttttgcgacggagcggcgaaatcgatatccccgtcggcggatcgcgtgaagtgggactaccgagggcagaggaagataatcccgttaggcagtggctccccaaagtggccgtggatgcttacgtagcacccaac

SEQ ID NO: 160829 - DNA, 255 bp, Glycine max
atcttgccaagaaaatctggtgctttggccctgagacccttggacccaacatggtggttgatatgtgcaagggagtccagtatttgaatgaaatcaaggattctgtggttgctggattccagtgggcatcaaaagaggtgctttggctgaagaaaacatgagagccatctgctttgaagtatgtgatgttgtgctgcacgctgatgctatccacagaggaggtggtcaaatcattcctactgccaggagagtctt

SEQ ID NO: 160830 - DNA, 258 bp, Glycine max
gagacggaatttggacatggcaccgtataaaccgtctgtttaattggcttcctctagcagccctaattgagaaaaaaattatttgcatgcatgggggtattggtcgttcaataaatcatgtggaacaaattgagaatatcagcgtccaattacgatggaagcaggatcaattgtgcttatggatctattatggtctgatcctacagagaatgacagtgttgaaggactgcgaccaaatgctaggggtccaggattagt

SEQ ID NO: 160831 - DNA, 263 bp, Glycine max
cagaaattaagctagagcttcatagtttcttcttcttttctcaccttccttctctcccttcagacaaagggacaaaaaatcagtgtgtgagagagagagagagaaattccaaaaccatgtcccacagtcatctaagtttcgctttgggattctaggtaacattgcctccttcgtgtgctttctggcaccactaccaacattttatagagtttgtaagaagaaatcaaccgaagggttccaatcaattccatatgtggctgcac

SEQ ID NO: 160832 - DNA, 263 bp, Glycine max
gaaggggtcaatttcagtgtattgcatcaaccaccctagatgaatacagactttattttgagaaagacacggcattggctcgacggtttcaacctgtttgggttgatgagccgagtgaggatgacgcaatcaagatacttatggtctacgtgagaaatatgaggcacatcacaaatgcagatacactgcagaggctataaaggctgcagttgattgtcagcgagatacatagtgataggtaactacctgataaagctattgac

SEQ ID NO: 160833 - DNA, 258 bp, Glycine max
ccctaaaaagcgcaagaaaacaaaatccccaaaatatctctcgctctgaaaccgccatggatttgcagcagagcgagttcgatcgcctcctgttcttcgagcacgctcgtaaggccgcagaagccgaatacgagaaaaccctctcgacgctgataacttaacaagatggggtggagctttattagagttgtctcagtttcagagttttcctgaatcgaagaaaatgacccaagaggctgtttcaaagctagaggaggc

SEQ ID NO: 160834 - DNA, 257 bp, Glycine max
cttttcttctctttacccgttgaaacatccttagttttcagattctgaaatcttgattctgaattcatcacaatgaattcgtcaactacagtgaggaagttgcaggtggtgtcccctgttcctgcggacatagacacgcaaactccgttgaaccagttcatatctcccagattgccaaagagctcaaccttagtcccaatcactatgacctttacggtaaatacaaggctaaggttttgttgtcggttcttgatgag

SEQ ID NO: 160835 - DNA, 260 bp, Glycine max
ctcgagccgtttttctctctcccttagtcaaagggattcatcgttcttcttcccaggttatttagaaaagcaaaatggtgaagatttgctgcattggtgctggatatgtggggggtcctactatggcagtcattgcactaagtgcccatccattgaagtcgctgttgttgatatctctaaatcccgcattgcagcctggaacagcgaccagcttcctatctatgaacctggccttgatggtgttgtgaagcaatgccgtg

SEQ ID NO: 160836 - DNA, 265 bp, Glycine max
aaacacaacaacactctctcttctcgctcttggcttttcgctcttcactcactctcattcattcatttccaccgttcatggatcctgtaagcgtgtggggtaacacgcccttggcgacggtggatcccgagatccatgactcatcgagaaggagaagcgccgtcaatgccgcggaatcgagctcatcgcctccgagaacttcacctccttcgccgtcatcgaggccctcggcagcgctctcacgaacaaatactccgagggcatg

SEQ ID NO: 160837 - DNA, 256 bp, Glycine max
gtttcaccgcacgaatatcttgttgtttggagcgatccgagaaaaactctgtaaacatgttggtttaccaggacctccttacaggtgatgagcttctctctgactccttccgttacaaggaaattgagaatggatgctgtgggaagttgaggggaagtgggttgttaaaggagcagttgatgtagacattggtgcaaacccttctgctgagggtggaggagaagatgagggagttgatgatgcagctgttaaggtt

SEQ ID NO: 160838 - DNA, 256 bp, Glycine max
atcttcttcaattccagcaaggatgtcacagcaaggcgaatcatcggacccgaaatcggggaagaaggacttctcgaccgcgattctggaacgtaaaaagtcgccgaaccggcttgttgtggatgaggctgtcacgacgacaactccgtagtgaccatgcacccccaaaccatggaaaagcttcagcttttccgaggggacactatccttatcaagggtaagaaacgaaaggatactatttgcatagctcttgctg

SEQ ID NO: 160839 - DNA, 253 bp, Glycine max
aattgattcatgggaatttggtaggattgaagacaaagctgtttgttatattcaattttgtttcattggatcttattcttgcatgatgtgctataggtaatgagttgagtgggaagggcattggggctagagtggtgctgcacagtatgggaaagacttgataaagcttaaagaaattttacgcacattatacaaaaactccacgttcaaaccttcccttgtagcacctggaggattctataataaggagtgg

SEQ ID NO: 160840 - DNA, 249 bp, Glycine max
gatcgagataactagaaacagtgtgatgaaaatgaaggtccttgttttcttcgttgctacaattttggtagcatggcaatgccatgcgtacgatatgttccctctccgaatgaacactggctatggtgcccgactccggaggtgaaatgcgcaagttggaggcttgctgtggaagcacacaacatctttggctttgagaccattcctgaagagtgcgttgaagcaacaaaggaatacatccatggcgaa

SEQ ID NO: 160841 - DNA, 253 bp, Glycine max
gaaatttcccgaaggaggaggaggttctgatcttctttcttttttgtctggttccctttcttccttcaaccaatttcgagatccgaaaccggcatcagatccgatccgaaatgtacggattcgaagctctcacttcaacatccacggcggcttcctagaggccatcgtccgcggccaccgcgccggcctcctcaccaccgccgattacaacaacctctgccaatgcgaaaccctcgacgacatcaagatgcac

SEQ ID NO: 160842 - DNA, 253 bp, Glycine max
cgccaatttcggcgacttcgaggaggacccggaggcgtacaagcagcccgaggtggacgagaaggacgtcgtcattttgaaggagaagaacttcaccgacaccgtcaagagcaaccgcttcgtaatggtcgagtctacgcgccctggtgcggccactgccaggccctcgcccccgaatacgccgccgccgcaacggagctcaagggcgaagacgtaattttggcgaaagtggatgccacggaagagaatgaat

SEQ ID NO: 160843 - DNA, 257 bp, Glycine max
gaagatactgaggatgcttgcaaatacataagttggacgatacttgatgatcgtcccattcgagttgattttgattggggatttcaggaaggaagacaatggggtcgtgggaggagcggtggccaggtgcgggatagtaccgcactagattatgatcctggtagaggtggctacgggaagctggttcagaaagagttagaagtacaaaggcagcttgtagattatggtgctggttctttgggttcttttccaccagt

SEQ ID NO: 160844 - DNA, 258 bp, Glycine max
gcaaaattaagcacaaaagcccaaccctctctctcgctgctggtctcccccatttggcattcgcagatcgaatacgagtaatttcactgaatcttattgaagatgtttctcacaagatctgagtatgatcgatgtgtaacaccttttctcctgaaggccgtttatttcaggttgaatatgcaatcgaagccatcaagctgggatcaactgcgattggattgaagacgaaagagggtgttgtccttgcagttgaaaagc

SEQ ID NO: 160845 - DNA, 251 bp, Glycine max
agggtttttgtgatctgcaagctacgatgggtaagggaacggggagtttcggtaagagaaggaacaagacccacaccctctgtgtgaggtgtggccgccgcagtttccacctccagaagagtcgttgcgcccgtgcgctttccccgctgcgcgcaccaggaaatataactggagcgtgaaggccattaggagaaagaccaccggaactggaaggatgaggtacttgcgtaacgtgccccgtagatttaaga

SEQ ID NO: 160846 - DNA, 254 bp, Glycine max
gtcgacaaatttgactttgtcgtgtgcatgagtgcatacgttggcgtggtctttggcagtgttgaaattggcttagtcatagctattgcgatatctgtacttcgggtacttctatttattgcaaggccaaggcatttgttttgggaaacattccaaattctgtgatatacagaaatgttgagcactatccaaatgcaaaacatgttcctggaatgctaattctagagattgatgcaccaatttactttgccaat

SEQ ID NO: 160847 - DNA, 252 bp, Glycine max
cgctctttcagctttgactttggtggaaactaaagactagtcaaaatggtgaagttcacagctgaagagctgcgtcgcattatggactataagcataatatccgtaatatgtctgtcattgctcatgttgatccggaaaatcaaccctgactgattctcttgtggctgctgctggtattattgctcaagaagttgcaggtgatgtccgtatgactgatacccgtgcagatgaagctgagcgtggtattacaa

SEQ ID NO: 160848 - DNA, 256 bp, Glycine max
tgatgcacccgttatgttggaccgtatattgcgcctattggcttgctacaatatcctctctttttctctccgcactctccctgatggcaaggttgagaggctctatggtctcgcccccgttgccaagtacttggtaagaacgaagatggtgtctccattgctgcgctcaacctcatgaaccaggacaaagtcctcatggaaagctggtactatttgaaagatgcagtccttgaaggaggcattccatttaacaagg

SEQ ID NO: 160849 - DNA, 259 bp, Glycine max
acagattgaaaataaagcaaaggatgctactgaatgtttggtacaagaaggagcacagtttgctactaggttgactggtattaaagagaatactaaatttcaaaagaaattacagaacaatgagcagatgtcaggtcgaagcatctagtacatggagcaaagcagcatcacaatgtgaaaaatgtatatgtatggcatgcactagctggttattggggtggagtgaagccagcagcaaccggcatggaacattatgaca

SEQ ID NO: 160850 - DNA, 256 bp, Glycine max
aaacacgccgacatgtctaattggtatctcatggggagcagtgcgggggccacaatcgcctacttcgcgggtctacgcgcgaccgacacggcgagcgatctctcgccgttgaagatcagagggctgatattgcggcaggtgttttccggtgggacccagaggagcaaatccgaggttaggctggagaacgacgaggttcttccgctgtgtgtgacggatttgttgtgggagctggcgctgccggttggcgttgacc

SEQ ID NO: 160851 - DNA, 257 bp, Glycine max
gttgttcccatcttctctctcgtaccaatcaaatcacacttttgtgttgtgttgggaaaccctaaaccccgttttcggtgagatcgagatcgatcgaacatggatgaggagtacgatgtgatcgtgttgggcacgggtctcaaggagtgcattctcagcggtcttctctccgtcgatggcctcaaggttctgcatatggataggaacgactattacggaggagaatccacttcgctcaatcttattcagctttggaa

SEQ ID NO: 160852 - DNA, 250 bp, Glycine max
ggccaaactgatgctgagggtggttttgattccaatgctgtggcaactgcaaacatcttggagagttcaacgcctgtcattgatgggaaacagtactacagtttgactgtgttgacaaggacagctgatggagatgaaggtggcaagcaccagctgattgcagcaactgtgaaagatggcaaactatacatttgcaaggctcaagctggagacaagagatggtttaagggagcaagaagatttgtggaga

SEQ ID NO: 160853 - DNA, 252 bp, Glycine max
gcgcactattcaatttgttgactggtgccccaccgggttcaagtgtggaatcaattaccagcctccgactgttgttccaggtggtgatcttgccaaggttcagagggccgtgtgcatgatctccaattccaccagtgttgttgaggtcttctctcgcatcgaccacaaatttgacctcatgtatgccaagagggcgttcgttcattggtatgttggtgagggtatggaagagggggagttctctgaggcccg

SEQ ID NO: 160854 - DNA, 253 bp, Glycine max
aaactaccagaggcacttcctgaagggaaagctttacattcatttctcagtggaatttcctgataccctgagtcttgatcaggtgaaagctttggaggctactctgccactaaagcctacatcgcagttgacagacatggagctggatgagtgtgaggagaccacactccatgatgtgaacatggaggaagagataaggaggaggcaacaagctcagcaggaggcatatgaggaggatgaggatatgcatggt

SEQ ID NO: 160855 - DNA, 254 bp, Glycine max
gtgcgtgggagggtccgaagttggagatagtgattctggttctgttctgttcttctttctactcacaacaacatcagaatcagaaacaacaatggccaacactaacttggaagatgttccctctctggatctcatgactgagctccttcgtcgtctcaagtgctcttccaaacctgacaagcgtcttattctcattggcccacctggatctggaaaaggcacccagtcaccaatcataaaagatgagtactgct

SEQ ID NO: 160856 - DNA, 255 bp, Glycine max
gattgcacccacccattaacggtgatgtgagccgcccaaagccaatgaccgtcttctggtcatctctggctcagagctttaccaagcgcccaatgaagggaatgcttaccggtcctgttaccattctcaactggtcctttgttagaaatgaccaacctagatctgagaccacctaccagattgctttgtctatcaaggacgaagtggaagaccttgaaaaggctggcatcactgttatccaaattgatgaagctg

SEQ ID NO: 160857 - DNA, 257 bp, Glycine max
aagagaaggtgtagacaaacacaatctctaatggcactcaggatgtgggcttcttccactgccaatgcactcaaagtctcttctacctccagacctcatctcttgcatcctttttctttctccagatgcttgtcttccgtcttggatggacttaagtatgcagattcacacgaatgggtcaagcacgaaggctcagtcgccaccattggtatcactgaccatgcccaggaccatcttggagaggttgtgtatgtgga

SEQ ID NO: 160858 - DNA, 194 bp, Glycine max
ggaatcagaggcctttgcaggggagctttttgatgcgctttctaggaggaggggaattcaaggggattccattaacaaggccctgttgaaggacttctgggaccaggtttctgaccagagtttcgattctaggctcagaacattctttgacatggttgataaagatgcagatggaagaatcacggaggaagaaa

SEQ ID NO: 160859 - DNA, 255 bp, Glycine max
atcaacagctcccccgacggtgaggtcgacgacaccaccggcctcatcctcaaactcaagtccttctgcctccgcatggacgcattcgggttcttcgccttcgtcagcgccaagacgaaggagctcgacggcctacgcgccgagatgcctgtggctctggcggagtgcgttgatccggcgaaattcgtgctggaggcgatctccgaggtgtttccggtcgacaagagaggggacaaggccggccacgacttgggc

SEQ ID NO: 160860 - DNA, 250 bp, Glycine max
gaagaatgagcatatctgtggaaggcctttgggactcagatttgacaagaaaacaggtgatttgtatattgcagatgcatattttgggctcctgaaggtaggacccgagggtggtttagcaacatctcttgtaactgaggctgaagggattccattgagatttacgaatgatgttgatgttgatacggaagggaatgtttattttacggaaagcagtgctctttatccaaggaggaatttccttcagctg

SEQ ID NO: 160861 - DNA, 254 bp, Glycine max
cactcattaattgcaagaatggcacttcgttgcttggtgatgtccctttctgttctcttcactcttggtcttgcgagagaaagccatgccagagacgaagatttttggcatgctgtttggccaaacactcccattccaagttcattgcgagatcttctaaagcctggccctgcaagtgttgaaatcgatgatcaccctatgcaaattgaagaaacacagtacccgaaaaccttcttctataaagaagaccttca

SEQ ID NO: 160862 - DNA, 254 bp, Glycine max
tgtgaattaaaatatattcaattttgcgtttctctgcctaaaaggattgaaagatgggtcaagcattcggttgctaccaagtcgatcagtcaaatgtggctatcaaggagcattttggaaaatttgatgatgtcctagagcctggatgtcactgcctgccttggtgtcttgggtaccagattgctggtagtctgtcgctgcgagtgcagcaacttgatgttcgatgtgagacgaaaaccaaggacaatgtcttt

SEQ ID NO: 160863 - DNA, 257 bp, Glycine max
cttttagcaagttaacaacacttttgtcttcgttccattatctagttctcaattctcttcaccctttgcctctgaaagaaatgggtagtcttgaagcggaaagaacaacagtaggattggcagcaagagacccttcagggattctctccccatacacctacaatctaagaaacacaggccctgatgatgtttacattaaagttcactactgtggaatttgccattctgatctccaccagattaaaaatgatcttggc

SEQ ID NO: 160864 - DNA, 259 bp, Glycine max
agattttatccaattgaaattttaaaaatgactgggataaacttaagacttcaattattgaaattgaataagtaaacaatttaattggattggtcgaatggtatcaaaaaaatggagtactaactcccatttcttatttattattgaattaaccgatcaacttgctttgttatcgaacatttctttttgatttcaaaaattttccggaaaaaatttgaatctatttttatatgcgaatcaatcctactacttctggtcc

SEQ ID NO: 160865 - DNA, 250 bp, Glycine max
cacaaggcagaaagcaagctcatcctagagttttaaaaatggcagcagcctcctccatggctctctcttccccatccttggctggcaaggccgtgaagctgggcccatcagcccccgaagtcgggagggtcagcatgaggaagaccgtcaccaagcaggcctcctccggaagcccatggtacggcccagaccgcgtcaagtacttgggcccattctctggcgagcccccgtcctacctcactggcgagtt

SEQ ID NO: 160866 - DNA, 140 bp, Glycine max
gctgagaagcatgctgccatagaaggtgatttagttgtgcagccatcagatgatcacttttggtttcaccggccccgtgttgtcctctttttgattcactttatccttttccaaaatgcttttgagatagcatttttttt

SEQ ID NO: 160867 - DNA, 250 bp, Glycine max
gaaacaaattagaagagtgtgttgtgttgtgttggagtagcaagctagcaaagatgtttggcatcttaggaggcaataaggggcacaagatcaagggtactgtggtattgatgagcaagaatgtgttggacttcaacgaaatagtgtccattactcagggtggtttggttggtgatgccaccggcatcttcggtgctgccaccggtattgttggtggagttgtcgatggtgctattttcatcttcagtcg

SEQ ID NO: 160868 - DNA, 246 bp, Glycine max
ttctacatccctggctctgttccgtcgatgacgatggcgtttagggtgcgaaaccctgacctccgctttctcattcttctctctctcttgtccatcacttccgccaaggtcttcttcgaggagcgtttcgatgacggatggggaaatcgttcggttaaatcagattggaaaaaagatgagaacctggctggggagtggaaccacacctctggccaatggaatggagacgctaacgacaaaggtatt

SEQ ID NO: 160869 - DNA, 248 bp, Glycine max
caattgctgaatttgcacttcaacaggtaaaggctcttttgaaggatcggttaagtggaaaagcaacaggaggatctagtgaaaagacagaaaccagttcttcagtagaattaaactctggcaactttgatgaattggtgatcaaaagcaaagaactctggattgtggaatttttcgcacctcggtgtggacattgtaaaacattagctccagagtggaagaaagcatccaataatttgaaagggaag

SEQ ID NO: 160870 - DNA, 248 bp, Glycine max
gaggaagaatcagagctcagcgataagcagaaagtggagatcgcgcaatggttcctcctcaactctcctcccggagaaatccaatacgttgccaaagatgtgaaatcgattctcaacaacgacgatttgtacaaggaagccgcttccgaggcttttccctattacaacaaatcgcacttgatttccattccaatgcccaaccgaagcggagacgtactggttacttcgttcggtgagcttgagggtaa

SEQ ID NO: 160871 - DNA, 249 bp, Glycine max
gttcgagtatgtacttcagatgattcatgtagatatggaagagttactgagctttatgtgtatgacaaattcaatagggtccctgcaaataaggtggaggcaggagatatatgtgcagtatgtggaattactgatattcagatcggggagacaattgctgataaagtatctgggaaaccactaccttcaatcaaggtggaagaaccaacagtgaaaatgtctttctccataaacacttcaccttttgtt

SEQ ID NO: 160872 - DNA, 241 bp, Glycine max
gagaatgactgttactgatgagagcttggagtttctggctctcaaattccccaatttcaaagccctttcccttctcagttgtgatggattcagcactgatgggctggcttcaattgccactaattgcaagaatttgactgaacttgacatacaagagaatggtattgaggataagagtggcaattggttgagttgtttccctgacagcttcacatcattggaagtattgaactttgccaat

SEQ ID NO: 160873 - DNA, 239 bp, Glycine max
gtccgtatgactgatacccgtgcagatgaagctgagcgtggtattaccatcaagtctacaggtatctcactctactatgaaatgactgatgaagctctcaagagttttaagggagagcgcaatgggaatgagtatcttatcaatctcattgactcccctgggcacgttgacttctcatctgaggttactgctgcactccgtattactgatggagctctagttgtggtcgattgtgtgga

SEQ ID NO: 160874 - DNA, 237 bp, Glycine max
ttcttcttcaaggtgttgggagacatgcctagcaaacagacttatagcttttgcttctgacttccgccggcgtttcaggctccccgtgtcggaggccccgccggagataaggacccttttcgaccgttactccgatcagaatggcgtcatgacagccactcacctccgaagtttcctggctgaggtgcagagggaagacaatgccactgaggaggaagcacaaaccatcatcgatgg

SEQ ID NO: 160875 - DNA, 235 bp, Glycine max
gaaaaacgttgttgttaccatctcttcggacaaaggtctttgtggtggaatcaattccacgtctgtcaagataagcagggttttgtacaaattgaattctgggcctgataaagagacaaaatatgtcatattgggagagaaggctaaagctcaattgttgcgtgactcaaggaaacacattgtgctcagccttactgaattgcagaaaaatcccctgaattacactcaggtgtct

SEQ ID NO: 160876 - DNA, 236 bp, Glycine max
caacaacattcattcattcacagctgtcacgccgtgaacggaaaatggcaacggcgagacgcagtttcccgcctatcaccgaatgcaacggaacgacaccgtgcgagtctgtggccgccgacctcgacggtacgctcctcatctcccgtagctcgttcccgtacttcatgctcgtcgccgtcgaagccggcagcctcctccgcggcctcatcctcctcctctcccttccgttcgtc

SEQ ID NO: 160877 - DNA, 233 bp, Glycine max
cgcatttcctcctccgtagtccgttccccgaacccgacaaaacctgacattgctccggatcccggagacagccgcaggttcctccacaagagggcctccgtgctcccgccggagctccgcccgccgctgcccgccggcagcctcctccagaggctccgggaaatggacattgcgcggagcggatccggctagacggtctcgctccgccggagactgaacaaacggtggcgccg

SEQ ID NO: 160878 - DNA, 235 bp, Glycine max
ctcagttctccaactctctgatctcaacttccacttcagcttcaagaccaatggccaacgacgattgctgcgccacgcaactcatcgacggcgacggcgagttcaacgtcgccggcctcgacaactttatcagaaccgtcaatctcgcctcctgcggcctctcctatgccgtcgtcgcaatcatgggacctcagagtagcgggaagagcacgttaatgaatcatcttttccacac

SEQ ID NO: 160879 - DNA, 233 bp, Glycine max
ctagggttatcatttctccatttccattttctctctcacttttcaagaatcgtaagctatgggaaagtcttacccaactgtgagtgctgattaccagaaggccgttgagaaggcgaagaagaagctcagaggcttcatcgctgagaagagatgcgctcctctaatgctccgtttggcatggcactctgctggaacctttgacaagggcacgaagaccggtggacccttcggaa

SEQ ID NO: 160880 - DNA, 231 bp, Glycine max
tttgaacgattcggctacttccctcacgcgccgcccttctcgaatttctccgatgaattcgacgacgcgctcgaatccgccatcaaaacttaccagaagaacttcaacctgaacgtcactggcgtcctcgacgacgccaccgtgcagcagatcgtgctgcctcggtgcggcgtcgcgatataatcaacggcacaaccacgatgaacgccgccaaggagaacgagacggcgt

SEQ ID NO: 160881 - DNA, 232 bp, Glycine max
aaagagatcacatagcagaatggcttctactcaatgtttcttgcaccaccatgctcttaccacccctgccagatccccatcacaacgcatcatggttagcaccaagcctaaccagcttgtttgcaaggcacagaagcaagaggatattgatgtcagcccaatctctcgccggttagctctaaccgtgctcattggtgctgctgctgttggctccaaagtccaacctgctgat

SEQ ID NO: 160882 - DNA, 227 bp, Glycine max
gtttaaatttccaggtggagggaccatgttccctcacggagcagatgcatatattgatgaacttgcgtcagttattccaattgctgatggttctgtcagaacagcactggacactggttgtggggttgcaagctggggagcctacttgctaaagagaaatgtgctggctatgtccttcgctccaaaggacaaccatgatgcacaagttcagtttgctctagaacgag

SEQ ID NO: 160883 - DNA, 232 bp, Glycine max
tagaaacagtgtgatgaaaatgaaggtccttgttttcttcgttgctacaatttatgtagcatggcaatgccatgcgtacgatatgttccctctccgaatgaacactggctatggtgcccgtactccggaggtgaaatgcgcaagttggaggcttgctgaggaagcacacaacatctttggctttgagaccattcctgaagagtgcgttgaagcaacaaaggaatacatccat

SEQ ID NO: 160884 - DNA, 231 bp, Glycine max
cctaattctcatttcttcatcgttcgattcttctcctcctaaagatgcagatcttcgtgaaaactttgaccggtaagaccatcacccttgaggtggagtcctccgacaccatcgataatgtgaaagctaagattcaagacaaggaagggatcccacctgaccagcagagacttatctttgcgggtaaacagcttgaggatggtcgaacccttgccgactacaacatccaaa

SEQ ID NO: 160885 - DNA, 231 bp, Glycine max
cttggaattccatgattgcgggaatgatgttaaataaagagagtgagagagctgttgatatgtttcaaaggctggaatctgaagggttgaagcctgattcagctacttggaattccatgatcagtgggtttgcacaactaggggagtgtggggaagcttttaagtactttgggcaaatgcagtctgttggtgtggctccatgtttgaaaattgttactagccttttgtcag

SEQ ID NO: 160886 - DNA, 231 bp, Glycine max
attgaattcaaaaacttaagttcattccttgtgttttgctttcttcctcaaaaccaaacatgtcgaacacatgcggcaactgcgactgcgctgacaagactagctgcaccaagggaaacagctatggtgttattgtagagactgagaagagttacatcgagactgttgtcatggatgttccagcagctgagcatgatgggaagtgcaagtgtggcactaactgcacttgca

SEQ ID NO: 160887 - DNA, 231 bp, Glycine max
gttttgataaagctgacagaaagcgcctgttcactatgattaatgatttgcctacaatatttgaggttgtaactggatctgcaaagaaacagacaaaggagaagtcatcagagaacaatggcaacaaatcaaagtccagttcaaaagggcgaggatctgaacccccaaagtattcaaagctagtgaaggatgaggaggagggattggacgaagaagacgatgacgagcatg

SEQ ID NO: 160888 - DNA, 233 bp, Glycine max
attgcaatcaaattagttcattctctttgcgcagttccctacctctcctttcaagatgcagatcttcgtcaagaccctcaccggaaagaccatcacccttgaggtggaaagctctgacaccatcgacaacgtcaaggcaaagatccaggacaaggaaggaattcccccggatcagcaccgtctgatcttcgccggtaagcagctcgaggacggccgtaccctcgccgactaca

SEQ ID NO: 160889 - DNA, 233 bp, Glycine max
gggtgttcaagaacagcaatgacttgggagtgaagttcccatttaaccaaccaatgaagatatacaacagtttgtggaatgctgatgactgggccacaaggggtggtttggagaaaacagattggtccaaagcccccttcatagcctcctacaagggcttccacattgatggttgtgaggcctcagtgaatgccaagttctgtgacacacaaggcaagaggtggtgggatcaa

SEQ ID NO: 160890 - DNA, 228 bp, Glycine max
gagaatggctcccaagggtctaacctttctggctgtgttaatatgcgtttcagcactgtcactgagtccttctgttgcgggggaagggcaaaataatggccttgttatgaacttctacaaggaatcatgccctcaggctgaagacatcatcacagaacaagtcaagcttctctacaagcgccacaagaacactgctttctcctggctcaggaacatcttccatgactg

SEQ ID NO: 160891 - DNA, 229 bp, Glycine max
cttcctcacgcatttcctcgtttttttcttcccttttctctttctccggcgacgatctcagattccggccactcctctcgccggcgagcccttactcttccctcctccgtcgagccctctccgattcgaatcgttcccagcctcgcaccaccatgaatcccgaatacgattatttgttcaagcttttgctgattggagattctggtgtaggcaagtcatgtcttctcct

SEQ ID NO: 160892 - DNA, 227 bp, Glycine max
ttcacttttaagttaaatagtttttcattgtatcatttaatctacaatggctgcttcaacaatggctctctcttcatcatcattggctggccaagctatcaagcttgccccctccacccctcagcttggtgttggaagggttagcatgaggaaaacagcctccaagactgtttcttctggaagcccatggtacggcccagaccgtgtcaagtacttgggcccattct

SEQ ID NO: 160893 - DNA, 229 bp, Glycine max
aataggtttcacaccacactaaagccaattagtccctctcttctccctttccttttctctatccaataatagagccttagaagatagatagaaagccatgcaagcatgttcctcctcagacgctccactctccaagaggttagatggcaaagtagcactcataaccggcggagccagtggcatcggtgaagccaccgccaagcttttccttcgccacggtgccaaggtc

SEQ ID NO: 160894 - DNA, 238 bp, Glycine max
tatctcgagccgtatcggctcgagccaccattggatccaccaatctacaaccttcttctccaatgttccgtttctctctccaacgggaagaactttttttttgtgtgtgtttttggtggtgagtttgtaagaagcaatggcacgcaagaagatcagagagtatgactccaagagattgttgaaggagcactttaagagactctctggccaggacttgcccatcaagtccgcacaagtt

SEQ ID NO: 160895 - DNA, 227 bp, Glycine max
atagaggtgtaactttgcacaagtgtggaagatgggaggctcgaatgggccaatttttgggcaaaaagtatgtttatctgggtctgtttgacaccgaaattgaagctgcaagggcatatgataaagcagcaataaaatgtaatggcaaggaggctgtcaccaattttgatcctagcatctacgatagtgagcttaattctgaatcctcaggaggtgtagctgcagat

SEQ ID NO: 160896 - DNA, 235 bp, Glycine max
ggtgctgggtgtaatttccattactcccaaggcccaagcagcagtgacatgcaaccaggtggtgagcaacctcaccccatgcatttcttatgtgctcaatggtggcaaaaccgtgcctggcccttgctgcaatgggatcaagaccctctttaacctcgctcactccacaccagaccgccaaaccgtttgcaagtgcataaagaacgctgttagtgcgttccattatggcaagtca

SEQ ID NO: 160897 - DNA, 232 bp, Glycine max
caagcatggcaacgaccccaagcaccacacagaatggtacagagttattaggaaaggagtctgatggaaaagatcgggtttctgccaaaagttcgaagggtgtgtctacaaacagtggttccaaagcaggagacaatggaaaggcaggctcaggttctggaaatgatggtgtctcacaaagctacaaacaagaaagggagttttaaccaaatgcttgttgatggagccaatg

SEQ ID NO: 160898 - DNA, 230 bp, Glycine max
caaagagatagctcgactgaagaaattgattggatattggaaggagcaagcaggaaggagaggagaggatgaagatttagaattttaaggagagatagtaacaagtattctttctcgttgaaggcatatatgttggaattatatcaagatacacttgtagatcttctgttaccgaagaatgcaaagcgtttaaaattggatattaagaaggattccaagggaatggtagc

SEQ ID NO: 160899 - DNA, 223 bp, Glycine max
aaaggattttgggacatgtacgatccagagggatattctctgtggttctgtgattacaaatacaattgtgagaacacagtttcctttgttacgttaaacaaggttggtggatttcttcagaggatggatctggctcgcaagtatgcatttggaaagatgctggtgattggatcacaggcaccatttaaggtgaaggggttgtggcttttccgtggacaagaga

SEQ ID NO: 160900 - DNA, 164 bp, Glycine max
ggcagaaagcaagctcatcctagagttttaaaaatggcagcagcctcctccatggctctctcttccccatccttggctggcaaggccgtgaagctgggcccatcagcccccgaagtcgggagggtcagcatgaggaagaccgtcaccaagcaggcctcctccgg

SEQ ID NO: 160901 - DNA, 223 bp, Glycine max
gcttaggggctaatgggtaactgcctagattcttcagccaaagtagaagctgctcacagttccagaaccccttctggaatttcaaaaactagtccttcatctgttccttccaacttatctattctgtcatatagtgaagcaagtgatttctcaaatcttccaacaccaaggtctgagggcgaaatcttgtcttccccaaatcttaaggcctttaccttcaatg

SEQ ID NO: 160902 - DNA, 164 bp, Glycine max
gcaattactcattagatcagaaaatgatggtaatctgtgtcccattccacagtaccctctgtactcagcctcaattgccctccatggtggctgcctggtaccttattatctagatgaagcaactggctgggggttggaaatacctgaactcaagaagcaattgg

SEQ ID NO: 160903 - DNA, 289 bp, Glycine max
aagaagaagggtgagctaaagtcaattttccttcctttcctttccactagtcacataatcccgctagtggacatggccagactcttcgccttgcacgacgtcgacgtcaccatcatcaccaccgcacataacgccaccgttttccaaaagtccatcgatttagatgcgagtcgcggtcgccccatcagaacgcacgttgtcaacttccccgccgcacaagtgggtctccccgttgggatcgaagccttcaacgtcgatacgcctcgggaaatgacccccagaatctaca

SEQ ID NO: 160904 - DNA, 285 bp, Glycine max
agaaatttaagtgaggagctagagaatgatgatgaagtctgctatgtgtgcagtggtggttgtagcacttcttcttctggcggaggtggggcccatggctgaggctgtgacatgcaccccaacagagttgagtccgtgtcttccagcaatcacttccggtgctaaaccttccaatgcttgttgcacgaagctgaagcagcaaaaaccatgcttatgtggctacctcaaaaacgctagcttgaagcagtatgttaactctcctaatgcccgaaaaaccgttgcttc

SEQ ID NO: 160905 - DNA, 279 bp, Glycine max
cctccttctgatcccgtcgccttttttagggttcaagtcggtgtacaatctccccaagcaatcaccacttctcgactattactacgcagatttagtgatttcgtcaatctcttttctcaactgaaaaaggaatttcccataaaagatctgcctacacctccacccaaaaagataccaagaattaaaagtcacactgtgttggaagagcgacgccttttattagctgattggatggaaaagttgttatcggacgttgatgtatcaagaagtgccccggtg

SEQ ID NO: 160906 - DNA, 271 bp, Glycine max
ctcgttttcaatatgcagatcttcgtcaaaaccctaaccggtaaaacgattacgctagaggtcgagtcctccgacacaatcgataacgtgaaagctaaaatccaagacaaggaaggcattccaccggatcagcagcgtttgatcttcgccggtaaacaactcgaagacggcagaactctcgccgattacaatatccagaaagaatcgacgctccacctcgtcctccgccttcgcggtggcatgcaaatcttcgtcaaaaccctaaccggta

SEQ ID NO: 160907 - DNA, 265 bp, Glycine max
gagaaagagagagagagagagagaaactgagagaaattcgcaaaccctaatttcggaaagatcggcgatggctgcctccaaggatcgcgagaacttcgtctacatcgccaagctcgccgaacaggccgagcgatacgaagagatggtggaatcaatgaagaacgttgcgaatctcgacgttgaactgactgtggaggagcggaatttactttctgttgggtacaagaatgtgattggtgctcggagagcatcgtggaggatcctg

SEQ ID NO: 160908 - DNA, 263 bp, Glycine max
gccacgacacacaacacaaaacatcaagcattggtattcgttgagttggagaagcaaacatattgcgatcttaaagttctgaataacacagagaactacgttgcctttaaggtcaaaaccacttcaccaaagaagtactttgtacgacctaataccggtgttgtacatccatgggacctatgtatcatcagagtcaccctccaggctcaacaagaataccctccagacatgcaatgcatcgacaagtttctcttgcagagtac

SEQ ID NO: 160909 - DNA, 277 bp, Glycine max
ggaacataatggagaaccctgcttggtacactcagtatacaccttaccaggctgagatatctcaggggaggcttgagtcattgctgaattaccaaaccatgatcaccgacctcaccggcttgcctatgtcgaatgcttcattgcttgatgagggtactgctgctgctgaagcaatgtctatgtgtaataatattcagaaagggaagaagaagaccttccttattgcaagtaactgccaccctcagacaattgatatttgcaagacaagagctgatgg

SEQ ID NO: 160910 - DNA, 276 bp, Glycine max
ctttctccgatggctaatccctcactcttgttcttcagtctcctcctattatccgccaccgtagccgccgccgaacggatctacgatgaagacgaccttctgatccgtcaagtggtgccggatgcggaggaccaccacctgctcaacgcggagcaccacttctccgccttcaagacaaagttcggcaagacctacgccacgcaggaggagcacgaccaccgcttccgtatcttcaagaacaacttgctccgcgccaagtcacaccagaaattggat

SEQ ID NO: 160911 - DNA, 269 bp, Glycine max
ggtgaaacgattcaagatatttcaacaggacaacctgggacgccgtttgattacggtgccggacacgtcgatcccgtggccgctcttgatcctggtctcgtctacgatgccaacgtggacgattacttagggtttttctgcgcactaaactactcgtcatttcaaatcaagcttgctgcgaggagggactatacgtgtgacccgaagaaggattacagagtggaggattttaattatccttcttttgcggttcctatggatacagcttc

SEQ ID NO: 160912 - DNA, 267 bp, Glycine max
aagatttccaaccgattggacaacactccttgtgtagtggtaacatcaaaatttggttggagtgctaacatggagagaatcatgcagtctcaaactttgtctgatgctagcaagcaagcatacatgcgcggcaagagggttcttgaggtcaatcctaggcaccctattatcaaggagctccgagagagagtagtaaagaaccctgaggatgagggtgtgaaacatacagcacagttgatgtaccagaccgcactcttcgaaagtggc

SEQ ID NO: 160913 - DNA, 265 bp, Glycine max
gatcaacaatcggcggcgaaaatgccttcccacaagacgttcagaatcaagaagaagctcgcgaagaagatgaggcataacagacccatcccttattggatccgcatgagaaccgacaacactatcaggtacaatgctaagcgcaggcactgggcgccgcaccaagctcggattttaaggtccatgtcaacctccgactcgagatttttatattgtttttgttattctagaatgttactagcaatgtgtaaactggaaaggtttt

SEQ ID NO: 160914 - DNA, 281 bp, Glycine max
aacaacttctgctacttcctactccaaccgcacttctgctccgcaattatcatgggcaaggtcaagatcggaatcaacggatttggaagaattggccgtttggtagccagagtggctctgcagagagacgatgttgaactcgttgccgttaacgaccctttcatcaccaccgattacatgacatacatgtttaaatacgacagtgttcatggacactggaagcatcacgatgtcaccgttaaggacgagaagacccttctcttcggtgacaagccagtcac

SEQ ID NO: 160915 - DNA, 277 bp, Glycine max
gttcaacaatcggcggcgaaaatgccttcccacaagacgttcagaatcaagaagaagctcgcgaagaagatgaggcagaacagacccatcccttattggatccgcatgagaaccgacaacactatcaggtacaatgctaagcgcaggcactggcgccgcaccaagctcggattttaaggtccatgtcaacctccgactcgagatttttatattgtttttgttattctagaatgttactagcaatgtgtaaactggaaaggttttagcttttggtcat

SEQ ID NO: 160916 - DNA, 275 bp, Glycine max
gcgggattgagagctgctattggactttcagaacacgggttcaatactgcttgtattaccaagctcttcccaactcgttcacacactgttgcagctcagggtggtataaatgctgctttgggaaatatgactgaagatgactggaggtggcacatgtatgacactgtcaagggaagtgattggctaggagaccaggatgccatccacctaatgtgtagggaagcaccaaaagcagtcattgagctagagaattacggattaccattttcccgaac

SEQ ID NO: 160917 - DNA, 271 bp, Glycine max
gagacacctgatagggttttgggtgctttggctgataagtatggacccatattcaccatcaactatggtgtcaaaaaggctttggtaatcagcaactgggaaattgctaaggaatgcttcaccaaaaacgacatcgtcgtttcgtctcgccccaagcttcttgccattgaactcatgtgctacaaccaagccatgtttgggtttgcaccctatggtccttattggcgcgagccaagaaagattacaacgttagagatccttacatctcgca

SEQ ID NO: 160918 - DNA, 260 bp, Glycine max
gtcatagggtacaagcaccagactgacctcaaggaaaatggtgaaatctgtggtggggttggcattcttggcattgcatgggcctttggtggcatgatcttcatccttgtctactgcactgctgggatctcagggggtcacattaacccagcggtgacatttgggctgtttttggctcgcaaggtgtctttgatccgagccatcatgtacatggtggctcagtgcttaggtgctatctgtggagttggtttggttaaggc

SEQ ID NO: 160919 - DNA, 265 bp, Glycine max
gagcaccttcatgaggaggctgacaagtgtgtttggaggagcagcagagccaccgaagggtggcaaccctgactcaaacacactcatcagtgacaccaccactgtcatatgcttggatgattaccactctttggatagaactggcagaaaggagaagggtgtcactgcccttgaccctagagccaatgattttgatctcatgtatgaacaagttaaagctcttaaggatggaattgctgttgaaaaaccaatctacaaccatgtc

SEQ ID NO: 160920 - DNA, 270 bp, Glycine max
gagaatggatgaagtctgctatgtgtgcagtggtggttgtagcacttcttcttctggcggaggtggggcccatggctgaggctgtgacatgcaccccaacagagttgagtccgtgtcttccagcaatcacttccggtgctaaaccttccaatgcttgttagcacgaagctgaagcagcaaaaaccatgcttatgtggctacctcaaaaacgctagcttcaagcagtatgttaactctcctaatgcccgaaaaaccgttgcttcttgtggg

SEQ ID NO: 160921 - DNA, 279 bp, Glycine max
gctcatcaagtccaagaaccaacctaccttttgcaatctcaattcaatggcgtcctctctcattgcgaacgcttcctctcctcttctctcctctccaggtccctccttcgccccgccgcttccgcttcccaccgctctttcaacaccaacgccatgggccagtatgacaaccgcgccgacgaccacagcaccgacatcgatcgtcactccgaacgctctttccctagcactgcgcgccgcgacgatatcttctcagatgtgttggatccattttttccg

SEQ ID NO: 160922 - DNA, 273 bp, Glycine max
cgcatccctccccaacccaaaacggaaccaggtgattttgatgacaagtcagatcctcctttatccgcacaaaatgacatacaagaatctgatatagagttggataatgctgatgttgttgaacctgataatgaccctcctcaaaagatgggagatccttctgctgaaataacggaagaacaaagggatgctgcacaactagcaaaatcaaaagcagtcgatgctatgtcacaaggtaatttggatgaagcactggcccaactgacagaagcc

SEQ ID NO: 160923 - DNA, 269 bp, Glycine max
gtggtaccagcagcagagcttgtatacgtcgccgcttcagcgtacaacatgatcattcccgagaagaaccgtaaagagatctgcaaatacctcttccaagagggagtttgctttgcgaagaaggacttcaatctggcgaacacccggagattgatgtgccgaatctgcaggtgataaagctgatgcagagcttcaaatccagagagtacgtgagggaaacatttgcgtggatgcactattactggttcctcaccaacgatggaattgag

SEQ ID NO: 160924 - DNA, 264 bp, Glycine max
gagagagagaaagagaagtgtgtagttggtgaagtttttgagaagaatatggaacgaagtgacggaatggtaacggggtcgcatgaaaggaacgaacttgttagagttagacacggttctgacagtgggatttgtcaaatatgtggtgacaccattggattaacggctactggtgacctctttgttgcttgtcatgagtgtggcttcccactttgtcattcttgttacgagtatgagctgaaaaatgtgagccaatcttgtccc

SEQ ID NO: 160925 - DNA, 262 bp, Glycine max
ccataacacaaggcagaaagcaagctcatcctagagttttaaaaatggcagcagcctcctccatggctctctcttccccatccttggctggcaaggccgtgaagctgggcccatcagcccccgaagtcgggagggtcagcatgaggaagaccgtcaccaagcaggcctcctccggaagcccatggtacggcccagaccgcgtcaagtacttgggcccattctctggcgagcccccgtcctacctcactggcgagttcccagg

SEQ ID NO: 160926 - DNA, 260 bp, Glycine max
gccttgaagatcctgaacttcttgctagagagactgtgttcagtgtaagcgaaatagaagcactttacgagctcttcaaaaagattagcagtgctgtaatcgacgatgggttgattaacaaggaagagtttcagttggcattgttcaagacaaataaaaaagaaagtctgtttgctgatcgggtatttgatttatttgacacaaagcacaatgggatactaggttttgaagagtttgctcgtgctctctccgtttttcat

SEQ ID NO: 160927 - DNA, 260 bp, Glycine max
gtctatgctggaatcggttgggttatctggagaagcaaggaggacttgcctgaggaactcatctttcacatcaactatcttggtgctgatcaacccaccttcacccttaacttctccaaaggttctagccaagtcattgctcaatactaccaactaattcgccttggttttgagggatatagaaacgtgatggaaaactgcagagacaacatgttggtgctgaaagaaggactagagaaaacagggagattttcaattgt

SEQ ID NO: 160928 - DNA, 260 bp, Glycine max
aagatgtcgaagcgtggtcgtggtggttcggcggggaacaagttccgcatgtcgctgggtcttccagtggcggcgacggtgaactgcgccgacaacacgggggcgaagaacctctacatcatttcggtgaaagggatcaaaggccgtttagaaccgtcttccctcggcctgcgttggcgacatggtgatggccaccgtgaagaagggaaaacccgatctgaggaagaaggtcttgccagctgtcatcgttcgccagcgca

SEQ ID NO: 160929 - DNA, 278 bp, Glycine max
gtcgccaccttcaaagcccgcaagaacgacttgcccctcaagacgaaaatcaccgtgtgcgaggtgcgtgaggaggctggcttcctcgacggtgacgtgttgattttccccgacatgatcaaatacaggggtttggaggaatcaaatgttgatagctttttcgaagatgttttggtgaatggtaaaccatggactgctggagttccggaggtgtttcgtggttcacatgtttatgtgtgtgctcatggaagtcgtgacgtgagatgtggtgtttgtgg

SEQ ID NO: 160930 - DNA, 272 bp, Glycine max
agcaagtggacttgggcgttgcaagataaataatggaggctgttggcatgatgctcaaaatggacatgcattttctgcttgtttggataatggaggggtcaaatgccagtgtcccacagggtttagaggtgatggtgtaaaaaattgtcaagatatagatgaatgcaaagagaagaaggcttgtcagtgccctgactgtagctgcaagaatacttggggaagctatgactgcagttgtagtggagatcttctgtatatgagggaccacgata

SEQ ID NO: 160931 - DNA, 270 bp, Glycine max
atgggaagaaagtgagaaggccaaagcagagaacagagctcaaaaacatctctcagctatcgatgcttgggaaaacagcaaaaaggcagctcttgaagctgagcttaaaaaattggaggaacaactggagaaaaagaaagcagaatatggtgaaaaaatgaagaacaaggtggccttagttcacaaggaagcagaggagaagagggcaatgattgaagccaagcgtggtgaagagattctgcagacagaggaaatggctgcaaaataccg

SEQ ID NO: 160932 - DNA, 261 bp, Glycine max
ccctaaacgactctatctctcttcgttttgttcttccttgcgctcctcctcgttcgttcgttctccctcgcgtagatcggcaatggcggagaccgagacgtttgctttccaggctgagatcaaccagctcctcagtctcatcatcaacaccttctactccaacaaggaaatcttccttcgtgaactcatcagcaacgcctctgatgctttggacaagattagatttgagagtttgacggacaagagcaagctcgatgctca

SEQ ID NO: 160933 - DNA, 259 bp, Glycine max
gcacgcggcaccgttcgttgctgtctgagaacagcaactccccagttgcttctctagacaaagctgatggccttccttcttggatgaaccatgaggaccgaagggtattgaaggctatggataacaaacctgcacctaatcgtcaccgtggctaaagatggcagcggagacttcaaaaccatctctgaatgtttaaatgctgtccctcaaaattttgaaggacgttatgtgatttttgttaaagaaggagtatacgatg

SEQ ID NO: 160934 - DNA, 258 bp, Glycine max
ggaggatctgacagaggttataacatcagcagaatttcaccctacacattgtaatacattggcatatagcagttcaaagggttcaatccgtcttgttgacttgcggcaatcagcattatgtgattctcatgccaaactatttgaggaacaggaagctccagggtccagatcatttttcacggagattattgcttctatctcggacataaaatttgggaaggatggtagatacatacttagtcgtgattacatgacttt

SEQ ID NO: 160935 - DNA, 257 bp, Glycine max
attatagcacaccacacaaaaaagcaaacaagagagaacaactgttactcacacacgccatgggtaaatgaatggtttttgagcaacagcagttaaaagagaaaagggattcagcgaagatgacatcggttggtgtggcaccaacttcgggtttgagagaagccagtgggcatggagcagcagctgcggatagattgccagaggagatgaacgatatgaaaattagggatgatagagaaatggaagccacagttgtt

SEQ ID NO: 160936 - DNA, 254 bp, Glycine max
tataacaaagcattgcgatggtccctgcggatgttgacgcaatgtgatttctgcccagtgctctgaatgtcaaagtgaagaaattcaaccaagcgcgggtaaacggcgggagtaactatgactctcttaaggtagccaaatgcctcgtcgtctaattagtgacgcgcatgaatggattaacgagattcccactgtccctgtctactatccagcgaaaccacagccaagggaacgggcttggcggaatcagcggg

SEQ ID NO: 160937 - DNA, 260 bp, Glycine max
aaaatgcccactttttttcttccaacgctcctcctccttctcatagccttcgccacctctgtctccggccgccgtgacctcgtcggagactttctccggctgccctccgaaactgataacgacgacaacttcaagggcacccggtggggccgtcctcctcgccggttccaatggttactggaattacagacatcaggctgatgtttgacacgcctatcaaatattgaggaaaggtggtctgaaagaagaaaatattattg

SEQ ID NO: 160938 - DNA, 261 bp, Glycine max; identical to SEQ ID NO: 151372

SEQ ID NO: 160939 - DNA, 273 bp, Glycine max
atcaggcacaagcttgagctgcatgtcaattgtttgtgttctctggggcctactcatgacgaaatagagtttgagtttttgggtaacttgagtggtgatccttacactctccacacgaacgtattcatccaagggaaagggaacagagaacaacagttccatctatggttcgaccccaccaaggacttccacacatactccgtccactggaatcctgcaagcatcatattctctgtggacgggaccccactaagggagttcaagaatttggag

SEQ ID NO: 160940 - DNA, 270 bp, Glycine max
gagtgagcgagcgagcgaggtagggttttcgttgttcccccgtctttgaattcagttcgcgacgatggggtccatccccgatccaggcgagttgagcgagttgactcagccgagcttcgacgagttccagcgccaaacttccctcatgaccagctgcaccctcctctggaaggagctctccgaccacttctcctccctcgagcaagacctcaaccacaaatccgaagacctcaaacgcaagattcgcaccctcgacaacactacttccga

SEQ ID NO: 160941 - DNA, 263 bp, Glycine max
aagatgatcaacattattggagcacttgttctactctttgcatttctcttcctcagttgtgtgtatgcacaagacacaacaacccttgtgcctgcaatcataacttttggtgattctgctgtggatgtagggaacaatgactatgcttcccacccttttcaaggctgattaccctccttatgggagggactttgttaaccaccaacctactgggaggttttgcaatggcaaattagctactgatttcactgctgacacattgg

SEQ ID NO: 160942 - DNA, 259 bp, Glycine max
cccaaagtgcttctctcctctgtctttttctctctcttgctatccttttggctagttgcactgctgcaagtgcaactccaagaagcgcagtgccaagccaccatgtttcaacattcaacagaagcctttttccttccacttttctctttggaattggttcttctgcttaccaggcagaaggagcagcaagtgtagatgggagaggaccaagcatatgggacacctacactagacagcatactgaaaagatttgggatca

SEQ ID NO: 160943 - DNA, 253 bp, Glycine max
caacaactactactactactacctctaaccgtgccgtttgtcaggtgcaagattgtagggctgatcttagtaatgccaaggattaccaccgtcggcataaggtttgtgatgttcattctaaggccactatggcactagtgggaaatgttatgcaacgtttctgtcaacagtgtagcaggtttcatgttcttcaagagtttgatgaagggaagagaagttgtcgaaggcgtttggcaggccacaataggaggag

SEQ ID NO: 160944 - DNA, 259 bp, Glycine max
gtacaacatgttcttcagcttcacctctcgggaggcacggtcccacactatagcttctcgattgacatcccctgatgcaaacattgaaaggtctggggaataacgtatgacactaatagcacccctatgtttctcaaggacagcctcttctacaagagtatcgccagaaatagaatatatgtgcaatttgggaaatatttgttggatttcaaatttcttcctttagaaggcttctaaaagtcaagactggtgaggatgt

SEQ ID NO: 160945 - DNA, 253 bp, Glycine max
gtttttctcttttatccacttggtaacttcggctattgtcgaatccgtaaggcgaaggagagcaatcaaggagggatatcttaacaatgccaatggtgtgttgcatatgtctgcaatgtggcttttcccacaactttgcttgggtggaatagctgaagcattcaatgcaataggccaaaatgagttctattacacagagtttcctaggaccatgtccagtgttgctgcttccctttctggactgggaatggct

SEQ ID NO: 160946 - DNA, 251 bp, Glycine max
gtgaagttgtaaatgaagatgaatacctgagggttttccctaggggcataggtccaacactcttgggcgcaagaaccgaatcttctaggcaaacagccatagttatcatgcatcatatgaaactcgttgagatgcttatggatgtcaatcaatggtcaaacatgttttgcggcatcgtttcaagggcggtaacacacgaagtgctgtcaactggagaaactataagatacgatggtgcctgccaagtgatg

SEQ ID NO: 160947 - DNA, 247 bp, Glycine max
gggaagacttacctacttagaatcatcaatgctgccctcgatgacgagcttttctttgccattggtggtcacaacttgacagtagtggaggttgatgcagtttacacaaaaccattcaccactcaaaccattctaattgcacctggtcaaaccacaaatgttctagtcaaggccaaccaagtagcaggaagatacttcatggctacaaggacctttatggatgcaccaataccagttgatagcaaag

SEQ ID NO: 160948 - DNA, 250 bp, Glycine max
  unsure (1)..(250): unsure at all n locations
cgaatgcgnaaaaaggtggtgaattagtttttggtggtgttgacccaaagcacttcaaaggaaaccacacttatgttccaattactgaaaaaggttactggcagattgaaatgggagattttttcgttggaggtgtttcaacaggtgtttgtgagggtggctgtgctgctattgtggattcaggaacatctttgcttgctggtccaactcctgttgtggctgaaatcaaccatgccattggagctgaagg

SEQ ID NO: 160949 - DNA, 255 bp, Glycine max
aaaattcctaatcagaaaaaaaaaaccctagtaatgccgccgatggggaggaagcgaaaggtagcacccaaatcttctctatccaccgagccacctctcaagcagcaacaaccaaaacccgaaaatccccctcaagaatacgaagaagtcgaagaggaagttgaggaagaagaggtagaggaagaggtcgaagaggaagaagaagaagaagaggaggacgaggaagaagaggaggaggaagaagaagaagaagaa

SEQ ID NO: 160950 - DNA, 253 bp, Glycine max
gaaatatgtaccgagaagaaaacgattctgtcagttgaagacatcattgctttgattggtgataagtgtgatggagttattggacagctgactgaagactggggagaacagttgttctctactttgagcaaagccggagcaaagctttcagtaacatggctgttggttataacaacgtggatgttgatgctgcaaacaagtatggtgttgctgttggaaatactcctggagtgctcactgagacaacagctga

SEQ ID NO: 160951 - DNA, 258 bp, Glycine max
cagaaaacagagatctatcattaacttcttggtgaattgtacagcagggacaatgttctataaatcaattgatccatccaattttgtgaaatctggtgaaaagacatttgagttgttggactctattgtggaagagattggggaggaaaaggttgtccaagttataacaggcaatggaagcaactatgttttggcaggtaaatttcttgaacgaaaaaggtcacatttatattggattccttgtgcagcccattgcat

SEQ ID NO: 160952 - DNA, 258 bp, Glycine max
actcgagccgaatcggctcgagcttgcagtcgcagaggaaaacccacagctagtagtctcagttcgtttgagagagaaaaaatggcagagggtctcgttctccgcggaaccatgcgcgcccacaccgacgtcgtgacggcgattgccactcccatcgacaactccgacatgatcgtgacggcgtcgcgcgacaaatccatcattctctggcacctcaccaaggaggacaagacctacggtgtcccccgccgccgcctc

SEQ ID NO: 160953 - DNA, 253 bp, Glycine max
cgtgaatgcgtataaaaggaaaataaagaaattagcgtcaaaatgttgggtgtgttcagcagctccatagtgtcgccgccggacgagctcgtggccgccggcagccgtactccgtcgccgaagatgacggcggcggcgctgcggaagcggttcgaggagaagaacccctccgccgtgtcggtggaggtcggagagcatgtccagctcgcttatacccaccacaacgagtcgccgtttcagcccagatcctttg

SEQ ID NO: 160954 - DNA, 250 bp, Glycine max
cttgattccaaaccacaatgattccatgtcctcagtgctgtctcgttttcaagccattggcattgacgttgaagccacagtcgctcttttaggagctcactcagtgggaagagttcactgcaagaatctggtgcacagattataccccaccatagattcaacactggaccctgcacatgctgagtacctaagacgtcggtgcccaacacccaatcccgatccaaaagctgttctgtattcaaggaatgac

SEQ ID NO: 160955 - DNA, 251 bp, Glycine max
caaaaattcgatccgaatgtattagatctcaaatcatttctactgaaaactacagctatcgaattccctgcaattaacataagcataacccctttccaacctttctcctcttcagatcggatcagatcagatccaccgccatggatttcatgaaggtcttcgatcaaaccgttcgagaaataaagagagaggtgaatctgaaggtgctcaagattccggaaatcgaacagaaggtgctggatgctactgat

SEQ ID NO: 160956 - DNA, 248 bp, Glycine max
ctgtggagttctgtgtgcatatagtacatgcattcatggtaagcttgggggataggagccaacgagcaaagacagcattgtgtaccatgggggcttctgtattcagtggaatcacacttacaaaattagtcggagtcctcgtcctttgcttctcaacatcagaaatttttgtggtgtattacttccagatgtatctggccttggttatcattggcttcttacacggtcttgtgtttctacctgtggta

SEQ ID NO: 160957 - DNA, 250 bp, Glycine max
ttcagttccaaacaaaacttatcaaaatctcatatactgattcagttctatacataaccatcgaaatttactatcaaaccaaaaattctcaaaatctcttcacctctgtgatgaccatggaatacagaaccttagaactcaacatcatatccgcaaaggacatcaagaacgttaacctcttctccaagatggacgtatacgccgtcgttacgctctccggcgaccctctccaccctcagggcgccaccac

SEQ ID NO: 160958 - DNA, 248 bp, Glycine max
caccaaccaaacctcactctccctttctcccctgaccctctccctgccatggtcatgggagcctttggccacttcgaaccggtctccaaatgcagcaccgagaaccggtctaaccaaaccgtggcctcggacttggacggcaccctcctggtgtcccccagcgcatttccttactacatgctggcagccatcgaagccggcagcttcctccgtggccttgtcctccttgcctccgtccctttcgtgta

SEQ ID NO: 160959 - DNA, 246 bp, Glycine max
ctgatccggagcgatgagtgagagtgagaagcagagggtaacggggaaggtgaagtggttcgatgaccagaagggttttggcttcataaccaccgacgacagcggcgaggaattcttcgtccaccagtcctccatccgatccgacggcttccgcagcctcgccctcggcgagtccgtcgagttccttattgactccgatcccgaaggccgcaccaaggccgtcgacgtcaccggccctgacgaatc

SEQ ID NO: 160960 - DNA, 248 bp, Glycine max
aagaactgcttcagatgcagccattgcaatggccttcttgcgataagcaattactcatccaccgaaggagttttgtactgcaaggtgcactttgagcagcttttcaaggaaactggaacctaccccaagaaatcccagtcgtctggaaagcctccactcgagctgaatagagcaccaagcaagctttctgccttcttctctgggactcaagagaaatgttcaaaatgcaagaaaaccgtatatccatt

SEQ ID NO: 160961 - DNA, 243 bp, Glycine max
gaacagatgatcaatgtgcaaaacaagaactcctcatactttgtcgagtggatacctaacaatgtgaagtccagcgtgtgtgatatcccacctaagggtcttaaaatggcatccacttttattggtaactcgacctcaatccaggagatgttcaggagagtcagtgagcagttcacggccatgttcaggcgcaaggctttcttgcactggtacaccggggaaggaatggacgaaatggaattc

SEQ ID NO: 160962 - DNA, 243 bp, Glycine max
gaagaacaagtagttgagaactaagaaggagaagcaaatggcttcctcaatgatctcttccccagctgttaccactgtcaaccgtgccggtgccggcatggttgctccattcactggcctcaagtccatggctggcttccccaccagaaagaccaacaatgacattacctccattgctagcaacggtggaagagtgcaatgcatgcaggtgtggccaccagttggcaagaagaagattgagac

SEQ ID NO: 160963 - DNA, 248 bp, Glycine max
aaagagtacttgttcggaaaaattgacatgcagctcaagcttgtgcctggtaactctgctggaacagtaactgcctattatttatcttctctggggcctactcatgacgaaatagactttgagtttttgggtaacttgagtggtgatccttacactctccacacgaacgtattcccccaagggaaagggaacagagaacaacagttccatctatggttcgaccccaccaaggacttccacacatactc

SEQ ID NO: 160964 - DNA, 250 bp, Glycine max
gttggattgcactcccaacttccttcactatcttcaattttggagttcagaaagatgtcaagaattggcagctattcttgtgtgttgctgttggtctttgggcaggtcttattattggatttgtaactgagtactatactagcaatgcatatagtccggtgcaagatcgttgcagactcctgcaggactggtgctgcaactaatgttatatttggccttgccttgggatacaagtctgttattattccaa

SEQ ID NO: 160965 - DNA, 108 bp, Glycine max
taagattatttggtgaagaaaaagatgcataacactgctaaagcattcatgacagaagggaaggtttctcctgatccagtagcaattgatactcctggaggttttctt

SEQ ID NO: 160966 - DNA, 251 bp, Glycine max
accaaaaattgatgtagtagggttttgctttcttgatcttgcgttaaactatgaacctccagagtcccttgtaaaatggcttgaagaaggagacaaacctatttacattggatttggtagcctgcctgttcaagaaccaaaaaagatgacacaaataattgtagatgctttggagatcactggacagaggggcatcatcaataaaggatggggaggtcttgggaatttggcagaaccaaaggactctatat

SEQ ID NO: 160967 - DNA, 248 bp, Glycine max
gattggatcacaacagggcattgggccaaatctctgaaagactgaccgttcaggtttctgatgtaaagaatgtcattatctggggcaatcactcatcaacccagtatcctgatgttaatcatgcaactgttgcaacctcagctggggagaagcccgtccgtgagcttatagctgatgatgcctggttgaatggggaattcattactactgttcaacaacgtggcgctgcaattatcaaagctagaaag

SEQ ID NO: 160968 - DNA, 245 bp, Glycine max
cgtggccccaccatggtcgccaacactctccacgccgccgctattgctctgacggagagtgatgactgggattggttcattaatctcagcgcctccgattaccccctcgttacccaagacgatctgctgcacgcgttctcgcatttgccacgcgatcttaacttcattgatcataccagtgacattggctggaaagatcatcaacgggcgaggcctataattattgatccggggttgtatatgac

SEQ ID NO: 160969 - DNA, 242 bp, Glycine max
aaagtcctcttatgggaaatttttcactggagactcctatgtgatcttaaagacaactgcctcaaaaagtggtgctctgcgccatgacatccattactggcttggtaaagacaccagtcaggatgaagcgggtgctgcagctatcaagacagttgagctggatgcagctcttggaggacgtgctgttcagtatcgtgaagtacaaggccatgaaactgaaaagtttctgtcttatttcaaac

SEQ ID NO: 160970 - DNA, 244 bp, Glycine max
gtgatttgatcagaaaggaatatgacatgaagtgcaaattcttacggaatctggaatcaaaaggagaaaagacttctagaattgataaaatgcgtgctgtagtcaaggatctgcattcaagaattagaattgcaattcttaggatagactctatatctaagaggattgaggaattgcgggacaaagagcttacgcctcaacttgaggagttgattgacgggttaagtcggatgtgggaagtgat

SEQ ID NO: 160971 - DNA, 251 bp, Glycine max
aaatgatgataatgaatcctcaatgtttccttcttccaagggatttagatatatactaaatgagcagcaggaactgtctcaacagcaccttaatggcaatacttttgctgataaattaaggttttccaattcaacctacaggaatgagccatcttcagcaagcattttgaactcatcagcaaagccttgggataggcaaatcaggaatactgatttgcatgttagcagtggtcaagaggcacttgtttatg

SEQ ID NO: 160972 - DNA, 246 bp, Glycine max
caacaagggatttccatggaagtctcaaaagaagaagctcgagtggcacccgcaccggccctagtggcgatgctgccatcccctggcatgggccacctaatcccaatgatcgagttcgcaaagcgagtggtgtgctaccataacctggcggtgagcttcgtgatccccactgacggcccaccttcaaaagcccaaaaggcagttctggaggcccttccggactcaatttcccacaccttcctccct

SEQ ID NO: 160973 - DNA, 241 bp, Glycine max
ggcgacacagctactaaacttgaacgacaaggaatataccgtgcttcggaaatatcacaatcacagtctgctgttattggccctttcactgtcataggatctggcaccaaaattgggcataacactaaaattttaaattctgttattggtgaaggatgtaaaattgggtcaaatgttatcatagagggatgctatatatgggataacatcagcatagaagatggctgtaaactccagcatg

SEQ ID NO: 160974 - DNA, 244 bp, Glycine max
acaaatcaaagccatggccacctccaacttctctattgttctctccgtctccctagccttctttttggtgctacttaccaaggcacactcgaccgataccgtttctttcaccttcaacaagttcaacccagtccaaccaaacattatgctccaaaaagatgctagtatttcatcctctggggtgttacaactcaccaaagttggcagcaacggcgtgcccacctcgggatctctcggtcgtgcc

SEQ ID NO: 160975 - DNA, 243 bp, Glycine max
aacattcactccctctctcttgtcttttcctctacgttcctgcattgctcgtctcaaacgctaaccatggccggcggaggtttcaccagcggcggcggcgccggagatttcgaggccaaaatcactcccatcgtcatcatttcatgtatcatggctgccaccggaggtctcatgttcggctacgacgtcggcgtttcaggtggtgtgacgtctatgcccccgttcttgaagaagttttttccg

SEQ ID NO: 160976 - DNA, 242 bp, Glycine max
gagcaagctgacgagatgattagacgggagcttctaagtttactggagcatgacaatgctaagtatccacttgatgagaaagtgattaaggagaagaagaaaggagccaagcgtgctgtaaatgggtctgctgtccctgtgatagaagattttgaggaagatgaaatgaaagaggctgataagttgataaaggaagaggccctgtatctttgtgcagcaatgggtcatgaagatgaacccct

SEQ ID NO: 160977 - DNA, 240 bp, Glycine max
ctcacgcatttcctcgtttttttcttcccttttctctttctccggcgacgatctcagattccggccactcctctcgccggcgagcccttactcttccctcctccgtcgagccctctccgattcgaatcgttcccagcctcgcaccaccatgaatcccgaatacgattatttgttcaagcttttgctgattggagattctggtgtaggcaagtcatgtcttctcctgaggtttgctgatga

SEQ ID NO: 160978 - DNA, 241 bp, Glycine max
cggcggcgcagagccaagacgacggcaaggactaccaggagccggcgccggcgccgctggttgacccgacggagtttacgtcatggtcgttttacagagcagggatagcagagtttgtggccacttttctgtttctctacatcaccgtcttaaccgttatgggagtcgccggggctaagtctaagtgtagtaccgttgggattcaaggaatcgcttgggccttcggtggcatgatcttcgc

SEQ ID NO: 160979 - DNA, 166 bp, Glycine max
tcctccaccagcaacatcaccaccagcaacaacaccaacgccaacaccaacagctgcacctacacctgcttcttctcctgcaacctcaccagtcccttccgctagttctccaccagcaccaggcacagccggaacccgctcccggacccgcaggtggcgccgagcc

SEQ ID NO: 160980 - DNA, 244 bp, Glycine max
  unsure (1)..(244): unsure at all n locations
aagagatgcaagaagcaggcttggngaatgatgggtgaggtctccggcgatcagcaccgtcagctgaaggcggagatagcgactcatccgctgtacgagcagcttctggcagcacacgtggcatgcctccgtgtggcgactcccatcgatcagcttccactcattgatgctcaattatctcagtctcaccatcttctacgctcttatgtctcacacaacactctttctctctcccctcatcacc

SEQ ID NO: 160981 - DNA, 244 bp, Glycine max
gaagaattcttcccacttcggctggagtattatgagagaagaaagaaacatatactgaacaaccttgaacaacttctgttgatattggacaacaaagttaggtttatattaggggttgtgaatggagaaattgtcgtgagcaacaggaaaaaggctgaattgttgattgagctgcagcagaaaggttttactcccatgccaaggaaaggtaaatctgcagaaccccaagttgctggggcaaatg

SEQ ID NO: 160982 - DNA, 264 bp, Glycine max
gtggcacaccagtcaaattcagcatacctgggataagccctggaatcatctttacaggtactccacttgaaatcgagttcgcagagaaaccttattgtgctgaatcctccaaatgggtggcgtttgtggcacaatgaaatccaaaaggcatgtgtgggtattggtggtcctgaaggtcatcctggtcaacaaacatttagtggcacatttagcattcagaaatataaatttggatacaaacttgtgttctgtatcactggctca

SEQ ID NO: 160983 - DNA, 261 bp, Glycine max
gcaaaaaaaaatctcaaaataaaacaaccaaaccacacacctcacaccctcttcaacatcctcagcaagaacaagaagaagaagaagaaacaatgtcttgctccaatctgacaatgttggtgtcctcaaaaccttccctttccgacccctcgaacctctccttccgctctgtcctgaacccttttcagctccctacacaaaacccagcttcatgcaccccttcacgctcctcaagcacccaaattcagtgtggtctgagag

SEQ ID NO: 160984 - DNA, 259 bp, Glycine max
tgatgttggaacggctgctcttatgggcctctttaactcaattgcttatggtctcaattcttctgttcgtagagcaatttgtgaaagactggacaagttctggcctgagagattaaacagatggctccctaacagtttaaagtacaagaacctacagcaagaaagtgaactagttttgttcaaaactgaagatcaataacagtgaatggacaaattgtgatcctccatgccaagtgacatttcttattctagtttacta

SEQ ID NO: 160985 - DNA, 255 bp, Glycine max
ccacgttcaagctcttcttgtgcagcttgcaagttcttgaagagaaggtgcatacccaattgcatatttgcaccttactttcgctctgacgagtgcaagaaattcgccaaggtgcacaaggtgttcggggcaagcaatgtgagcaagatcctcgttgaggttcctgaggaacagagagaggatacggtgaattcgcttgcttatgaggcggaagcacggcttcgggacccggtttatggatgcattggtgccata

SEQ ID NO: 160986 - DNA, 249 bp, Glycine max
tacactcattaattgcaagaatggcacttcgttgcttggtgatgtccctttctgttctcttcactcttggtcttgcgagagaaagccatgccagaaacgaagatttttggcatgctgtttggccaaacactcccattccaagttcattgcaagaacttctaaagcctggccctgcaagtattgaaatcgatgatcaccctatgtaaattgaagaaacacagtacccgaaaaccttcttctataaagaag

SEQ ID NO: 160987 - DNA, 251 bp, Glycine max
gaatagtcagcgatggcacagaagagattcatcatcgaggtcgagaaggcgaaggaggcgagcgaaggaaggccttcgagaggacctgtctatcgtagcctcttcgccaaggatggattccctgctcctatccaaggtctcaatagttgctgggacgtttttcgattgtctgttgagaaatatccatcaaatccaatgcttggtcgccgggaaattgtggatgggaagccgggcaagtacaagtggctaac

SEQ ID NO: 160988 - DNA, 261 bp, Glycine max
  unsure (1)..(261): unsure at all n locations
tggggtgacaacgcagagcgtgttcttgagtcaattcaacttctcttggatcttcttgnggcccctgacccttgcacccttgagactttccttggaagaattcctatggtcttcaatgttgtcattctttctccccatggttactttgcccaagataatgtcttgggataccctgacactggtggccaggttgtttacatcttggatcaagttcgtgctttggagaacgagatgctccatcgcattaagcaacaaggatgg

SEQ ID NO: 160989 - DNA, 261 bp, Glycine max
cggtgattcatttgggggaggaggatggaaagacagtgaataactttctggaaatggataggggggaaggagtgaatgatggtttttctggacctggaccaaatgattcacttattcctggtcttattgatgatgtagccttgaattgtcttgcttgggttagtggatctgattatgccgtgctatcgtgtattaataaaaggttcaataaactgatcaatagtgggtatctatatgggttgaggaaacaattgggggctg

SEQ ID NO: 160990 - DNA, 257 bp, Glycine max
cttttcccccaggtaagatgcctaatatttacaacgctctgatagttaagggtcgagatactgttggtcaacaaattaatgtgacttgtgaagtacagcaattattaggaaataatcgaattagagctgtagctatgagtgcgacagaaggtctaatgagaggaatggaagtgattgacacaggagctgccctaagtgttccagtaggtggagcaactctaggacgaattttcaacgtgcttggagagcccactgat

SEQ ID NO: 160991 - DNA, 258 bp, Glycine max
ataatttcaaaagtctagttcaattgcaggggatagagaagaacctgaacagaaattgtaccagagcactgtactttccagacttgtgcttctttccacaatatgcgttgagatacatatcaacaccatattttatcttgaactctgcctatgatgtattccagcagttcactcatatattggtgccaccctctgctgatatgcgcggacactggaaacactgcaaggcaaacctggcagagtgtacaacagaacaaa

SEQ ID NO: 160992 - DNA, 256 bp, Glycine max
ctcaaacttgcaagggatattaactaccagtttccacagcttgccggtgttaatctatctgctttgattccgtctgctagtgatgatgcaatcagccttattacatcactttgctcctgggatccctgcaagaggccaacagcttcagaggctcttcaacatcctttcttccagagttgcttttacattcctccatcccttcgcaacagagcagtagcaagaactcctccacctgctggaaccagaggagcactgg

SEQ ID NO: 160993 - DNA, 255 bp, Glycine max
aacggcgtctacctccgtaacggcgccaacccattgttcaagccaaaagcgggccaccacctcttcgacggcgacggaatggtccacgccgttaaattcaatgacggcaccgccagctacgcgtgccgcttcaccgaaacgcagcgtctcatgcaggagcgcaaattgggaaaacctgtgtttcccaaggcaatcggcgaactccacggccattccggcatcgcgaggttgatgctgttctacgcaagaggcttg

SEQ ID NO: 160994 - DNA, 247 bp, Glycine max
gagtaaccaaaaggagagtgcaataactcgttgtacattcctagtgtgtgggagagacatggctaagatgtgtgttttggtgttggttcttgctctggctgtggccacaagtgccagaaacgttcccaaccccaaggatgctggtcttaaggaccagaagaacttcatcagctatggtggagttggtggttattccgggattgggaacaatggactgccttttggaggagctggtgccggaataggt

SEQ ID NO: 160995 - DNA, 251 bp, Glycine max
ctggtagttgatcctctggacaagggaatcccgtgggtttggctttgtgacaatggagactcttgaggaggctgaacgatgtgtaaagtatctgaatcgctctgtacttgaagggcgtgtcatcacggtggagaaggtataatacttacctagcaatgccctattttgtggggcctggacttttattagctatgatttttttattcaactccaatgcatggaaattatatgggggatttcttctttagttc

SEQ ID NO: 160996 - DNA, 253 bp, Glycine max
acgagattgcaaaatgaagttcaacattgcaaatcccaccactgggtgccagaagaagctggaaatcgatgacgacctgaagcttcgggcattttgggacaagaggatctcccaggaggtccttggtgacgccctgggtgaggagtttaaaggatatgttttcaaaatcactggtgggtgtgacaaacaaggattcccaatgaagcagggagtgttgacccctggtcgtgttcgactcttgctccatagagga

SEQ ID NO: 160997 - DNA, 254 bp, Glycine max
gtgaggacacgacaatcaagaggtggaggatttcagactccaaatgcttggaatcaatccacgcccacgacgacgccgtgaacgccgtcgtgtgcggggacaggggcgtgatattatccggctcggcggacggcaccgtcaaagtgtagcagcgggagcccgaagggcaaggcctgacgcacgtgccgatgaagactctgctgaagcaggagtgcgcggtgacagcgctggcgatggacgcggcggaggggtcc

SEQ ID NO: 160998 - DNA, 255 bp, Glycine max
ctttctggctgtgttaatatgcgtttcagcactgtcactgagtccttctgttgcgggggaagggcaaaataatggccttgttatgaacttctacaaggaatcatgccctcaggctgaagacatcatcacagaacaagtcaagcttctctacaagcgccacaagaacactgctttctcctggctcaggaacatcttccatgactgtgctgttcagagttgtgatgcttcactgttgctggactccacaagaaggag

SEQ ID NO: 160999 - DNA, 260 bp, Glycine max
ctcttaagcaagtgaggtcaacaaagactcagttcatgctggaccagttagctgatcttcagaataaggagcatatgttggtggaagcaaacagatctttgaccatgaagctggaagaaatcaattcaagaaaccagtataggcaaacatgggaagctggtgagcaaagtatgccatatggaacccaaaatgctcactctcaaggcttcttccagcctttggagtgcaaccccacattgcagataggttctgactacagg

SEQ ID NO: 161000 - DNA, 260 bp, Glycine max
ctgcgtccatggagttttggggtgttgaggtgaaaagtggagaatctctcaaggttgatccgggagatgacaagattatccacctttcaaatgcatgcctgggggatgtcactaaggataaagaaggtctaccagtagccctgtatgtcaagtttggtaaccaaaagcttgtacttggaacgcgttcttctgaagcttttcctcagatatcttatgatttggtatttgagaaggaatttgagctatcccataactggaaa

SEQ ID NO: 161001 - DNA, 256 bp, Glycine max
gccgtaggttcaggcttggggcaagagttgtggacaactttgatggtgttagaataagagaagcaaagacagaatcattcattgtcagtgatcacagaggagaattgtacaagaagcaccatcctcctggtctgtctgatgaagtttggagattggaaaaaataggcaaggatggagctttccacaagcgcttgagtcgggaaaagatcgttactgttagagagtttctcacacttctgaatctggatccagcaaa

SEQ ID NO: 161002 - DNA, 253 bp, Glycine max
caaggtcactgccgttttgcaacaagcttctagccatggcttaactgttgctagaacttgggctttcagtgatggaggttatagagcccttcaggtttctcctggttcctacgacgagaaagtattcaggggattggactttgtagtatcagaagcgggaaaatatggggtgcgtttgatactgagcttggtgaacaactggaaagattttggtggcaaaaatcagtacgtacagtgggtgaaggaacatgga

SEQ ID NO: 161003 - DNA, 251 bp, Glycine max
ggttttcaggaggaattgagatttatctttcagtgcttaccagaaaatcgacaaaacctgttcttttctgcaacaactacaagtaatctgcaaaagttgcgtgggcgttaccaagataagatgtatgtctatgaggcttatgaaggctttaaaacagttgaaacacttaagcaacaggctatattcatccctaaaaaggtgaaggatgtatatttgatgcatattttggataaaatggaagatatgggaat

SEQ ID NO: 161004 - DNA, 248 bp, Glycine max
ctggaattgaggtctattttgatatgatgagaagctttcggacagagtttgatgacctgtttgcagaaggtttgatttctgctgtggaggttggacttggagcatctggagagctaaaatatccttctttctcagaaagaatgggatggaggtatcctggtatcggtgagtttcagtgctatgataaatacctgcagcatagtctgcgcagagcagccaaattacgtggtcactctttctgggctaga

SEQ ID NO: 161005 - DNA, 255 bp, Glycine max
cagcagttgtcaaggcagatgcaaaaaccatccggtttagagaaaaagtcttaaagaagggtgggatctggaaagatatttatggaactgatgaaaagaaggttgctgacatggttagacaagatcaagttgatattttaatagaacttactggtcacactgcaaacaataagctgggaatgctggcatgccgacctgctccagttcaggtgacttggattggttatcccaatacaacaggattgcctacaattg

SEQ ID NO: 161006 - DNA, 256 bp, Glycine max
atggaattctgttggtcaacaaatgtcaccaaatatggttgcgtgcattgcagtagaggcaatatcaattcttgagaagctccacttgaaagggtttgtgcatggagatgtgaaacctgaaaactttttgcttggtcaacctggatcagctgaagataagaagttatatcttattgatcttggtctggcttctagatggaaggatgcatcatctggtctacatgttgattatgatcagagacctgatatattcagg

SEQ ID NO: 161007 - DNA, 255 bp, Glycine max
gcacaccacacaacataaaaaacaaaaagaacaactgttactcacacacgccatgggtaaatgaaaagtttttgagactcagcagttaaaagagaaaagggattcagcgaagatgacatcggttggtgtggcaccaacttcgggtttgagagaagccagtgggcatggagcagcagctgcggatagattgccagaggagatgaacgatatgaaaattagggatgatagagaaatggaagccacagttgttgatgg

SEQ ID NO: 161008 - DNA, 253 bp, Glycine max
gaaggcacaaaaaatggcactgctttctttaagtgccatggacatgagcaatttgagatgacgggtttggatcctgagtataataggttgttcaatgagggcatggtgtgcactgctagggttgtgtccaaggctgtgatcactggctacaaagatgggttcaaccagattaagtccttggttgatgttggaggtggcattggagggtctctttcggagattgttagggcttatcctcatatcaatgccatca

SEQ ID NO: 161009 - DNA, 291 bp, Glycine max
tacgtaaactcaggctcggactccagctcgagcactttttttcttccaacgctcctcctcctactcatagccttcgccacctctgtctccggccgccgtgacctcgtcggagactttctccggctgacctccgaaactgataacgacgacaacttcaagggcacccggtgggccgtcctcctcgccggttccaatggttactggaattacagacatcaggctgatgtttgtcacgcctatcaaatattgaggaaaggtggtctgaaagaagaaaatattattgtttttatg

SEQ ID NO: 161010 - DNA, 265 bp, Glycine max
taaaattcctaatcagaaaaaaaaaaccctagtaatgccgccgatggggaggaagcgaaaggtagcacccaaatcttctctatccaccgagccacctctcaagcagcaacaaccaaaacccgaaaatccccctcaagaatacgaagaagtcgaagaggaagttgaggaagaagaggtagaggaagaggtcgacagaggaagaagaagaagaagaggaggacgaggaagaagaggaggaggaagatgatgaagaagtagtaaacga

SEQ ID NO: 161011 - DNA, 256 bp, Glycine max
acaaaaacaaagaaaaaaaaaaacccttagccaacacaaccatcatggccacctctgctattcagcaatcagcattcactggtcaaactgctctgaagcagctcaatgagttcgtccgcaagaccggtggcgccggcaaaggtcgcactaacatgcgccgcaccgtcaagagtgctcctcagagcatttggtatggccctgaccgtcccaagtacttgggtccattctcggagcagattccatcatacctgaccgg

SEQ ID NO: 161012 - DNA, 251 bp, Glycine max
gtttgttgttgttgttggaagccaaaaccctagcagccggcgagaatggcagacgttgaggttgatgtggcggcggcggcggcggcggcggctgcagggcagccaaagaagagaacgttcaagaagttcagcttcaggggggtggatctggacgcgcttctggacatgtccactgacgaactcgtgaagatgttcagtgctcgcgcacgcagaaggttccagagaggtctcaccagaaagcccatggcctt

SEQ ID NO: 161013 - DNA, 248 bp, Glycine max
catgatgcttgtgaagaatcctgcacttttcgatgtactagtgatgcctaacctttatggtgatattatcagtgacctttgtgctggcttgattggaggattgggcttaacaccaagctgcaacattggtgagggcggtattgcacttgctgaggctgtacatggttcagcacctgatattgctggaaagaatttggctaatccaactgctttactgctgagtggtgttacaatgttgcgccatttgg

SEQ ID NO: 161014 - DNA, 246 bp, Glycine max
caagattcagcaagtgcgttttggaagcagagaccgaaatacttcgagatggcccgtacaaagcaaactgctcgtaagtcaactggaggaaaagctcccaggaagcagcttgcaaccaaggctgcacgtaagtctgcaccaacaactggtggtgtgaagaagcctcatcgttatcgccctggaactgttgctcttcgtgagattaggaaataccagaagagcactgagctcctaatcaggaagctt

SEQ ID NO: 161015 - DNA, 245 bp, Glycine max
gggactgtaactagccgcagcacgaggagcagcctcaggaggagaaggatgtctcacaggaagttcgagcacccaaggcacggttcactgggatttcttcccaggaagcgtgctgctcgtcacaggggaaaagtgaaggcattccccaaggatgacccatccaaggcacccaagctcactgcattcttgggttacaaggccggtatgactcacattgttagagaggtcgagaagccaggatcaaa

SEQ ID NO: 161016 - DNA, 254 bp, Glycine max
atggacttgaaatatgggatgctattaagacatgggttcatgaatatgtctccttgtattacccaacagatgcagcagttcaacaagatactgaactacaagcatggtggaaggaagctgtggagaagggtcatggtgacttaaaagaaaagccttggtggcctaaaatgcagacaactgaagatctcattcaatcatgctctattatcgtttggacagcttcggctctccatgctgctgttaattttggacaa

SEQ ID NO: 161017 - DNA, 252 bp, Glycine max
ctgaatctctgaaagattacgaggaggattttgaaaatcctgaaaagaagcccagaaggaacaagtacgctttcgcatgtgctattttggcttcaatgacttccatcctactaggttaccatattggagtgatgagtggagcagcactgtacatacaaagagatctcaaggtatcggacgtgcaaattgatatcctgatcggtatcataaacctctactctcccgtcggttctttcatcgccggcagaactc

SEQ ID NO: 161018 - DNA, 247 bp, Glycine max
tggagaagcatggagcaaagcttctgatggcccctatgcatgttaatcatgcacgtgaagtcccagagtatgaaatcaatcctaaagagcttgattttaccaacagtgtggagataacaaaggggactttctgtattgcactgtggcgtggaacagaggttgcagtaaaaaagcttggggaggatgtaattagtgatgaggagaaagtgaaggctttcagagatgagcttgctctgttccagaaaat

SEQ ID NO: 161019 - DNA, 246 bp, Glycine max
agcgactgttggagagtgtaaatgaacaattgactgagaaggatgtatacatatcataccttccacttgcacatatatttgatagggtcattgaggagacattcatatggcatggtgcttcaataggtttctggcgtggggatgtcaaattgttaattgaagatgttggcgaactaaaaccaactattttctgtgctgttccccgtgtgcttgatagagtgtactcaggtttgacgcagaagattt

SEQ ID NO: 161020 - DNA, 250 bp, Glycine max
ccagataaaggatgaagtgaggactggcttgaatttcatcaattatgtctataagatatttggtttcacgtatgagctgaagctttcaacgaggccagagaaatacctaggagatattgcaacttgggacaaagctgaaagtgctcttaaagaagctttagatgattttggcaagccttggcagttgaatgaaggggatggtgcattctacggaccaaagatagacatcagtgtatctgatgcattgagt

SEQ ID NO: 161021 - DNA, 253 bp, Glycine max
atacaagacaattctcttgttcatgttgccaagtctaatttgagtggaaaagtcttgccaactatcattggagataatgtcactgtaggtcatagtgctgtgttacaaggatgtacagttgaggatgaggcatttattggcatgggtgcaaccttgcttgatggtgtatatgttgagaaacatgccatggttgctgctggagctcttgtcaggcagaatacaaggatcccctatggagaggtttggggaggta

SEQ ID NO: 161022 - DNA, 259 bp, Glycine max
aaacattgtgacaacagtttcacctacttacgcccaagaagtgagaacttcagagggagggcatggtctccattcaacactctctgcccactccaaaaagttcattggtattcttaatggtattgatactgatgcatggaatcctgccaccgatgcatttcttccagtccagtacaatgcaactgatcttcaagggaaagcagagaataagcaagccttgagaaggaactaggtctttcatctacagatgttaggaggc

SEQ ID NO: 161023 - DNA, 256 bp, Glycine max; identical to SEQ ID NO: 110410

SEQ ID NO: 161024 - DNA, 249 bp, Glycine max
accatattggtttcactttggtcttcttcaccctgttagggtttgcatcagattcccccaattcttgtttgattttgcgctttcactagtttttcttcgacatgactcaagatctcgagatgagggatcgctcaacgccttccaactctgtttctttgcctgctccatctactttgcagcatttgaaggagatagcgtctcttatcgagaccggttcgtactcgaaggaagttcgtagaattgctcgcg

SEQ ID NO: 161025 - DNA, 247 bp, Glycine max
ccaggattgatcataagtttgacctcatgtatgcgaagagggccttcgtgcactggtatgtgggtgaaggtatggaagagggtgagttctcagaggctcgtgaggaccttgctgctcttgagaaggattatgaggaggttggtgccgagtctggtgatggagatgatgatggtgaaggagatgatgattattagagtgtctgaaatatcgtgtgtttgatgtctactttttcgtcttctgtcggaca

SEQ ID NO: 161026 - DNA, 251 bp, Glycine max
cggctgcatggtgggatgctgacttgcctaactacacgcccgtgttgtacaaacccgaggaccctaaagggttgaggtttacggtgcttaagccaagccaaattgcgagaatgtaccactccacttccacggtgcttcccagtggaaagatttgggtttctggaagcaacacccacaatacctatagggacgtggataagttcccaactgagacaagagttgaagctttctctcctccttatttggacgcc

SEQ ID NO: 161027 - DNA, 251 bp, Glycine max
caaagttagaaacaaggagaaagaaagaagatggcaggaaagaaaatcccagatgtgttgctgaattcaggacacaaaatgccagttataggcatgggaacttcagtggagaatcgtccatcaaatgagacccttgcttctatctatgttgaagccattgaggtgggttaccgtcattttgacactgctgcagtgtatggaacagaggaagccataggcctagccgtggccaaagccatagacaaaggcct

SEQ ID NO: 161028 - DNA, 251 bp, Glycine max
cgcgcggattcaaaccttaattcttctattactctctttctctcatgcgttcttgctctcaacaacaatcacacaccgccatcgatgccttcgttcttttcttcttcgttctcctttttgctctcgttcgagggttctttcgtggggaacactgcagatttcaccacccgggtcttattcatccgtgcccatgtccaaagttctcggcttttccggagttgacgatctttgccctatgggatcaatatacg

SEQ ID NO: 161029 - DNA, 248 bp, Glycine max
ccagagcgaatatgtgtccgcacgagacaagcgccgcgaattcgtttccggcttcactggaagtgccggcttggcacttataacaaagaatgaagcactgctgtggacggatggacgatattttttgcaggctgagcaagaacttagtgctcagtggaagcttatgcgtattggtgaagatcctgctgtagatatctggatggccgataatttgccaaaagaggcatccattggggttgacccttggt

SEQ ID NO: 161030 - DNA, 123 bp, Glycine max
gcttacttggacttacaccacttgctgaacgtgtgagcttcattacagaacaagttgccttttacactggtcccacagttggaggacttctgaatgctacatgtgggaatgttactgagctca

SEQ ID NO: 161031 - DNA, 247 bp, Glycine max
gccatttgggagttaggttctgcacgctctgcttccagcgagtgttctttcttcgtttcaacaccttaatttgcacacgctgcttcttcagcttgagaaatggcacaagaaacctttctattcacatctgaatctgtaaacgagggtcaccccgacaagctgtgcgaccagatctctgatgcagtgctcgatgcgtgccttgaacaggaccctgacagcaaggttgcctgtgagacatgcaccaaga

SEQ ID NO: 161032 - DNA, 249 bp, Glycine max
ttcccaaggccttgagaaatatgttcaagtgcacatttggtgaatattcagaaagggaagggtacaatggatctgaatatgctccaacttatgaagacaaggatggggattggatgctggttggagatgttccatggaacatgtttgtgtcatcctgcaagagactgagaattatgaaagcatcagaagcaaaggggttgggttgtttttgaccaaaataaaaaaacaaagcaggaccatcatgcatgc

SEQ ID NO: 161033 - DNA, 114 bp, Glycine max
cttgttggtcttgtaaggcttgtcaatatatactacttatatatatatatatatataaacataaggaaattgttcgtgttttgtatgagaatactttttaagtcatctgtactc

SEQ ID NO: 161034 - DNA, 249 bp, Glycine max
tgatccgtggctctggttctggctctggctctgccctttttggttttctctcgttaccgaaaccagaagaaccatttgtggtggatatggatctggaccagtggatctccaaggtcaaagatggccagcatcttcttgaagacgagcttcaacttctctgcgaatttgtaaaagagatccttattgaggagtccaatgtgcagcctgtcaatagtccagtgactgtttgtggtgatattcatggtcaat

SEQ ID NO: 161035 - DNA, 254 bp, Glycine max
gagataactagaaacagtgtgatgaaaatgaaggtccttgttttcttcgttgctacaattttggtagcatggcaatgccatgcgtacgatatgttccctctccgaatgaacactggctatggtgcccgtactccggaggtgaaatgcgcaagttggaggcttgctgtggaaacacacaacatctttggctttgagaccaatcctgaagagtgcgttgaagcaacaaaggaatacatccatggcgaacaatatag

SEQ ID NO: 161036 - DNA, 243 bp, Glycine max
cccactttaaagagttgatcctagagcatgcacctccacctccagcaatagcagagtatgctactgctaatttaattaagatgggtttcccacaacgatcagctgagggttctgtcgcaatatgcacatgtcatgaagaggccaagaccggagggggatacacttgtccaagatgcaaagttcgtgtctgtgagcttcccactgaatgtcgtgtgtgtggattgacccttatttcttcacccc

SEQ ID NO: 161037 - DNA, 247 bp, Glycine max
aaaaacttaaatcaaaatacttaatagcatggcgatacatttatacaaaacttctaccccaagcacacgcaatggagccgtagacagtcaagtaaaatccaatccacgaaatcatttgatctatggacagcatcgttgtggtaaaggccgtaatgccagaggaatcattaccgcagggcatagagggggaggtcataagcgtctataccgtaaaattgattttcgacggaatgaaaaaaacatatat

SEQ ID NO: 161038 - DNA, 242 bp, Glycine max
acttctcggtggagggataagagctgaagagatcaaagaactttgggcagagtatgaaaacaattcttctttagaggcaaatcttgtaaaggattttgacaaggttgagatgattctgcaagcgctggaatatgaaacagaacatggaaaagtgttggatgaattcttcctttcaactgcagggaagtttcaaactgaaatcggaaaaagttgggcggctgagatcatttcaagaagaaaat

SEQ ID NO: 161039 - DNA, 248 bp, Glycine max
aaagcttcagcaaacatgctagggaacttgttactcgccttcagaagattgacggtgacaactatccagagaccttgaatcgcatgttcatcatcaatgcaggttctggatttaggatactgtggaacaccgtaaaatcattccttgatcctaagaccacggcaaaaatcaatgttcttggcaacaagtatgacaccaaattgctagaaataattgatgcaagtgagttgcctgaatttttaggaggc

SEQ ID NO: 161040 - DNA, 251 bp, Glycine max
ctgtcctcacttctgtcagttgcatctgcagcaacagaggagggacgaacaaggccattcaaaagggtctatgcctttggagactctttcacagacactggcaacacccaaaatgcagaaggtccaagtggctttggccatgtttcaaactctccctatggaaccactttctttaaccactccaccaataggtactcagatggtaggcttgtgattgattttgtggctgaagcactttcactgccttactt

SEQ ID NO: 161041 - DNA, 243 bp, Glycine max
caacagcacaaagcgggttactgtctgttcaagctaccatctctctctctctttcttagtgcctccttgccagaagttaaaatggcccaagaaactttcctattcacatctgaatcagtgaacgaggggcaccctgacaagctctgtgaccagatctccgatgctgtgctcgatgcatgcttggagcaggaccctgacagcaaggttgcctgtgaaacctgcaccaagaccaacatggtgatg

SEQ ID NO: 161042 - DNA, 241 bp, Glycine max
cagaagaagaagaagaagatggagaagtatcagatctggagcaggagaatagcgttggcagcgtttgcgtttgctctgctgttccaatcggcctcagcagacgacgtcgttgtgctctctgaagataagttcgagaaggaagttggtcaggacagaggagctctcgttgagttctatgctccttggtgtggacactgcaaaaagcttgctccagaatatgaaaagcttggtagcagcttca

SEQ ID NO: 161043 - DNA, 245 bp, Glycine max
gttgatttggatttgggaaattacgagcgcttcctcgatgtcacgcttaccaaagataacaacatcaccactggaaaaatttaccagtctgttcttgagaaggaacgtaaaggcgattatctcgggaaaactgttcaggtggtcccgcacatcactgatgctattaaagattggattgagtcggttgctgtgattcccgtggatggaaaggagggccctgcagatgtttgtgtgattgagctggg

SEQ ID NO: 161044 - DNA, 250 bp, Glycine max
tttcattttccctcactttctcgctcgccaaacgcccctctctctcctccaatggccgaccagctcaccgacgaccagatcgccgagttcaaggaggccttcagcctcttcgacaaggacggcgatggttgtattactactaaggaacttgggactgtgatgcggtcactagggcaaaacccaactgaggcagaactgcaggatatgactaatgaggttgatgctgatggcaatggaaccatcgacttcc

SEQ ID NO: 161045 - DNA, 245 bp, Glycine max
agcaagtggacttgggcgttgcaagataaataatggaggctgttggcatgatgctcaaaatggacatgcattttctgcttgtttggataatggaggggtcaaatgccagtgtcccacagggtttagaggtgatggtgtaaaaaattgtcaagatatagatgaatgcaaagagaagaaggcttgtcagtgccctgactgtagctgcaagaatacttggggaagctatgactgcagttgtagtggag

SEQ ID NO: 161046 - DNA, 244 bp, Glycine max
gaaagtagcaaagatgtttcctttcgggcaaaagggtcaaaagataaaggggactatggtggttatgcagaagaatgtgttggatatcaacagcatcaccagtgttggagggatcgttgaccaaggcttaggcttcataggcagtgcagtcgatgcacttacttttgcagccaccaaaatctccatccagttgattagtgctaccaaggctgatggtgggaaaggataaattggaaagagtaca

SEQ ID NO: 161047 - DNA, 240 bp, Glycine max
cagttctactctacgctctaaaccctctctctctctctctctcgatctatcatggctttgcccaatcagcaaaccgtggattaccctagtttcaaactcgtcatcgtcggtgacggcggtacaggaaagacaacgttcgtgaaaaggcatcttaccggtgaattcgagaaaaaatacgaaccgaccattggagtggaggttcacccattggatttcttcacaaactgcggaaagattcgc

SEQ ID NO: 161048 - DNA, 240 bp, Glycine max
tagggttatcatttctccatttccattttctctctcacttttcaagaatcgtaagctatgggaaagtcttacccaactgtgagtgctgattaccagaaggccgttgagaaggcgaagaagaagctcagaggcttcatcgctgagaagagatgcgctcctctaatgctccgtttggcatggcactctgctggaacctttgacaagggcacgaagaccggtggacccttcggaaccatcaag

SEQ ID NO: 161049 - DNA, 241 bp, Glycine max
ttctcatcctcctctgtctctctctctccaccattgccatggattcttacaagctccggccatccagcgccttcaattctcccttctggactacaaattctggtgctcctgtttggaacaacaactcctctttaaccgttggagctagaggtccaattctgcttgaggattatcatcttgtggagaagcttgcaaactttgacagggaacgtatcccagaacgtgttgtccatgccagggg

SEQ ID NO: 161050 - DNA, 247 bp, Glycine max
gaaaaagcaatggaagctcaatcacaccaccgactcaatgtcctttttcttccatatccgacacctggccatttacttcctatggtagacacagcaagactatttgccaagcatggtgttagtgttactattctcactacccctgctattgcttcaacattccaaaatgccatagacagtgacttcaattgtggatatcacatcagaactcaagtggttccattcccttcagcccaagttggtctca

SEQ ID NO: 161051 - DNA, 286 bp, Glycine max
attcggctcgagcacgtttcctttttatctctatctttcttcacatcttaaccttgttcttaccagatggctgcctcagttaaactcttatttttgtcctttctctcgttgttcatctctttctccatagctcaaacctctttcagaccaaaggcacttgttcttcctgtaaccaaagatgtttctgcctcagttcctcagtatgtcacacaaatcaaacaaagaaccccacttgtggcagtgaaactaactgttgatcttggtggtggctacttgtgggtgaatt

SEQ ID NO: 161052 - DNA, 272 bp, Glycine max
cttcttctttttcatcaatcatcaccagtggttcttttccttctgagaagatcgaattgtgttttgcaaaaatgggagttccagagaaagaccctctttcccaattgagtttgcctcctggttttcggttttaccccaccgacgaggagcttctcgttcagtatctgtgccgcaaggtcgctggccaccatttctctcttccaatcattgccgaaattgacttgtacaagttcgacccatgggttcttccaagtaaagcgattttcggtgaa

SEQ ID NO: 161053 - DNA, 271 bp, Glycine max
atcgaactcgccaggaacggaactttctcagattgacacacaccatgaaggaaagtggtttcgagaataatgatacaaagcaagctgctgctgatgtgttgtttctatattcaaaatttgcaatggcatgcattggatgtaaggctcgtccatgtgatttgaggtttcatttgatgaaggagatttcaggtatgccctcttctctaaatagggagtcaccacagaatgcagcatctcctgatgcaatgggtgagtcatccagcacaggaac

SEQ ID NO: 161054 - DNA, 271 bp, Glycine max
ggaagaggggatatgaatacaaggagctagttgtctatttgcaataacataacatcatcaagcaggatcatcgatccaaccttagtattcaacccagagagatttgtagtaataattactacaacaacttaaaacaatggcaggaggaggttatgtagattcgggaaatgcaaagcaatttgaagggaaggtcactgcattcgtattggttacatgctttgtggcagccatgggaggcttactcttcggttatgatcttggaataaccgga

SEQ ID NO: 161055 - DNA, 263 bp, Glycine max
caaaaacttcatagatggaacgaacacttatagaactgccactgtcgctattcaaggagatcactttgtggccatcaatatggggtttgagaattctgctggacctcataagcatcaagcggtggcattgagagtccaagcagacaagtccatcttttacaattgctcaatggatgggtatcaagacacactttatgcacacaccatgcgtcaattctatagagattgcaccatttcaggtaccatcgactttgtgttcggta

SEQ ID NO: 161056 - DNA, 265 bp, Glycine max
caacactaaaatggcacttccatacccattttcctacctcctcttcctccttctaattctcttatcttctctcccaaacatttcccaagccacctctcgtgccccaaatcgcatgttagccttggttcaaaaccaaccgcttgtactaaaataccacaagggtcctcttctaaagggcaacatcaccctccatttgctatggtacggtacatttacccccacgcaacgatcaatagtcatcgatttccttgaatccctaacctcc

SEQ ID NO: 161057 - DNA, 270 bp, Glycine max
tggccgtgggacttcctaaacgtgctcctatagactccaacctactgaagttgctcattccggtggctgtgtgccatgcattaggccacgtgaccagcaatgtctcatttgctgcagttgctgtttctttcactcataccattaaagctcttgagccattcttcaatgctgctgcttcacagttcatacttggccaatcaatccccatcactttgtggctgtcactggctcctgttgttattggtgtgtccatggcatctttgaccgagc

SEQ ID NO: 161058 - DNA, 269 bp, Glycine max
gagaaggaaaagcacatgacgataaatttctaagggatgctgtgttcaatctatttgtggctggaagagataccataacttcagctctcacgtggttcttttggcttgttgctacaaacccctcagttgaagccaagattctcgaagagatgaaagagaagcttgggaccaaagaaaagtcgcttggggttttaagcgtggaggaagtgaaaaggctggtttatctgcatggtgctatatgtgaagcgttgcgtctctttcctcctata

SEQ ID NO: 161059 - DNA, 267 bp, Glycine max
caaaagagcaagctcatttcttagcacgagctgtgattgatgatgtattggctcctctgaatttagaggaaattagcagcaagttgcctccaaaatgcagtggtagtgaaactgtacggatggctagatcacttgttgctgctcgtcatgctggtgagagactattgagatgttgacgtggtgggactggatgggctgttgaagatgccaaggacaaaatcatgaagctcttggaggagtacgagagtggaggtgttgtgagtgaag

SEQ ID NO: 161060 - DNA, 268 bp, Glycine max
agagttggggcgttgcctcaaatatttgatgaacctttttctccatcaccagcactgaaagaaaaagctcaagtcacagatttaaactctgtaagcttatcagagccaccagtattgagccaaggctcaaccgagcaattagcactgaaaaacaaggctcccagatggcatgagcagctacagtgctggtgtctaaacttcaagggtcgcgtttcagtggcttctgttaagaactttcaacttgtagctgctgttgatccatctcata

SEQ ID NO: 161061 - DNA, 267 bp, Glycine max
cagaatcccaccgccatggatttcatgaaggtcttcgatcaaaccgttcgagaaataaagagagaggtgaatctgaaggtgctcaaggttccggaaatcgaacagaaggtgctggatgcaactgataatgaaccttggggtcctcatggtactgtgctggcagagatttcacaggctaccaaaaaatttactgaatgccaaatgatcatgaatgtcctttggacaagactgggtgaaactggaaaagattggcgttatgtatacaag

SEQ ID NO: 161062 - DNA, 261 bp, Glycine max
atatagcgaaaggggtggagtccctactgcgtcactctgacccaaactccataactacggtaaacggcgtcgttcagcagctggaggccaaactagggttagacctctctcacaaggccagtttcatcagagaccagatcgatcatcttctccggtcacagccacagacatttgctcctcaccctcctccacttcacaaagactattttgcccctcacacccaactgcacttcccaaccacccactttgctccccattttg

SEQ ID NO: 161063 - DNA, 268 bp, Glycine max
gtggagttagaacaatcttttatggaaggggcttacaatcgtgtcttgagtgcacggcagacagtgccacatgatacatacgtttatttcatggatcttttggcaaagactgtcagagatgaaatagcaggttgcagtgagaaggcctatgactatctttcaattaaggatgccaagcaaatgttgctgttctcctcagaccaggaactcctggaatatattaaagaggagcatcctgagtgggagattaagaatgatagtgtctttt

SEQ ID NO: 161064 - DNA, 265 bp, Glycine max
cttggtgaatgcatggtggctggccaacaaccctgcacactggaagaagccagaggagttccggcctgagaggttcttcgaggaggagtcgcttgttgaagccaatggcaatgactttaggtaccttccctttggtgttggcagaagaagctgccctggaatcattcttgcattgccaattcttggcatcactttgggacgtttggtccaaaactttgagctcttgcctccccctggccagtcacagattgacactagtgagaaa

SEQ ID NO: 161065 - DNA, 267 bp, Glycine max
  unsure (1)..(267): unsure at all n locations
ttctaaagctagtaagtagtaagtagtaagccactatcgtttctctctaacagcaaaaaagttctaacctcaccaaacccacactaccatgggtagagagaatcgcgagcttcacgtattattcttccccttcccagctaatgggcacataataccaagcattgacttagccagagtctttgcttcaagaggaatcaaaaccaccgtagtcaccactcccctcaacgttccacacaactcaagaacgatangaaaagccaacatcat

SEQ ID NO: 161066 - DNA, 265 bp, Glycine max
gcaacctagcaatggaggcgattaggaagagtaggattcttatatttggaggaactggttacatagggaagtatatggtgaaggcaagcgtcacgttaggccatccaacttttgtctacactcgccctcttgatgcacaaactccttcctctaaggcacagctttgcaaggagttcaactctatgggggtcacacttgtccatggagaacttgagcatgaccagattctggcagtgattaaacaagtagacattgtgatatgttc

SEQ ID NO: 161067 - DNA, 231 bp, Glycine max
tgagattaagaactactggaggacaaggatccagaagcacctcaagcaagcttccagcagcttccagcaacagagtagtaattctgagataatttatcatccccaagcttgcactagccaagtgtccaccatggcgcagccatagaaacctattctccacccagttatcaaggaatgttagatccattttcaattcagttcccaacaaatcctcatcattctagttgttgt

SEQ ID NO: 161068 - DNA, 258 bp, Glycine max
gcacaaggtttggtcttgttaggttacctctgtgacatttgtgttgttagttcgtagttgcggctgacacccagaaagaaagaaagcaggaaaaaaacaaaaaggcgcagatgggtagcacaggtttctcatggaaattggcggatcatccaaagcttccaaagggtaagactgtggctgtggtggtgttggatggttggggagaggccacacccaatgagtacaactgcatccacaaggctgaaacaccctgcatgg

SEQ ID NO: 161069 - DNA, 257 bp, Glycine max
ctccttctcgctctttcagctttgacttttgttggaaactaaggcctaatcaaaatggtgaagttcacagctgaagagctacgtcgtattatggactataagcataatatccgtaatatgtctgtcattgctcatgttgatcacggaaaatcaaccctcactgattctcttgtggctgctgctggtattattgctcaagaagttgccggtgatgtccgtatgactgatacccgtgcagatgaagctgagcgtggtat

SEQ ID NO: 161070 - DNA, 263 bp, Glycine max
cttgagggtggttccttcgctgcaaaggactaccatgatcctcctccagcaccattgattgatgctgaggaactcacacagtggtccttctacagggctttgattgctgagttcattgccacaatgctcttcctttacatcacagtgctcactgtgattggttacaagagccagagtgatgtaaaggctgggggtgatgtgtgtggtggagttggcattcttggcattgcttgggcctttggtggcatgatcttcattctggt

SEQ ID NO: 161071 - DNA, 265 bp, Glycine max
gtactaactcccatttcttatttattattgaattaaccgatcaacttgctttgttatcgaacatttctttttgatttcaaaaattttccggaaaaaatttgaatctatttttatatgcgaatcaatcctactacttctggtcctgaggtttctgcgcttgaaaaaaaaaaatctgggacgtatcgcccaaataattggtccggtactagatgtagcttttcccccaggtaagatgcctaatatttacaacgctctgatagttaag

SEQ ID NO: 161072 - DNA, 262 bp, Glycine max
cttattgcgttgatctggaagtttgattttgcacccttcatggttttgattattgccatactcaatgatggtaccattatgactatatccaaggatagagtgaaaccatcaccacttcctgatagctggaaactgagggagatatttgctactggcgttgtgctaggaagttacatggcactaatgacagtagtatttttctgggcaatgaaagataccaacttcttctcgaacaagtttggtgtgaggccattgagagata

SEQ ID NO: 161073 - DNA, 261 bp, Glycine max
cactagcgtgtttcgtcttcttcgtctttactcttttcttcaccgaagcgaaaaagaaaaggcttgacttgagagaaatagagcttcgaatcgaaactcagaattagaaaaaaacacaaatcacaatcacaatggcaaggtacgaccgagcaatcaccgttttctcccccgacggccacctcttccaggtcgagtatgccctcgaagccgtccgcaagggcaacgccgccgtcggcgtccgcggcaccgacaacgtcgtcc

SEQ ID NO: 161074 - DNA, 255 bp, Glycine max
aaccccaccaatgtgcagcttccaggtatgtacaacaaggaagagaacccccgtgttcccatcattgtcaccggtaacgatttctcaacactctatgcacctctcatccgtgatgggcgtatggagaagttctactgggcaccaacaagggaagaccgcattggtgtttgcaccggaattttccgcactgatggtattcctgaacaggacattgtcaagcttgttgacaccttccctggccaatccattgatttc

SEQ ID NO: 161075 - DNA, 256 bp, Glycine max
ctcattcaagattcagcaagtgcgttttggaagcagagaccgaaatacttcgagatggcccgtacaaagcaaactgctcgtaagtcaactggaggaaaagctcccaggaagcagcttgcaaccaaggctgcacgtaagtctgcaccaacaactggtggtgtgaagaagcctcatcgttatcgccctggaactgttgctcttcgtgagattaggaaataccagaagagcactgagctcctaatcaggaagcttcctt

SEQ ID NO: 161076 - DNA, 258 bp, Glycine max
aaaaaatcttcaaattctctgagtcagccatcgacaagatcaagtcaacggtcaacgagaaccctccatcggacggctcaaaaccattctcaacatttcaggctctttcctcccacgtttggcgccatgtaagccatgcacgtaacttgaagccggaggattataccgtgttcaccgtctttgccgattgccggaagcgggtggacccgccaatgccggagacttatttcggaaacttaattcaggctatttttaccg

SEQ ID NO: 161077 - DNA, 262 bp, Glycine max
agggcagcacgcttgtccgggagcagagtagatgccatggaagaactggatagcgaagataaacgagtcttgagtcgaatcaagtgctggtttctatcacactcgcaacatctgaatttctttactattctagtgcttgcttcggttccaaatcctctatttgaccttgctggcattatgtgtggacaatttggcattccattttggaaattttttcttgcaaccttgattggaaaggcaatcattaaaactcacatacaga

SEQ ID NO: 161078 - DNA, 263 bp, Glycine max
gaagcgacgcgtgcgcccgccgtccgtttgccgaccagcagtacgtcgcctcggccccccaaaggcacgtgccgttggtgaccctcgtgaggcggattagccctacgagacgccttgaagcgcaattcccatcgagcggcgggtagaatcctttcctgagccaataaaacaatctctctgtcttcccttgaagaaggagaaatggggggaaattaaaagggaaaaaggcatataaccggaaacaatcgcgtttcgaattcaaa

SEQ ID NO: 161079 - DNA, 258 bp, Glycine max
atttaatttgccaaccgcgccagatcgccattactacaacaacatagacgagtgcggtgcattccctcgtttaccatgctttcctaagagaaagagaaaagtaaaacccctcactactgatagattttcattcctccgaggaaaaaaaaaacatgtcggatgctttgatcaatggattggccggagctggaggagggatcattgctcagctcatcacatacccacttcaaactgtaaacactcgccaacaaaccgagc

SEQ ID NO: 161080 - DNA, 257 bp, Glycine max
aaatccatcaggtaatttcaaagcaatgcatcgacacatatccaaaggtacatggacattctcaatgcaggatcagggttggcaagtctctgactgcacagcagaaggattaaaggctgcacttctattgtcacaaatgtctcctgacctaataggcgagaaaatggaagatgagaggttctatgatgctgttgatgtgattttatctcttcagagcggcaatggcggcttccctgcttgggagcctcaaagagcgt

SEQ ID NO: 161081 - DNA, 256 bp, Glycine max
ctcttttttctctctcttgcaaaacctaattttcatttcttccctcaaatttcaaaatgcgtgagatccttcacatccagggtggccaatgcggcaaccagatcggcgccaagttctgggaggtggtttgcgcggacacgggatcgaccctaccggaaggtacggtggggactcggagttgcagctcgagaggatcaatgtctactacaacgaggccagttgcggtcggttcgtgccgcgcgcggttctcatggac

SEQ ID NO: 161082 - DNA, 258 bp, Glycine max
cgcagtcgcagtgagtgaaaaggaaaaccctaattgcggtattctcagtgccttcgagagaaagaaaaaatggcagataatcttgttctccgtggcaccatgcgcgcccacaccgacgttgtgacggcgattgccactcccatcgacaactccgacatgatcgtcaccgcctcacgcgacaaatccatcatcctctggcatcttaccaaggaggacaagacttacggtgtcccccgccgccgcctcaccggccattct

SEQ ID NO: 161083 - DNA, 249 bp, Glycine max
agggactcgttgttcttctcccaggttatttagaaaagcaaaatggtgaagatttgctgcattggtgctggatatgtggggggtcctactatggcagtcattgcacttaagtgcccatccattgaagttgctgttgttgatatctctaaatcccgcattgcagcctggaacagtgaccagcttcctatctatgaacctggccttgatggtgttgtgaagcaatgccgtggcaagaacctcttcttcagc

SEQ ID NO: 161084 - DNA, 255 bp, Glycine max
gtctcagaccctttctcaccaccatcttctttctcacactcacagtgctcgaaggtttcagcatcatcctcagtgattttctacaacaagtgccagcacccagtgtggcccgggatccagcccagcgcaggaaagcccgttctggcccgcggaggcttcaagctcgccccaaaccgggcctactccctccagctccccgctctatggtccgggcgcttctggggccgccacggctgttccttcgacgccggcggc

SEQ ID NO: 161085 - DNA, 258 bp, Glycine max
atggccacctctgctattcagcaatcagcattcgcaggtcaaactgctctgaagcagctcaatgagttggtccgcaagaccggtggcgccggcaaaggtcgcaccaacatgcgccgtaccgtcaagagtgctcctcagagcatttggtatggccctgatcgtcccaagtacctgggtccattctcagagcagattccgtcatacctgaccggagaattccccggtgactacggatgggacactgctggactatcagct

SEQ ID NO: 161086 - DNA, 257 bp, Glycine max
cacagacacaaggtttagtcttgttaggttacctctgtgacatttgtgctgctagttcatatatttgcggctgacaccgagaaggaaagcaggaaaaaaacaaaaaggagcagatgggtagctcaggtttctcatggaaattggcggatcatccaaagcttccaaagggtaagactgtggctgttgtggtattggatggttggggagaggccacacccaatgagtacaactgcatccacaaggctgaaacaccctgc

SEQ ID NO: 161087 - DNA, 252 bp, Glycine max
tgatgatggagatggcgaacgaaacgctgtcgttgctgtactcgcggcgttggtgctactcgcggcgagtgtggcggtggatgctcaggagaactcggacgtgaagacgctggtgaagtacaagcacgggaagaagtactgcgacaaaggatgggaatgtaagggctggtcaatttactgttgtaacctcaccattaccgattatttccagacctaccagttcgagaatctgttctccaagcggaactcgcc

SEQ ID NO: 161088 - DNA, 250 bp, Glycine max
atttgtttatcctggttgggaaggttctgtcaccgactcacgagtgttaagggcagtccttgataacccagatcagaatttccctcaaatacctcaaggaaagtattaccttgttgacaagggatatttaaatacagaagggtttattgctccttaccaaggggttcggtaccagcattatgagtttagaggcgctaatcaattaccaagaaacgcaaaagagctgttcaatcacaggcattgttttctg

SEQ ID NO: 161089 - DNA, 236 bp, Glycine max
ggctcgagaattcaacttaagagatcaatatagccaccattaccaagcctccttctaatatatgtttcctccttctgttgcttctagcacacttccatttgggccaaagccaagttgagttgaattactactctaaaagctgcccaaaagctgaagagataatcaaggaacaagtcacacaactatacaacaagcatggaaacactgccgtttcgtgggtcagaaatctcttccac

SEQ ID NO: 161090 - DNA, 251 bp, Glycine max
acgtcgtccaagagcttttcagggacctcccaacgcagctctcgatcaagcccgatttggtgacttacaacaccatcatcaaggcgttttgtgaaaagggttcgtttgattcggcgttgtcggtgcttcgggagattgaggagaagggtttgagtcctgattccatcactttcaacactttgcttgatgggttgtactcaaaaggtcgttttgaggagggtgagaaggtgtgggagcaaatgagtgtgaat

SEQ ID NO: 161091 - DNA, 255 bp, Glycine max
ctcttataacacaacacaacccatggccaccacctccgcattcctcctccttccactcctcctgctgctccacctcgccatcgccgctcacggcatcggcatcaactacggcacgctcggcgacaaccttccaccgcccgcggcggtggcgaacttcctgaagacgaagacgaccatcgaccgcgtgaagatctacgacgtgaacccggacatcctgcgggccttcgccggcagcggcatctccgtgacggtgac

SEQ ID NO: 161092 - DNA, 254 bp, Glycine max
gggagaaagcctgctgctcaaaatgccaagaaggcacctgctgctgctgccaggaagagaaacgtaggtggcaagcaatctcagtttttgggtcagaaactcataactgatatgttggagagtacagggatatcaccagagaagaaagtgaggaagatgagggcgtctccatttaacaagaaaagcagttctgtattgggaagggttgctgctgctgacaaagatgaaagtgtaagtaaagacttgtctggtgg

SEQ ID NO: 161093 - DNA, 286 bp, Glycine max
aagcgcttgaaggagatggaagatgaagctgctgctttgcgagagatgcaggccaaggtcgagaaggaaatgggatctgcgcaagatcctgcaaatgcttctgcaagtcaggccaataaagaggaaatagattctcgatcagtctttgtaggcaatgtggactattcatgcactcctgaagaagtgcaacagcattttcagtcttgtggaacagtaaacagagtcaccattcgaactgataagtttggccaacccaagggttatgcctatgttgagttccttgagg

SEQ ID NO: 161094 - DNA, 281 bp, Glycine max
atgagtggtcattggtgaacaagcagaagcctatttggatgaggaaacctgaagagatcacaaaagaagaatatgctgctttctacaagagtcttaccaatgattgggaagagcatttggctgttaagcacttttctgttgagggtcagctggagtttaaggctgtcctctttatccccaagagggcaccttttgatctttttgacactaagaagaagcctaacaacatcaaactgtatgtccgccgtgttttcatcatggacaactgtgaggagttgatg

SEQ ID NO: 161095 - DNA, 266 bp, Glycine max
gtcgccggagaaaattttccggcaagttcgtgcaaccggaaactcatcggcgcgaggtggttctcaggcggatacgaagccacccacgggaagatgaacgagaccactgagttccgctcgccatgcgactccgacggccacggcacgcacactgcgtcgatcgccgccgggaggtacgtctctcaggcgtccacgttggggtacgcgaatggcgtcgccgccgtcatggcgccgaatcgggactcgcggtgtataaagtctgctgg

SEQ ID NO: 161096 - DNA, 280 bp, Glycine max
gctgaaactgcaactaactgccaccatccaggtgttaaagaaagccggtcgcccatctgaacgtctggtaagccatgagaattgcaaatttacaaagccagcagagcatgagtgtgttcatgttcaggagattacagaagcttctgggactgaagaagcagaagcagatgctgagtatgacaatgctctaaaagaagctattagaggtgtccaggatgctgtcatggccataaatgaacgtatggaagaagtcagatatgaaattgctgcccttgaagca

SEQ ID NO: 161097 - DNA, 279 bp, Glycine max
atacattacagcagcaaaggaaggttgtggtaagtaaatagtagtaacctaacccttgcgtttgcgagtgaggctgaggttgggtttggaaggcaaaggctggtgttgtcccaatccaagagagaagtaaagtaaagcaaaggaatggcgaacatagacatcgaagggatcttgaagcagcagcctgatgatgggcgcgttccgaagacgaaaatagtgtgtactttgggccccgcttctcgatccgtggaaatgactgagaagcttcttagggctggg

SEQ ID NO: 161098 - DNA, 279 bp, Glycine max
ctctcctcagttatccctccaacagaagatagcacatggttctagttgcaagtcatggcgaggaggaaaagggggcagaaggcattgctgctgttgattttcgaggtcaccctgtggacaagacaaaaactggaggatggctagcagcagggctcatcttaggtactgaactggcagaaagaatatgtgtaatgggcataagcatgaacttagtgacctacttggttggagttttgaatctcccttcagctgattctgccaccatagttaccaatgtca

SEQ ID NO: 161099 - DNA, 281 bp, Glycine max
aaaatgggttcttctttgtggactttgtgtctaattttggcttcactagcctcttctgcattctgtgcctttccacggaggccagtggatgttccattcggcagaaactacgttcccacttgggcttttgatcacatcaaatacttcaatggaggttctgagattcaacttcatcttgacaagtacactggtactggcttccagtccaaagggtcatacttgtttggtcacttcagcatgaacataaagatggttcctggcgattcagctggcacagtcac

SEQ ID NO: 161100 - DNA, 278 bp, Glycine max
tggaaatgggactgaaacaggacatataattgttactaccattggtggtaaaaatggccagccaaagcagacaataagctatatggctgagcgagttgttggaaatggatcatttggtgtagttttccaggcaaagtgcttggagacaggggaaactgtggctataaagaaggttcttcaagacaagagatacaagaaccgggaactgcaaaccatgcgtcttctggaccatcccaatgttgtaactttgaagcattgtttcttttcaacaactgaaa

SEQ ID NO: 161101 - DNA, 275 bp, Glycine max
ctagtttcttacaaggctctactctactgcttcaccttctgctctagaaaattcagtggtgatacatggcttcggctactctctctgtagccaaaccagcccttcaggcaaatgtcgaaaggcttctctgaattctctggcctccgcagctcatctggcttccttcccttttctagaaaatcttcagaggatttccattctgtcattgccttccagacctatgcagttggaagcagtggaggatacaagaagggtgtgacagaagcaaaactgaa

SEQ ID NO: 161102 - DNA, 278 bp, Glycine max
ctcgcaaggaccttcttctagttatttgcggcttgctattactctcttcccttgttgcctttggagggtacagggcctccaacgcgccgcatgccgacgtggcatcggcaacatcgaacgatgagcaacgtagtccgacatcggtgccttctccgaaatggtacccggtttcgcgaggtgtttcttccggggtgtcagagaagtcatcaagcatgttgtttgcggttaaagatggagcttcgaaggcatttccatgggacaacagcatgttgtcttgg

SEQ ID NO: 161103 - DNA, 278 bp, Glycine max
ctccgttatgagaagctgaaccttcctctgcacaatctccttcaaaaagcttctcatccatggcgaaaacgctcatttcgtctcaatcgttcatcggcacaccgctcccctcactccctcgccaccacctcccccaccgcaccaggctcgtcgccaccaaagtcctcgtcagcctccacgaaattcccccaatccactccataagccgcaacattgacttcgccggaatcgtgactagagccgaagccttctctacacgctcgccgatgctgcggttg

SEQ ID NO: 161104 - DNA, 279 bp, Glycine max
cacatcctcaaccatggcagcaccatcttcagagacaatgtcaccatcatcctcgaacacgcagcttccgctgaaaccaatcccaggcagctacggaatgtcgttttttggagcaataagcgacagacacaactacttctaccaccaaggacgcgacaagttcttcgcgacgaggattgaaaaacacaactccaccgtgatccgaaccaacatgcctccggggcccttcatctcctcggaccctcgtgtcgtcgcgttgttggacggtgcctccttccc

SEQ ID NO: 161105 - DNA, 276 bp, Glycine max
gagaacttcaactgagggtgagagtgacacaaatctagggagcactactctaaaagttctattagattcttcaaaacatgaccatgcatcgcgagtcttgggcttttgtcttcggcgttatgggcaacatcatctcctttggagtgttccttgctccattgccaaccttttaccaaatctacaagaagaaatccactgaagggttccagtcacttccttatgttgttgcactgttcagtgcaatgctttggatttactatgctttcgtcaaaaggg

SEQ ID NO: 161106 - DNA, 271 bp, Glycine max
aaaaatacttgctctacctctgccactttctgagtacaatacaacactgccatggctgtctcagtctccactattggagctgtctacagagctccactgagcttgaacagctctgaagctggagattcggttcccagttcagccttctttggcacaagcttgaagaaggttactgcctcaagggtccctaacgtcaagatttcttctggaagtttcaaaatcgttgcggcggagaaagagattgatgagcaacaacagacaaacaaggaca

SEQ ID NO: 161107 - DNA, 272 bp, Glycine max
atatagcccaagccctatacaaccaaacccttacacacacccatttgattcagtttccatggctagcctcaaggttgcatttttggctgcagtgctctgcatggttgtggtgagtgcacccatggcacatgcagctatcacgtgcgggcaggtgacgaatagcctgatcaattgcatcggttacctccagaacggaggaacgccgccgtcgggatgctgcaacggagtgaagagcctcaatgccgccgccaagaccaccgccgaccgccaga

SEQ ID NO: 161108 - DNA, 273 bp, Glycine max
gagcgattgcccttgctgcggcgactacctcaccaacaccaacctcttccctaacttgttgctcgacaagctactgaagaagacttctgcgcgtcaaatatcaaaaaccgcttcacctgtcgaacattttcggcaggtattgcaaaagggttctgatgtgtcaattaaggagctagacacccttttgtcacttcttgccgagaagaaaagaaaaatggaacaagaagaagctgagagaaatatgcaaatattgttagacttcttgcattgctt

SEQ ID NO: 161109 - DNA, 269 bp, Glycine max
aataagaatattgaggagtggccactgagaggtggagctaatggtagcttaagatttgaagttgagctgaaacatggagccaatgctggacttttaaatgcattgaaacttcttcagccgatcaaagacaaatattctggtgtgacatatgcagacttatttcagttggctagtgctacggctgtggaggaagctggaggccccaaaatccctatgaaatatggaagagtggatgtatctggacctgaacaatgccctgaagaagggag

SEQ ID NO: 161110 - DNA, 268 bp, Glycine max
tcgagacacagatcatagtgatcattttttaatttctcagatttatccgacgtcgctgcagatccaccaaccgttatggctgccttcagcggtgatgaaacggcaccgtttttcggcttccttggcgccgcagctgccctcgtcttctcctgtatgggagctgcctatggcacagcgaagagtggcgtgggcgtggcttccatgggtgtaatgagacctgagctggtgatgaagtcgattgttcctgttgtcatggctggagttttgg

SEQ ID NO: 161111 - DNA, 272 bp, Glycine max
gttacagccgcagcttgaaacagcgcagagcgaccttgaagagctatggctgtcggaaagaataagaggatttccaagggaaagaagggtggcaagaagaaagccgctgatccctttgccaagaaagactggtacgatatcaaggccccttccctcttccaggtcaagaatattggcaaaaccctcgtctctcgtacccagggaaccaagattgcatccgaaggactcaaacatcgggtttttgaggtctcattggctgatctccaagggga

SEQ ID NO: 161112 - DNA, 274 bp, Glycine max
attcaggggggtgaagcttttttcaggggtgtgttggaaagtatgcaatctgtttacttgaacagaaatcgtactgctaaggccatattggaccttgttcactctgctgagaataactcattatgctatgatcatcttgcattcaggacatttggggtgaatggttatggaattgattccatggctagtttttttctggattatggctatacacaaagggaagagttgaggtttccagccaaaaagttgagggctttgtggttttctcctcctg

SEQ ID NO: 161113 - DNA, 271 bp, Glycine max
acactttccacttgtctccgaattagttatcttgagaaacattattcccattgctatatattatggctagcatgaaggttacatgggtggttgtgatcatgtgcatggccgtggtgggtgcaccgatgatggcgcaaccatgacatgcaatgatgtgacggtgaacatggcacagtgcctatcctacctgatgcagggaggaacaccttcaacactttgctgcagcggagtcaagaacattcttggctctgctgtcaccaccgttgacaaa

SEQ ID NO: 161114 - DNA, 272 bp, Glycine max
cttagacactcatttttattagttttgttgctgagtgtgtgtgaaactgtgaaagagagttatggcaggaggtggtggagctccagcacctaagaatgatgagccacaacctcatcccccgaaggatcagttaccgaatgtttcttactgcattacgagtcgtcctccatggcctgaggccatacttcttggttttcaacattatcttgtgatgctcggtacaactgtgctaattcccactgctcttgttctcctgatgggaggtggcaatg

SEQ ID NO: 161115 - DNA, 269 bp, Glycine max
ctcatcctcggtgatggcttatacaactttgtcaagattttagtttcctcaatccttagcgtacatgaaaaaattaagaaccgtaaaaatgcttcaagtgcggatcaacagagagataacgctgaagagcttaaacaaaaagaagttttcctgagggacaacatttcgatgtggatcggaaccggcggatacatagttttgtcggtgatttccataattgtaatccctttaatgtttcctcagctgaagtggttctacgtggtggtcgc

SEQ ID NO: 161116 - DNA, 270 bp, Glycine max
caacggtggcggcaacgacgacgacgacgaaatcgaccccttggatgccttcatggaggggattcacgaggagatgcgggctgccccgccgccgaaggagaaggcggaggaccggtaccgcgacgacgaggacgacgatcccctggagagctttctgaaggcgaagaaggatttagggttgactctcgcgtccgacgcgctgcacgctgggtatgattccgacgaggaggtttatgctgctgccaaagctgtggatgctggtatgattga

SEQ ID NO: 161117 - DNA, 269 bp, Glycine max
ctgtcatcacatggacttgtctttctcttactctgacggggtccttccttttcttcttctccttcatattttctctctcaccattctcttcttcttctccctttcttagattctccctcttttctctctgccctccgccatgactgaggataaggagatgtcttcctctgtcaccaatggacgatgattccctcactggtcacatcatatctacaactattggaggcaaaaatggggaaccaaacagactattagttacatggcagaac

SEQ ID NO: 161118 - DNA, 271 bp, Glycine max
cgcatggccacctctgctattcagcaatcagcattcgcaggtcaaactgctctgaagcagctcaatgagttggtccgcaagaccggtggcgccggcaaaggtcgcaccaacatgcgccgtaccgtcaagagtgctcctcagagcatttggtatggccctgatcgtcccaagtacctgggtccattctcagagcagattccgtcatacctgaccggagaattccccggtgactacggatgggacactgctggactatcagctgacccggaaa

SEQ ID NO: 161119 - DNA, 266 bp, Glycine max
gtttgctggaggaggctttggaccttaaaacccaaatggtccacaaagggattaagcttgacgtctttacctacaccacccttttgtccggattcgagaaggccggtaaagatgactttgccatccaagtttttctggaaatgagagctgtgggatgcaagcccaatatttgcaccttcaatgcccttattaagatgcatggcaaccgaggaaagtttgccgagatgatgaaagtttttgatgatatcaagctctgcaattgctcc

SEQ ID NO: 161120 - DNA, 269 bp, Glycine max
ctttggtttcggagggaaaactctaaaacctcaaaattttcagtctcaatcaacttaacatctgtgattccaatcgatcacattcaataccacccttcaggattaggtattaattctgttcccttaaataaataacatgagcaccacagtgcaaagaactccaagatccagtaggcagtctttatttttccaggatttggcttcacctgtttctgcccgtagaggaaaattttcgagtcccagtcaggcagctgcagtatcttcactat

SEQ ID NO: 161121 - DNA, 267 bp, Glycine max
cgatcataccatggtaaatatgagaaacttggaggattatgtttctcttattgtcgatgcaactgtgaggtctggagtttcaagacaagtggaagcttttaaatctggctttaaccaggttttctccattgatcatcttcggattttcaatgaagaagaacttgagcgaatgctttgtggagagtatgactcttgggctgtcaacgagtttggagatcacattaagtttgatcatgggtatactgctagcagtcctcccattgttaa

SEQ ID NO: 161122 - DNA, 266 bp, Glycine max
cttaaagctcatctctctgaggatgcctttgttacttgtgcattactagacatgtatgctaaatgtggatgcatggaacaatctcagaacatttttgacagggtaaacgagaaggatgaagcagtatggaatgttataattgcaggatatgggattcatgggcatgggctgaaggctattgagctgtttgaattgatgcaaaataaaggcggcagaccagattcttttacatttctgggagtgctaattgcctgtaaccatgctgg

SEQ ID NO: 161123 - DNA, 267 bp, Glycine max
agacaatcccgatggtaacgccgctttggtgaactccttctgcgaaatcacttcctcttccaaggaagaagctcttttctttttggagagccacaatttcgacctagacgctgccgtttcgactttcctcgacaacgccaacatccccctcatccctctcaacgacgaccttgccattcccaaccccaacgccgtttcccctccctcagattctcactctccggacttcaacccttctcgctcgccgtctccgtctccttcgcccac

SEQ ID NO: 161124 - DNA, 266 bp, Glycine max
gtgtttgaatcgtgaaaatgttcagaaaccagtatgacacggacgtgacgacatggagcccggcggggaggctgttccaggtggagtacgcgatggaggcggtgaagcagggctcggctgcgatagggctccgatccaagacccacgtggtcctcgcatgcgtcaacaaggctaactccgaactttcatcgcaccagaagaagatcttcaaggtcgacaaccacatcggcgtcgccatcgccggcctcaccgccgacggccgcgtc

SEQ ID NO: 161125 - DNA, 264 bp, Glycine max
cacagttctgtataattctgatgacaatgtcttagttgctgctccaacaggtggcggtaagactatatgtgctgagtttgctattttgaggaatcatcaaaaagggcctgatagtgtcatgcgtgtcgtttatgttgcacccgttgaagctcttgtcaaggagcggtatcgtgattgggagaggaaattttgaggtggtcttaaattgagggtggttgaattgactggagaaactgcgaccgacttgaaactgcttgagaaagg

SEQ ID NO: 161126 - DNA, 265 bp, Glycine max
cttttcgtggttatcgactcgggtctgtggttttactgttctaaattttgataaattaaggcaaagacgatgactaagaagaagaatcccctggtgtttatggatgtgtcgatcgatggggatcctgttgaaaggatggtttttgagcttttctatgatgttgctcccaagactgcagaaaactttcgtgcattatgtacaggagaaaaaggcatcagtccaaatactggaaaatcactgcactacaagggttctttcttccatc

SEQ ID NO: 161127 - DNA, 265 bp, Glycine max
attgtgccctccctctttctagctatttccctctcttaacacaattaacaaagatatatcatatcatatcaactccaaatgatgaaaaatattgggttgtttcttcttgtggtggtggctacttttgtggtggcagccacagctggtagcttttaccaagactttgaaataacatggggtggtgagcgtgccaaaatctatgaaaatggaaatcttctcaccctctccctagacagagcctctggctctggctttcgttccaaaa

SEQ ID NO: 161128 - DNA, 264 bp, Glycine max
gttattgttgaatcagcctcattccacaaagaggctaacatcaatcctcccaaaaaaagtcctgttcctcccacttttgtgaaaactttcaccattgcatcccttcaacagtatacaaatagcttttctcaagacaatcttataggtttaggcatgctagggagtgtgtatagggcagagcttccagatggaaagatacttgctgtgaagaaactagacaagagagtttctgatcaccaaacagatgatgagtttcttgaattg

SEQ ID NO: 161129 - DNA, 263 bp, Glycine max
cgagctcttagggagctgcttttcactgctcctggtgttcttcaatatctcagtggtgtcatcctctttgaggaaaccctctaccagagcacagctgcaggcaagccctttgtgaatgtcttgaaggaagctggtgtgcttcctggcatcaaggttgacaagggcacagtcgagcttgctggaactaatggagaaaccaccactcagggtctagatggccttggtcagcgttgtgccaagtactacgaagctggtgcacgttt

SEQ ID NO: 161130 - DNA, 264 bp, Glycine max
atcaagaatacaataacatagcatagagtgagaagtgagaagagaaaaatggcaatctccatacccagtagacaacttttcatagatggagagtggaaagtccctcttctcaacaatcggtttccgatcatcaaccccgctactgaagacatcatagggcatattccagccgctactaaggaagatgttgaccttgcggtggatgctgctaaaagagccttttcccataacaaaggcaaagattggtcttcagctcctggctct

SEQ ID NO: 161131 - DNA, 247 bp, Glycine max
agataatcgaaaacagaaaatcttgagaactattcgaaactcagaagaattacgggaaggggccattgaacagctggaaaaagcccaagcccgcttaaggaaagtcgaaacggaagcagatcgttttcgggtgaatggctattctgagatcgaacgagaaaaattgaatttaattaattcaatttatacgactttggaacaattagaaaattacaaaaacgaagccagttcattttgaacaacaaag

SEQ ID NO: 161132 - DNA, 132 bp, Glycine max
atcagatcagaaagtaattaaggagaagaagaaagcaaaacgctcgagaaaaaaacagcttgttcaggaagaggagagggttagaggtagagtcagcatgaaggtgtacttgtcatacatggctgcagcata

SEQ ID NO: 161133 - DNA, 258 bp, Glycine max
attctctgtctctctctctctctctcgatcaatcatggctttgcccaatcagcaaaccgtcgattaccctagtttcaaactcgtcatcgtcggtgacggtggtacaggaaagacaacgttcgtgaaaaggcatcttaccggtgaatttgagaagaaatacgaaccgaccattggagtggaggttcacccattggatttcttcacaaactgtggaaagattcgcttctactgttgggatactgccggacaagagaagtt

SEQ ID NO: 161134 - DNA, 250 bp, Glycine max
aggctcataaatcttttttatgggtttcagggtcactactactctgtctctgctctccctgttttggctcttgtccctgcaccaagcaagagctgcaaagttccacaatgtgagtggcttgagagggaaaaagccagttgtagcaaatgggtgcaatttgttcctgggaagttgggtggttgacacgtcttatcctctctatgactcttcaacatgccccttcattgatcccgagtttgattgccaaaag

SEQ ID NO: 161135 - DNA, 260 bp, Glycine max
aacatgcacacaaagtaatggacaaaaaaccatgcaactcatcatctcatgatcctgaagtgagaaagggaccatggaccatggaagaagacttgatcttgataaactatattgcaaatcacggtgaaggtgtttggaactccttagccaaagcttctggtctcaaacgaacgggaaagagttgtcgactccgttggctaaactaccttcgtcctgatgttagaagaggaaacattacacccgaggaacagcttttgatc

SEQ ID NO: 161136 - DNA, 263 bp, Glycine max
tcaaggtttggagatgggtggtgagtttgatgttagtggggttactgcccgtgtcaacaatgggtcgattcgtggtggagaagaacagcctgagagtgacatcgccggagaaaataagagggacacacgacagtgccattggcaacttcggaacacctcaatacggtggtagcatggccgggaacgtaatttaccctaaggataacaaaaagggttgcaaagagtcgatgagttcgggatttccttcaaataacccccggtgc

SEQ ID NO: 161137 - DNA, 259 bp, Glycine max
attgatgttgactctctcaagggcttgccttatctcagaacgttgagtttcatgaacaatgatttcgagggtgcatggccagagattcaacatttgattggtctcaagtctatttatctttccaacaacaagttttctatgggagattccttccagaacttttgaagggttgcagtggctgaagaaggttcatttgtccaacaaccatttcaccggtgctgttccaacttccctcgtgttgctgccgaggctcatagag

SEQ ID NO: 161138 - DNA, 253 bp, Glycine max
gaagaacacgattgtgaaccgtcccttggctgggacagctaaaagggcgaaaacacctgaagaagatgcaaggttagaagcaatactgctgagagatgaaaagcagtgtgcagagcatgtcatgttggttgatttgggacgcaatgatgttggaaaggtttgctatagatacattttaatggatattcctatttatttatcttgttcaaggtgtcttgaagcaatagcttgctcaattatattgtttatttaa

SEQ ID NO: 161139 - DNA, 254 bp, Glycine max
cggaccgtttattaaagccttttggggtctagtgaggagaagttgcagtgcacagtgtgcttggaggatgttgaggttgggagtgaagcaaaggagatgccatgtaagcacaagttccatggtgattgcattgtctcatggctcaaacttcatggttcttgtccagtttgcaggtttcagatgccatctgaggattcaactcttgaagccaatgtgggagttggaaatggggacaatcagaacagtgagctggt

SEQ ID NO: 161140 - DNA, 262 bp, Glycine max
tgagctgcgggaggaggctcgtgatcatgcacgtttgcgcaatgcatattttgagcaggcacggcaagcctaccttgttggcaacaaggcccttgcaaaggagctaagtgttaaggggcaactgcacaacgtgcatatgaaagcagcacatggaaaagctcaagaatctatttatcgccagaggaatcctgttgctccagagaatggaagagcgccccaaagaatgatagacctacatggtctgcacgtaagtcgaagcgat

SEQ ID NO: 161141 - DNA, 259 bp, Glycine max
gtgattgataatgaggagcagaacaaatcaaattctgtttctgttccagcgccggcaacagttgccacccacaccagaacgattataattatacatccgcctccggacattaggaccattgttgataaaacctcccagttcgtcgccaagaatggtccagaatttgaaaagaggatcattgcaaataacacaggaaatgtcaagttcaatttcttgaactcatcagatccctatcacgcttattatcaacaccggttgt

SEQ ID NO: 161142 - DNA, 255 bp, Glycine max
agaaagagagaattcgtaaaccctaatttcggaaagatcggcgatgactgcctccaaggatcgcgagaacttcgtctacatcgccaaactcgccgagcaggccgagcgttacgaagagatggtggaatcaatgaagaacgttgcgaatctcgacgttgaactgacggtggaggagcggaatttgctttctgttgggtacaagaatgtgattggtgctcgcagacgctcctggaggatcctgtcttccattgagca

SEQ ID NO: 161143 - DNA, 256 bp, Glycine max
aacagttgaagtgaatggcataaaaatgcatgttgcagagaaaggagagggtccagtggtgttgttcctccacggcttccctgagctctggtactcatggcgccatcagattctctctctcagctccctcggctaccgcgccgtcgctcccgatctccgtggctacggtgacaccgaagcaccaccttcaatcagcagctacaactgcttccacatagtgggtgatctcgttgcgcttattgactctctgggtgtc

SEQ ID NO: 161144 - DNA, 253 bp, Glycine max
ctttctctttctctgccaacctgcacactcttcactcgatcaaacagaacatggcaaagaatgtggggatccttgccattgacatctacttccctcccgcttgcgttcagcaggaagcattggagactcatgatggtgccagtaaagggaagtataccattggtcttggacaagattgcatgtcattctgtaccgaagtagaagatgtcatctcaatgagtttgacagtggttacttctcttcttgagaaata

SEQ ID NO: 161145 - DNA, 251 bp, Glycine max
ctctctctctctctctctgaagatggcttcacgcaggctcgtatcttctctgattcgatcctcccttcgtagatctcaatcgaagccctcaatttccgcatcgaaatcgatatacacgtcatccaaccgtgcctcaccgcacggatacttgctgaaccgcgtcgccgagtacgccaccgccgcggctgctgctaccactcccctggatcctcctcctccggggaagaaggagctcggcggcggcgggaaga

SEQ ID NO: 161146 - DNA, 255 bp, Glycine max
ggcctaatagttttgaattagatgacaaagaaaagcagagggaaaagcgaaaaggtcttgatcttgctaccacgcttgaacgtattgagaaaaacttcgtcattactgatccaaggcttccagacaatcctataatttttgcatcggatagcttcttagagcttacagaatatagtcgtgaagaaatcttgggaaggaattgcaggtttctgcaaggacctgaaactgatccagcaactgtgaacaaaattagag

SEQ ID NO: 161147 - DNA, 246 bp, Glycine max
gttggtgcgttgatcagtgatttaataatgtggaaagatgtttcaaaatcgaccctttggtttggtttggggtgtctttgtttcttgtcttcttgcttcactaaaggggtcaactttagcattttctcggccatatcgcgattggcaattctcttgttgggtgtttcattcttctcaaactcagtttgtcaaagaaaccaggttgagaaaaggagttttccaagctgaaagaagatgacattttac

SEQ ID NO: 161148 - DNA, 249 bp, Glycine max
ctcacactggtcttcgcttctcattcatcatttctcacctaaccttctcctcctctcagtctcagatcagaaacctcagccagccatggcagcgttccagaagatcaaggtcgtcaaccccatcgtcgagatggacggagatgaaatgactagggttatctggaagtcaatcaaggacaagctcattttgcccttcttggagttggacatcaagtattatgacttaggccttccttaccgtgatgagac

SEQ ID NO: 161149 - DNA, 245 bp, Glycine max
cttttccctcgttgaaatgaaaatgggttcttctttgtggactttgtgtctaattttggcttcactagcctcttctgcattctgtgcctttccacggaggccagtggatgttccattcggcagaaactacgttcccacttgggcttttgatcacatcaaatacttcaatggaggttctgagattcaacttcatcttgacaagtacactggtactggcttccagtccaaagggtcatacttgtttg

SEQ ID NO: 161150 - DNA, 249 bp, Glycine max
gtggatgactgatgaggaatttgctagagaggtgattgccggtgtaaacccaaatgtgatccgtcgtcttcaagaattcccaccaaagagcacacttgatcccacactctatggtgatcaaaccagtaccataacaaaagaacaattggagattaacatgggaggggtcacagtagaagaggcacttagtactcagagattattcatattagattaccaagatgctattaagacatgggttcatgaata

SEQ ID NO: 161151 - DNA, 256 bp, Glycine max
gcaaaacttagggttgggcctttttttgaggttttcagcgcttctttctcacaatggttcttcagaatgatattgatttgctgaatcctccagctgagttggagaagagaaagcacaaactcaagcgtcttgttcagtcaccaaactctttcttcatggatgttaagtgccagggatgcttcaacataacaactgtgtttagccactctcaaactgttgtggtgtgcggaaactgccagactgttttgtgccaacc

SEQ ID NO: 161152 - DNA, 254 bp, Glycine max
gtcggacgaagagcaccatttcgagtccaaggcagacgccggtgcctccaaaacctaccctcagcaagccggtaccattcgcaagaacggctacatcgtcatcaaaggacgcccctgcaaggttgtggaagtttcgacttccaaaactggaaagcacggtcacgccaagtgccactttgttggaattgatattttcactgccaagaaacttgaggatattgtgccctcttctcacaactgtgatgttcctcatg

SEQ ID NO: 161153 - DNA, 249 bp, Glycine max
gaaactgtctacaaagtttcaaaacactatgttaggatgcaccaacacatgcctatcatttatgtgcaactttatacctaccagatatgtcgtgcgttaaattatttacatcaagtgattggtgtttgtcatcgtgacatcaaaccccagaacctattggtaaatccgcagacacatcagttaaagatatgtgattttgggagcgcaaaggtgttggttcctggtgaacccaacatatcgtacatttgc

SEQ ID NO: 161154 - DNA, 247 bp, Glycine max
gtactttgctctccgctggttgcgagttttatttggacgggaattttcactcagcaacctctttataatctgggatgaaatcttttcatcagataatagtaaattggaaaaacatgcagaggacaatgcagactctggttttaggatcttcaattcgtctcgcggagcatttatctcagctatggctgtagcaatgatgcttcatataagatcttcgttacttgcagctgaaaatcctacaacctgt

SEQ ID NO: 161155 - DNA, 251 bp, Glycine max
gttcttgaagcatatttcagagttttatcagagaacaaatgggttatattgggactcacggtgttgcagctctgcacagatataaatatagtggagtagatcattcctatgtggccaaatatgtactacaacccttttggagtcgctttgttaattttttccccctatggatgcctccaaacatgataactcttatgggatttatgttcttactactgtctgcattgcttggttatatatactccccacaa

SEQ ID NO: 161156 - DNA, 252 bp, Glycine max
aacgctcgctcgcactgtccagatcttaatcaagaggagtgagtcttgtttttccagccatgacgccgctgatcctgcatgctgggaaaaccaacaaaaattcttacaagacactcattgcagccgagtatgctggcgtccaagttgattttgcccctaattttgagatgggtgtctccaataaaactcctgaatttctcaagatcaatcctattggcaaggttcctgtgctggaaacccccgatggtccaa

SEQ ID NO: 161157 - DNA, 247 bp, Glycine max
gtgatactggatataaccaaggatgcaatggaggacttatggactatgcatttgagttcataatcaacaatggcggcattgattctgatgaggattacccataccgtggtgttgatggtagatgcgacacatataggaaaaatgctaaagtcgtttctattgatgactacgaagatgttcctgcctatgatgagttagccttgaaaaaggccgttgcaaatcagcccgtgagcgttgctattgaagg

SEQ ID NO: 161158 - DNA, 249 bp, Glycine max
aaaatgcccactttttttcttccaacgctcctcctcctcctcatagccttcgccacctctgtctccggccgccgtgacctcgtcggagactttctccggctgccctccgaaactgataacgacgacaacttcaagggcacccggtgggccgtcctcctcgccggttccaatggttactggaattacagacatcaggctgatgtttgtcacgcctatcaaatattgaggaaaggtggtctgaaagaagaa

SEQ ID NO: 161159 - DNA, 253 bp, Glycine max
cgctgagggaaatcagaaagtatcagaagagcaccgagcttctcatcaggaagcttccgtttcagagactcgtgagggaaatcgcgcaggacttcaagaccgatttgcgttttcagagtagcgccgtttctgcgcttcaggaagctgctgaggcctacctcgttgggttgttcgaggacactaacctttgcgcgattcatgcaaagagggttaccattatgcctaaggatattcagcttgctcgcaggatcag

SEQ ID NO: 161160 - DNA, 248 bp, Glycine max
agcattcagtgaaacactagctagggtattgggagctctcgttgtttcggagttagggaccttacgcagccatggccactgctacgaatgccgccgccgccccaccacgccagctctcccagaaggaagctgacatccagatgatgttggccgccgacgtccacctcggcaccaagaactgcgacttccaaatggaacgttacatcttcaagcgccgcaacgacgggatttacattattaaccttggg

SEQ ID NO: 161161 - DNA, 248 bp, Glycine max
atcgctgtggttatcatcttcttcttcctctttcttagatctcttctttctctacgccgcacgccgaaaccatggccggaaaaggagagggtcctgctatcggaatcgatctcggaaccacctactcttgcgtcggtgtgtggcaacatgaccgcgttgaaatcatcgccaacgaccaagggaacagaaccacgccgtcttacgtcggattcactgacaccgagcgtctcatcggtgatgcggccaag

SEQ ID NO: 161162 - DNA, 249 bp, Glycine max
gggccatgctcggggccttgggctgcgtcttccccgaactgttgtcccgcaacggggtcaagtttggagaagctgtgtggttcaaggccgggtcccagatcttcagcgagggtgggctggactacttgggcaacccaagccttgtccacgcctagagcatcctcgccatctgggccacccaagttatcctaatgggtgctgttgagggttatcgtattgctggtgggcccctcggtgaggtcactgacc

SEQ ID NO: 161163 - DNA, 245 bp, Glycine max
tgatggaagtcggggacggagaccagtggcccatagattgagctttgttgagatggtggtcccatatggagatcctaatgatcctcactataggaaaaatgcttttgatgctggggaagatggcttgggtaaaaattctcattctctgaagaagggctgtgattgtttaggctatatcaaatactttgatgcgcatttcacaaacttctatggaggtgttgaaacaattgaaaactgtgtttgtt

SEQ ID NO: 161164 - DNA, 247 bp, Glycine max
ggagagggtccagtggtgttgttcctccacggcttccctgagctctggtactcatggcgccatcagattctctctctcagctccctcggctaccgcgccgtcgctcccgatctccgtggctacggtgacaccgaagcaccaccttcaatcagcagctacaactgcttccacatagtgggtgatctcgttgcgcttattgactctctgggtgtccaacaagtgttccttgtggctcatgactggggag

SEQ ID NO: 161165 - DNA, 245 bp, Glycine max
gaaattgtggccatcaagaaagttctccaggacaaacgatacaagaatagagagttacaaattatgcaaatgctggatcatccaaatattgttgccctaaggcattgtttcttttcaacgactgacaaagaagaagtttacttgaatcttgtacttgaatatgttcctgaaactgtgaatcgcattgcgaggagctatagcaggattaaccagcgaatgcctttaatatatgtaaagctttatac

SEQ ID NO: 161166 - DNA, 247 bp, Glycine max
caaggatcccgaaggtctcttcccctgtattctcggccacgaagctgcagggattgtggagagtgttggagaaggtgttactaatgttcagcctggggatcatgtcattccctgttaccaggctgagtgtggggagtgcaagacttgcaaatcggggaagacaaacctctgtggcaaggttcgttccgccactggagttggggtcatgctcaatgatggaaagagccggttctccattaatgggaag

SEQ ID NO: 161167 - DNA, 247 bp, Glycine max
atcgagataactagaaacagtgtgatgaaaatgaaggtccttgttttcttcgttgctacaattttggtagcatggcaatgccatgcgtacgatatgttccctctccgaatgaacactggctatggtgcccgtactccggaggtgaaatgcgcaagttggaggcttgctgtggaagcacacaacatctttggctttgagaccattcctgaagagtgcgttgaagcaacaaaggaatacatccatggcg

SEQ ID NO: 161168 - DNA, 276 bp, Glycine max
agcgaacccaaaactagagctaccttcccttcaaaccttccactcttctctccttttccaatcaagggaataatatttcttagagatattccgaaaccatggctcacgccaatcctatgatttttgttgttggaattctaggtaaccttgtctccttctgttgctttctagcaccagtaccaacattctatcgagtttgtaagaagaaaaccacggaaggtttccaatcacttccttacgtggctgcactcttcacttcaatgctttggatatttt

SEQ ID NO: 161169 - DNA, 267 bp, Glycine max
ctcttcaaactagggttttacagaatataagctctctctatctttggttttcgtcattcaaatccaatccaatatcaaatatgagtcgtcatcccgaggttaagtgggctcagagacttgacaaggtctatatcacggtgcaattggctgattcaaaaaatgccaaggtggatcttacaccagatggtatttttaccttctctggtagtgctggtgctgaagaccatcagtatgagctaaaactggagctctttgacaaggttaatg

SEQ ID NO: 161170 - DNA, 263 bp, Glycine max
gggttatcatttctccatttccattttctctctcacttttcaagaatcgtaagctatgggaaagtcttacccaactgtgagtgctgattaccagaaggccgttgagaaggcgaagaagaagctcagaggcttcatcgctgagaagagatgcgctcctctaatgctccgtttggcatggcactctgctggaacctttgacaagggcacgaagaccggtggacccttcggaaccatcaagcaccctgccgaactggctcacagcg

SEQ ID NO: 161171 - DNA, 263 bp, Glycine max
taaaaaacgagaacgtcgatctggaacggattgcaatagaggaagtgtttgagcagctgaaatgttcaagagcaggtctaacatcagaggaaggggccaatcggctccaagtctttggagcaaacaaattggaagagaaaaaagagagcaagtttttgaagttcttgggctttatgtggaaccccttgtcttgggtcatggaagctgctgccataatggccattgctttggcaaacggaggaggaaggccaccggattggcag

SEQ ID NO: 161172 - DNA, 263 bp, Glycine max
tggacatttttgaagtaagagttggttatgttgaggactatggtgcttttgttcatttgcgcttccctgacgaatgaatgcaggtctttatcaccttactggactaatacacgtctcagaagtgtcatgggatctaattcaggatgtcagagatatcttaaaagtaggtgatgaagtgagggccaaagttgttggtattgattggggaaaatcaaggattaacctatcaattagacagctagaagaagatccactcttagaaa

SEQ ID NO: 161173 - DNA, 259 bp, Glycine max
tctagactcttctttttctctaagtctaaggggtgccctgagatcactttgagcaatggtgaaggctgtggcagttcttggcagcagcgagggtgtcactggaactattttcttcactcaggagggaaatggtccaaccaccgtaactggatctctggctggtcttaagcctggtctccatggcttccatgtccatgccttgggggacactaccaatggttgcctgtcaactggagcgcatttcaatcctaataacaac

SEQ ID NO: 161174 - DNA, 263 bp, Glycine max
caacacgaaagcatagccaaaaccttttttcgaagtctctgattttcgctaatggctccggcaaaggcagagaagaagccggcggagaagaagccagcggcggagaaggcaccggcggagaagaagccgaagcgtagaagaagatctcgaaggaaggagggagcgagaagaagaagaagcgcacgaagaagagcgtggagacctacaagatctacatcttcaaggtcctcaagcaggttcaccccgacattggtatttccagc

SEQ ID NO: 161175 - DNA, 272 bp, Glycine max
gataaaagcacacccatggcacaagatattccacaaaaagatgcctccggaagcaattgatcttgcatccaggcttttgcaatactccccaagtctccgatgcactgcgcttgaagcatgtgcacatcctttctttgatgaacttcgagaacccaatgctcgcctgccaaatggtcgtccatttcctcctttatttaacttcaagcaggaattatccgaagcttctccagagcttgtgaacaaagtgatacctgaccacatgaagcggcaaa

SEQ ID NO: 161176 - DNA, 268 bp, Glycine max
ctcttaaaagagcctttgctttttctttaggcctttccgtcttaagtacttgtgtcattttctctcgaagcaagagaaatgttcatcgagagtttcaaggttgagagtcctaacgtgaagtacacagagactgagattcagtccgtgtacaactatgaaaccactgaacttgttcacgagaacaagaatggcacttatcagtgggttgtcaagcccaaaactgtcaaatatgaatttaagaccaacacccatgtccctaaactagggg

SEQ ID NO: 161177 - DNA, 264 bp, Glycine max
actcactacccagaaactagggtttaccgtcacaccccaatcgtagccgtcgcactttgcgttttctgcgtcatctccgattccccgacaatggccacccaaatgagcaagaagagaaagttcgtagctgatggagtgttcttcgctgaactgaacgaggttctgacaagggagttagccgaggacggatactccggcgtggaagttagggttacgccgatgcgcaccgaaatcatcatcagagccaccagaacccaagccgtt

SEQ ID NO: 161178 - DNA, 263 bp, Glycine max
cagatcgcagcaaaccagagattgaactccgacgatgcctcccgtcgctcctcgatccggcgatgccatattcgccaacgtcgaacgcgtcaatgcggagctgtttactttgacgtatggcgcaattgtgcgtcaattgctcacggatctggaagaggttgaggaggttaacgagcagcttgatcaaatgggttacaatattggaatccgattgattgatgagtttttagctaagtctaatgtctcaagatgcaacgatttca

SEQ ID NO: 161179 - DNA, 271 bp, Glycine max
tacagtttaccttttcttgctcaaaccaacgacgctaacgctgaaaacaatctctacccgtttgtttttctaaacgtcgatggcaacctttttatctttgccaacaaccgcgctatcttgttcgattacaataagaacagtgtcgtgagaacctaccctcaaatacccggtggagatccacggtgttatcctagcaccggttccgcagttttgcttcctcttcgagaacctaatgtggaggctgaggttctgatttgtggtggaccccgag

SEQ ID NO: 161180 - DNA, 267 bp, Glycine max
gtgcaatggctgacagatacatcacttgatgctgctcgtcaacgtatccaagaacagttaagtgctgtgacagctgatatggttatgctttctacagatgaaccagagaagaagaaaaaagcagcaagtaacggaaatggcggttctcagaatggtaactcaatgcactatgggaccctggttggggaagtgaaagctaatttgaagaaaggtattggagcgaatgaattgctgtcccatctttcagcacatcctgcacctgctcaa

SEQ ID NO: 161181 - DNA, 264 bp, Glycine max
acaggagtcgcctcgtgtttccgtttccgtttcaatttcctgctcacaggctttaacgttaccagctcgagataagacatggaccggatcaaaggcccatggagtccggaggaggacgaggctctgcagaagctggtggagaaacacgggcccaggaactggtctctgatcagcaagtccatcccgggccggtccggcaagtcctgcaggctccggtggtgcaacagctgtccccccaggtggagcaccgggccttcacggccg

SEQ ID NO: 161182 - DNA, 261 bp, Glycine max
gggttcgaactatactagacataggttgtggctatggtagctttggagcacacctcttcgacagtcagcttttaactatgtgcattgcaaactatgaaccttctggcagtcaagttcagctcactctggaaaggggtcttcctgctatgattgcttctttcacttcaaagcagttgccatatccatctctatcctttgatatgttacattgtgcaagatgtggcattgattgggaccagaaagatggccttctcctgattg

SEQ ID NO: 161183 - DNA, 258 bp, Glycine max
cagaaaccctaatttctcaaaatcttcagaggacacacagcacaaccaacacctccacagcctctcctacctcccggagccatggccgccgccgactcctccgccgctccatcgcaccagttgtcgcagagggagacggacatccagatgatgctcgccgccgacgttcacctcggcaccaaaaactgcgactttcagatggaacgctacgtcttcaagcgcagaaccgatggtatttacataattaaccttggcaag

SEQ ID NO: 161184 - DNA, 254 bp, Glycine max
cacggcgcagatccgaggagtttgggaaaccctaattcattcctctttgcttctatctctattaccctaacaccagtgatggcaggtttggctccagaaggatcgcagtttgatgctcggcagtatgactctaagatgaatgaattgctttccgctgatggacaagaatttttcacttcatatgatgaagtctatgatagttttgatgcaatgggccttcaagaaaatcttctcagaggcatatatgcttatgg

SEQ ID NO: 161185 - DNA, 266 bp, Glycine max
cggaaacttggaacaatggctgcatggtgatgtaggaccagttagccccttgacatgggatattcgaatgagaattgctattgggactgcaaaagggctagcctatctgcatgaaggtttagaacccaaagttgtgcaccgggatataaaatccagtaacattcttttggataaaaactggaatgccaaagtatcagattttggactagcgaactcttaggatctgagaaaacacacgtgactacgcgtgtaatgggaacatttgg

SEQ ID NO: 161186 - DNA, 268 bp, Glycine max
caataacagagcatagagtgagaagtgagaagagaaaaatggcaatctccatacccagtagacacggtttcatagatggagagtggaaagtccctcttctcaacaatcggtttccgatcatcaaccccgctactgaagacatgatagggcatattccagccgctactaaggaagatgttgaccttgcggtggatgctgctaaaagagccttttcccataacaaaggcaaagattggtcttcagctcctggctctgttcgtgctcgcta

SEQ ID NO: 161187 - DNA, 264 bp, Glycine max
gttttcatcatggacaactgtgaggagttgatgccagaatatcttagctttgttaagggtattgtggattctgaggatcttcctctcaacatttctagggaaatgctgcagcagaacaagatcctgaaagtcatcaggaagaacttggtcaagaagtgcattgagatgttctttgaaattgctgagaacaaggaagactataacaagttttatgaagccttctctaagaatctgaaacttggtattcatgaggattctcagaac

SEQ ID NO: 161188 - DNA, 258 bp, Glycine max
gaaacataatggagaggtttttgctggttggaattcttggttctcatgtaacggttgcttcaaggccaacaattttgaatgctttgaagatgttagaaggggatattgaggtcccaccaattccagataggccactgagtcatgggaactatgtgttgtacagtggtgattgctctgggatgagctcaggatgtggatttgtgagctcatgaaaagttgaatgattcataaaatccatccttgatgagttggacaaga

SEQ ID NO: 161189 - DNA, 261 bp, Glycine max
cttaaaagagcctttgctttttctttaggcctttccgaattaagtacttgtttcattttctctcgaagcaagaaaaatgttcatcgagagtttcaaggttgagagtcctaacgtgaagtacacagagactgagattcagtccgtgtacaactatgaaaccactgaacttgttcacgagaacaagaatggcacttatcagtgggttgtcaagcccaaaactgtcaaatatgaatttaaaaccaacacccatgtccctaaact

SEQ ID NO: 161190 - DNA, 252 bp, Glycine max
ctcgagccgaatcggctcgagggtggcgtctcatgcccatacatcggtgggaagcatttgggtcatggggttcttctagtaggttatggtgaaggtgcatatgctcccattcgttttaagaacaaaccttactggatcattaagaattcatggggcgagagctggggagagaatggatattacaagatctgcagaggtcgaaatgtgtgtggagtagattccatggtctcaactgtagctgctatatatcca

SEQ ID NO: 161191 - DNA, 252 bp, Glycine max
gtccagccggaagtacttgctatgatgtgcaggttgatgtgcctcttccacttgagaaggatatgtctgcgttcttggcaagcactgagaggcacaaagatattgatacttttgatgaattgatctctgattcgataaagaagattcgtgaacatcataggagacgggcattctttctcggctttagtcagtccccagcagagtttattaatgccttgatagcttctcagagcaaggatctgaagctcgttg

SEQ ID NO: 161192 - DNA, 263 bp, Glycine max
cttgcagtcgcagaggaaaaccctagctagtagtctcagttcgtttgagagagaaaaaatggcagagggtctcgttctccgcggaaccatgcgcgcccacaccgacgtcgtgacggcgattgccactcccatcgacaactccgacatgatcgtgacggcgtcgcgcgacaaatccatcattctctggcacctcaccaaggaggacaagacctacggtgtcccccgccgccgcctcaccggacattctcacttcgtccaggacg

SEQ ID NO: 161193 - DNA, 259 bp, Glycine max
cattactctctcttctcctaaaaatttctaatgcttccattgcttcatctgactcactcatcaatggctctgagactgaaccctatccccacccaaaccttctccctcccccaaatgcccagcctcagatctccccgcttccgcatggcttccaccctccgctccggttccaaagaggttgaaaatattaagaggccattcactcctcccagagaggtgcatgtgcaagtaacccactctatgcgtccccagaagattg

SEQ ID NO: 161194 - DNA, 253 bp, Glycine max
cgatgttcttctccttggtgatggcccctggccggaattcgtaaatagcgtatggtgcataaagatactttctcctcaggaagtgcagcagatgggcaacaatggccttgagctgttgaactcgtttccaattcaaaggctctctaatggcatctgtgatgactatgtgagccgtcaagacccaagaaatttaggcactgggataacaaccgtggggtctttagactactaaatagtcttcacttcttctatc

SEQ ID NO: 161195 - DNA, 253 bp, Glycine max
aaatttaaagaaatcaacacacacaaacacaacaacatatggaggtgctaagggtgcaaaccatagcttccaaatccaaagatgctgccatcccagccatgtttgttagggcagagacagagcaaccaggcatcacaaccgttcaaggggtgaaccttgaggtgccaattattgattttagtgacccagatgaagggaaagtggtgcatgagattttggaggcaagtagggactggggcatgttccaaattgt

SEQ ID NO: 161196 - DNA, 252 bp, Glycine max
tacaaacatggcaatgaagaagttcttgtgggttgttctgtccctttctttggtccttggagtggccaatagctttgattttcacgacaaggatttggagtccgaggaaagcctgtgggacttgtacgagagatggaggagtcaccacacggtttcgcgaagcttggtgacaagcacaagcggtttaacgtgttcaaagcgaatgtgatgcatgtccataacaccaacaaaatggataagccttacaagctg

SEQ ID NO: 161197 - DNA, 160 bp, Glycine max
acaacaaaatggtgtgtgaacagttcggttcggacaacgatctagccaacagaatacggtgttttggccctcataccactgcgaccaccatcatggtggatgcatgtaacggagttcagtacctccatgccatgaaggacgctgttcttgctggctttca

SEQ ID NO: 161198 - DNA, 177 bp, Glycine max
acactgcaacagcaacagcttccaaatggcacacggacaacgtagagtttgtgtcacgggaggcactgggttcgttggttcacggaccatcaagagatccttgaacacggatatgctgttaacaccactactagatctgactcaggacgcaagagacacgttagcttcctcaccaac

SEQ ID NO: 161199 - DNA, 239 bp, Glycine max
caggatctacaccttcagtttctctcgttgctcttcgctttcctgttcttcaatctcgattctttcgttacatccacacaagatctttcggagggcaccgaagaacagccacaatacgacgtactacgaaactctcggcgtctccaacaacgcttcgcacgatgatctcaagaagcgcttacaagaaagccgccattaagaatcaccccgacaacggcggtgatcccgagaagtttaaa

SEQ ID NO: 161200 - DNA, 220 bp, Glycine max
tttcactcgttgaaatgacaatgccgctcttctttgtggaatttgtgtctaattttggattcactaccctctctctgcattctgtgcctttccacggaggccactccctgcctcattcggcacaaactacgttctcacttgggcttttgatcacatcacatacttcaatgcacgttctgagattccacttcatcttgacaactacactggtactggcttc

SEQ ID NO: 161201 - DNA, 104 bp, Glycine max
atcacccttgaggtggacagtctgacaccatccacaacgtcaacgccaacatccaggacaacgaaggaatccccccgcaccaccaaagcctcatcttcgccggc

SEQ ID NO: 161202 - DNA, 259 bp, Glycine max
  unsure (1)..(259): unsure at all n locations
tacaaangttgctgtaggagataagattgcagtagtgctaagtgctaacacctgcagtgaacaatggcctctgcatcagcatctctgctcaagtcttcacttgttcttgacaagtctgagtgggtgaagggacaaacccttcgccaaccttctgcatcagttgtgagatgcaaccccaccaccccatcaggcctcaccatcagagctggttcctatgctgatgagctcgttaagaccgcgaaaacagtggcttcaccag

SEQ ID NO: 161203 - DNA, 256 bp, Glycine max
agtccgaattgtgaaagtaagcaaagatggctttcacggaatcgtctctcctccttccttcggtttcaggaaccaacaagaacaagaacaaggttccagaagacaaatggtatttagcctacattgtgtattttaccctgggtctcggttaccttctcccatggaacgctttcatcaccgccgttgattacttctcctttctctaccctgacgccagcgttgaccgcatcttcgccgtggtttacatgatagtcgg

SEQ ID NO: 161204 - DNA, 255 bp, Glycine max
gttcattccatcactgccacccagaagactgttgatgggccatcagccaaagactggagaggtggaagagctgcttcatttaacatcattcctagcagcactggagctgccaaggctgttggaaaagtccttcctgctttgaacggaaaattgactggtatggcattccgtgttcccaccgtggatgtctctgttgttgacctcacagtgaggctggagaaggaagcctcctacgatgaaattaaaaatgctatc

SEQ ID NO: 161205 - DNA, 235 bp, Glycine max
  unsure (1)..(235): unsure at all n locations
cctctctcttcttcagtggtggaagctactagaacactagtttgttgagcactgcgatgaggaagtggacggttgcttccgctctccttcttctctctctcctctttctctttgcagatcaaggtcgtaagttttangcgaagcgcgagggagattccgacgagcttgtagatccacccaaggtggaggacaagatcggtgctgtgcctcatggcctttcaaccgattcagatgt

SEQ ID NO: 161206 - DNA, 248 bp, Glycine max
  unsure (1)..(248): unsure at all n locations
cacaaactctgctatccctgctctgtttctctacatcaccgtctctcccgttatgggagtcgccggggctaagtctaagtgtagtaccgttgggattcaaggtatcgcttgggccttcggtggcatgatcttcgccctcgtttactgcaccgctggcatctcagggggacacataaacccggcggtcacatttgggctgtttttggcgaggaagttgtcgttgcccagggcgatttnctacatcgtga

SEQ ID NO: 161207 - DNA, 252 bp, Glycine max
cttagtgtgctccaccctatttataaacttttgttgcctcactatcgtgacaccatgaacatctatggactcgcaagacaatcactcatcaatgctcgtggcattattgagcaatcatttctgcctgggccatttgctgtggagatgtcttcggcagtttacaaggggtgggttttcactgatcaagcccttcctgcggatcttatcaagagaggaatggcagtggaggatccatcctctccctatggcctt

SEQ ID NO: 161208 - DNA, 247 bp, Glycine max
gtggatgtgttagagctgcatccgatactgcattacaggctattggacaatactgcaatcagctacaatctttgaaccttggatggtgtgataatgttggcgatgttggagtgactactttagcatatgggtgtcctgatcttaggatagttgacttgtgtggctgtgtccgtataacagatgacagtgtgattgctttggcgactagatgcccccatctgaggtccctaggactgtactactgcaa

SEQ ID NO: 161209 - DNA, 251 bp, Glycine max
agggaaactccgaatacaggtctagatcgtttgtacagacagacttttagggtgctaacatccaaagtcgagagggaaacagcccagatcgtacgctaaggtccctaagcaatcacttagtgcaaaaggaagtgatcgagcgatgacaaccaggaggtgggcttggaagcagccatcctttgaagaaagcgtaatagctcactggtctagctccatggcaccgaaaatgtatcagggctcaagtgattcac

SEQ ID NO: 161210 - DNA, 279 bp, Glycine max
  unsure (1)..(279): unsure at all n locations
cgaacgtcagaactcagctcgacataatcggcctgctgtctttacttggtctggaaactctacaagtgcagaaaaccaggaacttcttgagaggatactggatttgataaagccaaatttacaatccaaaccacaaagggaagcttctgaatctgaacagttttgggattttttaggaggaaaatcagaatatcccagtcaaaagattcttagagagcctgaaagtggatctcacctattctcttgtcatttctcgantacgtaaggataattttttgc

SEQ ID NO: 161211 - DNA, 255 bp, Glycine max
tttatctcaaaactgggacttgcaaatttggattcaattgcaagttcaatcacccgcttaggaggaaaaacctggctaaaaacgagaatgcgggagaaagagaagagcaggaagaaagatcaggccagacggaatgcaagtattatttaaggtctggggggtgtaagttcggaaaggcttgcaagtttaatcacacaagaggaaagagttcatcagcatcctctactgcagagcttaacttccttggcctgccta

SEQ ID NO: 161212 - DNA, 250 bp, Glycine max
atttacaaagtgtcataaattgatgggattctctacagggccaagatcacgagctacacattggaaacaaacagtcctatacctagaagatgtcttgaccgtttgtgagggggaggcaattgtggggagcatgactgttgctccaaataaaaaaaatcctcgggatgttgatataatgctcaagtattcattgaatggaaggcgatgcaatgtttcaagggttcagtactacaagatgcgttgaacctgg

SEQ ID NO: 161213 - DNA, 251 bp, Glycine max
agttaatggagcatagatatggtgcgaaggaatttgtgacaagcaaggacagtagccttttatctccgggcacattctatctcactgaagttgactccatgtatcggagattctattcaaagaaaactaaagaaagcagtttgactcacgctgagaacggtgtgattgctaatggcgttgctaatggccactgatgttgagcatgtacaatcagcagtcaacttcgcctagaatgaggaagggtattgtta

SEQ ID NO: 161214 - DNA, 231 bp, Glycine max
cttttctgctccccgttgagaaagatttgaatcccaaggagaaataacgctaatggctccacgagacagccgagcccccgcgctcattgggcccggcccaagcctatcaccggcccacaaagagatccgctccagaggcctcaggaaacgcccctcgggccgctacgccgccgagatccgcgatcccggcaagaaaacccgcgtctggctcggcactttcgacaccgccga

SEQ ID NO: 161215 - DNA, 246 bp, Glycine max
gaaagtagtcaattaacccaggtctatggattttatgatgaatgccagatgaagtatggcaatgccaatgcttggcggtattgtacagatgtgtttgactatttaacactttctgcaattattgatggaactgtgctttgtgttcatgggggcctttctcctgacattcgaacaattgatcagataagggtcattgaccggaactgtgaaattcctcatgagggtcctttctgtgatctaatgtgg

SEQ ID NO: 161216 - DNA, 252 bp, Glycine max
ggcttctgtgcctcaaccaaaaatctcccttctaaccttattcttcttctcgtccttcaccatcattgcgcatgcaattgttcctcaaaacgaaaccttcaaatttgagaactcaggtgaacttggaccctacatcgttgagtacggtgcagattacagaatgataagcatcttcaactctccattccaagttggtttctacaacaccaccccaaatgccttcactctagctttgcgtgtagggctccaacg

SEQ ID NO: 161217 - DNA, 247 bp, Glycine max
gttgaaatgaaaatgggttcttctttgtggactttgtgtctaattttggcttcactagcctcttctgcattctgtgcctttccacggaggccagtggagactccattcggcagaaactacgttcccacttgggcttttgatcacatcaaatacttcaatggaggttctgagattcaacttcatcttgacaagtacactggtactggcttccagtccaaagggtcatacttgtttggtcacttcagca

SEQ ID NO: 161218 - DNA, 244 bp, Glycine max
atcgaaggaatgaacggccaaaaccttgacggccgtaacatcactgttaacgaagctcagtcccgtggtggcggttgcggcggttgcggtggaggtggtggataacgcggtggtcgcggtggtggatatggtggtggttgtcgcggtggtggagggggatacaaccgtagcggtggcggtggaggctatggcggcggcggtggatatggcggtggcggtggcggtggctatggcggtggcagag

SEQ ID NO: 161219 - DNA, 245 bp, Glycine max
ctggcagtggcaaatctaccttgattcaagcattatttcgattggttgaaccggaggcagggagtatccttatagacaacattaatatttcatcaattggtcttcatgatcttagaagtcatttgagtatcataccacaagatccaaccttatttgaaggcaccattcgaggcaatcttgatcctcttgatgagcactctgataaagagatttgggaggcccttgataagtcacaacttggagat

SEQ ID NO: 161220 - DNA, 249 bp, Glycine max
gctggagtgggtaaatcggtactgattatggaattgatcaataacattgccaaagctcatggaggtgtatctgtatttggcggagtaggtgaacgtactcgtgagggaaatgatctttatatggaaatgaaagaatctggagtaattaatgaacaaaatattgcagaatcaaaagtagctctagtatatggtcaaatgaatgaaccgcccggagctcgtatgagagttggtttaactgccctgactatg

SEQ ID NO: 161221 - DNA, 206 bp, Glycine max
  unsure (1)..(206): unsure at all n locations
gtaatggacaaaaaaccatgcacgntcatnatctcanngatcctgaagtgagaaagggaccatggaccatggaagaagacttgatcttgataaactatattgcaaatcacggtgaaggtgtttggaactccttagccaaagcttctggtctcaaacgaacgggaaagagttgtcgactccgttggctaaactaccttcgtcctgat

SEQ ID NO: 161222 - DNA, 247 bp, Glycine max
ctttattggcgttagtatgctacctactggagcaaaagagaaccaattacgtgagaacaacagccagaaggtccatcctcaaccaatggaagaggccatgaatcagaatccagaagcaatggaaaccctaatatctaaagtttttacaaatatctcttccttgaagtcagcttatatccagcttcaagctgctcatactccctacgaccctgataaaatccacactgctgataaacttgttattagt

SEQ ID NO: 161223 - DNA, 247 bp, Glycine max
cgtgcctctagggttatcatttctccatttccatgttctctctcacttttcaagaatcgtaagctatgggaaagtcttacccaactgtgagtgctgattaccagaaggccgttgagaaggcgaagaagaagctcagaggcttcatcgctgagaagagatgcgctcctctaatgctccgtttggcatggcactctgctggaacctttgacaagggcacgaagaccggtggacccttcggaaccatcaa

SEQ ID NO: 161224 - DNA, 246 bp, Glycine max
tgcacgcatggcatacattatgctcaggctcgactatgctggaattgcagccctgatatctacctctttctatcctccagtatattactcttttatgtgttacccctttttctgcaacctttacttgggatttatcactgtattgggcatctccaccatcttgttttctctactcccagtgttccaaaatccagaattccgcaccatatcgaaacatatctcctctggaatgggggtatctggcgc

SEQ ID NO: 161225 - DNA, 245 bp, Glycine max
  unsure (1)..(245): unsure at all n locations
tgctgagatcattgagcatggtatatcaggattccacattgatccttatcntcctgatcaagcttcagagctattggttgaatttttccaaaagagcaaggaggacccagaccattggaagaaaatatctaatggtggtcttcaaagaatttatgaaaggtacacttggaagatttattctgaaaggcttatgacctttgcgggagtttatagtttctggaaatacgtttccaaattagagaggc

SEQ ID NO: 161226 - DNA, 248 bp, Glycine max
cagcttttccctcgttgaaatgaaaatgggttcttctttgtggactttgtgtctaattttggcttcactagcctcttctgcattctgtgcctttccacgtaggctagtggatgattccattcggcagaaactatgttctcacttgggcttttgatcacatcaaatacttcaatggaggttctgagattcaacttcatcttgacaagttacactggtactggcttccagtccaaagggtcatacttgtt

SEQ ID NO: 161227 - DNA, 244 bp, Glycine max
ctccaacttccaacgagactgcgtgtggtatccttatagattggctgcaatattaccctttttcatttttgaagtatcgtttgaaattgaagtacaatggcactttccttcagggaagaaagagatacctttggagccattcaagttccctccgagaaattatggggagcacaaactcaaagatcgttgcagaacttcgatatcggtgggccccgcgaacgcatgcccgaacccatcattcgcg

SEQ ID NO: 161228 - DNA, 246 bp, Glycine max
cgtgcctctagggttatcatttctccatttccattttctctctcacttttcaagaatcgtaagctatgggaaagtcttacccaactgtgagtgctgattaccagaaggccgttgagaaggcgaagaagaagctcagaggcttcatcgctgagaagagatgcgctcctctaatgctccgtttggcatggcactctgctggaacctttgacaagggcacgaagaccggtggacccttcggaaccatca

SEQ ID NO: 161229 - DNA, 246 bp, Glycine max
atcgaagggatgaacggccaaaaccttgacggccgtaacatcactgttaacgaagctcagtcccgtggtggcggtggcggcggaggcggtggaggtggtggatatggtggtggtcgcggtggtggatatggtggtggtggtcgcggtggtggagggggatacaaccgtagcggtggcggtggaggctatggcggcggcggtggatatggcggtggcggtggcggtggctatggcggtggcagagac

SEQ ID NO: 161230 - DNA, 245 bp, Glycine max
atcgattccggtcgaacatggatggtcaatcgccggagaaactaatactggtgaaccgcgagccaaacggcgtcgcactggtgacgattaaccgtcccggttcccttaactcgctgacccggcccatgatggtggacctggctcaggctttcaagaggctcgaccgggacgagttggtgcgggtcattatattaaccgggtcgggccggtcattctgttcgggcgtggatctcacggccgctgag

SEQ ID NO: 161231 - DNA, 243 bp, Glycine max
gtcagctgggaggatattggaggccttgagaatgtcaagcgtgagtgcaagagactgttcaatatcctgtggagcacctagaaaaatttgagaagtttggtatgtcaccattaaaaggggttctcttctatggtcctccaggatgtggaaaaactttgttggccaaagcaattgctaatgaatgtcaagctaacttcatcagtgtaaggggcccagaattgctcactatgtggtttggtgaaa

SEQ ID NO: 161232 - DNA, 256 bp, Glycine max
ctcgagccgattcggctcgaggtctgctgtctttgttgcctctacgcttatggagaatggtggtgttcctcagtctgctactcctgaaactcttcttaaggaggctattcatgttatcagctgtggttatgaggataaaactgattggggaagtgagataggatggatttatggttctgtcacagaagatattcttaccggatttaagatgcatgcccgcggttggcggtctatatactgcatgcctaagcgccca

SEQ ID NO: 161233 - DNA, 246 bp, Glycine max
cagacaacaatttcgggaatccgctggctatgactgcagttgtggtcgtcccattgggccttctcttcttcgcttccggcctcatcgttaacctcattcaggcaatatgctacgtggttgtgcggccggtgtcgaagaatctgtaccggcggatgaacagggtggtggcggagctgctctggctggagctcgtgtggattattgattggtgggccggtgttaaggttcaagtattcacagatcctg

SEQ ID NO: 161234 - DNA, 213 bp, Glycine max
agaacagagaacaacagttccatctatggttcgaccccaccaaggacttccacacatactccgtcctatggaatcctgcaagcatcatattctctgtggacgggaccccaataagggagttcaagaatttggagacaaaaggggttccattcccaaagagccaacccatgagaatatactctagtctttggaacgctgaggattgggccacaa

SEQ ID NO: 161235 - DNA, 213 bp, Glycine max
ttctggcacccgcaatgcaacttctggctgggtcaaagatcattgaagtggacaacaatgtacgagaggaccgagcactgttaaacggagcacagaagcatacttggtactttgatagctgttggtgaggcagttgcctatgttctttcggggatgtatggtagtgtgggcacactcggagtaggaaatgctatcctcatcattatccagctc

SEQ ID NO: 161236 - DNA, 197 bp, Glycine max
acagctgtcaatgttcggaacaagttggatgagagcctcctcattcattggtctgggattcagcaaaggaggagttcgtggcaagatggtgttctacgcacaaactgtcctattcctgcaaagtggaactggacttaccagtttcaggtgaaggatcaaattggaagctttttctacttcccttcccttcatcttca

SEQ ID NO: 161237 - DNA, 208 bp, Glycine max
agcaaattttaggccgctgaaagctactctctctgggcttccagaccgggtttttatgaaattagtagtctgtgcaaaaacaaatgaagttctaggtttgcatatgtgcggagaagatgctcctgaaattgtgcaggggtttgcagttgctcttaaagctcgcttgaccaaggctgactttgatgccactgtaggcattcacccaagt

SEQ ID NO: 161238 - DNA, 207 bp, Glycine max
gcccttcagggtcctgttccttcgtttgagaaaggtgtgaagttcactctcgatgggatcaatagtttttgtctgaaagatgttggaccctgcgattctcgtatctccactttgcttgatatcactgcgggtttcgggtatccccttcagttggcgcgttcctggactgggaacgatccttgtgatgattggagttttgttgtgtgt

SEQ ID NO: 161239 - DNA, 209 bp, Glycine max
aaagcgcaaagcattctccactacgattcgctcttccagaagcttccagaaaactccagatcacgcgtacaaagcaaacagcccgtaagccgaccggcggcaaggctccccggaagcagctggcgactaaggccgcccgcaagtctgctccggcgaccggcggagtgaagaagccacacaggttcaggccaggaaccgtggccctgagg

SEQ ID NO: 161240 - DNA, 202 bp, Glycine max
caaggctctactctactgcttcacattctgctctagaaaattcagtggtgacacacagcttcggctactctctctgtagccaaaccagcccttcaggcaaatgggaaaggcttctctgaattctctggcctctgcagctcatcaggcttccttcccttttctagaaaatcttaagaggatttccactctgccattgccttcc

SEQ ID NO: 161241 - DNA, 206 bp, Glycine max
gcacaaagttggggattcagccatctcctgtggtggcagcgtttagctctagaggacccaactcgatcaccccgcagatccttaagccagatcttatcgcgccaggtgtcaacatcctagccgggtggtccaaggcggtgggacccaccgggttacacgttgataacaggcgcgtggatttcaacatcatttctggcacgtccatg

SEQ ID NO: 161242 - DNA, 205 bp, Glycine max
ggtcaacgcatggagattgttgaactacctaaccatccttattttatcggtgctcaattccatcctgaatttaaacaaagaccaggaaaaccttctcctttgttcttaggattcattggagcagcatgtggacaattggatgctgtcttacagcgctcttcaattgttgataatggtctctcaaaaggagtcattaatgatatct

SEQ ID NO: 161243 - DNA, 205 bp, Glycine max
  unsure (1)..(205): unsure at all n locations
ttcctatgtttgatnggnnnggaggtagaacgtcagnnatgtctgcagttggcctgcttccagcagcccttccagggattganatnanagaaatgcttgccggtgcatcattgatggatgangctaanaggagtactgtgnnaaggaataaccctgcagctctgctggctttatgttggtattgggctacagatggtgnaggatc

SEQ ID NO: 161244 - DNA, 205 bp, Glycine max
cgaagatctaccactcaacatttcaagagaaatgttgcaacagaacaagatcttgaaggtcatcagaaagaacttggttaagaagtgccttgagctcttctttgaaatagcagagaacaaggaggattacaacaagttctatgaggctttctccaagaacttgaagctaggtatccatgaggattcacagaacaagggaaagatt

SEQ ID NO: 161245 - DNA, 205 bp, Glycine max
cgtggaagaggctcacaacgtgagaatagtagggaaggggaatgaaatcgtgattcttgctcatgggttcggcacggaccaatcggtgtggaagcaccttgtaccgcatctggtcgatgattaccaagtgatcttgtacgacaacatgggtgctggtaccacgaacccagactacttcgacttcgaacgttactacacgatcgat

SEQ ID NO: 161246 - DNA, 173 bp, Glycine max
ctctccttctacattactatctccctcctacaaatttctaatgcttccattgcttcatctgactccatcatcaatggctctgagactgaaccctatccccacccaaaccttctccctcccccaaatgcccagcctcagatctccccgcttccgcatggcttccaccctccgct

SEQ ID NO: 161247 - DNA, 205 bp, Glycine max
aaataaagcacagaacagtcacagtgaatggcataaaaatgcatgttgcagagaaaggagagggtccagtggtgttgttcctccacggcttccctgagctctggtactcatggcgccatcagattctctctctcagctccctcggctaccgcgccgtcgctcccgatctccgtggctacggtgacaccgaagcaccaccttcaat

SEQ ID NO: 161248 - DNA, 83 bp, Glycine max
attgaggtggaaagctctgacaccatcgacaacgtcaaggccaagatccaggacaaggaaggaatccccccggaccagcaacg

SEQ ID NO: 161249 - DNA, 206 bp, Glycine max
aaactgaaccaaatcatcacacacacatactacgaagcaacaattcttctacaatggatctcctcattctggacaagaccctcataggtctcttcctcgctgcggtggtcgccatcgccgtctccaccctccgcggccggaaattcaagctcccaccgggcccactccccgtcccaatcttcggcaactggctccaagtcggcgac

SEQ ID NO: 161250 - DNA, 203 bp, Glycine max
actcttttcaaggatgtgatggaaaaaaatataataccacaggttccactctttaacatactacaagaagtttgatggtgaaactgtcacggaggtggtccgtcctcatatagcaaggatgcagtatcgtgttaccagattgcccaagtatatgattctacacatgcgtcggtttactaagaataatttttttgtcgaaaaga

SEQ ID NO: 161251 - DNA, 203 bp, Glycine max
cgtgaagtgttcggattgcggcgacgtgagcagttcgctgcccgcgacgttgtgagaagtccactgaaccttatcattcagaggaagtaaagtcgctggtaggatcatcatctctttgagttgccattgaagaagaagctcagatcggaaaaattcacctctccaatcccaatcccatcgttgcaaatggttccttcgttcat

SEQ ID NO: 161252 - DNA, 202 bp, Glycine max
ctaacatgagtcacgcatggacattattgttgacccaaattcttctggtggcggaggcaaagaaaaatgtcccagcggtgattgttttcggagactcctctgtggattctgggaacaataacgtcatagccacggttttgaagagcaacttcaagccctatggtcgtgacttcgaaggtggtcgtcccacgggacggttttg

SEQ ID NO: 161253 - DNA, 267 bp, Glycine max
gctgtttcgccacctggaggagatttctctgatcctgtgacatctgcaatcctgagcatagttcaggttttctgggttttggacaaaaagcttgctcagaggaagcactttccttctgtaaactggcttatttcttatgcaaaatactcaacggcacttgaaaccttttatgagcaatttgatccagattttatcaacattaggacaaaggctcgtgaagttctgcaaagggaagatgaccgcaatgaaattgtgcagcttgtgggc

SEQ ID NO: 161254 - DNA, 133 bp, Glycine max
gaaaatgggttcttctttgtggactttgtgtctaattttggcttcactagcctcttctgcattctgtgcctatccacggaggccagtggatgttccattcggcagaaactacgttcccacttgggcttttgat

SEQ ID NO: 161255 - DNA, 262 bp, Glycine max
acttgtccttctttgcgagattgaatcgtaagcagcggctaccctaatcctctcctcttcctctctactaatttcagctatggccgacgaagctgtggttgttccagatcccacccagatcgatgtcaagctctttaaccgctggagcttcgacgatattgagattactgacatttctctggctgattatatcggagtggcgacatccaagcacgccacgtatggccctcacaccgccggcaggtactcggtgaagcggttc

SEQ ID NO: 161256 - DNA, 135 bp, Glycine max
gcagatcttcgtcaagaccctcaccggaaagaccatcacccttgaggtggagagctctgacaccatcgacaacgtcaaggccaagatccaggacatggaaggaattcccccggatcagcaacgttctcatcttcg

SEQ ID NO: 161257 - DNA, 182 bp, Glycine max
ttggtaaagacggagatctgagctgaagatgctggaaggacatcccaatgttgtcacacttcatgcacatgccatcgttgatattagtaagacgaaagaagcattcgttgtgatggaattttgtgagaggtctctggttaatgttctggagtatcgaagagtcgattattttgatgagaaac

SEQ ID NO: 161258 - DNA, 260 bp, Glycine max
ccgatcgatccaattctcttcccatgtctacgatcggacacaacaatctcaatgccaaattggttcttctcggggacatgggtgctgggaaatccagcctcgttttgcgctttgtcaagggtcaatttctcgaatttcaggaatcaacaataggggcagcgttcttttcacagacgctggcagtaaatgatgcgacagtgaagtttgagatttgggacacagcaggacaagagaggtaccatagcttggctcccatgtat

SEQ ID NO: 161259 - DNA, 261 bp, Glycine max
ctcgagccgcaacagcacaaagcgggttactgtctgttcaagctaccatctctctctcactttcttagtgcctccttgccagaagttaaaatggcccaagaaactttcctattcacatctgaatcagtgaacgaggggcaccttcacaagctctgtgaccagatctccgatgctgtgctcgatgcatgcttggagcaggaccctgacagcaaggttgcctgtgaaaactgcaccaagaccaacatggtgatggttttcgga

SEQ ID NO: 161260 - DNA, 260 bp, Glycine max
atcatggacacatacattgatgatttgattgacgctgatgggtatttgccatggcaaggaccagagggtccttctggtatggatacttgcttctatgccgagtaccacaacattggccccggttcagacaaatccaagcgtgtgaaatgggctgggatttggaacctcaattcaaaagctgcacgttggttctcaccatctaagttttttcatggaactgattggattgaggttactggaattccttgctttcctggcgt

SEQ ID NO: 161261 - DNA, 262 bp, Glycine max
cgattccgaagccccacataccatttgttattcatataaaaactcgttttccttctccatttctcgtcgcaccttttcctcttctctctctttctctctttctagttcgtgttcttcgtcgcatatccgaagtaggatctctcttgttttttctctaggtttttcgcgatggcgtcgaagcgaattttgaaggagcttaaggatttgcagaaggatcctccaacatcttgcagtgccggtcctgttcatgaagatatgtttc

SEQ ID NO: 161262 - DNA, 266 bp, Glycine max
ttcgcacctctttctcaatcagcgaagagcggaggttcgcgtttcgagtggaggatacggaactgtgtcggcaccgaagtcagttgcgtctgatcctgatcagttgaagagcgccagagaccgtatcaaggagcttctcaactccaagttctgccatcctattctcattcgtttgggatggcatgatgctggtacttataataagaatattgaggagtggccacagagaggtggagctaatggtagcttaagatttgaaattgagc

SEQ ID NO: 161263 - DNA, 258 bp, Glycine max
ttgttgcgcgcccctcccattgttcgtaggcaacttcaacctcaccaaaggaactaagaatttcattgaggctacagaaagtggtgatcaatatgtcaaagaatccaaaagttttctttgatattctaattggaaagatgaaagctggacgagtagtgatggagttgtttgccgatgcaaccccaaaaacagctgaaaacttcagggctctctgcactggggaaaaggggattggatcatctgggaaacctttacact

SEQ ID NO: 161264 - DNA, 248 bp, Glycine max
gtgatttgcaagataagccatggtggcaaaagatgcaaactcgtgaagagttgattgacgcctcggctaccctcgtatggatcgcttcagcccttcatgcagctgttaactttggacagtatccatatggaggtttaatcctaaacaggccaaccattagcaggagattcatgcctgagaaagggtctgctgagtatgcagctttggctaagaaccctgagaaggagtttttgaagactaatactggc

SEQ ID NO: 161265 - DNA, 258 bp, Glycine max
ggatcttcagggctatgaatggcgctttaagcatatatttagaggtcagccacgtagacacttgctcacaactggatggtttaattttgtgacttccaagagattagttgctggagacacctttgtgtttctgagagggaacaatggagaattgcgggttggagtgaggcgcattgctcctgtgcagagcagcatgccatcatctgtgatttctagtcagagcatgcacctaggagttcttgcaactgcatctcatgc

SEQ ID NO: 161266 - DNA, 261 bp, Glycine max
aaacaaccttctttctttttctgtgagcctttctttcaggttcttaacttgatcagtgtgcagtgtccaaatcataagggtagttgcaaattgcaatggctaagcatgatgttgagggtggttccttctctgcaaaggactaccatgatcctcctccagcaccgttgattgatgctgaggaactcacacagtggtccttctacagggctttgattgctgagttcattgccacaatgctcttcctttacatcacagtgctca

SEQ ID NO: 161267 - DNA, 263 bp, Glycine max
gaaaacactaaagaaaaaaaatgggttcttctctgtggacctgtctgattgttatcacttgcttctgcttccttcgccgccaactcaagagtaccaattgatgtgccatttggcagaaactctgtgcctacctgggcctttgatcacatcaaatacctcaatggtggttctgagattcagcttcatcttgataagtacacaggtactggcttccaatcaaaagggtcctacttgtttggtcacttcagcatgtacataaaatt

SEQ ID NO: 161268 - DNA, 253 bp, Glycine max
ctagttccctggtttatgcgtgttcaatatatattgttctgggaatattagtgttgaaaggtgcacaggcacagcgtgcgttctatctgtttggtcgttctcttgtggataatgggaccaacaactttttggcaactacagctcgagcagatgctcctccttatggcattgatttcccaaccggacgacccactcgccgtttctctaatggctacaacattcctgacttcatcagtccctcacttggggccga

SEQ ID NO: 161269 - DNA, 261 bp, Glycine max
ccaagggtgatggtcttggtgctgaccttgttggcactttcatccttgtttacaccgttttctccgccaccgatgccaaacgtagcgccagagactcccacgtccccattttggcacccttgccaattgggttcgctgtgttcttggttcacttggcaaccatccccatcaccggaactggtatcaaccctgctcgtagtcttggtgctgctatcatcttcaacaaggaccttggttgggatgaacactggatcttctggg

SEQ ID NO: 161270 - DNA, 256 bp, Glycine max
cttgttgccactgtcatctcaatgtttttggttgacaagtatggtagaagaaaattctttctggaagctggctttgaaatgatatgctgcatgattattacaggtgcagtcttggctgtgaactttgggcacggcaaagaaattgggaaaggagtgagtgcctttctggttgttgtgatcttcttgttcgttttggcatatgggagatcttggggtccccttgggtggttggttcccagtgagctcttcccattag

SEQ ID NO: 161271 - DNA, 253 bp, Glycine max
ggcagcagagtgtgctcgtaatgctttgttggagaaggttgtggacaacaaagcagattctgagaaattcaggtcagacttattgaacattgcaatgactactttgagtcccaagattctctcacaggacaaggatcattttgcaaaattagctgtggatgctgtaatgagactaaagggaagcactaatttagaatctatccagattataaagaaacctggaggctcattaatggatccattcctagatgaa

SEQ ID NO: 161272 - DNA, 235 bp, Glycine max
gtaatatttcgagtccaagcttctcttggtgctctgtaagggaccaaaaaccaatttcatccactcgtaacatacccctatcggttttagaaaagccaagaaagtttgtgtccaccaacctctattttacacgagtctctcatactatgatactatagctacacttcccactgtgtctcagggtctgtgacacacacagactcacttcaagttcccagcttttgccatttttccc

SEQ ID NO: 161273 - DNA, 253 bp, Glycine max
tcgatttgttgtggattggatgatggaaaaaccagcaagcccctttcattgaaagtgtgcagtgaactgtaattgtgaaaaggttggaagatctggccaaagaaggtgatagccctgtagattcgttcccatggtttgatccttcccggtacaacgcggcgtgttcgaattctgatcgcttttacgcgagatagggggaccaccctctaagcctaagtattcctcaatgaccgatagcgtacaagtaccgtga

SEQ ID NO: 161274 - DNA, 254 bp, Glycine max
ctagcacacaaaacttgctatagtcgtgagctataactcatttgaggctctgtgagaattgagaaatggctaaagatgttgaggttcaagagcaaggaggagagtactctgccaaagactaccatgaccctcctccagcacctttgttcgacccagaggagctcacacagtggtccttctatagagccctcatcgctgagttcatagcaacccttctcttcctttatgtcactgtgctcaccattattggctac

SEQ ID NO: 161275 - DNA, 243 bp, Glycine max
cagctgtctgctgttagatctgtacccgcctagccattgatttggaaaagtccaacttcaaggatgagtaagcttcagagtgatgctctaagagaagctatctcaggaatcatggctgattccaaggaaaagaacaggaaatttgtggagaccattgaactccaaattgggttgaaaattatgatccccagaaggacaagcgtttcagtggcttgttaagttgcccatatctcgccccaagat

SEQ ID NO: 161276 - DNA, 253 bp, Glycine max
gaaagagaatccgaggcgaagagaagagaaaaattaagatggaggggaaggagcaggatgtgtctctgggagcgaacaagttcccggagagacagccgattgggacggcggcgcagagccaagacgacggcaaggactaccaggagccggcgccggcgccactggttgacccgacggagtttacgtcatggtccttttacagagcagggatagcagagtttgtggccacttttctgtttctatacatcactgt

SEQ ID NO: 161277 - DNA, 252 bp, Glycine max
caaaagtgtcagtattaggtggcatcaccgaagtgcagggagctgccaacagcgtcgagatcaacaatctcgctcgctttgctgtagaggaacaaaacaaaagagagaattcagttctggagtttgtgagggtgattagtgcaaagcagcaagtggttgctggagtgaattactacataacattggaagcaaaagatggtgagattaaaaatgagtataaagcgaaggtttgggagagggaatcccaagagt

SEQ ID NO: 161278 - DNA, 257 bp, Glycine max
gtctggaaaccctcccactcatccttcctactaagagatggtttaagatgcaattacctcgctgaaggagaataccggttcgagccaatacgcgattgcgaagttcatcgaggagaagcacaagctgcttccaccgaacttcaagatcaatcttctctaccatttgaagaagctcgtcgccgccggaaaactcgtcaaagtcaaaggctcgttcaagctcccacctaccagacctgctgcatgcatcttcttcttct

SEQ ID NO: 161279 - DNA, 254 bp, Glycine max
gaattaaaacatattttgttttcattgacgggtctaccgttatggttacatgatattccgggtatcgtattcagatctgacaatgagcaattcaagttccacatgcaaaggttcaccgcgaaaatagccaacttaatgaaatcagccaatctttttgcttcacaaggagggcctatcatactatctcagattgagaacgagtatgggaacgttgaaggggcatttcacgagaaaggactgtcctatattcgttg

SEQ ID NO: 161280 - DNA, 260 bp, Glycine max
cagcctcatacagaaacttcaatgccctaacctcttcctccactggccaatcactggacgccacggggctggccaagatccattgggtgcaaaagaattacatgatttacaactattgcactgatattagacgtttcccacaaggcctccctccagaatgttccattgcttgagaatgttcattattcaattcaatgttgcatattattatatatataaaaaaaatggtccccatatacgtgacacgtgtatgcctatta

SEQ ID NO: 161281 - DNA, 257 bp, Glycine max
gcattccatagttctcagatagggcacgtctctcgcggcctcttctctccctcgcgccgcccacactaaaaggttattgctctattattgtttgacgatggctgatgctcatgggactgataagaacattgaggtgtggaaaatcaagaaattgatcaaagctcttgaggctgccagaggaaatgggacaagtatgatttcccttatcatgcctccacgtgacaaattatctcgtgtcaccaagatgcttggtgatg

SEQ ID NO: 161282 - DNA, 255 bp, Glycine max
ggctttccctttgatcttgattggaggattgttccttctctcgagacgatccggagggatgggaggtcctggtgggcccggatttcctcttgcttttggtcaatccaaagccaagtttcaaatggaaccgaacaccggagtgacatttgatgatgttgctggggtggatgaagccaagcaggactttatggaggttgtggagtttctaaagaagcctgagaggttcactgctgttggggctcgcataccgaaaga

SEQ ID NO: 161283 - DNA, 259 bp, Glycine max
ctgaaaaatcaaaagatagtcccggtggaccatggcaatttgttggtctgctaccattgtttgatcctcccaggcatgatagtgctgaaaccattcgaagagctcttaaccttggtgtcaatgttaagatgattactggggatcagcttgccattggaaaggaaacaggccgaaggcttggaatgggaacaaacatgtacccttcatcggcattgcttggccaagacaaggatgcttctatttcagctcttccagttga

SEQ ID NO: 161284 - DNA, 260 bp, Glycine max
aaaagatccaacatctgacatggctataatatctcgcaaaggatctactcttgttagagaaatccatgagaagcagagtatgaacaagtctcgccaacgcttttgggaacttgcaggctcaaaacttggtgatatcttgggtgttgaaaaaacagcagagcagattgatgcagacactgctgaagtgggtgaagatggtgaaattgattttaaggaggaagctaagttttcacagcatatgaagaagggagaagccgtga

SEQ ID NO: 161285 - DNA, 258 bp, Glycine max
actcaatggcttggcactcgttcctcttattagcgacggccattctcgccgttgtgtgctccgccgtgagcggttgctcgccatcggatagggcggcgctgctggccttccggaaggcgctgagcgagccctaccttggcctcttcaactcgtggacgggctccaactgctgcctcgactggtacggcatcagctgcgacgccaccaccggccgcgtcaccgacatcaacctccgcggggagtccgaagaccccatct

SEQ ID NO: 161286 - DNA, 261 bp, Glycine max
cactatcattaaccaataaccaataaatacattaatcaccatggggaagtactttgctgttgttgctctctttgtctcagctttgtgcttctcctctatcttggctcgtaagacacctgcccttgataaattcttcgttgagggcaagatttactgtgacccttgccacttcgcatttgagtccaggctcagtttccccttggaaggtgttaaggtaagcctgcaatgtctgaggagtgagaatgataccgtgacatatgt

SEQ ID NO: 161287 - DNA, 258 bp, Glycine max
gggtttagggttttgattcctcagtccaagccgctctccgcaggcgaggttctgggttgcactgcgcccaaggtatcgtcgaaattgctcggtgatgatggtgagagtagtgttttggtttttgtggcggatggaaggttcacttggaggcgttcatgattgcgaatccggggattagggcattcaggtatgacccttacatggggaagttgtttctggaggaatatgatcatttgggtatgaagaggtccaggaaaa

SEQ ID NO: 161288 - DNA, 261 bp, Glycine max
ccttcacaagattctcacaaacaactcttgagaaagaaagaatggctgccaacacattgatgagttctgccatctcagccttcccatctctcctttcctcctcaaaatccagatttgccgcagcagttcctctttccagctttgttgtcaccaatgcctcttcttctcgcttttccatgagtgctgactggatgcctggccagcctagacccccctaccttgatggttcagcacctggtgactttggattcgaccctcttc

SEQ ID NO: 161289 - DNA, 258 bp, Glycine max
gctgctgcatctattggttacataggtgttggaacggttgagttccttttggatgaaagaggttccttttactttatggagatgaacactcgtatccaggttgagcatccggtgacagaaatgatttcctcaacggattgatagaagagcaaattcgtgtagctatgggagaaaaacttcgatacaaacaggaggatcttgtcctcagaggacattctattgaatgccgtatcaatgcagaagatgcttttaagggat

SEQ ID NO: 161290 - DNA, 243 bp, Glycine max
tttaatttccatagttaattaaagcttcaacgtttctgtctaaaaaaacacctctttcttccaggtgctcaacattcctaccaagattaacaagggtactgttgaaatcattacccctgtggagctcattaagaaggggacaaggttggatcttctgaagctgcattgcttgccaagctagggataaggcccttctcgtatgggcttgtggttctttctgtttatgataatggttcagtgttc

SEQ ID NO: 161291 - DNA, 256 bp, Glycine max
gtggctcatgatgggagtggacaggtgaagacaattcacgaggctcttaaattggtgcctaaaaagaacaagaagccttttgtcatttacgtcaaggccggtgtctaccaggagtatattatgatcaacaagcactgacccatgtcaccatgatcggagatggccccaccaagaccagaatctccggcagcaaaaactacgtcgatggcatcggaacttacaacaccgctaccttcggtgtgaacgctgctaactt

SEQ ID NO: 161292 - DNA, 257 bp, Glycine max
cgccggaatgcagctcgaggacggccgtaccctcgccgactacaacatccagaaggagtcaacccttcacgttgtccttcgtctccgtggtggcatgcagatcttcgtcaagactctcactggcaaaaccataacctagaggtcgaaagctctgacaccattgacaacgtcaaggccaagatccaggacaaggagggaatccccccagaccagcaacgtctcatcttcgccggaaagcaacttgaggacgggcgcac

SEQ ID NO: 161293 - DNA, 256 bp, Glycine max
ctaccccaaagtgcaaaagacatttgaaagagtttcaggttactgtgagcagaatgacatacattctccatatataaccgttgaagaatctgtcacatactcagcatggttgcggttgccaacagaaattgattcgtcacgaaagggaaatttgttgaagaagtccttgaaacaattgaacttgatggtataaaggattgtttagttggcatccctcgccagagtggcttgtctaccgaacaacgtaaaagactaa

SEQ ID NO: 161294 - DNA, 257 bp, Glycine max
gggtgggctcaccgttgagcaggctatccagagcaagaagttgttcatcttagatcaccatgactatctcattccatatttgaggaaaataaatgcaactaccacaaagacttacgctgaaagaaccatatttttctgaaaagtgatggaaccttgacgccattggccattgagttaagtaagccgcatcctcagggtgaaggatatggtcctgttagcgaagtctacgtgccttcgagcgagggagttgaagctta

SEQ ID NO: 161295 - DNA, 255 bp, Glycine max
caatgttggtacatcctgataaaaatatgggtaatgagaaggctgcagaagcctttaagaaacttcaaaatgcatatgagattctaatggattcgttgaagcgaaaagcttatgatgatgagctaaggagagagggattttgagtgtatttcgtagatttcatgatgcttctcgtaagaatggtaggcatggattctttccttcaggatttgcacgatctgatgcagatggcaaggatccatttggtgattcaag

SEQ ID NO: 161296 - DNA, 257 bp, Glycine max
gtgccggcgcgcgctgaagtttgctaggttcatgagcaggttcgggaagagttaccgaagcgaggaagagatgagggagaggtacgagatattctcgcaaaacctcaggttcatccgctcccacaacaagaaccgttgccctacactctctctgttaatcattttgctgattggacttgggaggagttcaaaagacacagactaggcgctgcccaaaattgctctgccactcttaacggcaaccacaagctcactga

SEQ ID NO: 161297 - DNA, 256 bp, Glycine max
gtcttcgtcgaccccaacaacacaacaaagttcctcgtacccgccatgaagaacgtccacgcttctctaacaaagtacaacctcgacaaaaacattaaaatctcctcacccatcgcactctccgcgctccagaatcgttccccgcctcatccggttccttcaaaaccgaactcgtcgaaccggttatcaaacccatgctcgacctgctccgccaaaccggttcctacttaatggtgaatgcgtatccgtttttcgc

SEQ ID NO: 161298 - DNA, 248 bp, Glycine max
gcttttccctcgttgaaatgaaaatgggttcttctttgtggactttgtgtctaattttggcttcactagcctcttctgcattctgtgcctttccacggaggccagtggatgttccattcggcagaaactacttcccacttgggcttttgatcacatcaaatacttcaatggaggttctgagattcaacttcatcttgacaagtacactggtactggcttccagtccaaagggtcatacttgtttggtc

SEQ ID NO: 161299 - DNA, 251 bp, Glycine max
atccgaggcgaagagaagagaaaaattaagatggaggggaaggagcaggatgtgtcgctgggagcgaacaagttcccggagagacagccgattgggacggcggcgcagagccaagacgacggcaaggactaccggagccggcgccggcgccactggttgacccgacggagtttacgtcatggtccttttacagagcagggatagcagagtttgtggccacttttctgtttctatacatcactgtcttaacc

SEQ ID NO: 161300 - DNA, 254 bp, Glycine max
gcaagtcgagcagtgcggacatttcatgggcatgagggagatgttaatgcagtcaaattctttcctgatggaaatagatttggaactggttcagatgatggaacctgcagattatttgacattaggactgggcaccaacttcaagtttattatcagcagcacagtgacaatgagatcccacctgtgacttccattgcattctctgcttcaggaagacttctctttgctggatacacaaatggagattgctatgt

SEQ ID NO: 161301 - DNA, 251 bp, Glycine max
ggacaaacttaaggctgagcgtgaaagaggaatcaccattgatattgctttgtggaagtttgaaacaacaaagtattattgcacagttattgatgcgcctggacatagggatttcattaagaatatgattatgggacatcccaagctgactgtgctgttcttatcattgattcgaccactggtggttttgaagctggtatttccaaggatggacagactcgtgaacatgctctgctttcattcacccttgg

SEQ ID NO: 161302 - DNA, 252 bp, Glycine max
aattaatcaaacatggctagggttagtgctttgtttcactctttgctcttgatttcttcccttgtattggcttctcaaatccatgtttcctctgggaaactagtccctggactatcatggaattactatttgttgacatgtcccaagcttgagaggattataaggaagcatcttgaggatgtcttcgagaaggacagtggagtagctcctggcatacttcgactcttcttccatgactgctttcctaatgga

SEQ ID NO: 161303 - DNA, 250 bp, Glycine max
cggtccaccacctagtaaatggaagggcacctgccaaacttctaaaaatttcacatgcaataataaaatcattggggctaagatttacaaagtagatggattttttagcaaggatgatccaaaatctgtgagggatatagatggtcatggcactcatgtagcatcaacagcggctgggaatccagttagcacagctagcatgttaggccttggtcagggaacatcaagaggtggcgtgacaaaagcacgc

SEQ ID NO: 161304 - DNA, 251 bp, Glycine max
ttcaagccttagaaaccgtaatggaccggttcagatgccttatactgtgcttcttcctaccagtgaggaaggccttactttcagaggaattcccaacagcatctctatctaaggccagagtgcgtttatgtgtggttctctttccaaacctacgttacctttctcgttgacgagtaaatatgcaagcttatgcatgcatataataattgtcttatgcattcttaagtgttgtatgtggacgttatctagtt

SEQ ID NO: 161305 - DNA, 248 bp, Glycine max
ctcattaattgcaagaatggcacttcgttgcttggtgatgtccctttctgttctcttcactcttggtcttgcgagagaaagccatgccagagacgaagatttttggcatgctgtttggccaaacactcccttccaagttcattgcgagatattctaaagcctggccctgcaagtgttgaaatcgatgatcaccctatgcaaattgaagaaacacagtacccgaaaaccttcttctataaagaagacct

SEQ ID NO: 161306 - DNA, 250 bp, Glycine max
gtgaaactggggcaggaaagcacgtgccccgtgcgatttttgtagatcttgagcccactgtgattgatgaggttaggactgggacataccgccaactattccatcctgagcagctcattagtggaaaggagatgcagcaaacaactttgcccgtggccactataccattggaaaggagattgttgagctttgcttggaccgcatcagaaagcttgctgacaactgcacaggtctccaaggttttctggtt

SEQ ID NO: 161307 - DNA, 249 bp, Glycine max
tttttccctcaccaaagaagaaccaaaacaatggcggatcaactcaccgatgaacagatctccgagttcaaggaagccttcagcttgttcgataaggacggcgatggttgcatcacaaccaaggagcttggaactgttatgcgttcattggggcaaaacccaactgaggcagaactccaggacatgatcaatgaagtggatgctgatgggaatggtaccattgacttccctgagttcctaaacctcatg

SEQ ID NO: 161308 - DNA, 250 bp, Glycine max
gtggttctggtgcttcctcatctgttctcgacaaagtagttcatgctgctaatgagaacataggctcacaggaaagctctattgatctagacaaaaagacgtcggaagatggaagtgtgaagaacagttctgtttctgccaaagttagtgatggggccagcagtcttgcaaagacaagtggaagtgccaagatcagcaaccgggctgattttgttgagagtggtaagagcagtatttgcagaggaagcac

SEQ ID NO: 161309 - DNA, 248 bp, Glycine max
  unsure (1)..(248): unsure at all n locations
tttcttccaacctctcaagtccaacctacccctttttcttctcccaccaacttcaccgtcnacttcctcgatcatgtctcacttcaagggcaagtaccatgatgagcttattgccaatgnngcttacttggcactcctggaaagggtattcttgctgctgatgagtcaacagggacaattggcaagcgtttggccagcatcagtgtagagaatgttgaatccaacaggcgtgctcttagggagctgct

SEQ ID NO: 161310 - DNA, 246 bp, Glycine max
ggaactgcaggttatgcgaatgcttgaccatactaatgttctcagactaaaacactgtttctattcaactgctgagaaagatgatttgtaccttaacctagttttggagtatgtacctgaaactgttacagagtttcaaagcactatgtcagaatgcaccaacatatgcctatcattaatgtgcaactgtatacataccagatatgtcggggtttaaattatttgcatcatgtgattggagtctgc

SEQ ID NO: 161311 - DNA, 248 bp, Glycine max
gaagacgaaggacagagcaatgcctcgatggtagcatctgcatcttcaccttcctcggagtgtttcaccctaaatgaggctagattgaaagaacgcaattacctgggattgtcagattgctcttcggtggacagttctattgtcccgagtttgtctgatgagaaaaaggagaatctgaatttgaaggctactgagttgaggcttggacttcctggatcccagtcacctgaaagggatccggatctttt

SEQ ID NO: 161312 - DNA, 242 bp, Glycine max
gttttgacgatgaagcaaatcatctcttaatgcacaggaacttgcccgctgtcagatgggttggtggtgtacagttggaattgatagctatagcaactggtggaagaattgttcctaggttcaggagttatctccagaaaagttgggaaaggctggtatggttcgagaaaagtcctttggtacaacaaaagaccgaatgctgtacattgaacattgtgcaaattcaagggctgtaaccatat

SEQ ID NO: 161313 - DNA, 242 bp, Glycine max
ttttcattttcttataaatgaacaggtataacagtttgtctgcatatgggcagtcaaagcttgctaatgtgttgcataccaatgagctcgcaagacggctaaaggaggagggcacaaacatactgcaaactcagttagcccgggaccaattgccaccaatctatttcgttatcacagtttaatggaggtgtttgttggtatacttggtaaatatgcgatgaaaaatatacagcagggagcag

SEQ ID NO: 161314 - DNA, 243 bp, Glycine max
cggctcgagccagttttgaatatatttttattccttctttgtttcttcactttcttccatacaccttacgatattatctcagactgttgtcctcaaagttggtatgtcatgtcaagggtgtgcggagcagtgaacagggttttgggaaaaatggaaggtgttgagtcatttgacattgatctgaaggagcagaaggtgacagtgaaaggaaatgtggagccagatgaagttctgcaagccgtt

SEQ ID NO: 161315 - DNA, 242 bp, Glycine max
  unsure (1)..(242): unsure at all n locations
tgcactgcaacttagccacttgaacccccttcgtaagcctcttcacatcttcacttcttcacttcttcttccgcactaatacgaaaatagagggaattcacaaaagaggttaccatgttggacgtgagagagaggagaaggagttggatctcacttctccggaagttgncaccaagtacaagatcgccgcggagattgttaacagggctttgcagttagttatttcagaatgtaaaccgaag

SEQ ID NO: 161316 - DNA, 244 bp, Glycine max
atagcagctggaatgacagttaatgattggactgcattttgtggttccgacaccacagcaacagagctatctgtaatcgagagtgttttcaagctgagagaagcgcacctagcgcaattgtggatgagatgaggaaatctctcattgatacctatgtctgaactgtggtagtaatagtgttttgttttatgcaagatattgcactgctcattgttgagatcttctaagttaagttttggtgata

SEQ ID NO: 161317 - DNA, 243 bp, Glycine max
ttggtgcttcgtttgagaggtggcatgcagattttcgtcaagactttgacaggaaagaccatcaccttggaggtggaaagttctgatacaattgataatgtgaaagccaagattcaggataagagggtattcccccagaccagcagaggcttatctttgccgggaagcagcttgaagatggaagaacccttgctgattataacatccagaaggaatctactttgcacttggtgttgcgacttc

SEQ ID NO: 161318 - DNA, 243 bp, Glycine max
cgacccttgttaaaacctcatccacggattccgagcctttaagaaagaattctgcttactgtgtccaacctgcatgtattgagcccccttcctgcatccagccatcctgtgttgctcctactagtgcttttcaccccggctcttctctagcaaatcaaagaaagaccggaagccgaaaactgaaattggtaaccaagtgagtccgttacctgagctcattgcagagcctacggatgctcggtc

SEQ ID NO: 161319 - DNA, 267 bp, Glycine max
gtgggaagttgaggggaagtgggttgttaaaggagcagttgatgtagacattggtgcaaacccttctgctgagggtggaggagaagatgagggagttgatgatgcagctgttaaggttgttgacattgttgacacattcagacttcaggagcaacccgcattcgataagaagcagtttgttaccttcatgaagaggtttatcaagaatttgactcccaagctcgatgcagagcaacaggagttgtttaagaagcacatcgagggagc

SEQ ID NO: 161320 - DNA, 271 bp, Glycine max
gttctttgaagaagaacccttctctttgcgcgtgtcccgttctcttctccaatcctcctccatccccactgtgtgatctgatcctaaaccctatagccatgactaccatggaggttaagctatggaatgacaagcgcgagagagaaatgtatgacaactttggggagctttatgccattatcaaagccgctgagaggcttgagaaggcctatgttagagatataatctcaccccaggaatatgagttagagtgccagaagctcatagctca

SEQ ID NO: 161321 - DNA, 272 bp, Glycine max
tttggggtttctctcttcaaactagggttttacagaatataagctctctctatctttggttttcgtcattcaaatccaatccaatatcaaatatgagtcgtcatcccgaggttaagtgggctcagagacttgacaaggtctatatcacggtgcaattggctgattcaaaaaatgccaaggtggatcttacaccagatggtatttttaccttctctggtagtgctggtgctgaagaccatcagtatgagctaaaactggagctctttgacaag

SEQ ID NO: 161322 - DNA, 266 bp, Glycine max
ctctctttcttctcggtccagtgtctctttcaaagtgctgctgctgccagcattgacctgagctagagcagtaaccgtcatcaccactgccagtacggtaccatggctgtgcttcaatctttcgtttcggtccacccagattctcacttccccatacagaacctcccctacggagtgttcaagccccaatccgcttctcctcctcgtcccggcgtcgccatcggagacttcgtcctcgacctctccgaaatctcttccgctggtct

SEQ ID NO: 161323 - DNA, 260 bp, Glycine max
cgcaagcaaaaagaaagaatcccaggcgaggagaaagatggaggggaaggagcaggatgtgtcgttgggagcgaacaagttccccgagagacagccgattgggacggcggcgcagagccaagacgacggcaaggactaccaggagccggcgccggcgccgctggttgacccgacggagtttacgtcatggtcgttttacagagcagggatagcagagtttgtggccacttttctgtttctctacatcaccgtcttaaccg

SEQ ID NO: 161324 - DNA, 265 bp, Glycine max
gcaaatattgcctattcggcaatatggcggaaaatggttcatgtgagctgaacaagtttgtgctgttttgtttgttgttgctaatacaagtggcagtttctgaaatcatttttgaagagcgatttgatgatggatggcgaagtaggtgggtgaaatcagactggaaaagcagtgagggcaaagcaggttcattcaagcacacagctggaaaatgggctggtgatccagatgacaaaggtattcaaacatccagtgatgccaaaca

SEQ ID NO: 161325 - DNA, 273 bp, Glycine max
caaatctcagactttttaaggcgctttgggtggatagtgccagcatacaccatgcccccagatgctcaacatgtcacagtgcttcgtgttgtcatcagggaggacttctcaaggaccctcgcggagcgtctcgtgtccgatgtggagaaggtgctgcatgagcttgattcacttcctgcaagggtcatcagcagcaccactgtgacactcagtgcagaagaaaatggcaaggtagtggttgctaagaagaatcctatggagactcagagggaa

SEQ ID NO: 161326 - DNA, 269 bp, Glycine max
cttccctctcttctgttaccaatggctccctcatcaaactacatttctttccttttcctcaccacccttttgtgtgctcttcaaatcagtgcaagagacagccagttcttcagcaaagtcacccattttgacaaaaacagtgtcaaagagacagaacttcccaacaaagaagcaccagaagtgaacaagccagagcaacaaccacctttcattccggagactgaaaacagctatggcctatatggtcatcatgatgagtataaccaagt

SEQ ID NO: 161327 - DNA, 266 bp, Glycine max; identical to SEQ ID NO: 152364

SEQ ID NO: 161328 - DNA, 264 bp, Glycine max
aaggcagaaagcaagctcatcctagagttttaaaaatggcagcagcctcctccatggctctctcttccccatccttggctggcaaggccgtgaagctgggcccatcagcccccgaagtcgggagggtcagcatgaggaagaccgtcaccaagcaggcctcctccggaagcccatggtacggcccagaccgcgtcaagtacttgggcccattctctggcgagcccccgtcctacctcactggcgagttcccaggtgactacggct

SEQ ID NO: 161329 - DNA, 258 bp, Glycine max
tgtcacccctccttcctttatggttcggatggccatgagattgtctagagcaagatggtttacctttttgagaagagtttttcattaccaaaatggatcaaggtccaaccttggctccaaccctttcaattctagcacttggatgatgctggagtttattgccttgattctccaaataacaattacaacgttcactttggccatttccaagagggagagacctatttggccgatgaggatttggatttctggatatga

SEQ ID NO: 161330 - DNA, 255 bp, Glycine max
cagtattgttcttgcgttgtttcggagggtcaattgtttggttgagcaaaaatctgaaattcaatttcatttgaaagcaaatggggaatcttttatgttgtgtgaaagttgatcaatctacggtggctatgagagaaggattttgacgatttgagaaggtacttcagccgggatgccattgcatgccatggttccttggaaaacaacttgctggtcatctctctcttcggctacagcaactggatcttcgttgtg

SEQ ID NO: 161331 - DNA, 255 bp, Glycine max
ctctcggcttcttcttcgttgcgctttttcccaaaaccaattgcatcactctcgtccgttaccgccgctgccctagaccaccgcaagcgacgtcgcacaccgccttcatccgttagggcaaaaatgagtcgaggaagtggaggtggatacgatcgtcacatcactattttctcccctgaaggacgtctctttcaagtggagtatgctttcaaggctgtgaaggctgcaggaatcacctcgattggtgtccgagga

SEQ ID NO: 161332 - DNA, 257 bp, Glycine max
atttctccatttccattttctctctcacttttcaagaatcgtaagctatgggaaagtcttacccaactgtgagtgctgattaccagaaggccgttgagaaggcgaagaagaagctcagaggcttcatcgctgagaagagatgcgctcctctaatgctccgtttggcatggcactctgctggaacctttgacaagggcacgaagaccggtggacccttcggaatcatcaagcaccctgccgaactggctcatagcgct

SEQ ID NO: 161333 - DNA, 260 bp, Glycine max
gtttgccgtgggagctatctgaatctaactggcgaaggggctttcgaaaaggtactgaaggagtggcatggaattcttgatcgtcattatttgatgctagaagcttgtgaattaaactctgtttctgaagaggactataatgacctgggaagagctggtttaggcagttgtttgcttggaggcctgccagattggctagtttcctatgcagctcgccttgtgagatttatcaattttgaacgaactaaacttcctgagga

SEQ ID NO: 161334 - DNA, 254 bp, Glycine max
atcaaagtttcttcctttctctgctctttgccttctctgacacatttggtgccttgtagagcgtgttttggcaggaaggtggtatggcgaaggacgttgaggttgctgagcgtggctccttctctgggaaggactaccaggaccctccaccagcaccactcattgatgctgaggagctcacaaagtggtccttttacagggctctcattgctgaattcattgccactttgctcttcctctacattactgtgctc

SEQ ID NO: 161335 - DNA, 253 bp, Glycine max
tcttcataaacgcctttattctccgtttccgtttccttcccggaattcgattcatcatctctgaaaatgagagagtgcatctcgatccacattggtcaggccggtatccaggtcggaaatgcttgctgggagctctactgtcttgagcacggcatcgggcccgatgggcaaatgccaagtgacaaaacagttggcggaggtgatgatgctttcaacactttcttcagtgagactggtgctggaaagcacgtgc

SEQ ID NO: 161336 - DNA, 189 bp, Glycine max
cgattaaagacttgcttccaagatggttctgctctcagaagctctgggatgacgttgttgctggccctcaacctgagcgtggccttggcaagctcagaaaactcaccaccctcaaatctattgatgacggagacagtagcaagctgcagaagacgtcgtcgatgccgtcgactccgacaaccccgatga

SEQ ID NO: 161337 - DNA, 262 bp, Glycine max
gtgggatctaatctcccttatttacacttctggaactacatcaaactccaagggtgtgatctatagccacagaggtgcctatcttaattctctggctacggttcttcttaacgagatgaggtctatgccggtatatttatggtgtgttcccatgtttcactgcaatggttggtgcctcccttgggccattgctgctcagggtggcactaacgtctgccaaagaagtgtcaccgctgaagggatatttcacaatatttttagg

SEQ ID NO: 161338 - DNA, 254 bp, Glycine max
ctgcagagacgcgctggagaagcagatagggctgcagctcgaagaagccacgcttgacgaccttctcgtgccgagctactcgtacctgaacgaaacgctttacgacgtcgattgcgtggagaggattttgagtcagttcttggaaggtttagaagcgagaaccgccgcggaaacgacggaagacgcggcggcgacgaggtcgccggcgcttatgctcgtcggaaaactcatcgacggttacctctccgagatag

SEQ ID NO: 161339 - DNA, 248 bp, Glycine max
attcaacttaagagatcaatatggccaccaccactacccagcctccctctaatatctgttttttccttctgttgttgcttctagcacactttcatttgggcataagccaacttgagctgaattactactctaaaagctgcccaaaagctgaagagatcatcaaggaacaagtcacacaactatataacaagcatggaaacactgccgtttcgtgggtcagaaatctcttccacgattgcgtggttaag

SEQ ID NO: 161340 - DNA, 254 bp, Glycine max
gtgtgtcgccgccatggccaccgtcaccacccaagcctccgccgcaattttccggccatgtacctcgaaatcgaggtttttgaccggctcttccggtaaacttaaccgggaagtgactatgcggccaatggggtgccctccttctgcctctttcaaggttgaagccaagaagggagagtggttacctggcttggcctccccaacttacctcaatggcactcttcctggtgacaatggatttgaccctctggggc

SEQ ID NO: 161341 - DNA, 254 bp, Glycine max
gagataactagaaacagtgtgatgaaaatgaaggtccttgttttcttcgttgctacaattttggtagcatggcaatgccatgcgtacgatatgttccctctccgaatgaacactggctatggtgcccgtactccggaggtgaaatgcgcaagttggaggcttgctgtggaagcacacaacatctttggctttgagaccattcctgaagagtgcgttgaagcaacaaaggaatacatccatggcgaacaatatag

SEQ ID NO: 161342 - DNA, 217 bp, Glycine max
gtgaaagagaatccgaggcgtagagaagagaaaaattaagatggaggggaaggagcaggatgtgtcgctgggagcgaacaagttcccggagagacagccgattgggacggcggcgcagagccaagacgacggcaaggactaccaggagccggcgccggcgccaccagttggacccgacggcagtttacgtcatgggccttgtaccgggcacggataa

SEQ ID NO: 161343 - DNA, 255 bp, Glycine max
gctgatatgataatgctgcctcctgggtggctgagtgaactcatatgaattggtcattattgctgcctggttcttaaagaaggccacatcatacaggcaggaaaatatgatgatctttgacaagccggaacagattttaaaactctagtttcagctcaccatgaagcaatagaggctatggatattcctaatcactcagaagattcagatgaaaatgtacccttggatgacactattatgaccagtaagacatcc

SEQ ID NO: 161344 - DNA, 257 bp, Glycine max
atcttctcataagctttacttaattagcaaatccaaatatggcactttcttcttcatcatcttcaacatccatatttgctttagctttgttcactcttttgcttataggaagttcttcagctcaactctctgagaacttctatgatagtaaatgtcccaaggttttctatgccgtaaaatccgttcttcaatctgctttggctaaagaacctcgccagggagcatctatcgttcgcctcttctttcatgactgcttt

SEQ ID NO: 161345 - DNA, 249 bp, Glycine max
cggaagattaaaaaaacaacggtggtacgtgatgccaccgaagttcgatccctcgcaggtggtggacgtgttcgtccgagtcaccggcggcgaggtcggcgcggcgagttctctcgccccgaagatcggtcccttgggactctccccaaagaagatcggagaggatattgcgaaggaaaccgcgaaggactggaagggcctccgcgtgacggtgaagctaaccgtgcagaaccgcgcagcgaaagtgac

SEQ ID NO: 161346 - DNA, 241 bp, Glycine max
ccggcaagaccatcgaccttgaggtggaaagctctgacaccatcgacaacgtcaaggccttatccgtctcatggcaggatcaaacaccggaccaatcaaccttggaaacccaggtgaatttacaatgactgaacttgctgagacagttaaagagcttattaatccaggtgtggagatcaagatggtggagaacactcctgatgacccacgacaaagaaaaccagacatcacaaaagcaaag

SEQ ID NO: 161347 - DNA, 250 bp, Glycine max
catcttttgtttgttcttcagtactttagtgtgtgatttaattccaagattttgagaatgtctagctgtgggtgtggaagtagctgcaactgtggcagcaactgcggttgcaacaagtactcttttgacttgagctatgttgagaagacaaccacagagactcttgttttgggtgttgggtctgtgaaggcccaattggagggtgctgaaatgggtgttgcagctgagaacggtggctgcaactgtggat

SEQ ID NO: 161348 - DNA, 247 bp, Glycine max
caattatacaaacacattcttctcttctcttcctctcaaataaatttattttctttttttcatatttttcttctaattttccctttgcataatttctcgcgtaacggaaagccatgaaattcggaaagagcctgagcagccagatcgagaaaaccctgccggagtggcgtgacaagttcctctcctacaaggagctcaagaagaagctcaagcaattcgaccctcccgccggcggcgatgagcgccc

SEQ ID NO: 161349 - DNA, 248 bp, Glycine max
atccttaacacactgtccaacaagaatggctaattcatatgaaaacaacttcccccctcagaagcaagacactcagcctggcaaagagtacctcatgaatccaccaccccaatacaacagctcccaatacaagccatcaaataaacttcagggaaagatagctgtagtaaccgggggtgattctggaattggacgaagccgtgtgcaacttgttttcattagaaggtgctactgtgatcttcacctac

SEQ ID NO: 161350 - DNA, 236 bp, Glycine max
gaactttgacgccattggccattgagttaagtaagccgcatcctcaaggtgaagaatatggtcctgttagcgaagtctacgtgccttcgagcgaaggagttgaagcttatatttggttattggcaaaggcttatgttgttgtaaatgactcgtgctacaatcaactcgttagccattggctaaacactcatgcggttgttgagccaatcgtcatagcgactatgaggcagcgtgct

SEQ ID NO: 161351 - DNA, 254 bp, Glycine max
tttggcatccccgtggcttcaagaagagaatctcaatggaggcccaggagctgaagcgcgtgttccagatgttcgaccgcaacggcgacgggagaataacgaagaaggagctgaacgactcgctggagaacctgggcatcttcatctctgacaaggacctgagccaaatgatccagaggatcgacgtcaacggcgacggttgcgtggacatggacgagtttggggagctgtatcagaccatagcggacgagcgc

SEQ ID NO: 161352 - DNA, 242 bp, Glycine max
ggaaaaccgggtgcagcagcactcttagtgaaggtcagcatggatggtgctccctatctgaggaaggtagatctaagaaattatacaatgtaccaggaactgtcttctgcccttgagaaaatgttcagctgtttcactctaggtcaatgtggttcccatggagctccaggaagagaaatgttgagtgagagcaagctgaaggacctcctgcatggttcagaatatgtactcacttatgaaga

SEQ ID NO: 161353 - DNA, 246 bp, Glycine max
agaatgcatctgttagcatcatcctcttctctttctccttctctcccttcttcattccctcgcccttctctccatctccaccttcactttccttcccaaactacccagcttcgcctccataccccaccacccctttcttgctcccttaattcttcttcttcttcttcttacgtggaacaatctgcttcatcttctcagatgcagaatggcttgctgtactccagagcttattgggttgctgaatct

SEQ ID NO: 161354 - DNA, 243 bp, Glycine max
atcacaatcacatgtgccactttcgcccaagatgttctagaaggaagagcaaaggcttcacaagcacacgatcacaagcatcaaccactaatatttggaccggctagccttgtaaatggaaacataacaactgagagagaaagaatggcagctcaggtcttccaacctagtcataggatgccaactatgagcattgaggaagctgggctaaaagaaatggaaataatgaacaatggcaagaga

SEQ ID NO: 161355 - DNA, 239 bp, Glycine max
cccagatcccggtggccttttccctctctttctctggaaaattcccccgattttctcgagaaagtgaaacgcaattatgagctttcaggacatcgaggctgggcggcccttcagttcgaggcgcgggttgatgaacgggaagcaagacccgacgcaagcggtggctgccggaatattccagatcaacaccgccgtctccaccttccagagactcgtcaacaccctcggaacccccaaag

SEQ ID NO: 161356 - DNA, 237 bp, Glycine max
ctcgttgaaatgaaaatgggttcttctttgtggactttgtgtctaattttggcttcactagcctcttctgcattctgtgcctttccacggaggccagtggatgttccattcggcagaaactacgttcccacttgggcttttgatcacatcaaatacttcaatggaggttctgagattcaacttcatcttgacaagtacactggtactggcttccagtccaaagggtcatacttgttt

SEQ ID NO: 161357 - DNA, 235 bp, Glycine max
atggaagctcgtgatccaccgcagctgccgatgattgtttgactttgatatcgaaattgctgggagatattcaacgtggatacttacttgtagtgcttagtttgagtctctattaatgaccctatcttgcatggcgcttttggggttaaagattacgattcttctccccattgtagtcttacctgagcagtttaaaattttgggagacgataacttttgtctttataccatgtgt

SEQ ID NO: 161358 - DNA, 236 bp, Glycine max
cgagtcagttgccatatgctagtctcaacgattaagccatgtatgtgtaattatgaactaattcagactgtgaaactgcgaatggctcattaaatcagttatagtttgtttgatggtatctactactcggataaccgtagtaattctagagctaatacgtgcaacaaaccccgacttctggaagggatgcatttattagataaaaggtcaacacaggctctgcctttgctttgatg

SEQ ID NO: 161359 - DNA, 233 bp, Glycine max
ctaaaacagcgtccgcaatcgcatctgggactttgctgggaacttttgaggataacaggtacaagtcagagtcgaagaaatcagtgcttagttcggtggatattattgggcttggaactggacctgaattggagaagaaacttaagtatgcagctgacatttcttctggaatcattctcggaagggagcttgtgaattctccggctaatgtgctcacgccagggtattggctg

SEQ ID NO: 161360 - DNA, 234 bp, Glycine max
cttgctcttagccctcctcctcttcgccgcagtgaccaccgccgcgatggcgtggcgcgtccgacgccgacgacatcctgatccgtcaggtggtgccagatgttggcgaagcgaagaggaggacaacctgctgaacgacgagcaccacttcgcgagcttcaaggccaagttcgccaagacctacgccaccaaggaggagcacgatcatcgcttcggcgtcttcaagtccaacct

SEQ ID NO: 161361 - DNA, 238 bp, Glycine max
accagtatgaatgatatagtagcaatcaaacgccgtttggggggtcgctatccatggttgtctcgagcttatgatccctgtactgagaggtactctaccttgtatttcaatcgtccagaagttcagaaggcacttcatgccaatgtaactgggattccttattcatgggcaggatgcaatgatgttattgtggaaaattggggtgattctccgctatctatgcttccaatatatcaag

SEQ ID NO: 161362 - DNA, 237 bp, Glycine max
ttcatattcatcaaactcatcaaaatgaatctgtaccactcctccaccaccaccaccaccaccaccatcttcaccgtcatattcctcctccttgcaatattattcactctcacaccccacaaggccaacggtgccacgtgtcaccctgaggaagaagcgggcctgttgggcttcaaatccggtatccgatccgacccgtccggcctgctcagtaactggatatcgggtacggactgc

SEQ ID NO: 161363 - DNA, 229 bp, Glycine max
gaaaattggtggaaagtagcatcatcaaggagggcttacttgtagaggttttcaaagatgaggaagggtttaaagctgcatggttctcagccaatattttgactttgagggatgataaagcttatgtaggctacacttcacttgtagctgctgaaggtgcagggccattaaaggaatgggtttcacttgtatgtgatggagacaaacaccccagaatacgtctgctgtc

SEQ ID NO: 161364 - DNA, 240 bp, Glycine max
ctttgtgatcctgggaaactcatttcattagagtgagagagacgagagagagagagagagaggtatcacagtgaaacacagaagccctaactacgcacgcactcattcttgagaaagctcaatattcattcgtccatggcactctcttctcgtctcttttccaaatccaaattgatctatggctgtcaaatacttctgcaaaaggagcatgctattccagttcgtcacttgctaaagagt

SEQ ID NO: 161365 - DNA, 235 bp, Glycine max
  unsure (1)..(235): unsure at all n locations
gcgaaggactttaggttgggatttgggaattagggttattcgcgtggcgaagatgattgaggtggttttgaacgatcgattggggaagaaggtgcgcgtgaagtgcaacgancgatgataccatcggcgacctgaagaagcttgtggcggctcagactggcacaagagccgacaagatccgcatccagaagtggtacaccatctacaaggatcacatcactctcaagattacgag

SEQ ID NO: 161366 - DNA, 238 bp, Glycine max
accgaaacaggtttcctataaaatcccgcatgtgccgtagcagttgagctgaaaccgagaagaagaagatggagatgtatcagatctggagcaggagaatagcgttgggagcgttcgcgtttgttctgcttttcctatcggcctcagcagacgacgtcgttgtgctctctgaagataacttcgagaaggaagttggtcaggacagaggagctctcattgagttctagctccttggtgt

SEQ ID NO: 161367 - DNA, 238 bp, Glycine max
gggttcacaggtgagactcagattactccaacccatgtatctgatgcagaggcaaaccttttcgccatgcaactagccagtgcctcagtactccctatggttctcaaatcagctcttgagcttgatctgttggaaatcatagccaaggctggccctggtgttcacctttccccctccgacattgcttctcggctcccaacacacaaccctgatgcacccgttatgttggaccgtatat

SEQ ID NO: 161368 - DNA, 236 bp, Glycine max
cttcttgttactctctctctgtctctctctacgctttctcgttcgagatccctcaagggatccactaactgaaggagaaatggggttgacattcaccaagcttttcagccggcttttcgccaagaaggaaatgcgaattctgatggtgggtctcgatgcagctggtaagaccaccatcctgtacaagctcaaacttggagagatcgttaccacaattcccaccatgggttcaatgt

SEQ ID NO: 161369 - DNA, 229 bp, Glycine max
gaggaaaaccctagctagtagtctcagttcgtttgagagagaaaaaatggcagagggtctcgttctccgcggaaccatgcgcgcccacaccgacgtcgtgacggcgattgccactcccatcgacaactccgacatgatcgtgacggcgtcgcgcgacaaatccatcattctctggcacctcaccaaggaggacaagacctacggtgtcccccgccgccgctcaccggac

SEQ ID NO: 161370 - DNA, 241 bp, Glycine max
  unsure (1)..(241): unsure at all n locations
agatgacttaaatcagttactggttgagctagatggattcaagcataatgagggcataattgtgattggtgctactaattttccacaatcattggataacgcattggtgagacctgggcggtttgatcgccatgttgttgttcccaatcctgatgtaaaaggaagacaacagattttggaatcacacatgtcaaaggttctgaaggctgatgatgttgatctaatgatcattgncccgagg

SEQ ID NO: 161371 - DNA, 232 bp, Glycine max
gtaggatcggtggatcaggaatggacctgaggagcaaagcaaggactctcccaggaccagttagcgacccttcaaagcttcccaagtggaactatgatggttccagcacaggccaagctcctggagaagacagtgaagtgattatatacccacaagccattttcagggatccattcagaaggggcaacaatatcttggttatctgtgatacttacactccagtggagaaccc

SEQ ID NO: 161372 - DNA, 229 bp, Glycine max
atcaagccaaagaataggagaatcatgggtgctggagtccctgatgatgaggacaacaacaggtggccaccgtggctgaagcctctgctaaaagaaagtttctttgttcaatgcaagcttcacgctgattcgcacaagagcgagtgcaacatgtactgcttggattgtatgaacggtgctctctgctctctctgcctcgcttaccataaagatcatcggctattcagat

SEQ ID NO: 161373 - DNA, 233 bp, Glycine max
ggcaagccccactcaaccaccacacatctcctcgttcacgctacccctttctgctcttcttctacctttcaagttttaaaagtataaagatggcagagacattcctatttacctcagagtcggtgaacgagggacaccctgacaagctctgcgaccaaatctccgatgctgtcctcgacgcttgcctcgagcaggacccagacagcaaagttgcctgcgaaacatgcaccaaa

SEQ ID NO: 161374 - DNA, 231 bp, Glycine max
caagcctgaaccatcttttgagattctgactaatcctgcaagggtggttcctgcacaggagaagtgtattaaatttttgcaggatagcagatatgttccggttaagttggcaccatcaggatttgtgcttctcagagacttgcatcctactgagccagaagtgcttgctctaactgacacgccctcatctaccagttctgctgctggtgggtcagcaacaggatgcagagt

SEQ ID NO: 161375 - DNA, 229 bp, Glycine max
cgagagtggtttcagtgagtgatcggtgttcacttgatccttcataagtcgtcatcatcatcatgatcatcaccgttgattgaagaagatgccgatcagaaacatcgccatcggaaggcctgaagaggctactcaccccgacacgttgaaggcggggttggctgagttcatctccgccttgatcttcgtgttcgccggttcaggttccggcatcgcctaaagaagctca

SEQ ID NO: 161376 - DNA, 224 bp, Glycine max
attttatatgtatatggggacagctgagtgcactgctattgatgcttttaagcatgctggggaaaatatggtgtttgcaagtggaagccctttcgaaaacgtagatcttggtaatggaattgtgggtcatgtaaatcaagcaaacaacatgtacctcttcccaggaattggtttgggaacccttctgtcaggtgctcaccttataacagatggatgttgcaggc

SEQ ID NO: 161377 - DNA, 238 bp, Glycine max
gcagcagtggttcaggcttgccatgatatggttcctcctgatgcagttgaacccttgttcaaacaaatagtaaatcaatttgtacatgaccgttcacgtccagaggctattactgttggaataaatgcagtcagggagatatgcatgcgcatgccattgttaatgaatgaagacttgctacaagaccttgcgctatataagaagtcacgtgagaaggcagtttcaatagcagctcgat

SEQ ID NO: 161378 - DNA, 274 bp, Glycine max
gtttaaacctaattctcatttcttcatcgttcgattcttctcctcctaaagatgcagatcttcgtgaaaactttgaccggtaagaccatcacccttgaggtggagtcctccgacaccatcgataacgtgaaagctaagattcaagacaaggaagggatcccacctgaccagcagagacttatctttgcgggtaaacagcttgaggatggtcgaacccttgccgactacaacatccaaaaggaatccactctccacctcgtgcttcgcctcaggg

SEQ ID NO: 161379 - DNA, 269 bp, Glycine max
ctatttttcaagtaacttaaggtttcaaacctaggaagttggaagtcatggcagcaacattgatggcagcaacaacaagttctggtactcttaaagcaactcctttccttggccaaggcaagggtgccaatgccaatgctcttagggatgttgtctccatgggaactgggaagtacaccatgggcaatgatttgtggtatggaccagacagagtgaaatacttgggacccttctcagctcagaccccttcatacttgaaaggagaattc

SEQ ID NO: 161380 - DNA, 264 bp, Glycine max
ctagcattgattcttcgtccagacttccctgaagcaacttgcaatctccttcatacataccagtgtgtatgctgttgggaggatcgtgataaaatgttcaaggaagttgaagcgataatcaggaggcagattaatatgtccgttattcctagtgtccagccattccatgcaatagcatatccacttgacccaatgcttgctctggaaattagccgtaaatatgctgcacactgctcggtaattgcatctcgtttttctcttcct

SEQ ID NO: 161381 - DNA, 266 bp, Glycine max
atcgttgttgttctaaagcactcatccacacattctccgtcgccacgacaacaatggctccaaagaaaggtgcgaaaggtggagttgtagcagcaaagaagaaggttcaggagaaggtaacgaaccctttgttcgagaagcgtccgaagcagttcgggatcggaggcgcgctgccgccgaagcgggacctgacgcgcttcgtgaagtggccgaagaacgtccaaatccaacgcaagaagcgcatcctcaagcagaggctcaaggtc

SEQ ID NO: 161382 - DNA, 269 bp, Glycine max
cgaaacaatttcatcaagcctgccatggcttcctcgtgtgcttcctctgccattgcagctgttgccatctccacaccaagttcccagaagaatggatcactcttgggaagcacaaaagcttcttttcttagtgggaggaaactgaaggtgaacagttttacagcaccagttggagcacgatccagcactacagtgtgtgcagttgctgagcctgataggcctctgtggttcccaggcagcacccctcctccatggctagatggcagttt

SEQ ID NO: 161383 - DNA, 265 bp, Glycine max
aaatgattgagtctggctttcagcctactatttttgttctgacatcgcttgtccagtgctatgggaaggttggacgtactgatgatgttttgaagacatttaatcaactcttggatttgggcatcagtccagacgaccgtttctgtggttgtcttctgaatgttatgacccaaacaccaaaagaagagcttggtaagctaaatgattgtgtggagaaggctaatccaaagcttgggtctgtgctaagatatttggtggaagggct

SEQ ID NO: 161384 - DNA, 265 bp, Glycine max
aaagaaagaggtgaagtcaaatggtccttagttctgggagtgttgatgcttgagtcttgacggaacgaacggaaaaggggatctcaatggacaacaccaagccccttatcgaactggaactcgacgatgatggcagaatcagaagaaccgggaatgtgtggactgctagcatacacattataacagtggttgtaggggcaggggtgctgtctttggcatgggttatggcacaactaggatggttagctggcatagccagtatcat

SEQ ID NO: 161385 - DNA, 271 bp, Glycine max
gagaaatgcattggagtaccgatgtgtaccatgcatcagaatttagatatagtaatgtccatatcttaccaaaaacaagtcatttatggattttatcaggaaaatcatacaggtccggttcagtctctttttcaatccgaaaagatcaagatcaaatgaacattcattatctttctactggagaaagagatttttgtaaccttttagcaagtaaaaaaaaagtaagacataaattgtttcgtttcaatccttctgataaaaaagaaagaag

SEQ ID NO: 161386 - DNA, 261 bp, Glycine max
aaagtgtaataaaggacgaaagttaggctattctttcaaccgtaagtgtgacttggtagccacttctctgaaataacatatgttactttgtcattttccaaaagggagtagctggtggtgccggagagaaacccattccacttggtgagaacgttctgcagaagcatgctgcattctttgacttgaataaagatggtgtcatctacccatgggagacttttaaagggttccgtgatatcgggactggggttttgctgtccg

SEQ ID NO: 161387 - DNA, 268 bp, Glycine max
cttcactctgcccgctgcatgaatggcttcagagaagaaactttcgaacccaatgagggagataaaagtgcagaagctcgtcctcaatatctctgttggcgagagtggagatcgtctcaccagagcctccaaggtgttggaacaacttagtggccaaaccccagtgttttccaaagcaaggtacactgttcgttcctttgggattagaagaaatgagaagattgcatgctatgtcactgtcagaggtgacaaggcaatgcaacttttt

SEQ ID NO: 161388 - DNA, 265 bp, Glycine max
caaaccaaaaccactcactcttctcattttttctgttgcataccaaatggaataagtttagattatgtccaattgttcatagcgttgaacaaaacaaacacgcagcaaaatgagcacacccttgttccatgaattcaaaaggcaagcttctttcttcttcaaggagaaaatcaagactgctagattagcactaacagatgtcacccctgcagaactgatgacagaagaggcaacaagtggaaatccatgggccccagatgccaga

SEQ ID NO: 161389 - DNA, 259 bp, Glycine max
gtcgctccgcaccagtttcaccgcacgaatatcttattgtttggagcgatccgagaaaaactctgtaaacatgttggtttaccaggacctccttacaggtgatgagcctctctctgactccttccgttacaaggaaattgagaatggaatgctgtgggaagttgaggggaagtgggttgttaaaggagcagttgatgtagacattggtgcaaacccttctgctgagggtggaggagaagatgagggagttgatgatgca

SEQ ID NO: 161390 - DNA, 264 bp, Glycine max
atttttctcactgtcttgtctctccagagaactgtatagacagagatggcagctgcaacatctggtgctgtgttaaatgggttgggatcttccttcttgagtggaggaaacaggagccaaacccttctggccactgctattggaggcaaagttggtgctgctgctgttactgttagtcctagaagactcattgtggtagctgctgctgcaccaaagaagtcatggctccctggtgtcagaggtggtggcaacctcgtcgaccca

SEQ ID NO: 161391 - DNA, 268 bp, Glycine max
cttcttctcttttcacgtcattatcctaaacttgcagattttcacatcccaagcaacatgaaggggaggttcatgtttctgtcggtgctcctttgtgccacctttcatgtctccttctccattactgacggcttagtagcaaacggcaacttcgagctgggtccgaagccctccgccctgaaagagaactgtggtgattggtggcagccactcgatcccagaatgggagatctctggcttcgtggagtacataaagtccggccagaag

SEQ ID NO: 161392 - DNA, 269 bp, Glycine max
aaaggcttatggtggatcacctaggcacccagagacgaggaagggcgtagtaagcgacgaaatgcttcggggagttgaaaataagcgtagatccggggattcccgatataggtcaacctttcgaactgctgctgaatccacgggcaggcaagagacaacctggtgaactgaaacatcttagtagccagaggaaaagaaagcaaaagcgattcccgtagtagcggcgagcgaaatgggagcagctaaaccgtgaaaacggggttgtggga

SEQ ID NO: 161393 - DNA, 264 bp, Glycine max
gctcttcatcaatgaactccaatggttaccctgcttcctccttcaaaatccccaccgtcaagttcaccaagctcttcatcaatggacattttgttgattcactttcaggagtagaatttgagacaatagacccaagaaccggagaggtgattgcaaggattgcagagggaaccaaagaagacattgaccttgccgtcaaagcgtctcgtctggctttcgaccatggtccatggcctcgtatgcctgccgtagaaagagcaagaa

SEQ ID NO: 161394 - DNA, 261 bp, Glycine max
caagcttggtggaaagaacttgtagaggtgggtcatggggatttgaaggataagccatggtggcaaaagatgcaaactcgtgaagagttggttgaagcttccgctaccctcatatggattgcttcagctcttcatgctgctgttaactttggacagtatccatatggaggtttaatcctgaataggccaactattagcaggagattcatgcctgagaaagggtctcctgaatatgatgcgttagctaagaaccctgagaag

SEQ ID NO: 161395 - DNA, 264 bp, Glycine max
gtttgaatgatccctaccaattcttgcagcactttcggaaatgatcttgaacccacaagcaactggctagaagtgattttcagtatatgcatagtactcagtggactattgcttttcacattattgattggtaacattcaggtattcttacatgcagtcatggcaaagaagagaaagatgcagctgagatgtcgtgacatggaatggtggatgaggaggaggcagttgccatcgcgattaagacaaagagttcgccattttgaa

SEQ ID NO: 161396 - DNA, 263 bp, Glycine max
  unsure (1)..(263): unsure at all n locations
agcgagcgncgtctntgncgaccgcgtctnccttcgnattcgcntccgccgcggactnctctgtcatgganntctgccgcggatcggcgattcagctgctgaatttcgccgacgncntcncgatcgggagccggtcgccgnaaaggctgttccgaancctcgacgtgttcgagacgctgcgtgacctatttccggagttcgaggctctgtttgctgatcagtttagtgtgtcgctcaggaatgaagcgattacgatttncaag

SEQ ID NO: 161397 - DNA, 260 bp, Glycine max
acaaacttttggttggaaacaagagtgatctgacagcaaatagagttgtctcatatgacacagctaaggaattcgcagatcaaattggcatacctttcatggaaacaagtgcaaaatatgctacaaatgtggaagatgctttcatggccatgtctgctgccatcaagaatagaatggctagtcagccttcagcaaacaatgcaaggcctccaacagtgcagatcagagggcaacctgttggacaaaaaagtggttgctgc

SEQ ID NO: 161398 - DNA, 262 bp, Glycine max
aatcaattaactgaatgcttagagagagaaagaggagaaggagtagtgataaggtgatcatagagcatattataagagagtgaaaactaatggaggttggcctcaagaaggagaacatggggtttgaggaaactgagttaaggcttggactgcctggaaacggaggcactgaagaagtgctcatcaggaagaggggtttctctgagactgaaactggtcatgaagatgagtctgccaccactgtggatttgatgcttaatct

SEQ ID NO: 161399 - DNA, 260 bp, Glycine max
atcttcttctcttttcacgtcattatcctaaacttgcagattttcacatcccaagcaacatgaaggggaggttcatgtttctgtcggtgctcctttgtgccacctttcatgtctccttctccattactgacggcttagtagcaaacggcaacttcgagctgggtccgaagccctccgccctgaaaggaactgtggtgattggtggcagccactcgatcccagaatgggagatctctggcttcgtttagtacataaagtcc

SEQ ID NO: 161400 - DNA, 260 bp, Glycine max
cacctctctctcatcgcagtttcaagaatccataaaacacacaaaaactcagggtagggcagagagagagagagaaatgggaggttgggctatcgcggtgcatggtggcgctggtgtggaccctaatcttccactcgagcgtcaacacgaagcgaaacaacttctcacgcactgtctcaatcttggaatctctgctctaaattctaatcttcccgccatagatgtcgttgaacttgtgatgtgacaagtgtttgtgacag

SEQ ID NO: 161401 - DNA, 262 bp, Glycine max
  unsure (1)..(262): unsure at all n locations
ggcaagaactttgcagcataccagcatgagcatgaagctcttccagctcttctccctactcccattcttcctctacttctacacaatagaagcaatagttggcccattgcaactgacacacccactggaccccttaactcagcaagaaatcaccctcgtcaaaaccatagtcctaaaaaagtacccaggnccagccaaccgcgtcttcttccactacgtcggcctcgacgatcctgacaaggccgccgtcctcaaatggctc

SEQ ID NO: 161402 - DNA, 257 bp, Glycine max
tctcgagccgaatcggctcgagaagaaagacaaagcattccatagcctcccataaaaatgaacaatactatcttctctgctctctttctactttgtgccttcaccacctcatacctatcttcaaccaccgcggtggtcgataccgacggtgatattcttcagaatcctggcacatactttatcttgtccgtttttcgacccggcggcggataagaattcgccgccactggaaacgaaacttgccctctcactgtcgt

SEQ ID NO: 161403 - DNA, 262 bp, Glycine max
  unsure (1)..(262): unsure at all n locations
attaaaacggtaaaacgaacacaccctngttacttggacgtggaaattcacgttcgcgctncctttttatcttggcattgcgtttgtgtgtgtgtgcaatatcacacaacccaaccttattcgttcttctgttgttctgaggcgagccatgacggacggncatctcttcaacaacatcaccctcggtggccgtggaggcaccaatccagggcagataaaaatatatcctggaggaattgtatggaagagacagggtggtggt

SEQ ID NO: 161404 - DNA, 251 bp, Glycine max
ggcaacagaaacaaaagtggaagtattaggtggcatcaccgaagtgcagggagctgccaacagcgtcgagatcaacaatctcgctcgctttgctgtagaggaacaaaacaaaagagagaattcagttctggagtttgtgagggtgattagtgcaaagcagcaagtggttgctggagtgaattactacataacattggaagcaaaagatggtgagattaataatgagtatgaagcgaaggtttgggagaggg

SEQ ID NO: 161405 - DNA, 253 bp, Glycine max
cgccaatttcattgaaggcctggtcttggatgctaaggagaaaggagcaacattctgtcaggagtacaaaagagaaggcaatctcatttggcctttgctactggacaatgttaggccagacatgagaattgcatgggaagagccatttggaccggttttaccagtaattaggatcaattcagttgaagaaggaatccatcattgtaatgctagcaactttggacttcagggatgtgtcttcacaaaggatgtc

SEQ ID NO: 161406 - DNA, 259 bp, Glycine max
ggttacttcagcttccacatatcttgaagaattgatcaatgggcaagtctgtagttgagaagctactttggatggcaattgtgtgcttggtgctgggtgtaatttccattactcccaaggcccaagcagcagtgacatgcaaccaggtggtgagcaacctcaccccatgcatttcttatgtgctcaatggtggcaaaaccgtgcctggcccttgctgcaatgggatcaagaccctctttaacctcgctcactccacacc

SEQ ID NO: 161407 - DNA, 243 bp, Glycine max
gggagaagtttgttccccaaaattgataattctaacataaatagagcagaatctcaacaagacaacaatattgatggcttgaaggctgaatgggtagaacaatacgagctcggtgtttacatcacatttacaactttgccatgcgggaaaaaaggccttaagcgagtgagatttagtcgaaagcgattctcagagaaggaagctgaaaaatggtgggaagagaatcaagtgacggtgtatcac

SEQ ID NO: 161408 - DNA, 243 bp, Glycine max
cttgtctcacgatctcaacggagcacctctcttcaggtcgccatctagactgcaatcatggctgatggaccacagcatccatcagttgttcagaagctagctggacagtcttacctggtgtccaggctaagccccaactttaactctgggaattattcctcgactggttcttacttcaatggaggactgcactcttctgggttggctgttgtgtcgcctggatctccagttactgtgcatgct

SEQ ID NO: 161409 - DNA, 247 bp, Glycine max
ctattctggtgctggatttggatctaagagcaaatatatgtttgggaaagtgaccatccagctcaagcttgtggagggtgactctgctggaactgtcactgctttctatatgtcatcagacggcccaactcacaacgaatttgatttcgagtttttgggcaacaccactggtgaaccttactcagtccaaaccaacgtgtatgtgaatggcgttggcaacagggagcaaagactcaacctctggttc

SEQ ID NO: 161410 - DNA, 242 bp, Glycine max
aagcgataagcaatagaatcagagagagagagaaagagagtctcttgctctgtatctttgatttgatcattccaatcttcaatttttctatatatccatcaatccgctgagtgcaaagttctaatctttcgcctattgggttctactcctttctctcttcgtttccgatcgatccaattttcttcccatggctacgatcggacacaacaatctcaatgccaaattggttcttctcggggaca

SEQ ID NO: 161411 - DNA, 245 bp, Glycine max
ctcgagcgtatcggctcatggtaggtactctttggaaatgactgctgttatttacacggactgggttttcactgatcaagcattgcctaatgatcttgtcaagagaggagttgcggttaaggatccatctgctccccatggagttcggcttttgattgaggactatccttatgcttctgatgggctagagatatgggatgccatcaagtcctgggtgcatgaatatgtctcattctactacaagt

SEQ ID NO: 161412 - DNA, 245 bp, Glycine max
gcacccttctacatttccgtcaaagagaaccttccagaacctcacttcaatggcgagcgtgttgagcctaagaatcccagaggtgtccttcacgggaagggtttggaggatgtcattcagtttttcaatagtggaagctataaccctagttataacacctctcttgaaggtcgtcggaagttgtttgctattactaaggaggaggtgttgttgttgaacaagcgaatgcccgacttggcaattgc

SEQ ID NO: 161413 - DNA, 242 bp, Glycine max
ggattttctttgggaaaagctgagtctgatcgactcaacctcaacctgcttcctgcattgctctctccaaatttctagggtttggttcagagagagaggaacctaaaatgtctcaaaacgggaagctgatgccaaatctagaccagcacagcaccaagcttctcaatctcactgttctccaacgaatcgaccccttcgttgaagaaatctcatcaccgccgcacatgtcaccttctacgagt

SEQ ID NO: 161414 - DNA, 243 bp, Glycine max
ggaaagacatttacaaatgaagtaattgaggctgtgacttctatcaatgaaaaacctcttgttttggccctctccaatccaacttcacagtctgagtgtacagctgaagaggcttacgaatggagtgagggtcgtgcgattttcgctagtggaagtccatttgatcctgtagaatacaagggcaaagtgtactattctggccaggccaacaatgcatacatcttccccggctttggtcttggg

SEQ ID NO: 161415 - DNA, 234 bp, Glycine max
cttttgactccaaaatttgggagttaacaaaatccaatgctggactgagcttcactaaagatgacttgattgcctcattgactctgaatgacaaaggtgatgctttgaatgctgcatattaccatgtagttaaccccttgaccaacactgctgttggtgctgaagtgacccatagattctcaactaatgagaacactctcacccttggtacccagcatcagttggatccattga

SEQ ID NO: 161416 - DNA, 242 bp, Glycine max
tgagagatgaggtcgctgtcacagcagtcatggtgtacgtcaaggctcataaatcaaaagcctacgtcaagagatatcaagtcgagttcaagagaagatgagatggatgaaccgattaccgtgccaggatgcggttgattaatcaggacaagttcaaatataacactccgaaataccgatttgttgttcgctttagcaacaaggacattgttgcactaatactatctgctagcattgctggc

SEQ ID NO: 161417 - DNA, 238 bp, Glycine max
gaaatcgctcttcaaccgcaacaaggacgcgatctcctcccacacggcgtcccgatcgacgtctttatccgtgcgttcacgcacgcgtatggcggatgagctggagcaggtgttcaacaagttcgacgtgaacggcgacggcaagatctcggcgtcggagctggggtcgatcatggggagcctggggcagccggcgaccgagctggagctggacaacatgatccgcgaggttgacggc

SEQ ID NO: 161418 - DNA, 237 bp, Glycine max
gacaaagtgttgaaatggctggatgagcagccaggttcttctgttgtctttctttgttttgggagcatgggagggtttggtccttctcaaacaagggaaatagcactagcacttcagggtagtggggtaaggttcttgtgggctatgcgttctcccccaacctcagacaatgcagacagaaccttaccagaaggtttcttggaatggatggaggaaggtaaaggaatggtatgtgga

SEQ ID NO: 161419 - DNA, 241 bp, Glycine max
ctctctctctcccaattttctctcttattgaggctagcaaaagagagcaaaaaaactaaaaaatgcctgcggtcggaggtataaacaccggacggggcaaggagtaccctggaagcctcactctatttgtgacggtaacatgtatagttgcagccatgggtggtttaatcttcggttacgatatcggaatttcaggtggagtgacgtccatggatccgtttctgctcaagttttttccgtc

SEQ ID NO: 161420 - DNA, 244 bp, Glycine max
ctcctaaaacatctcaatgggttcttcttctattacaacatcgccctaaaccatgaccatggctgcgatcgtgctcctgttcacggtctttgccgtttcctccgccctagacatgtcgataatctcgtacgacagcgcccacgcggacaaggccgccacgttgcgcaccgaggaggagctgatgtccatgtacgagcagtggctcgtgaagcacgggaaggtgtacaacgcgctcggcgagaag

SEQ ID NO: 161421 - DNA, 238 bp, Glycine max
gaaaaggaaagaaaactctcaaaaaactattatagcaatggcagaacaaaaccaaaaccaaacaactgaagctggaaggcaccaagaggttggtcacaagagccttctccagagtgatgctctttaccagtatattctggagacaagtgtctacccaagagaacctgaatccatgaaagaactgagagagttgacagcaaaacacccatggaacatcatgacaacctctgcagacgaa

SEQ ID NO: 161422 - DNA, 233 bp, Glycine max
tgatgacagcgtcctcaataggtcgttgttcactaagttggtgcaagaggggtatatggtaggcgtgctgggtctcgtcaaaaggtgtactgtgaagcagatgaagtgcaggctgctattgtgacttgtgggggtctgtgtcctgggcttacactgtcattagggtattagtgtgtggcttacaccatatgtatggggtgaagtctgtcttggaatcaatggaggatatatgg

SEQ ID NO: 161423 - DNA, 203 bp, Glycine max
  unsure (1)..(203): unsure at all n locations
ccaggaggatcaagacgtctttgtcacaattttatagttatagatcgatggctagngggtcttatcggcgtatggaactggtattgctgctaagacgctatagtcaattgggatcaatcgcaaagatgctcgagtggaagtagataatataattggaaggtgtagtggatttggggctgtgtgagagtccatgtattccccgg

SEQ ID NO: 161424 - DNA, 231 bp, Glycine max
ctgagcccttgtctgtgtttgttgacacttatggcactgggaagatccctgacaaggaaatcctcagcattgtgaaggagagttttgacttcaggcctggcatgatctccatcaaccttgatctcaagaggggtggaaatggcaggttcttgaagactgctgcatatggacactttggcagagatgaccctgacttcacatgggaagtggtgaagccactcaagggggaga

SEQ ID NO: 161425 - DNA, 234 bp, Glycine max
caagatctaagagagattttgctgctctttgaagaagggtgtttgcttgattttggagatgtcgctgctctcagatctcatcaaccttaacctctcagacactactgagaaggtgatcgcagagtacatatggatcggtggatcaggaatggacctgaggagcaaagcaaggactctcccaggaccagttagcgacccttcaaagcttcccaagtggaactatgatggttccag

SEQ ID NO: 161426 - DNA, 233 bp, Glycine max
cttggcaagaataaaacaactatatttgaacagcgaatggggaacattgacaatgctgttcctttctttggggatgaatttaacaaaatctatccacttattatggttatatacaccattttagttgcaagcaacttctttgataaagtatttgattttctgggaagttggaagagatatattttcaaaactgaagctgaagatatggatggttttgatccatctggattaat

SEQ ID NO: 161427 - DNA, 235 bp, Glycine max
aacaattgtatgtgacaggattgtctcctaggattaccaagagagaactggagaaacattttgctgctgaaggaaaagtgatagatgtccatctggtagttgatccttggacaagggaatcccgtgggtttggctttgtgacaatggagactcttgaggaggctgaacgatgtgtaaagtatctgaatcgctctgtacttgaagggcgtgtcatcacggtggagaaggctaaaag

SEQ ID NO: 161428 - DNA, 236 bp, Glycine max
gaaatcgctcttcaaccgcaacaaggacgcgatctcctcacacacggcgtcccgatcgacgtctttatccgtgcgttcacgcagcgtatggcggatgagctggagcaggtgttcaacaagttcgacgtgaacggcgacggcaagatctcggcgtcggagctggggtcgatcatggggagcctggggcagccggcgacggagctggagctggacaacatgatccgcgaggttgacgg

SEQ ID NO: 161429 - DNA, 236 bp, Glycine max
tctcacacaaaataatggacaagaagcttggcaacacgtctcatgatcctgaagtgagaaaggggccatggacaatggaagaagacttaatcttgatcacctatattgccaatcacggggaaggggtttggaactctttggccaaggctgctggacttaaacgtaccggaaagagttgccggctccggtggctaaactacctccgtcctgatgttagaagagggaatattacaccc

SEQ ID NO: 161430 - DNA, 234 bp, Glycine max
attggggtggcctgatatgcgtttgccaatcctctatacattatcatggcctgacaggatttattgttctgaagtcacttggccacgccttgatctttgcaagcttggttcacttacatttaaaactccagataatgtaaagtatccatccatgaatcttgcattttctgctggccgtgctggaggcacaatgacaggagttcttagtgcagcaaatgaaaaagctgtagagat

SEQ ID NO: 161431 - DNA, 231 bp, Glycine max
actattcagataggtatgcaggagatgatatgcacccaaaggagaaaaggcgaacacctgcttggtgtgacaggattttgtggtacggagaaggtctccatcaattatcttacgtccgtggagaatcaaggttttcagaccacaggccggtttatggcatattttgggctgaggttgagtcaagtcatggaagactgaagaagagtatgagctgttctcggaacagaattg

SEQ ID NO: 161432 - DNA, 230 bp, Glycine max
caagagagcgtcgccatcaaagtcatcaagaaagagaagctcaagaaagagcgactcgtgaagcagatcaagcgcgaggtgtcggtgatgagactcgtccgccatccccacatcgttgaactcaaggaagtcatggccacaaagggaaaaatcttcctcgtcatggaatacgttaaaggcggtgaactcttcgccaaagtcaacaaaggaaaactcaccgaagatctcgc

SEQ ID NO: 161433 - DNA, 232 bp, Glycine max
cctggcttggcctccccaacttacctcaatggcactcttcctggtgacaatggatttgaccctctgggactagctgaggacccagagaacttgaggtggtacgttcaagccgagcttgtgaatggacgttgggccatgttgggtgttgcaggaatgctacttcctgaggttttcaccaagattggaatcatcaatgcccctcaatggtatgatgctgggaaatcggagtact

SEQ ID NO: 161434 - DNA, 261 bp, Glycine max
gttgaggacttgtggaagaacttttccagtgcagatactgctagacaggtggtcaagttgaaagcattttctaaatttgagaacacttcagaagctctagaggcagctactttacttattgatggaaaagctagcaagggtctgcgcaagttcctgcgtgttcattgtgaaaatgaaacactaggtgtggcagattcaaagcttgggaatgtgatcaaggagaaattgaaaattgactgtattcacaacaatgcagttatg

SEQ ID NO: 161435 - DNA, 258 bp, Glycine max
gccatttacaaaaatggtaaccattaaagcatcttacacagtccttcccaatgaaccaactccggagggccttttatggctatctgatattgatcaagtggcacgtctacgccacacacccaccatctacattttccatgcaaaacacaaccctgatacattaattgagcggatgagaaactctcttagcaagattttggttcactactatccaatagccggccgattgcgcaggatagaagggcgtggtcgattgga

SEQ ID NO: 161436 - DNA, 257 bp, Glycine max
gcgaaaaaaggtggcgaattagtttttggtggtgttgacccaaagcacttcaaaggaaaccacacttatgttccaattactgaaaaaggttactggcagattgaaataggagattttttcattggaggtgtttcaactggtgtttgtgagggtggctgtgctgctattgtggattcaggaacatctttgcttgctggtccaactcctgttgtggctgaaatcaaccatgctattggagctgaaggagttctcagtgt

SEQ ID NO: 161437 - DNA, 261 bp, Glycine max
gcttctctcctctgtctttttctctctcttgctatccttttggctagtggcactgctgcaagtgcaactccaagaagcgcagtgccaagccaccatgtttcaacattcaacagaagcctttttccttccacttttctctttggatttggttcttctgcttaccaggcagaaggagcagcaagtgtagatgggagaggactaagcatatgggacacctacactagacagcatactgaaaagatttgggatcatagcaccggt

SEQ ID NO: 161438 - DNA, 259 bp, Glycine max
tgaagagacaaaaaacaatggctgaaacaaagttgagcatgatgaaggacaaaagatggtcactccgtggaatgactgctctcgtcacaggagccacccgaggcatagggcatgccattgttgaagaattggcagactttggagcaactgttcatatatgtgcacgtaatcaagatgatattgataagtgtttagaagagtggaaaaacgagggacttaatgtgactggctcagtatgtgatttacaatgttctgacca

SEQ ID NO: 161439 - DNA, 256 bp, Glycine max
gattgtttgttgttgtaactcgttcttcttcttttgttgttctgtgtttgtgtttgttttttctctcacctgaaaatgtcttgctgcggtggtaactgtggttgcggaagctcctgcaagtgcggcaacggctgcggaggctgcaagatgtacccagacttgagctacactgagtcaaccaccaccgagaccttggtcatgggagtggcacctgttaaggctcaatttgagggtgctgaaatgggtgtgcccgctg

SEQ ID NO: 161440 - DNA, 121 bp, Glycine max
caagatcggaatcaacggatttgcgaagaattggccgtttggtggccagggtggctctgcagagagacgatgttgaactcgttgccgttaacgatcctttcattaccaccgattacatgac

SEQ ID NO: 161441 - DNA, 256 bp, Glycine max
cttagaaagaaaaaaacttaaatcaaaatacttaatagcatggcgatacatttatacaaaacttctaccccaagcacacgcaatggagccgtggacagtcaagtcaaatccaatccacgaaatcatttgatcgatggacagcatcgttgtggtaaaggccgtaatgccagaggaatcattaccgcagggcatagagggggaggtcataagcgtctataccgtaaaattgattttcgacggaatgaaaaaaaacata

SEQ ID NO: 161442 - DNA, 254 bp, Glycine max
ataccatttatcaactcactcatcaatctcgtttgttctcactaactattacttcatcatgtcgtcgagcacagttggtcaagtcatcaaatgcaaagctgcggtttcatgggaggcagggaagccacttgtgattgaagaagtagaggtggcaccaccacaagctggtgaagtgcgtttgaagatcctctacacctctctttgccacactgatgtttacttctgggaagccaagggccaaactccattgtttc

SEQ ID NO: 161443 - DNA, 251 bp, Glycine max
gctggtgttaatgtacctgttgtgggcggccatgcaggcattactattctgccactattttctcaagccacaccaaaagccaatcttgatgatgatgtcattaaggctcttacaaagaggacacaagatggagggacagaagttgtagaagctaaggctggaaagggttctgcaactttgtcaatggcctatgctggtgccctttttgctgatgcttgcctcaagggcctcaatggagtcccagatgttgt

SEQ ID NO: 161444 - DNA, 254 bp, Glycine max
ctagaaaaagactacataaagaatgtattaggggaacaagggcagcacatggctgtgaactactatccaccatgcccagaaccagaacttacctatggattgccagggcacactgacccaaatgcacttacaattctgcttcaagaccttcaagttgctggccttcaggttctcaaagatggcaagtggcttgccgttagtccccaacctaatgcctttgtcattaacattggcgatcaacttcaggctttgag

SEQ ID NO: 161445 - DNA, 252 bp, Glycine max
atttttcttgaaaaatgatggaactttgacgccattggccattgagttaagtaagccacatcctcagggtgaagcatatggtcctgttagtgaagtctacgtgccttcgagtgaaggagttgaagcttacatttggttactggcaaaggcttacgttgttgtgaatgatgcttgctaccatcaaatcattagccattggctaaacactcatgcggttgtggagccattcgtcatagcgacaaacaggcatct

SEQ ID NO: 161446 - DNA, 255 bp, Glycine max
tttaatttcctctcaaaccctaaccctaaccctaaccctccccgtcacaaaagaaaaccctctttgtccgatcatcgtcgtcaagatgttggaactccgtctcgtgcaaggctccctcctgaagaaggttttggaatccgtcaaggagctcgtgaacgacgcgaacttcgactgctcctccaccgggttctccctccaggccatggactccagccacgtcgccctcgtcgctctcctcctccgatccgagggctt

SEQ ID NO: 161447 - DNA, 248 bp, Glycine max
ccaagagttaaggttgttcatacatctgacaagatacatgggcatgtctacattcctgaaattaattggctactcatgatcctctgtattactgtgaccattggatttagggacacaaaacacatgggaaatgcttcagggttagcagtgatgaccgtgatgctggtgacaacatgccttacttctttagtaattgtagtttgttggcagaaaccccctataatagctctttgcttcctgttgttctt

SEQ ID NO: 161448 - DNA, 244 bp, Glycine max
aaaatttgcgggtgttcttgtctccgatgcctggcttcatagccagttcacgcaggttgagcttcgcagcctgaaatcaaaatttgtctctttaacgaatcagaatggtaaagttacctttggagatttgccgcctttgatggtgacgctaaacgcattcagagatatgtacagtgaggatgagattaggggtatcttgggtgaatcaggcactgattttaccaatgacattgattttgaagcc

SEQ ID NO: 161449 - DNA, 249 bp, Glycine max
cgctgatgtcgctggtgttgacgaggctaaggaggagctggaagagattgtggaatttcttcgcaatccagacagatatgtacgactaggagctcggcctccccgaggtgttctcttggtgggtcttcctgggacaggtaagactttactggcaaaggctgtggcaggggaagctgatgtgccatttataagttgttctgctagtgagtttgtagagttatatgttggtatgggtgcttcccgtgtgag

SEQ ID NO: 161450 - DNA, 249 bp, Glycine max
aaagaagttgtgcatgctggattaccatgatttattcttaccatatgtaagcaaagtgagaaaaattaagggcaccacattatatggatcacgaacattattcttcctcactgatcaagggacattaaagccattagctattgagctcactagaccacctatggatggaaatccacaatggaaacaagtcttccaaccttcttgtgattcaaccaaactctggctttggaggcttgctaaagctcatgt

SEQ ID NO: 161451 - DNA, 250 bp, Glycine max
atgatgttcgttgcagcatgtggtacaaagcagagctatattccttcacttcccccgttgacaagatgcaaccgtgactcaaagttgatcaagttgtggaagaaagctagcccttgtggtgctaatatctcagagctagaacacatccatgaaggtcataatcctaggccatcaactagccgtggcacccagcgcctctatgttcgtctcaacaccttacactatctcctctctaacatcaacacccttg

SEQ ID NO: 161452 - DNA, 253 bp, Glycine max
catatatccctcttgatatactcaaattcgcaatccgctatgttctgagtgggaaggcttgggataatcttttggagaacaagactgccttcactacaaagaaagactatggcaaagaagagagagaagcacagtgggcaactgcacagaggactcttcatggtcttcagccacctgaaacaaccaaccttttcaatgacaaggccagttacagggagctgtcagagattgctgagccagctaagagacgtgc

SEQ ID NO: 161453 - DNA, 245 bp, Glycine max
gagatgtgttgatttggggttaagaactgtgcttatagtcacacctgtcaacgtgctacataattggcgtcaggagttcatcaaatggagaccttctgagttaaagccactcagggtcttcatgctggaagacgtatcgagagatagaagggcagaattgcttgcaaaatggagatctaaaggtggtgtctttttgattggttatgctgctttccgaaatttgtcttttgggaagcatgtgaaag

SEQ ID NO: 161454 - DNA, 246 bp, Glycine max
cacaggctctgcctgttgctttgatgattcatgataactcgtcggatcgcacggcctttgtgccggcgacgcatcattcaaatttctgccctatcaactttcgatggtaggatagtggcctaccatggtggtgacgggtgacggagaattagggttcgattccggagagggagcctgagaaacggctaccacatccaaggaaggcagcaggcgcgcaaattacccaatcctgacacggggaggtag

SEQ ID NO: 161455 - DNA, 247 bp, Glycine max
ttcaactcttttccattttattattcttccaaaactggaccttactttacccgaatctaaatcccaacccgaaccaaccatgttcggaccaacccaaaccgcttcccaacctccgaaatccactctcaaattcctctgcagctacggcggcaaaattctcccccgctaccccgacggcaagctccgttacctcggcggccatacccgcgtcctcgccgtcgatcgctccattccattctccgagcta

SEQ ID NO: 161456 - DNA, 247 bp, Glycine max
cagattcgtgatttaccatttaccacaccaaaaccaatccgatcgtttcctctgcggagtcagaaatccatggatccctacaagaatcggccatcaagcgccttcaattctcccttctggactactaattccggtgctcccatctggaacaacaactcatcgctgactgttggatctagaggtccaattctgctggaagattaccatctggtggagaagcttgcaaactttgacagggaacggatcc

SEQ ID NO: 161457 - DNA, 239 bp, Glycine max
ctcttcttctcttgcggctagggttttagcgcagttcttctagatttaaggaagatgggtaaggaaaaggttcacatcagtattgtggtcattggccatgtcgactctgggaaatccactaccactggtcaaccgatttacaagcttggaggcattgacaagcgtgttattgagaggtttgagaaggaagctgctgagatgaacaagaggtctttcaagtatgcctgggtgctggacaa

SEQ ID NO: 161458 - DNA, 245 bp, Glycine max
caatttaaacacagaaacaaaatcaccaccttcaaagtcttctctctcgagaatcatcgaataaaactagggtttccgatcgtcgtcgaggagaatgccgaagaacaagggaaagggaggaaagaaccggaagcgcgggaagaacgaggcggacgacgagaagcgggagcttgtgttcaaggaggacggccaggagtacgcgcaggtgctccggatgctggggaacggccgctgcgaggcgatgt

SEQ ID NO: 161459 - DNA, 240 bp, Glycine max
gtttctgcattttgtcaaacaaattgcggtgatgttagtccaaatgtacttggagctttttgtatagacactgaactaccttgtgacttcaatcatagtacatgtggaggaaagaatgaattatgctatggccgaggacctggttatccagatgaatttgaaagcacacgtattataggggagagacaatttaaaaaagcagtggagctattcaacggagcatctgaacagattaaaggg

SEQ ID NO: 161460 - DNA, 246 bp, Glycine max
atctcgttcttcctttcttctctcagattccccctttgcctccttcttcaaccccttttctttctctctctgtctttcgcactttcattctctcttaaaaatctaaatcccttttggtcttcatctttccctctcatccaggtatggcttcgatacgcatcctgaaggtgctcaaggatttgcagaaggatcctcctacgtcatgcagcgcaggtcctgtagctgaagacatgtttcactggcaag

SEQ ID NO: 161461 - DNA, 247 bp, Glycine max
attttgaagacccatattcagtctccagcaacttcacttccagtgttagcgaactcacaattggcaagaaggatttacgaaggaacttgaagggaaaatatcgtggtgacggtccatgcatagccacaaaccccatcgacaggtgttggaggtgtgaccccaattgggccaacaatcgccagaagctcgcagattgcgtccaaggcttcggtagaaacaccgttggaggcaaaggtggaccattcta

SEQ ID NO: 161462 - DNA, 249 bp, Glycine max
gaacataccaatctacaataaacgatgattctcattatctccctcattttttctcttctctctttctcccatgcttctgtcctagatttctgtgttgcagattatgcaggtcctattggacctgcaggatattcctgcaagaagccttcaaaggtcacagcagatgattttgcttacagtggccttggcattgctggtaacacctcaaacattatcaaagctgcagtgacccctgcatttgatgctcag

SEQ ID NO: 161463 - DNA, 244 bp, Glycine max
aaacaaatcaaagccatggccacctccaacttctctattgttctctccgtctccctagccttctttttggtgccacttaccaaggcacactcgaccgataccgtttctttcaccttcaacaagttccacccagtccaaccaaacattatgccccaaaaagatgctagtatttcatcctctggggtgttacaactcaccaaagttggcagcaacggcgtgcccacctcgggatctctcggtcgtg

SEQ ID NO: 161464 - DNA, 246 bp, Glycine max
ctcgagccggttgaaatgaaaatgggttcttctttgtggactttgtgtctaattttggcttcactagcctcttctgcattctgtgcctttccacggaggccagtggatgttccattcggcagaaactacgttcccacttgggcttttgatcacatcaaatacttcaatggaggttctgagattcaacttcatcttgacaagtacactggtactggcttccagtccaaagggtcatacttgtttggt

SEQ ID NO: 161465 - DNA, 247 bp, Glycine max
cttctgtctctagaattattcctggacaaagaactgctgttttccaacgttacttgcgtcctgagaaggactatttgtctttttcacttatttacagtaacggaaagcgatcgcttgatttgatttgcagagataaagttgaggcagaagtgtggattgctggcctcaaagcactgatagcttctggtcaaggtggtcggtccaaaattgatggatggagtgatgggggtctcattcttaatgatag

SEQ ID NO: 161466 - DNA, 227 bp, Glycine max
ggcagattgtggatcagattcctgggagagcaactggtgcctatagccatagtcagggtgttcagggcttgcgtgatacaatagctgctggaattgaagagcgtgatggttttcctgccaatcctgatgacattttcatgactgatggtgcaagccctgctgtccataatatgatgcaattactcattagatcagaaaatgatggtattctgtgtcccattccacac

SEQ ID NO: 161467 - DNA, 244 bp, Glycine max
ctcccctttgccgctgttgttgttgctgcaccaccgaacaacttcccctgtaaatcgcgtttcgtttgtgcaaggttttaaaagatggctgatgctgaggacattcaacctcttgttgttgataatggaactggaatggtcaaggctggttttgcaggtgatgatgctcctagggccgtgttccccagcattattgggagaccacgccatactggtgtaatggttgggatgggtcagaaggatg

SEQ ID NO: 161468 - DNA, 245 bp, Glycine max
taacagaggctccaatgtaattaaagggaaaggtcctagtggtggtaggggtgagaaaccaaaagaagagtttggaagtggggttcaagaacccgagaagaacaagttggttttcttgagggaagttcttataattttgatcttgaggatttgctgagagcttcggctgaagttctggggaagggtagttatggtactgcatataaggccatactggaggagtcaatgactgttgtggtgaaaag

SEQ ID NO: 161469 - DNA, 246 bp, Glycine max
gtaagagctcaattattgcacttatacaaagattctatgatccaacatctggtcgggtcatgattgatggcaaggacatcaggaaatacaacctcaagtccttaagaaggcacatttctgtggtacctcaggagccatgcttgtttgctactactatttatgaaaacatcgcttatgggcatgagtcagccactgaagctgagataattgtggctgcaactcttgccaatgcacacaagttcatat

SEQ ID NO: 161470 - DNA, 245 bp, Glycine max
ctaaaaggcctcaaggatacactccggacttaattacgttattttgttagggtcaccgtttcgagatattctaaacttgtactgaaaaatatggagggaaaagaagaggacgtaagagttggagccaacaggtacggagagaggcagccaatagggaccgctgctcaggctaaagactacagagagccaccgtcggcgcctctcttcgaaccgggagagttgtcatcgtggtctttctatagggc

SEQ ID NO: 161471 - DNA, 104 bp, Glycine max
tctctctctctctctgaagatggcttcacgcaggctcgtatcttctctgattcgatcctcccttcgtagatctcaatcgaagccctcaatttccacacaacata

SEQ ID NO: 161472 - DNA, 240 bp, Glycine max
gtttccatcttacataacaatagagctgttccttactggagaaagctatgcaggacactatatacctcaattaactaatgttttattggaccataatgctcgttcaactggttccaaattcaatattaaaggagttgctattggaaacccacttttgagacttgaccgggatgcacctgcaatttatgaatacttctggtcacatggaatgatttctgatgaaattggccttgccattat

SEQ ID NO: 161473 - DNA, 240 bp, Glycine max
gtcgttgtgaaaacactgcaacgttgggtgagagaaaaaatgttaaccttcctggtgttgtggtggatctacccacacttactgagaaggataaggaagacattcttggatggggtgtacccaacaagattgacatgattgctctttcatttgttcgtaaaggctcggatcttgttaatgtccgcaaggttctggggccacatgcaaagaatattcagttgatgtcaaaggttgagaatc

SEQ ID NO: 161474 - DNA, 111 bp, Glycine max
atcgatctgaaggctgggtggtaagagcaaaaagaccaaaagaacagcagcaaagtccaatgacatctacctcaaattacttgtcaagctttatcgattcgttgttcgaag

SEQ ID NO: 161475 - DNA, 115 bp, Glycine max
ggctagtaaagcacggcaaggtgtacaaaacgctcggatagaaggagaagaggttccagatcttcaaggacaacctgcgattcatcgacgaccacaactcccaagaggaccgaat

SEQ ID NO: 161476 - DNA, 238 bp, Glycine max
  unsure (1)..(238): unsure at all n locations
aaactatatccaatgctggatattggttgattgtgggtgacctagaggtcattgaaccaatccagtacaatgatggacttgatcattttcggctgtctccagcagaactccgtgctgagttcacaaggcgcaatgcagtcgctgtgtttgccttccagctccggatcctggtttcacaatggccacgctttgctaactcactgacacccgnaggcggcttcttgagatgggttataag

SEQ ID NO: 161477 - DNA, 239 bp, Glycine max
gtgcgttaggcataaaagatgtatgatcaactacaccatatgggctgtctcatcttcgagagaaaggaattggcttccaactatgagcaagttaaggcttcgattgattcatccgagtttatgtgtaagcatgattcaaccatgactttgtctgcactaattgaagcaaggaaacgggaagaaagcttgaagaaggcagtaggagtcacagaggcatatgaagcgcagaaaaaatcaac

SEQ ID NO: 161478 - DNA, 237 bp, Glycine max
atcatcagtgctgtattgaccagtcgagcaatattccaaaggatgaagaattacacaatctatgcagtttccatcacaatccgtattgtgcttggtttcatgttactggccctcatatggcaatttgattttccaccattcatggtgctgattattgctattcttaatgatggtaccattatgacaatatcaaaggacagggtaaaaccatctccatatccagatagctggaagttg

SEQ ID NO: 161479 - DNA, 241 bp, Glycine max
gaaccagtttggaatatatttttattccttctttgtttcttcactttcttccatacacataaccatgtcttctcagaccgttgtcctcaaagttggtatgtcatgtcaagggtgtgctggagctgtaaacagggttttggaaaaaatggaaggtgttgagtcatttgacattgatctgaaggagcagaaggtgacagtgaaaggaaatgtgcagccggacgaagttctgcaagccgtttcc

SEQ ID NO: 161480 - DNA, 235 bp, Glycine max
ctctctttctctctttctagttcgtgttcttcgtcgcaaatccgaagtaggatctctcttgttttttctctaggtttttcgcgatggcgtcgaagcgaattttgaaggagcttaaggatttgcagaaggatcctccaacatcttgcagtgccggtcctgttcatgaagatatgtttcattggcaagctacaattatgggtcctccagacagtccctatgctggaggtgttttcct

SEQ ID NO: 161481 - DNA, 239 bp, Glycine max
ggaagaagctgctgccatggctctctcatccccagccaaggatggggatgagagagccatggaagaagctgctgccatggctctctcatccccatccttggctggcaaggccgtgaagctgggcccatcagccccgctagtgggaagggtgagcatgaggaagaccgtcaccaagcaggtctcctcaggaagcccatggtacggcccagaccgagtcaagtacttgggcccattctctg

SEQ ID NO: 161482 - DNA, 240 bp, Glycine max
gtgatttcagtgagtgatcggtgttcacttgatctcatcataatcgtcagcgtcaattgaagaagatgccgatcagaaacatcgccgtcggaaggcctgaagaggcgactcaccccgacacgttgaaggcggctttggctgagttcatctcaaccttcatcttcgtgttcgccggctcaggctccggcatcgcctacaacaagctcaccgacaacggcgctgccacccctgccggcctca

SEQ ID NO: 161483 - DNA, 235 bp, Glycine max
ggttcatcttggcttcttccttctggggtgtttctccatgatctcatatgctaatggttatgtcagcaatgggggttggaccaatgcccatgctacattctatggtggaagtgatgcttctgggatcatgggtggggcttgtggttatggaaacttgtatagtcaaggatatgggactaacacagcagcacttagcactgccttgttcaacaatggcttgagttgtggctcatgc

SEQ ID NO: 161484 - DNA, 233 bp, Glycine max
gacagagaaaccaatcggaggaaaatgaaactagtttggtccccagagacagcatccaaagcatacatcgaaacagttcaatcttgtcggattttccgggaatccggggtggcggactggtgtcggcgatggcggcggggtggaacgcgcactaatcgtggagacgtggtcggaggggggagtgatagcgacgagcgtgggtttagccgtggcgagaactcacacgtgcggga

SEQ ID NO: 161485 - DNA, 229 bp, Glycine max
cccatatgatgagtgtggtgatgggtgggtgagtccgaattgtgaaagtaagcaaagatggctttcacggaatcgtctctcctccttccttcggtttcaggaaccaacaagaacaagaacaaggttccagaagacaaatggtatttagcctacattgtgtattttaccctgggtctcggttaccttctcccatggaacgctttcatcaccgccgttgatgacttctcct

SEQ ID NO: 161486 - DNA, 237 bp, Glycine max
aaaagcttaacaggaactgcacgttatgcaagttgcaacactcacatgggaattgagcaaagttgtcgtgatgatttggagtctcttggctatgttcttatgtactttttaagaggaagccttccttggcagggtttgaaagctgctaccaaaaaggaaaaatatgacaatatttgtgagaagaaattatcaactaccattgagatgctttgcaagtcgtatcctgcggagtttgct

SEQ ID NO: 161487 - DNA, 236 bp, Glycine max
gaaaaaatttgcaaggcaacttggttgttgagaaattagatagcctaatggtgctggcatttttgcaccttgaatcctgtcaaagcagtggccgtttgactgaggtattcgatactctactagcttcatttcagagaaccgtattgaatgcgtacaagtcaaaatttacccagtatgtgatgttctatgcatgtgcactggaccctgaaggatgtggtgtgaaatttgacatggtt

SEQ ID NO: 161488 - DNA, 237 bp, Glycine max
gctactttggcttggctttctgaattttggtttttcagtgctgagagctgaacaagaagatggggggtggaaatcaagaggcagtcaagcagctgcagaccctgatggaaaatgtggatgatgagcagctgaagaatacattccagattatgcaccagggttatcaaacggaaacgttaatacggtttctcaaagctagggactggagtgttgccaaagcccataaaatgttaattg

SEQ ID NO: 161489 - DNA, 235 bp, Glycine max
aagaagccgagcgattttgtttaccttccaagagatgaagcatttggtcacttgaagtcatcagattttctcgcttatggaatcaaatctgtatcccaagatgtcttgcctgtcttgactgatgcattcgatggaaatattttgagccttgagtttgataattttgctgaagtgcacaaactctatgaaggtggagttacactacctacaaactttcttagcaagatcgccccta

SEQ ID NO: 161490 - DNA, 227 bp, Glycine max
aggcactatagtaaacaatcttctctatctaagatggagtttgttctaaattacctaaatgccactgccattggagttctttctataaccctcttcttttggtttttgtataatcccttcaaatttgcattaggtaaaaaagaggctcccaaagttgcaggtgcatggccaatacttggtcacctaccactattgagtggttcagagacacctgatgtaggtttggg

SEQ ID NO: 161491 - DNA, 276 bp, Glycine max
gcgaagagaatggctcccaagggtttaatctttttggctgtgttatgcttctcagcactgtcactgagtcgttgtcttgcggaggataatggacttgttatgaacttctacaaggaatcatgccctcaggctgaagacatcatcaaagaacaagtcaagcttctctacaagcgccacaagaacactgctttctcctggctcagaaacatcttccatgactgtgctgttcagagttgtgatgcttcactgttgctggactccacaagaaggagcttg

SEQ ID NO: 161492 - DNA, 271 bp, Glycine max
gtcaaagatagatcctggtgatgaatctggtagcacactggacagcgttaagggagaaattgagcttcgtcatgtgagcttcaagtatccttctaggcctgatatacagatttttcgagacctcagcttgactatccattctggcaagacagtggctcttgttggtgaaagtggaagtggaaaatcgacagtgattgccttgttgccaagattttataatcctgattcagggccaatcacacttgatgggatagaaattcgtgagttacag

SEQ ID NO: 161493 - DNA, 268 bp, Glycine max
cttgggattcttgttgacagagatgatcagggcactctgcttcagattttcaccaagcctgttggggacaggccaacgatattcatagagataattcagaggatcgggtgcatggtggaggatgaggaagggaaggtgtaccagaagggtgcatgtgggggttttgggaaaggcaatttttctgagcttttcaaatccattgaagaatatgagaagactttggaagctaaaagaaccgcgtaagcacattggaagaacacaaatactc

SEQ ID NO: 161494 - DNA, 267 bp, Glycine max
ctctttggaaatgtctgctgttatttacaaggactgggttttcactgatcaagcattgcctaatgatcttgtcaagagaggagttgcggttaaggatccatctgctccccatggagttcggcttttgattgaggactatccttatgcttctgatgggctagagatatgggatgccatcaagtcctgggtgcatgaatatgtctcattctactacaagtcagatgcagcaattcaacaagatcccgagctccaagcttggtggaaaga

SEQ ID NO: 161495 - DNA, 276 bp, Glycine max
aagccaccagtttacaagaaaccaccagtgtacaagcccaagcccaagccacccattcacaagcccaagccacccgtttacaagcccaagccacccgtttacaagaaacccccttatggtaagtacccaccagttcaagacaacgatcacttctaaaccatgcaacaaggcatgttaatgttaactatctactaaaataaagaggttcagttaacctactacgtacgttgctccttttaattcctaaatcgtaatttacaactttgtagggatgag

SEQ ID NO: 161496 - DNA, 271 bp, Glycine max
gggatcacgcgcgatgaggcgtgccataatttgttattcgccacgtgcttcaactccttcggcgtggtgaagctgttcttcccgaacgtgctgaagtggatcggacgcgcctgggtgaagctccacgcgcgcctggcggaggagattcgctccgccgtacgaggcgccggcggggagatcaccatggcggcgatggagaacatgccgctgatgaagtcggtggtgtacgaggcgttccgcatcgacccgccggtgccgttgcagttcggga

SEQ ID NO: 161497 - DNA, 273 bp, Glycine max
actccctcctcttcacacattttcttagctctctccaacaatccctctcgttcacactttcagattgtgtgaagatgggggctggtggccgaactgctgttcctcctgccaacaggaagtcagaggctgaccctttgaagcgggtaccatttgaaaaacctcagtttagtctcagccagattaagaaggccattccacctcactgtttccagcgctctgttctccgctcattctcctatgttgtttatgacctcaccatagccttctgcctct

SEQ ID NO: 161498 - DNA, 266 bp, Glycine max
cttcatcttctttaatttgatgagaaatttggtgcaattctgatgcagcttaggccttacttcttggttttcaacattatcttgtgattctcggtacaactgtgctaattcccactgctcttgttccccagatgggatgtggcaatgaggagaaggcaatagttatccaaactctactttttgtagctggaattaacacattgctgcaaactctgtttggcactcgattgcctgcagtaattggagggtcttatacttacgttgca

SEQ ID NO: 161499 - DNA, 267 bp, Glycine max
ccatggtgaacatcatgatcaaactgggcactcttgtcatgaagatgctccacttgttcgtaaagagcatgaccatcgccatattgatcacaatatggaagggatatttttgcatgttcttgctgacaccatggggagtgttggtgttgttatatctaccctgttgattaagtacaagggatggcttatcgctgatcctgcctgctcaatttttatttctattctaattgtatcttctgtgatacctttgctaaaaaattcagcaga

SEQ ID NO: 161500 - DNA, 270 bp, Glycine max
tgagaagtggctggaagaacatctaagaaagagaggtgaggagaaggacggtaaatgtgaaagcgacttcatggatgtgatgatatctgctttccaagaggaagaagagatttgtggttataagcgggagatggttatcaaagcaacatcagtgcttcttatccttactgcctcaggaagcacagccataacactaacatgggcactctccttgctcctaaaccatccaaaggtcctaaaagcagcccaaaaagaactggacacccattt

SEQ ID NO: 161501 - DNA, 269 bp, Glycine max
gctgataatccatattttcgattgggttacaacagtttgggtgcttttgcaaccattaaccatcttcacttccaggcttattatttggatctgcccttcccaattgagaatgcccccactaagaaaattgcaagtttaaatggtggggtgaagatatctgaactgttgaagtatccagttagaggtctcgtctttgagggtggcgatacgctggaagatttatcaaatgttgtttcagatgcctgtatatgtcttcagaacaacaacat

SEQ ID NO: 161502 - DNA, 269 bp, Glycine max
gggtgttgctctgactgtgtgcacaattcctggtcaagttgcatcagatcgtttgggaccaggaaagatggaacttggtcttggaattcatggagaacctggggcagctgtggctgatattcagcccgtaaatgtggtggtttctcatgttctgcagcaaattttgtccacggaaacaaactatgttccgataactcgaggagacagagtggtccttatggtcaatgggttgggtggcactcctacaatggaactaatgattacagctg

SEQ ID NO: 161503 - DNA, 258 bp, Glycine max
agccaatacgcattggaagacatgcttttggagaccaatatctggcaactgatacagctataaaaggcccaggaaagctaaaattggtttttgcacccagtggaaatgaaggcattaaagagctagaggtctataactttactggtgctggaggcatagctttgtccatgtataatactgatgagtccattcgagcttttgctgaggcttcaatgaactttgcttaccagaagaaatggcctctctatcttagcacta

SEQ ID NO: 161504 - DNA, 275 bp, Glycine max
ttaaaggtggtcatggctaatttgcttacagtgtttttgctaattgaggtgtttgcatatggctacagttacggacaatatggcttaaacacgaattactacttgatgagctcttgtccttttgttgaacctgttgttaagaacattgtcaacagagctttgcaggatgatcccaccctagcagctggtctgattagaatgcactttcacgactgcttcattgagggatgcgatggctctgttctgattgactccactaaggataatacagcaga

SEQ ID NO: 161505 - DNA, 267 bp, Glycine max
atggaacaaacacttacagagctgccactgttgctattcaaggagattactttgtggccatcaatatggggtttgagaattctgctggaccacaaaagcatcaagcagtagcattaagagtccaagcagataagtccattttctacaattgctcaatggatgggtatcaggacactctttatgtacacaccatgcgtcaattctatagagattgcacgatttcaggtaccattgactttgtgtttggtaatgcacttgctattttcc

SEQ ID NO: 161506 - DNA, 269 bp, Glycine max
gcaaataaagcacagaacagttgaagtgaatggcataaaaatgcatgttgcagagaaaggagagggtccagtggtgttgttcctccacggcttccctgagctctggtactcatggcgccatcagattctctctctcagctccctcggctaccgcgccgtcgctcccgatctccgtggctacggtgacaccgaagcaccaccttcaatcagcagctacaactgcttccacatagtgggtgatctcgttgcgcttattgactctctgggtg

SEQ ID NO: 161507 - DNA, 269 bp, Glycine max
  unsure (1)..(269): unsure at all n locations
ggctccacacaacatctcatctcgtcanncaanaaaatggccctgcttctgataattcccatctcaatggtcacccactggctcggttacaccctataccagcgattaagattcaagctccctccgggtccacggccctggccggtagtcggtaacctctacgacataaaacccgtccgcttccggtgcttcgcggagtgggcgcagtcttacggccccataatatcggtttggttcggttcgaccctaaacgtcatcgtttcgaactc

SEQ ID NO: 161508 - DNA, 267 bp, Glycine max
tttcaaaaaacatacaatatactaagcctctttctctctctgaatttctaagcctctctcacaccaatggaggcgccacaacccggatccagcccgttacgcaaaatgattttggtgtcatcaatggcggccggtatccaattcgggtgggccctacagctctcccttctcaccccatatgttcacaccctaggcgtcccgcacccttgggcctcatttatttggctatgtggcccgatatctgggctgctggtgcagccattgtgg

SEQ ID NO: 161509 - DNA, 266 bp, Glycine max
cgttggcagatgctgatggcagaattgcatggcaaactaacactgccaacaagggtgttgtggccttcaggcttctttcaaatggtaacatggtccttcttgatgcacaaggcgggttcgtttggcagagttttgatcaccccacagatacccttttggttggtcaatatcttagagcaaaagggccatccaagttggttagtaggctctcagagaaggaaaatgttgatgggccttatagtttggtcttggagcctaaagggtta

SEQ ID NO: 161510 - DNA, 265 bp, Glycine max
gatgaattaattgagcatctgagtgcagccagaatagaggatcgtggtcgatggcgtctgctagccttggaagtggtggggtcggcagttcgaggtctgttaatggtggcttcaggggttcttccagttccgtcgattggcttggcagagagatgcttgagatgaggttgagagaccacgaagacgatagagatagtgagcctgacatcattgatggtgtgggtgctgagacaggtcacgtcataagaaccagcattggtggccg

SEQ ID NO: 161511 - DNA, 268 bp, Glycine max
gttgagaactaagaaggagaagcaaatggcttcctcaatgatctcttccccagctgttaccactgtcaaccgtgccggtgccggcatggttgctccattcactggcctcaagtccatggctggcttccccaccaggaagaccaacaatgacattacctccattgctagcaacggtggaagagtgcaatgcatgcaggtgtggccaccagttgggcaacaagaagtttgagactctttcctacctgccagaccttgatgatgcacaatt

SEQ ID NO: 161512 - DNA, 264 bp, Glycine max
gtgaaacaactgatgaggagccttatgcaccaaacaatcctaaaggttttgttggcaaagctcttggacaaccaggactgaaacgttcagtgagggttggggagacaggtttcagagaagttgcagcctaccttcttgaccatgatcattttgccaatgtaccctttactgcccttgtaaaggtcacacattctatttttactgttaatgacagggtcaatggtagtatgcatcataacaaaaagcaaataagcaagattgcat

SEQ ID NO: 161513 - DNA, 269 bp, Glycine max
gaagaacaaaattcaggtttccaacactaagaaaccccttttcttttacgtcaatcttgccaagaggtacatacagcaacgcgatgaggttgtgctttctgctcttggaatgggtactgtttctctaaaacttatattttcattcatcagtctttgaacataaaaatcaaattttcttccgtgtctaaattgcgggaaagttattataaatataaaactgaacatttttaattttttaatgctcatttactccatatcatgtagcagct

SEQ ID NO: 161514 - DNA, 266 bp, Glycine max
aaaatgggttcttctttgtggactttgtgtctaattttggcttcactagcctcttctgcattctgtgcctttccacggaggccagtggatgttccattcggcagaaactacgttcccacttgggcttttgatcacatcaaatacttcaatggaggttctgagattcaacttcatcttgacaagtacactggtactggcttccagtccaaagggtcatacttgtttggtcacttcagcatgaacataaagatggttcctggcgattc

SEQ ID NO: 161515 - DNA, 267 bp, Glycine max
gggaaagagggttgttttcctgaagcagctcccatctggattgcttcttgtaactggtccctttaagatcaatggggttcctctcagaagggtgaaccaatcgtatgtcattggtacatccacaaaggtggacatctctggtgttaatgttgataaatttgatgacaagtactttgccaaggaagccaagaaaaagaaaacaaagggcgaaggcgagttcttcgaggcagagaaggaggagaaaaatgtgcttccccaagaaaagaa

SEQ ID NO: 161516 - DNA, 266 bp, Glycine max
ttctctttggtgctagtgactcatacaacggagacaagatcatgcagatcacagtggcattcaaccacttcgggcaaggactggtccagaggatgccaaggtgcagatggggtttcgtgcacgtcctcaacaacgactacacccactggttgatgtatgcaatcggtgggagctcagggccaacaattctgagccaaggaaaccgtttcattgctccgaacaacgacaacgccaaggagatcactcacagggactacgccggaccc

SEQ ID NO: 161517 - DNA, 255 bp, Glycine max
gtgccctccctctttctagctatttccctctcttaacacaattaacaaagatatatcatatcatatcaactccaaatgatgaaaaatattgggttgtttcttcttgtggtggtggctacttttgtggtggcagccacagctggtagcttttaccaagactttgaaataacatggggtggtgagcgtgccaaaatctatgaaaatggaaatcttctcaccctctccctagacagagcctctggctctggctttcgt

SEQ ID NO: 161518 - DNA, 266 bp, Glycine max
gtgtgagagcaaaatcaaaatgtgggcaagcgcagaaggtggtgctccggaggttactctggaaacttccatgggttctttcaccgttgagctgtactacaagcatgcgccgaggacttgtaggaacttcattgaactgtctcgccgaggttactacgacaacgttaaattccacaggatcatcaaggacttcatagtacaaggtggggatcccactggaacaggaaggggaggagaatccatatatggtgcaaagtttgaagatg

SEQ ID NO: 161519 - DNA, 263 bp, Glycine max
gctttcatcgttcaacatatcctcaccatctcagtcatgggcctgctatcttgttttaggtctaccgtcctgagaaaatgttccaaaggaagctctggcatgtcaagattcctgtatacgaacaattttcaacgaaacttgatttcgcctggtggcaatgaatcgtattatgggtattttaacaggagatcatacacttcactttatatgggaactggaactgtgggtgggattacaagtgctagaatcagggtgccaaatgt

SEQ ID NO: 161520 - DNA, 263 bp, Glycine max
cgaaaagttatggcaatggccacaggagaggcaccagctgaagctaccccaactgaggtgccagagattgtcaagactcttcaagaaacttgggacaaagttgatgataagtatgcagtgagttcacttgccttggttggggtgattgcattgtggggctcagttggattgatctcagcaattgataggcttcctttgattcctgggattcttgagattgtaggcattggatacactgggtggtttgtataccagaacatagt

SEQ ID NO: 161521 - DNA, 142 bp, Glycine max
cggcaacggatatctcggctcttggatcgatgactaatgtagcgaaatgcgatacttggtgtgaattgcagaatcccgtgaaccatcgagtctttgaacgcaagttgcgcccgaagccattaggccgagggcacgcctgcct

SEQ ID NO: 161522 - DNA, 268 bp, Glycine max
caccaacgcgagacaagccctaaatctctcttctcttgtcttcttcttcctttaaccatgagaccgatcttgcacgttcagggaggccaatgcggtaaccaaatcggttccaagttctgggaggtgctctgcgacgagcacggcatcgatcccaccggaaagtacaacgaggaaggcaacagcagcatccaactcgagaggatcaatgtgtattacaacgaggcctctggcggaaggtacgttccccgtgccgtgcttatggatctcg

SEQ ID NO: 161523 - DNA, 259 bp, Glycine max
ccaggcgtcttcataaacgcctttcttctccgtttccgtttcctcgttcgaattcgctttttgatctgcgaaaatgagagagtgcctctcgatccacattggtcaggctggtatccaggtcggaaatgcttgctgggagctctactgcctcgagcacggcatcgggcccgatgggcaaatgccaagtgacaagacagttggcggtggtgatgatgctttcaatactttcttcagcgagactggtgctggaaagcacgtg

SEQ ID NO: 161524 - DNA, 259 bp, Glycine max
gagattgctaggatgctggctgatgagttcaggaagcgtgttgtaatagtggatacatctaatgaaattggaggtgatggagatgttcctcatgcaggaataggcagggccaggaggatgcaagttccaaatgtgaatatgcagcataatgttatgattgaagcagttgaaaatcacatgcctgaaaccattattattgatgaaattggaacggagcttgaggcattggcagccagtactattgctcaaagaggcattc

SEQ ID NO: 161525 - DNA, 264 bp, Glycine max
cacaatcaaagctatggagcctttcttcactgtagttctttctgcccttttactgggtgagatgcctactttctgggtggtttcttcccttgtaccagtagtaggtggagtggcactggcatcaatgactgaagtctctttcaattggattggattcactactgctatggcatctaacgttactaatcaatcgcggaacgttttgagcaaaaaactgatgactaatgaagaggcaactttggacaatatcaatctctactcagt

SEQ ID NO: 161526 - DNA, 257 bp, Glycine max
aaaatgcccactttttttcttccaacgctcctcctccttctcatagccttcgccacctctgtctccggccgccgtgacctcgtcggagactttctccggctgccctccgaaactgataacgacgacaacttcaagggcacccggtgggccgtcctcctcgccggttccaatggttactggaattacagacatcaggctgatgtttgtcacgcctatcaaatattgaggaaaggtggtctgaaagaagaaaatattat

SEQ ID NO: 161527 - DNA, 256 bp, Glycine max
gtttccatttgattaagagaacaaaagaaaacaagagaagagattataggaacaaaagcaattaatggacacattgagggtgcaaagcttagcttctcagtcgaaggaaacgattcctgcagagtttgttaggtcagagacagagcaaccaggcatcacaaccgttcatggaacccaacttggggttcctataatcgatttcagtaaccctgatgaagacaaggtgctgcatgaaattatggaagcaagtcgtgac

SEQ ID NO: 161528 - DNA, 252 bp, Glycine max
aagctggaaatcgatgacgacctgaagcttcgagcattttgggacaagaggatctcccaggaggttcttggtgatgctctgggtgaggagtttaaaggatatgttttcaaaatcaccggtgggtgtgacaaacaaggattccctatgaagcagggagtgctgacccctggtcgtgttcgacttttgctccatagacgaactccttgtttccgtggatatggaaggcgcaatggagagcgtagaaggaagtct

SEQ ID NO: 161529 - DNA, 255 bp, Glycine max
aaattagttcattctctttgcgcagttccctacctctcctttcaagatgcagatcttcgtcaagaccctcaccggaaagaccatcacccttgaggtggaaagctctgacaccgtcgacaacgtcaaggccaagatccaggacaaggaaggaattcccccggatcagcaacgtctcatcttcgccggaaagcagctcgaggacggccgtaccctcgccgactacaacatccagaacgagtcaacccttcaccttgt

SEQ ID NO: 161530 - DNA, 262 bp, Glycine max
cggctcgagctctccgcagcagccttcttcgccgtttcagctcaacagccaccagcacgtaagatatggttaagcataacaacgttatccccaatgggcacttcaggaaacactggcaaaactatgtgaagacttggtttaatcaaccagcacggaagaccagaaggcgtttagctcggcagaagaaggctgtcaagattttcccaaggcctactgctggacctctcaggccaattgttcatggccagactctgaaatacaa

SEQ ID NO: 161531 - DNA, 250 bp, Glycine max
ttcatgaactcatgaagcatgtgatgattcatgaactcatgggagttgatcctggaactaaccctgtttgccatttccttggaagcaaggccattttatgggtacccaatttatctatggacactgcctatcagactaacgttgttgtttaattagtccatgcatctgcatcttgggcaccataagattgtatataagataaattatggtgtgttgtgtatgttgtgcaagacctggaacttcacctttc

SEQ ID NO: 161532 - DNA, 250 bp, Glycine max
attcattcaagattcagcaagtgcgttttggaagcagagaccgaaatacttcgagatggcccgtacaaagcaaactgctcgtaagtcaactggaggaaaagctcccaggaagcagcttgcaaccaaggctgcacgtaagtctgcaccaacaactggtggtgtgaagaagcctcatcgttatcgccctggaactgttgctcttcgtgagattaggaaataccagaagagcactgagctcctaatcaggaag

SEQ ID NO: 161533 - DNA, 249 bp, Glycine max
tgatcttggtggtgggacctttgatgtcagtatcttgacaattgataacggtgtttttgaagttcttgctacaaatggagatactcatcttggaggtgaggattctgatcaaagaataatggagtacttcattaaattgatcaagaaaaagcatggaaaggatattagcaaggacaacagagcacttggaaagctgaggagagaggctgagcgtgcaaagagggctctcagcagccagcaccaggtccg

SEQ ID NO: 161534 - DNA, 250 bp, Glycine max
cgaagatggtgtctccattgctgctctcaacctcatgaaccaggacaaaatcctcatggaaagctggtactatttgaaagatgcagtccttgaagggggtattccatttaacaaagcatatggaatgacagcctttgaataccatggaacggatccaaggtttaacaaggttttcaacaaggggatggctgatcactctaccattacgatgaagaaaattcttgagacctacacaggatttaagtccctc

SEQ ID NO: 161535 - DNA, 249 bp, Glycine max
aggactttgaaaaattatacatacgtcactcaatttggatccttggaatattacaaccggtgggatttaggttcaaacaacagctacaggtacaatcatgatgtttatgatcgtttctggtatatctatggtgacaacaaggattggaaacaattaagtgcttctattcctgccgattccttaaaccagaacgattacaaaccgccagagattatcttgagtaccgcagttacaccagtaaatgcttct

SEQ ID NO: 161536 - DNA, 247 bp, Glycine max
gtgtcgagccgattcggctcagcttacagaattcagcataagtaggatgcaatttcgggaatgcccaccaacttatatagaccatatgacaattttcatcccgagaattcgcatgtgttacctgctctcatgagaaggtttcatgaggcaaaggtcaatggtgctaaggaggtggttgtgtggggcaccggaagtccattgagggagttcttgcacgttgacgatttggcagacgcggttgtcttca

SEQ ID NO: 161537 - DNA, 248 bp, Glycine max
cgccgccgtcgggatgctgcaacggagtgaagagcctcaatgccgccgccaagaccaccgccgaccgccagacggcgtgcaactgcctcaagtcggccgccagccaaatctccggcttcaaagccaacaacgccgcctcgctccccggcaaatgcggagtctccatcccctacaagatcagcacctccaccaactgcgctaccatcaaggtttgaagagaaagtcatggacgcaggaaaccggaaact

SEQ ID NO: 161538 - DNA, 261 bp, Glycine max
attgaatctcagaattctctaaaagagatctttttctgctctttgaagaaagaagggtctttgcttgattttggagatgtctctgctctcagatctcatcaaccttaacctctccgataccaccgagaaggtgatcgcagagtacatatggatcggtggatcaggaatggacctgaggagcaaagcaaggactctcccaggaccagttagcgacccttcagagcttcccaagtggaactatgatggttccagcacaggtcg

SEQ ID NO: 161539 - DNA, 245 bp, Glycine max
ccgaaacgcagcgtctcatgcacgagcgcaaattgggaaaacctgtgtttcccaaggcaatcggcgaactccacggccattccggcatcgcgaggttgatgctgttctacgcaagaggcttgtgcggcatcgtcgaccaccgcagaggcgccggcgcagcagacgccggcctcgtcttcttcaacggaaaactcctcgccatgtcggaggatgatttcccctacgaactccgaatcaccgcctcc

SEQ ID NO: 161540 - DNA, 250 bp, Glycine max
ctctgatctcactcaccattcaccaacctgcttctctgttctcttctttcccttcccaagaagaagaagaagaagatgccttcttcagaatcatcaacaggcttctccgaaaccatttgtgtgaccggcgctggtggcttcatcgcctcttggatggtcaaactcctcttggagaaaggctacactgtccgaggaaccctcagaaacccagatgatcccaagaacgggcacttaaaagagtttgaaggag

SEQ ID NO: 161541 - DNA, 247 bp, Glycine max
cgctgatgtcgctggtgttgacgaggctaaggacgagctggaagagattgtggaatttcttcgcaatccagacagatatgtacgactaggagctcggcctccccgaggtgttctcttggtgggtcttcctgggacaggtaagactttactggcaaaggctgtggcaggggaagctgatgtgccatttataagttgttctgctagtgagtttgtagagttatatgttggtatgggtgcttcccgtgtg

SEQ ID NO: 161542 - DNA, 245 bp, Glycine max
caaaaagaaggttcgtttgggggttcctgctacacaatggatttcagtttacaatgcaagactgccaatgaagcaaaggtatcattacaatgtagcggatgcaagattagcgcaacatgtggagagagggattgcagatggccttctaattagttgtgtggcttcttgttccaatctctgggcccttattatggatgctggaactggcttttcaagtcaagtttataagttgtcaccatttttct

SEQ ID NO: 161543 - DNA, 280 bp, Glycine max
gtcgcgtgtacgcgtactcgggatccagttctatcctgtctttcgagatccagacctcttcccaatgatgaacctctgtttcttcttcttctacttcttcaccttcttcgccgccgtcagatctgatccctcagatcaccgctacaaagaaggcgaccccgtccctctctacgccaacaaagttggccccttccacaaccctaccgaatgctaccgttacttcgacctgcccttttgtgaaccaggtgatttgaaagagaagaaggaggcgctcggggag

SEQ ID NO: 161544 - DNA, 264 bp, Glycine max
gatttggatcgagctttctccctcagaagcgaagaagaagccacagagaactagtctcgtactctcacccgcaagaaaaaaatggcatctcacatcgttggatacccccgtatgggtcccaagagagagctcaagttcgctctcgagtctttctgggatggcaagagcagcgccgaggatttgcagaaggtgtcttctgatctcagggcatccatctggaagcagatggctgatgctgggatcaagtacatccccagcaacact

SEQ ID NO: 161545 - DNA, 251 bp, Glycine max
actttaccaactcctaacaatttctctctgtttccttcttcaccgcatcaatggagttggacggcgttctcctcggcatgtgcaaccctctcctcgacatctctgccgtcgtcgacgacgctttcttgcaaaaatacggtatcaagttgaacgatgcgattctcgctgaggataagcacaaacctatgtatgaagaattggctaacaatcctaatgtggagtacattgctggaggtgctactcagaattca

SEQ ID NO: 161546 - DNA, 247 bp, Glycine max
attgctgtcttgtctgaagttagttcagcaatttttgctgaagttatgcaaggaaagcctgaattcactgaccatttgactcataaactaaagcaccaccctggtcagattgaagctgctgctattatggaacacattttggaaggaactcctattggagtctccatggataatacacgtttggctcttgcttcaattggtaaactcatgtttgctcaattctctgagcttgtcaatgattattaca

SEQ ID NO: 161547 - DNA, 245 bp, Glycine max
gtcagctcaggagtttataatctgagagatgtcagatcttgaggctcccttgcgtcctaagacgtacaaggtttgggtggactatgtcgttcagtttcgatctatccttgttatggacgtggtcgttcccatctccttcgccatttgtttccgtgcgtacgttgggggtgtaagatctgagcggaggtcctatgatgctcgtcggatcgaacatgatgatagtgtgatgagggctatcgaacgcc

SEQ ID NO: 161548 - DNA, 246 bp, Glycine max
tctttgcgcagttccctacctctcctttcaagatgcagatcttcgtcaagaccctcaccggaaagaccatcacccttgaggtggaaagctctgacaccatcgacaacgtcaaggccaagatccaggacaaggaacgaattcccccggatcagcaacgtctcatcttcgccggaaagcagctcgaggacggccgtaccctcgccgactacaacatccagaaggagtcaacccttcaccttgtccttc

SEQ ID NO: 161549 - DNA, 241 bp, Glycine max
ctcgagccgctcgagccgcatttttggatccaccaacatttggatcgatcatgtttccctatctaactgagccgatggtcttatcgatatcatccaaggctccactgccatcaccatctcaaattgccacatgaccaaacataatgatgtgtttctctttggtgctagtgactcatacaacggagacaagatcatgcagatcacagtggcattcaaccacttcgggcaacgactggtccag

SEQ ID NO: 161550 - DNA, 254 bp, Glycine max
cttgacaatttgcgccactacgcaccagagaaggcttctaagaactcaagggatggccaagacaataattgatgctgttttgggcctcactcttgatgattctcccagcaatcttgcagctgcaacccttttgtacgtgttgaccagtgatggccaagatgatcacctccttgaatcacctggttctgttcaatttctgatgaagttgttaaaaccaattgtctccacagctattaaagacgaagcaccaaaat

SEQ ID NO: 161551 - DNA, 247 bp, Glycine max
ctttcaggaaaatatatttgaatggcaatttgctataagggggcgtcgtgatactgaatttgaaggtggtatttatcacggacggattcagctgccttcagaatatcccttcaaacctccttcgtttatgttgctcacacctagtggccgttttgagacccaaaccaagatttgcttgagcatatcaaatcatcaccctgagcattggcaaccatcatggagcgtaaggactgctttagtcgcactg

SEQ ID NO: 161552 - DNA, 243 bp, Glycine max
tgagtgcttaaaagggttcacgccaaagtctccagagaaatggaactcaatggttaggacacaaggatgtggccttaagagtccattgacttgtaagtctgatggatttgctcaggttgatggtttgaaagtgccagatactacaaatacgtctgtgtatgagagtattgatcttgagaaatgcagaaccaagtgcttgagagattgttcctgcatggcatataccaattctaatataagtgg

SEQ ID NO: 161553 - DNA, 242 bp, Glycine max
gtgagctataagctagtttatcgtgaggagaatatgaagttgtttgttgtcgttgttgctgcagtagttttggtagcatggccatgccatggcgcaggctaccaaaggttccctctccgaatgaaaactggctatggtgagcgttcttcggaggtaaaatgcgcaagttttaggcttgctgtggaagcacacaacatccgagcgtttaaaaccattcctgaagagtgcgttgaaccaacaaa

SEQ ID NO: 161554 - DNA, 240 bp, Glycine max
tgaaaacgtgaagaagagtcaatatgctgtcagaggtgaattataccttcgagcttctgaacttcagaaagagggcaaaaagattatctttactaatgttggcaacccgcatgcattgggacagaaaccactgagcttccctcgccaggttgttgctttgtgccaagctccattcctacttgatgatcctaatgttggactgctattccctgctgatgcaattgcaagagctaaacacta

SEQ ID NO: 161555 - DNA, 246 bp, Glycine max
cgagaagcccatgtatgaacaaggtttaattttacttccccatctagctactctaggttggggggtaggtcctgggggggaagttatagacacctttccatactttgtgtctggagtacttcacttaatttcctctgcagtattgggctttggcggtatttatcatgcacttttgggacctgagactcttgaagaatcttttccattcttcggttatgtatggaaagatagaaataaaatgactac

SEQ ID NO: 161556 - DNA, 243 bp, Glycine max
gtgtagactgtcgagcagtgaataccagttgctcctatagccggcgctcaacaacatggcggacaaggcagtcaccatccgaaccagaaagttcatgacgaacaggcttctctccagaaagcaattcatcgttgatgtccttcatccagggagggctaatgtttccaaggctgaactgaaggagaaattgggcagaatgtatgacgtgaaagacactaacactgtatttgtcttcaagtttcg

SEQ ID NO: 161557 - DNA, 238 bp, Glycine max
  unsure (1)..(238): unsure at all n locations
gccagttcgtggaggccgtggaggtggacgaggtgggggacgtggatttggacgtggtcgtgggtttagtcgtgactcctcgantgatgagaactcattccctaccagcagagctccttataatcagggtccttttgaagaaggagatgctgggaagtcttctgaaagacgcagttatggtggaccacgagttccttaccgtggtggtcgtcgtggaggtttcagcaatggtgaaatg

SEQ ID NO: 161558 - DNA, 238 bp, Glycine max
cagggaaacattgatccatatagcatttatacaccagtatgcaatgatatagcagcaatcaaacgccgtttggggggtcgctatccatggttgtctcgagcatatgatccctgtactgagaggtactctaccttgtatttcaatcgtccagaagttcagaaggcacttcatgccaatgtaactgggattccttattcatgggcaggatgcaatgatggtaatgtggaaaattggggtg

SEQ ID NO: 161559 - DNA, 250 bp, Glycine max
gacaaaatgaagagttttttgttgtggcgtgtggccattgtggaaaaaaatagaccctatgttgcaatgttgttcattcagtttgtgtatgctggaatggccttgctttccaaggctgcaatttccaagggaatgagcccttatgtgtttgttgtttatagacaagcctttgcatcagttgctctatctccatttgctttctttgacagcaagcaaccagctcctttgtcatgcaacttgttgtgcaaat

SEQ ID NO: 161560 - DNA, 236 bp, Glycine max
tagatcacaagttagagatgaatcatcttttttcatttagcatataatataaggttttttgtactaaaagatggagttcattttttaccttaaggccttttaaacttgtagtacttctggacgaaccaaattatgcctgtttgaataacgaaaaaaaaaaaaaaaaaaaaaaaaaaaaaaaaaggggggcccccagattttgaaccacttcacccgggaaataaattcggggcggt

SEQ ID NO: 161561 - DNA, 244 bp, Glycine max
ccgaaccctcgatcactctcacgcgctcctatattcgctcctccaccgtcgctctctcgaacaaccacaacaccatcttcatcacatggcaaacgcagcatctggtatggcagtccatgatgactgcaagttgaggtttttggagctgaaggcaaaaaggacacaccgtttcatagtttttaagattgaggagcagcagaagcaggtcattgtggagaagcttggtgagcctgcccagggctat

SEQ ID NO: 161562 - DNA, 243 bp, Glycine max
gagaaatgtaagaaatatgggagagcaatgcgcattgggacaaaccatggaagtctttctgatcgtataatgagctactatggagattcacctaggggaatggtagaatctgcttttgaatttgcaaggatatgccgaaagttggactatcacaattttgttttttctatgaaagcaagcaacccggttatcatggttcaggcataccgcttacttgtggctgaaatgtatgtccaaggctgg

SEQ ID NO: 161563 - DNA, 245 bp, Glycine max
ttcgaatagattatcctaagtctttgggaatagtgctgcaatggcttcaagtcaggaggaggtgacccttttgggagctactggaagcccatttgtgtgcagggttcatattgccctcaagttgaagggagttcaatacaaatatgtcgaagaaaatttgaacaacaagagtgaactgcttctcaaatccaacccagttcacaagaaggttccagtgtttattcacaatgagaagcccatagcag

SEQ ID NO: 161564 - DNA, 246 bp, Glycine max
gagtgatttcagtgagtgatcggtgttcacttgatctcatcataatcgtcagcgtcaattgaagaagatgccgatcagaaacatcgccgtcggaaggcctgaagaggcgactcaccccgacacgttgaaggcggctttggctgagttcatctcaaccttcatcttcgtgttcgccggctcaggctccggcatcgcctacaacaagctcaccgacaacggcgctgccacccctgccggcctcatctc

SEQ ID NO: 161565 - DNA, 250 bp, Glycine max
gcatagagtgagaagtgagaagagaaaaatggcaatctccatacccagtagacaacttttcatagatggagagtggaaagtccctcttctcaacaatcggtttccgatcatcaaccccgctactgaagacatcatagggcatattccagccgctactaaggaagatgttgaccttgcggtggatgctgctaaaagagccttttcccataacaaaggcaaagattggtcttcagctcctggctctgttcgt

SEQ ID NO: 161566 - DNA, 250 bp, Glycine max
aaggacttgaaaatgtgattgcaagacacagtcgtttaggcaaagcaaccagacttgctgtagaggcatggggtttgaagaattgcacccaaaaggaagagtggtacagtgacactgtgactgctgttcttgttcctgcttacattgatagtactgaaatagttagaagggcatggaagagatacaatttgagcttaggtcttggactgaacaaagttgctgggaaggttttcagaattggacatcttgg

SEQ ID NO: 161567 - DNA, 247 bp, Glycine max
gttttgaccaaggagaccaggcatggccgttctgcacacagaatgtcctccacctctttgcgcaagaaatctagccgaactcttgtctcaaaggttccatgtgccactctcagaaactttctttcaaatttgcaagaggttattcttggcaccaagctttccattctcatccctgctattccagctgccatcgttgctgagtgctttggctttggaagaccttggatttttatattaagcttacttg

SEQ ID NO: 161568 - DNA, 239 bp, Glycine max; identical to SEQ ID NO: 139793

SEQ ID NO: 161569 - DNA, 241 bp, Glycine max
aaagtcactggttgctgctctaatacctctacagaaggattctgaggttccttctcatgtgttgatgggtatcccagatggtacagctgcttttcccctttcacctcttggagaagcttgtctacgaatggatctgactgccctgcatgaggtgatggagaaaattgggtataaagacgacgagggcgcacaactgagctttcattccaaatgtggacgaaccagatgcaggaaacgttga

SEQ ID NO: 161570 - DNA, 245 bp, Glycine max
gcaggaccagagaagcaccaagcagtggcactgagatcagactcagacctctctgtgttcttccgatgtgggatctttggttaccaagacagcctctacactcacaccatgcgccaattctacagagagtgcaaaatcagtggcacagtggacttcatcttcggtgatgccacagcaattttccaaaactgccacatctcagccaaaaaagggttaccaaatcaaaagaacacaatcacagcaca

SEQ ID NO: 161571 - DNA, 247 bp, Glycine max
cttcttcttctttcggatttcgttctctttctcttccttccttctccttctctcagagaacaacacctctctctctcaccgcctccttctcctctcacaccgccatgggcgagacttccgctcccgccgccgatgccggaatggacgccgtccagcgccgtctcatgttcgaagacgaatgcattttggtggacgagaatgaccgtgtggttggtcatgattccaaatacaattgtcacttgatgga

SEQ ID NO: 161572 - DNA, 256 bp, Glycine max
cttctttctgtttatcaatttccaaatcacgaaactcaagaagaccggagaagagggattcaatagaccagtaagagttgggcctcatcatctcaacccttcatcatccagccagccgaacgaatcatcctccctccatgcttcagcatgtgtggcgggggatagcgctgcttatcaaaggacatcgacattcggggacgatgttgtgatcgtggctgcttatcggactgctcattgcaaagctaaacgaggtggt

SEQ ID NO: 161573 - DNA, 243 bp, Glycine max
gagtttcacagagaaacatgccgcaagatcaaagcactccaccaatatgattgcttgcgagccaataaatcaacatttgcttggggtctagaagcccgtgtaccatttttggacaaggcatttatcaatactgcaatgagtattgaccctgagtcgaaaatgataaaaagagatgaaggacgaattgagaagtggattctgaggagagactttgatgatgaagagcatccttatctgccaaag

SEQ ID NO: 161574 - DNA, 240 bp, Glycine max
ctcttcctcaccgattgctagaatggaatttcgatgctcagtcatctcttttaccattctcttctctcttgctcttgcaggagagagccatgtccatgcatcgctacctgaggaagattattgggaagctgtttggccaaacactcccattcccactgcactgcgagagcttctaaagcctctccctgcaggtgttgacatcgatgaactccctaagcaaattgatgatacacagtaccc

SEQ ID NO: 161575 - DNA, 238 bp, Glycine max
ctttgtttcccagagatcctgccaagaaagagttcggagagcaattgatatcccatgttgatacattcagcagagacctgttcgtttcattgaaaggggatgctgtacagcaagccagtcccgcttttgaatacttggagaatgctcttggtaaatttgatgatgggccattcttgcttggtcaattcagtttggtggatattgcctatattccatttgctgaaagattccaaattgt

SEQ ID NO: 161576 - DNA, 242 bp, Glycine max
ttccaacttccaaatctccaatttatctatctagaaaacaacaatctctcgggtcgaatacccgataacatcggtaaccttacccgattagatgtactcagtttaactggtaaccggttcatcggacccgtaccgagttcaataaccaagttgactcagctcactcagctcaaactcggtaacaattttctcaccggaacagttccccaaggaattgccaagctcgttaatttaacctattt

SEQ ID NO: 161577 - DNA, 235 bp, Glycine max
ggaccgtaaagttgagtttggccttcctgacttagagagtaggacgcagatattcacgatacacacaagaaccatgaactgcgaaagggatattcgatttgaacttctggctcggctttgcccaaattccactggagctgatataaggagtgtatgcacagaagccggtatgtatgctatccgtgcccggaggaagactgtaacagagaaagacttccttgatgcagtaaataaa

SEQ ID NO: 161578 - DNA, 239 bp, Glycine max
gtgagaaccttggtagaggaacaaagataactttgtttcttaaggaagatcaacttgagtatcttgaggaacgccgtctgaaggatttgataaagaagcattctgaattcataagctatccaatttctctctggattgagaagactactgataaggagatttctgatgatgaggatgaggaagagaagaaggatgaggagggtaaagttgaagatgtggatgaagataaggagaaggag

SEQ ID NO: 161579 - DNA, 242 bp, Glycine max
atcgttgggatctccatacgccggatctgctaaaatacgcttgatccatatgggcctcctcgaccacttgtgggacgacaccgtcgccggcccaaggccgaaaacggtctcggcaagctccgaaaacaccacaccttcactttccgacctagctccggcaaggaaacggagggcgggagcgtgagatcgtacggagacgaatcgtcggatgaagcgacgagagtgacgcgtagtatcatgat

SEQ ID NO: 161580 - DNA, 244 bp, Glycine max
gagactgtggaatacaagaacattagcttcactgtttgggatgttggtggccaggacaagattcgtcccttgtggaggcactacttccagaacactcagggtcttatttttgttgtagacagcaatgatagggacagagttgttgaggccagagatgagttacataggatgttgaatgaggatgaactgagagatgccgtattgcttgtgtttgcaaacaaacaagatcttcctaatgcaatga

SEQ ID NO: 161581 - DNA, 240 bp, Glycine max
gatgaggatgatgaggattttaacagtgatgatagcaatgatgaaggaatggaaataattgcaaaagaatatggagttaaaaggtatggttggcttgtttacatggataagaaggctaaggaggaagaaaaaaggcaaaaagagttgatcaaaggtgatcctgcaattaggaagctgagtcgtaaggaaagaaggaaggcttctcagattgaaagggagagagagagagaagccacacgg

SEQ ID NO: 161582 - DNA, 238 bp, Glycine max
cgaggccttcacagagagaaagagaaaacatttcaaaaaaaataaaaaaaaataagcctctttctctctctgaatttctaagcctctctcacaacaatggaggagccacaaccaggacccagcccgttacgcaaaatgattttggtgtcatcaatggcggccggtatccaattcgggtgggccctacagctctcccttctcaccccatatgttcaaaccctaggcgtcccgcacgctt

SEQ ID NO: 161583 - DNA, 233 bp, Glycine max
agcttttcagaggaacaatggcgggtagggtttcgacgtgcttcttcttcgtgtttgctctttctctccttcttccttttcagatctccgctgaggaatcatcggagaaagagttcgtactcacattggatcactctaactttcaccacactgtcagcaagcacgatttcatcgtcgtcgagttctacgctccatggtgtgcccactgtaagaatcttgctcccgagtatgag

SEQ ID NO: 161584 - DNA, 236 bp, Glycine max
acacttctcacattgctgtcaagtttgctgaactcatgaccaagattgacaggcgatccggcaaagagcttgagaaggagcccaagtttttgaagaacggtgatgctggttttgttaagatgattccaaccaaacccatggttgttgaaactttctccgagtatcctccacttgataggtttgctgttagggacatgcgtcaaactgttgctgtgggagtcatcaagaacgttgag

SEQ ID NO: 161585 - DNA, 242 bp, Glycine max
actcgagccgattcggctcgagcacccacacaccatccgttctagactcaacttctgctctacccaactcctacaacgcttatctctgcactcatgggcaaggtcaagatcggaatcaacggatttggaagaattggccgtttggttgccagagtcgctctgcaaagagacgatgttgaactcgttgccgttaacgaccctttcattaccaccgattacatgacatacatgtttaaatacga

SEQ ID NO: 161586 - DNA, 239 bp, Glycine max
agtgcctcagctgctctcactgtagacccttcactccacttgtcaagagcttctagcattgtgatgttgattgcatatgtagtctacattgtctttcaactgtggacacacaggcagttatttgaagccgaagatgagggtgaggatggtgaggacggtgaagaagaacaagctgtgattggattatggagtggcattgcttggttggtagggatgactgtgttcattgctgtgttgtc

SEQ ID NO: 161587 - DNA, 238 bp, Glycine max
tgtttataagtggattagatgacagagaaaagattctgttggaggagtacacatcagttttagtgaactataaggatgtcaggctgaagctcaatgatgtggaaaagaaaaaccgtgacagcatttttgagttgactcttcagctaagggaaatgaagaacgctctttccacaaaggataaagagatacaggttttacatcagaagctggacaatccagatgcaaatcctgatgaaag

SEQ ID NO: 161588 - DNA, 237 bp, Glycine max
cttacaagctgaaactaaacaagtttgctgacatgaccaaccatgcatttaggagtacctatgctggctcaaaggttaatcaccacagaatgttccaaggcacgccacgtgggaacgggaccttcatgtatgagaaggttggtagtgttcctccttctgtggattggaggaagaatggtgctgtcactggtgtaaaagatcaaggccaatgtggtaagctaaatgatcactagtccc

SEQ ID NO: 161589 - DNA, 237 bp, Glycine max
atttcatcaagcctgccatggcttcctcgtgtgcttcctctgccattgcagctgttgccatctccacaccaagttcccagaagaatggatcactcttgggaagcacaaaagcttcttttcttagtgggaggaaactgaaggtgaacagttttacagcaccagttggagcacgatccagcactacagtgtgtgcagttgctgagcctgataggcctctgtggttcccaggcagcaccc

SEQ ID NO: 161590 - DNA, 232 bp, Glycine max
gggatattactactggccttaaaacatctgtctttggaggagagtttcagtctggacatactgcagatgtacttagtatctccattaatggatccaactcgagaatgtttgtatctggttcttgtgatgcaactgctcgattgtgggatactcgcgtggcaagtcgagcagtgcggacatttcatgggcatgagggagatgttaatgcagtcaaattctttcctgatggaaa

SEQ ID NO: 161591 - DNA, 234 bp, Glycine max
gtaagctttgtgctaggaactgcttattcaatcaatgtgcctctgttgagatggaagaggtttgcagtgcttgcagcgatgtgcattctagctgttcgggcagtaatagttcaacttgcatttttccttcacatccagactcatgtatacaagaggccacctgtcttttcataatcattgatttttgctactgcattcatgagcttcttctctgtagttatagcactgtttaag

SEQ ID NO: 161592 - DNA, 240 bp, Glycine max
gcagaggtgacggagtttcagttttgtaagtgcatgatcataataataaggtttttatagaaaagaaaagttgagaataagatgggggaagatggtaattcttggattaggaggacaaatttttcacacacagtgtgccatcgtttggatcctgctagattaggctctattcctatcagtgttcagtcagagcagaaatcaaggccttcctcaaaggctcagagacaccctatgacatac

SEQ ID NO: 161593 - DNA, 241 bp, Glycine max
gcagaattcaccaagtgttggattgttcacccaccaatagggaacgtgagctgggtttagaccgtcgtgagacaggttagttttaccctactgatgacagtgtcgcaatagtaattcaacctagtacgagaggaaccgttgattcgcacaattggtcatcgcgcttggttgaaaagccagtggcgcgaagctaccgtgcgttggattatgactgaacgcctctaagtcagaatccgggcta

SEQ ID NO: 161594 - DNA, 241 bp, Glycine max
ggcaagtaccatttttctcaaccttatcacccttttgcataaaagggccaccccttcttcttcttcccttctcaacttgtactacaatttctggattgaattatcttcaaaatgagagaaatccttcatgttcaagctggtcaatgtggaaaccaaattggaggcaagttttgggaggtgatgtgtgatgaacatgggattgatgccactggaaattacgtaggtaactttcatcttcaac

SEQ ID NO: 161595 - DNA, 234 bp, Glycine max
tcgaagttgatgccaacggcattctaaatgtgaaggcagaagacaagggcactggtaaatcagaaaagatcaccattacaaacgaaaagggacgtcttagccaggaagaaattgagagaatggttcgcgaacagaggagtttgcagaggaagacaagaaggtgaaggagaggatcgatgctcgcaacagtcttgaaacctatgtatacaacatgaagaaccagatcagtgacaa

SEQ ID NO: 161596 - DNA, 232 bp, Glycine max
attttcttttccttcactttcccgagaaaaaaataacacttttcactttcttcactacgttctcacttcgatatggctcgtacgaagcaaaccgctcgcaagtccaccggtggcaaggcgccacgtaagcagctcgccaccaaggccgctcggaagtccgctccggcgaccggaggagtgaagaagccccaccgcttcaggccgggaaccgtggcgctgagggaaatcagaa

SEQ ID NO: 161597 - DNA, 232 bp, Glycine max
catctcctgagatgctatgctgtttttgccctgctccttttaggcagttccttgagattgtagtaaacatgaagtttgatgaagaacctaactattccaggctaatatctttgtttgatggtatgcttggaccgaatcctgcattgaggccaattaacactgaaggtgctcaaaaggttgggcagaagaggggtagattgaatattgaggaagaggatgattcacagcccaa

SEQ ID NO: 161598 - DNA, 232 bp, Glycine max
gttttgatgcaacgctgtcactgagaaaggatctctatctacgaaggagcggaataaaacccttctctctgtgattaagagaatggcttcagatcggaaacttcacacttttgaggaggtggcaaagcacaaccagaccaaggattactggctcatcatttctggcaaggtgtatgatgtcacccctttcatggaggatcatcccggaggtgatgaggttttgttatctgca

SEQ ID NO: 161599 - DNA, 258 bp, Glycine max
gccttgctttgcagcttcagttcagtctctaactgtgttgaatttatctaacaactctattgtggggggactacctgcttgtattgcttcttttcaagctttgactcatttgaacctgtcagggaaccacttgaagtatagaatatatcctaggcttgtgttctcggagaaacttcttgttttggacttgagtaataatgctttgtctggtcctattccttgtaaaattgctgagacaactgagaaacttggccttgt

SEQ ID NO: 161600 - DNA, 252 bp, Glycine max
ggaatatgatgaataagaaaatggttaatggggggacagttaacaactggttctgcataaacttttcaaggaatgttcaagatagtgttgcccgtggtttttgctatgaacttgctcagatgtgttatatatctggaatggcatttacacctgagccagtagtccccccagtcagtgctcgccctgatcaagtggaaaaggttcttaaaactcggtatcatgatgccaagaacaaactgcaaggaagagagc

SEQ ID NO: 161601 - DNA, 255 bp, Glycine max
ttcgaatagattatcctaagtctttgggaatagtgctgcaatggcttcaagtcaggaggaggtgacccttttgggagctactggaagcccatttgtgtgcagggttcatattgccctcaagttgaagggagttcaatacaaatatgtcgaagaaaatttgaggaacaagagtgaactgcttctcaaatccaacccagttcacaagaaggttccagtgtttattcacaatgagaagcccatagcagagtctcttgt

SEQ ID NO: 161602 - DNA, 254 bp, Glycine max
gccgccgcagagttcctcgcatttgaatgaagagaagaagaaaccgaggcccaaggatgttttcgggcggcctcttccgactgaggaggaattcgaagttcttaaaaatgcgcctaggctggaaacaggagctcctgccagggtgaaaccttttggaattgaagtccgtaatgtaaaatgcttaagatgtgggaactatggtcaccaaagtggtgatcgtgagtgtcccttgaaggatgctataatgcctaatg

SEQ ID NO: 161603 - DNA, 255 bp, Glycine max
gtcatcatccgcagctgctgttattcgcaccgcaaacaaacagtgagccatggccgtcggaaagaacaagcgcatctccaaagggaaaaagggtggcaagaagaaggcagctgatccctttgccaagaaggattggtatgacattaaggccccttctctttttcaagtgaaaaatgttggcaaaaccctcgtctctcgtacgcagggtaccaagattgcttctgaaggacttaaacatagagtgtttgaggtctc

SEQ ID NO: 161604 - DNA, 254 bp, Glycine max
gacaacaactgaggagaaggatatcttgaatgggatcactggttctgtaaatccaggggaagttttggcattgatgggcccctcgggaagtggaaagacaactcttttaaaccttcttgggggaaggttaagccatcctataagtggtggttctatcacttacaatgaccaaccatattccaagttccttaagagcaggataggattcgtgacacaagatgatgttctgtttcctcacctaactgtgaaagaga

SEQ ID NO: 161605 - DNA, 255 bp, Glycine max
  unsure (1)..(255): unsure at all n locations
ctttcttccatcttcttcccttttcacgtcattatcctaaaaacttgcagattttcacattccacacaacatgcaactttggtctctgtttctgtcggtgctcctttgtgccacttttcatctctccttctctattatcgacggtttagttgccaacggcaactttgagttggngtccaaagtcctccgccctaaaaggaacagtggtggtgggcgggagctctcgatcccagaatgggagatctccggctttgt

SEQ ID NO: 161606 - DNA, 258 bp, Glycine max
gaggatatagaagaaggagtagaaggtactggatttgatgatgagaaatcactacttatgtcacaaatgagtcttgagaaaaggtttggtcagtccgctgtctttgttgcctctacgcttatggagaatggtggtgttcctcaatctgctactccagaaactcttcttaaggaggctattcatgttatcagctgtggttacgaggataaaactgattggggaagtgagataggatggatttatggttctgtcacagaa

SEQ ID NO: 161607 - DNA, 254 bp, Glycine max
ggcaggtttgtcattggtgggccgcatggtgatgctggtctcaccggtcgctagatgatcatcgacaccgatggcggacggggtcgcacatggatcgcgtgtgttcgctgcgaaggatcgtaccagtgtcgataggagtggtgcctacatgatgcggcgagtctgttggagcattgttgcctatggcactgtcaggctgggcaattgtgcaagcgtcctatgccattggtgggcccgagcccttgtctgtgttt

SEQ ID NO: 161608 - DNA, 248 bp, Glycine max
gttggatagagcttcttgccttgtgttctacgttctgcattcttctcagcccgaaacaaggacctgtcatcaagatggtgaagttcacaactcacaggcttcggcacataatggactgcgaacacaatattcgtaacatgtctgttattgcacacgtcaatcatgccaagtctacgctcactgattctcttgtggctgcttctggtaatatccttgcacaagagggtgaagctgagcgtggcaacact

SEQ ID NO: 161609 - DNA, 252 bp, Glycine max
ttctccatttccattttctctctcacttttcaagaatcgtaagctatgggaaagtcttacccaactgtgagtgctgattaccagaaggccgttgagaaggcgaagaagaagctcagaggcttcatcgctgagaagagatgcgctcctctaatgctccgtttggcatggcactctgctggaacctttgacaagggcacgaagaccggtggacccttcggaaccatcaagcaccctgccgaactggctcacagc

SEQ ID NO: 161610 - DNA, 259 bp, Glycine max
aaaggcttaaaaatgagcaagtctttgggtaatgttgtggatccacgtttagtgattgaaggaagtaaaaatcaaagggaatcacctgcatatggagctgatgtcctccgactctgggtttctagtgtagattatacaagtgatgtgatgattggcccacagattcttcggcaaatgtctgaggtttacagaaagttgcgaggaactttgagatacctcttggcaaatcttcatgattggaaaacagaatacactgttc

SEQ ID NO: 161611 - DNA, 249 bp, Glycine max
attctctcttctattctattctaaactcgaaacaatcttagagaaagaagcagaagaaaatgccgatttctagaattgccattggaaattcttcggagttgaaccaatctgatgcacttaaggctgcactagctgagttcatctcaatgctcatctttgtttttgccggggaaggctctggaatggcttataataagctgacaaacaatggttcagcaacaccagcagggttagtggcagcatcactgt

SEQ ID NO: 161612 - DNA, 248 bp, Glycine max
attctcaactgcgcggtgagtgagtgagagacggaaagtgcaaagccaccgtcttctcttctcagagcttggctttgcttatcgattctctctcctctcatctttctcattcaaggtttgtaaaagatggccgatgctgaggatattcaaccccttgtttgtgacaatggaactggaatggtcaaggctggatttgctggtgatgatgctcccagggctgtctttcccagtattgttggccgacctcg

SEQ ID NO: 161613 - DNA, 249 bp, Glycine max
ctcttcttccattttccttctcaatccaccactctaaccctcgcacgcttcgttcaattacaacaatggacagatcaactggccgtggtggtggtggaagtgtggacatgtttctccgaaattataagttgggaaaaacactcggcattgggtcctttggcaaggtgaaaattgctgagcatgtacggactggtcataaagttgctataaagatccttaaccgccacaagattaaaaacatggcaatgg

SEQ ID NO: 161614 - DNA, 248 bp, Glycine max
gcttgagggacttttccatttcccgagcatcagttgagtggggcattcctgttcctgatgacaagacccagactatatatgtatggtttgatgctttactaggctatatatcagcactatctgatgatcaggaacaacctgatttacttaaaactgtttcttcaggttggccagcttcactgcacttgatttgtaaggatattctacgcttccatgctgtttactggccagctatgctaatgtctgct

SEQ ID NO: 161615 - DNA, 250 bp, Glycine max
ctcgcaagcaaaaagaaagaatcccaggcgaggagaaagatggaggggaaggagcaggatgtgtcgttgggagcgaacaagttccccgagagacagccgattgggacggcggcgcagagccaagacgacggcaaggactaccaggagccggcgccggcgccgctggttgacccgacggagtttacgtcatggtcgttttacagagcagggatagcagagtttgtggccacttttctgtttctctacatca

SEQ ID NO: 161616 - DNA, 232 bp, Glycine max
caatcttatttctatccacacttcacattcactctatctctctctctcagccatcctcatgggaacagtgaacatcccagatctcggcaccgagattttgattccagtctgcgccatcattggaatagggttcgccctcttccagtgggtcctcgtctccaaggttaagctctccgctgccagagacgcttcccctaacgccgccggcaaaaatggctacaacgattacctc

SEQ ID NO: 161617 - DNA, 254 bp, Glycine max
ataaagtgaaggtgtttgatttggaggatttgctgagggcttctgctgaggtgttggggaaaggaacttttgggactacctataaggcggttatggaggatgggcccgtggtggctgtgaagaggttgaaggatgtgactgtttcggagaaggagtttaaggagaagattgatgtggtgggagtgatggatcatgagaatttggtgcctctcagggcttactactatagcagggatgagaagcttcttgttcat

SEQ ID NO: 161618 - DNA, 247 bp, Glycine max
gatgttctggctccttttggctttctctcctctccaaccgatgcttttaatacagagattcatgtcaacaaattctccatggattattatgagagtggagaggtttcacagttccacaccgatctttcccttcgtaacatggatgggaaagaagtaatgaggaagacaatcagtgtaaatgatcctttaagatacggtggtatcaccatatatcagacagattgggagtatttccgctctgcaaatt

SEQ ID NO: 161619 - DNA, 247 bp, Glycine max
agagagggagattctttgtttgctaccttctctcggaaaaatggttacgttcaggtttcaccagtaccaggtggttgggagggctcttcccacggaagcagatcagcaccccaagatctaccgaatgaagctctgggccaccaacgaggttcgcgccaagtgccaattctggtattttctgaggaaactgaaaaaggtgaagaagagcaatggccaagtgcttgccatcaacgagatttttgagaag

SEQ ID NO: 161620 - DNA, 255 bp, Glycine max
ctcttcctccctttctcacagcaatggccgccgcagcacgccctctcgtcaccgtgcaggccctcgacggtgacatggcaaccgatgcctccgccaccgttcccatccctgacgtcatgaaggcctctatccgccccgacatcgtcaatttcgtacactcgaacatctccaagatcagccgccagccatacgccgtcagtcgtcgcgctggtcaccagacctccgccgaatcctggggtaccggccgagccgtct

SEQ ID NO: 161621 - DNA, 253 bp, Glycine max
gaggacttgaggaacaagagtcctcttctcctccaaatgaacccggttcacaagaagattccggttctcatccacaatggcaaacccatttgtgaatccctcattgctgttcagtacattgaggaggtttggaatgacagaaatcccttgttgccttctgacccttaccagagagctcaggctagattctgggctgattatgttgataagaagatatatgatcttggaaggaagatttggacatcaaaaggag

SEQ ID NO: 161622 - DNA, 249 bp, Glycine max
ctttgttcactcttcttctcttgcggctagggttttagcgcactatcttctagatttaaggaagatgggtaaggaaaaggttcacatcagtattgtggtcattggccatgtcgactctgggaaatccactaccactggtcacctgatttacaagcttggaggcattgacaagcgtgttattgagaggtttgagaaggaagctgctgagatgaacaagaggtctttcaagtatgcctgggtgctggacaa

SEQ ID NO: 161623 - DNA, 243 bp, Glycine max
cgcaacaaaaagaaagaatcccaggcgaggagaaagatggaggggaaggagcaggatgtgtcgttgggagcgaacaagttccccgagagacagccgattgggacggcggcgcagagccaagacgacggcaaggactaccaggagccggcgccggcgccgctggttgacccgacggagtttacgtcatggtcgttttacagagcagggatagcagagtttgtggccacttttctgtttctctac

SEQ ID NO: 161624 - DNA, 232 bp, Glycine max
gatgtcgggtcgtggaaagggaggcaagggtttgggaaagggaggagccaagaggcacaggaaggtgcttcgtgacaacatccagggtatcaccaaacccgcaattcggcgtttggctcgcagaggtggtgttaagagaatcagtggtctcatctacgaggagacacgtggcgtcctcaagatcttcctcgagaacgttattcgcgacgctgttacctacaccgagcacgct

SEQ ID NO: 161625 - DNA, 248 bp, Glycine max
acacaagatgtttccactttaccttactagagttctgactttcttcatgtatgcgtttatgtttctacttatttctgttcattgtattaccgttctcaaacaagttattatataattaagaccggtctcatttcaaaaaaaaaaaaaaaaaaaaaaaaaaaaaaaaaaaaaaaaaaaaaaaaaaaaaaaaaaaaaaaaaaaaaaaaaaacaaaaaaaggggggcccccccaccaagagaccccccccc

SEQ ID NO: 161626 - DNA, 239 bp, Glycine max
aaatgagaccatgcaaatgcaaatgcaatgttctctctgctctcattcttcttgtcacattcctttttattgcttcttccgtccactgtgaagacccatatcggtacctcacttggaaggtcacctatggtgacatctatcctcttggtgtcaagcaacaagggatcttaattaatgggcagtttccagggcctcaaatagatgctgttacaaatgacaacttgattatccatgtctat

SEQ ID NO: 161627 - DNA, 245 bp, Glycine max
caaaggaagacaaggggaatattatgtgatggttatggacatgcttggtccaagcttgtgggatgtttggaattcctcaagccaggctatgactgcggaaatggttgcatgtatagcagtcgagtccctatcgatcctggagaagatgcatgcaagaggctatgtgcatggagatgtaaaaccagaaaactttttactaggtcaaccttctacaccacaagaaaagaaattatttcttgtagacc

SEQ ID NO: 161628 - DNA, 249 bp, Glycine max
gaccgagccagagcttcgtcttggccctcgattttgccctgtaaaactaatcccagtcacaacagaaataatcaatggcaccgaaacagaccaaggctgagaagaagatcgcttacgatgcgaactgtgcgacctaatggaggagtacggccaaatcctcgttgtaaactccgacaacgtgggatcgaaccagctccagaacattcgcaagggtctccgcggcgactctgttgtcctcatggggaagaa

SEQ ID NO: 161629 - DNA, 239 bp, Glycine max
ggcctccccggcgtctgcatcgccatctccgggcctcaccgctgcaggagctgacccttttgcgcccagttgaagcccatgtctgtcgagggtgcatagttgcctcacgttggacggcgttcaatacgatgtgtcgaagaagatttgaggatcaagagtggactgcttctcaaatgccaagccagttcacaggaaggttccagtggttcttcagaatgagatgcccatagcagagtctc

SEQ ID NO: 161630 - DNA, 244 bp, Glycine max
gtgctggaacattgcaaagaccctacaacacagcagaaagttatggatgaaattttaggtgcagttagcatgttagctcaggatcagtatggcaactacgttgttcagcatgtgctggaacatgggaagcctcatgagcgttcttgtataataaaggaattagcaggcaagatagttcaaatgagtcaacagaagtttgcctccaatgttgtagagaaatgtttgacctttggaggtccttctg

SEQ ID NO: 161631 - DNA, 237 bp, Glycine max
ctcgcatctcaatacccttttgatttgtgaaaggaaagcaaacatgcttgatcaggtccaacaccctacaatcatggacaaggttgctggccagctccatctccgttctggtgtttctggtattaggagttatgaaggagcctactgccaccccacaatgtaccaaagaccctcttttgggaattactcgaatgctgcattgcagtatcctgtgatgccctcatgcaaagctactat

SEQ ID NO: 161632 - DNA, 246 bp, Glycine max
ctctggttcgaccccaccagaaacttccacacttactccatcatatggaagccccaacacatcatattcttggtggataacattcccataagggtgttcaagaatggtgagactattggcgttcctttcccaaagaagcaacccatgagaatctattctagcctgtggaacgctgatgactgggccaccagaggtggtttggtgaaaactgattggtccaaggcaccctttacagcctactaccgc

SEQ ID NO: 161633 - DNA, 243 bp, Glycine max
tagacgagaagttgctaacttcacttcgcacatctcgaagcctctctttccggcaactacgttaaagttcatcaatggcacgtcgtggcaaaaccctaggatccagcgccgccaagaaggccacctcaaggagcagcaaagccggcctccaattccccgtcggccgtatcgcccgtttcctcaaggccggaaaatacgccgagcgcgtcggcgccggtgctcccgtttacctcgccgctgtcc

SEQ ID NO: 161634 - DNA, 251 bp, Glycine max
tcggctcgagtgcaaacattagctatccctacaatactccttgtgatattcatatgggtggtacaaccaaagcaacgtcatgggaagattgcaccaggtcccaatgcgttgccaattattgagtaacctccacatgctagggagactcccgcaccgcaccctacaaacctttgcaagatagtatggacccataatgtccttgaagctagggctagtccgcgccatagtagtttcctgaccggaaatcgctg

SEQ ID NO: 161635 - DNA, 239 bp, Glycine max
ctccttgctcttagccctcctcctcttcgccgccgtggacaccgccgcgatggcgtggcgcgtccgacgccgacgacatcctgatccgtaggtggtgccagatgtggcaacgaagaggaggacaacctgctgaacgccgagcaacacttcgcgagcttcaaggccaagttcgccaagacctacgccaccaaggaggagcacgatcatcgcgtcggcgtcttcaagtccaacctccgcag

SEQ ID NO: 161636 - DNA, 236 bp, Glycine max
atcgagcgaatcggctcgagcggctcgagagcaaaaaaaaagacagtaatatgggaagacgtagggttcagctgaagaggatagagaacaagatcaatcggcaggtaactttctccaaaaggagagctgggttactcaagaaagcacacgagatctctgtgctctgtgacgctgaggtcgctttgattgtcttctcccacaaaggaaagctctttgaatatgccaccgattcttgc

SEQ ID NO: 161637 - DNA, 226 bp, Glycine max
gcagcattgggagatagaaagagagagagaaagagagagagagaaagacccttacccttctctatcgctcgctttcctttgacgcttctgacccttgctttgtctgcgtcttccttctttctttctttctttctctgtgtgtcgtaatggctctcccagactcttcttcccgtcgcaactccctgatcccctccttcatctactcctcttcctccaaaacgctccc

SEQ ID NO: 161638 - DNA, 235 bp, Glycine max
cttggaggcttcatccttccaaaacgtgaaattcctgattggtgggtgtgggcttactgggtgtcaccattgacatacggctttaatgccttgtctgtgaatgaaatgttagctccaaggtggatgcatccacagacttcttctgataaaaataccacattgggtctatcagtactaaggaactttgatgtttatgctaaaaaagattggtactggattggagctgctgctcttc

SEQ ID NO: 161639 - DNA, 235 bp, Glycine max
ttcgaatagattatcctaagtctttgggaatagtgctgcaatggcttcaagtcaggaggaggtgacccttttgggagctactggaagcccatttgtgtgcagggttcatattgccctcaagttgaagggagttcaatacaaatatgtcgaagaaaatttgaggaacaagagtgaactgcttctcaaatccaacccagttcacaagaaggttccagtgtttattcacaatgagaag

SEQ ID NO: 161640 - DNA, 248 bp, Glycine max
ctgttattttgatagcaaaggtttcttgtatgttgtagataggttgaaagagttgattaaatacaagggctaccaggttgctccggcagagctagaagagttactcctatctcattcagagataaatgatgctgcagttattccataccctgatgaagtagcaggccaagtgcccatggcgtttgtggtgagacaacctcaaagttcccttggcgcacagaagttattgattttgttgccaaacaggt

SEQ ID NO: 161641 - DNA, 236 bp, Glycine max
tttctgcaccgtatggagaagaagacaaagggtgtctgagttggctaaacttgcaaccgagtcagagcgtcgtgttgctgtgtttcggaagcatgggaaggttctcgagggctcagttgaaggagatagctattgggttggagaagagtgagcaaaggttcttgtgggttgtgagaaccgagttgggtggtgctgatgactcggcggaggaactgagtctggacgagttgctgcca

SEQ ID NO: 161642 - DNA, 234 bp, Glycine max
cacagatctgtcttccgaagcaggaactaaatatggctgacttgttggaatggtcaaagcaagataagaaacgaatgcttcatgtcgtctaccgtgttggtgaccttgatcgcaccatcaaattttacacagaatgtttaggaatgaagcttttgaggcaaagagatatcccagaggagaaatatgctaatgcttttcttggatttggccctgaagaatcccattttgttgttg

SEQ ID NO: 161643 - DNA, 233 bp, Glycine max
ccccatacacctacaatctaagaaacacaggccctgatgatgtttacattaaagttcactactgtggaatttgccattctgatctccaccagattaaaaatgatcttggcatgtccaactatcccatggtcccaggacatgaagtggttggtgaggtactggaggtgggatcaaacgttagcaggttcagagtgggagagttggtgggagttggactcctcgtaggttgctgc

SEQ ID NO: 161644 - DNA, 246 bp, Glycine max
cgcaatcagacacttgtcttctgcagctaaagagattactgtcacggaggctctgaactccgcactcgatgaggaaatgtcagctgatcctaaagtgttcttgatgggtgaataggttcgggaatatcacggtgcatacaaggttggttgcttccttagttgctttacttgtcttgccaccctctcctcttaagaacttcattaacttaactttcattttagatatccaaggggctgctcgacaag

SEQ ID NO: 161645 - DNA, 240 bp, Glycine max
gtctcaaatctcttcgttccttcgattcgttccatttcttccaaaatggccaaagacccagttcgcgttctcgtcactggagctgcagggcaaattgggtatgctcttgtccctatgattgctaggggagtgatgttgggtcctgaccagcccgtgatcctccacatgcttgacattcctccggcagcagagtcattgaatggggttaaaatggaattggtggatgctgcattccctctt

SEQ ID NO: 161646 - DNA, 238 bp, Glycine max
aaagacaatacttttcgtcaagatagtggttttttaggtgagagaatcaaagggggtctgaattacagtccctggatcattaaccaattggcctcaagtttgagaacccaagagagggtgaagaaggccaaacctggtgttgtttctgctgttcttacatcaagtaacaccaaagaatcagtggcttttcaaatgccatcgtttctcagaagaaaggctgatccaaaaaatgttgttt

SEQ ID NO: 161647 - DNA, 232 bp, Glycine max
gcttcatcttgataaatacacaggtactggcttccaatcaaaagggtcctacttgtttggtcacttcagcatgtacataaaattggttgctggtgattcagctggcacagtcactgctttctatttatcatccacaaactcagaacatgatgaaatagactttgagttcttgggaaacagaaccgggcaaccttatattttgcaaacaaatgtgttcaccggtggcaagggt

SEQ ID NO: 161648 - DNA, 231 bp, Glycine max
aattagttcattctctttgcgcagttccctacctctcctttcaagatgcagatcttcgtcaagaccctcaccggaaagaccatcacccttgaggtggaaagctctgacaccatcgacaacgtcaaggccaagatccaggacaaggaaggaattcccccggatcagcaacgtctcatcttcgccggaaagcagctcgaggacggccgtaccctcgccgactacaacatccag

SEQ ID NO: 161649 - DNA, 247 bp, Glycine max
gaaagaaactgttgaatcgcgtcgattaaggttttgagatttctaggctttcatctcagacagtgaaaaaatgatagatataagtacacttaatgctgcacagattactgtgctgggatctgccttttgtgctatgctttccatgcatttcacgtcgcagttactgtctcagcatctcttttattggaagaatccgatagagcaaaaggctattatcattatcatcctcagggttccaatctatgca

SEQ ID NO: 161650 - DNA, 246 bp, Glycine max
ccatatttgctttagctttgttcactcttttgcttataggaagttctttagctcaactctctgagaacttctatgatagtaaatgtcccaaggttttctatgccgtaaaatccgttcttcaatctgctttgtctaaagaacctcgccagggagcatctatcgttcgcctcttctttcatgactgctttgtcaatggttgtgatggatcagtactacttgatggcccttcctcagagaagactgcac

SEQ ID NO: 161651 - DNA, 243 bp, Glycine max
caaatgacgaagcttggaacctctctattggttccttctgttcacgagctagctaagcaacccatgaccaaagttccagaacgatatgttcgtctaaaccaagatcctgttgtatctgacacaatctctctaccacaagtcccagtcattgatctgaacaaattgttttctgaagatggaactgaggtagagaagctaaaccaagcatgcaaagaatggggtttcttccagcttataaatcat

SEQ ID NO: 161652 - DNA, 223 bp, Glycine max
cttttcaacagttgacaagcctaaactccttagtcagttaacagcaatacttggtgagatgggactgaatattcaagaagctcatgcattttccactactgatggattttctctggatgtgtttgttgttgagggatggcctaatgaggaaactgaggagctgaaaagtgtgttggaaaaggaaattaacgaggttgaggagcgaaatatgtcaaatcagggt

SEQ ID NO: 161653 - DNA, 238 bp, Glycine max
catctttctctggttctgttgttgcctaagaatgggaggaaattccagtttcagggatgaatataccttcgaacaaaggcttggagaatcgcgggatattgtggccatgtaccccgatcgagtccccgtgattgtggaaagatatgcgaaatgcgatctgcctgagttggagaagaaaaaataccttgttcctcgagacttgtctgttgggcatttcattcatattttgagttccaga

SEQ ID NO: 161654 - DNA, 237 bp, Glycine max
ccgacttcggcctcagcactttctccgagcagctccggcacgacggcctgctgcacactacgtgcggcacgccggcctatgtcgcgcccgaggtgattgggaaaagaggctacgacggcgccaaggccgatatttggtcttgtggcgtaatcctctacgtacttcttgctggatttttacccttccaggatgacaacctggtggccttgtacaagaaaatttaccgcggtgacttca

SEQ ID NO: 161655 - DNA, 235 bp, Glycine max
cagatttcaaagcagctgtagcaagggctggccatcctgaatgggaactgccagatgacgcaggcaagtacaatgatgtcccagaatctactggattcttcaaatcaaatggcacgtatgtcactgagaaagggaagttcttcttgacctggtattctaacaaattgctgaatcatggtgatcaaatactagatgaagccaacaaagctttcctgggctgtaaagtcaaattagc

SEQ ID NO: 161656 - DNA, 232 bp, Glycine max
ctatgcttcccagattactgccaaacccaggcttcttgagcctgtctacctggttgaaatacaggctcctgaacaagctcttggtggaatctacagtgttcttaaccagaagcgtggacacgtgttcgaggaaatgcagaggccaggtaccccactatacaacatcaaggcatacctccctgtcatcgagtcctttggtttctcgagcacattgagggctgcaacatcaggc

SEQ ID NO: 161657 - DNA, 230 bp, Glycine max
agaaagtcttttgcttttgattctgatgcccctggtgctggcatgactgagaaaagaaaagtcttcgagatggctctgagcacagcagatgccacattccaaaatcttgattcatcagaaatttccctcactgacgtcagtcattactttgactcagacccgactaatctggtacaaaatctaaggaaagatgggaagaagcctagtgcatacattgctgatacaaccac

SEQ ID NO: 161658 - DNA, 269 bp, Glycine max
gtcagctcggtcttcggctcgcgcgacaccaccgcggcttacacatagtacttttggtcgaaaaatcgatctgatttttttcgtacttttcgctcaatgatgacatgggtcagattctacaggaccaaaccaagtgggcgttccggcgtgatggtagcctcgccctgaagcgccgtaaataaaaatgcagtagccgagtcctgattccaaacgagaaaattcaaacttgattgaaaaggatctttctgattattgaagaatgggacaaa

SEQ ID NO: 161659 - DNA, 235 bp, Glycine max
tgaagaagtgaggggtgttctttgttggtgaatacacccactcacgcgttcgtggttgcaggctctaatcagatcccaaatgatcaactttgtgcttctcattagtcgccaagggaaggtgagactgacaaaatggtactcaccttattctcagaaagaaaggagtaaggtaatccgtgagctcagtggaatgattctttcccgtgctcccaagcaatgtaattttgtagaatgg

SEQ ID NO: 161660 - DNA, 234 bp, Glycine max
gggaagaggaaccctagctagggtttggaagaagctgatccgagaagatggtgcagcgtctcacctaccgcaaacgccacagctatgctaccaaatccaaccagcacagagtcgtcaagactcccggtggcaagcttgtttatcagaccacgaagaagagggccagcggacccaagtgccctgtcactggaaagaggattcaagggattccacatttaaggccagcagagtata

SEQ ID NO: 161661 - DNA, 231 bp, Glycine max
gcgcagaacgccttggccgcggcctccaggcctcgcccctcggcctctaaccccttcggtgatgctttctctgggcctgagatgtgggcccgtctcaccgcagaccccaccactagggcttacctccaacagcctgatttcgtgaagatgatgcaggatatccagagagatcctaataacctcaacttgcacttgaaggaccagagaatcatgcaggccctaggagttttg

SEQ ID NO: 161662 - DNA, 242 bp, Glycine max
  unsure (1)..(242): unsure at all n locations
gaaccgtcgagctcgctggaagaccaagacgctggagaaggattacgaggctctgcatgcaagttttnagaatcttaagtccaactatgacagcctcctcaaggagaaagacaacttaaaagctgaggtggcgagcctcaatgagaaggtgcttgcaagagggaaacaagaggggcacatgaagcagcaggctgaaagtgaagaagaaacaaaaagattattgcatttgcaggaacaggaac

SEQ ID NO: 161663 - DNA, 235 bp, Glycine max
ctctttctctagtcctgttatttctcagcgcgtaaagcatggctttgttggtggagaaaaccacgagtggtcgcgagtacaaggtcaaggacctttcccaggccgacttcggccgcctcgagatcgagctggccgaggttgagatgcccggcctcatggcctgtcggaccgagttcggcccctcccagcccttcaagggggcccgcatcaccggctccctccacatgaccatcca

SEQ ID NO: 161664 - DNA, 217 bp, Glycine max
cattaacatatacaaattctctgtgttgtgttgtgtacttgtgttaattgtgttgttgttgtaggaaatttaagtgaagagagaatgatgatgaagtctgctatgtgtgcattggtgcttgtggcactggttgtggttgaagtggggcccatggctgaggctgcggtgacttgcaacccaacacagttgactccttgtcttccggcaattaattcag

SEQ ID NO: 161665 - DNA, 265 bp, Glycine max
agcaaagatgacaggtgggatgtttggaaggaaggggcaaaagataaaggggacagtggtgttgatgccaaagaatgtgttggacttcaacgccataacctccgtcggaaaaggcagtgctaaggacaccgccaccgatttcttgggcaaaggcttggacgcattaggtcatgcagttgatgctctcactgccttcgctggccatagcatctccttgcagcttatcagtgctactcagactgatggtagtggaaaaggaaaagtt

SEQ ID NO: 161666 - DNA, 266 bp, Glycine max
cggctcgaggcaaatttgcaatctctctctctctctctctctctatcccctttctgccgacgattttgtttgtcccctttggatcagttcgtgcccttgttgttggtttgtagcttttgctgaaatccagcaataatgaagaaggttattggtcaaactgttagggaccttaaaagagaagtaaataagaaagtgctgaaagttcctgggattgaacagaaggttcttgatgctaccagcaatgaaccatggggtcctcatggatc

SEQ ID NO: 161667 - DNA, 256 bp, Glycine max
acaatacaacactgccatggctgcctcagtctccactattggagctgtcaacagagctccactgagcttgaacagctctgaagctggagattcggttcccagttcagccttctttggcacaagcttgaagaaggttactgcctcaagggtccctaacgtcaagatttcttctggaagtttcaaaatcgttgcggcggagaaagagattgatgagcaacaacagacaaacaaggacagatggaaaggtcttgcctat

SEQ ID NO: 161668 - DNA, 254 bp, Glycine max
gtgggatcccgaggatttgcctgggcaatctatattgaaaacgggagataggcaatggttctttttctgtcacagagataggaaatatcctaatggtggaaggtctaaccgagcaaccagacgtgggtattggaaagcaacaggaaaggatcgtaacgtgatatgcaattctaggtcagttggagtgaaaaagaccctggttttctacgcaggcagagctcccagtggtgagcggactgattgggttatgcatg

SEQ ID NO: 161669 - DNA, 252 bp, Glycine max
gatgatttcagtgacatataaaaacaacaacaactactatataattagggaaatagcgaccttaaagctcctacggcatcccaacgttgttagattatatgaggtcttggctagcaaaacaaaaatttatatggtacttgagtacgtgaatggaggggagttatttgacataattgcatccaaaggtaaacacatcgaaggtgaaggtagaaagctgttccaacagttaattgatggggtgagctactgcca

SEQ ID NO: 161670 - DNA, 254 bp, Glycine max
cttcatggcctgagaatgggacaatccaattaattgatctgaaggtacgttacaaggaaaatcttcccgtggtgcttcacggagtatcctgcacatttcctggtgggaagaagattggaatagttggtcgtactggcagtggcaaatctaccttgattcaagcattatttcgattggttgaaccggaggcagggagtatccttatagacaacattaatatttcatcaattggtcttcatgatcttagaagtcat

SEQ ID NO: 161671 - DNA, 251 bp, Glycine max
aggctactttggctcctttaattggatcctctattcagtcagctactggggtagtgtataatattactggaggaaaggacataaccctgcaggaagtgaacagggtttctcaggttgtgactagtttggctgatccttctgctaatattatatttggggctgtcgttgatgatcgctacactggggagattcacgtgactatcattgcaactggcttctcacagtcttttcagaagaagttgctaacagat

SEQ ID NO: 161672 - DNA, 254 bp, Glycine max
ctgaatgtcgtcactgcatatgggtttgatttggtccgtggaacccatactcttgatttgatcaagggtggatttcccagtggaaaatacctctttgctggagtggttgatggaaggaacatctgggccaatgaccttgctgcttctctcactacattgcagggtcttgagggcattgtgggcaaagataagcttgttgtgtccacctcctcctcccttcttcacactgctgttgatcttgttaacgagaccaa

SEQ ID NO: 161673 - DNA, 256 bp, Glycine max
cacagagaaccagtctcctactctctctcacccacaagaaaaatggcatctcacatcgttggatacccccgcatgggtcccaagagagagctcaagttcgctctcgagtctttctgggatggcaagagcagcgccgaggatttgcagaaggtggctgctgatctcaggtcatccatctggaagcagatggctggtgctgggatcaagtacatccccagcaacactttctcgttctatgaccagctgctcgacgcca

SEQ ID NO: 161674 - DNA, 258 bp, Glycine max
cgagcaggatcatggatcatcgtcattggcgcttcttcattatgcttttcattaccgcagcagcaataggacttgtttcgtcgttagggataaactacggccaaatagcgaacaatcttccttcacaagacgacgccgttgcgttggtgaaatccatcggagcgacgaaggtgaagctctacgacgcagatccacgcgttttgaaagcgttcgcgaacaccggagtggaattaatggtaggtctgggaacgagtactt

SEQ ID NO: 161675 - DNA, 257 bp, Glycine max
cacaaacacatacattgtagtatcacttttgtctcggaatttgttcttttgagttatggcaagcttaaaggttgcatgtgtggttttgatgtgcatggctgtgatgagtgcaccaatgatggtgcaagccgtgtcatgcaatgatgtttctgtgaacctagcaccgtgcctatcttacctgatgcagggtggagatgttccagaatcgtgctgtagcggagtgaggaacattctgggttctgccagcaccacctttg

SEQ ID NO: 161676 - DNA, 252 bp, Glycine max
aacgtattcagccaagggaaagggaacagagaacaacagttccatctatggttcgaccccaccaaggacttccacacatactccgtcctatggaatcctgcaagcatcatattctctgtggatgggacaccaataagggagttcaagaatttggagacaaaaggggttcctttcccaaagaaccaacccatgagaatatactctagcctttggaacgctgaggattgggccacaaggggtgggcttgtgaaa

SEQ ID NO: 161677 - DNA, 253 bp, Glycine max
caactgcgcggtgagtgagtgagagacggaaagtgcaaagccaccgtcttctcttctcagagcttggctttgcttatcgattctctctcctctcatctttctcattcaaggtttgtaaaagatggccgatgctgaggatattcaaccccttgtttgtgacaatggaactggaatggtcaaggctggatttgctggtgatgatgctcccagggctgtctttcccagtatttggccgacctcgacacactggtgt

SEQ ID NO: 161678 - DNA, 253 bp, Glycine max
ttccttttcttttcttcaaatcaaggagctcagctatgactaccagagaaatccttcaaaagatgaaggtaaaagttggtttgggttcatcagaccctgattcagggaaaggaaagagcaagatgtcaaagaacataactcatggctttcatttggtgaaaggaaaatcatatcatgacatggaggattacgttgtggctcaatttaggcaaatagataacaatgaattgggtttgtttgcaatatttgacgg

SEQ ID NO: 161679 - DNA, 254 bp, Glycine max
cttggctattcgagaaacccgaatcaaggctgcgcctgtgcatgcatcagcccattggtatctggagaatgttttgcctgttctacagagttatggtattgctgcaatctctccattttctcacagactgagttttgacaacttgcctatggatattcaacacctacgctgtaaagtcaacttccaagctttaacctttgttcctcatatcagagcacttggagatgcccttatcagccgccttcgctatcctg

SEQ ID NO: 161680 - DNA, 257 bp, Glycine max
atacaaccaaaccctaacacacacccatttgattcagtttccatggctagcctcaaggttgcatttttggctgcagtgctctgcatggttgtggtgagtgcacccatggcacatgcagctatcacgtgcgggcaggtgacgaatagcctgatcaattgcatcggttacctccagaacggaggaacgccgccgtcgggatgctgcaacggagtgaagagcctcaatgccgccgccaagaccaccgccgaccgccagac

SEQ ID NO: 161681 - DNA, 254 bp, Glycine max
caaagagacaattcaacttaagagatcaatatggccaccaccactacccagcctccctctaatatctgttttttccttctgttgttgcttctagcacactttcatttgggcataagccaacttgagctgaattactactctaaaagctgcccaaaagctgaagagatcatcaaggaacaagtcacacaactatataacaagcatggaaacactgccgtttcgtgggtcagaaatctcttccacgattgcgtggt

SEQ ID NO: 161682 - DNA, 251 bp, Glycine max
gttgcgttttaggcctaccagacaaagactatggagagattgttagtgcaatcgttgtgccagaggccgatgttaaacgaaaacaagatcaagaatcaaagcctgttctaagcctagaagaattatccaactgggccaaagacaaaattgcaccttacaagattccaactcagctaatcgtgtgggataaactccctcgcaatgccatggggaaggtaaataaaaaagagctgaagaagctgcttgtttca

SEQ ID NO: 161683 - DNA, 251 bp, Glycine max
cccaattcttccccctccacccacccagcatatctctctattcctctttattagcacccctcacattaccttgtgtcaccaactactttgactcctttaccataccattacaataattatcaaacctaaccagtaaaaatggtgaccgtggaggaaatccgcaacgctcagcgttcccatggacccgccaccatcttggccttcggcaccgccacgccgtccaactgcgtctcccaagccgattaccctga

SEQ ID NO: 161684 - DNA, 250 bp, Glycine max
gccttttgtctctgtgttttcacatcgacaattctttacagatgaagagatgtcaagggaacttcttacttcccaaacagatcttcctacatctatatataaacactggtttatcaagaatacgcaagaaaagcattttgaattgttgattcattgccagagatggcttagaatcaatagttcattatctaatggatttttccgttctaatactctatctgagagttatcaatatttatcaaatctgttc

SEQ ID NO: 161685 - DNA, 249 bp, Glycine max
ctcggaggaatgggttgcagcgccgggatcattggtgtggacctggccaaggacattcttcaggcgaacccaaataactacgcggtggtggtgagcacggagatggtggggtacaactggtaccaggggaaggataggtctatgcttatcccgaatagcttcttccgcatggggtgttccgcggttctgctttccaaccgtcgaagggactatagccgcgcaaagtaccgccttgaacacattgttcgc

SEQ ID NO: 161686 - DNA, 251 bp, Glycine max
atttcgtatctcactaaccgcgctgctgtctatttggaaatgggacagtatgaggaatgcataaaagattgtgacaaggctgttgaaagaggaagagaactaagatcagattttaagatgatagcaagagctttgacaaggaaaggaaatgccttggtgaaaatggcgaagtgctcgaaggattacgagtctgccattgagacttatcagaaagcactcactgagcaccgcaaccctgacactttgaagaa

SEQ ID NO: 161687 - DNA, 255 bp, Glycine max
caacttttaggttccgtttctgaagacttaggcttgatccaataccttcgccacatcgatctctccaacaatttccttaatggctctctacccaacactatcttcaactcttctcaacttcaagtactttccctctcaaacaatgttatctcaggcaaactacctgagctaattggcaaaatgacaaaccttaaacttctcaacctctctgacaatgccttttccggtttgatcccagaaaacctctctactcta

SEQ ID NO: 161688 - DNA, 254 bp, Glycine max
gagcaattgtggtttcacagaacgtgatcttatcaactatggcggagaaacacaacatcaagaacccagccgtgaagcggattctccaggaggtcaaggagatgcaatcaaacccttccgatgactacatgagcctccctcttgaggaaaatatatttgaatggcaatttgcgatcagggggcctcgtgatactgaatttgaaggtggtatttatcacggacggattcagctgccttcagaatatcccttcaaa

SEQ ID NO: 161689 - DNA, 254 bp, Glycine max
cggctcgagagaagatgctcatgaatttttgaggtgcgtggttgatacaatgcaatctatttgcctcaaggaagttggtgtttcaagtcctttggcagaagaaacaactctagttagttacacctttggaggttatcttcgatctaagataaagtgcttaagatgcctggggaaatctgagaggtacgagagaatgatggatcttactgttgaaattgatggggatattgggactttggaggaagctcttggac

SEQ ID NO: 161690 - DNA, 252 bp, Glycine max
gatcgagataactagaaacagtgtgatgaaaatgaaggtccttgttttcttcgttgctacaattttggtagcatggcaatgccatgcgtacgatatgttccctctccgaatgaacactggctatggtgcccgtactccggaggtgaaatgcgcaagttggaggcttgctgtggaagcacacaacatctttggctttgagaccattcctgaagagtgcgttgaagcaacaaaggaatacatccatggcgaaca

SEQ ID NO: 161691 - DNA, 250 bp, Glycine max
ggattatttcagtggcgtgaaacttccagaagaactcaaagtcactcctcttctgcttgccctctttcgcttcctgcaaatctttctgagaatcgagtcacagactagagctaaatcagcatagagatacaaaaatgccaaaagtaaagacaaatcgtgttaaatacccagagggctgggaattaattgagcctacactccgtgaacttcaagcaaagatgagggaagctgagaatgatccgcatgatgg

SEQ ID NO: 161692 - DNA, 249 bp, Glycine max
aacgcgcgttcgttccaataatgtctgaccccgctgccgaagaggctgctttcatcgagaagctctacgaatacggcgagcagctcaacaatgccaaggacaagtcgcagaatgtgcaggattaccagggaatcatagatgcggcgaagacgagtgtgaaggcgaacagctcgccgcgcactgattcccaagttcttcaagttcttccctgacctctcgagccctgctctcgacacgcatcttgatttg

SEQ ID NO: 161693 - DNA, 253 bp, Glycine max
atcagactagagagagtaagagtaagagaagagatggaaagagtagcatcagtatctcggccactgaaaatatacttcctcccattcttctcaccggggcacctaatccctctggtccagctggctcgcttggtggcggcacgaggccagcacgtgaccatcatcaccacccccgccaacgctcaactcttcgaccagaacatcgacaaggacaccgcctccggccaccacatccgcgtccacatcatcaagt

SEQ ID NO: 161694 - DNA, 245 bp, Glycine max
ctccctcagaagcgaagaagaagccacagagaactagtctcctactctcacccgcaagaaaaaaatggcatctcacatcgttggatacccccgtatgggtcccaagagagagctcaagttcgctctcgagtctttctgggatggcaagagcagcgccgaggatttgcagaaggtgtcttctgatctcagggcatccatctggaagcagatggctgatgctgggatcaagtacatccccagcaaca

SEQ ID NO: 161695 - DNA, 245 bp, Glycine max
gtgtgcaccattgtcgccttgcgtgcgccggttgcgcaccccctatcttgcgcatccccaatcacctcatcgaaactactaacaccttcacaatcgttcaccagccctacagaacccagatctcgggttccaatcgtcgagccatgtccaaggcacgcgtctacaccgatgtcaatgttcttcgccccaaagagtactgggattacgagtccctcaccgttcaatggggtgatcaagatgattat

SEQ ID NO: 161696 - DNA, 239 bp, Glycine max
gttggaccaagtgtctgctatgccactggacacatataagggacatggtttccgaactgaccttgttgaaatgctgacagctttgaaaccaagatttatcagatttccgggcggttgttttgttgaaggagaatggttaagaaatgcatttcgatggaaagcatctgttggaccatgggaggagagacctgggcactttggtgatgtttggatgtactggactgatgatggacttggct

SEQ ID NO: 161697 - DNA, 242 bp, Glycine max
ctttcctcttaagtggcacattgttaaggatgttcctaacaatatgttgaggcacattaccttggacaacaatgagaacaaacctgtcactaacagtagggatacacaagaggttatgttggagcctgggctgaaattaattaaaattttcaaggaatataccagcaagacatgcattttggatgattttggcttctatgaggctcgtcagaaaactattttggagaagaaagcaaagcaac

SEQ ID NO: 161698 - DNA, 248 bp, Glycine max
catcaaactcatcaaaatgaatctgtaccactcctccaccaccaccaccaccaccaccatcttcaccgtcatattcctcctccttgcaatattattcactctcacaccccacaaggccaacggtgccacgtgtcaccctgaggaagaagcgggcctgttgggcttcaaatccggtatccgatccgacccgtccggcctgctcagtaactggatatcgggtacggactgctgcacatggaccggagtag

SEQ ID NO: 161699 - DNA, 245 bp, Glycine max
gcctaaggtcccatctgggagttacaacatagctcaggtaacatatgaattaaatgtgcttgggactcgaggaccaagaaagatgcactgcgttatgcattcaataccagcttcagcactagatgcaggtggcactgttcctggccagccagagcttcttccccgttccctggaggactcgtttcggagcatctcgttttcaaagtctctagatcattctattgagttcagcagttcgcgatttt

SEQ ID NO: 161700 - DNA, 237 bp, Glycine max
gatcaacgtctactacaatgaggcctccggcggaaggtacgttccccgggccgtcctcatggatctggagcccggcaccatggacagcatcagatccggcccatacggcaagatcttcaggcccgacaacttcgtctttggccagtccggcgccggcaacaattgggccaagggccactacaccgaagtgccgagttgatcgattccgtcctcgacgtcgttcgcaaagaggccgag

SEQ ID NO: 161701 - DNA, 244 bp, Glycine max
cttttgtttgttcttcagtactttagtgtgtgatttaattccaagattttgagaatgtctagctgtgggtgtggaagtagctgcaactgtggcagcaactgcggttgcaacaagtactcttttgacttgagctatgttgagaagacaaccacagagactcttgttttgggtgttgggtctgtgaaggcccaattggagggtgctgaaatgggtgttgcagctgagaacggtggctgcaactgtg

SEQ ID NO: 161702 - DNA, 245 bp, Glycine max
gtgcaaaagagcgtcgtagtcgcaaccctaatcagaagaagcgcagtatcaagcgagtgacagccaccagccatgggtcgtatgcacagccgcggtaagggtatatcctcttctgctttgccctacaaaaggacacctcctagctggctcaagatctcttcgcaagatgtcgaagaaaatatctgcaagtttgcgaagaaaggtttgaccccgtctcagattggtgtcattctcagagattctca

SEQ ID NO: 161703 - DNA, 243 bp, Glycine max
gactgagaagcgtgggatagcttttgatcaattacttacaattcctgaacaagatgaatgtgtatacagtgatgggaaatcaacaacatgtgttgcctttattctttcaatgtataaagcggctggaatattcggccctatttctagctccattcaagtaactgaattcacaattcgtgatgcatacatgcttaggatttttgaggataaccaaacacgtctaccaagatggtgcaacaatga

SEQ ID NO: 161704 - DNA, 248 bp, Glycine max
caaagttgttgaacttcaagaagagcttgatattgatgttcttgttcatggagaaccagagagaaatgatatggttgagtacttcggtgagcaattgtcaggctttgccttcactgttaatgggtgggtgcaatcctatggttcccgttgtgtgaagccaccaatcatctatggtgatgtgagccgcccaaagccaatgactgtcttctggtcatctctggctcagagctttaccaagcgcccaatga

SEQ ID NO: 161705 - DNA, 171 bp, Glycine max
gtaaactagacccgcaaatctatggtccacaggaatcaacaacaactagggaagtcattgagccacaaactatcacttatggaacaactgaagaggcccttaaagaaaagaagttgttcatgctggactaccatgatttattcttaccatatgtaagcaaagtgagaaaaa

SEQ ID NO: 161706 - DNA, 290 bp, Glycine max
gaaaagtgaagttcaatatagtctctggcacctcaatgtcatgccctcatgtgagtggcatagcagctttggtcaagtctaggcaccctgagtggagtcctgctgctataaaatctgctttgatgacaacagcttatgttcttgacaacaccaagaaaactctcagagatgcctcaactgctaaaccatcaagtccttatgatcatggtgctggacacattgaccctattagagctcttgaccctggtttggtctatgacattgtgccacaggactactttgaatttcta

SEQ ID NO: 161707 - DNA, 283 bp, Glycine max
actgaacaacgaggtccaccactgagacgtttgcagaagaagtgaatgcagcattcagagagagtgcagacaatgagctccagggaatcctctctgtgtgtgatgagccacttgtgtctgttgacttcaggtgcactgatgtgtcctcaaccgttgactcatcgttgaccatggtcatgggagatgacatggttaaggtgattgcttggtatgacaatgagtggggctactcccaaagggttgtggatttggctgacattgttgccaacaagtggaagtgaga

SEQ ID NO: 161708 - DNA, 195 bp, Glycine max
ctattctcaaactttaaatacacacgacggcacggctgctatgccaagccgcgccatggaatcgagagctccaagtgggccatttttggtaagcagaactggcgatgcgggatgaaccggaagctgggttacagtgcccaactgcgcactaacctagaccccacaaagggtgttggtcgattaagacagcaggac

SEQ ID NO: 161709 - DNA, 287 bp, Glycine max
cacctcttctcttctcccagaatcggtgtaggttacaggtttaagggttttgttttcatttaggtcactaatccgatatcatgaagcccgatacgactagtctcgaatcgtttcccacactgattgcacctaaaaacgacgtcgccggagaactctccgccgctccgttctttgaccttccgaattccaatgacttcgatgggttcttgaaagacgctattcagatggtgaagcccgcgaagggcactacaactcttgcttccacacctaaagagggtgttatggta

SEQ ID NO: 161710 - DNA, 285 bp, Glycine max
agagtccgagaggcatcatggcgacactggattccgacgtgaccgtgtttccggccggcgaagctccagcagcgccggtccttcttcgtccaccaagaagccgaagcgtttcgagatcaagaagtggaatgcggtttccctctgggcttgggacattgtcgtggacaattgcgctatttgacggaaccatatcatggatctctgtactgagtgccaggccaacaaggctagcgccactagcgacgaatgcactgtagcttggggagtttgtaaccatgcttttca

SEQ ID NO: 161711 - DNA, 286 bp, Glycine max
cttgggtacaggggcgaaagactaatcgaaccgtctagtagctggttccctccgaagtttccctcaggatagctggagcccgcgggcgagttctatcgggtaaagccaatgattagaggcatcgggggcgcaacgccctcgacctattctcaaactttaaataggtaggacggtgcggctgctctgttgagccgcgccatggaatcgagagctccaagtgggccacttttggtaagcagaactggcgatgcgggatgaaccggaagctgggttacggtgcccaact

SEQ ID NO: 161712 - DNA, 292 bp, Glycine max
aatcaaataagccaacattaccagagaagtcagagggatatatccaggtctttcttgatggaggtttgaaccaacaaaagatggggatatgtgatgcagttgctgttgcaaagacactgaatgctactctggtgatcccataccttgaactgaatcctgtatggcgagattcaagctccttcatggatatacttgatgtggatcatttcattgatgtattgaaggatgatatttctacagttaaagagttgcccaaagagttcgcctggagcacaagggagtattatggctt

SEQ ID NO: 161713 - DNA, 289 bp, Glycine max
aggctcgagtgttagattagaagccggtttgtgatgttgcacttcactttttgcaggctggattccgattccaccatgctgaaccagattaccttgatgctcgtgaattggattcccaatacctcccgatacacttcctgcaaatgcttcgcaccgcgttgctgttggtgcttttgtcatgaatgccaatagggaggtgcttgtggttcaggagagcaatggcaggtttagtggccaaggaatctggaagttgcctaccggaggcgttgatgaaggtgaagatatttgt

SEQ ID NO: 161714 - DNA, 285 bp, Glycine max
aaaaatactaagatgacaaacattggagcacttgttgtactctttgcatttctcttcctcagttgtgcctatgcacaagacacaacaacccttgtgcctgcaatcataacttttggtgactcagccgtggatgtagggaataatgactatcttcccacccttttcaaggctgattaccctccttatgggagggactttgctaaccaccaacctactgggaggttttgcaatggcaaattagctactgattttactgctgacactttgggttttaagacctatgct

SEQ ID NO: 161715 - DNA, 283 bp, Glycine max
actacatcagtgatttctcctgatgtttcatatgcaagcagctcagcaacaacaaatgagatatatgaggttggagagttgtttgatttaagcatccaactaatatacttggtattgctattaggtttgctagggactggaactttctttgtgattagtcaagttcttgtccgcagagaacttgacctatctgccaaagagttgcaggagcaagtaagaagtggtgatgctggtgcaactgagctttttgaacttggtgcagtgatgctgcgcaggaaatttt

SEQ ID NO: 161716 - DNA, 277 bp, Glycine max
catttgctactatgggctctcttcatgacatattgcacggtagaaagggagttcaaggtgctcaacctgggccaactcttgattggatacagcgagttagaattgcagttgatgcagcaaggggattggaatatttacatgagaaagttcaaccgccgattatacacagagatatccgatcaaataatgtgctaatatttgaagatcacaaggccaagatagctgactttaacctttctaatcaggcccctgacatggctgcacgtcttcattcaac

SEQ ID NO: 161717 - DNA, 283 bp, Glycine max
aaaatgggttcttctttgtggactttgtgtctaattttggcttcactagcctcttctgcattctgtgcctttccacggaggccagtggatgttccattcggcagaaactacgttcccacttgggcttttgatcacatcaaatacttcaatggaggttctgagactcaacttcatcttgacaagtacactggtactggcttccagtccaaagggtcatacttgtttggtcacttcagcatgaacataaagatggttcctggcgattcagctggcacagtcactg

SEQ ID NO: 161718 - DNA, 277 bp, Glycine max
atcaatgatgtggatgtgggggacatgcttcttgttgatggtggtatgatgtctttggtggttaagtctaagacagaggattctgtgaaatgtgaagttgttgatggaggagagctcaagtcaaggagacatttgaatgttagaggaaaaagtgcaacacttccttccatcactgagaaggattgggatgacatcaaatttggagtggataacaaagttgacttctatgctgtttcttttgttaaagatgcacaagtagttcatgaactgaagaatt

SEQ ID NO: 161719 - DNA, 280 bp, Glycine max
caccattctcacaaaacaactttcaaactctgagaaagaatggctgccaacacattgatgagtactgctatctcagccttcccatctctcctttcttcctcaaaatccagatttgccaccgcagttcctctttctagctttggtgtcaccaatgcctcttcttctcgctttcctatgagtgctgactggatgccaggccaccctagacgtccttaccttgatggttcagcacctggtgactttggattcgaccctcttcgtcttggtgaagtacaagaga

SEQ ID NO: 161720 - DNA, 270 bp, Glycine max
aaataaagcacagaatagttgaagtgaatggcataaaaacgcatgttgcagagaaaggagagggtccagtggtgttgttcctccacggcttccctgagctctggtactcatggcgccaccagattctctctctcagctccctcggctaccgcgccgtcgctcccgatctccgtggctaaggtgacaccgaggcaccaccttcaatcagcagctacaactgcttccacatagtgggtgactacgttgcgcttattgactctctgggtgtcc

SEQ ID NO: 161721 - DNA, 284 bp, Glycine max
tggaagggttatatcagttaaatggggtgattatacaaggcgaataggtattgatggcaccccagaagccattaaagaagcaattagggctgcttttaggttgagaactaaacgtacattttggttggaggatgaagatcagattatcagaagtattgaccgtgaaatgcctttaggaaattacactcttcacattgatgaaggaatggccattaaattacctctctatgatgagcctgaccatatacctgtgcatactgaagataagatattttacactgaag

SEQ ID NO: 161722 - DNA, 281 bp, Glycine max
gtgggaactcgaaccagtaggacatcataagagtccaattttgtgaaaattattaccattcattcttattcatcaacgtcaccccttctgtgcccacttccaaatcttctcctctcgctatgggttgtggctcctcccttccagatagggattcaaggcagttgggtcgacccaattccgagaatggtggagggcaggacgccaagaatctaagggtcaagcttgttctcttacgtgattctggcgttggcaaaagctgtattgttctacgatctgttcgc

SEQ ID NO: 161723 - DNA, 278 bp, Glycine max
aaggtcctcatgatcgtcatccctctccaggtcctcgccaacgttgcctccgtcgtcatcggcgaaaccggtcccttcatcaaggattgggttacttggaaccaggtcttcctgcttgttgacattatctgctgctgcgccatcattttccctattgtgtggtccatcaggtcgctcagggagacctccaagaccgacgggaaggcagccaggaacctggccaagttgaccctcttcaggcagttctacattgttgtcattgggtacttgtacttcac

SEQ ID NO: 161724 - DNA, 280 bp, Glycine max
gaggtcctttgcaaacatctgcaatgtagggacaaagaatgagcaaatggctgaggcctctgcacaagcttgtgtctctattccttccaatccttggagttctctgcaaaggggtttcagtgcataataattcctgtaatgtgcaccagtaaagaccaaagtatgattattgttacatctatgctatatgattgtacttgtacacacatattttgtcccgcctttgtaaatacaattgggacactactaggattgggaagaagggtctttacatttttag

SEQ ID NO: 161725 - DNA, 279 bp, Glycine max
gtcaaaaagagaccctgctgcacagttcctcatcatcttcagaagcaaggacacaattggattgcgatcccttgctgctggtggaaaattattgcagatcaatagaagaatggagtttgtatttgctagtcatagttttgatgtttgggagaactggactctagaaggttccttacaggaatgcagactggtgaactgtagaaacccatcagctgttttggatgtacgcgttgagattttggcaactgtaggcgaagatggagttactcgttggcttga

SEQ ID NO: 161726 - DNA, 276 bp, Glycine max
cacgattgtttcagtcgaaccatgaaggatgaaggggtgattgctctttggagaggaaacactgctaatgttatcagatacttccctactcaggctctcaactttgcttttaaggattatttcaagaggcttttcaatttcaaaaaggacaaagatgggtactggaaatggtttgctgggaatttagcatctggtggggctgctggggcttcctctctgttgtttgtctactctttggactatgcccgaacacgtttagcaaatgatgcaaaggct

SEQ ID NO: 161727 - DNA, 277 bp, Glycine max
atttccttttcaagagcttgtatggtttcacagtcttcttctcaatgggtgaactactgatttttgtcactcaggctcctgtaaattatgtttctctccgttgtgtaaaacctagtttgaggccactgtctatggctatatctactgtttcaatccatgtctttggtgatgtgccttcctcaccacttgttggggtcctgcaggatcacatcaacgactggaggaaaacagcactttgtttaacatccattttctttcttgctgctgtaatatggtt

SEQ ID NO: 161728 - DNA, 276 bp, Glycine max
accaaggtttacaaagaaggtggggtgggatgccaagctagtaaatgaatcacatccatgggttgagaagcaaattgtccaccgtccaaagttttcaccttatcagagagcatttagagacagtcttctagactctggtgtgtcaccctttaatggcttcacctatgatcatctctatggaacaaaggttggtggaaccattttcgacagatttggccgccgtcacacggctgctgaactgcttgcttcagggaaccatgacaaacttactgtttt

SEQ ID NO: 161729 - DNA, 277 bp, Glycine max
gtttgctactatgggctctcttcatgacatattgcacggtagaaacggagttcaaggtgctcaacctgggccaactcttgattggatacagcgagttagaattgcagttgatgcagcaaggggattggaatatttacatgagaaagttcaaccgccgattatacacagagatatccgatcaaacaatgtgctaacatttgaagattacaaggccaagatagctgactttaacctttctaatcaggcccctgacatggctgcacgtcttcattcaact

SEQ ID NO: 161730 - DNA, 279 bp, Glycine max
cagaatttgacaggtgtggctgggagccctgcatatgttgcaccagaagtgttgtagggtagatattctgagaaggtggacatatggagttctggggtgctcctgcatgctttgttggttggtggtcttccatttaaaggagattcaccggaagcagtttttgaggaaattaagaatgtcaaactagattttcaaacaggggtgtgggaatcaacatctaaacctgcacgagatcttgttgggagaatgctgacaacggatgtttcagcaacgatagca

SEQ ID NO: 161731 - DNA, 276 bp, Glycine max
gaaaaggcgtcttcataaacgccgcccaaaacttctcatacccttttattcattccattcgtttctagggttttcttttctttgccgagaaaatgagagagtgcatttcgatccacattggccaggccggtatccaggttggaaacgcctgctgggaactctattgccttgaacacggcattcagcccgatggacagatgccgagtgacaagaccgttggcggaggagacgacgccttcaacacatttttcagcgagaccggcgccggaaagcacg

SEQ ID NO: 161732 - DNA, 272 bp, Glycine max
cactccctcctttgctgaaaactaccgggttgtgctgtttgattggcccttttctggagctgtgaaggatccaagcctctatgaccctttgaagtatacctccttggaagcttttgcagatgagttgatcactcttatggatcagatggacctcaaagctgtcacctttgttggtcattccatgtctggcatgattggttgcttagcctccatcaagaggcctgaactctttaagaggcttattctccttggtgcttctcccaggtatatta

SEQ ID NO: 161733 - DNA, 273 bp, Glycine max
ggccgacgaagccaaagccacaggcaacgcagccttctcctccggggactatcctgccgccatccaccacttctccgatgccatcgccctggctccctccaaccatgtcctctattccaaccgatccgccgcatacgcctccctcaaaaactaccgcagatgcattagcggatgccaaaaagacagttgaactcaagcccgactggtccaagggttacagccgtctcggtgccgcgcatcttggcctttcccaatacgatgatgctattttgg

SEQ ID NO: 161734 - DNA, 270 bp, Glycine max
  unsure (1)..(270): unsure at all n locations
ccatggnaggaaatgatcaggctattgcaaacgaatgancccttgtggatgaaaggtgctgatgggagggatgtccttgatcttgattccnatganagaatgttccccaaggcnaatagtcacttgaagaaccccaatgttcatgctgaagcttcnagagattcaggagttgnaattatgaacggcttaactttggttganatgttnatggacccgaacaagtggatggagntatttcccaccattgtcacaatggctagaacaattgag

SEQ ID NO: 161735 - DNA, 274 bp, Glycine max
aaaatatcaggctcgtcaaaaaggacaaattgggatcactaatccaacacactactttttgccaaaatctcaaagtgctgcagattacaaggcagcaagtagagctctggacttcttccttggttggtattctgatccggttatctatggtgactatccggagagtatgaaatcttcagtaggttctaggctcccaaaattcacaaaagctgaatctgaaggtctaaaaaattccacagattttcttggtgtgaattactacaccacttattat

SEQ ID NO: 161736 - DNA, 269 bp, Glycine max
agcttacttcttcttcaccaaagacatcctccatgggaagaccatcgacgtctaccagacgccggaggggaagcaggtggcgcgtgactttacctacatcgacgacatcgtcaagggttgcctcggcgccctcgactccgcccagaagagcaccgggagcggcggcaagaagcggggccctgcccagctcagagtgtacaatctagggaacacgtcaccggtgccggtggggaccttggtgtccattctagaaggtttgctgaaaacca

SEQ ID NO: 161737 - DNA, 272 bp, Glycine max
acgctccctctacctcgctttctcccccgacgaggaaatcggtggccacgacggtgccgagaagttcgctgactcctctatcttccaaagtacgaacgttggcgttgttcttgacgaaggtctggcttctcccgacccccattaccggtctttctatgccgaaaggagtccctggtggttggtcatcaaggcctttggtgttcccggccatggcgccaagctttatgataactctgccatggagaatctctttaagagcattgaaagtatcc

SEQ ID NO: 161738 - DNA, 267 bp, Glycine max
gtggacctggccaaggacattcttcaggcgaacccaaataactacgcggtggtggtgagcacggagatggtggggtacaactggtaccaggggaaggataggtctatgcttatcccgaatagcttcttccgcatggggtgttccgcggttctgctttccaaccgtcgaagggactacagccgcgcaaagtaccgccttgaacacattgttcgcacgcataacggtgccgatgaccgcagcttcaggtgtgtgcaccaagaggaagat

SEQ ID NO: 161739 - DNA, 266 bp, Glycine max
ctcaagagaactctcaagggatacatcgcagccggattcgccggaatcattctcgaagatcaggtttctcctaaagcgtgtgggcacacgcgcgggaggcgagtggtttctcgagaagaggcggtgatgaagattaaggcggccgttgatgcgaggagagagagcggttccgacattgtgattgtggcgcgcagtgatgctcggcaagctgtgtcgttggaggaagcgcttgttaggtcaagggcctttgcggatgctggagctga

SEQ ID NO: 161740 - DNA, 265 bp, Glycine max
agacaattcaacttaagagatcaatatggccaccaccactacccagcctccctctaatatctgttttttccttctgttgttgcttctagcacactttcatttgggcataagccaacttgagctgaattactactctaaaagctgcccaaaagctgaagagatcatcaaggaacaagtcacacaactatataacaagcatggaaacactgccgtttcgtgggtcagaaatctcttccacgattgcgtggttaagtcatgcgatgca

SEQ ID NO: 161741 - DNA, 258 bp, Glycine max
aagttctactgggcaccaacaagggatgaccgcattggtgtctgcactggaatttttcgcaccgattcaattcctgaacatgacgttgtcaagattgttgacaccttccctggccaatccattgatttctttggtgcactgagggccagagtatatgatgacgaagtgaggaagtggatttctggtgttggtgttgacggcattgggaagaaacttgtgaactcaaaagatggacttccaaccgttgagcagcccaag

SEQ ID NO: 161742 - DNA, 261 bp, Glycine max
ggaagaagagctaaattcaattattgtggaaatgagaaggaattgcacttctttacaagagaaattggtgaaggaagaatccgaaaaaacagcagcagcagaatctcatcttaaagagagagaagctaggcttaactttgagaggtcacagagtacactgcaggaggatcttggacgagcacaacgagagctccaaagtgcaaatcagaagatatcatctctcaatgacatgtataagcggttacaggattacataacaag

SEQ ID NO: 161743 - DNA, 257 bp, Glycine max
gtcagtatagtcagccaggctttgatatttgtaacccgttctcgaagctggtcctttattgaacgccctggaatgctgttagtttgcgctttcgttattgctcagctgattgctacaatcatagcagtatatgctgactggggctttgcaaaggtgaaaggaattggttggggttgggcaggagtcatctggctctacagtattgtcttctatattccacttgatgtcatgaagtttgccacccgttatgtattgag

SEQ ID NO: 161744 - DNA, 268 bp, Glycine max
gccggccataacagacaacggagggcgtttcacattgatcaacagaaacaggtcgtgccctttgtacgtcggtctcgaaaacaccgacacgccgcagggctacccgatgaaattcaccccttttgccaacaaggacgacgacgataacttgagggtgaacacggacttgaaagtgacactggtgcaagtttccacaacgtgtgtgcaatccaccgaatggaagttgggtgagaatgacacgaggagtggaaggaggctcatcgtcact

SEQ ID NO: 161745 - DNA, 265 bp, Glycine max
caatgctcctcagctgtcaacaagtgcagggcacagtagagaagcttctggtgaattaaatccagggccagaaactgctggtactacttctgtggcatcagtgcatagagaacctgagttcccactccgattggagacaaggtctcgaagtcaagccatttggaggcggccatcagagaggcatgttcctaggatagtatcttctcctgttgttgaaacaagagctgatctttctgctattgaaacccaggttcggaatttggtt

SEQ ID NO: 161746 - DNA, 262 bp, Glycine max
gttgcgttttaggcctaccagacaaagactatggagagattgttagtgcaatcgttgtgccagaggccgatgttaaacgaaaacaagatcaagaatcaaagcctgttctaagcctagaagaattatccaactgggccaaagacaaaattgcaccttacaagattccaactcagctaatcgtgtgggataaactccctcgcaatgccatggggaaggtaaataaaaaagagctgaagaagctgcttgtttcagaacagtgaac

SEQ ID NO: 161747 - DNA, 258 bp, Glycine max
aaacaaactcgttttgttttgtttcacgttccgttctgggagttgaaagaaagaaaggaaggatgggagtgacaccgaacaattgctccttcgatgctctcttccgacttcgccaatttggcttccgaggctcagcgcatgctccacttcggcgccgattggctccacatggacatcatggatgggcattttgtccccaatttaactattggcgctccagttattgaaagtttgagaaagcacacaaagggatatttg

SEQ ID NO: 161748 - DNA, 257 bp, Glycine max
gaattctaagcagggcatccactgatcaaaccaatgttgatgtctttatccccttgttcatcaattttgtggtggctatgtacattacagtgatcagcatcttcataatcacgtgtcaaaattcttggccaacagctttcttgttaattcctcttgcttggttaaacatttggtaccggggttattttcttgcttcatctcgcgagttaactcgtctggattcaattacaaaagcaccagtgattcaccatttctct

SEQ ID NO: 161749 - DNA, 258 bp, Glycine max
aacactcataacacaaagcacaaagcaaagctcatccttgagttaaaaaatggcagcagcttcttccatggctctctcatccccatccttggctggcaaggccgtgaagctgggcccatcagccccagaagtgggaatggtgagcatgatgaagaccgtcaccaagcaggtctcctcagggagcccatggtacggcccagaccgagtcaagtacttgggcccattctctggcgagcccccgtcctacctaaccggtga

SEQ ID NO: 161750 - DNA, 258 bp, Glycine max
cacatatacaaattctctgtgttgtgttgtgtacttgtgttaattgtgttgttgttgtaggaaatttaagtgaagagagaatgatgatgaagtctgctatgtgtgcattggtgcttgtggcactggttgtggttgaagtggggcccatggctgaggctgcggtgacttgcattccaacacagttgactccttgtcttccggcaattaattcaggttctgcaccttcgagtgcttgttgccagaagctgaaggagcaaa

SEQ ID NO: 161751 - DNA, 266 bp, Glycine max
cagtcctgcacatgttatgccgcttctggaaattgtacgtaccaagcagacctctgcccaagtgatagttgacgtgttagatatttcaaagaagataaagaaaactccagtggtggttggaaactgcacaggatttgctgttaataggatgttcttcccatatacccaagcaggtctcttgcttgttgaacgtggtgcagatgtttatcaaattgatagagtaataaccaaatttggaatgcccatggggcctttcagattgatgg

SEQ ID NO: 161752 - DNA, 259 bp, Glycine max
gtttcatcttctggtggcttatacacatacgggtggagcaaatatggccagctaggacatggaaattttgaggattctcttgtgcctcagaagcttcaagccttgagtgataagttaatctctcaggtatcaggtggttggaggcatagtatggcactcacgtctactggactactatttggatggggttggaataagtttggacaggttggagtcggtgacaatgttgatcactgctctcctgtgcaagtgaagttcc

SEQ ID NO: 161753 - DNA, 258 bp, Glycine max
cgcacgcagagggagatggagcttcacgataagaaccacgatggcttcgtttccttctccgagtacgatcctcccagttgggttcaaaatgcagataatgaatctttcggttatgatatgggttggtggaaagaagagcattttaatgcatcggatgctgatggagatggtgttctaaacttaactgaattcaatgactttctgcaccctgctgacagcaaaaatcccaagcttcatcaatggttgtgcaaggaggaa

SEQ ID NO: 161754 - DNA, 153 bp, Glycine max
cgaaccgaagaggaggacaacctgctgaacgccgagcaccacttcgcgagcttcaaggccaagttcgccaagacctacgccaccaaggaggagcacgatcatcgcttcggcgtcttcaagtccaacctccgcagagccacggctcgcacgcca

SEQ ID NO: 161755 - DNA, 255 bp, Glycine max
ctcgatgtttccaggtgtgcaatcactgatactggtatcgcagcccttgcccgaggaaaacagttcaacctggaggtactttctttggcaggttgcgcattggtttcagacaagagcgtgcctgcattgaaaaaattgggccgttcccttgctggattaaatatcaagctttgcaatgcaatcagcagccgctcagttgacaagcttctgggacatctctgcatgtgtgacatcctctactgaacaggaaaatgc

SEQ ID NO: 161756 - DNA, 257 bp, Glycine max
tgaaaatgggaaagtttagttcaagttacagtacttctgattttgttcactttggagttctacttccctttcttctgttatcacagttgttctttcaacttgcatggtgtggctccatagtaaatctccttcctggattagagggaccccttccttttgttcttgaaaccgggtatgtgggagtgggtgaatcagaggatgtgcaggcattctactacttcattgagtcagagaacaatccaaaggaggatcctctc

SEQ ID NO: 161757 - DNA, 259 bp, Glycine max
ctctgttctcttctgtcattgcttctcctccacacacgcacagagacacacacttttgcagtcacattgagaatggggcgtgttcgcacgaagacggtgaagaaatcctcgcggcaagtgatagagaggtactactcccgcatgacgctggacttccacacgaacaagaaggttctggaagaggtggccatcattccctccaagaggctccgcaacaagatcgcggggttctccacccatctcatgaagcggatccaga

SEQ ID NO: 161758 - DNA, 263 bp, Glycine max
ggaaatcaaagttgtttctgaccgcaaccctgccaaccttccttggaaggacttggggatagacttggtgattgaaggaaccggggtgtttgtagacagagaaggtgcagggaaacacattcaagcaggagctaagaaggtgctcatcactgctcctggtaaaggagatatccccacctacgtggttggtgtcaatgagtatgactacagccctgatgaacccatcatcagcaatgcctcttgcaccactaactgccttgcac

SEQ ID NO: 161759 - DNA, 240 bp, Glycine max
cgagatctgcgtttggcatgaggtgccaggacaaagatgaattcatatcaatcatacaagaaggtgtataagttgcagcaggttttaacataggagatttatttccttctgctaaatggcttcaacatgttactggtttgaggtctaagcttgagaagctgtttggacaaattgatcggatactatgagacatcatcaatgaacacaaagaggcaaagtcataatccagagaaggcacgg

SEQ ID NO: 161760 - DNA, 261 bp, Glycine max
aacacatacattgtagtatcacttttgtctcggaatttgttcttttgagttatggcaagcttaaaggttgcatgtgtggttttgatgtgcatggctgtgatgagtgcaccaatgatggtgcaagccgtgtcatgcaatgatgtttctgtgaacctagcaccgtgcctatcttacctgatgcagggtggagatgttccagaatcgtgctgtagcggagtgaggaacattctgggttctgccagcaccacctttgacaaacaa

SEQ ID NO: 161761 - DNA, 260 bp, Glycine max
gttggaccaagtgtctgctatgccactggacacatataagggacatggtttccgaactgaccttgttgaaatgctgacagctttgaaaccaagatttatcagatttccgggcggttgttttgttgaaggagaatggttaagaaatgcatttcgatggaaagcatctgttggaccatgggaggagagacctgggcactttggtgatgtttggatgtactggactgatgatggacttggctattatgagtttctccaacttg

SEQ ID NO: 161762 - DNA, 256 bp, Glycine max
tttcattaccgccgtgataacacactaacaccaccacttcatcaactttacttgacaacaatattgtaaaactcaaaatctagtttcatactttttttcttcttcttgaaatggctctccaggctgcttctcttgttcctgcttctttctcggttcttaaagagggaaagagtggtgtgtctctcaaggactccaccttgttcggtctttcattttcagaacctatcaaagctaacttcagctcttctgcatgagg

SEQ ID NO: 161763 - DNA, 251 bp, Glycine max
gtctctgtgtttgcggctgaggattccgaacgagcgaccttcttcgtttctcgcaaagtttaagtcatcatgggtaaggaaaagactcacatcaacattgtcgtcattggacatgtcgactctgggaagtcaactaccactggtcatttgatctacaagcttggaggtattgacaagcgtgtgattgagaggttcgagaaggaggctgctgagatgaacaagaggtcattcaagtatgcctgggtgcttga

SEQ ID NO: 161764 - DNA, 249 bp, Glycine max
gcaaaacttcagggatctgaattaaaatatggtccatatgaaaatcttcctccattttcatacctgccaatagttattcactttgagaataaccaaccctttgctgttgctaaagagttggttcgagagatcgaaatttcccattggggcaatgtacagatcacagagcattacgatattatccatgctggttctcagagcaaaggagaattttctaggcttgactatcagaccaggccatttttaaga

SEQ ID NO: 161765 - DNA, 254 bp, Glycine max
tacagttacagcataacttctattctatatttctttctactcgcaagcaaatcagaagaagagaatggcagcagcagaggggctaaacagagagcagtacgtgtacttggcgaactgtcggagcaggcggagcggtacgaggagatggtggagttcatgcagaaggtggtggtggggtcgacgccggcgtcggagctcacggtggaggagcgcaacctcctctcggtggcctacaagaacgtcatcggctcgct

SEQ ID NO: 161766 - DNA, 255 bp, Glycine max
gaaccggaagaggaaaaactagaaaagatcccaacagtgagaagcccagtgattttgtttaccttccgagagatgaagcatttggtcacttgaagtcatcagattttctcgtatatggaatcagatcagtggctcaagacgtgttgcccgtgttgactgatgcgtttgatggcaatcttttgagccttgagtgtgataactttgctgaagtgcgcaaactctatgaaggtggagtcatactagttgaaagttttt

SEQ ID NO: 161767 - DNA, 253 bp, Glycine max
caggtggcgagaggaacagtagtgtataccgagagtgcttgagaaatcatgcagccagcctaggaagctacgccacggacgggtgcggcgagtacacggtggacggcgcggggggactacaatgcgccgcgtgcgggtgccaccgcaacttccaccggaaagtgaagtacctggcggcggctgaaagccctcccacggagtatgggggcagcaacagcaagaagcggttcaggtctaagttcacggaagatca

SEQ ID NO: 161768 - DNA, 251 bp, Glycine max
ctcgagccgagtcggctcgagatggcttctctagcaaccttggctgctgttcaaccagctacgatcaatggccttgctggacgttccctctctggaactaaactctctttcaagccctctcgccacagtgtcaaatccgagaacttcaggagtggtgccgtggtagcaaagtatggtgaccagagtgtgtactttgatttggatgatctgggcgacactacagggctgtgggacttgtctagctcagatgc

SEQ ID NO: 161769 - DNA, 251 bp, Glycine max
cacaaaccctcccctcacactctccaaaccctagcggcactacacacgttatctctctctctctctctctctctccctctctccttccccaagatgtcgagcgccgatcccgagcaccgagaagaggaggaggcacccgccgtcggcgacgacgaggacaccggagcacacgtcgctcccatcgtcaagctcgaggaggttgctgtcaccaccggcgaggaggacgaagatgcaatcctagatctcaaatc

SEQ ID NO: 161770 - DNA, 237 bp, Glycine max
tttcgaactccactagtgtggctgaagtgttctccaggattgatcataagtttgacctcatgtatgcgaagagggccttcgtgcactggtatgtgggtgaaggtatggaagagggtgagttctcagaggctcgtgaggaccttgctgctcttgagaaggattatgaggaggttggtgccgagtctggtgatggagatgatgatggtgaaggagatgatgattattagagtgtctgaa

SEQ ID NO: 161771 - DNA, 240 bp, Glycine max
tagtactctcgttaatttttttgctaattgctaattgggcacaatggaaaagcttcatgctgtgtgcatcccatacccagcacaaggccacataaacccaatgctcaagctagcaaaactccttcatgttagaggttccacatcacctttgttaccacagaatacaaccacaaacgccttctcaaatcaagaggttctgattccctcaatagtgtcccatcatttcaatttgaaaccatc

SEQ ID NO: 161772 - DNA, 240 bp, Glycine max
gtggttgccactgctcctaagttcgatgggatcacccatgttggaggtgacatgttcgtgtccattcctagtgctgatgctatttacatgaagtggattctgcatgactggagcgacgagcactgcatcaagatctgaagaactgcaggaaggcaataccagagaagacaggaaaagtcataatcgtggatcacgttcttcgacccgaaggcaacgaactcttcacagacgttggcatcg

SEQ ID NO: 161773 - DNA, 241 bp, Glycine max
ctgcttaatcgaactattcagattctaaaaaatgagttggtggtgggctggagcaatcggtgctgccaagaagaaattcgaggaagaggaaccgccgcgaacttccagagcgtgggcctggtgatcggcgtgacggcatcgtgggcaacagcctcgccgagatcctccctctcgccgacacccccgccggtccatggaaggtctacggcgtcgcacgccgcccccgtccgccgtggaacgc

SEQ ID NO: 161774 - DNA, 243 bp, Glycine max
ctcatagtaatgacccatatgtagatgactattaccaccaagcttgtctggcaaaaaaacctaatgtggctaagttaaaacatccattttgcccaagccaaataagggaatatcctccacgatcccgtgctaatactagccacattcatttgttcagattgatgccctagggagggtttcattttcttctattcgctgtcctcgccctcttcttgaggttgaccctccaaacacttctagctc

SEQ ID NO: 161775 - DNA, 240 bp, Glycine max
gcttctgactccgtgccctagcttcttcttcctcctcctcctctgccattgcagcaaggcacacacctcaggctccaacccatttcacgagggatcggattcgctcgccatcatggggaagaagaagaagagagtttcctcgaaggtgtggtgttattactgcgatcgcgaattcgacgacgagaagatcttggtgcagcatcagaaagccaagcactttaagtgccatgtctgccacaa

SEQ ID NO: 161776 - DNA, 244 bp, Glycine max
gaggaaaagaagaggaaaaggagagtggagaggaagaaaaggattgaagttgttgctgtgagaaagagaaagagtgaaatcggagtttgggaaggaattgcaatcaatggatgtgataaagacgcagcaaatctcatctcgaccaatcgagaaggtggtggttcaccctctcgtgcttctcagcatcgtcgacaactacaacagagtcgccaaagacactcgcaagcgcgtcgtcggcgtcttg

SEQ ID NO: 161777 - DNA, 236 bp, Glycine max
  unsure (1)..(236): unsure at all n locations
tggcttcttcaatccctaatgcgccttctgcgttcaattctcagagctacgttggtctcagagcgccactgaggaccttcaacttttcttctcctcaagctgccaaaattcctcgctcccaacgccttttcgtctcagagcctccgattcggagttcgaagccgccgttgtcgccggtaaggttccgccggcgcctcccgtgccgcccagaccggcggctccggttggaanccggt

SEQ ID NO: 161778 - DNA, 239 bp, Glycine max
ccttaaaaaccaacacggttttctttttggtttggcaacatagcaccaaaaccctaaacccttcttctctgatatttaaaaacctatcttgtcaccacattcacctttctccatttcctttctgatcaatcaatccctcttctcttccggccatggcctccttgctccgctctctccgccgccgtgatgtcgcttccgcctccctctccgcctatcgctcgttaacgggcagcaccaag

SEQ ID NO: 161779 - DNA, 242 bp, Glycine max
atgaaaatgggttcttctttgtggactttgtgtctaattttggcttcactagcctcttctgcattctgtgcctttccacggaggccagtggatgttccattcggcagaaactacgttcccacttgggcttttgatcacatcaaatacttcaatggaggttctgagattcaacttcatcttgacaagtacactggtactggcttccagtccaaagggtcatacttgtttggtcacttcagcat

SEQ ID NO: 161780 - DNA, 243 bp, Glycine max
ggctatttgaacacggctcctgttcgatcagcaattagttatattgatggtgatgaggggattcttagatatagaggctaccctattgaggagttggcagagaaaagcactttcacggaagtgtcctatctcataatgatggaagtttgccttctgaaagtcagttagcagaatgggagtatagaatatctcagcattcggctgttccacaaggaattttggatatcatacagtctatgcccc

SEQ ID NO: 161781 - DNA, 236 bp, Glycine max
aaaaaaaatgggttcttctctgtggacctgtctgattttgttatcacttgcttctgcttccttcgccgccaacccaagagcaccaattgatgtgccatttggcagaaactatgtgcctacctgggcctttgatacatcaaatacctcaatggtggttctgagattcagcttcatcttgataaatacacaggtactggcttccaatcaaaagggtcctacttgtttggtcacttcag

SEQ ID NO: 161782 - DNA, 233 bp, Glycine max
ctctctcagctcaggagtgtataatctgagcgatgtcagatcttgaggctcccttgcgccctaagaggaagaaggtttgggtggactatttcgttcagtttcgatggatccttgttatttttgtggtccttccatctccttcaccatttatttccttacataccttggggatgtaagatctgagtggaagtcctataagacgcgtcagaaggaacatgatgagaatgtgaaga

SEQ ID NO: 161783 - DNA, 228 bp, Glycine max
caggcaagccccactcaaccaccacacctctcctcgttcacgctacccctttctgctcttcttctacctttcaagttttaaaagtataaagatggcagagacattcctatttacctcagagtcggtgaacgaggacaccctgacaagctctgcgaccaaatctccgatgctgtcctcgacgcttgcatcgagcaggacccagacagcaaagttgcctgcgaaacatgc

SEQ ID NO: 161784 - DNA, 239 bp, Glycine max
gcacaggaaaccttccgggaccgtcttcccgaaccggccagctcctcgacagatttgccggcagaaacttcgacgccaccgacgtggtcgcgctctccggcgctcacaccttcggacgggcccactgcgccacatcttcagccgcatcaaccagacggacccacccatcgaccctaccttgaacaacaacctcatcaaaacttgtccctcttcccagtcccccaacacggccgtgcttg

SEQ ID NO: 161785 - DNA, 240 bp, Glycine max
gggtggtgcctctcttccatctccccagccaaatcctctctcaagaaggccacattaggcccttctgtcttcgcaaccgttagcactccttcttctccttcttcttcttcttcttcttccttcccttctctcattaagacaggcctgtctttgctgcccctgcccccatcatcaccccaactgtgagagaggatatggcaaaggaatacgagcaagctattgaagaactccagaaattgt

SEQ ID NO: 161786 - DNA, 242 bp, Glycine max
gggaatatccccaactcgatttcttccctggcgccgaaactgacgtacttggatcttgggcacaactcactttccgggaaaatccctgattttctgggaaaattcaaggcgcttgacacgcttgacctgtcatggacaagttttccggaacggtccctgcgagtttcaagaacctgacgaaaatcttcaacctgaacctctccaacaacctcctggtggacccgttccccgagatgaacgtg

SEQ ID NO: 161787 - DNA, 240 bp, Glycine max
gtaggttcgtataccaaaccagttgcaggtgccactccaggatatgcatcagaggtgatctttgctgatggaaccttcattgatgggagtacaagtgagctttcatgtgatggaccacttagagagccatttactgattttgccagggtggcacccattggactcaatggggactagtcctatgagaagttttgaaatcattatgatggaatataattttcaatcagaagtttatagaaa

SEQ ID NO: 161788 - DNA, 101 bp, Glycine max
gctacaatgtccaaactggtagtgctggagattggggtagctacttctactatggtggtcctggtagaaacccaaattgcccttgatcattcatgttaatc

SEQ ID NO: 161789 - DNA, 235 bp, Glycine max
gaaggcttcggcaatgctcctcaagtacttgaaatggagaaattcatttgttccaaatggctctgtatctgtgtcagatgttcctaacgaacttgcacaagataaggtgttcatgcaaggacacgacaagataggtcgacctatacttatggtcttcggtggaagacattttcagaacaaggatggtcttgatgaattcaagcgatttgttgtttatgttcttgataaagtatgt

SEQ ID NO: 161790 - DNA, 238 bp, Glycine max
caattcttccccctccacccacccagcatatctctctattcctatttattagcacccctcacattaccttgtgtcaccaactactttgactcctttaccataccattacaataattatcaaacctaaccagtaaaatggtgaccgtggaggaaatccgcaacgctcagcgttcccatggacccgccaccatcttggccttcggcaccgccacgccgtccaactgcgtctcccaagccg

SEQ ID NO: 161791 - DNA, 238 bp, Glycine max
ggcatttttgttggttcgagtgagcgagggaagatgtactctagagattcatggggtggtccgttggagataaacgcgacggactcggcaacggaggacgagcggagccggaacctgcaggacgtggacagggcggcgctgtcgcgtcccttggacgagacgcagcagagctggctcctaggccccggcgagcagaagaagaagaagtacgtcgatctcggctgcatcatcgtcagcc

SEQ ID NO: 161792 - DNA, 232 bp, Glycine max
ggaagaagctgtgttatgtccaatttccacaaagatttgatggtattgatcgccacgatagatatgctaaccgaaacacagtgttctttgatatcaatatgaaagggcttgatgggattcaaggtccagatatgttggtactggaactgtgttcaacaggcaggcattgtatggctatgatccaccagtatctgagaaaaggccaaagatgacatgtgactgttggccatca

SEQ ID NO: 161793 - DNA, 232 bp, Glycine max
cccctttctctgcactctgcaactccctccaatttagtttgagccttagaggcattgttctttggttggatagatctctgatctgaagatgagtgcgtcgaggttcattaagtgcgtcaccgtcggcgaggcgctgtcggcaaaacctgcttgttgatttcctacaccagcaacacttttcccacggactacgtgcccacggtttttgacaatttcagtgctaatgttgtgg

SEQ ID NO: 161794 - DNA, 236 bp, Glycine max
ctcgcccgcaccgtccagatcgtaatcaagagaagaggagcgagttctctttttccttgcagcccaagccatggcgcctctgatcctgcatggtggaaaaaccaacaaaaattcttacaagacactcattgcggcggagtatgccggcgtccaagttgactttgccccaaattttgagatgggtgtctccaataaaactcctgaatttctcaagatcaatcctattggcaaggttc

SEQ ID NO: 161795 - DNA, 235 bp, Glycine max
agtgagaagagaaaaatggcaatctccatacccagtagacaacttttcatagatggagagtggaaagtccctcttctcaacaatcggtttccgatcatcaaccccgctactgaagacatcatagggcatatccagccgctactaaggaagatgttgaccttgcggtggatgctgctaaaagagccttttcccataacaaaggcaaagattggtcttcagctcctggctctgttcg

SEQ ID NO: 161796 - DNA, 241 bp, Glycine max
ggactgaatgaactaatggagtctaaaggtgggaaaaagaagtctagtagtagtagtagtaaatcattgttctacgaagctcccctcggatacagcattgaagacgttagaccaaacggtggaatcaagaaattcagatctgctgcttactccaactgcgctcgcaaaccttcctgatatccatccagattgatagttcattgcatgcaaccatagttttattaggttttttcttctttgt

SEQ ID NO: 161797 - DNA, 238 bp, Glycine max
aactaagtcttccaattttggaacgtgtgaagggacctctggagaaggcacttgctgaagcaggtcttaccgttgaaaatgtacacacagttgaggtggttggttcaggttctcgggtaccggccattaacaaatattgacagagtttttcaaaaaggagcctaggcggacaatgaatgctagtgagtgtgttgctaggggctgtgcgttggaatgcgcaattcttagtccaacgttc

SEQ ID NO: 161798 - DNA, 234 bp, Glycine max
tcgacggcgacgtaaagaaactcgcgtccgttcccggcggcgtcgacgtcgttttccatccccgtaacttgtacgattacgggaagaacggtggtggtgacgtggcagaggctggtggaatggtgtcgtgcttgagagtgggtccgggcacgaaagttgggtgagggttgagaagctggaattggggctgtgtgggaagagcaggcccgttttcttcagaggggtggcgactgt

SEQ ID NO: 161799 - DNA, 230 bp, Glycine max
ctccatatggccactcttcttcttcccacgctcctccttctcatacccttcgccaccctcgtctccgcccgccctcacctcgccggagactttctccgactgccctccgaaaccgataacgatgacaacgccagggcacccgctgggccgtcctcctcgccggttccaatggctactggaattacagacatcaggctgatgtttgtcacgcctatcaaatactaaggaaa

SEQ ID NO: 161800 - DNA, 232 bp, Glycine max
atgaagctctcacctccatccttattgatgcctttgaggttggctacagacactttgatactgcttctctgtatgaaagtgaggagtctctaggcaaagctgtggcaaaggccttagagctaggcctcataatagcagagaggaattattcatcacatcaaaactatggtccactgatgctcatcctgaccttgttgttccagctcttaagacctccctgcagaagttggga

SEQ ID NO: 161801 - DNA, 235 bp, Glycine max
gcgacgacgatccaagtgatagacactcgtcgcgatggaacgtgtagctgaatccgagcgaactctgtacccatacgtgactggatcctctgtagtcgctatcaaatacaaagatgggattctaatggccgctgacatgggaggttcgtatggatctaccctgcggtacaagagtgttgagcgtatcaagcctattggaaagcattctcttcttggtgctagcggggagataagt

SEQ ID NO: 161802 - DNA, 234 bp, Glycine max
accaaagtagaacttaaatccaggttttcggagatgacatttaacactataatgaggatggtgtcagggaagaggtactatggtgaagactgtgatgtgagtgatgtacaggaagcaaggcaatttagaggatcattaaagagttggtgacgttaggaggggctaataaccctggggacttcttggctttgcttaggtggtttgattttgatggtttggagaagagactaaaga

SEQ ID NO: 161803 - DNA, 239 bp, Glycine max
ggaaggagagaaagaaaatcccgatggtaacgccgctttggtgaactccttctgcgaaatcacttcctcttccaaggaagaagctcttttctttttggagagccacaatttcgacctagacgctgccgtttcgactttcctcgacaacgccaacaaccccctcatccctctcaacgacgaccttgccattcccaaccccaacgccgtttcccctccctcagattctcactctccggact

SEQ ID NO: 161804 - DNA, 240 bp, Glycine max
gtttgggattggagggattgacgctgcgtctcttcctcttctctttcgatccatccctcattcctaaccctccaatccaaccacctcagcctcacactcacatatacacatatctgaacgcgtatcgtccctccatggcttcaaagcgcatcctcaaggagctcaaggacttgcagaaaaccccaccaacttcttgcagcgctggtccagtagctgaggacatgttccattggcaagcaa

SEQ ID NO: 161805 - DNA, 258 bp, Glycine max
  unsure (1)..(258): unsure at all n locations
atcagatacgaaggcattctctacaacatcaacacngnagagtccagtattggcctcagaaatgtgcgatcttttggaacagaaggaagaaaaaaggatggcccacaaattcctccaggtgacaaggtttatgagtatatacttttccgtgggactgacatcaaggatttacaggttaaatcttctccacccgtccagcctattccacangtcatcngacntgnanntattattcagtctcactatnctcacccggtc

SEQ ID NO: 161806 - DNA, 259 bp, Glycine max
cgcgcactttctctcttctctccgcatctccaactctctctctcacacacgcactctgaaacaaaaaaatagaaatagaaaaaaaaaacaaaagttaaaaaaaaaggttagttattcttcttcaaccacgccatggagggtcttccccaaggttaccgtcccaacgttggtgtctgtctcatcaactccgatgatcagatttttgtggcttctaggttgaatgtcccaggagcatggcaaatgcctcatgggggaattg

SEQ ID NO: 161807 - DNA, 258 bp, Glycine max
gcgttgccattctcatcctcttctttctctctctaccattgccatggatccctacaagcaccggccatccagcgccttcaattctcccttctggactacaaattctggtgctcctatttggaacaacaactcctctttaaccgttggagctagaggtccaattctgctggaggattatcatcttgtggagaagcttgcaaattttgatagggaacgtatcccagaacgtgttgtccatgccaggggcgctagtgcaaa

SEQ ID NO: 161808 - DNA, 260 bp, Glycine max
gaaagcagcgattttgaagtctctccaaaccattatggttgtactcctgctgatagtactctttagcagcaacaccaaagcagaaaaagaaacaatccacgaccatgcaaacagaaagacctacataatccacatggacgagaccatgatgcccttaaccttcaccgaccacctcagctggttcgacgcctccctcaaatcagcgtccccctccgcggagattctctacacttacaaacagttggggcatggcttctccg

SEQ ID NO: 161809 - DNA, 253 bp, Glycine max
aagatgatcaacattattggagcacttgttctactctttgcatttctcttcctcagttgtgtgtatgcacaagacacaacaacccttgtgcctgcaatcataacttttggtgattctgctgtggatgtagggaacaatgactatcttcccacccttttcaaggctgattaccctccttatgggagggactttgttaaccaccaacctactgggaggttttgcaatggcaaattagctactgatttcactgctg

SEQ ID NO: 161810 - DNA, 252 bp, Glycine max
atcacaaataactgcacctacacggtgtgggccgctgccgtgcccggcggcggcgcaaggcttaaccctggcgaatcgtggaacatcagcgtgacgaacggcacaacacgaggacgcatctggggtcgaacaaactgcaacttcgacaacgcgggacgcgcgaagtgcctcaccggcgactgcgagggtattctggagtgcaacaaaacaggtacacccccgaacacggtcgttgatttcgcgttgaaccag

SEQ ID NO: 161811 - DNA, 253 bp, Glycine max
ctcgcaatcttcactattttcaccgagcatttgcattccacattgaatatggctgaggctacacaatctaatgctgagttattggagtggcctaagaaagataagcgccgcttcctgcatgttgtgtatcgtgttggtgatcttgatcgcaccattaagttttatactgaatgttttgggatgaagcttttgaggaaaagagatattccagaagagaaatatgccaatgcttttcttggatttggccctgaac

SEQ ID NO: 161812 - DNA, 253 bp, Glycine max
gccatttgggagttaggttctgcacgctctgcttccagcgagtgttctttcttcgtttcaacaccttaatttgcacacgctgcttcttcagcttgagaaatggcacaagaaacctttctattcacatctgaatctgtaaacgagggtcaccccgacaagctgtgcgaccagatctctgatgcagtgctcgatgcgtgccttgaacaggaccctgacagcaaggttgcctgtgagacatgcaccaagaccaaca

SEQ ID NO: 161813 - DNA, 254 bp, Glycine max
tgctgttcaagtccttgactctgtgaatatcaccttgggtgctgaagatgaactaagacatgcagttgcatttgttcggccagttagtgtggcctttcaggtggtgaatgggttccatttctacgagaatggagttttcactagtgacacttgtggtagcacttcccaggatgtgaaccatgccgttcttgctgttggatatggagttgaaaatggtgtcccatattggctcataaaaaattcatggggagaaa

SEQ ID NO: 161814 - DNA, 253 bp, Glycine max
gtggaatgaatagcaataccaccggcgctgcagcaatgaacgaccagctctccaacaccacctccatcttcggcctccgcctatgggtggttctcggggtgtgcgtgggcgccgccatcgtcctcatcctcttcctcatctctgtctggctcgccttcaagcgctcttccaaaaccaaccctgtttccatccccgacgtctccaaagagatccaagaaatcaggctcgacaccaaccccactctccaacccga

SEQ ID NO: 161815 - DNA, 250 bp, Glycine max
ggcgctcaacctacaggaactgttcaggacatttcaaaaagggctggtgtttttatggaacttagctcgaatcaacaaacgaaattccattaatgaaataaaaaaaagggggtgtggatgacttgtatatagatttctaaaactcttttctcttttatccccccgctctcttgttctattcatacctaatttttgctaattccttgtggttatataagatgataggatgtagtttctatacccagaaaag

SEQ ID NO: 161816 - DNA, 236 bp, Glycine max
acggggagcgtgagttcatgttctacagaaaccccagcgccgacatgctcctcaagcccgaagaactcaatctcgaactcatcagatctgcaaaagttttccattacggatcaatcagtttgatcgtggagccatgcagatcagcacacttgaaggcaatggaagtagccaaggaatctgggtgctgctctcctatgaccccaaccttcgtctacctttgtggccttcggctgagg

SEQ ID NO: 161817 - DNA, 252 bp, Glycine max
agagtgagttcggttatcttctttctatttcgtcattttcttcgcttctttcttcttctctgttaattcttttcttacatcttaaaaaacaatataaagaagggcgtggttttgttgtgagtactgagctgagaagagggagaagatgatcatccccgttcgttgttttacctgtggaaaggtaattggaaacaaatgggatacctatttggaccttctccaggcagattacagtgaaggagatgcactgga

SEQ ID NO: 161818 - DNA, 252 bp, Glycine max
ctcgagcggcggcgattgtcccttcaaatgttgaagacaagttgccttttacactggtcccacagtcggaggacttctgaatgctacatgtgggaatgttactgagctcataatagcaatatttgcccttagcagtaacaaaattgctgtggtcaagtattctctgttgggttctattctttcaaaccttcttctggttcttgggacctctctattatgtggtggcattgcaaaccttaaagtggaacaaaa

SEQ ID NO: 161819 - DNA, 254 bp, Glycine max
gtgtggttgaaagttaagaagtagcaaagatgtttccattcgggcgcaagggtcaaaagataaaggggcctatggtggttatgcagaagaatgtgttggatatcaacagcatcaccagtgttgacgggatcgtcggcaccggcttagacttcttaggcagtgcactcgatacagttacttttttagcctcctccatctccatccaacttatgatacctaccaaggctgatggtgggagaggataagttggaaag

SEQ ID NO: 161820 - DNA, 258 bp, Glycine max
gttcagcgttcaccaacagaaacagcagaaggaaggaaaaggtgactgcacagaggtatcgaataaagtcaaaagtcggaatggtttcactctgatcaaactgaggaatcgaggaaggaagggttaggatcagctagagtaccttgaggagcgccggttgaaggatttgattaagaagcattctgagttcattagctacccaatttctctttgggttgagaagactaccgagaaggagatttctgacgatgaggatga

SEQ ID NO: 161821 - DNA, 256 bp, Glycine max
ctccaagtgcagtggcaagggttctaagtctggtgcttcgatgaagtgtgctggttgtcaaggaactggtatgaaggtttctataagacatcttggcccatccatgattcagcagatgcagcatgcctgcaatgaatgtaagggtactggagaaactatcaatgacagagatcgctgcccacagtgcaagggagagaaggttgtgcaggagaagaaagtccttgaagttattgtagaaaaggggatgcagaatggg

SEQ ID NO: 161822 - DNA, 252 bp, Glycine max
gattgatacacccttcttcgttcctcactcaccagccacagattctctcttctctattcagtaaacggctgttttgtatacgagctgtcccggtctcagcctctacatcccaaaacatcaaaacaactggttgggctccttgtatggcttcttcctcagttggtagaagagctacatattcaacacaatctgtatcgacaaatgagccagttgtatctgtagattggctttatgataacctgaaggagccag

SEQ ID NO: 161823 - DNA, 253 bp, Glycine max
ggaaattgatggtaggtttctgaacactggcctcctccttgtggccacaatccttgtagccaaactcatctcagctttcatagtgcccaagtccagaaagagggtacccccaattgtgaaggggtggcccttaattggagggctaatccgtttccttaaaggtccaatctttatgctccgtgaggagtaccctaagcttgggagtgtcttcaccctcaagctcttccacaagaacatcaccttgctcgttggc

SEQ ID NO: 161824 - DNA, 254 bp, Glycine max
atttctctctctctctttttctctgcaaaacaaaaatgtctcacttcggacgttcgggtcccccagacatttccgacacttactctcttctcgttctgaacatcaccttccgtaccaccgccgacgacctattccctctcttcgacaagtatgggaaggtcgtcgacatcttcatccccaaggatcgaaggactggtgaatcgaggggttttgcgttcgtgcgttacaagtatgctgatgaggctcagaaggcc

SEQ ID NO: 161825 - DNA, 251 bp, Glycine max
gttcttaagcattgaaatttgtcttgtagggtggctatgttgatttatgccgtggtgtttggaggatccagggatctcttgctgtgtctaggggaattggagatagacacctgaaacaatgggtgacagcagagcctgagaccaaagttctcagaattgaacctgaacatgacttgttaatcttagcttcagatggattatgggataaggtatagaacttgaccatttcacttcaatgttaatagtgtctt

SEQ ID NO: 161826 - DNA, 252 bp, Glycine max
acaaagcattgttagcgccagaggattctatagaagacgagagttgtagccttagtgaggtggaagaagcaaaagcagtactaaggctggttcctatttgggctacaactctggtttatgctgtggtgtttgctcaagttcctacgttctttaccaagcaagggattactatggagagaacaatatttcctggctttgacatacccgctgcttctcttcaaacgcttgtcactgtggccattgtcctgttca

SEQ ID NO: 161827 - DNA, 253 bp, Glycine max
aaccaagtggaatcaatagccatgaagatcgttcggaaagacctcgtacccaatggacctggcagcgttaagatggttgcagtggattcggatgatctctggtttgcgtataacctgatagctcccggagactctgtcatggccgttactgtcaggaaggttctaagagaagctgctagtggcggacgggaagcagaacgcgtcaagctcaaattggaaattaaagtccaagagcttgctgattatgacaaag

SEQ ID NO: 161828 - DNA, 250 bp, Glycine max
aacacaacaccttttccttttcccttccgttggtgccattcgtgcagcaccggatcctctcatttctccggcgataactctcccttttccggcgaattcaccgcttcctcgatatgaatcccgagtatgactatctgttcaagctccttctgattggagactctggtgttggtaaatcatgccttcttctaagatttgctgatgattcatacattgagagctacataagcaccatcggagttgattttaa

SEQ ID NO: 161829 - DNA, 249 bp, Glycine max
ctcccctttgccgctgttgttgttgctgcaccaccgaacaacttcccctgtaaatcgcgtttcgtttgtgcaaggttttaaaagacggctgatgctgaggacattcaacctcttgttgttgataatggaactggaatggtcaaggctggttttgcaggtgatgatgctcctagggccgtgttccccagcattattgggagaccacgccatactggtgtaatggttgggatgggtcagaaggatgcttac

SEQ ID NO: 161830 - DNA, 251 bp, Glycine max
gagctatgccaaagcgtacagctatgaacttccagttgctgttgccattgttatttcgggcatgtatgaggatgatctggataatgctgaggatgttgtgtacactggtcaaggtgggcataatctgactggtgataagcgtcaatttcgggatcaaaagttggagcgtggtaacttggctctgaagaattgttctgagcaatgtgtgcctgttagagtcattcgtggtcatgaatcttcaagcagttaca

SEQ ID NO: 161831 - DNA, 248 bp, Glycine max
ctaaaaagcgctgtttgatgagcctgcgtagtattaggtagttggtcaggtaaaggctgaccaagccaatgatgcttagctggtcttttcggatgatcagccacactgggactgagacacggcccggactcccacggggggcagcagtggggaatcttggacaatgggcgaaagccggatccagcaatatcgcgtgagtgaagaagggcaatgccgcttgtaaagctctttcgtcgagtgcgcgatca

SEQ ID NO: 161832 - DNA, 247 bp, Glycine max
tatttttctcactgtctctccagagaacttgatagagagatggcagctgcaacatctggtgctgtgttaaatgggttgggatcttccttcttgagtggaggaaacaggagcctaacccttctgggcctctgctattggaggcaaagttggtgctgctgttactgttaatcccagaagactcattgtggtagctgctgctgcaccaaagaagtcatggctccctggtgttagaggtggtggcaatctc

SEQ ID NO: 161833 - DNA, 246 bp, Glycine max
ggagattcaaagtctgtgttgttgtggaatgcgtgggaagaggagcaagagaaatggattgataggcatatgttagaagatgttgacttggataatcatagtgaggtaatgaatgaaactgctgacataccctctgatctgacaatgcctttacttagatatcaaaaggaatggttagcctgggctttgaaacaggaaagttctgcgagtaaaggtggaatacttgcagatgacatgggaatgggg

SEQ ID NO: 161834 - DNA, 248 bp, Glycine max
aatgcttacacattcacagttgatcaaggcaagacatacagattcaggatatcaaatgtagggctcaccacttccatcaactttagaatccaagggcataaaatgacaattgttgaggtggaagggacccacactctccaaaacgtttatgactcacttgatgttcatctggggcagacttactctgtgttggttactgctgatcaaccaccccaagactacctcattgtcgtcacgacacgattcac

SEQ ID NO: 161835 - DNA, 247 bp, Glycine max
atttgctgtggagatgtcttcggcagtttacaaggggtgggttttcactgatcaagcccttcctgcggatcttatcaagagaggaatggcagtggaggatccatcctctccctatggccttcgccttgtgatagatgactacccttatgctgttgatggactagagatatggagtgctatccagacatgggttaaggactacgtctccttgtactatgccacggatgatgcagttaagaaagactca

SEQ ID NO: 161836 - DNA, 251 bp, Glycine max
ttccaggcaaaatgcttggaaactggggaggcagtggcaattaaaaaggttttacaagacagaagatacaagaatcgtgaactaccagttaatgcgtgtgatggatcatccaaatgtgatctctttgaagcattgtttcttttccactacaagtactgtcaaactttttcttaatttggtgatggagtatgttccagagtacatgtatagagtcttaaagcactagagcaatgctaatcaaagaatgccta

SEQ ID NO: 161837 - DNA, 246 bp, Glycine max
tgatagacaggtgacagttgatgttccagatataaggggaaggactgaaatcctaaaggttcatgctagcaacaaaaagtttgatgctgatgtttctcttgaagtgattgcaatgagaacacctggctttagtggagctgatcttgcgaatctgttgaatgaagctgctatattagctggtcgccgtggaaagacagctatttcatctaaagaaattgatgattctattgataggattgtggctgg

SEQ ID NO: 161838 - DNA, 248 bp, Glycine max
atcttgatgctgaaaaagagatgatgtctcaatgtgtggctcttcttggaaaatttattgctgtccgtgaaccaaacattcgatatcttggcttggagaatatgacaagaatgttgatggttactgatgtacaagatatcattaaaagacatcaagctcagattattacctcattgaaggatcctgacatcagtattcggaggcgtgctctagatttgctttatggcatgtgtgatgtttcaaatgca

SEQ ID NO: 161839 - DNA, 245 bp, Glycine max
gccaaacggaaggtcattagtaagactttccgtcgcctgcttgaggtaagtgagaaacaaacatttactggtccaccggaaaatgtcagagatcatgttatggctgccacaagggttcttaacaagggagacttccagaaggcttttgacattattgtgtctcttgatgtgtggaaatttgtgagaaatcgagacaccgtacttgaaatgctgaaggacaaaatcaaggaggaggcattgaggac

SEQ ID NO: 161840 - DNA, 245 bp, Glycine max
gaaacttcaagtacgtaaacaccatcaaagcagcggttgagaaagaatgccccttgacggtttcatgcgctgacattgttgctctttctgctagagatggcattgccttgttgggaggaccaagcattgaaatgaagacagggcgaaaggatagcaaagaaagctatgcaacggaggtggaagccttgattccaaaccacaatgattccatgtcctcagtgctgtctcgttttcaagccattggc

SEQ ID NO: 161841 - DNA, 242 bp, Glycine max
agatggtcttgtctgtaccgctcgtaagccctggattgctgttgggatgcggaacgttgactataagagagcccgtcattttgaagttgatttgtctgctttccggaatgtacttgagatcgacaaagaacggatgattgcaagagttgagcccctagtcaacatgggtcagatcagcagggtgactgtacccatgaatctttcccttgctgtagttgcagagcttgatgatctaactgtcg

SEQ ID NO: 161842 - DNA, 245 bp, Glycine max
gatcaaccttggatcaggtttagggaatggctgcaatcttagctcgaaaatcactccttgctcttcgtgcgcgccaattggctgtaagcggtcaagggctgcacagctcccaatactatggccttcggttaagtgcacactccttctctaccaaaagagaggatgaggaaagggagcaactcgcaaaggacatttcaaggattggagttctgtctttgaacgtagcattaacactctctttctca

SEQ ID NO: 161843 - DNA, 248 bp, Glycine max
caagaatatcacattggtctcttgtcttcctcctcatctctacacttatccacatacagcccagcctctcaagcccaagcccaagcccaagcccaagcccggtcatgaaatccttctgcagcagcacccagtacccagccctctgcgtctcatccctctccgtctacgcctccagcatccaacaggaccctcaccaactggttcagacagcactctccctctccctgaaccgcacccaagcgaccaaa

SEQ ID NO: 161844 - DNA, 244 bp, Glycine max
gcagacttaacaacagcacaaagcgggttactgtctgttcaagctaccatctctctctctctttcttagtgcctccttgccagaagttaaaatggcccaagaaactttcctattcacatctgaatcagtgaacgaggggcaccctgacaagctctgtgaccagatctccgatgctgtgctcgatgcatgcttggagcaggaccctgacagcaaggttgcctgtgaaacctgcaccaagaccaac

SEQ ID NO: 161845 - DNA, 244 bp, Glycine max
gtgctggagagttggaaagtggaaatgcaggagagccagcaaaactgatcagacagagataccgtgaagccgcagacatgatcaagaagggaaagatgtgtgctctcttcatcaacgatcttgatgcaggagctggtcgtcttggtggaactacacaatacactgtcaacaaccagatggtgaatgccaccctcatgaacattgctgataaccccaccaatgtgcagcttcctggtatgtacaa

SEQ ID NO: 161846 - DNA, 247 bp, Glycine max
gaaagcagcgattttgaagtctctccaaaccattatggttgtcttcctgctgatagtactctttagcagcaacaccaaagcagaaaaagaaacaatccacgaccatgcaaacaaaaagacctacataatccacatggacgagaccaccatgcccttaaccttcaccgaccacctcagctggttcgacgcctccctcaaatcagcgtccccctccgcggagattctctacacttacaaacacgtggcc

SEQ ID NO: 161847 - DNA, 246 bp, Glycine max
aaaattgctcctgcgctgattgctggaaactccattgtgctcaagcctccaactcagggagctgtttctgctcttcatatggttcactgctttcacttggctggttttcccaaaggcctaatcaactgtgtcactggcaaaggctcagaaattggtgacttccttacaatgcatccaggagtgaactgtataagctttactggtggtgatactggcattgcaatttcaaagaaggcaggcatgatt

SEQ ID NO: 161848 - DNA, 209 bp, Glycine max
gggttattgatgttgccaaagatatgtgcaggctttttaagatggacccagagactagtataaaatttgtggagaacagaccatttaatgaccagagatactttcttgatgatgaaaagcttaagatcttgggttggtctgagaggaccacttgggaagagggcttgaagaaaaccatggactggtatatcaacaattctgattggtgg

SEQ ID NO: 161849 - DNA, 247 bp, Glycine max
cacaaatcttagccgccattgatttttcctcttccatttctcttactttctcagcctttttcgattacccatttggttatttcgccctaatggctcttgctccatccaaagtttccaccttttctggtttttctcccaaacccagtgttgggggtgctcagaaaaacccaacttgctctgtttctctgagctttttgaatgagaaacttggaagcagaaaccttagggtttgtgcctcaacggtgcc

SEQ ID NO: 161850 - DNA, 244 bp, Glycine max
atcaattatgaaaccatgttggtcttcttccattccatctactcttcgcatggcatgacctcatcttcgcgtgttgtggcttaacgtgcgccggaaatggaggaggagcagcagacttttgtgtccaaagcgagaaccgcctttcattccgccgcggccaaagcggagcgcgttctcttggatttcaaatccgatcgagatcacgataaacaatcgtcgcccaacaccttcaccggccaacaac

SEQ ID NO: 161851 - DNA, 244 bp, Glycine max
gaaatttatccagtttcagctcacggttaatgttgctgctcttgtaataaatgttgtggcagcaataacttctggtgatgttcctttaaatgcagtgcagcttttgtgggtcaaccttatcatggatacacttggggcgcttgcactggctactgaaccgccaacagaccgcctaatgcacagatcaccagttggccgaagagaatctcttataacaaatatcatgtggagaaacttgatcgta

SEQ ID NO: 161852 - DNA, 256 bp, Glycine max
ccccaacgcgatttccaacttcaggatttcggaaccattgagggagaaattgaaggagaagggtatcgagtcgctgtttcccattcaggccatgaccttcgacaccgttctcgatggttctgatttggttggccgtgctcgcactggtcagggtaaaactctggcatttgtgttgcccatattagagtctttaataaatggtccagcaaaatctgccacaaagactggctacgggaggactccgagtgttctcgtg

SEQ ID NO: 161853 - DNA, 273 bp, Glycine max
gcacgcacgcgtacggaagcagctcactctctctagtcctgttatttgtcagcgcgtaaagcatggctttgttggtggagaaaaccacgagtggtcgcgagtacacggtgaaggacctttcccaggccgacttcggccgcctcgagatcgagctggccgaggttgagatgcccggcctcatggcctgtcggaccgagttcggcccctcccagcccttcaagggggcccgcatcaccgggtccctccacatgaccatccagaacgccgttctca

SEQ ID NO: 161854 - DNA, 250 bp, Glycine max
cgccaacactgcagaagggttcattgccaaggcaatgacattccagaacactgccggtgctgagggacaccaagccgttgcattcaggaaccaaggagacatgtccgctctcgttggttgccacatcttgggttaccaagacaccttgtacgtccagaccaacaggcaattctaccgcaactgcgtcatctccggcacagtcgacttcatcttcggcacctcctccaccgtgatccagcactccgttatc

SEQ ID NO: 161855 - DNA, 249 bp, Glycine max
gctgttgtctcttggcttcaagattgtattcttgtcaggaagatatcttgacaaaatggccgtaacagaagcaaacctaaagaaggctggcttccacacatgggagcagttaattctcaaggatccacatgctatcactccaaatgcactttcatacaaatcagcaatgagagagaatctgttgaggcagggatacagaattgttggaatcattggagaccaatggagcgatctgcttggagaccacag

SEQ ID NO: 161856 - DNA, 249 bp, Glycine max
gagaaaagttagggttcacaacttttgcttttccttttgcttgcgaatctgagtcaaataatcaatcatccattcattattcatcaagtcgtcggcgaagaaaatcacgctgaagagttcggacggcgaggtttcgaggtggaggaggcggtggcgctggagtcgcagacgataaagcacatgatcgaggacgactgcgccgacagcggcatccctctgccgaacgtgacgagcaagatcctggcgaag

SEQ ID NO: 161857 - DNA, 249 bp, Glycine max
tcttcctcggaaaatggacagggaccatctgcagatcgcaatgctggcatcccttcaactagtggggttgattctgatttaacttctgaagatgaagttgtccgtttgttgaactgctctgatcattatgcagcactgggattcacgcggtatcaaaatatagatgtttcaatactaaagcgggaatataggaaaaaggcaatgttggtacatcctgataaaaatatgggtaatgagaaggctgcagaa

SEQ ID NO: 161858 - DNA, 248 bp, Glycine max
atcacaaataactgcacctacacggtgtgggccgctgccgtgcccggcggcggcgcaaggcttaaccctggcgaatcgtggaacatcagcgtgacgaacggcacaacaggaggacgcatctggggtcgacaaactgacaccttcgacaacgcgggacgcgggaagtgcctcaccggcgactgcgagggtgttctggagtgcaacaaaacaggtacacccccgaacacggtcgttgatttcgcgttgaa

SEQ ID NO: 161859 - DNA, 248 bp, Glycine max
caatgctaaagatcacatctttggacttgttctgatgaatgactggagtgctcgagatattcaggcatgggaatatattcctcttggtccatttcttggacaagagttttggcacaacaatatcaccttggattgtgaccttggaagcattagaaccttttgccagtgaagccccaaaacaggatccttctccagttccatacttgactgagaaagaacccaaaatctatgatatttccctagaggct

SEQ ID NO: 161860 - DNA, 248 bp, Glycine max
gtcgacatggttgagaatcggcttgtaggtatgaagagccgtggagtgtacgaaactccaggaggaaccattctgtttgctgcagcacgcgagttggagtctttgacacttgatcgtgaaacaatacaagtcaaagattcattagcccttaaatatgcagagttagtgtatgctggcagatggtttgatccgcttcgggagtccatggatgcctttatgcagaagatcacggagaccacaacaggttc

SEQ ID NO: 161861 - DNA, 210 bp, Glycine max
gcggtggcagggtgtaagttaatccaacgtatcaggcaaatgtgttttgagaaggttgtcaacatggaggttagttggtttgatgagcctggaaaactcaagtggtgccattggtgcaaggtctcaggagatgctgcttctgttcgtgcgcttgtcggcgatgcgctgggactattggttcacaatttcgcaactgtactggcacgtttg

SEQ ID NO: 161862 - DNA, 247 bp, Glycine max
aatccctcactcttgttcttcagtctcctcctattgtccgccaccgtagccgccgccgaacggatcgacgatgaagacgaccttctgatccgtcaagtggtgccggatgcggaggaccaccacctgctcaacgcggagcaccacttctccgccttcaagacaaagttcggcaagacctacgccacgcaggaggagcacgaccaccgcttccgtatcttcaagaacaacttgctccgcgccaagtcac

SEQ ID NO: 161863 - DNA, 247 bp, Glycine max
ggttaatagagaaattgctcagaaggatgcaaagggtctttacaaagcaggggagaagaaactgggaactgatgaaaagacttttatccacatattcagtgaacggagtgcggcgcatttggctgccgtagttcttattaccatgacatgtatggtcattcactgaagaaggcagtaaagaatgaaacatctggggcctttgaacatgcacttttgacaataatccaatgtgctgttaatccaggaa

SEQ ID NO: 161864 - DNA, 245 bp, Glycine max
gcacgatttaacaagcctgacaatgagattgttgaccattacacatatgttatattgggtgatggttgtcaaatggagggaatttcaaatgaagcatgctcacttgccggtcactggggtctagggaagcttattgctttatatgatgacaaccacatttccattgatggggacactgagattgcattcactgagaatgttgatcaacgttttgaggcacttgggtggcatgtaatttgggtgaa

SEQ ID NO: 161865 - DNA, 242 bp, Glycine max
atgagggccttccatggcttccgcttgtgcttcctctgcaattacagctgttgccatctctacgccgagttccgggcagaagaatggatcaggaggttgttttcttagtggaaggaaattgagggtgaaaaaggagagagcagcaattggaggacgatcgatgggcactacagtgtgcgcagttgctgagcctgacagacctctatggttcccaggcagcacccctcctccatggcttgatg

SEQ ID NO: 161866 - DNA, 248 bp, Glycine max
gcttttccctcgttgaaatgaaaatgggttcttctttgtggactttgtgtctaattttggcttcactagcctcttctgcattctgtgcctttccacggaggccagtggatgttccattcggcagaaactacgttcccacttgggcttttgatcacatcaaatacttcaatggaggttctgagattcaacttcatcttgacaagtacactggtactggcttccagtccaaagggtcatacttgtttggt

SEQ ID NO: 161867 - DNA, 249 bp, Glycine max
gaaaaagtgagaagagaaatcaaaattttaagattgttcatgcatcctcacattattcgactttatgaagtcatagaaactccaactgacatatatgttgtcatggagtatgtgaagtctgtagagcttttcgattacatagtagagaagggtaggttgcaggaagatgaagctcgtaatttttttcagcagataatctctggggtggagtactgtcacaggaatatggtggttcatagagatttgaag

SEQ ID NO: 161868 - DNA, 245 bp, Glycine max
ttccttttcatcattctcatatcctcaatcaccccccctcgcactcgctcttcgcttcctctggtggcgacaatgtcgactcctgctaggaagaggctgatgacagacttcaagatgctgcaacaagacccgcctgcagggatcagtggtgccccccaggataacaacatagtgctgtggaatgctgtcatgtttggtcctgatgatactccatgggatggaggcacgttcaagttgacactcca

SEQ ID NO: 161869 - DNA, 242 bp, Glycine max
gaacagtctaatgcaacaccatattgcacttcctcctgataacatgggaaagattacctacattgcaccacctggccaatattccataaaggatactgtattggaacttgagtttcaaggtgtcaaaagaaattcaccatgcttcagacttggcccgtacgtacaccaaggcctgttgcatcaaaacttgcagctgatactcctcttcttactggtcagcgtgttcttgatgcccttttccc

SEQ ID NO: 161870 - DNA, 242 bp, Glycine max
cttgggaagaacgctcgctcgcactgtccagatcttactcaatacgagtgagttttgtttttccagccatgacgccgcttatcctggatgctgggaaaaccgacaaaaattcttacaagacactcatcgcagccgagtatgctggcgtccaagttgattctgccgctaattttgagatgggtgtctccactaaaactcctgaatttctcaagatcggtcctattggcaaggttcctgtggtg

SEQ ID NO: 161871 - DNA, 242 bp, Glycine max
gatcggtggatcaggaatggacctgaggagcaaagcaaggactctcccaggaccagttagcgacccttcaaagcttcccaagtggaactatgatggttccagcacaggccaagctcctggagaagcagtgaagtgattatatacccacaagccattttcagggatccattcagaaggggcaacaatatcttggttatctgtgatacttacactccagctggagaacccattcccactaacaa

SEQ ID NO: 161872 - DNA, 242 bp, Glycine max
gggcaatgcttggtgcccttggctgcaccttcccagagatccttgagaagaatggtgtcaaattcggcgaggccgtgtggttcaaggccggtgcacagatcttctcagagggaggccttgactacgtgggcaacccaaacctgatccatgctcagagcatccttgctatctgggctgttcaggttgtgctcatggggtttgttgaaggttacagagttggtggaggaccacttggtgaagga

SEQ ID NO: 161873 - DNA, 243 bp, Glycine max
aacacaacaccttttccttttcccttccgttggtgccattcgtgcagcaccggatcctctcatttctccggcgataactctcccttttccggcgaattcaccgcttcctcgatatgaatcccgagtatgactatctgttcaagctccttctgattggagactctggtgttggtaaatcatgccttcttctaagatttgctgatgattcatacattgagagctacataagcaccatcggagttg

SEQ ID NO: 161874 - DNA, 223 bp, Glycine max
ccaggaatacttgcatcggctggaggaggctaaaaagtatgatcacaggattttgggtgtgaaacaggagcttattcttcatcatgaatggagtcctggaagctggttttttcttccacatggcgctcggatctacaacaaactcatggacttcattcggaatcagtacagggacagaggctatcaagaggtcatatctccaaatgtatttaacatggatcta

SEQ ID NO: 161875 - DNA, 240 bp, Glycine max
aaagaatatttcaagagatgaaatgttaagagaagctcaagtagtggcctcttgttcctacgaaaataacacaaattggggcacagaggtgggattctcatatggcatattactagagagttctattactggctgtattcttcacagcagaggatggaaatcagcatatctttacccgaaaacaccatgtttcttaggttgtgctcccactgacatcaaggaaggcatgcttcagttggt

SEQ ID NO: 161876 - DNA, 241 bp, Glycine max
caaactcagggtagggcagagagagagagagagagagagagagagagagagagtgggagtgtgggatatcgcggtgcatggtggcgctggtgtcgaccctaatgtcccactcgagcgccaagaagaagcgacacaagttgtcacgcgctgtgtcaatgtgggagtctgtgctctgaattctagtgttcgcggcatagatgtcgtcgaacttgtggagagggaattggaaacgggtgctctg

SEQ ID NO: 161877 - DNA, 234 bp, Glycine max
tatcaaggaggctgctaaagagaagatggtgcagctcaaggtacatagatcagtgagaggtatgagggcgtctatttacaatgccatgcccttggctggggttgagaagttggtggctttcatgaaggattttcaggcaaggcatgcctaaaggagtaacctcaatctgaaacaaatacttgcattgcatgaacctaatgcctgaaggattttatgctaataaagtgtttgtct

SEQ ID NO: 161878 - DNA, 242 bp, Glycine max
gttcacaatcactttctgcgcttcactcactcccttcgtgcggttttctttctttgtcgaactcgtgcgaaaatgcgtgagattcttcacatacagggagggcaatgcggaaaccagatcggagcacgttctgggaggtggtgtgcgcggacacgggatcgattccacggggaggtaccagggggacaacgagttgcaactcgagcgagtcaacgtctattacaatgaagcgagttgcggaa

SEQ ID NO: 161879 - DNA, 236 bp, Glycine max
cggaacaaacgaattggcaatactgatagcaaaattgtacactggctcccatgacatgatatctctaaggaattcttaccatgggaatggtggtggaacgatggggaccacagctcaaagcatttggaaatataatgttgtgcagagtggtgttcatcatgcggtgaatccagacccttatcgaggccttttcggttctgatggagagaagtatgtaagagatgttcaagaaatca

SEQ ID NO: 161880 - DNA, 236 bp, Glycine max
gggtgactgagagatggacgctcccctgctgctggccaaaggcgagggggacgcgctggtgacggagaacggcgactacgtggcggtgagggagctgaaggaggtgaagaaggtgttctggattgagacgaagagagtgtggcagattgcgatgcccattgttttcaacatatggtgtcagttcggtgtgaattccgtgaccagcatgttcgttggacacctcggcgacattcagc

SEQ ID NO: 161881 - DNA, 237 bp, Glycine max
aaagcagcgattttgaagtctctccaaaccattatggttgtcttcctgctgatagtactctttagcagcaacaccaaagcagaaaaagaaacaatccacgaccatgcaaacaaaaagacctacataatccacatggacgagaccaacatgcccttaaccttcaccgaccacctcagctggttcgacgcctccctcaaatcagcgtccccctccgcggagattctctacacttacaaa

SEQ ID NO: 161882 - DNA, 239 bp, Glycine max
aatacatcaagccggtcctgcctttgattacttagagaatgctcttggtagatttggtgatgggccattctttcttggtcaattcagctgggtggatattgcttatgttccatttgttgaaagattccagctcgtctttgctgatgtgttcaagcatgatataactgaaggaagacctaaacttgcaacatggattgaggaagtgaacaagattagtgcttatacacagacaagagctg

SEQ ID NO: 161883 - DNA, 238 bp, Glycine max
gacttggcaaaatctgcccaaaagttatgggcaaagaccccactatggaaacgtgctgaacttcttcacaaggcagctgctatccttaaagagcacaaagcaccaattgcagagtgcctggtgaaagaaatagcaaagccagccaaagatgctgttacagaggttgtaagatctggggatctggtttcttatactgctgaagaaggtgtaaggattctgggagagggaaagttcttgg

SEQ ID NO: 161884 - DNA, 238 bp, Glycine max
caaaaagggttgcaaggagttcgatgagtatggcatttccttcaaatccaaacccggtgctcttcccactatcgttttgctcgatcgaggaaattgcttctttgctttgaaggtatggaatgcacagaaggctggagcttctgctgttcttgtttcggatgatattgaggaaaagttgataaccatggacactcctgaggaggatgggtcatctgcaaaatacatagagaacataaca

SEQ ID NO: 161885 - DNA, 235 bp, Glycine max
ttcttctcttgcggctagggttttagcgcagttgcttctagtttctttgcagatttaaggaagatgggtaaggaaaaggttcacatcagtattgtggttattggccatgttgactctgggaagtccactaccactggccacctgatctacaagcttggaggcattgacaagcgtgttattgagagatttgagaaggaagctgctgagatgaacaagaggtctttcaagtatgcct

SEQ ID NO: 161886 - DNA, 292 bp, Glycine max
ttcggctcgagagaaatttgagtgaggagctagagaatgatgatgaagtctgctatgtgtgcagtcgtggttgtaggacttcttctactggcggaggtggcgcccatggctgatgctgtgacatgcaccccaacagagttgagtccgtgtcttccagcaatcacttccggtgctaaaccttccagtgcttgttgcgcgaagctgaagcagcaaaaaccatgcttatgtggctacctgcaaaaacgctagcttgacgcagtgtgttaggtctgctaatgcccgaaaaaccgtt

SEQ ID NO: 161887 - DNA, 260 bp, Glycine max
gagtgagcgagcgagcgaggtagggttttcgttgttcccccgtctttgaattcagttcgcgacgatggggtccatccccgatccaggcgagttgagcgagttgactcagccgagcttcgacgagttccagcgccaaacttcccccatgaccagctgcaccctcctctggaaggagctctccgaccagttctcctccctcgagcaagtcctcaaccacaaatccgaagcccgcaaacgcaagattcgcaccctcgacaaca

SEQ ID NO: 161888 - DNA, 245 bp, Glycine max
cctggcttggcctagcgcttattctctcgcattccgtggagatctagtgcttctgctgcaagacctcgctgaaaattagggtttcgattcggaggtagacgaagatgttcggaagggctccgaagaaaagcgacagctccaggtactacgaaatcctcggcgtttccaagaacgcttcgccggatgacttaaagaaggcttacaagatagccgccattaagaaccatcctgacaaaggcggggat

SEQ ID NO: 161889 - DNA, 260 bp, Glycine max
atcaatgatggctcagcttctccacactcccttcatcccctcctcctcctccgcgctccgccgcgccgccaccattccccaccgcaaaacgacttctcgcctcgtcgttcgggccaagatccgggagattttcatgccggcactgagctccaccatgaccgagggcaaaatcgtctcctggaccaaatccgagggcgacaagctctccaagggcgacacgtcgtcgtcgtcgagtccgacaaggccgacatggacttggg

SEQ ID NO: 161890 - DNA, 266 bp, Glycine max
gttcattctctttgcgcagttccctacctctcctttcaagatgcagatcttcgtcaagaccctcaccggaaagaccatcacccttgaggtggaaagctctgacaccatcgacaacgtcaaggccaagatccaggacaaggaaggaattcccccggatcagcaacgtctcatcttcgccggaaagcagctcgaggacggccgtaccctcgccgactacaacatccagaaggagtcaacccttcaccttgtccttcgtctccgtggtg

SEQ ID NO: 161891 - DNA, 269 bp, Glycine max
gattgacgccgtggtcattgccaccggcgttcataccttctttgggaaagctgctcaccttgttgataccactaatcaagttgggcactttcaaaaggtgttgactgcaattggaaacttctgcatatgttcaattgctgtggggatggttattgagattattgttatgtatcccattcaagatcgagaatatcgccctggaatcgataaccttcttgtgcttcttattggtggaattccaattgccatgcccactgtcctctcagtga

SEQ ID NO: 161892 - DNA, 275 bp, Glycine max
gaccttccaatgttgtcatgtcactacatccaaaacggcgtgttactcaccgccccgccctcctcttttgacgacttaatactttcttttaaacacactctttctatcgcgctctctcactttcccgctctcgcgggaaggtttgagaccgattccaacggttacgttaatattgtatgcaacgacgctggcgttgattttattcatgctatatcaaaacacctaactttaaacgccgtcgtttcgccgtccctcgttgatgttcacccttgctt

SEQ ID NO: 161893 - DNA, 270 bp, Glycine max
cacaaagcacaaagcaaagctcatccttgagttaaaaaatggcagcagcttcttccatggctctctcatccccatccttggctggcaaggccgtgaagcttggcccatcagccccataagtgggaagggtgagcatgcggaagaccgtcaccaagcaggtctcctcaggaagcccatggtacggcccaaaccgagtcaagtatttgggcccattctctggcgagcccccgtcctacataaccggtgagttcacaggctactacggctggg

SEQ ID NO: 161894 - DNA, 264 bp, Glycine max
aaaggattctacccgccgctcgatgggaattgcgcttcaaggcgtctcgtagggctaatccgcctcacgagggtcaccaacggcacgtgcctttggggggccgaggccccctactgctggtcggcaaacggacggcgggcgcagcgtcgtttttgccccggtttctgacttagaggcgttcagtcataatccaacgcacggtagcttcgcgccactggctattcaaccaagcgcgatgaccaattgtgcgaatcaacggttcct

SEQ ID NO: 161895 - DNA, 263 bp, Glycine max
cttttccctcgttgaaatgaaaatgggttcttctttgtggactatgtgtctaattttggcttcactagcctcttctgcattctgtgcctttccacggaggccagtggatgttccattcggcagaaactacgttcccacttgggcttttgatcacatcaaatacttcaatggaggttctgagattcaacttcatcttgacaagtacactggtactggcttccagtccaaagggtcatacttgtttggtcacttcagcatgaaca

SEQ ID NO: 161896 - DNA, 262 bp, Glycine max
aatcaatggcgtttctttagggtcacacttgatttggtggaaatggtgtttgccaaaggagatccgaaaattgccgctctgaatgatagactccttgtgtcaaaggatctgtggccgtttggggatcaattgaggaacaaatatgcagaaactaggaaactcctacttcaggtggctggacacaagggaattcttgaaggggacccttacttgaagcaaagactcaggcatcgtcatgctcccattaccagcctcaatattg

SEQ ID NO: 161897 - DNA, 191 bp, Glycine max
gcaaaggattctacccgccgctcgatgggaattgcgcttcaaggcgtctcgtagggctaatccgcctcacgagggtcaccaacggcacgtgcctttggtgggccgaggccccctactgctggtcggcaaacggacggcgggcgtacgcgtcgcttctagcccggattctgacttagaggcgttcagtccat

SEQ ID NO: 161898 - DNA, 271 bp, Glycine max
gccaaacggaaggtcattagtaagactttccgtcgcctgcttgaggtaagtgagaaacaaacatttactggtccaccggaaaatgtcagagatcatgttatggctgccacaagggttcttaacaagggagacttccagaaggcttttgacattattgtgtctcttgatgtgtggaaatttgtgagaaatcgagacaccgtacttgaaatgctgaaggacaaaatcaaggaggaggcattgaggacatacctctttaccttctcttcatctt

SEQ ID NO: 161899 - DNA, 267 bp, Glycine max
caaggcagaaagcaagctcatcctagagttttaaaaatggcagcagcctcctccatggctctctcttccccatccttggctggcaaggccgtgaagctgggcccatcagcccccgaagtcgggagggtcagcatgaggaagaccgtcaccaagcaggcctcctccggaagcccatggtacggcccagaccgcgtcaagtacttgggcccattctctggcgagcccccgtcctacctcactggcgagtcccacgtgactacggctggg

SEQ ID NO: 161900 - DNA, 263 bp, Glycine max
cgaagatctttgcttagattttactctccctggttatcctgaatacaccttgaagccaggagatgaaattgttgatatcaacaatttggaggagtatatatccttggtgatcgatgcaactgtcaagactggaatcatgcggcaaatagaagcatttagagcagggtttaaccaggtttttgatatctcatctttacaaattttgactcctcaagaactagataatttgctttgcggccgcagggagttgtgggaggctgaga

SEQ ID NO: 161901 - DNA, 119 bp, Glycine max
gaagttggaaaagttcgcttgcgatttgcccctgaaccaagtggttatcttcatattggacactcaaaagcagctatgttgtgcaaatattatgctgagcgatacaatggtcaggatat

SEQ ID NO: 161902 - DNA, 262 bp, Glycine max
aagtttcttcctttctctgctctttgccttctctgacacatttggtgccttgtagagcgtgttttggcaggaaggtggtatggcgaaggacgttgaggttgctgagcgtggctccttctctgggaaggactaccaggaccctccaccagcaccactcattgatgctgaggagctcacaaagtggtccttttacagggctctcattgctgaattcagtggcactttgctcttcctctacattactgtgctcacagtcataggg

SEQ ID NO: 161903 - DNA, 263 bp, Glycine max
cagaaatcaaacatgaaacccttgagactctctgtttctgaccttccaatgttgtcatgtcactacatccaaaacggcgtgttactcaccgccccgccctcctcttttgacgacttaatactttcttttaaacacactctttctatcgcgctctctcactttcccgctctcgcgggaaggtttgagaccgattccaacggttacgttaatattgtatgcaacgacgctggcgttgattttattcatgctaaagcaaaacacct

SEQ ID NO: 161904 - DNA, 259 bp, Glycine max
atttttcttgaaagatgatggaactttgacaccattggccattgagttaagtaagccacatcctcagggtgaagaatatggtcctgttagcgaagtctacgtgcctgccagcgaaggagtggaagcttatatttggttactggcaaaggcttatgttgttgtgaatgatgcatgctaccatcaaatcattagccattggctaagcactcatgcaattgttgagccatttgtcatagcaacaaacaggcaactgagtgtg

SEQ ID NO: 161905 - DNA, 118 bp, Glycine max
aaagatggtatcagagaggccagtggtgatattcagcaagagctcgtgctgcatgagccacaccataaagaccctcttgtgtgactttggggtgaatccagcggttcatgagctggat

SEQ ID NO: 161906 - DNA, 268 bp, Glycine max
aaaaggtttgtccaaggatgataaggctcaaaaattagccctccaacattggctagaagctattgacccacgtcatcgctatggacacaatttgcacatgtattacgatatttggtttgagagccaaagcacccaaccatttttctactggttggatgttggagatggtaaagaaataaatcttgagaaatgcccaagatccatcctacaacgccagtgcattaaatatcttggaccaaaagaaagggaagagtatgaagtaattgtt

SEQ ID NO: 161907 - DNA, 244 bp, Glycine max
gtgaggtcgacgacaccaccggcctcatcctcaaactcaagtccttctgcctccgcatggacgcattcgggttcttcgccttcgtcagcgccaagaagaaggagctcgacggcctacgcgccgagatgcctgtggctctggcggagtgcgttgatccggcgaaattcgtgctggaggcgatctccgaggtgtttccggtcgacaagagaggggacaaggccggccacgacttgggctgggcttg

SEQ ID NO: 161908 - DNA, 255 bp, Glycine max
aaaggattctacccgccgctcgatgggaattgcgcttcaaggcgtctcgtagggctaatccgcctcacgagggtcaccaacggcacgcgcctttggggggccgaggccccctactgctggtcggcaaacggacggctggcgcacgcgtcgcttctagctcggattctgacttagaggcgttcagtcataatccaacgcaccgtagcttcgcgccagtggcttaccaaccaagcgcgatgaccaattgtgcgaatc

SEQ ID NO: 161909 - DNA, 258 bp, Glycine max
ctttctctcgttttttctcagaaccttctgaggttaaagcaaaaaacaacgagagagagagagagaaaatgatgaagccatcgatgctcagatctctccactccgccgccacccgcggcgcctctcatctcttccgccgtgggtacgcctccgagccggtgccggagcgcaaggtagccgttctcggcgccgccggcgggatcgggcagcctctctcccttctcatgaagctcaatcccctcgtttcgagcctctccc

SEQ ID NO: 161910 - DNA, 238 bp, Glycine max
caagcctctctcttaaccccacccctctccggtctcaaagccagcgaccgcgcctccgtgccatggaagcaaaactccagcctctccttctccagcccgaagcccctcaagttctccagaacaatcagagcagcagccgccgacgagaccacagaggcaccagcaaaagtagaggctgcaccggtcgggttcaccccaccagaacttgacccaaacaccccttccccgatcttcgggg

SEQ ID NO: 161911 - DNA, 256 bp, Glycine max
caacaatataaattggttaaagagaggactatatctggagattcatactatggctctcacgtgatgcagtatggtgatgtacggcttagcagtgatgttctcttccattatttgggtacagatcctgctaatgataatttcacttttgtggacgaaaactccttatggtcaccttcaaaaccagtcaaccaacgtgatgctgatctcatccatttttgggataagttccgcaaagctcctgagggttctctcagga

SEQ ID NO: 161912 - DNA, 222 bp, Glycine max
aatggcagcaactttcaaattcagacaaagatctttttccactcctggaatgctttacatctatatcacatgctctgggtactggtttcactcaatttgctgaacctgtatttaggaggtgcataaatataatccagacccaacaatttgctaaggctgatcctgccgccaccacaggggttcagtatgacaaggagtttattgtatgctctcttgatttgc

SEQ ID NO: 161913 - DNA, 265 bp, Glycine max
tggggttctgttttgttctgttctgtcaccatcattcttgaaccttcacaaaagccagccaaaaaaatggctccaaatttcttgcaccaagtggcattccttcttgtgctctcaactgcggtttccagtggctatgcttgggttggtgtgaactggggaaccatggcgacgcaccagcttcaacccgagaaggtggtgaagatgctgaaggaaaacgggttcagaaaactgaagctgtttgatgcagacgagttcattatgacgg

SEQ ID NO: 161914 - DNA, 258 bp, Glycine max
ggttatcatcttcttcttcctctttcttagatctcttctttctctacgccgcacgccgaaaccatggccggaaaaggagagggtcctgctatcggaatcgatctcggaaccacctactcttgcgtcggtgtgtggcaacatgaccgcgttgaaatcatcgccaacgaccaagggaacagaaccacgccgtcttacgtcggattcactgacaccgagcgtctcatcggtgatgcggccaagaatcaagtcgccatgaac

SEQ ID NO: 161915 - DNA, 259 bp, Glycine max
caatggttcctcaacctctgctaacccttttcctctttctctcccttctctcaattgtcaactcctctccttcccaacaccttcagatcgccaatgctgaacgcaggattgacttgacttctcacattattaaggtgtacttgacgttgaaggttgaaaatttggggacatctcctacttcagaagtacatattgccttttcacccactgaagtagaacatctagcaatagtcagagctgctgcaacttctgggaagag

SEQ ID NO: 161916 - DNA, 252 bp, Glycine max
tgctgcagtttcaactagccagggaaccccagttcaaactagctctagcgacccttttaaacaacagcgagtcatggtcattggtggagatggatactgtggttgggcaactgccctccacctttctaacaagggttatgaggttgccattgttgacagccttgttcggcgcctttttgatcaccagcttggactggattctctaacaccaatttcttccatccagaatcgccttcagtgttggaaatctct

SEQ ID NO: 161917 - DNA, 254 bp, Glycine max
cagtgaaagagaatccgaggcgaagagaagagaaaaattaagatggaggggaaggagcaggatgtgtcgctgggagcgaacaagttcccggagagacagccgattgggacggcggcgcagagccaagacgacggcaaggactaccaggagccggcgccggcgccactggttgacccgacggagtttacgtcatggtccttttacagagcagggatagcagagtttgtggccacgtttctgtttctatacatcac

SEQ ID NO: 161918 - DNA, 251 bp, Glycine max
actaaaaccccactctctttttccgagtcttccagtgaaagaaaggcagcgatggaagaagacttcgacatccccggcggcgaggaaatggatctcggcgaagacgaggtcggcgaggagagggagatcggctctggcggcctcaagaagaagctcctcaaggaaggtcaaggctgggaaacccccgaagtcggtgacgaagtccaagttcattacacggggactttgctcgacgggactaagttcgattc

SEQ ID NO: 161919 - DNA, 263 bp, Glycine max
gtccattaaagggtccaaaactgggtggcagcccatgtcaagaaactgggggcaaaactggcagagcaactcatacctcaatggacaatccctctcttttcaagtcaccaccagtgatggcagaactgtgacaagcttcaatgtggcaccagccaattggcaatttggccagaccttccaaggaggccaattctagagacattattgcaatgagggatagaaaatagtgcaaaacaaaaaaaatgttggtatacctatgatta

SEQ ID NO: 161920 - DNA, 256 bp, Glycine max
tgagaagggaaatattgacctgagccaactaaagtttcgtgtccttgatgaagccgatgaaatgctgaggatgggttttgttgaagatgttgaaatgattctaggcaaggtagaaaatgttaataaagttcagacacttcttttcagtgctactttgccagactgggttaagcaaattgctttaaaatttttgaagccagataagaaaactgctgaccttgttggaaatacaaaaatgaaggccagcaccaatgtt

SEQ ID NO: 161921 - DNA, 257 bp, Glycine max
gggaaggaaagatgcagatattcgtgaaaaccctaaccgggaagacaatcacccttgaggtggagtcaagcgacaccattgacaatgtcaaagccaagattcaggacaaagaagggattcctccggatcagcagaggttgatcttcgccgggaaacagctggaggatggccgtaccctcgccgattacaacatccaaaaagagtcaacattgcatcttgttttgaggcttcgtggtggtattattgagccatctttg

SEQ ID NO: 161922 - DNA, 255 bp, Glycine max
ttccttgtttcccctattattatctcgctctcacaaaatcatggcattctctagtgctttgattctgtggtcgttgctagcaatcaacatggccctgccaaccctcgcaaccgtctacaccgtgggagatacttcaggttgggcaattagtactgattatagcacttggactggcgacaagatcttttcagtgggtgatagtctcgcgttcaactatggaactgggcacacagtggatgtagttaaagagagcga

SEQ ID NO: 161923 - DNA, 255 bp, Glycine max
gcatcttgtgttgaaggatatccatgccaccttgaagaaatttggaagcaatataattttctcaaatggcctcttggatccatggagtggtggcggcgttttgcagaatatatctgaaagtgtggtttcacttgtcactgaagaaggtgcacaccacatagatttacgttcttcaacaaaaaatgatcctgattggttggtagagcagagggagactgagataaagctgatagaaggttggatcagtgactacca

SEQ ID NO: 161924 - DNA, 252 bp, Glycine max
caaagtttcttcctttctctgctctttgccttctctgacacatttggtgccttgtagagcgtgttttggcaggaaggtggtatggcgaaggacgttgaggttgctgagcgtggctccttctctgggaaggactaccaggaccctccaccagcaccactcattgatgctgaggagctcacaaagtggtccttttacagggctctcattgctgaattcattgccactttgctcttcctctacattactgtgctc

SEQ ID NO: 161925 - DNA, 252 bp, Glycine max
cagcctcatacagaaacttcaattcccaaacttcttcctccactggccaatcactggacgccacggggcaggcaaagatccgttgggtgcaaaagaattacatgatttacaattattgcactgatatcagacgtttccctcaaggccttcctccagaatgctccattgcatgagaatatttaattcaatgttgcatatcattataaaatgatcctcatgaacgtgacacacatgtgttgcctattacgttaa

SEQ ID NO: 161926 - DNA, 255 bp, Glycine max
ctttgcttctagagaatgtgaggttctacaaggaggaagagaagaatgatcctgaatttgcaaagaagttggcttctctagctgatctctatgtgaatgatgcatttggcactgcccacagagctcatgcttctacagaaggagttgccaaatacttgaagccctctgttgcaggattcctaatgcagaaggagcttgattatctagttggggctgtgtcaaaccccaagagaccatttgctgctattgtcggtg

SEQ ID NO: 161927 - DNA, 255 bp, Glycine max
caggtgggaaggaaggagttctcgtgatttggcggttagacacaaaaaagaattattgcttaccaagatttggatctccacttttgtattttgtagattctcctgatcgatcacttttctcaatatctcatgcagataatcaaatgcttatattgaagaagccttcaaagccaatggaaataatcagctgtatttctggtatcaagccccctttgtcttctcaagatatatgtgaaggtctttccagccgagttg

SEQ ID NO: 161928 - DNA, 255 bp, Glycine max
gtttccatccaaaaaatggctctatcgcgcgtggctcaatcgtcgccatcacagtcgaatcttttgaaacccctctcgtcgtacttatccctacgacgccgttcggtgtcgacctcgtcggagcccctcaccgtggagacctcggtgcccttcacctcccacaactgcgatgcgcctccacgcgccgtggagacgtcctcggcggagctcttctcgttcttccgtgacatggcgctgatgcggcggatggagatc

SEQ ID NO: 161929 - DNA, 230 bp, Glycine max
cagaacttgacttccaagttggaaaagagagatgtatacctgagtctgatataagtcagttaacataccttcaagctgtggtcaaagcaactttaagattatacccttcagtggctctctcatcacctcgtgaattcatcgcggcttgcactttaggtggctacaatgtctacgaaggaactcgtcgacttacaaatatgtcgaagatccacacagatcttagtgtttgg

SEQ ID NO: 161930 - DNA, 257 bp, Glycine max
tgaactcatcgaactgcaacagaaaactcgtcggagcgaggtttttctcgaaaggctacgaagccgcacttggacccatcgacacaaccacggagtcaaagtcagcgcgtgacgacgacgggcacgggagtcacacgttaaccaccgcggcgggctcggtcgtacccgaggctagcctcttcggcttggcatcgggcacggcacgtggaatggccacgcaagcgcgcgtggcggtttacaaagtgtgctggctaggc

SEQ ID NO: 161931 - DNA, 252 bp, Glycine max
ggaatgctccaatgcttatattattgtccggagggatgccttagatgagtgcctcttcattcttgaaatggaaaggctcagcatcgaggacgtcttgaaaatggagtggggtactctgaactcaaaaatcaaaagatggatttgggctgtgaaaatttttgttagggtgtatcttgcaagtgagaggtggctcagtgaccagctttttggggagggtgagcctgttggtctatcttgttttgtcgatgcatc

SEQ ID NO: 161932 - DNA, 253 bp, Glycine max
gggaagtatccggtgctctgccaactacgttcctctcactccaatcagcttcttggaccgcgccgccgtcgtttaccgcgacagactgtctcttgtctccggtgacgttacctacacgtggacccagacacaccaacgctgcatcaaacttgcttcttccatttctcaacttggtgtcggtctttctcccctcgatgtggttgctgtattggcccctaatgttccagctatgtatgagctgcattttgctgtt

SEQ ID NO: 161933 - DNA, 257 bp, Glycine max
atcgttttctccgttctttctcaaagccgcactcaactttctaaaaccaaatcggtttgaatcctcatttcccgcctctcactggaaagcagcaaaatcacctttctctactatctatctgttccttttgtactctgagtgggtagaagtcatggtaaggctcactgctgacttgatttggaaaagccctcatttcttcaacacgattaaagagcgtgagttagatctcagaggcaacaagatagctgtaattgaaa

SEQ ID NO: 161934 - DNA, 246 bp, Glycine max
agagtgagagagagagagagagagagagatactgagagaaattcgcaaaccctaatttcggaaagatcggcgatggctgcctccaaggatcgcgagaactgcgtctacatcgccaagctcgccgaacaggccgagcgatacgaagagatggtggaatcaatgaagaacgttgcgaatctcgacgttgaactgactgtggaggagcggaatttactttctgttgggtacaagaatgtgagtggtgct

SEQ ID NO: 161935 - DNA, 251 bp, Glycine max
caggaattaatccactagatatcccaaagatattcactaagtttgcacaaaaccaatcgttaacaacaagaaatcctgctggaagtggacttggcctggcaatttgtaggaggtttgtaaatcttatggaaggacatatttgggttgaaagcgaaggtattgataaaggatgtacagtcacttttattgtaaaacttggaatcccagaccgatcaaatgaatttaagctaccttttgtacctaaagtaccg

SEQ ID NO: 161936 - DNA, 249 bp, Glycine max
ctccagggatacctgctggggaatccagcaacaactcgaaggcatgaaaactatcgaatatcctttgctcatggaatgggacttatttctgatgaactatacaggtcactgcaaaaaaattgtaaaggagagtacataaatgtagacaccaaaaatgtattatgttctagaaatatcgagacattcaatgaggttacatcaggacttagtatggtcaatattttggacccgtcatgtgattggcttgat

SEQ ID NO: 161937 - DNA, 250 bp, Glycine max
aatcaatggcctttctttagggtcacacttgatttggtggaaatggtgtttgccaaaggagatccgaaaattgccgctctgaatgatagactccttgtttcaaaggatctgtggccgtttggggatcaattgaggaacaaatatgaagaaactaggaaactcctacttcaggtggctggacacaaggaaattcttgaaggggacccttacttgaagcaaagactcaggcttcgtcatgctcccattacca

SEQ ID NO: 161938 - DNA, 251 bp, Glycine max
aaacactatagcaatagaaacatttgcttttgaaaatgccctcactcttcatcactacactagctacccacatacaatgtcgaccaaatttaaggtgtttcgtgaattcacaagcgatgactcattcctaaaccaagttaaccctgaaaacatcaccgaattccaagtgactctgtccctcgctagagactacgatggcaacaactcaaccaacggaaagttcattccttactgggacactgaaaaggtca

SEQ ID NO: 161939 - DNA, 251 bp, Glycine max
  unsure (1)..(251): unsure at all n locations
attgaaccagctctaaaaaagcagcttatcanctctacagtactcatgactgttggaattgcaattattagttggattgctctgccaacatccttcacaattttcaactttggtgctcagaaggaagtaaagagctggcagctgttcctctgtgtgggtgttggtctatgggctggacttattantgggtttgttactgagnactatacaagcaatgcttacagtcctgtacaagatgttgctgattcctg

SEQ ID NO: 161940 - DNA, 247 bp, Glycine max
agaaaactgtgactgccttcaagggtttcaggtttgccactctcttggtggtggaacaggttctggaatgggaacactgttgatctcgaagatcagggaagaataccctgaccgaatgatgcttacattctctgtgttcccatcccctaaggtttctgacacagttgttgagccttacaacgcaacattatcagtgcaccagctcgttgaaaatgcagatgaatgcatggttttggataacgaagct

SEQ ID NO: 161941 - DNA, 245 bp, Glycine max
aagacactaaaagcggatgatttggcttcttcggtggtaggaactcccaactatatgtgtcctgaacttcttgcagatattccttatggattcaaatctgatatttggtcactaggttgttgtatatatgagatggctgctcatcgcccagcttttaaagcttttgatatggcagggttgataagcaagataaaccgtgcctctattggccctttgcctccctgttattccccatctttgagaac

SEQ ID NO: 161942 - DNA, 250 bp, Glycine max
gtgaaaaaggagagatggcagctgcaacatctagtgctgtgttaaacgggtttggatctcacttcttgtgtggaggaaagaggagccatgcccttcttgctgctagcattggagggaaagttggtgcttctgttagtcctaaaagagttattgtggcagttgctgctgcaccaaagaagtcatggatccccgctgtaaaaggtggtgggagtttcatagacccagaatggcttgatggctcgctaccagg

SEQ ID NO: 161943 - DNA, 251 bp, Glycine max
atttcaatttccctaggggcttaatatctccccgcatttgtgcctagcctcattattatcatagtagatattcattccccttatctttctctcttctctctccccgcccaaaccctaactccctaccctattccgctttctctcatccatcatgaaaggaggaaagtccaagaccgaatctaagagagccgatgccaaacttgctgtgaataagaagggcgccgccaccaagactaggaaacccgccggaa

SEQ ID NO: 161944 - DNA, 250 bp, Glycine max
gcagcactggagctgccaaggctgttggaaaagtccttcctgctttgaacggaaaattgactggtatggcattccgtgttcccaccgtggatgtctctgttgttgacctcacagtgaggctggagaaggaagcctcctacgatgaaattaaaaatgctatcaaggaggaatcagagggcaagttgaagggaattcttggttacactgaagatgatgtggtctccaccgactttgtgggcgatacagatca

SEQ ID NO: 161945 - DNA, 247 bp, Glycine max
tccaaatcatggctagctcactgcttgtgagggttgccagctgcatggttgtggtgtggatgtttagttttgggcacataattcccttggcagaagctgaaattccatgtggcagggtgcaaatcactgtggctccatgcatagggtacctaaggggtcctggtggaggtgtccctgcaccatgctgcaatggggttaagagcataaacaaccaagccaaaccaccccagatcgtcaaggggtgtgt

SEQ ID NO: 161946 - DNA, 246 bp, Glycine max
gttgtaactcgttcttcttcttttgttgttctgtgtttgtgtttgttttttctctcacctgaaaatgtcttgctgcggtggtaactgtggttgcggaagctcctgcaagtgcggcaacggctgcggaggctgcaagatgtacccagacttgagctacactgagtcaaccaccaccgagaccttggtcatgggagtggcacctgttaaggctcaatttgagggtgctgaaatgggtgtgcccgctga

SEQ ID NO: 161947 - DNA, 121 bp, Glycine max
gctcagcactacactgaggcagctatggatgagataacaattttgcagcagattgcggagggagatcctgatgataagaagtgtgtggtgacgcttttggaacatttcaagcatgctggtc

SEQ ID NO: 161948 - DNA, 247 bp, Glycine max
cgaggcccttgaagttcccggtgctcatagaagtgactatgaggacatcagtgtgggtaagaaaattgtattggcttttcagacacttggtgttgtctttggtgatgttggaacaagtccattatataccttcagtgttatgtttagaaaggcccctattaatggaaatgaagacattcttggagctttatcacttgtcttgtacactttaatcttgtttcctttattgaagtatgtcctggtggtt

SEQ ID NO: 161949 - DNA, 261 bp, Glycine max
gttggtggcaaagctggtgctcttggtgactctgttaccgttacacgtgagaagactaagattattctcacctctgactgtaacttttccaaacggtatttgaagtacttgacgaagaagtacttgaagaaacacaatgtgcgagactggctcagagtgattgcttcaaacaaggatagaagtgtttacgaactgaggtacttcaacattgctgagaatgagggagaggaagaagattagttgtctgatagccttatttgc

SEQ ID NO: 161950 - DNA, 266 bp, Glycine max
ttctgctcgatcggctagctatcggggttattttcaaggatgaaaatgggaagcagcatgaggcgtatctaggaaatgacaggcagagtgaggtgattgtgtctagtggggcacttgggactcctcaattgctattgctgagtggaattggcccaaaagcagagcttcagaaattgaacatccctgtggtgcttgacaaccaatttgttgggaaaggcatggctgataccccatgaacacaatttttgttccttccaaaagatcag

SEQ ID NO: 161951 - DNA, 253 bp, Glycine max
attaaacccaatgggccgaatttggacaatggtagctgggggaggtgctagtgtcatctatgctgatacggtaggggatctcggttatgctcctgagcttggaaactatgcagaatatagtggtgcacccaaggaagatgaggtcttgcagtatgccagagttgtgattgatgtaatcgattcttatctcaaacatcattgttggcatatttatggataaactatttttgctttatgcgatcagccatttctc

SEQ ID NO: 161952 - DNA, 250 bp, Glycine max
gttcattcaattcgcgaagagctgctaacaacttgaaacgccttgctgaagaatttggacctgagtgggctatgcagcacataattcctcaggttttggagatgaacaacaatccacactatttgtatcggatgaccattcttcgtgctatctctctgcttgctcctgtgatgggccctgaaatcacttgttcaaacttgttaccggttgttctgctgcatctaaagacagagtgcccaacataaagttc

SEQ ID NO: 161953 - DNA, 251 bp, Glycine max
gcatgcagttactggtgcttatgctaaacccatcttcgttgataaactcggtgctagtctggattcaatttcaaatggaatccctttggaagattttggacatggccatcctgatcctaatctaacatatgcgaaggatcttgtcaacattctgtatgctgaaaatggacctgattttggagctgccagtgatggggatggtgatagaaatagattttaggaagaagtttctttgtaactccttcagactc

SEQ ID NO: 161954 - DNA, 252 bp, Glycine max
ataaagaggattctttgaccgtgtcagtgactgagccttatgtgttgcaaagctcaaggcgtagtatactgccttggaggaagaggaagttgagtttcagatctcctaaatctaagggggagccattgttgaagaaggcttatggcgaagaaggcggtgatgacattgattatgatcgcagacagcttagctctgatgaatccctttcactcgggaagactgaggatgattcaggtgcaaatcgatcatcgg

SEQ ID NO: 161955 - DNA, 251 bp, Glycine max
ggaaatcgttcctatcatcacttctcaaatctcgaaccctctcgttcgtgccgatcactaggtcacacttcatcaatggcgggtagaggcaaaaccctaggatccagcgccgctaagaaggccacctcaaggagcagcaaagccggcctccaattccccgtcggtcgtatcgccaggttcctcaaggccggaaagtacgccgagcgcgtcggcgcggagcccccgtctacctcgccgccgttctcgaatat

SEQ ID NO: 161956 - DNA, 257 bp, Glycine max
gtgagttgcaggcagtgtcatctctcctttgacgacaagatgagcatcccaattccccatcggcagttattcatagacggagactggaaagtccccgtcctcaagaatcggattcccatcatcaacccttccacccaacacatcatacaggatatcccagcagctactaaggaagacgttgatctcgctgtcgctgccgccaaagctgccctctccccaacaagggcgccgattgggctccggcttccggctccgtt

SEQ ID NO: 161957 - DNA, 249 bp, Glycine max
tctcagtctctgtgtttgcggctgaggattccgaacgagtgaccttcttcgtttctcgcaaagtttaagtaatcatgggtaaggaaaaggttcacatcaacattgtcgtcattggacatgtcgactctgggaagtcaactaccactggtcacttgatctacaagcttggaggtattgacaagcgtgtgattgagaggttcgagaaggaggcgccgagatgaacaagaggtcattcaagtatgcctgggt

SEQ ID NO: 161958 - DNA, 251 bp, Glycine max
gcagcactcaaaaccctagagaggacgagagagcgtgcaactttcggcaaccacagaccatgacattcaagcgcaggaatggaggtcgcaacaaacacggccgcggccatgtcaaattcatccgatgctccaactgcggaaaatgctgccccaaggacaaggccatcaagaggtttttggttaggaacattgttgaacaggctgcagtcagaatgtgcaggaagcttgtgtctatgaacaatatacacttc

SEQ ID NO: 161959 - DNA, 260 bp, Glycine max
tttcctttttatctctatctttcttcacatcttaaccttgttcttaccagatggctgcctcagttaaactcttatttttgtcctttctctcgttgttcatctctttctccatagctcaaacctctttcagaccaaaggcacttgttcttcctgtaaccaaagatgtttctgcctcagttcctcagtatgtcacacaaatcaaacaaagaaccccacttgtggcagtgaaactaactgttgatcttggtggtggctacttg

SEQ ID NO: 161960 - DNA, 251 bp, Glycine max
ctagccgcagcagcctcaggaggagaataaggatgtctcacaggaagttcgagcacccaaggcacgggtcactgggatttctccccaggaagcgtgctgctcgtcacaggggaaaagtgaaggcattccccaaggatgacccatccaaggcacccaagctcactgcattcttgggttacaaggctggtatgactcacattgttagagaggtcagaagccaggatcaaagcttcacaagaaggaaacatgtg

SEQ ID NO: 161961 - DNA, 248 bp, Glycine max
cgcaacacaacaaaaaaagacaacccagagagcgcgtcttaataaacgctcttctctgaaaacccccatttcttttcttctttcttcttctctttcgcttcttcgatcttcgatcttcgtcgctgaaaatgagagagtgcatttcaatccacatcggccaggccgggattcaggttggaaacgcctgctgggagctttactgcctcgaacaggcattcagcctgatgggcagatgccaagtgacaaga

SEQ ID NO: 161962 - DNA, 249 bp, Glycine max
cttgaacttgaactatcgggtcttcttcttggctctctctgtttaggatcgatatggatttgtattttcctttggcaatacttgtgctgatattaggcacaccatactctagtgcttttgggaagagtgaaagtaatgtgaaaacagctgtttttctgtctcccaagtttgaacttggaccgggttcggtagccaataaatttgattatgatattgattttccaagaggtcatattgccctcaagagtt

SEQ ID NO: 161963 - DNA, 247 bp, Glycine max
gatcagccaccctaaactcggaaactgccacagatctttgaaaaagatagaggaaagaaatgtgattgaaaataagctgaaagaggaagcaagagagccaggaaggaagcaaattattgctgaatttaaatctttggtttcttcatttcctgatgaaatggggtctatgcaaagccagcttagaaaatataaagaatctgcttcagataccattctctgcgtgcagatgtgaagtctgtttctagta

SEQ ID NO: 161964 - DNA, 246 bp, Glycine max
cgtcggagctgtgtctggggaaatttgcgttgtttttcgcggtacagctcacacacactgaacggtaagtatggcggacaaggctgttacaatccgaacccgaaagttcatgaccaacaggcttctttccaggaagcagtttgtcgttgatgttcttcatccagggagggcaaatgtttccaaggctgaacttaaggagaagctagctagatgtatgatgtgaaagaccctaatactgtatttgtc

SEQ ID NO: 161965 - DNA, 249 bp, Glycine max
caacttctgctacttcctactccaaccgcacttctgctccgcaattatcatgggcaaggtcaagatcggaatcaacggatttggaagaattggccgtttggtagccagagtggctctgcagagagacgatgttgaactcgttgccgttaacgaccctttcatcaccaccgattacatgacatacatgtttaaatacgacagtgttcatggacactggaagcatcacgatgtcaccgttaaggacgagaa

SEQ ID NO: 161966 - DNA, 251 bp, Glycine max
ccacattcacctgagctttttgtgaggattccaaagcatggcttcccttgcagcatccactgctgctgcttcccttggcatgtcagacatgcttggaaaccccatcaacctcagtggtgccacaaggccagctccatctgcctctagccctgcctccttcaagactgtggctcttttctccaaaaagaaggctgcacctccaaaaaaagctgcactgctgctcctgccaatgatgagcttgccaagtggta

SEQ ID NO: 161967 - DNA, 257 bp, Glycine max
caagaatatcaaattggtctcttgtcttcctcctcatctctacactactccacatagagcccagcctctcaagcccaagcccaagcccaagcccaagcccgttcataaaatcctcctgcagcagcacccagtacccagccctctgcgtctcatccctctccgtctacgcctccagcatccaacaggaccctcaccaactggttcagacagcactctcctctccctgaaccgcacccaagccaccaaaaccttcgtgg

SEQ ID NO: 161968 - DNA, 244 bp, Glycine max
ggaaaagaaaattctctcaattcgagacagaggtatcggtatgacgaaggaggatttgataaagaatttggggacaatagcgaaatctggaacttctgcatttgttgagaagatgcaaacaagtggagatctcaatctgattgggcagtttggagtcggcttctactctgtttatcttgtggccgactatgtcgaagttattagcaagataacgatgataagcagtatgtatgggaatcaaaag

SEQ ID NO: 161969 - DNA, 244 bp, Glycine max
gtggccgtgtcgcagcaaaaccaaaccacatattaacttgtttgctctaagtcatggctctgatcttgcacgcaaccaaagcaaacaagaatgctttcaagactctgattgcggcagagtacagtggcgtccaagtggaattggcccctaatttcgagatgggtgtctctaatagaactcctgaattccttaaaatgaatcccataggaaggttcctgtcttggaaacgcccgatggtccagtc

SEQ ID NO: 161970 - DNA, 254 bp, Glycine max
agcgagtcaggttcagcaaagacggttctgccctccaactaaccgcggttgacggccgtcgcgcctccgttattgtccccaatgacccggacctcatcgacatcctcgccatgaacggcgtcgacatttccgtcgcggaaggcgaatcccccaacagcttgttcaacatcgttggcaacttgctcttccccttgctcgcgttcgcgggtttgttctcctcttccggagagctcaaggcgggcccggtgggcctg

SEQ ID NO: 161971 - DNA, 256 bp, Glycine max
atcgatctgggtgggctacaagtgtctcaaatatcaacattcaacaaagtatggggcacctatggcggcggaccggacaatcaaggcttcaccatgtttgaagcatcaggaattcctcaaggtttctttatgttaggtagctactgccaacccaacaacaagcctctttttggatgggttcttttggcaaaagatgtgtctaaaagcacaagcaacccactttaaagcaaccaatcgattacacgcttgtatggaa

SEQ ID NO: 161972 - DNA, 246 bp, Glycine max
ctctgcttcaacttgctccctcagaagcgaagaagaagccacagagaactagtctcctactctcacccgcaagaaaaaaatggcatctcacatcgttggatacccccgtatgggtcccaagagagagctcaagttcgctctcgagtctttctgggatggcaagagcagcgccgaggatttgcagaaggtgtcttctgatctcagggcaccatctggaagcagatggctgatgctgggatcaagtac

SEQ ID NO: 161973 - DNA, 235 bp, Glycine max
cagtgaactcattgttggatttaagggttatccccattttcaatgaaaatgatgctgttagtactaggaaggcaccatatgaggattcttccggtattttctgggacaatgatagtttggctggtctattagcccttgaacttaaagctgacctccttgttttattgagtgatgttgaggggctctatagtggtcctccaagtgaccaaactcaaggttgatccatacatatata

SEQ ID NO: 161974 - DNA, 234 bp, Glycine max
gaggccaggcaagccccactcaaccaccacacctctcctcgttcacgctacccctttctgctcttcttctacctttcaagttttaaaagtataaagatggcagagacattcctatttacctcagagtcggtgaacgagggacaccctgacaagctctgcgaccaaatctccgatgctgtcttcgacgcttgcctcgagcaggacccagacagcaaagttgcctgcgaaacatgc

SEQ ID NO: 161975 - DNA, 245 bp, Glycine max
tgaagctccatattatcaaatcagccctgctggtcactgccctcatgatgaagttcctgagatcataaatttcttacttcgcgggtggatcagaaacctagagtctcagggttctgtgtcattaccattgcttgaagatctagacagtatgaagcactctattattgacagggaattagaatttcccagagaaggttcaaaaaagtcagtgatggtcagatatttcgcttccaatttctcacttt

SEQ ID NO: 161976 - DNA, 245 bp, Glycine max
ctgcatttggggatggtaatgggacaacagaaaatcgccctcgcccctccctcttcgtccttccgcctccgcagccgcagcctcaactccctccgcctccgccgcatcttcgacatgttcgacaagaacggcgacggcaccatcaccgtcacggagatcagccaggcgctgagcctcctcggcctggacgccgacgtggcggagctggagtccatgacgaaactctacataagacccggcaacga

SEQ ID NO: 161977 - DNA, 247 bp, Glycine max
cttcttcccaaccactactactcactcactgcagatctcaattgtatcgctgtccatggctaccatcgttagcatcaaggcccgccagatcttcgacagtcgtggcaatccaactgtcgatgtggatttgacttgctccgatggtacttttgccagagctgctgttccaagtggtgcatccactgggatttatgaggcccttgaattgaagatggaggatctgactaccttggaaagggtgtatcaa

SEQ ID NO: 161978 - DNA, 224 bp, Glycine max
cttcttgttgattctgtgaaagaactagcaaaggaagcactaatcaaagttcctgagcgatacgttcatccaaatattgaaccccccattttatttcataaagacactttgccacagctccctatcatcgacctaaacaagttattgtctgaagatgttaaggaactggaaaagctagactttgcttgcaaggaatggggcttttttcagcttgttaatcacgg

SEQ ID NO: 161979 - DNA, 248 bp, Glycine max
cacaagccaagtgaaagtgagaaaaaataaaaatcaaagagcataatgtcagggatcattcacaagattggggagacccttcatgtgggagggcacaagaaggaggaggagcataagggtgagcaccatgctggagaatacaaaggggagcaccatggtgaacacagtagtgagtacaaaggagagcatcatggtgaacacaaagctggagagtaccatggtgagcacaagccagagcacaaagaggg

SEQ ID NO: 161980 - DNA, 243 bp, Glycine max
gtggtgccttatcgctgtggttttcatcgtcttccttctcttatatttcttttttttttttgtcttcgccgcacgccgaaacaatggccggaaaaggagagggtcctgctatcggaatcgatctcggaaccacctactcttgtgtcggtgtgtggcaacatgaccgagttgaaatcatcgccaacgaccaagggaacagaacgagccgtcttacgtcggcttcactgataccgagcgtctcat

SEQ ID NO: 161981 - DNA, 245 bp, Glycine max
cttgaggtcataaccaatggcaagtacaagagtgtcatgcaccgagtgattgcccaagccgatgataccagaatgtccatagcttctttctacaaccctggtgatgatgctgtcatttctcctgcaccggctttggtgaaggaattagatgagacaagccaagtgtacccgaaatttgtgtttgatgattacatgaagctctatgctggtctcaagtttcaggctaaagagccaaggtttgaagc

SEQ ID NO: 161982 - DNA, 245 bp, Glycine max
ctgaaattggtaaacaatttaggaatgagggcatagatttgacccataatcctgagtttactacctgtgagttctatatggcttataaggactacaacgacttaatggatataacagagcaaatgttgagtggtatggttaaggaacttaccaaagggagctataaaatcaagtatcatgctgatgggattgacaaggaacctattgaaattgactttactcctccttttagaaggattgacatg

SEQ ID NO: 161983 - DNA, 246 bp, Glycine max
  unsure (1)..(246): unsure at all n locations
attccatagttctcagatagggcacgtctctcgcggcctcttctctccctcgcgccgcccacactaaaaggttattgctctattattgtttgacgatggctgatgctcatgggactgataagaacattgaggtgtgganaatcaagaaattgatcaaagctcttgaggctgccagaggaaatgggacaagtatgatttcccttatcatgcctccacgtgatcanatatctcgtgtcaccaagatgc

SEQ ID NO: 161984 - DNA, 245 bp, Glycine max
aaacttctttctggttatgtcaatcagaagaagtttggtggtgataccccttatagtttgatgtttggaccagatatatgtggttcacagacaaagaagctccatcttatactatcataccaggggcagaattaccccattagaaaagatctgcaatgtgaaacggataagttgactcatttctatacatttattctaaggcctgatgctcttatagtatccttgttgataatcgggaaagagat

SEQ ID NO: 161985 - DNA, 250 bp, Glycine max
gagaataatcatatttattattaaatagaaaaaatggcccgatcatttatcaaaggccaatcttcggtagaagagaaggttcctttggaacacttatttctatttcagtataccgggtctctttctttcatttcaaaaaatttatagaatttcgattttgaaatgaaagttaagtgtggggataaatataaatgacaaaaagatattggaaataatcttggaagagatgatggaagcaggagttcatttt

SEQ ID NO: 161986 - DNA, 311 bp, Glycine max
tcgcacgcacgcgattcggctcgagctttctctcgttttttctcagaaccttctgaggttaaagcaaaaaaacaaagagagagagagagagaaaatgatgaagccatcgatgctcagatctctccactccgccgccacccgcggcgcctctcatctcttccgccgtgggtacgcctgcgagccggtgccggagcgcaaggtagccgttctcggcgccgccggcgggatcgggcagcctctctcccttctcatgaagctcaatcccctcgtttcgagcctctccctttacgatatcgccggaactcccggcg

SEQ ID NO: 161987 - DNA, 284 bp, Glycine max
aaaatggccaaatcaatcaaattctttgagttgaacacaggggccaagattccttctcttgggttagggacttggcaagctgaacctggtgttgtagctgaagctctcaccacagccattcaggttggatacaggcatattgactgtgctagtgcgtataagaatcaagcagagattggttctgctcttaagaagctttttgatgatggtgtggtgaagcgtgaggacttatggatcacttccaaactctggtgttcagatcatgcaccagaagatgtgccaaa

SEQ ID NO: 161988 - DNA, 278 bp, Glycine max
ttcacagcgaagtcgtaggagggtttcaaaagatggagaacatgcagagcttctggcaattgggcgatgaactccgtggacactcaaaagcatcggaggatcacaaatggttaatggttgcttcgaaattggcggaacagacaagattgaagggggagcgtgtgaacaaccttgatctttcaaagggccccattgaaataaggtcaagggataaatttgggttccaggaagagaacaaatttgattctcttaacttaagcatgttgaacctggactct

SEQ ID NO: 161989 - DNA, 284 bp, Glycine max
tacttggtgtcttgcaattcccaatggcctccattttcaagctctcaacgccatctccagctgcttccttatcagaagcgcttcgccccagagattctcgcttcctctccttcaatccttcttccaacgctattaattacaaaattaacctctccgcttccctccgatccattcactccctccctcttaaaacctccttgcggatcaaatgctcccaaacagatgggaatggaagtcctgcaaagaggacagtgcttcatgatctttatgagaaagaagggcag

SEQ ID NO: 161990 - DNA, 253 bp, Glycine max
  unsure (1)..(253): unsure at all n locations
ctcctaatgctacctccttagaaattgcttaatctttttcattcattcaattacttagcaaattgttacgaaatgcaacacaacatcttcgcctcaccgcgtacnttgaagatcatggacggttgcaagggcactcaggtctacgccatcaacccctccagcgccaccggcggtggcaattggcgagaagcttctccaacagcttcacgaccacatcaaaagccacacccttagaaccaaatcggttcggaac

SEQ ID NO: 161991 - DNA, 283 bp, Glycine max
tggcgtggtggtttttctggtgcaaatgatgaacgtgaaagtactttaaatcagctgttggtggagatggatggttttggaaccacttctggagttgttgtgttggcaggaacaaataggcctgatatcttagacaaagctcttcttaggcctggtggatttgaccgccagataacaattgacaaacctgatattaaaggtcgtgaccagatatttcagatctacttgaagaaaatcaaacttgatcacgattcttcatattattctcaaaggcttgcagccc

SEQ ID NO: 161992 - DNA, 281 bp, Glycine max
tggaaataacaccagagaccatccaggaatgatccaggttttcttgggccaaagtggaggacttgacactgagggtaatgaacttccacgtttagtctatgtttctcgtgaaaagcgtccagggttccaacatcacaagaaagctggtgccatgaatgcccttgttcgagtatctgcagtccttaccaatggacctttcttattgaatcttgattgtgatcactacataaacaacagcaaggccttgagggaagctatgtgctttatgatggatcccaatc

SEQ ID NO: 161993 - DNA, 285 bp, Glycine max
  unsure (1)..(285): unsure at all n locations
atgtgacaatctgtgcaagaactgcaagagacctggtcattatgcaagagaatgccctaatgtcgcaatttcgccacaactgtggcctccctgggcatattgcttctgaatgtacgacaaagtcactgtgctggaactgtaaagaacctggccacatggccagcagttgtccanatgagggtatttgccacacctgtggtaaagctggacaccgtgctagggaatgctcagcccctccaatgcctccaggggacttaaggttgtgcaacactgttataagcaggg

SEQ ID NO: 161994 - DNA, 280 bp, Glycine max
gcaaaaagaaagaatcccaggcgaggagaaagatggaggggaaggagcaggatgtgtcgttgggagcgaacaagttccccgagagacagccgattgggacggcggcgcagagccaagacgacggcaaggactaccaggagccggcgccggcgccgctggttgacccgacggagtttacgtcatggtcgttttacagagcagggatagcagagtttgtggccacttttctgtttctctacatcaccgtcttaaccgttatgggagtcgccggggctaagtc

SEQ ID NO: 161995 - DNA, 277 bp, Glycine max
ccgaccttgaacgcttcccatcttggtgagtaacacgaatctgaggaaaaaaaatgtcgattatgcaactttacgggcgcacaagagcgtggtgaagcggtcgaagaagtacttggaagaagcgctttacatgaagctcttcaaagatggaagctcccagctcatcgttcgccagagcctcaacaacttcgtcaagagccgaaagcgcgtttacaaatgggaggtaggcgacacgctcaagaagcttcgcgatcgcaagctctatcaacccgctctt

SEQ ID NO: 161996 - DNA, 280 bp, Glycine max
gagagggggtggggtgacactgccgagcgtgtcctcgagatgatccagcttctcctggaccttcttgaggcacctgacccttgcaccctcgagacattccttggaagagtccctatggtcttcaatgttgttatcctttctccccatggttactttgcccaagataatgtcttgggataccctgacactggtggacaggttgtttacatcttggatcaagttcgtgccttggagaatgagatgctcaaccgcatcaagaaacaaggcttgatatcacccc

SEQ ID NO: 161997 - DNA, 279 bp, Glycine max
gcacaacacaacaattcactaagctaaaatcacttcatcatggcttcctcgtgtgcttcctctgccattgcagctgttgccatctccacaccaagttcccagaagaatggatcactcttgggaagcacaaaagcttcttttcttagtgggaggaaactgaaggtgaacaactttacagcaccagttggagcacgatccagcactacagtttgcgcagttgctgagcctgataggcctctgtggttcccaggcagcacccctcctccatggctagatggc

SEQ ID NO: 161998 - DNA, 281 bp, Glycine max
caaaatcttcatattcatcaaactcatcaaaatgaatctgtaccactcctccacaaacaacaccacacaaaacatcttcaccgtcatattcctcctccttgcaatattattcagtctcacaccccacaaggccaacggtgccacgtgtcaccctgaggaagaagcgggcctgttgggcttcaaatccggtatccgatccgacccgtccggcctgctcagtaactggatatcgggtacggactgctgcacatggaccggagtagaatgccactataacagca

SEQ ID NO: 161999 - DNA, 277 bp, Glycine max
acctcgttgaaatgaaaatgggttcttctttgtggactttgtgtctaattttggcttcactagcctcttctgcattctgtgcctttccacggaggccagtggatgttccattcggcagaaactacgttcccacttgggcttttgatcacatcaaatacttcaatggaggttctgagattcaacttcatcttgacaagtacactggtactggcttccagtccaaagggtcatacttgtttggtcacttcagcatgaacataaagatggttcctggcga

SEQ ID NO: 162000 - DNA, 280 bp, Glycine max
  unsure (1)..(280): unsure at all n locations
ggcattcaccatctcctgtgggacacaggtatagcaggaggagcagaagagacagaagcagatctccttattcatcctactcttacaacaggcgaaaaagtcgttctatttcaccaagaggtcacagaagtccttctactactccaagacgtcgtagaagccgaactccatctgctanacgatacagaagacatagaagtaggagttcctcgttgtctcctactcgtaaatcttccagtcaaagtcttgggtcaatagagcacaaagtgcaactgaaaac

SEQ ID NO: 162001 - DNA, 176 bp, Glycine max
ctcgagccgagaacttcatgcaaaacgagttctacctcaagtctttaattctcgaagacattccaaaccatggaacctagaacttcatatgtaactcctgggtttacaattcaaaacactacaagactgatcgcattttctttgccaacaatacatatcttccaagcgagacaccg

SEQ ID NO: 162002 - DNA, 284 bp, Glycine max
caacaagcaaagtacatggttgatttggaaatccaggtccccaccccattcgacccgtttgccgaggcgagagaatcggatgcccccggagcaaaggagtatgtgcatattcgaattcagcagaggaatgggaagaagagtctgaccacagtgcaagggctgaagaaggagttcagctacgagaagatcctcaaggacctcaagaaggagttctgctgcaacggaaccgtggtgcaggacaaggagcttggcaagatcatccaactccaaggcgaccagcgtaa

SEQ ID NO: 162003 - DNA, 277 bp, Glycine max
caattatggagaaagcaattcaaagacagagagttctgcttgaacatcttcaacccatttcttcaagttcaaatttttcctctcaaacccatcaatctacggatctctcagcttcattatgttttgctgggaattcttcgcatggtcaaacaggtggatcagatgatgacgtggtgattgtagctgcatatcgtactgccatctgcaaagcaaagcgtgggggctttaaggatacccttccagatgaccttcttgccacagttctgaaggctgtaat

SEQ ID NO: 162004 - DNA, 276 bp, Glycine max
aattgttgtaactttttgattcctaaattctctaaaattcgaaattctaatttcgttaggggaaagagattgtttgtgtgtgagtgagtatggctggaaaaggcgagggtcctgctatcggaatcgatttgggaacgacgtactcttgcgtcggcgtgtggcaacacgatcgtgttgaaatcatagccaacgatcagggtaacagaactaccccatcctacgtggctttcaccgacacagaacggttgatcggcgatgcggcgaagaaccaggtcg

SEQ ID NO: 162005 - DNA, 276 bp, Glycine max
tgaatttcaatttccctaggggcttaatatctcccctcacttgtgcctagccttatgtcatagtattatcattcattctcatctttctctcttctctctccacccaaaccctaactcccgaccctgttcccctctcgtatccgtcatgaaaggaggaaagtccaagaccgaatctaagagagccgatcccaaacttgctgtgaataagaagggagccgccaccaaggctaggaaacccgccggcaaggggaaggcagcgaaagaccctaacaagcc

SEQ ID NO: 162006 - DNA, 275 bp, Glycine max
tgcattcttacagagtgggatgagttcaagaacattgattttcaaagagtgtatgacagcatgcagaaaccagcatttgtgtttgatggaagaaacatattgaatgctgagaagttgagggagattggattcattgtgtactcaattgggaggccattagagcaatggctaataagcatggcctaacaggcttgaagattatgaattgagcagagctatcaattatgttatcctttgtgacatttcaccacttgctatttttcatgatttcaagc

SEQ ID NO: 162007 - DNA, 274 bp, Glycine max
ggccaccgtcacttctgcagccgttgctattccctcattcactggcctcaaggcaagcgcaggcaaagtgagtgccgcagttaaagtctcagctccccaagccacaaggttgggcatcaaggcttcgctgaaagacgttggagtcgctgttgtggccactgccgcgagtgcagtgctggctagcaacgccatggccattgaagtgttgctgggtggtgatgacgggtctctggctttcgttcccaacaatttctccgtggcctctggggagaag

SEQ ID NO: 162008 - DNA, 275 bp, Glycine max
gtcaagataccagtgatctacatgagaaagtcgattttgtggcatgcttgggtggagatggcgttatactgcatgcgtcaaatctattcagagatgctgttccccctattgtgtcatttaaccttggctcccttggttttctgacttctcatgattttgaagattacaagcaagacctacgacaagtcatccatggaaataatacacgagatggtgtgtatattactcttagaatgcgcctccgatgtgaaatttttcgtaaaggtaaagcaatg

SEQ ID NO: 162009 - DNA, 278 bp, Glycine max
aagccaagtgaaagtgagagaaaaataaaaatcaaagagcataatgtcagggatcattcacaagattggggagacccttcatgtgggagggcacaagaaggaggaggagcataagggtgagcaccatgctggagaatacaaaggggagcaccatggtgaacacagtagtgagtacaaaggagagcatcatggtgaacacaaagctggagagtaccatggtgagcacaagccagagcacaaagaggggttcctagacaaagtcaaggacaagatccatg

SEQ ID NO: 162010 - DNA, 275 bp, Glycine max
agcaacttcacttccagtgttagcgaactcacaattggcaagaaggatttacgaaggaacttgaagggaaaatatcgtggtgacggtccatgcatagccacaaaccccatcgacaggtgttggaggtgtgaccccaattgggccaacaatcgccagaagctcgcagattgcgtccaaggcttcggtagaaacaccgttggaggcaaaggtggaccattctacgtggtcaccgatccctccgacgatgatatggtgaaccctaaacccggcacgct

SEQ ID NO: 162011 - DNA, 274 bp, Glycine max
caaacacagatgctgcacagcttgctgaaacatttgctgtagcaaaatgccccacaaaggtggttggtgttcctgtcactctaaatggagatcttaaaaaccagtttgtagaaactaatgttgggtttgacacaatttgtaaggttaattctcagctcatcagcaatgtctgcaccgatgctctctctgcagagaagtattattatttcatccgtcttatgggacgcaagcatcacatgttgctttggaatgcaccctccagtcccatccaaac

SEQ ID NO: 162012 - DNA, 279 bp, Glycine max
aactgaggagagtgagagaaaagagaagagaagatgacaacacgcttcaagaagaacaggaagaagaggggccacgtcagcgctggccacggtcgaatcggaaagcacaggaagcaccctggaggacgcggtaacgccggaggcatgcaccaccacaggatcctcttcgacaaataccaccctgggttcttcggcaaggtaggaatgcgctattttcacaagcttcgcaacaaattctactctccgatcctcaacatcgacaagctgtggtccctggtc

SEQ ID NO: 162013 - DNA, 275 bp, Glycine max
aaacatctcaatgggttcttcttctattacaacatcgcctgaaaccatgaccatggctgcgatcgtgctcctgttcacggtctttgccgtttcctccgccctagacatgtcgataatctcgtacgacagcgcccacgcggacaaggccgccacgttgcgcaccgaggaggagctgatgtccatgtacgagcagtggctcgtgaagcacgggaaggtgtacaacgcgctcggcgagaaggagaagcgcttccagatcttcaaggacaacctgcgat

SEQ ID NO: 162014 - DNA, 265 bp, Glycine max
actctctctcaccaaagccttcctagaacgatgaaatcaaacaagagcaattttccctcaccaaacaagaagaaccaaacaatggccgatcaacttaccgatgaacagatctccgagttcaaggaaccattaagcttgtccgaaaatgacggcgaaggatgcatcacaaccacggagcttggaactgttatgcgttcattggggcaaaacccaactgaggcatacctccatgacatgatcaatgaagtggatccagatgggaatg

SEQ ID NO: 162015 - DNA, 274 bp, Glycine max
gaaggttacattttccgtggaagattcgtagggtcttggcttgttaagcttctttcttctttctaaaggctacattttccatggaactgtcagaagacgtgctactctgaaatatcaacacttgctcaaactccacggagcactctcttcaaggcagatttcttgaattacgaatctctttgctcagcaatttctggatgcactgcagttttccatcttgcttgccctgtaccctcaattattgttcccaaccctcaggcaattctttttatat

SEQ ID NO: 162016 - DNA, 271 bp, Glycine max
agagagaaagagaaccaaaccaaataaagctcttggttggttcacccttgtgcttattttttgttgctgagaaagagcaaagaagaagaataagaagaaggttttgatcggatgcgatgagcacacaaggacaagtgattgatgaggcggttctggatgacataatccggcgcctaacggaggtccgattggcccgacccggaaagcaggttcagctctccgagtctgagatcaagcaactttgcgtcgcttccagagacatcttcattaa

SEQ ID NO: 162017 - DNA, 263 bp, Glycine max
gtggtgccttatcgctgtggttttcatcgtcttccttctcttatatttctttttttttttttgtcttcgccgcacgccgaaacaatggccggaaaaggagagggtcctgctatcggaatcgatctcggaaccacctactcttgtgtcggtgtgtggcaacatgaccgagttgaaatcatcgccaacgaccaagggaacagaacgacgccgtcttacgtcggcttcactgataccgagcgtctcatcggtgatgcggctaagaa

SEQ ID NO: 162018 - DNA, 271 bp, Glycine max
gttggtggaacgttggagaagatcgttgaccggttatctgtagtttggggcatgatcaatcatctaaagtctgttaaggatagttcggagctacgttctgctattgaagatgtacaggcagaaaaagttaagtttcagcttagactgggtcaaagcaaacctatttataatgcattcaaagccattcaggagtctcctgattggcagacactcagtgatgctcgaaaacgtattgttgaaagccaaataaaggaggcggttcttaatggag

SEQ ID NO: 162019 - DNA, 263 bp, Glycine max
ttcgttaaaaatagaaagcacaacacataagctacgcacacgtagcttccttcatttcggaaattctaagcaatcaataaaagatggcagatggtgaggatatccaacctcttgtttgtgataatggaactggaatggtcaaggctggatttgctggagatgatgctccaagggccgtgttccctagcattgtgggtcgtccacgccacactggtgtgatggttggaatggggcaaaaggatgcatatgttggtgatgaggct

SEQ ID NO: 162020 - DNA, 278 bp, Glycine max
gtcaagataccagtgatctacatgagaaagtcgattttgtggcatgcttgggtggagatggcgttatactgcatgcgtcaaatctattcagagatgctgttccccctattgtgtcatttaaccttggctcccttggttttctgacttctcatgattttgaagattacaagcaagacctacgacaagtcatccatggaaataatacacgagatggtgtgtatattactcttagaatgcgcctccgatgtgaaatttttcgtaaaggtaaagcaatgcca

SEQ ID NO: 162021 - DNA, 272 bp, Glycine max
aattgctggagtggcactctactcgttcatcaaagccaggatggaggaagagaagcgacaagcgaaagcagcataagaagttgtcaacctggaggatgtcttgcactgtaaatcaccacaaatttccttcaaaataattgagtgactggttcagtgttgtactatccttgtgatagcgcgcttttatttttccttctatttttgtcaaatattttctttttttcctttttctctcttcattcagaaaacaatgtctcgctgctgatttgcag

SEQ ID NO: 162022 - DNA, 272 bp, Glycine max
aaaacattcccaataacaataatatacacatcttcaattaagctccttctcctatagccatggctctttctaagcttataattgcttcccttcttgcgtcgcttctccttcttcatttcgttgatgctgatcaatcggcacatgcacaaacgcaggggtctcttcttcagcagatagattgtaacggagcatgtgctgcgaggtgccgtttatcatctcgtccacgcctctgccaaagagcttgtggaacttgttgtagacgctgtaactgc

SEQ ID NO: 162023 - DNA, 273 bp, Glycine max
ttaagagatcaatatggccaccaccactacccagcctccctctaatatctgttttttccttctgttgttgcttctagcacactttcatttgggcataagccaacttgagctgaattactactctaaaagctgcccaaaagctgaagagatcatcaaggaacaagtcacacaactatataacaagcatggaaacactgccgtttcgtgggtcagaaatctcttccacgattgcgtggttaagtcatgcgatgcatcattactgttagcgacggt

SEQ ID NO: 162024 - DNA, 274 bp, Glycine max
tgaattggaaaatctaagaggagatggaaaaggagagcgcaaggaatatgataggatctatgattatgatgtctataatgatttgggtaacccagacaagagcaatgatctagctcgtcctgttcttggagggtctagtgcctatccatatcctcgcaggggaagaactggtagaaaaccaacaacaaaagactctaagagtgagtcaccatccagcagcacctacatcccaagagatgagaactttggtcacttgaagtcatcagatttcctt

SEQ ID NO: 162025 - DNA, 273 bp, Glycine max
gtgctcatccctttagggtgaaagaagaatggtgctttcggaggaggaaatcggtcgtctataccgaataaggaagacggtgatgcagatgctgagggacagaaattttctggttggtgacttcgagatcaacatgtccaagcacgagttcaagtccaagtacggcgaacacatgaagcgcgaggacctcgtcatcaacaaatccaagaaggacaactccggcgaccagatctacgttttcttccccgacgaacccaaggtcggcgtcaagac

SEQ ID NO: 162026 - DNA, 294 bp, Glycine max
ctcggggttcggctcgagaaagcatttagtgacggtgttctgtttatgggctttaacatgttcccttcttccatctttctcctttggaattctgagaattggtttgaagaagagacctctagatcttgatagtattaatgctgctagaaaggcaagagaaggtctaagatctgtaagaccaatgatgggtgcacatgatcagtttattggtaagtcaaaaggtgaagatatagtacctttgaagaattatttggacgctcaatattttggtgagattggaattggcacaccccc

SEQ ID NO: 162027 - DNA, 275 bp, Glycine max
cacacaattcctacacatttctactctttagtttctccaattttctttctcaattctcaacaatggccactacaacacaacttcacttaccccctggattcagattccatccaacagatgaaagactcgtcatccactacctttgtcgcaaatgcgcttcgcaacatatcgcggttcccataatcgccgaaattgatctgtacaagtacgacccttgggaccttccaggaatggctttgtacggagagaaagagtggtattttttcacgccgagg

SEQ ID NO: 162028 - DNA, 270 bp, Glycine max
gctgtttccccatggagatctcactgaaataggtgagaggggagttaacttgagtggaggtcagaagcagcgaattcaacttgctcgtgcactttatcagaatgctgatgtatatctcttggatgatccatttagtgctgttgatgcacatactgccactaatctgtttaatgaatacatcatggatggtcttaaagagaaaactgttttactcgtaactcatcaagttgactttcttccagcgtttgattctgttttgttgatgtcaaa

SEQ ID NO: 162029 - DNA, 269 bp, Glycine max
ctcaactagatcatggcctcttctaactcctctctttctctccttctaccttctctcacaaccctcattctcctccaaattcaaacatgtgtctcctcatcacaattaacacaaaaacccctccttctgcctctcaaaacacaaacacaaacaccttcacgtaagctctcattccaccacaacgtcacatcaaccgtctcactaaccgtaggctcgcccccacagaacgttaccatggtcttcgacacaggcagcgaactctcctggct

SEQ ID NO: 162030 - DNA, 272 bp, Glycine max
gcggaaacttcaaaaccatctctgaagctttggctgccatcccaccaaaatacgacggaaggtacgtggtttatgttaaagaaggagtgtacgatgagaccgtgacagtgacaaagaaaatgctaaacgtaaccatgtacggtgacggacagcaaaagagtatcatcactggcaacaaaaatttcgtggatggagtcaggactttccaaactgcatcattcgttgtacttggaggtggattcttggcgaaagacatgggattcagaaacaca

SEQ ID NO: 162031 - DNA, 254 bp, Glycine max
cacattcttcctgtggatgatactattgaaggagtaacaggaaacctctttgatgcctacttaaaaccttatttcctggaggcatatcgaccagtgaggaagggtgaccacttccttgtgagagggggaatgaggagtgttgagttcaaggttattgaaactgacccttctgagtactgtgttgtcgccccagacacagagatcttctgtgaaggagagcctgttaaaagggaagatgagaatagattagacga

SEQ ID NO: 162032 - DNA, 253 bp, Glycine max
taccaactacatttcaaggaacaacaaggaggtcaaataggaatagcactagatgtcatttggtatgaacctataacagaacttgatgaagacaaagacgcagcagcaagacgctatggacttttcacttggatggttccttgacccacttttctttggaaaatatcctctctcaatggagaaacttgtagctaagagattgccggagatttctgatacagcctcaaaatttcttgtgggatctttggatttt

SEQ ID NO: 162033 - DNA, 250 bp, Glycine max
actgcttgttctttaattttgcttcatggaactgcacaaatccacacatgtggttcttcactcaagccctggtctgggccatctcatcccaacgattgagcttggaaagcgcttcgtccatcaccacaacttccaagtcactgttctcgccgttacttcccaaacctcaaaaaccgaaactgagatattaaactcatccctctgccacatcatcgacatcccttcaccagacctcactggtcttgttaac

SEQ ID NO: 162034 - DNA, 250 bp, Glycine max
ctccgatggctaatccctcactcttgttcttcagtctcctcctattatccgccaccgtagccgccgccgaacggatcgacgatgaagacgaccttctgatccgtcaagtggtgccggatgcggaggaccaccacctgctcaacgcggagcaccacttctccgccttcaagacaaagttcggcaagacctacgccacgcaggaggagcacgaccaccgcttccgtatcttcaagaacaacttgctccgcgc

SEQ ID NO: 162035 - DNA, 245 bp, Glycine max
cttcaatttataagaatggcactttctcctattcgttcttcttctttctcttcatcagctattgttgcattggctgtgttactgcttcttacagggacctcttcagctaacctctcaaagaacttctattccaagacatgtcccaacgttttcaacactgtaaaatctgtagttaaatctgctgttgtcagagaacctcgcattggggcatctattgttcgtctcttcttccatgactgctttgt

SEQ ID NO: 162036 - DNA, 246 bp, Glycine max
ctttctctctcccttagtcaaagggactcgttgttcttctcccagcgttatttagaaaagcaaaatggtgaagatttgctgcattggtgctggatatgtggggggtcctactatggcagtcattgcacttaagtgcccatccattgaagttgctgttgttgatatctctaaatcccgcattgcagcctggaacagtgaccagcttcctatctatgaacctggccttgatggtgttgtgaagcaatg

SEQ ID NO: 162037 - DNA, 245 bp, Glycine max
tcttcaattgtcgatgatcttggccttctgctaagagaaaaaggatttaattatcacggtttggaggttctatatagtggtgtttatggaacggaactaacatgtgagatatttattggacctgtttattatcaacggctgcgtcacatggtttcagacaaatttcaggttcgatctactggcacaattgaccaggtcacccggcagccaataaaaggacgaaagcgtggtgggggaattcgatt

SEQ ID NO: 162038 - DNA, 209 bp, Glycine max
atctggatgagcttgagaatagacttgatgacatagatagcatagaggctgaggaggaacggaaaagatcaagtcaagcaaatagaaagacatccaatcgtggtgttacaaaagcagctaagaagtacacggaaatacggtagacaagtagtaaagagaaaagagttaagtcagataatgataattattcaatggaaattgagaatgtt

SEQ ID NO: 162039 - DNA, 243 bp, Glycine max
tatggttcccgttgcgtgaagccaccgatcatctatggtgatgtgagccgcccaaagccaatgaccgtcttctggtcatctctggctcagagctttaccaagcgcccaatgaagggaatgcttaccggtcctgttaccattctcaactggtcctttgttagaaatgaccaacctagatctgagaccacctaccagattgctttgtctatcaaggacgaagtggaagaccttgaaaaggctggc

SEQ ID NO: 162040 - DNA, 251 bp, Glycine max
gcggaagctctagcttgggtagcgaatcacaatggcgagaggattaaagaagcatctgaagaggcttaatgccccaaagcattggatgcttgacaaactgggtggtgcatttgctcctaagccctcatctggaccacacaaatcgagggagagcctgccactcatactcattttgcgaaaccggctgaagtatgctctaacataccgtgaagtcattgctattctgatgcagcgacatgtccttgttgatg

SEQ ID NO: 162041 - DNA, 247 bp, Glycine max
gaatgttgcgagggaaatcataaaccatagaagtcttcggcaccccaatattattcggttcaaggaggtggttctgactccaacccatctgggtattgttatggagtatgcggctggtggagagctctttgagaggatttgcagtgctggaagattcagcgaagatgaggctcgatatttcttccagcagctcatctcaggagttagctactgtcattccatgcaaatctgtcatcgagacttgaag

SEQ ID NO: 162042 - DNA, 248 bp, Glycine max
caaaaattatggacccataatgttcataaagttgggacaagtcccaaccgttgtagtttcctcccctgaaactgcagagctattcctcaaaacccatgacacaatctttgctagcaggccaaaaactctagcttcagaatacatgtcttatggaagtaagggcctagcgttctctgagtatggaccctattggcgtaacgtgaaaaagttgtgcaccacacaacttctgagtgcatcaaaggtcgaga

SEQ ID NO: 162043 - DNA, 241 bp, Glycine max
ttgggagttaggttctgcacgctctgcttccagcgagtgttctttcttcgtttcaacaccttaatttgcacacgctgcttcttccacttgagaaatggcacaagaaacctttctattcacatctgaatctgtaaacgagggtcaccccgacaagctgtgcgaccagatctctgatgcagtgctcgatgcgtgccttgaacaggaccctgacagcaaggttgcctgtgagacatgcaccaag

SEQ ID NO: 162044 - DNA, 241 bp, Glycine max
ctaaagtaagcgtagatcctttgccaacaagtgggtttcaaagggtcttgcaaggtcaagaactttcgaccttgagaggtaattttgctgaaagaacgaatctgatacggcagagaagtctggtgtgtggccacctgccacggatgatgaaaagattgatgtttctacctcaagaaggtatgggtcagacagctggatgtcaatgggaaggcatgaaccaacatatccagatctactttca

SEQ ID NO: 162045 - DNA, 241 bp, Glycine max
tctgagggccccagaagctcatttgatctgggtttctcttgtttttgtgttgaaggagagtcttttgttttttgtggcgagtttgttgcacgtttaagaagcaatggcacgcaagaagatcagagagtatgactccaagaggttgaaggagcactttaagagaatctctggccaggagttgcccatcaagtctgcacaggttacagaatccaccaatttcagtgagctagcagagaaggaa

SEQ ID NO: 162046 - DNA, 250 bp, Glycine max
cgagattccaactgaggaaagtgacagtgctctacgagcttctctctgcttgtctatcagatttaggtgaaaataacaagaaatttagccggaggagaaagggctatgatgctcaacaacgtgtcactctgcggctgctagcaacttggctcgatatcaagtgggcaaaaatggaggccattgagacaataggtgctagttctgcaatggttttattaaagagcaagaggcaagtaaagaagaaattcaa

SEQ ID NO: 162047 - DNA, 248 bp, Glycine max
cttgcattttcctacttccacgacatagattcacgcttcagccatggacttgacttgcctcccgaagaaaccgagaagggtttcctaggaaaaatcatgcccaggctcgtcaaatccatctctggcgacaggacacacgtgcttcgcttcgagaccccagagactatgagcagggacaggtttttctggtttagggatgaggagtttgctagacagactgttgctggtctcaacccgtatagtatacg

SEQ ID NO: 162048 - DNA, 243 bp, Glycine max
cgaatacataatcgttggatctgccaatatcaaccaaaggtcaatggatggtgctagggactctgagattgccatgggtgcttatcagccctatcatttggctaccaggcagccagcacgtggtcagattcacggtttccgcatgtcattgtggtatgagcaccttggcatgcttcatgactccttcctccagccagagagtgatgcatgcattaacaaggtgaaccaagttgctgacaaata

SEQ ID NO: 162049 - DNA, 244 bp, Glycine max
ctttgtgtaggtgctcaaccctagtaagccgcaatggtgaagtactcaagggagcctgacaatccaactaagtcttgcaaggctagaggcgccgaccttagggttcattttaagaacacaagggaaactgcctttgcaatcaggaagttgcccttggtcaaggctaaaaggtacttggaagatgttcttgcccacaagcaggcaattccattcagacgtttttgtcgaggtgttggaaggacag

SEQ ID NO: 162050 - DNA, 245 bp, Glycine max
actcgagccgattcggctcgagaagagggagttataagatattcacagaagcagcaaaaatgcttatgcaacaagttcatgtatcaaatccaagttcatcttgtctcatccttcaaaagccatgcctccgtgacattactcacccatcttttcagctttggtcaaggccatcatcgttcccataccaaaggacgcaggaagggtttctcatggatgcaggtcttatggcatcaatatcttagctg

SEQ ID NO: 162051 - DNA, 239 bp, Glycine max
ctcataacacaaagcacaaagcaaagctcatccttgagttaaaaaatggcagcagcttcttccatggctctctcatccccatccttggctggcaaggccgtgaagctgggcccatcagccccagaagtgggaagggtgcgcatgaggaagaccgtcaccaagcaggtctcctcaggaagcccatggtacggcccagaccgagtcaagtacttgggcccattctctggcgagcccccgtc

SEQ ID NO: 162052 - DNA, 249 bp, Glycine max
agatgttgcacattttttgtttggcatctttgggaatgcttccgctctgttcctattcttggctccagtgatcacattcaagaggattattaagaacagatccacagagaagttctcgggcattccatatgtcatgacactgctcaattgtctcctttcagcttggtatggtttgccttttgtgtctccccacaacatattagtgtcaacagtgaatggcactggatcattgatagaaatcatatacgt

SEQ ID NO: 162053 - DNA, 242 bp, Glycine max
atacgtgaacagtgaagatgatttcttttcacatcctattgctaagcaacattacaaaaaccatattaaggctgtgttgacaagaaaaaacacaataactggggtcgcatataaggacgatcctgccatatttgcgtgggaacttatcaatgaaccccgttcccaacacgacaactccggaaaagttatttagcaatgggtgattgagatggctgcctacgtcaaatccatcgacaacaatc

SEQ ID NO: 162054 - DNA, 242 bp, Glycine max
  unsure (1)..(242): unsure at all n locations
ctcccatcctttcgcattctcaatacccttttgatttgtgaaaggaaagcaaacatggttgatcaggtccaacaccctacaatcatggacaacgttcctagtcaactccatctcagacctggtctttcatctggtattagaagttatgatggagcctaccgccacccagctatgtaccaaagaccctcttttgggaattactcggctngtgccttgcagtttcctgtgatgcccacatgcaa

SEQ ID NO: 162055 - DNA, 242 bp, Glycine max
attcaagtaaaatttcacttaagcttggtaaagttgaagagaatggcatagagaaggaatctgaccccagaaagaaggctgcggttttaattcttggagctggtcgggtctgtcaaccagctgctgaaatgttatcatcatttggaaggccatcatcgagccaatggtataaaacattgttggaagatgattttgaatgtcaaactgatgtagaagtcattgtgggatctctgtacctgaag

SEQ ID NO: 162056 - DNA, 241 bp, Glycine max
gttccagaggcccgtcttcggagtgcccgtgggtattgaagcccgacgtcgtggcccctggctcgtccattttggccgcttggattccggatgtgcccgcggcccgaattggcccaaatgtggttttaaatactgaatacaatttgatgtcgggaacgtcgatggcctgccctcatgcttccggggtggtggctctgttgaagaatgcacatcctgaatggagtgcttctgctattaggtc

SEQ ID NO: 162057 - DNA, 237 bp, Glycine max
aaataaaaaaggaaaggagatgtttgaataaaaataattccccttcaagttcttattttttgagaggacaggacaatatgaatgttttattatgctctatcaacacattaaaaagattatatgatatatctgctgtggaagtaggtcaacatttctattggcaaatagggagtttccaagtacatgcccaagtacttattacttcttgggttgtaattgctctcttattggtttcag

SEQ ID NO: 162058 - DNA, 236 bp, Glycine max
gttcgtgtccactattaaaaaaatcaacaagagtagtaacgctcccaagtccgttgcgagcaccggagcgacaatatcaccattgaacttccgaaccggggttgatcatttttgccttcacaccggaggaaaggcggtgatcgacgggatcggaatgagcttggatctgagcgagtatgacctggaaccggcgaggatgacgctgcaccggttcgggaacacgtcggcgagtagct

SEQ ID NO: 162059 - DNA, 239 bp, Glycine max
gcaggaagagagaaaggcgatggacctcggaacctatgaagtgccagaaggagtggacattctaggaagatacgatgcagagtttgcaaaaatcctcacaaaagacgctttgacattcgttgctgagctggaacgtgagttccaggagcgatatcaagcatgcattagggagcagtagagaggcaaagaagaagtacaatgaagggactcttccggggtttgatcctgccaccagtcaa

SEQ ID NO: 162060 - DNA, 237 bp, Glycine max
acagggcatgatgcaatggcaatatctcacttaacaaaggtgggaatgctgtttgtgcgttgtcgcggaggcataagtcactctccacaagagcatgtgctagataatgatgtctgggcagctggtttagcaaccttgtcatttctggaaaacctatcataagtgatacggtaactgtgtaaagcaataaatagatgatagcttgtaattataggttaatttattgagttaattcat

SEQ ID NO: 162061 - DNA, 252 bp, Glycine max
tgcgtattcagctcgagatgtggatgaaagtaaagaagtagcaaagatgtttccattcgggcacaatggtcacaagataaaggggactatggtggttatgcagatagaatgcgttggatatcaacagcatcaccagtgttgacgggatcgtcggtaccggcttagacttcttaggcagtggactcgatacagttacttgtttagcatcctgcatctccatccaacttagtagtgctaccaaggctgatggtg

SEQ ID NO: 162062 - DNA, 240 bp, Glycine max
cgaatacataatcgttggatctgccaatatcaaccaaaggtcaatggatggtgctagggactctgagattgccatgggtgcttatcagccctatcatttggctaccaggcagccagcacgtggtcagattcacggtttccgcatgtcattgtggtatgagcaccttggcatgcttcatgactccttcctccagccagaaagtgatgcatgcattaacaaggtgaaccaagttgctgacaa

SEQ ID NO: 162063 - DNA, 243 bp, Glycine max
aattgctggagtggcactctactcgttcatcaaagccaggatggaggaagagaagcgacaagcgaaagcagcataagaagttgtcaacctggaggatgtcttgcactgtaaatcaccacaaatttccttcaaaataattgagtgactggttcagtgttgtactatccttgtgatagcgcgcttttatttttccttctatttttgtcaaatatgttctttttttcctttttctctcttcattca

SEQ ID NO: 162064 - DNA, 239 bp, Glycine max
aataaattatgctactgggtgcatatttgagtatgacaaagctcatccagagggttctggcattggctttaaggaggaagacaaacccaacttcattggttctttctattccaaaactaaggctatggtcgaagagctcttgaaagaatatgacaatgtgtgcaccctcagggttcgcatgccaatttcatctgacttgagcaatccgcgcaatttcatcaccaagatttctcgttata

SEQ ID NO: 162065 - DNA, 236 bp, Glycine max
aaaaaaaatgggttcttctctgtggacctgtctgattttgttatcacttgcttctgcttccttcgccgccaacccaagagcaccaattgatgtgccatttggcagaaactatgtgcctacctgggcctttgatcacatcaaatacctcaatggtggttctgagattcagcttcatcttgataaatacacaggtactggcttccaatcaaaagggtcctacttgtttggtcacttca

SEQ ID NO: 162066 - DNA, 236 bp, Glycine max
caagaagcaaaggctcctttgggcctcaaccagtgtaaagaaccctgcctattctgacaccttatatgttgctcctcttattggacccgacactgtatcaaccatgccagaccaagcccttcaagcatttattgatcatggtaccgtatccaggacaatagactcaaatgcatctgaagctgaaggaatatacaatgctctccagaaattgggtattgactggagctttgttggtt

SEQ ID NO: 162067 - DNA, 230 bp, Glycine max
gccttgtccacgcccagagcatcctcgccatctgggccacccaagttatcctaatgggtgctgttgagggttatcgtattgctggtgggcccctcggtgaggtcactgacccaatctaccctggtggcagctttgacccattgggccttgctgatgacccagaggcttttgctgagcttaaggtgaaggaactcaagaacgggagattggccatgttctctatgtttggg

SEQ ID NO: 162068 - DNA, 236 bp, Glycine max
caacaaaggaatacatccatggcgaacaatatagatcagactccaaaacagttaaccaacaagcttacttttatgccagagacctcgaagtccatcccaaggacacatttgtgttcagtatagatggcaccgtactctctaatattccatactacaaaaaacaaggatatggggtggagaaatttaactcgaccttgtatgatgaatgggttaacaagggcaatgcaccggcactg

SEQ ID NO: 162069 - DNA, 237 bp, Glycine max
acttaagagatcaatatggccaccaccactacccagcctccctctaatatctgttttttccttctgttgttgcttctagcacactttcatttgggcataagccaacttgagctgaattactactctaaaagctgcccaaaagctgaagagatcatcaaggaacaagtcacacaactatataacaagcatggaaacactgccgtttcgtgggtcagaaatctcttccacgattgcgtg

SEQ ID NO: 162070 - DNA, 238 bp, Glycine max
gttcgttggcttgcaaggatctggtaaaacgacgacgtgtacaaaatacgcgttttatcatcagaagaaaggttggaagcctgctctggtgtgtgcggatacgttcagagctggtgcttttgatcagttgaagcaaaatgctactaaagcgaagatccctttctatggaaggtacacgctggtttcttttcttgttggagaatttcagagctggttggatttaactgtagacttattg

SEQ ID NO: 162071 - DNA, 245 bp, Glycine max
gcaaactcatccgaacattactattattggagaagaggttgctgccaagaagatgacactgaaggatgtcactgactacattgttaatatcatttctaaaagagctgaggataattataactatggggtcattcttatccctgaaggtctaattgatttcattcccgaggtccaacaccttattgcagaactcaatgaaattctggcccatgatactgtggatgagggagggctatggaagaaga

SEQ ID NO: 162072 - DNA, 240 bp, Glycine max
agcttcctcttgtttacgctgggaacgcgagtaactcttctgtagggtatctatgtttgcaagattctctgattcctgagaaagtttcagggaaaattgttatatgtgagagaggtgggaatccgagagtggaaaagggtttggtggttaagcttgctggaggtgctggaatgatattggcgaatagtgaagcctacggagaagagttagttgctgactctcatcttcttcctgctgcgc

SEQ ID NO: 162073 - DNA, 238 bp, Glycine max
gaataaaagaaccttcaactggtaaatattttacagatgtccaaaagaataaaagaaccttcctttgatctgctgtcattctttcaacaatctcccaaaaccaagatatgtgaatatctgtatctttatagccattatactcagtatgtgctttccaatcttcaacagaaacggtatcttcactcccatgcagcatccaatccagatcttcgaggtctaaactttggaagaagtactg

SEQ ID NO: 162074 - DNA, 235 bp, Glycine max
cgctctgtttctgtctctgtgtttgcggctgaggattccgaacgagcgaccttcttcgtttctcgcaaagtttaagtcatcatgggtaaggaaaagactcacatcaacattgtcgtcattggacatgtcgacactgggaagtcaactaccactggtcatttgatctacaagcttggaggtattgacaagcgtgtgattgagaggttcgagaaggaggctgctgagatgaacaaga

SEQ ID NO: 162075 - DNA, 236 bp, Glycine max
acccaattcccttcgtcgttttcgattaagagagcaatggcacgtaccaagcaaaccgctcgcaagtccaccggaggaaaggctccgaggaagcaattggcaaccaaagccgctcgcaagtcagccccggcgaccggcggagtgaagaagccccaccgcttcaggccaggaacggtggctctgagggagattcgaaagtaccagaagagcaccgaacttctgatccgaaaactccc

SEQ ID NO: 162076 - DNA, 262 bp, Glycine max
tgagaaaaaaatatgggattctcaattccctaaaccagttgatgtgtgtcagacatatgccttgtgtggtgcaaatgctatttgcgatttcaatggaaaagctaaacactgtggatgcttgagtggattcaaagccaactctgctggttcaatttgtgctcgaactacccgtctagattgtaataagggaggtatagataaatttcagaagtataagggaatgaaattgcctgacacatcttcatcttggtatgataggact

SEQ ID NO: 162077 - DNA, 255 bp, Glycine max
caatgccgaagatctcgggggtggtgaaactcgacgtgtcgaagggggaggagcggagggactgcacggtggggtgcaggatgtacggcgagggttgctacggcggagaaccgttcttcgtggcgagggaagaagggggcgaggaagatgatgggtacttggtgagttacgtgcacgatgagaggaagggggagtcgaggtttttggtgatggacgcgaagtcgccggagctagatgttgtggcggcggtgaggc

SEQ ID NO: 162078 - DNA, 254 bp, Glycine max
gcttgttgcacgaagctgaagcagcaaaaaccatgcttatgtggctacctcaaaaacgctagcttgaagcagtatgttaactctcctaatgcccgaaaaaccgttgcttcttgtgggattccctttccaacttgttaattaattaagccttcttataattaaagtgtgggatatatatatatatatagataaacagtttaatttatacacactttgatcctacaaagcatcttgacacaagcattcaataggat

SEQ ID NO: 162079 - DNA, 253 bp, Glycine max
tgaaagacaagccatggtggcctaagttgaacactcttcaagatctgattcacatttgctgcattattatatggactgcttcagcactccatgcagctgtgaatttcggacaatacccttatggcggtttcatcctaaatcgtccaactctaaccagaagattgctcccagagccaggaaccaaagaatatggtgtccttaccagtaatcatcaaaaggcttatttgagaacaattacaggaaagactgaggc

SEQ ID NO: 162080 - DNA, 247 bp, Glycine max
gaaagccgtcgctatcctagtctcttcttcccctctacccatttcagtttcaggatggaatctcaggtgaagcacgcccttgttgtcaaagttatgggtcgtactgggtctagggggcaggtgactcaggttagagtgaagtttttggatgatcaaaaccgacacatcatgaggaacgtgaagggacccgtgagagaaggagacattctcaccctacttgagtctgaaagagaagcaagaaggttgc

SEQ ID NO: 162081 - DNA, 246 bp, Glycine max
gtgccactgcatggttgatggatactgaaatgactgatcatgatgatcgtgttgtgccactgcacacattgaagctattagcgaccatgcaatatgtcctctgtacgagcttggaaaaaagtccccagacaaacgctataattggtcgcattgactgcaagtctggtcatggagctggtcgtccaacacagaaaatgatcgatgaagctgctgaccggtacgttttatggctaaagtgttggaagt

SEQ ID NO: 162082 - DNA, 253 bp, Glycine max
gagagaacttcaagtgagggtgagagtgacacaaatctagagagagcactagtactctaaaagtctattatattcttcaaaatatgaccatgcatcgcgagtcttgggcttttgtcttcggcgttatgggcaacatcatctcctttggagtgttccttgctccattgccaaccttttaccaaatctacaagaagaaatccactgaaggtttccagtcacttccttatgttgttgcactgttcagtgcaatgct

SEQ ID NO: 162083 - DNA, 260 bp, Glycine max
ctccgagccgcgagcgagcagtttcaaagagaggatttgggattgggaaggcgagggattgcgctgcgtctcttcctcttctctttcgattcatccctcattcataatcttccaatccaacaacctcagcctcacactcacacatacacacatctgaacgcgtatcgtccctcccatggcttcaaagcgcatcctcaaggagctcaaggacttgcagaaagacccaccaacttcttgcagcgctggtccagtagctgagg

SEQ ID NO: 162084 - DNA, 269 bp, Glycine max
gacccactgaacgctctcatcaccttcacgtggctccccttcggcttcatcctctccatcataagggtctacttcaacctccctctcccagaactcattgtccgctacacctacgagatgctcggcatcaacctcgtcatccgcggccaccgccctcctccgccttcccccggcacccccggcaacctctacgtctgcaaccaccgcaccgctctcgaccccatcgtcatcgccattgccctcggccgcaaggtctcctgcgtcaccta

SEQ ID NO: 162085 - DNA, 258 bp, Glycine max
caacattttacactcttttcttcttctcgttgttgcttcggtgttgaatcatggatcagaaagtcgatttcagtgctccgcattccatgggaaccactatcatcggcgttacttacaacggcggtgtcgttctcggagccgactctcgaaccagcactggagtgtatgttgccaaccgagcatcggacaaaatcacacagctcactgataatgtttacgtgtgtcgctctggatcggctgctgattctcagattgtct

SEQ ID NO: 162086 - DNA, 202 bp, Glycine max
tagcgtgcaaaattatattcaaaaaaaaaaaaaaaggggaggctgcagattagtgagttcgtcaacccggaaattatttcgggcccggaacttgaaggggtacaagttttcccaaaagggagccgtattaaagcttggggaaatcatggccaaagctgttcccagtgaaaaattgtaatccgttcaaaattccaaacaacat

SEQ ID NO: 162087 - DNA, 252 bp, Glycine max
gagagcacttcaagtgagggtgagagtgacataaatctagagagagcaccagtactctaaaagtctattatattcttcataatatgaccatgcatcgcgagtcttgggcttttgtcttcggcgttatgggcaacatcatctcctttagagtgttcctcgctccattgccaaccttttaccatatctacaagaagaaatccactgaaggtttccagtcacttccttatgttgttgcactgttcagtgcaatgc

SEQ ID NO: 162088 - DNA, 253 bp, Glycine max
tctcgatcgcgcgtcgtgaagccaccgatcatctatggtgatgtgagccgcccaaagccaatgaccgtcttctggtcatctctggctcagagctttaccaagcgcccaatgaagggaatgcttaccggtcctgttaccattctcaactggtcctttgttagatatgaccaacctagatctgagaccacctagcagattgctttgtctatcaaggacgaactggaagacctcccttaggctggcatcactgtta

SEQ ID NO: 162089 - DNA, 253 bp, Glycine max
ctcacgagggctgcacagcaatgggtggggagcgcaacaaggctttcactttggccgaggtctctcagcacaacaatgccaaagactgttggcttgtcattcatggtcaggtttataatgtaacaaagttgttggaagatcaccctggtggggatgaggtcctgttgtcttccacagggaaaggtgcgaccaatgattatgaggcatagtggtcaccgcagcattgccgtagccatgatggatgagctctatg

SEQ ID NO: 162090 - DNA, 256 bp, Glycine max
cggctcgagtcagctttgactttggtggaaactaaagactagtcaaaatggtgaagttcacagctgaagagctgcgtcgcattatggactataagcataatatccgtaatatgtctgtcattgctcatgttgatcacggaaaatcaaccctgactgattctcttgtggctgctgctggtattattgctcaagaagttgcaggtgatgtccgtatgactgatacccgtgcagatgaagctgagcgtggtattacaat

SEQ ID NO: 162091 - DNA, 258 bp, Glycine max
tgttgctgctcatcctccgtaacctccgagctctgcaccgaagaacgaagccatggggaagacacatggaatgggatctgctcgcaagctcaagtcccaccgcaggaggcaaaggtgggctgacaagtcatacaagaaatcacatcttggaaatgaatggaagaaaccttttgctggttcatcccatgccaagggaattgtccttgaaaagataggtattgaggctaagcagcccaactctgccattcgtaagtgtgc

SEQ ID NO: 162092 - DNA, 264 bp, Glycine max
atcgattggtcaatcaaacaagctcgttcaataaggacaaacttgacagcgagtggaccaaggccaaatccacaaggctcctaccactatggattaataaacattagtaggacaattaccttggtgagctcaacagcacaagtgaacaagaaacaaagatacgcagtgaacagtgtttcattcacacctgctgacactcctttgaagctagcagattactttaacattggagggattttccaagttggaagcatcccagatagc

SEQ ID NO: 162093 - DNA, 252 bp, Glycine max
aatccatccctgtcaaacaaaccatggcttccgaaacaaaccagtccaagaatgtgtgtgtaattggagctggaccctcggggctattggcagcgagggagctgagaaaagaaggtcacaaggtggttgtgttggagcagaaccatgatattgggcggtcaatggctatatgacccaaatgtacaagaggaggatcccttaggaagagacccttggctaaaggtgcatagcagcatctatgagtctttaagg

SEQ ID NO: 162094 - DNA, 250 bp, Glycine max
taagtccctttggtcttcatcttctgttctgatccaggtatggcttctaaacgcatcttgaaggagctcaaggatttgcagaaggatcctcctacctcatgcagtgcaggccctgtggctgaggacatgtttcactggcaagccacaatcatgggacctgctgatagcccatatgcaggtggtgttttcctagtttcaattcattttcctcctgactatcccttcaagccaccaaaggttgcttttcgga

SEQ ID NO: 162095 - DNA, 248 bp, Glycine max
gtctacacggaactcgttcgagcctcaccccatggttgccgatgcctgggaatccctcagaaaatctctagtctattttagaggccaaccggttggcacaattgcagctgttgatcatcaatcagaggaagttctgaactatgatcaggtttttgttcgagattttgtgcccagtgctctagcctttttgatgaatggtgaaccagagatagtcaggaacttcttgttgaagacactgcatcttcagg

SEQ ID NO: 162096 - DNA, 268 bp, Glycine max
caataaaagtatccactttcaccacatctgtcttccatttgtggatttctcaaaagtgagtatcagcttccgggacttccacagtgatcaatacgccccctataaagacctggattacccaaacgggaagatgccattgtcaggaccttttggatcgcggccgggttcgcgaaacggggttcatttggatgaagcagaaggcgccaagccagcacttcttcgaggcaaccaagaccctcgtgagctacgcggcggaagtcaccgccta

SEQ ID NO: 162097 - DNA, 261 bp, Glycine max
gacgaaaatcttcaacctgaacctctccaacaacctcctggtggacccgttccccgagatgaacgtgaaagggatagaatcgttggacttgtcgaacaacagttttcacctggggagcattcccaagtgggtggcttcgtcgccgataatattctctctgaagcttgtgaattgcggaataaagatgaggctagaggattttaagccttcggagacttatttctatgattttattgatctttcggggaatgaaatttcagg

SEQ ID NO: 162098 - DNA, 247 bp, Glycine max
gctgatgacaaagctggaacagaagagagtaaaacatccaaagatgagacttcatctaaagattctccagcagaacaaagagcgacagctacttttggacctagacctggacctgctgggcatccaggcaacccttttgatctctcagcaatgtctggtctgctcaatgatccaagtatcaaggaattggctgaacagatagcaaaagatccatcgttcaatcagatggctgagcagcttcagaaaa

SEQ ID NO: 162099 - DNA, 248 bp, Glycine max
ggccatcacaaacctcactgagcatctcagggaacagaatagggcagaggatttgcacagccttcttacacagttgaggcccttcttttccttgattcctaaggcaaaaactgcaaagatagtgaggggcataattgatactgttgcaaaaataccagggacttctgatctacaaattacactatgcaaagaaatgatgcaatggactcgtgctgaaaagcgtacctttctgaggcagcgagttgagg

SEQ ID NO: 162100 - DNA, 248 bp, Glycine max
cctactttcagctcctaagagcacgcatcactgttgcacttcttactcgttctccctcttttttttcttcttcttcttcttcgctaaaccccccctttatttttcctatctcactaacatcgatgggagacgagaataagaccaagtcccctgcttccggcgtgtggtccaccatcaagcctttcgtcaatggcggacctccggcatgctcgccacctgcgtcattcaacccatcgatatgatcaagg

SEQ ID NO: 162101 - DNA, 261 bp, Glycine max
tcgagctgctacgaagccactgttgcaactatcttaccatcatcaccgcgctggcagcgttccttgcaacgtactcgttccgccgacgccctatcctgcaacggcatcctcggctcctatgctcacaccggcggcgtgcggctggcgtcgtatgtctccgactcggcaaagcagccttaccgggtcgagtcgacggtgacggtactcaacaacggcctcgacgagctcaagtcgtggacagtcttcgttgggttcgcccac

SEQ ID NO: 162102 - DNA, 259 bp, Glycine max
gagaattccaactgataaaaagaatattcagagaattccaaagacagagatgactgtcattaaggaagagcaacaaccaaaccaaatagctggccacaaagaacttggtcacaaaagcctccttcagagcgatgcactctatcagtatatacttgaaaccagtgtgtacccaagagagcatgagagcttgaaggagctacgagagttgacggaaaaacacccttggaacctgatggctacaccacctgacgaaggacaa

SEQ ID NO: 162103 - DNA, 254 bp, Glycine max
tctgtatggaaacatcgtgcttagtggagggtctactatgtttccgggaattgctgatcgcatgagcaaggaaattagtgctcttgcacccagtagcatgaaaatcaaggtggttgcacctcctgagagaaagtacagtgtctggattggtggttctatcttggcatcacttagcaccttccaacagatgtggatctccaagggtgaatatgatgaatctgggccagccatcgttcatcggaagtgcttctaaa

SEQ ID NO: 162104 - DNA, 246 bp, Glycine max
gagaatccgaggcgaagagaagagaaaaattaagatggaggggaaggagcaggatgtgtcgctgggagcgaacaagttcccggagagacagccgattgggacggcggcgcagagccaagacgacggcaaggactaccaggagccggcgccggcgccactggttgacccgacggagtttacgtcatggtccttttacagagcagggatagcagagtttgtggccacttttctgtttctatacatcac

SEQ ID NO: 162105 - DNA, 246 bp, Glycine max
ggagaaccagcaatgcatggtcaccgccggtggaaggaccaagatcgacagccccagtgcactggtcttccagagctgcatcttcaccggcgaacccgacgtgtttgccttgtcccccaagattgcttacttgggaaggccgtggagggtttacgctaaggttgtcatcatggactcgcaaatcgatgacatctttgtccctgaagggtacatgccgtggatgggaagtgctttcaaggacacaag

SEQ ID NO: 162106 - DNA, 264 bp, Glycine max
taaaatggcaagcaacaccaccatggtagacgagcgtgcaggggcggagatcgtgtatggcgcggaggaatgccaccgcagactccatcggacctcctggaagagcttggattccccaaaggggtgatgccattgaaggaccttgtggagtgcggccgggttcgcgaaacggggttcatttggatgaagcagaaggcgccaagccagcacttcttcgaggcaaccaagaccctcgtgagctacgcggcggaggtcaccgcctat

SEQ ID NO: 162107 - DNA, 255 bp, Glycine max
gcgaggcagcacgaaaggccattgaagaagcacctccagttgttaaggagactcctattataattcaagatactgaaaagattaattcattattggctgaagtcaatagtttgaaggaatcactcctattggaaaaagaggctaaagaagaggccagaaaagctcaggctgaggctgaagctagaaataaagagatggttaaaaaggttgaagattctgaccgcaaagtggatcaacttcaagaattggttcaga

SEQ ID NO: 162108 - DNA, 246 bp, Glycine max
gagagagagagatggaggatctcgaggaggaagagaacggagcggaggaggtgttggggtcaagcttgaccatggagaaggtggcggcggcgaagaagttcattgagaatcattatagggctcagatgaagaacatccaagagaggaaggagaggcgttgggttttagaaagaaaattggcgtcatcggatgtgccaaatgaggaacggatcaacctcatcaaagatttagagaggaaggagactg

SEQ ID NO: 162109 - DNA, 243 bp, Glycine max
caccaacttccgctacttcctactccaaccactttcttttttcccgcagtcatgggcaaggtcaagatcggaatcaacggatttggaagaattggccgtttggtggccagggtggctctgcagagagacgatgttgaactcgttgccgttaacgatcctttcattaccaccgattacatgacatacatgtttaaatacgacagtgttcacgggcactggaagcatcacgatgtcaccgttaag

SEQ ID NO: 162110 - DNA, 270 bp, Glycine max
ctcggcatcggctcgagtttcgatagatgttatccaattgaaattttaaaaatgactgggataaacttaagaattcaattattgaaattgaataagtaaacaatttaattggattggtcgaatggtatcaaaaacatggagtactaactcccatttcttatttattattgaattaaccgatcaacttgctttgttatcgaacatttctttttgatttcaaaaattttccggaaaaaatttgaatctatttttatatgcgaatcaatccta

SEQ ID NO: 162111 - DNA, 259 bp, Glycine max
ctcctccgaagccactgttgctactaccttaccatcatcaccgcgctggcagtgttccttgcaacgacgtcgtccgccgacgcccaatcctgcaacggcatcctcgtctcctacgcccacaccggcggcgtgcggctgccgccgaatgtctccgacccggcaaagcagccttaccggttcgagtcgacggtgacggtactcaacaacggcctcgacgagctcaagtcgtggaaggtcttcgttgggttcgaccacgacg

SEQ ID NO: 162112 - DNA, 207 bp, Glycine max
ccatgttcttaggaggcttgtttttccttgtgggggcattattaaacggcttcgcgtcaacattgaaatgctgatcataggccgcctcttgcttggtttcggtgtcggatactgtaatcagtccgttccggtgtatttgtccgaaatggctcctgcaaatattagaggagtacttaaggggggcaacgatgttatcaattggaatct

SEQ ID NO: 162113 - DNA, 286 bp, Glycine max
ttcggctcgagatccaatatgacggaggaacggaacgtgcggaagacacgtgtggtcgacgtggtcctcgactgcgtcatcccttacatcgacgaccccaaggaccgcgacgccgtttcccaggtgtgtcgacgctggtacgagctcgactcgctcacccgcaagcacgtcaccatcgcgctctgctacaccaccacccgggctcgtctgcggcggcgtttcgcgcatctagtgttgcaaattctaaggggaaacctcgaggcgcaatgttcaacttgatacccga

SEQ ID NO: 162114 - DNA, 260 bp, Glycine max
atccaccttggcctagccagctagcgcttcttctctcgcattccgtggagatctagtgctgccaaacctcgctgaaaattagggtttcgtttcggaggtagacgaagatgttcggaagggcaccgaagaaaagcgacagcaccaggtactacgaaatcctcggcgtttcgaagaacgcttcgccggatgatttaaagaaggcttacaagaaagccgccattaagaaccaccctgacaaaggcggtgatcctgagaagttc

SEQ ID NO: 162115 - DNA, 264 bp, Glycine max
gcacaagtcatggaaagaataatggttggaagtgcaacaaaggttgctttcaccctcttggccactttcgccattgtcattccatgccttgaggctggcattgctgagtttgacgattttctcaaagcccaagctgatgaagcccataaaattgctcttgattcctatgtcgagagccccaagatgtcgcccatgaactcaatttccatgttcatatggcatgggaaactcccccaaggaggaactaaggacgaggaaacttag

SEQ ID NO: 162116 - DNA, 238 bp, Glycine max
ttttacttcccctatggctcgtcactccttgctcttagccctcctcctcttcgccgccgtggccaccgccgcgatggcggtgccgcgtccgacgccgacgacatcctgatccgtcaggtggtgccagatgttggcgaagcgaagaggaggacaacctgctgaacgccgagcaccacttcgcgagcttcaatgccaagttcgccaagacctacgccacaaaggaggagcacgatcatcg

SEQ ID NO: 162117 - DNA, 263 bp, Glycine max
caagaccaatggatcaactcctgtgaggggagagttagtggccaagttgaaggtggcaatcaatggtttcggacgcattggtagaaacttccttcgctgctggcacggccgaaaagactcaccccttgaagtcgttgttgtcaacgacagtggtggtgtcaagaatgcttcgcacctgctgaaatatgatcctatgctgggaacctttaaggaaatgttgaaatactagacaattgaaccatcactgttgatggtaatccatc

SEQ ID NO: 162118 - DNA, 276 bp, Glycine max
gccccctctcttcctcgcctccgccctcatcggactcctcaccggcctcgacgactacctctacgcctgcgggtggctcgccttccggtctccactttctctctaatccaagcctcccacctcgccttcaccgccgtcttcgccttcctcctcgtccgccacaggttcacgccctactccgtcaactccgtcgtgcttctcaccgtcgccgctgtggttctggctctgcgttccagcggggaccgccccgccggtgagtcgagtcgccagtacgtg

SEQ ID NO: 162119 - DNA, 261 bp, Glycine max
  unsure (1)..(261): unsure at all n locations
gcaggcagtgtcatctctcctttgacgacaagatgagcatcccaattccccatcggcagttattcatagacggagactggaaagtccccgtcctcaagaatcggattcccatcatcaacccttccacccaacacaatgaganagatatcccagcagctactaaggaanacgttgatctcgctgtcgctgccgcaaaagctgccctctcccgcaacaagggcgccgattgggctccgtgtttccggctccgttcgggctcgc

SEQ ID NO: 162120 - DNA, 208 bp, Glycine max
gtattcttgaaaggaccatctttatatgcttttcaaggacttgctggtcgtctggcccctgttggagtccatatagcattgctactgataatggctggaggaactcttagtgcttgtgggagcttcagaggttcagtcactgtgccccaggggctgaattttgttgtatatgatgttctggctccttctggctttctatcctctcaaa

SEQ ID NO: 162121 - DNA, 221 bp, Glycine max
gagataactagaaacagtgtgatgaaaatgaaggtccttgttttcttcgttgctacaattttggtagcatggcaatgccatgcgtacgatatgttccctctccgaatgaacactggctatggtgcccgtactccggaggtgaaatgccgaaatttggaggcttgctgtggaagcacacaacatctttggctttgagaccattcctgaagattgcgttgaag

SEQ ID NO: 162122 - DNA, 269 bp, Glycine max
ctttgaagagctgactgcagcctataaaagtggagagttacatcctggtgaccttaaaccagcattggcaaagtcgttgaataaaattctggagcctgtaagggaacactttaggaaggacagcaatgctaaagagctattgaaaagggtcaaggcttacagagtcaagtaatatgctgattaaggacttcaggctaatatctattctttgccaatcagccatagaattttcacgttgagattatgcacttgtggacttgtaaaatgtg

SEQ ID NO: 162123 - DNA, 259 bp, Glycine max
tccaactccaagtcacattggtgacaaagttagaaacaaggagaaagaaagaagatggcaggaaagaaaatcccagatgtgttgctgaattcaggacacaaaatgccagttataggcatgggaacttcagtggagaatcgtccatcaaatgagacccttgcttctatctatgttgaagccattgaggtgggttaccgtcattttgacactgctgcagtgtatggaacagaggaagccataggcctagccgtggccaaag

SEQ ID NO: 162124 - DNA, 226 bp, Glycine max
tttctgtagtctcaattatagtaacagtgcaagatctattttccacatcttggatatcattggctaaaagattgaatattgtgttattccttctagtagtcaaggggaacaatgaatgcactagcagccaccaacaggaactttaagttggcctctaggcttctgggattggattcaaagcttgagaaaagtttactgattccattcagggaaatcaaggttgaat

SEQ ID NO: 162125 - DNA, 263 bp, Glycine max
ggcctgctcttgccagtgtaattgtggaagctctcaaggtggacagtttgcagaagctttgctcatctttagaacccattcttcgtagagttgtcagtgaagaagtggagcgtgctttggcaaagttaggtcctgcaagacttagtggaaggtctcctcctaaaatgattgaaggccctgatggtagaagcttacagctgaaatttaggtcccggctgtctcttcccctattcacaggaggaatagtggaaggcgaccagggg

SEQ ID NO: 162126 - DNA, 150 bp, Glycine max
ggggaaggaatggacgaaatggagttcactgaggcagagagcaacatgaacgatttggtggcagagtaccagcaatatcaggatgctactgctgatgaggatgagtacgatgatgaggttgaggagggggagcatgctttcgaggacccg

SEQ ID NO: 162127 - DNA, 120 bp, Glycine max
caggcgaggagaaagatggaggggaaggagcaggatgtgtcgttgggagcgaacaagttccccgagagacagccgattgggacggcggcgcagagccaagacgacggcaaggactaccag

SEQ ID NO: 162128 - DNA, 218 bp, Glycine max
aatacaaccaagcaggcaaaactgtctggcggaggaaagttgcatcacttatagcaatggcaaagttatccaagatcttgtccttagattgcgacacgtggaaagcggtgaagtggaaatccaattgcaatggattaatcttcctggctccaagggtttatgattccttaaccatatgcatgcattcaactttcaagcaggggtgggttttatatatc

SEQ ID NO: 162129 - DNA, 264 bp, Glycine max
catcatcaaagattcaggaaagtgtgtgcgatgcagccggagatgaacttggggaggatattgaatacattgatttatacaatatttatgctccactatgcaagaatgcaaatctcacagccctgcccaaaaggaacacaattgtgactgatccatgtagtgagaattatgtgtacgcatatcttaatagaaaagatgttcaagaggctctccatgccaatgtaaccaacctcaaacatgactgggaacctgcagcgatgtcat

SEQ ID NO: 162130 - DNA, 262 bp, Glycine max
gaaaaaacgacattcattcatctatggctacccttattgctcccagcaaccactctccccaagaagacgctgaggctctcagaaaggcttttgaaggatgggggactgatgagaaaactgtcatagtaatattgggtcatagaactgtttatcagaggcagcaaatcagaagagtctatgaggaaattttccaggaggatcttgtgaaacgcctagagtctgagatcgtcggagactttgagaaaccgtgtaccgatggata

SEQ ID NO: 162131 - DNA, 256 bp, Glycine max
cttttccctcgttgaaatgaaaatgggttcttctttgtggacttcgtgtctaattttggcttcactagcctcttctgcattctgtgcctttccacggaggccagtggatgttccattcggcagaaactacgttcccacttgggcttttgatcacatcaaatacttcaatggaggttctgagattcaacttcatcttgacaagtacactggtactggcatccagtccaaagggtcatacttgtttggtcacttcagc

SEQ ID NO: 162132 - DNA, 247 bp, Glycine max
cttattcaaatcctctctcatctcttccttttcgctggcaattaactcacgagggctgcacatcgacaatgggtggggagcggaacaaggtcttctctttggccgaggtctctcagcacaacaatgccaaagactgttggcttgtcattcatggcaaggtttataatgtgacaaagttcttggaggaccacctggaggggatgaggtcctgtgtcctccacaagggaagatgcaaccaatgattttg

SEQ ID NO: 162133 - DNA, 267 bp, Glycine max
gggcactcaacattttacactcttttcttcttctcgttgttgcttcggtgttgaatcatggatcagaaagtcgatttcagtgctccgcattccatgggaaccactatcatcggcgttacttacaacggcggtgtcgttctcggagccgactctcgaaccagcactggagtgtatgttgccaaccgagcatcggccaaattcaaacggttaattgttattgttaacgtgtgtcgctctggatcggctgctgattctcagattgtctct

SEQ ID NO: 162134 - DNA, 265 bp, Glycine max
aagtaagcaaagatggctttcacggaatcgtctctcctccttccttcggtttcaggaaccaacaagaacaagaacaaggttccagaagacaaatggtatttagcctacattgtgtattttaccctgggtctcggttaccttctcccatggaacgctttcatcaccgccgttgattacttctcctttctctaccctgacgccagcgttgaccgcatcttcgccgtggtttacatgatagtcgggctggtggggatctccctcataa

SEQ ID NO: 162135 - DNA, 260 bp, Glycine max
atggctcccaagggtttaacctttctggctgtgttaatatgcgtttcagcactgtcactgagtccttctgttgcgggggaagggcaaaataatggccttgttatgaacttctacaaggaatcatgccctcaggctgaagacatcatcacagaacaagtcaagcttctctacaagcgccacaagaacactgctttctcctggctcaggaacatcttccatgactgtgctgttcagagttgtgatgcttcactgttgctgga

SEQ ID NO: 162136 - DNA, 259 bp, Glycine max
ctcataaaagagacatgacatttgaggaaaaacaaaaactaagcactaaccttcaaagtttgccttcagagaagcttgatgctattgtacaaatcattaagaagagaaattcagcacttaatcaacatgacgatgaaattgaagtggacattgatagtgtggatgctgagactctctgggagcttgatagatttgttaccaactataagaaaagtttgagcaaaaacaaaaggaggctgaacttgctcgagctagagca

SEQ ID NO: 162137 - DNA, 244 bp, Glycine max
atcaagattcaagcacatagttatcatcaattccccagctagttttggccacgcctgcatcttcttctgctttaagctatggcctctaacttcagcttgagaactttgatgatatttgcccttgcattttctctcgccctgcaaggcactcttggagggatagaatgtgagagtctgagccatgacacatgctcattcgccgtgacatctgctggcaaacgatgtgtgcttgagaagcaggtga

SEQ ID NO: 162138 - DNA, 261 bp, Glycine max
cggagagcttgcacaagatatggcacagcaacatgccatacaacaagattgctgacaggaaaggtcaccagggatggatgaaactagaaggtcaacactttatattccctggtggtggtacgatgtttccagatggagcagagcaatatattgaaaaacttggtcaatacattcctataagtgaaggtgttctgaggactgcgcttgacatggggtgtggggttgctagttttggaggatatatgctatctaaaaatattt

SEQ ID NO: 162139 - DNA, 260 bp, Glycine max
gtcatttgatctacaagcttggaggtattgacaagcgtgtgattgagaggttcgagaaggaggctgctgagatgaacaagaggtcattcaagtatgcctgggtgcttgacaagctcaaggctgagcgcgaaagaggaattaccattgatattgctttgtggaagtttgaaaccaccaagtactactgcacagtcatcgatgcccccggacatcgtgactttatcaagaacatgattactggtacctcccaggctgattgt

SEQ ID NO: 162140 - DNA, 257 bp, Glycine max
cttaagcgaaaagcaatagaattcaaagagagagtttcttgttctgtattttttgatttgatcatttcaatcttcaatttttttttatatatccaccaatccgcaaagtgcaaatttctaatctttcacgtattgggttcttctcttttccctcttcgtctccgatcgatccaattctcttcccatggctacgatcggacacaacaatctcaatgccaaattggttcttctcggggacatgggtgctgggaaatcca

SEQ ID NO: 162141 - DNA, 258 bp, Glycine max
caaaatggttttctcgagttgttcacgcgcaccgcgtggtgggtgattccaaccgtttgggtgccggttgcacgttggttcatttccaactccgtaaaatcaggcctcccttctcttgatgtagctctgctcgtctttcttggcatcttcgtttggactttggccgaatacacattgcaccgtttcctcttccatgtcaaaaccaagagctactggggaaataccttgcattatcttctccatggctgccaccacaag

SEQ ID NO: 162142 - DNA, 258 bp, Glycine max
cagactgggcatagcatccacgctttaatcgaccactgcttcttctacttttctttcctcaaggttttggcgggagtcgtcgtcgtcattgaatcagccatgcctcggtactactgtgactactgcgacacctatttgacccacgattctccatctgttagaaagcagcacaatgcaggttacaaacacaaggcaaatgtgaggacctactaccagcaatttgaagaacaacaaacacaaagtttaattgatcaaagg

SEQ ID NO: 162143 - DNA, 260 bp, Glycine max
gagtcctccgtccccctcccgccggcgaacccttgaagcccaaacaggacccacacccacactcccagcagcaatcgtacctcaccaacgccgtgttcttcgggctgttcttctcgctggcgtacttcctcctccaccgatggcgcgagaagatccgcacctccactcccctccacgtcgtcacgctctccgagatggctgccatcgtctccctcatcgcctccttcttctacctcatggccttcttcggcattaccttc

SEQ ID NO: 162144 - DNA, 261 bp, Glycine max
gattgactttttttcttcttctattctcacacatacccatctactccttccctcatggctgaacaatcttccaactccatttacgatttcactgtcaaggacatcagtggaaatgatgtgagtctgaatgattacagcgggaaggttctactgattgtgaatgtcgcctctcaatgtggtttgacacagacaaattacaaagaattgaatgtattgtacgagaagtacaagaatcaaggatttgaaatcttggcatttccg

SEQ ID NO: 162145 - DNA, 271 bp, Glycine max
accccatcaggatcgccgagggttacgaaatggcgtccaggatcgccgtcgagcatctcgagcgcgtcgccaacaagttcgagttcgacgagtctaatttggagcccctcattcaaacttgcatgaccacactctcctccaaaattgtgaatcgctgcaagcgtagcttggctgagattgctgttaaggctgttcttgctgttgctgatctggcgaggaaggatgttaatttggatctgattaaagtggaagggaaagttgggggtaaatt

SEQ ID NO: 162146 - DNA, 258 bp, Glycine max
tccgtttttctctctctctcgccaaacgcttcttccactatgccttcccaatcggttctggttaccggaggagccggttatatcggtagccacaccgtccttcagcttctcctcagcggttaccatgtcttcgccgtcgacaacttcgacaattcttccgaaaccgccatcaacagagtcaaggaactcgccggagaattcgcaaataacctttccttttccaagctagacttgcgggacagagctgccctcgagaaa

SEQ ID NO: 162147 - DNA, 256 bp, Glycine max
aatgatttatgtggtatcaaggagtctgatactggtttagctgcaccaagccagtgggatcttgtttctgataaacaaatgatgcaggaggagcagcctcttcaggtagcaaggtgcacaaagatcataaatccaaattcagaagatgccaaatatgttatcaatgtgaagcagattgcaaagtttgtcgttgggctgggtgataaagtttcacctaccgacattgaggaagggatgcgtgttggggttgatagaa

SEQ ID NO: 162148 - DNA, 258 bp, Glycine max
ctttgaagagctgactgcagcctataaaagtggagagttacatcctggtgaccttaaaccagcattggcaaagtcgttgaataaaattctggagcctgtaagggaacactttaggaaggacagcaatgctaaagagctattgaaaagggtcaaggcttacagagtcaagtaatatgctgattaaggacttcaggctaatatctattctttgccaatcagccatagaattttcacgttgagattatgcacttttggact

SEQ ID NO: 162149 - DNA, 255 bp, Glycine max
agcgctccgtgtgcctacacccaatgtttcagttgttgaccttgttgtgaatgttgagaagaagggtcttactgctgaagatgtgaatgcagcattcagaaaggcagctgaggggccgctcaaaggtgtattggacgtgtgtgatgttccacttgtgtctatcgacttccgctgctctgatgtttcctctactattgactcctccttgactatggtcatgggagatgatatggttaaagtggttgcttggtatga

SEQ ID NO: 162150 - DNA, 259 bp, Glycine max
cggcaacttcgagctgggtccgaagccctccgccctgaaaggaactgtggtgattggtggcagccactcgatcccagaatgggagatctctggcttcgtggagtacataaagtccggccagaagcagggcgacatgctgctcgtggtccccgagggggcctacgcggtgcgcctcgggaacgaggcctccatcaagcagaggatcaaggtgatcaagggcatgtactactccatcaccttcatggtggcccgcacctgc

SEQ ID NO: 162151 - DNA, 257 bp, Glycine max
tgaggattgagccacactttgctgagtgctacgggaatatggcaaatgcatggaaggagaaaggaaccattgaccttgcaattcgctactacttgattgccatacagctccgtccccattctgctgatgcatggtcaaatctagctagtgcatacatgcgtaaaggaagactcactgaagcagcccagtgttgtcgtcacccacttgctataaatcctctaatggttgatgcccataccaacttgggtaatcttatg

SEQ ID NO: 162152 - DNA, 252 bp, Glycine max
gtgacacagttcaaccccacttgctcaaaaactcatcttcactcatctcagctcccttttctatcgaggactcttcctagacatcgccactgcactattgcgccacttctgctccgccattatcatgggcaaggtcaagatcggaatcaacggatttggaagaattggccgtttggtagccagagtggctctgcagagagacgatgttgaactcgttgccgttaacgaccctttcatcaccaccgattacat

SEQ ID NO: 162153 - DNA, 252 bp, Glycine max
taccaacctatgaagacaaagatgctgactggatgctcgttggtgacgtaccgtgggaaatgttcgtggattcatgcaagcgcctgcgtataatgaaaggatctgaggcaatcgggctagcaccaagagcagtggaaaagtgcaagaacagaagctagagtcaaatttgtaaattccactttcgacaacaatctgctctatctgttgctcttgggcgtccacggaaagcattaatgctaatttctcgagcaa

SEQ ID NO: 162154 - DNA, 256 bp, Glycine max
gctggaggaattggtgttagtgttcacaacattcgtgccacaggaagttacatccgtggcacaaatgggacatcaaatggtattgttccaatgctgcgtgtgttcaacgatactgctcgctatgttgatcaagggggaggcaagaggaaaggtgcatttgctgtgtacctggagccatggcatgctgatatatttgaattcttggatttaaggaaaaaccatggaaaggaagagcatcgagctcgagatttgtttt

SEQ ID NO: 162155 - DNA, 253 bp, Glycine max
gcatgaaaacgttgtcgagcttgttaactattgtgttgatggtcctttccgtgcccttgcctacgagtatgctcctaaaggatcccttcacgatattctacatggacgcaaaggtgtcaagggtgcacaacctggtccagttctctcatgggctcagagagttaaaattgctgttggagcagccaggggacttgaatatcttcatgaaaaggcagagattcatatcatccatcgttacattaagtctagtaac

SEQ ID NO: 162156 - DNA, 254 bp, Glycine max
atttacaacaacaatggcttctgtgcctcaaccaaaaatctcccttctaaccttattcttcttctcgtccttcaccatcattgcgcatgcaattgttcctcaaaacgaaaccttcaaatttgagaactcaggtgaacttggaccctacatcgttgagtacggtgcagattacagaatgataagcatcttcaactctccattccaagttggtttctacaacaccaccccaaatgccttcactctagctttgcgtg

SEQ ID NO: 162157 - DNA, 253 bp, Glycine max
cacaaggacccttgtttcagtttgccatggaagcaagattgcttccccatattctccgagtcaagccctttgtaccacacaagcaacaaacgacgagcctcttaccccagaggaagaaaaagaccttcaacttgccatccagagattccatgagctttgccataagtgtgtgcaagtcaacattcctttgttggttgatgcagaacacacttctgttcaacctgctattgactacttcacatactcctctgcc

SEQ ID NO: 162158 - DNA, 250 bp, Glycine max
gcgccacggcaatgggaaggagcactttggctttggttctcgcgattctgatctctttgcagggaaccccccacgttagatccgatgcctccgatcatcgttacaaggacggagactccgttcctctttacgccaacaaagtcggtccctttcacaaccccagtgaaacgtatcggtactttgacctgccattctgtgtaacaggtcatgagaaagataagactgaagccctcggtgaggtgttaaatgg

SEQ ID NO: 162159 - DNA, 253 bp, Glycine max
gacgcaatgtgatttctgcccagtgctctgaatgtcaaagtgaagaaattcaaccaagcgcgggtaaacggcgggagtaactatgactctcttaaggtagccaaatgcctcgtcatctaattagtgacgcgcatgaatggattaacgagattcccactgtccctgtctactatccagcgaaaccacagccaagggaacgggcttggcggaatcagcggggaaagaagaccctgttgagcttgactctagtccg

SEQ ID NO: 162160 - DNA, 253 bp, Glycine max
ggagttcatcgacattgttgagaccgtctaccgtggagccaggaagggacgtggtctcgtcatcgctcccaaagattactccaccaagtaccgttactagtttcattcatctgtaacatacaacaaactaaatattatctcttttcttacttctctggtgtggtgctggttgtggttgtatgatcattctgatttctgcttattcacaactctgttacatgaattgcttttgtcatatgctaaagtgttgtta

SEQ ID NO: 162161 - DNA, 255 bp, Glycine max
cagagagtgatttcagtgagtgatcggtgttcacttgatctcatcataatcgtcagcgtcaattgaagaagatgccgatcagaaacatcgccgtcggaaggcctgaagaggcgactcaccccgacacgttgaaggcggctttggctgagttcatctcaaccttcatcttcgtgttcgccggctcaggctccggcatcgcctacaacaagctcaccgacaacggcgctgccacccctgccggcctcatctccgcct

SEQ ID NO: 162162 - DNA, 256 bp, Glycine max
gaattgttgtaactttttgattcctaaattctctaaaattcgaaattctaatttcgttaggggatagagattgtttgtgtgtgagtgagtatggctggaaaaggcgagggtcctgctatcggaatcgatttgggttcgacgtactcttgcgtcggcgtgtggcaacacgatcgtgttgaaatcatagccaacgatcagggtaacagaactaccccatcctacgtggctttcaccgacacagaacggttgatcggcg

SEQ ID NO: 162163 - DNA, 255 bp, Glycine max
aaaaagcgtgaaggacagtgataggtttggtttggaaggaagaagaaaatgaaggccatagtgataacgaggccaggaggtcccgaagtgctccaacttgaggaagtggaagatcccctagtcggagacgacgagcttctcatcggagtccacgccacttcccttaacagagccgatacctttcagaggaaaggctcctaccctccccctaagggcgccagcgttacctcggtctcgaatgttccggaactgtcc

SEQ ID NO: 162164 - DNA, 253 bp, Glycine max
ggaaatagataatatttattacgaaacggaataccgaagagaatggtgcagcagcaagggtaaaccatcgacttgcttcctttttgccagaaaatttactcggactgctgctttaaggcttcttaatatgtctgttctgggagtgttcaattaagagaacaaaaggctctttgtcagagagactgatacaaggaagaaaaaatacacttagcaaaacaaataagaggaagaaaaggaataaagtaaaagcagt

SEQ ID NO: 162165 - DNA, 251 bp, Glycine max
tcgggaaaaggattggctctgagggctgggcacgggggtcccagtcccgaacccgtcggctgtcggtggactgctcgagctgcttccgcggcgagagcgggtcgtcgcgtgccggtcgggggacggattgggaacgggcccttcggggcctcttccccgggcgtcgaacagtcaactcagaactggtacggacaaggggaatccgactgtttaattaaaacaaagcattgcgatggaccctgcggatgttg

SEQ ID NO: 162166 - DNA, 250 bp, Glycine max
ctccgtttggtttaggattgagtgttggatctagtcatctagataaaaaaaataaaaatgaagatcattgagaaaattcgcgcagcttctgctgatccaaacagggtggtgttctcatttgagttcttcccccccaagactgaggatggtgtggacaatctgtttgagaggatggaccgcatggtggctcacaacccctctttttgcgacatcacttggggcgctggagggacaacggctgatcttacat

SEQ ID NO: 162167 - DNA, 250 bp, Glycine max
ctaactcactcactcacaactcagtgaaagagaatccgaggcgaagagaagagaaaaattaagatggaggggaaggagcaggatgtgtcgctgggagcgaacaagttcccggagagacagccgattgggacggcggcgcagagccaagacgacggcaaggactaccaggagccggcgccggcgccactggttgacccgacggagtttacgtcatggtccttttacagagcagggatagcagagtttgtgg

SEQ ID NO: 162168 - DNA, 253 bp, Glycine max
ggctctgcaattgcaaattcagaggatgtcgatcttcgagtacaacggaagcgccgtggtggctatggtcggcaagaactgcttcgccattgccagcgaccgaaggctcggcgttcagctccaaactatagccacggattttcaacgcatttccaagattcacgacaagctcttcatcgctctctctggcctcgccaccgatgctcaaacattgtatcagcgtcttgttttccggcacaaactgtaccagctg

SEQ ID NO: 162169 - DNA, 253 bp, Glycine max
cataaattgattgaataacgaaatcttcaatgaccggccattttctccggacacccctcacactcaagatcgctgctttcttcttcatcgcagtcaccttcttctacttcggcaagcactggtccgatggctaccagcagctcgtcttcttcacccagcgatccgacccggattcgaactcgaacccgtttgtttccacgtccccgaataacgccaagtccttcaacgtctccgccctaattgagaacaacac

SEQ ID NO: 162170 - DNA, 250 bp, Glycine max
caaaaagttctgttctttttcccacccaattcagttttctcaaatggctcgtacgaagcaaacggctcgcaagtccaccggcggcaaggcgccacgtaagcagctggccaccaaggcggctcgtaagtctgctccggctaccggcggcgtgaagaagccgcacagattccgtccgggaaccgtagcgctccgcgagatccggaagtaccagaagagcacggaacttctgatccggaagctcccgttccag

SEQ ID NO: 162171 - DNA, 250 bp, Glycine max
ttcatccctaacgcgtgcatagcagagtcagagacagagacgcagccatggggcggagacctgcgaggtgttataggcaaattaagaacaagccataccccaagtcacgtttctgccgtggtgttcctgatcccaagatcaggatttatgatgttggtatgaagaagaagggtgttgatgagtttcctttctgtgtccatctggttagttgggagaaggaaaatgtttcaagtgaggccctggaagctgc

SEQ ID NO: 162172 - DNA, 248 bp, Glycine max
tttgtttatttgaaattaacaagtagcaaagatgtttggaatcatcggaggaaacaagggtcacaagataaaggggaacttggtgattatgcgaaagaatgtgttggatatcaacagcattaccagtgttaagggtgtcatcggaaccggcattaacatcattggaggagtcgtcgacaccgttactgctttggcgtcccacatctccatccagctcattagtgccaccaaggctgatggacatggga

SEQ ID NO: 162173 - DNA, 247 bp, Glycine max
tctgttattacttttgcttgcatctctctgtgttcaatcttcaaagacttgaattcttcttacttaggttctgaatggctggaatttgctgtggtgttgtcggagaaggtgacactccggctccactcgagccaactactcgcccctccaggcgccggagtttggacatcttacccttaaaatacatcgctgacatggcggtgccgccgtcggatggttcacggaaacgtcccaagctggatctcag

SEQ ID NO: 162174 - DNA, 247 bp, Glycine max
ggatatgctcgattcgagggtgacgagggatagcagatctgaatctcatcttcccaaaaccctctttcttctttttctcctctgatctcatttcaaacctaaccctaaccacaacagaggaagatgttgacgaaattcgagacgaagagtaacagagtgaagggcctgagtttccacccgaagcggcaactaaagctggcgagtctccacagcggcgtcatccagctctgggactaccgcatgggaa

SEQ ID NO: 162175 - DNA, 240 bp, Glycine max
gtgagagacaagttgaataaagttcccgactccaaggttcagcaactttattcaacttgtctctcacattctgcaacaatcgtggaaggtcatcatcccatttgtagaatgtgagagacaagttgaataaagctgctgaaccttggagtcgggaagaaaaggaccactgtctggaagaaacagaaaaatcattcaagctctctggagagattctccgtttgattttatcatgataataga

SEQ ID NO: 162176 - DNA, 249 bp, Glycine max
ggattgtggagtgaagagacgtgagagtgtgagagaggaagatgatgaagtgatgatagtaacaccattgggggctggaaacgaagtgggtcgttcatgcgtgtacatgtcctataagggtaaatccatattgttcgattgtggaatacacctaggtttttcaggcatgtccgccttgccctatttcgacgagattgacccttccaccctcgatgttcttctcatcactcactttcacttggatcatgc

SEQ ID NO: 162177 - DNA, 252 bp, Glycine max
gtaggaccagtagattcagcttacaaggctatcaatctcatcgtgaaggaaactgtaaaagtacttgagtactcactaagtacagttacagaatgcactgatgcaattgcaactacacgtgttgtaattcgtagagagaataagcaatcaccaactcctgctttgaatggaaacgtaatttatccaacatttagtggaaccggagaaggggtggatgttgttacttcaagtgtagaggcttatcttactgca

SEQ ID NO: 162178 - DNA, 280 bp, Glycine max
accttattgctcccatcaccttttcacctggtttagatgcagaagctcttagaaaagctttccaaggatgggggaccgatgagaaaaccgttattgcaatactgggtcatagaaatgttcatcagaggcaacaaatcagaaaggtttatgaggaaatttaccaagaggacctcattaaacgcctggagtctgagctctctggtgactttgagagagctgtgtaccgttggatgctggaacctgcagatcgtgatgctgttttggccaatgttgccatcaa

SEQ ID NO: 162179 - DNA, 279 bp, Glycine max
aaagaacaacatgaactttctaaccttcgttactgttctactcttcatactaccagcaacctcatcttcccagtatttggggaacaaccttctcactcatcgcaagatattcctaaaaaaagacaacattattacctcgtacgctgtcatctttgacggtggtagcacaggaacccgtgtgcatgtcttccattttgaccagaatttggatctccttcccattggtgatagtcttgagcttaataaaaagatcacacccggtttaagtgcttacgagga

SEQ ID NO: 162180 - DNA, 276 bp, Glycine max
caatcttctgagagtgtttggttgaaagtagcaaagatgtcacctttcgggcaacacggtcaaaagataaaggggactatggtggttatgcagaagaatgtgttggatacacaacagcatcaccagtgttggagggatcgttgaccaaggcttaggcttcataggcagtgcagtcgatgcacttactcttgtagccaccaaaatctccatccagttgattagtgctaccaaggctgatggtgggaaaggaaaattagaaagagtacagatttaaga

SEQ ID NO: 162181 - DNA, 273 bp, Glycine max
cagaacaacgtgtcctattgtacctggaattatgcccattaataattacaagggctttatccgcatgactgggttttgcaaaacaaagataccagctgacattatggctgctttagagcctatcaaggacaatgaagaagctgtcaaggcttatggaattcacctgggaactgaaatgtgcaaaaagattttagctcatggaattaagacattgcatcttcatacactagatatggagaaatctgcattggcaatactaatgaaccttggcct

SEQ ID NO: 162182 - DNA, 272 bp, Glycine max
aacgtttgtctctagcagcgaaaacggaggagtcccatgtgcctttcttactggacctgcaattgtttgagcccaagttcgtcttcgagcccaaaacgattcagagaatggaactctgggttatgtctaatctcaaatggagactccgctctgtcacccccttcgattatcttcattatttcatctccaagcttccttcttcctcttcttcccaatccttgaatcactttttctccacttcctccaacctcattctcagcaccactcgtgtg

SEQ ID NO: 162183 - DNA, 274 bp, Glycine max
agaaagccaacaaacattaaagatgctacagcatactcttttactcttgaagaagacaccacaaattatggtacgtatgagaaaggtggtattgtgacgcaggtcaaacaaccaaaggtattgaactttaagccactcaaggaagcaatcactgatcctggtgattttcttctgagtgatttttcgaagtttgatcgcccacctctccttcacttagcattccaggctttggataaattcatttctgagttaggtcgcttccctgttgctggtt

SEQ ID NO: 162184 - DNA, 281 bp, Glycine max
aacactctcatagctgtagcggcgacactaagatcggagaaagaatggcgaaaacgacgtcgttgctgctctttacactgctcatcttcggaaccctagctctcatccaggcgaagaaatcgaaggaggatttgaaggaggtgacccacaaggtttactttgatgttgagattaatggaaaagaagcaggtcgtattgtaatgggtcttcatgggaacgctgttccaaaaactgcagaaaacttccgagcactttgcacaggggaaaagggaactggtaaa

SEQ ID NO: 162185 - DNA, 276 bp, Glycine max
aaaattagttcattctctttgcgcagttccctacctctcctttcaagatgcagatcttcgtcaagaccctcaccggaaagaccatcacccttgaggtggaaagctctgacaccatcgacaacgtcaaggccaagatccaggacaaggaaggaattcccccggatcagcaacgtctcatcttcgccggaaagcagctcgaggacggccgtaccctcgccgactacaacatccagaacgagtcaacccttcaccttgtgcttcgtctccgtggtggca

SEQ ID NO: 162186 - DNA, 258 bp, Glycine max
agcttatgttgttgtaaatgactcgtgctaccatcaactcgttagccattggctaaacactcatgcggttgttgagccattcgtcacagcaacaaataggcatctgagtgtggttcaccctatttacaaacttttgtttcctcactatcgtggacaccatgaacactaattcacttgcccgcaaatccttggtcaatgcagacggtactatagagaaaacatttttgtggggtaggtacgctttcgaaatgtctgctg

SEQ ID NO: 162187 - DNA, 272 bp, Glycine max
atggactagacttgaaactttcagcaaaagaaaaggaagcaacacatgcaaatagggttcttttacttcttcatgccaacaagaatgagcaggcacgagaacttgtttctgcattaccagacatgtttccagaaagtgtcataccaatatttctgcaagctgccctcttggttagagagaacaaagctggaagggctgaggaaatactagcacagtttgctagtaagttccctgataagtccaaagttgttcacttagcccgggctcaggta

SEQ ID NO: 162188 - DNA, 267 bp, Glycine max
agaaccaggcaggtgctctggttcaagtctatacagatggaactgtttcagttacccatgggggtgtcgaaatggggcaaggtttgcacaccaaagttgcccaaattgctgcttcagctttccatatccctcttagttctgtctttacatcagatactagtactgacaaggttcctaatgcttctccaacagcagcttctgcaagttctgatatgtatggagcagcggttttggatgcatgtgagcaaataatggaacgcatggaac

SEQ ID NO: 162189 - DNA, 269 bp, Glycine max
aaagggtgtcactaccaaatacagcttggcacctcttgtgccccggctttctgagctcattggtatccaggttgtcaaggctgaagacagtattggtccagaagtagaaaagttggtggcttgtcttccagatggaggtgttcttcttctagaaaatgtgaggttttacaaggaggaagaaaagaatgatcccgagcatgcaaaaaagcttgcctctctggcagatctgtttgtgaatgatgcatttggtactgctcacagggcacatg

SEQ ID NO: 162190 - DNA, 273 bp, Glycine max
caaagaaattgtgacggccctcaagcatgatttggggaagcattacgtggaggcttttagagacgagcttggaacattaatgaagaccttaaacttggcaaccaagtctttgaaaaattggatggcggggaaagaggcaaagctgccacgaatagcactgctctcaagtgcagaaatagttcctgagccacttggtcttgttctcataatctcatcatggaactttccctttggactttccttggagccactgatcggagcagtagctgctgg

SEQ ID NO: 162191 - DNA, 267 bp, Glycine max
cattccattctctctgtgtacatccctacctctcccttcaagatgcagatcttcgtcaagaccctcaccggcaagaccatcacccttgaggtggaaagctctgacaccatcgacaacgtcaaggccaagatccaggacaaggaaggaatccccccggaccagcaacgtctcattttcgccggaaagcaacttgaggacggccgtacccttgctgactacaacattcagaacgagagtactcttcacctcgtcctccgtatccgtggt

SEQ ID NO: 162192 - DNA, 257 bp, Glycine max
aaagatccaagtgctgttgctgtaattgaaagcgcatcagatggtcagtgcaagatcattggagaaatttctgcacgtaagttatggaaatgtgattacttatccgcagcatgggctttagcgaatctctccgcgggacagtttgttatgggagttgaagataatgtcaccccaaggtcactgcatgagttcagtttagattcaccatctggagacattgacttagttaatagtgggggttcaaggaaaccaaggaa

SEQ ID NO: 162193 - DNA, 270 bp, Glycine max
tgcaattgaagttgaagtcttgcgcttctctcttcaactccaaacacaagacatcatcatccatggctgcatccgtctccactgtcggagctgtcaacagagctcttttgaacctgaatgggtctggacctggggtttcagctcccagttcatccttctttgggagcagcttgaagaaggttactggctcaagggtccccaacacaaagacttcctctggaagcttcaagattgttgctgcacaacagaacaaagagattgaagacaccc

SEQ ID NO: 162194 - DNA, 267 bp, Glycine max
tgtctatatcttcaaaggaactttcgatggaagagctggggttgagtgctgtcccatcagaagtatgggaatcaggggaggtcataaaacttaatctatcgagaaacctccatccaggagttgcctgttgagctttcttcttgtgtttccctccagacattgattttatctaagaatcaaattaaagattggccaggttcaattcttaaatcactttcgagcctttcatgtttgaagctggataacaatcccctcagacagatacct

SEQ ID NO: 162195 - DNA, 267 bp, Glycine max
taccaacctatgaagacaaagatgctgactggatgctcgttggtgacgtaccgtgggaaatgttcgtggaatcatgcaagcgcctgcgtataatgaaaggatctgaggcaatcgggctagcaccaagagcagtggaaaagtgcaagaacagaagctagagtcaaatttgtaaattccactttcgacaacaatctgctctatctgttgctcttgggcgtccacggaaagcattaatgctaatttctcgagcaaggggtagtctaatat

SEQ ID NO: 162196 - DNA, 267 bp, Glycine max
ttcaccacaccaccacaacaattatcaaacctaaccagtaaaaatggtgaccgtggaggaaatccgcaacgctcagcgttcccatggacccgccaccatcttggccttcggcaccgccacgccgtccaactgcgtctcccaagccgattaccctgactactacttccgcattaccaacagcccacacatgactgatctcaaacaaaagttcaagcgcatgtgcgaaaagtccacgacaaagaagcgatacatgcacctgacggagga

SEQ ID NO: 162197 - DNA, 266 bp, Glycine max
attggatcttaccctcttgtttgctagtattctcattcttctgtctctgcttcttctccttctgaactaagagatggggttgtctttcaccaagctttttagccggctctttgctaagaaagagatgcgtactctcatggtaggtcttgatgctgctggtaagactaccatcttgtacaagctcaagctgggagaaattgtcacaaccattcccacaattggattcaatgtggagactgcggaacataagaatattagcttctact

SEQ ID NO: 162198 - DNA, 271 bp, Glycine max
aggctcgagggataagctgtggcctatgctgcaaaagcttggggtcaccatgaaatctgaggagaaggacctcatgggtaaagcattgatgaagcgtgtcatgcaaacctggcttccagcaagtagtgctctattggaaatgatgatatttcatctaccctctccatcaacagcccagaagcatcgtgtggagaacttgtatgagggtcctcttgatgatcaatatgcttctgctatcagaaattgtgatcctgaaggtcctctgatgctc

SEQ ID NO: 162199 - DNA, 272 bp, Glycine max
atttcactttgccattactaccctgcatgccctgaaccagatttaactttgggaaccacaaagcattctgataattgtttcctcacagtgcttctccaggatcatattggtggcctgcaggttctttaccagaacatgtggattgatataaccccagaacctggggctcttgttgttaacattggtgatcttctacagcttataacaaatgacagattcaagagcgtagaacatagagtacaggcaaatctcataggtccaagaatatctgt

SEQ ID NO: 162200 - DNA, 271 bp, Glycine max
agaacattgagaagagtcttgttgaagcttttgagcccatcgggatcagcgactggaactctatcttctggatcacacatcccggtggtcccgcgatcctcgatcaagtcgaggagaagctccggctcaagccggagaaactccagtccacccggcatgtgctgagtgagtacggaaacatgtcaagcgagtgtgttttgttcattctggatgaaatgaggaacaagtctaaggaggaagggaagagtaccactggagaagggctagagtg

SEQ ID NO: 162201 - DNA, 270 bp, Glycine max
cgaattctctaaaagagatctttttctgctctttgaagaaagaagggtctttgcttgattttggagatgtctctgctctcagatctcatcaaccttaacctctccgataccaccgagaaggtgatcgcagagtacatatggatcggtggatcaggaatggacctgaggagcaaagcaaggactctcccaggaccagttagcgacccttcagagcttcccaagtggaactatgatggttccagcacaggtcaagctcctggtgaagacagt

SEQ ID NO: 162202 - DNA, 137 bp, Glycine max
gtgatttcagtgagtgatcggtgttcacttgatctcatcataatcgtcagcgtcaattgaagaagatgccgatcagaaacatcgccgtcggaaggcctgaagaggcgactcaccccgacacgttgaaggcggctttg

SEQ ID NO: 162203 - DNA, 265 bp, Glycine max
attctgactccgtgccctaacttcttcttcctcctcctcctctgacattgcagcaaggcacacacctcaggctccaacccatttcacgagggatcggattcgctcgccatcatggggaagaagaagaacagagtttcctcgaaggtgtggtgtcattactgcgatcgcgaattcgacgacgacaagatcttggtgcagcaccagaaagccaagcactttaagtgccatgtctgccacaagaagctctctaccgctggcggcatgg

SEQ ID NO: 162204 - DNA, 264 bp, Glycine max
acgatacgtaataagttctatcattgaggaagtttcctgtgcatcgtctccgaaaatgaacgacgcagatgtctcaaagcaaatccagcagatggtgcagttcatccgccacggaagctgaggaaaaggccaacgagatctctgtctccgccgaagaggaattcaatatcgagaagctgcagttggtcgaagccgacaagaagaagatcaggcaagaatacgaacgcaaagagcgccaagttgaaattcgcaagaagattgagt

SEQ ID NO: 162205 - DNA, 259 bp, Glycine max
gttgaggcaagggatgagctgcacagaatgttgaatgaggatgaacttagagatgctgttttgcttgtttttgccaacaagcaagatcttcctaatgcaatgaatgctgcagaaataactgacaagcttggacttcattcactccgtcaacgccactggtatatccagagcacttgtgcaacttctggagagggtctctatgagggtttggactggctttctaacaacattgccagcaaagcatgagacatttgaaaaa

SEQ ID NO: 162206 - DNA, 266 bp, Glycine max
actcgagccgattcggctcgagcaagcaaagaagccattgagggacaccagaagttttgtgcaaaatccttgggaacagtaatatggttttgccatttcaaagctgggaaagaacattcaagtactttcaagttcctttgtcaataagcaagaccaatacactgtggaaggagtgcagaatcttggagacaaagcagtgatgtgtcataggctaaatttcagaactgcagtattttactgccatgaagtccgtgaaacaacagctt

SEQ ID NO: 162207 - DNA, 262 bp, Glycine max
attttatccaattgaaattttaaaaatgactgggataaacttaagaattcaattattgaaattgaataagtaaacaatttaattggattggtcgaatggtatcaaaaaaatggagtactaactcccatttcttatttattattgaattaaccgatcaacttgctttgttatcgaacatttctttttgacttcaaaaattttccggaaaaaatttgaatctatttttatatgcgaatcaatcctactacttctggtcctgagg

SEQ ID NO: 162208 - DNA, 269 bp, Glycine max
atggcattgcaatttcaaagaaggcaggcatgattcctctgcaaatggagttgggaggaaaagatgcctgcattgtacttgaagatgctgacctggatttggttgctgcaaacattataaagggaggtttttcatacagtggtcagagatgcactgctgttaaggttgtcctggtaatggagtccgctgctgatgctttggttgagaaagtgaaggctaaggtggcaaaactaactgttggaccaccagaggatgactgtgatatcacc

SEQ ID NO: 162209 - DNA, 266 bp, Glycine max
cgcaaaaccaaaccacatattaacttgtttgctctaagtcatggctctgatcttgcacgcaaccaaagcacacaagaatgctttcaagactctgattgcggcagagtacagtggcgtccaagtggaattggcccctaatttcgagatgggtgtctctaatagaactcctgaattccttaaaatgaatcccataggaaaggttcctgtcttggaaacgcccgatggtccagtctttgagagcaatgccattgctcgttacgttgctc

SEQ ID NO: 162210 - DNA, 261 bp, Glycine max
actttcaacccaatccaatcctcgcacacatgcatgctgtatctgccaaagttggggccaagtcataactacatttccattgttacgattctttctttccatcccaaccacttacacagcgtctgatccaatttctttctctcaccatggatcatcgcaaaccattgttacccacttcctctgacgatgctccaaatccacgcactcggaaggaccttgttctaatgatttgcggtttgtttttgctctcttcccttgttg

SEQ ID NO: 162211 - DNA, 260 bp, Glycine max
attctagctctttcagctttgacttttgttggaaactaaggcctaatcaaaatggtgaagttcacagctgaagagctacgtcgtattatggactataagcataatatccgtaatatgtctgtcattgctcatgttgatcacggaaaatcaaccctcactgattctcttgtggctgctgctggtattattgctcaagaagttgccggtgatgtccgtatgactgatacccgtgcagatgaagctgagcgtggcattaccat

SEQ ID NO: 162212 - DNA, 262 bp, Glycine max
gtgagtgatcggtgttcacttgatctcatcataatcgtcagcgtcaattgaagaagatgccgatcagaaacatcgccgtcggaacgcctgaagaggcgactcaccccgacacgttgaaggcggctttggctgagttcatctcaaccttcatcttcgtgttcgccggctcaggctccggcatcgcctacaacaagctcaccgacaacggcgctgccacccctgccggcctcatctccgcctccatcgcccatgcattcgccct

SEQ ID NO: 162213 - DNA, 265 bp, Glycine max
atacgaccagtagattcagcttacaacgctatcaatctcatcgtgaaggaaactgtaaaagtacttgagtactcactaagtacagttacagaaggcactgatgcaattgcaactacacgtgttgtaattcgtagagagaataagcaatcaccaactcctgctttgaatggaaacgtaatttatccaacatttagtggaaccggagaacgggtggatgttgttacttcaagtgtagaggcttatcttactgcactaaacaaaatgc

SEQ ID NO: 162214 - DNA, 291 bp, Glycine max
caaagaagaaaaaatgggttcctctttgtggacttgtctgattttgttatcacttgcttctgcttccttcgccgccaacccaagaacaccaattgatgtgccatttggcagaaactatgtgcctacttgggcctttgatcacatcaaatacctcaaggtggttctgagattcagcttcatcttgataagtacactggtactggcttccaatccaaaggatcctacctgtttggtcacttcagcatgtacataaaattggttcctggtgattcagctggcacagtcactgct

SEQ ID NO: 162215 - DNA, 279 bp, Glycine max
agactacgtcattacggtcccaaacaaagaacaaccctttctagcaagtaaacccaagttcccttctctcttcacggttacattgctctctctctctctacacatatatttctctctctctctctacacgttcgatctctcgcttctgaatctcaacgatggtgctcgatgcgactattatctatatagacaattcagaatgtatgcgtaacggggatcactctccttctcgatttcaagcacacacagacgctgtcaatcttatgtgcggtgataaaa

SEQ ID NO: 162216 - DNA, 289 bp, Glycine max
ggcaatggcatttccgtccgtaacctctgtaactgtggagaacgtgacattccctctcaccgtgaagcctccctgctcccccaacaccttcttcctcgccggcgccggcgtcaggggcctccaaattcatcacgctttcgttaaattcactgcctctgcatttacctccaatacgacgccctttccttcctctccgttaagtggaaaaccaagtctgctcaccagttaacggaatccgaccaattcttctcagatatcgttacaggtccattcgagaaatttatgcagg

SEQ ID NO: 162217 - DNA, 283 bp, Glycine max
cgttacacaaactatcatggccacggcaacagcagctgccacctcgtcctttatggggacgcgtctcctggaggctcactccggagcggggcgagtgcacgcccgattcggcttcggcaagaaaaaggctcccgccccaaagaaagcctccagggatcgggccgagacaccgacagacccctttggtatccgggcgccaaagcgcccgaatacctcgatgggagtcttgtcggagactacgggttcgatccgtttgggctagggaagcccgcggagtacctgc

SEQ ID NO: 162218 - DNA, 285 bp, Glycine max
attctactcactcacacacacacacactctctttccatgggtccgtttcgtaaacccttccttgcatttctctcggttgttctatttctgggtctctatgaggcagcagcagaacagactcagactcacaagagtacttacattgtacacgtgggaaatcggagatgcccgagagcttcgagcaccacgctgtgtggtatgagtcgtcactgaagaccgtgtctgactcggcggagatgatttacacctacgacaacgccatccacggctacgcgacgagattaa

SEQ ID NO: 162219 - DNA, 289 bp, Glycine max
cacaaggaccatccttttcttgaaagatgatggcaccttaaagccattggccatcgaattaagtttgccacatcctaggggagatgagtttggtgccgttagtagagtcgtcttgcccgcagaccaaggtgctgaaagtacaatttggctaattgcaaggcatatgttgttgtcaatgactcctgctatcatcaactcatgagccactggttaaatactcatgctgtgattgaaccatttgtcatagcaacaaacaggcatcttagtgtgctccaccctatttataaac

SEQ ID NO: 162220 - DNA, 284 bp, Glycine max
tttgattttggtggctatgagaaggccatgaaggaaactgccaaggatttggatgagatttttggtgagtggttagaggagcacaaacaaaatagggcttttggtgagaacaacgttgatggaattcaagacttcgtggacgtcatgctttcctgtttgatggaaaaacaatttatggcatagatgcggataccatcatcaaatccaatttactgacaataatttcaggaggaactgaatcaatcactactactcttacatgggcagtatgtttgatattgaga

SEQ ID NO: 162221 - DNA, 289 bp, Glycine max
cttggagtggtacttcttcagcgcgctggatcgcaagtacggaaacggctccaggaccaaccgcgccaccgagaggggctactggaagaccaccggaaaagaccgtcccgtcacccacggcgaccgcaccgtcggaatgaagaagacgcttgtttccacagtggccgtgccccacagggccgtcgcaccaactgggtaatgcacgagtataagatgctcgacgatgaattggcacgttccggcacagtgctggatgtgtttgttgtgtgtaggattttcgagaagagtg

SEQ ID NO: 162222 - DNA, 292 bp, Glycine max
attgaagcacaagagaagagaagagaagagaggagagggggggagaaggggttgcagagagagagagagagagatgtcatcatcttcagacctggacaggcaaatagagcagttgaagaggtgtgagcctcttaaggagtctgaagtgaaggtcgttgcctcaaagccatggaaatccttgtcgaagagagcaacgttcaaagggtcgacgcccctgtcaccatatgtggtgatattcacggtcagttttatgacatgaaggagcttttcaaagtaggaggggattgcccca

SEQ ID NO: 162223 - DNA, 286 bp, Glycine max
ctgcaccgtaacgtcgtcgctcatgatgacgctacggtgcgccggcgaattgaggactggtagagtgcgccaaggctgtttcctctcggaaactttgacgacgcgatgatcaccatgggaagctctccgcggtttcccatgtacgaaaacgacttggctggggcagacccgttgcgattcggagtgggaaagcgaacaagttcgacggaaagatctccgcgtttccggggagagagggaaacggcagcgtcgatttggaggtcgttttggccccggcgaccatggc

SEQ ID NO: 162224 - DNA, 287 bp, Glycine max
atcggtgttcacttgatccttcataagtcgtcatcatcatcatcatcatcaccgttgattgaagaagatgccgatcagaaacatcgccatcggaaggcctgaagaggctactcaccccgacacgttgaaggcggggttggctgagttcatctcaccttgatcttcgtgttcgccggttcaggttccggcatcgcctacaacaagctcaccgacaacggcgccgccactcccgccggcctcatctccgcttccatcgcccatgctttcgccctcttcgtcgccgtctc

SEQ ID NO: 162225 - DNA, 284 bp, Glycine max
gtttggcagaaagctgtttttgtgtaccagaactaatttcctcttcatttgctttaatcaggaaggacagtcgttatactgaaagagacgcagcggtggttgtaaggcagatgctcaaggttgcagctgagtgtcatttacatggtttggtacacgggacatgaaaccagagaattttctttttaaatcaaccaaagaagattcacctttaaaggccactgattttggtttgtcagatttcataaaacctggaaaaaagtttcatgatattgttggcagtgctt

SEQ ID NO: 162226 - DNA, 285 bp, Glycine max
attcacccgcacaacaaagtaaattacagtgcaggggctcaattatggagaaagcaattcaaagacagatagttctgcttgaacatcttcaacccatttcttcaagttcaaatttttcctctcaaacccatcaatctacggatctctcagcttcttatgttttgctgggaattcttcgcatggtcaaacaggtggatcagatgatgacgtggtgattgtagctgcatatcgtactgccatctgcaaagcaaagcgtgggggctttaaggatacccttccagatga

SEQ ID NO: 162227 - DNA, 287 bp, Glycine max
gggagaacccaaaggatcctgatgaagttttagtcaagtatgaagcatgccttgaagatggaactcttgtggcaaaatctgatggagtggagttcacagtcaatgatggttatttttgtcctgctttgtcaaaggctgttaaaaccatgaagagggagagaaagtgcttctgacagtgaagccacaatatggatttggtgagaagggtaagccagcacatgatgaagaaggtgcagttccaccaaatgcaacattgcagattactcttgagttagtttcttggaaga

SEQ ID NO: 162228 - DNA, 289 bp, Glycine max
attccattttccaattcaaaaccctaactccgttcgaagcaccaaatcgtgatggcaccaaaggcagagaagaagccagcagagaagaagcctgtggaggagaagaaatcgacggtgggagacaaggctccggcggagaagaagccaaaggccggaagaagcttccgaagagggaggcgccggcggagaaggtaagaagaagaagagaaacaagaagagcgtggagacatacaagatctacatcttcaaggttctgaagcaggttcaccctgacattggtatctcaagc

SEQ ID NO: 162229 - DNA, 289 bp, Glycine max
caacactttccacttgtctccgaattagttatcttgagaaacattattcccattgctatatattatggctagcatgaaggttacatgggtggttgtgatcatgtgcatggccgtggtgggtgcaccgatgatggcgcaaccatgacatgcaatgagtgacggtgaacatggcacagtgcctatcctacctgatgcagggaggaacaccttcaacactttgctgcagcggagtcaagaacattcttggctctgctgtcaccaccgttgacaaacaaactgtgtgcaactg

SEQ ID NO: 162230 - DNA, 284 bp, Glycine max
gcaaaatgctcctgtatcccttcctatggaaaccttcaagagttatgttctcaaggatcccatcggagttgttgcattaattactccatggaactatcctctattgatggctacatggaaagttgctcctgctctagctgctggttgtacacaatattgaagccatctgaattggcatctgtgacctgtttggagctggctgaaatatgcagagaagttggccttcctccaggggtattaaacattgttactggattaggcaatgaagctggtgctcctttgtc

SEQ ID NO: 162231 - DNA, 283 bp, Glycine max
ctttagagagatagagagatagagagagagagaaagaaattaagaaaaaatggcagcctgcactgtctactcaacacaatctctgagctcaaattgctccatctcaaccccatcaaagacacagctgagtttcttccaccaaaagcaggtacgttctggaggaacagcaacaggggcaacagcagcagcagaagaagctatgtgataacatgtgcagcaggtgactcacagacagtggtgattggtcttgctgcagactcagggtgtgggaagagcacttcat

SEQ ID NO: 162232 - DNA, 278 bp, Glycine max
tccacatctccagaagctgatatggacaatgaagagagaataatctacacttatcagaatgcttttcatggagttgcagccaagttaactgaaggagaagctaagaagctagaggctgaagaaggtgttgtggccatattccctgatacaagtatgagctacacaccacaagaagtccaatattccttggtcttgaaccagcaaaaagcactaacatgtggtcagagaagctagctggccatgatgttatagtgggagtggtagacactgggatttgg

SEQ ID NO: 162233 - DNA, 284 bp, Glycine max
gcagaatcttggagacaaagcagtgatgtgtcataggctaaatttcagaactgcagtattttactgccatgaagtccgtgaaacaacagctttcatggttccattggtggctggtgatggaaccaaaactcaggcacttgctatttgccatcaaatacttctggaatgaatcatcaaatgcttcatcaacttatgggagttgatcctggaactaaccctgtttgccatttccttggaagcaaggccattttatgggtacccaatttatctgtggacactgccta

SEQ ID NO: 162234 - DNA, 286 bp, Glycine max
  unsure (1)..(286): unsure at all n locations
gctgctagctattagctatggctagaggaaagatccagatcaagaggatagagaacaacaccaaccgccaggtncacttactctaaacgacggaatggccttttcaagaaggccaacgagcttaccgttctctgcgatgccaaggtttctatattatgttctccagcactggaaaactccaccagtacatcagcccctccacctcaacaaagcagttcttcgatcaataccagatgactctgggagttgatctctggaactctcattacgagaatatgcaagagaa

SEQ ID NO: 162235 - DNA, 287 bp, Glycine max
agagaatccgaggcgaagagaagagaaaaattaagatggaggggaaggagcaggatgtgtcgctgggagcgaacaagttcccggagagacagccgattgggacggcggcgcagagccaagacgacggcaaggactaccaggagccggcgccgcgccactggttgacccgacggagtttacgtcatggtccttttacagagcagggatagcagagtttgtggccacttttctgtttctatacatcactgtcttaaccgtcatgggagtcgccggggctaagtctaagt

SEQ ID NO: 162236 - DNA, 284 bp, Glycine max
aatacgtgcatacatagctatctatttatctatagcaagtacgtcaagagacacgtggtacccttgctagagtgccattctgtggtttctttctatctttctttctgcatcacatcacaatttgccttgcctcgtgtcctttttcttctttctctccaaaaatctcacacacacaggtatctagcaaatgggttctcaccaacaagaaccatggctattggagaatgggaaaccaagggttttgaccaaggcagacaggcatggccgttctgcacacagaatgt

SEQ ID NO: 162237 - DNA, 274 bp, Glycine max
tctctctctgcttcacttgcttgaagcaatggccaaagccttggcatcagtgctgctgtttctcctcgtagctgtgagtaatgtgtttgctgtagagcttgaacttgaaactcttccaccctcttagcctcaccctcaccctgttcactccccacaccagcacctcttcacccaccagcagatgctcctcacccacaccaccagcaccaccaccagcaccctccatcaccagcaccagcagcagcacctgttccttcaccttctcaccacaatt

SEQ ID NO: 162238 - DNA, 284 bp, Glycine max
cttcttcccaaccactactactcactcactgcagatctcaattgcatcgctgtccatggctaccatcgttagcatcaaggcccgccagatcttcgacagtcgtggcaatccaactgtcgaggtggatttgacttgctccgatggtacttttccagagctgctgttccaagtggtgcatccactgggatttatgaggcccttgaattgagagatggaggatctgactaccttggaaagggtgtatcaaaggctgttgacaatgtgaacaccgtcattggccctgc

SEQ ID NO: 162239 - DNA, 284 bp, Glycine max
gggagttcaagaatttggagacaaaaggggttcctttcccaaagaaccaacccatgagaatatactctagcctttggaacgctgaggattgggccacaaggggtgggcttgtgaaaacggattggagcaaggccccattcacagcctcatcagaaacttcaatgccctaacctcttcctccactggccaatcactggacgccacggggctggccaagatccattgggtgcaaaagaattacatgatttacaactattgcactgatattagacgtttcccacaag

SEQ ID NO: 162240 - DNA, 283 bp, Glycine max
aaaaagtttgctgcgccctgatttccatgtttctgcacaaaactgttgggttcgcaaaggtggtgcttataccggtgaggttagtgctgaaatgcttgttaatttgggaattccttgggttattattggtcactctgaacggaggcagctttaaatgaatcaaacgagtttgtgggagataaagttgcctatgcacttcaacaaggtctaaaagttattgcatgcattggggagactctcgaacagcgtgaagctggtacaacaacggctgttgtttctgagc

SEQ ID NO: 162241 - DNA, 282 bp, Glycine max
cttaagtataagtctgaagaaggggtgagagtgttgttgctggtttcggatgataaaacttcgcacgataaggttttcctcaagacggctggtgtgatggggactcatgatgaggaaaccaggaagttttttaagcattcttctgttatggtgttctgtcgcctcggtatgccagcagcaagatgagcttcttgaagcaacaggagataggattctttgtgagctagttttcagtggagtcaaatgtgaaatgccctgtattttgtggcctaagctctaaac

SEQ ID NO: 162242 - DNA, 281 bp, Glycine max
agagggagtaacccctccaagcttcaattatctacattatccacattcctagctagctttatccacatctacaaaatagtccttagatttccctctctctttcttttgtataactgtgtcatatcttagatctcctttcacttccttcaaaaacaaaatcatgggtctgagagacattggtgcttcactgcctcctgggtttcggttttatccgagtgatgaggaattggtctgccattacctctacaaaaagatcgcaaatgaggaagttctgaagggta

SEQ ID NO: 162243 - DNA, 287 bp, Glycine max
ctctcttctttttactctctctctgtctctctctacgctttctcgttcgagatccctcaagggatccactaactgaaggagaaatggggttgacattcaccaagcttttcagccggcttttcgccaagaaggaaatgcgaattctgatggtggtctcgatgcagctggtaagaccaccatcctgtacaagctcaaacttggagagatcgttaccacaattcccaccattgggttcaatgtggagactgtggaatacaagaacattagtttcactgtctgggatgttg

SEQ ID NO: 162244 - DNA, 278 bp, Glycine max
atcattaaccaataaccaataaatacattaatcaccatggggaagtactttgctgttgttgctctctttgtctcagctttgtgcttctcctctatcttggctcgtaagacacctgcccttgataaattcttcgttgagggcaagatttctgtgacccttgccacttcgcatttgagtccaggctcagtttccccttggaaggtgttaaggtaagcctgcaatgtctgaggagtgagaatgataccgtgacatatgtgaaggagggcaaaactgatgca

SEQ ID NO: 162245 - DNA, 283 bp, Glycine max
gcaagctcatcctagagttttaaaaatggcagcagcctcctccatggctctctcttccccatccttggctggcaaggccgtgaagctgggcccatcagcccccgaagtcgggagggtcagcatgaggaagaccgtcaccaagcaggcctctccggaagcccatggtacggcccagaccgcgtcaagtacttgggcccattctctggcgagcccccgtcctacctcactggcgagttcccaggtgactacggctgggacactgctgggctttcggccgaaccag

SEQ ID NO: 162246 - DNA, 245 bp, Glycine max
gtttgtagggaagacaatatgaaactgctattattttaaagctctaaatgttcaatccaactaaatgcccgatgattggtgtttcttttttaaaaaaaaaaaaaaaaaaaaaaaaaaaaaaaaaaaaaaagtaaaaaaaaacaaaaaaaaaagggggggggcccccaaaaaggagccctccccggcgggatatatcgcgggggggggtagggaggggggcacatttttcccaagaaggggccctt

SEQ ID NO: 162247 - DNA, 281 bp, Glycine max
aattggcaaaggaagtagaataccttcttaggaagggatggattccttgcttggaattcgcgttggagcacggtttcgtgtaccgtgagcacaacaggtcaccaggatactacgatggacgctactggaccatgtggaagctgcctatgtttggttgcactgatgcttctcaggtgttgaaggagcttcaagaggctaagactgcataccccaacggcttcatccgtatcatcggattcgacaacgttcgccaagtgcagtgcatcagcttcatcgcctac

SEQ ID NO: 162248 - DNA, 281 bp, Glycine max
cccgtttcgccttcgatcaaagggaagaacaaacattcaattcatggcggctgcaaagcttcaagctttatggaatcacccagctgggcctaaaaccattcacttctgggcacctacctttaagtggggcatcagcattgccaacattctgatttctcaaaaccacctgagaaactttcctatcctcagcaaatagcggtcacagctactggaattatctggtctcgttacagcactgtaatcaccccaaaaaattggtacctgtttagtgtaaacattgc

SEQ ID NO: 162249 - DNA, 280 bp, Glycine max
gttgcacacggcgcaaaggggaacaagaagaagaagatggtgtccttgaagcttcagaagcggctcgccgctagcgtcctaaagtgtggcagaggcaaggtctggctcgatccaaatgaagtcaatgaaatctccatggccaattctgacaaaacataagaaagttggttaaggatgggtttattatcaggaagccaactaagattcactctcgctctcgtgctcgtcgaatgaaggaggccaagaggaagggacgtcactctggctatggtaagcgtaa

SEQ ID NO: 162250 - DNA, 282 bp, Glycine max
gccaaagcatggcttctctctcttgctccgccaacgaccttgccccactcttcaacgacaccgccgccgccaactacctctgcgcccaattcgattccatttctagaaagctcgccgaaacaacctacgccgtcgacaacacctaccttctgttttcagcgtatcttgtcttcgccatgcagctcggcttcgccatgctctgcgccggctccgtcagagccaaaaacaccatgaacatcatgctcaccaacgtcctcgacgccgccgccggcggtctctcct

SEQ ID NO: 162251 - DNA, 278 bp, Glycine max
cgcatgatagaggcatgacatttgaggaagaacaataactaagcactaaccttcaaagttttccttcagagaagcttgatgctattgtacaaatcattaagaagagaaattcagcacttcacaccatgacgacgacattgaagtggcattgatagtgtggatgctgagactcgctgggagcttgatagatttgttaccaactataagaaaagtttgagcaaaaacaaaaggaaggctgaacttgctcgagctagagcagaagctttgcagcagaatgc

SEQ ID NO: 162252 - DNA, 280 bp, Glycine max
ctcactcaatggcttggcactcgttcctcttattagcgacggccattctcgccgttgtgtgctccgccgtgagcggttgctcgccatcggatagggcggcgctgctggccttccggaaggcgctgagcgagccctaccttggcctctcaactcgtggacgggctccaactgctgcctcgactggtacggcatcagctgcgacgccaccaccggccgcgtcaccgacatcaacctccgcggggagtccgaagaccccatcttcgagaaagccggtcgctcc

SEQ ID NO: 162253 - DNA, 281 bp, Glycine max
ttcactctcaagcttcaagcatgactcctttttacttcctcctatttgccttcatccttttcctctccataaacttcttgatccaaacaagaaggttcaaaaaccttcctccgggaccattttctttccctataatcggaaacctccacaactcaagcaacccctccaccgcacgttccatgccttatcacaaaaatatggccctattttctccctctggttcggctcccgttttgtcgtcgtcgtttcgtcgccgctcgcggtgcaagaatgcttcacca

SEQ ID NO: 162254 - DNA, 283 bp, Glycine max
gtgctcagcaacaccgctgccaacggcgaggagctggtggcggatgctcatttgttacctgccaccgcggttgggcagaaagccggtgacgctattaagaagtatttgttttctgatgcgaaaccgacggtgaagattttgtttgaaggacaaagttggggattcagccatctcctgtggtggcagcgtttagctctagaggacccaactcgatcaccccgcagatccttaagccagatcttatcgcgccaggtgtcaacatcctagccgggtggtccaaggc

SEQ ID NO: 162255 - DNA, 284 bp, Glycine max
gtggtacttctttagtccacgagagaggaagtatccaaatggggtgaggcctaatagagcaaccgtgtctgggtattggaaggccactggcacagataaagcaatctatagtgggtctaagcatgtaggggtgaagaaggctttggtttttataagggtaagccaccaaagggtctcaagacagattggattatgcatgagtatagattaattggatcaagaagacaagccaatagacaagttggatccatgaggctagacgactgggtcttgtgtaggatcta

SEQ ID NO: 162256 - DNA, 265 bp, Glycine max
gttggcttcatagggactggactccctccttttgttgcattaagagctgacatggatgctcttcctctgcaggaaatggtggagtgggagcacaagagtaaagtacctggaaagatgcatgcatgcggtcatgatgctcatgttgccatgcttctcggtgctgcaaagatcctcaaacggcatgaaaatgagatacgaggaactgttgttcttgtttttcaaccagcagaagaaggaggtggaggggctaagaaaattttagatg

SEQ ID NO: 162257 - DNA, 250 bp, Glycine max
cgctcttgttcctccatttgtcttgcaaactttctgtcgcacaaataactctaaactaagcacttccatacacaaattttctctcccagaagaaatattttcatttcatttcgagtaaaagtaaaacacagttcctgatccatggcatctcgccgccgcatgttgttgaaggtcataatcctcggagacagcggggttggtaaaacatcactgatgaatcagtatgtgaatcgtaaatttagtaatcagt

SEQ ID NO: 162258 - DNA, 261 bp, Glycine max
gaagcaataagatgaaaatgaaagtgcttgttttgtttgttgctacagttttggtagcatatgaatgccatggctcagactaccagaagttccctctccaaatgaaaactgggtttggtgggcaatacagcaatgaggtggcatgtgccagttggaggcttggcgtggaagcaaacaacgtagtcaagtggcaaactgttcctgcagcttgcggagagtacatagctgactacgttctaggagaccaatatagatcagatt

SEQ ID NO: 162259 - DNA, 262 bp, Glycine max
aaggacacgggcattgaagatcctgaggttggaccagctattgcctttgctatcagagagcagctttatgagattgcaattcaaagtgtggtttcagcaagagaaagcagaatgagcaagaagggtcgtcgaggggctgaatatactccagtcagtaaaggaggtgcagcagcagtggacttggtcaagttgtttggtccgaaatctagtgtagttcggaaaagaaaggagtgggacgtatatgaacctattgtggacctac

SEQ ID NO: 162260 - DNA, 262 bp, Glycine max
caccactttatatacccacgcaatagaagggagtgctactctcttcgccgctctctctctccttctcgctctttcagctttgacttttgttggaaactaaggcctaatcaaaatggtgaagttcacagctgaagagctacgtcgtattatggactataagcataatatccgtaatatgtctgtcattgctcatgttgatcacggaaaatcaaccctcactgattctcttgtggctgctgctggtattattgctcaagaagtt

SEQ ID NO: 162261 - DNA, 259 bp, Glycine max
atagaagcaagattatcttccttttggaatgtgtacttaaatttctctgattaattatttccaggaaaggtatatcgggatatagttggtagtgcttactatgttgctcctgaagttctgcggcgcagatgtgggaaggaaatagatatatggagtgcaggagtcatattgtatatcttacttagtggagtccctccattttgggctgagactgagaagggaatatttgatgccatattggaaggtcacattgattttg

SEQ ID NO: 162262 - DNA, 260 bp, Glycine max
taaccctcttctttttgtttttgtataatcccttcaaatttgcattaggtaaaaaagaggctcccgaagttgcaggtgcatggccaatacttggtcacctaccactattgagtggttcagagacacctgatagggttttgggtgctttggctgataagtatggacccatattcaccatcaacaatggtgtcaaaaaggttttggtaatcagcaactgggaaattgctaaggaatgcttcaccaaaaacgacatcgtcgtt

SEQ ID NO: 162263 - DNA, 261 bp, Glycine max
gcggttagcttcttcattcaatcctggtgcatctcagaaagacgtcccctgtactgtgcaatgttcaaccctttggcaacagtcatcactgcattgataagtgcaactttcctagaggaataggtgtacgttggaagtttggtaggggctgttggagttattgccggtttatatgttgtgctttggggtaaagccaaagagtttgctgagattaaaccagaggcaccacaatcatcaaacttactagatgatgagataagt

SEQ ID NO: 162264 - DNA, 251 bp, Glycine max
caaggttgaaccatgctcatttgctcaaccttctagggtattgcgaagaaggtgaagagaggcttcttgtgtatgagttcatggctcacggatctttgcaccaacacttgcatggaacaaaccaagtgttgagagagcaactagattggataagaagggtcacaattgcagttcaagcggcacgtggaatcgaatacttgcatggatatgcttgccctccagtgattcatagagacatcaagtcctcaaac

SEQ ID NO: 162265 - DNA, 261 bp, Glycine max
gcatgattagggactccgccgaccattatggattgagaacaaggagtgatggtgatgccatctccatttttggatccaccaacatttggatcgatcatgtttccctctctaactgtgccgatggtcttatcgatatcatccaaggctccactgccatcaccatctcaaattgccacatgaccaaacataatgatgtgtttctctttggtgctagtgactcatacaacggagacaagatcatgcagatcacagtggcattca

SEQ ID NO: 162266 - DNA, 260 bp, Glycine max
aaaaaaaaagaagagaaaaacaaaatgggcagggtttggacttcgatgatagcattgttgctttgcctgatgacatcatcggttcggggcgaggacccttacatttactacacatggaacgtgacctacggcaccattgccccattgggtgtcccccaacagggtatcctcatcaatggtcagtttcccggccccgaaatcaactccaccagcaacaacaacgtggtcatcaatgtcttcaacaacctcgatgagcctct

SEQ ID NO: 162267 - DNA, 261 bp, Glycine max
aaatcacatagctagttgtttaaagtaagagagaagaaagaagcaaatggcaaactttccagttgttgacatggggaagcttaacaccgaagagagacctgcagccatggagattataaaagatgcctgtgagaactggggtttctttgagttggtgaaccatgggatatccattgagcttatggacacagtggagaagctcacaaaagagcattacaagaagactatggagcaaaggttcaaagaaatggtgaccagcaa

SEQ ID NO: 162268 - DNA, 260 bp, Glycine max
atccacttatctgaaattctgaacagtacagttcttgcgttgtttcggaggatcaattgtttgattaagcaaaaaacttaatagtagttaaaagcaaatggggaatcttttttgttgtgtgcaagttgatcaatcaacagtggctataagagaaggatttggacgatttgagaaggtacttcagccaggatgccattgcatgccatggttccttggaaaacaacttgctggtcatctctctcttcggctacagcaactgg

SEQ ID NO: 162269 - DNA, 260 bp, Glycine max
atcttgctctatatcaaggcataataatgtttggtctgaggccacttcctcggaatctgttgaaatgctattaaaatctgttggacaggaggaatttatccctagagaaactgttatacaggagtctgatgcctgtgatgaactggtatgcttagctaagcaaatggagcccgatccaaaacctgatggtagaaatgaatttaaaaataatattactgatttacagcctacaggttttattgatgagaacttggctggat

SEQ ID NO: 162270 - DNA, 258 bp, Glycine max
gccataaagaagtttaatgttgcgaagaatgcccttgcacaagttgcatggaactttgttaatgatgggctgaggacatcgctctgcctgcaatttaagccacatcatattgcggcaggtgccattttccttgctgccaagttcttgaaagtgaagcttccatcagatggtgagaaggtttggtggcaagaatttgatgtcaccccacgtcaattagaggaagttagcaatcaaatgttggtaatctacgagcagaat

SEQ ID NO: 162271 - DNA, 257 bp, Glycine max
atccacttatctgaaattctgaacagtacagttcttgcgttgtttcggaggatcaattgtttgattaagcaaaaaacttaatagtagttaaaagcaaatggggaatcttttttgttgtgtgcaagttgatcaatcaacagtggctataagagaaggatttggacgatttgagaaggtacttcagccaggatgccattgcatgccatggttccttggaaaacaacttgctggtcatctctctcttcggctacagcaac

SEQ ID NO: 162272 - DNA, 259 bp, Glycine max
gcaggaacttatgatgagaagagattgtttggtgttaccacccttgatgttgttagggcaaaaactttctatgctgggaaagccaatgttccagttgctggtgttaatgtacctgttgtgggcggccatgcaggcattactattctgccactattttctcaagccacaccaaaagccaatcttgatgatgatgtcattaaggctcttacaaagaggacacaagatggaggaacagaagttgtagaagctaaggctggaa

SEQ ID NO: 162273 - DNA, 259 bp, Glycine max
gcagagaggactttttcgctatgatgttaccgcctgtgaaaccaaggtgattcctggtgaatatggtttcgttgcccagcttaacgagggtcgtcacctcaagaagaggccaactgagttccgagttgataaggtccttcaaccctttgatgaaaacaaattcaactttaccaaagtcgggcaagaagaggtcctcttccaatttgaagctagcgaggatggacaagtccagttctttccaaatgctccagttgatgtt

SEQ ID NO: 162274 - DNA, 245 bp, Glycine max
aatggtttgagcaaaagccgaaaacctctgttgaagccttgccagatgagtgtctctttgagatctttaggaggttgccttctggggaagacaggagtgcatgtgcctgtgtttccaagcgatggcttatgcttctaagcagtatttgcaaaaatgaaatctgtgttaacaaaaatgccactgtagagaccattgaaaaggagggtgatgatgtagaatttggaggtgagggatatctctctcga

SEQ ID NO: 162275 - DNA, 261 bp, Glycine max
cgacgacgatgatctcgaagagggtgagatccccgtcgacggcgaagatagcggcgccaccgccacaacgaagcctccggccgccctcgcccgaaacccccaccctctggagaattcctggaccttctggttcgacaacccttcctccaagtccaaacaagccgcatggggcagctccatccgacccatctacactttcgccaccgttgaagagttttggagcatttacaataacattcaccacccgagcaagttgggttt

SEQ ID NO: 162276 - DNA, 258 bp, Glycine max
gtggctgtattgtttgatgatggagctaaatgtgatatcactgccttggaaagagagaagcttttaccactgactggtaattttcctgaagattcgcagtttccgtactatccagggcagagagtaaaggttaagtcctccagtgcttctaaatcaactagatggctatgtgacacttggagagacaatcatgatgaaggaactgtttgtgctgtggaagcaggcttggtgtatgttaattggatttctcatgttcta

SEQ ID NO: 162277 - DNA, 258 bp, Glycine max
gcgcaagtgaggaacaagcaagtgcttctaaaggactatgttaccggttttcccaaagaatccgacatgaatattgtcgaaagtaccataacattgaagcttccacaaggttccaatgatgtcttgctcaaaaatttgtacttgtcttgtgatccgtatatgaggaatctcatgaacaagcccgaaggccctcccaatagtcgtgcttacactcctggctctccattaataggatatggtgtgtctaaagtcctggaa

SEQ ID NO: 162278 - DNA, 255 bp, Glycine max
gcagaaattggctactacggcgagaaagaatggtacttcttttctcctcgggatcggaaatacccgaacggttcacggccgaaccgtgccgccggaagcggctattggaaagccaccggcgccgataaggcgatcggaaaaccgaaagcgctagggatcaagaaagctctggttttttacgccggaaaagcccccaaaggagtgaaacccaattggatcatgcacgaatatcgcctcgccaatgttgaccgatct

SEQ ID NO: 162279 - DNA, 258 bp, Glycine max
gcaccagtttcaccgcacgaatatcttgttgtttggagcgatccgagaaaaactctgtaaacatgttggtttaccaggacctccttacaggtgatgagcttctctctgactccttccgttacaaggaaattgagaatggaatgctgtgggaagttgaggggaagtgggttgttaaaggagcagttgatgtagacattggtgcaaacccttctgctgagggtggaggagaagatgagggagttgatgatgcagctgtta

SEQ ID NO: 162280 - DNA, 259 bp, Glycine max
ggacaggtaaggaaatttcttgttgagttacgtgcttacttaaacacgaataaacctcaattcaaagaaatcatatcttctaccaagacattcactggggaagcagaagtccttttgaaggaagctattcaagaacagatggaactctttttactacaggaacaggtagaaaaaaattgattaatcatttaataactttataatttcactttcaaattcttataattagtatcttttaatatctttttatttcatttga

SEQ ID NO: 162281 - DNA, 258 bp, Glycine max
cagctaattggtatttaattagacaaccaaagccgcaagagtcagtcagcaaggaagatggcaacaaccttcaagtactttacttccatcctcttcctcaccctcgtcatcaaagggtcatgtgatgactgttccttgaacaacatcaatattggcacatcaagaactgggagagaaatccagggccagcctgagtggaacgtgaccgtgatcaacaattgcaactgtgaacagagtcagataaagttgtcttgcaaa

SEQ ID NO: 162282 - DNA, 259 bp, Glycine max
attaaattgccaacagatatactgagccaaattagccccttaccagccctcaaggaaatcttccgcactgatggtgaaaatgttcttcaatttccaccacctcatgtagccaaagttagtaagtctgggtggatgactgatgaggaatttgctagagaggtgattgctggtgtaaacccaaatgtgatccgtcgtcttcaagaattcccaccaaagagcacacttgatcccacactctatggtgatcaaaccagtacca

SEQ ID NO: 162283 - DNA, 255 bp, Glycine max
ctaaactagaaagtgatcgaacagcatgttcaagcttttggttagtagagcagctagggtttcaactccacacaaccacaatgcttttgcttctttcgctttctctaggtatgctcattcattaccatttgcaactgtagaagcagaagagatatcaggctctagggctgctgaagttttgaacctggtgcaaggtaaatgggtaggatcttcaaattggaatacagttgtagatcctttaaatggagactcatt

SEQ ID NO: 162284 - DNA, 231 bp, Glycine max
atttgaaacaatgttacagaattatggcgcttttcttgagaaggatggagcagggattagaggtaaaataaagatcactggatttgaaaatggagatatagatctttcaaaatcattatggacctatcaggttgggcttcaagggtgagtttttaaaattttacagtgaagagattgaaaattcagaagggtagagttgaccctgatgccatcccatccaatttacagggt

SEQ ID NO: 162285 - DNA, 259 bp, Glycine max
ccacaatcaaacctcttctttcaggtccaattcactcgcttattctcttctttccatacacatgcagacacaaaattcgaacaagttcaggactggcatggacttctttcaccgcgcgaaggcggtgcgcctccgcagccaccacgacaagtacctcctcgcggaggacgacgaggattcggtgacgcaggaccgcaaaggctcctcgaaaagcgcgcggtggacggtacaatacgtggctgaatacgatcacataatt

SEQ ID NO: 162286 - DNA, 258 bp, Glycine max
atcagattgctcgaagagtttggaaagattactatgcccaggtggatgcagtggtgtacttggttgatgcttatgacaaggaaagatttgctgagtcaaaaaaagagctggatgctctactctctgatgaatctttagcgaatgtccctttccttgtccttgggaataagatagatattccatatgctgcctctgaagaagaactgcgttaccatttgggcctgactaacttcaccacaggcaagggtaaggtaaatt

SEQ ID NO: 162287 - DNA, 257 bp, Glycine max
gaaagcagctcgaggacggccgcaccctcgccgactacaacatccagaaggaatcaacccttcacctcgtcctccgtctccgtggtggcatgcagatcttcgttaagaccctcaccggcaagactattaccctagaagtcgaaagctccgacaccatcgacaacgtcaaggctaagattcaggacaaggagggaatccccccagaccagcagaggctgatcttcgccgggaagcagctcgaggacggacgcaccctt

SEQ ID NO: 162288 - DNA, 256 bp, Glycine max
atggaatttcgatgctcagtcatctcttttaccattctcttctctcttgctcttgcaggagagagccatgtccatgcatcgctacctgaggaagattattgggaagctgtttggccaaacactcccattcccactgcactgcgagagcttctaaagcctcgccctgcaggtgttgaaatcgatgaactccctaagcaaattgatgatacacagtacccaaaaacattcttctataaagaagaccttcatccaggca

SEQ ID NO: 162289 - DNA, 216 bp, Glycine max
gaagaagatacgaaacctcaagtttaatctacctattagatgttgggttaggatattaggattttaatgccttttgaacttgtttttgttatacatctttgaagatattttaaccttgtgagcaacgaattggcattttgtggatttcttatgtgtattagtttcctgccaccttattttctcctgaatttattgtttattgtttagaacaatgtg

SEQ ID NO: 162290 - DNA, 254 bp, Glycine max
taaaaaatgaaatgaatcatttcatattgatagtattgctatgcttagtgtgcgactcgttagttttttagaacggttccaatttaacaaatttataaaccggttcatcgtataaatgaattaaaaaagaactaataaccaacgcatcgcttcggattatctagatctaaagaactagtcaaaacaaaaaataatataaaaaaagatatattatagcaactgaactattgtgaagcataaaagaacaaaaatct

SEQ ID NO: 162291 - DNA, 246 bp, Glycine max
ggaacggtggagatggaggctagcatcatggatggtccaaaacgacgatgcggcgccgtttcgggtcttaccaccgttaagaacccgatctcgctcgctcgtttggttatggacaaatccccacattcctatctcgccttctccggagccgaagaaattgctaggcaacagggtgtggaggttgtggacaacgagtactttatcacacctgataatgttggcatgctcaagctggccaaggaagca

SEQ ID NO: 162292 - DNA, 248 bp, Glycine max
cttcgcaacacaacaaaaaaagacaacccagagagcgcgtcttaataaacgctcttctctgaaaacccccatttcttttcttctttcttcttctctttcgcttcttcgatcttcgatcttcgtcgctgaaaatgagagagtgcatttcaatccacatcggccaggccgggattcaggttggaaacgcctgctgggagctttactgcctcgaacacggcattcagcctgatgggcagatgccaagtgac

SEQ ID NO: 162293 - DNA, 244 bp, Glycine max
cttccctggcggcttccaccgcagctatgtcagaaatgcttggaaaccccgtgagcctgagaggcgccaccaggtctgctccatcaccgtctacacctgttactttcaagaccgttgcgcttttctccaagaagaaggcagcaccacctcctccaaagaaaaagcctgctgctgtatcccccgccaatgaggaactcgccaagtggtatggtcctgacagaaggatcttcttgcctgagggtct

SEQ ID NO: 162294 - DNA, 245 bp, Glycine max
gttcaagctttgcttgcaactaagctaattgacgaaattggccattcacttgcaaaagggcatgatttcatcaagaagtctcaggtgagagacaacccttcaggagattttaagagtatgtatcgtcatattactaaagggtcttggacattctcagatcaagaccatggatggcaagtttctgattgcactgcagaaggtttaaagtgttgtcttcttctatcaaagttgtcaccagagattgt

SEQ ID NO: 162295 - DNA, 246 bp, Glycine max
tagggtttctccttcgagtgagggaaatggctcccaaaccgcctagtacgggtctgtttgttggactgaacaagggtcacgtcgtcaccaagaaggaattgcccccacgcccctcagatcgtaaggggaaaacaagcaagagggtgcactttgtgaggaacctcataagagaggttgctggttttgcacccgatgaaaagcgtataactgagttgctgaaggttgggaaggataagagggcactga

SEQ ID NO: 162296 - DNA, 251 bp, Glycine max
aatcaacccttcacctcgtcctccgtctccgtggtggcatgcagatcttcgttaagaccctcaccggcaagactattaccctagaagtcgaaagctccgacaccatcgacaacgtcaaggctaagattcaggacaaggagggaatccccccagaccagcagaggctgatcttcgccgggaagcagctcgaggacggacgcacccttgctgactacaacatccagaaggagtcaactctccacttggtgttg

SEQ ID NO: 162297 - DNA, 258 bp, Glycine max
gggcaatgaagatctctaattatgcaaatgtagctctgttgatattaaagatttatgccactgtaaggagtgggtcaatagctattgcagcatcaactctagattctctacttgatctaatggctggtggtatactttggttcactcacctctcaatgaagaacataaatatttataaatacccaattggaaagctaagagtgcagccagttggaataattatttttgcagcaatcatggcaacacttggctttcagg

SEQ ID NO: 162298 - DNA, 252 bp, Glycine max
cctagtttcaattctgtccaatttccaaaaccaaaacaagccacacaagttcatggcaactcccaataacagactctctcttgccatggagagaactgggcaatgggttttctctcaagacataccaactgatgttatagtggaagttggagaaacaactttctctctgcacaagttcatgctagtggcaaaaagcaactacataagaaaactgatattggaatcagatgagagcgaactcaccagaatcga

SEQ ID NO: 162299 - DNA, 245 bp, Glycine max
tgtattttttctgtgtgagggacagaaaatacccaactggtcaaaggactaatagggccactggtgttggctactggaaggcaacaggcaaggagagagagatatataaggcaaaggcactgattggaatgaagaaaactcttgttttctacaaaggaagagctccaagtggtgaaaaaactagctgggtcatgcatgaatacagattagaagatgaacattctgtgcacaatccacccaaaaag

SEQ ID NO: 162300 - DNA, 247 bp, Glycine max
aaagggattcatcgttcttcttcccaggttatttagaaaagcaaaatggtgaagatttgctgcattggtgctggatatgtggggggtcctactatggcagtcattgcacttaagtgcccatccattgaagtcgctgttgttgatatctctaaatcccgcattgcagcctggaacagcgaccagcttcctatctatgaacctggccttgatggtgttgtgaagcaatgccgtggcaagaacctcttct

SEQ ID NO: 162301 - DNA, 250 bp, Glycine max
cacacacgtaacttcatctgggtttcaggaaaaaagaaaaaggaaaacaatgggttccgataatcaccagaacttggagttcttgaaggagatcggtttgggctcttccaacattggctcttacattaatggccagtggaaagccactggttcttctgtcacttctgttaatccttctaacaatcagagtatagctcaagtgaccgaagcaaccttgcaagattttgaggaggggttgcgagcttgcagt

SEQ ID NO: 162302 - DNA, 244 bp, Glycine max
gaaaagagtgcgagtgatgaaattgaatccaaatacctaagcggtggacgaggcctacctgagccactgcttcgcccccgccggcgaggtggtctccatcaaaatcatccgcaacgagctcacgggccagcccgagggctacggcttcgtcgagttcgtctcccacgccacagcggaaagggttctccagacctacaacgccaccgaccagaccttcaggctcaattgggcctccttcggcatc

SEQ ID NO: 162303 - DNA, 243 bp, Glycine max
gccatgtgttcaatgggttgatgacaaccttaagcaaagcaaagaagattgttttgctcattcaatggaatacgatattgagactaatcaagttcgagcactcacggtaaagacagatccatggtgctcatgtggaggacttacacctgatggtaccctagttgttgctggtggttttgcagacggagggaaaacctccagatactatggcggtcaacctgattgccaagactgtgactggag

SEQ ID NO: 162304 - DNA, 251 bp, Glycine max
gtttagttttgttagtagaggggatcgaatccaagattttttcctcaaagcttctcccttaatcatccaacatatcttatatcttttcttttttatgtaaattaataaattaatttataataaacatttatggatgcaggagatattgagtccatgccatttattcaggcattaggacaattctcatacagagtaggtgctggcaacttttgcttagttcatgtcagccttgttcctgttttgaatgttgt

SEQ ID NO: 162305 - DNA, 251 bp, Glycine max
cacaaattttatgtgattagtcgcggtatttaaaataaaaaatgaaagtagacaaataaaaaaggaaaggagatgtttgaataaaaataattccccttcaagttcttattttttgagaggacaggacaatatgaatgttttattatgctctatcaacacattaaaaagattatatgatatatctgctgtggaagtaggtcaacatttctattggcaaatagggagtttccaagtacatgcccaagtactta

SEQ ID NO: 162306 - DNA, 244 bp, Glycine max
ctgggacttcaggctatacaaatccaatatggcattcctcacaagagcacatttaatcggcaatttttgacaagtgaagtttcaagaatcaattatttaggatatagactttatcgtgctctgcctttcctttatgaattaagatgtgttcttgactggtcatgcacaactacgtccctcaccatgtatgactggctaaagctggaggacataaatgcaagtttgtaccttgtcaaatgtgatt

SEQ ID NO: 162307 - DNA, 245 bp, Glycine max
gctctgtcttatatcaggagattgattacaccaaggaggctgctaatgcagaattgtttgcaagtaactttaagaacatggattatgtgaaagttcctacaatctactgggattataccacaccacagattctataaatggagtatgttccagggattaaaataaacaaaatacaagctttagatcaactgggtgttgaccgcaaaaggttagggagatatgcggtggagtcatacttggaacaa

SEQ ID NO: 162308 - DNA, 240 bp, Glycine max
gcattttcagtcttgtggaacagtaaacagagtcaccattcgaactgataagtttggccaacccaagggttatgcctatgttgagttccttgaggtggaggctgttcaggaggcccttttgctgaatgaatctgaacttcatgggcgccaattaaaggtaacggctaaaaggaccaacataccagggatgaaacagtatcgtccccgtcggaccatcaatccttacatgggggggtttcg

SEQ ID NO: 162309 - DNA, 246 bp, Glycine max
cagcgggataaagtgtatcccgaaggaatacgtgaggcctcaagaagagctcaagagcatagggaacgtgtttgaggaggaaaagaaggaagggctacaggttccgacaattgacttgagagagatagattcggaggacgaggttgttcgagggaaatgtcgtgagaagctgaagaaagcggcggaggagtggggtgtgatgcacttggtgaaccatgggatccccgatgagctgatagagcgggt

SEQ ID NO: 162310 - DNA, 247 bp, Glycine max
ctcgagccgattcggctcgaggaggggataacattaacggagactactttcgacgagaagtcgcggattccggatccgcagaagatgattagggcttattgccaagccgcggccacgctgaatcttctcagagcttttgccaccggtggttatgctgctatgcagagggttactcagtggaatttggacttcacggatcacagcgaacagggagataggtaccgagagcttgctaaccgagttgatg

SEQ ID NO: 162311 - DNA, 247 bp, Glycine max
gaacctaccctcaaatacccggtggagatccacggtgttatcctagcaccggttccgcagttttgcttcctcttcgagaacctaatgtggaggctgaggttctgatttgtggtggagccccgagaggggcttttcggaatactctctcgggtaagtttgttggagcgttgagaacttgcgctcggattaaaataaccgacccgaaagcgaattgggtgatggaaaccatgccgggtgcgagagttat

SEQ ID NO: 162312 - DNA, 251 bp, Glycine max
gaacctaccctcaaatacccggtggagatccacggtgttatcctagcaccggttccgcagttttgcttcctcttcgagaacctaatgtggaggctgaggttctgatttgtggtggagccccgagaggggcttttcggaatactctctcgggtaagtttgttggagcgttgagaacttgcgctcggattaaaataaccgacccgaaagcgaattgggtgatggaaaccatgccgggtgcgagagttatgagt

SEQ ID NO: 162313 - DNA, 250 bp, Glycine max
gtttggtgtgagtgaatagggatcagggatgtggaggctgaagatagcagatggaggaaatgatccatacatattcagcacaaacaatttcgttgggaggcagacatgggagtttgatcctgaagcaggcagtccagaggaacgggcccaggttgaagcagctcgtcagcatttctaccacaaccgcttcaaggtcaagccctgcgctgacctcctttggcgttttcaggttctcagagaaaataacttc

SEQ ID NO: 162314 - DNA, 241 bp, Glycine max
gagaggagagagaaagtagcagatcctccatggcctccaccaaggaacgtgaaaacttcgtctacgtcgccaagctcgccgaacaagccgaacgctatgaagaaatggtggaagcaatgaagaatgtggcgaactaaacgtggaattgacggtagaggagcggaaccttctgtcggttgggtacaagaacgtggtgggtgctcgtagggcttcgtggaggattctttcctcgattgaacag

SEQ ID NO: 162315 - DNA, 243 bp, Glycine max
caacaatggcttctgtgcctcaaccaaaaatctcccttctaaccttattcttcttctcgtccttcaccatcattgcgcatgcaattgttcctcaaaacgaaaccttcaaatttgagaactcaggtgaacttggaccctacatcgttgagtacggtgcagattacagaatgataagcatcttcaactcaccattccaagttggtttctacaacaccaccccaaatgccttcactctagctttgc

SEQ ID NO: 162316 - DNA, 247 bp, Glycine max
cttggtcctcccgtcaaccggatggaccaggctacactctcgatgaccacagtatcagctgggccaattggaagttccacataggttttgatgtacgagctggtgcggtaatttcaactgcatcaatttacgaccctgagctgcataaatcacgttcagtactatacagagggtacatttctgaactattcgtgccatatcaagacccaactgaggaatggtactacaagactttctttgatgctgg

SEQ ID NO: 162317 - DNA, 247 bp, Glycine max
gttatttttctttttttctcatttgcactgcaaattgcaatggcttccaacaaggttattgccaccatcatggtgctttctctccttgcctactcaacatcattcaccaatgcatgtggcacatgccacccaaaacctaccccttctcctcctcctccatcaggaaagtgccctaaggacacattgaagctaggggtgtgtgcagatattctaggtcttgttactgttgttgttggctcccctgtct

SEQ ID NO: 162318 - DNA, 251 bp, Glycine max
gtttttcaaaaatgggtttggcctgtcatatcgcgaagattcatagtgaggcgtcagttgagaaaaatgccagagagctaaaagagtacattgaggaaatttattggggttcaaataaacgtgttatgcttcttggacatagcaaaggaggagtagatgcagcagctgctttatctttgtattggtctgatttgaaagataaagttgctgggttggcattagcacaaagtccctatggtggaactcctata

SEQ ID NO: 162319 - DNA, 250 bp, Glycine max
  unsure (1)..(250): unsure at all n locations
cttcaaggttcaagtataagancccaaaggggcatagatcagctattagaatctcacgcatagtgtctgagacacttaggcttgggatggaggatgtgaggtggtttgtgatgggggatgatgacacggtttttgtggcagaaaatttggtgaaagtgttgcaaaaatatgaccacaatcagttttattacattgggagttcctcggagagtcacttgcaaaacatttatttttcttataatatggctng

SEQ ID NO: 162320 - DNA, 243 bp, Glycine max
gaagaagatacgaaacctcaagtttaatctacctattagatgttgggttaggatattaggattttaatgccttttgaacttgtttttgttatacatctttgaagatattttaaccttgtgagcaacgaattggcattttgtggatttcttatgtgtattagtttcctgccaccttattttctcctgaatttattgtttattgtttagaacaatgtgaaaaaaaaaaaaaaaaaaagggcggcc

SEQ ID NO: 162321 - DNA, 241 bp, Glycine max
gattgaacagatgcagatcttcgtgaaaactttgaccggtaagaccatcacccttgaggtggagtcctccgacaccatcgataacgtgaaagctaagattcaagacaaggaagggatcccacctgaccagcagagacttatctttgcgggtaaacagcttgaggatggtcgaacccttgccgactacaacatccaaaaggaatccactctccacctcgtgcttcgcctcaggggtggcatg

SEQ ID NO: 162322 - DNA, 241 bp, Glycine max
gagagatttgatagcctcaactcaagtaagggttttctctttgagaaaatcgtatcttacaccttttggtgaccactttgagtgagagaagagaaattaagagagatactcaaattagattcaagagagatggccatcaaccatgaaacttgggctttcattttcggtcttctaggcaacgtgatctcctttatggtgttcctcgctccattaccaactttttaccaaatctacaagaaaa

SEQ ID NO: 162323 - DNA, 240 bp, Glycine max
caaagatgacaggtgggatgtttggaaggaaggggcaaaagataaaggggacagtggtgttgatgccaaagaatgtgttggacttcaacgccataacctccgtcggaaaaggcagtgctaaggacaccgccaccgatttcttgggcaaaggcttggacgcattaggtcatgcagttgatgctctcactgccttcgctggccatagcatctccttgcagcttatcagtgctactcagactg

SEQ ID NO: 162324 - DNA, 250 bp, Glycine max
cgatcaaacacaaaatggaaaagaatgtggggattctcgccattgacatctacttccctcccgcttgcgttcagcaggaagcattggagactcatgatggtgccagtaaagggaagtataccattggacttggccaagactgcatgtcattctgtaccgaagtagaagatgtcatctcaatgagtttgacagtggttacttctcttcttgagaagtatgggattgatcctaaacaaatcggtcgtctgga

SEQ ID NO: 162325 - DNA, 263 bp, Glycine max
caacaatatacgaacgtgctggaagaattgaggggcgaaaaggctctattacacaaattccaattctaaccatgcctaatgatgatattacgcatccaactcctgatcttacaggatatattactgagggacagatatatatcgacagacagttgtataacaggcagatatatcctccaatcaatgtccttccatcattgtctcgtttgatgaagagtgccattggtgagggaatgacacgaaaggatcattctgatgtgtcc

SEQ ID NO: 162326 - DNA, 256 bp, Glycine max
ataatttcaggaggaactgaatcaatcactactactcttacatgggcagtatgtttgatattgagaaatcctattgtattggaaaaagttatagcagaacttgacttccaagttggaaaagagagatgtataactgagtctgatataagtaagttaacataccttcaagctgtggtcaaagaaactttaagattataccctccaggtcctctctcagcacctcgtgaattcatagaggattgcactttaggtggct

SEQ ID NO: 162327 - DNA, 254 bp, Glycine max
ctttctcattattttctctcctattgataaagaaacagagagagcgagaaaaaaatgcctgcggtaggaggtattagcaacggagggggcaaggagtaccctggaagcctcactccttttgtgacggtaacatgtatagttgcagccatgggtgggttaatcttcggttacgatatcggaatttcaggtggggtgacatccatggatccgtttctgctcaagtttttcccgtcggtgttccggaagaagaattc

SEQ ID NO: 162328 - DNA, 259 bp, Glycine max
ataaaaaaaaaacccttagccaacacaaccatcatggccacctctgctattcagcaatcagcattcactggtcaaactgctctgaagcagctcaatgagttcgtccgcaagaccggtggcgccggcaaaggtcgcactaacatgcgccgcaccgtcaagagtgctcctcagggcatttggtatggccctgaccgtcccaagtacttgggtccatcctcggagcagattccatcatacctgaccggagaattccctggtg

SEQ ID NO: 162329 - DNA, 262 bp, Glycine max
tgaacttttaaaaatgactgggataaacttaagaattcaattattgaaattgaataagtaaacaatttaattggattggtcgaatggtatcaaaaaatggagtactaactcccatttcttatttattattgaattaaccgatcaacttgctttgttatcgaacatttctttttgatttcaaaaattttccggaaaaaatttgaatctatttttatatgcgaatcaatcctactacttctggtcccgaagtttctgcgcttga

SEQ ID NO: 162330 - DNA, 264 bp, Glycine max
aaccaacctcactctctctttctctctgtattctggtaattcatcaattgattcaaaatgcagaggctcaaactgcaactagtgctattcctctcaatctcaacttgtcacactgttttctccttcactgatgggttgttgccaaatgggaacttcgagcagggcccaaagccatcacaattgaaggggtccgtagtgacaggccacgatgccataccgaattggacaatttcggggttcgttgaatacataaaatcaggacaa

SEQ ID NO: 162331 - DNA, 268 bp, Glycine max
  unsure (1)..(268): unsure at all n locations
ctctctctgttcatatatataacgcccattgtaattgtacatggaaggaggagtacctgacgccgatatctttganctcagagaatgcctctccctctcatggaagaatccctatgtccttcgcctcgctttctcagctggaatcggtggccttctttttggctatgacaccggagtgatatctggagctcttttgtatataagggatgaattcccagctgtagataggaagacttggcttcaggaatctatagtgagtacagcaatt

SEQ ID NO: 162332 - DNA, 274 bp, Glycine max
gtaagctcggtacttcagtcaaccaaccccttcactctctctctctctctcttgcaatggctgccattgttttcatccacattgcatcattggtctctctttttgttgcaacaagtgcaagaatccctggagtttacaccggtggcccctggcagagtgctcatgccaccttctacggtggcagtgatgcttctggaacaatgggtggtgcttgtgggtacggaaacctgtacagccagggctacggagttaacaccgcggcgctgagcactgc

SEQ ID NO: 162333 - DNA, 89 bp, Glycine max
ggaagaatcgacaaaagaaagatcatggcgatggcaaacttggctcgacggaagggttacgccgtcgttttgtcgtcgaggtcgtcgct

SEQ ID NO: 162334 - DNA, 249 bp, Glycine max
  unsure (1)..(249): unsure at all n locations
cttctctttacacncccctcnctattttgcgttcattctgttttccagttgaagtctttccntagccaatggncactnattgnttgacccgggttcacagtgtccgtgagaggcttgatganaccctcactgncaacaggnacgaaattttggcccttctgtcaaggatcgaagctaagggcaaggggatcctgcaacaccaccaggtcatgctgagtttgaggaaatccctgaggagancatncnaaa

SEQ ID NO: 162335 - DNA, 250 bp, Glycine max
atgaggcatcactgtcccatttgttacgagtacctttttgattcattgaaagatgtcattgttatgaaatgtggtcacacaatgcaccatgaatgttacctggagatgataaaaaatgacaaatattgttgtcccatatgctccaagtcagtgattgacatgtctaagacatggaagagaattgatgaagagattgaagcaaccgtcatgcctcaagattatcgaaacaggaaggtttggatactatgta

SEQ ID NO: 162336 - DNA, 253 bp, Glycine max
gaaagggacgccaaagcgaaaccctaaccctaacggagagatggcggacacttggcatcgatattcgggacggagaaggacagggtgaactgtccgttctacttcaagatcggcgcgtgcaggcacggcgaccggtgctcccggcttcacacgaagcccacaattagcccaacgttggttctgtcgaacatgtaccagaggcccgacatgaacatgaacatcatcaccaaccccgatcagccccagccccaat

SEQ ID NO: 162337 - DNA, 256 bp, Glycine max
ggttatcatttctccatttccattttctctctcacttttcaagaatcgtaagctatgggaaagtcttacccaactgtgagtgctgattaccagaaggccgttgagaaggcgaagaagaagctcagaggctccatcgctgagaagagatgcgctcctctaatgctccgtttggcatggcactctgctggaacctttgacaagggcacgaagaccggtggacccttcggaaccatcaagcaccctgccgaactggctc

SEQ ID NO: 162338 - DNA, 258 bp, Glycine max
ccagagccaaggtaggttaaacactcttcttcatcgtcgtcgcaatgggacgtgtgatccgtgcgcacgtaagggagcaggctcggtcttcaagtcccacacgcaccaccgcaagggccctgcccgcttccggagcctggatttcggagagcgcaacggctacctgaagggtgtcgtcactgacgtcatccacgatcctggccgtggcgcgcctctcgctaaggtcgccttccgccacccgttccgctacaagaagca

SEQ ID NO: 162339 - DNA, 261 bp, Glycine max
gcattgcagtttcctgtgatgcccacatgcaaagctaccatggatttgtctgctactgcaacatctgcctcacccgtctttgttgctgctccagcagagaaaggccattttcttttagactttctcatgggaggtgtttcagcagctgtctccaaaactgctgctgctcccattgaacgtgttaagcttttgatccagaaccaggatgagatgatcaaaactggtaggctttctgagccctacaaaggtattggtgattgt

SEQ ID NO: 162340 - DNA, 266 bp, Glycine max
ccttgctaccaacactgagcttaaccgagcttcgcaaagatgaatcgggaaaagttaatgaagatggccggttcggttagaactggaggaaagggtactgtgagaagaaagaagaaggctgtccacaagacaacaaccacagatgacaaaaggcttcagagcaccctgaagagaataggggtgaatgccatccctgctattgaagaggtcaatatctttaaggatgacgtagttatccagtttctaaatcccaaagttcaagcatc

SEQ ID NO: 162341 - DNA, 266 bp, Glycine max
aaaagcatcattagaagtggtacacaaacatgggccatgctcccaactaaatgatcatgatggcaaagctcagtctacaacaccacacagtgacattctgaaccaagacaaagaaagggtgaagtacattaactcaaggctctctaagaacttgggccaagatagtagtgttgaggaattggactcagctaccctaccagccaaatctggtagccttattgggtctggaaattactttgtggttgtgggtcttgggacacccaaga

SEQ ID NO: 162342 - DNA, 255 bp, Glycine max
gctatttctaggtttcgttttatttggctttgattttcttctgcaaccttatctactgcaaagctttgattactgagtctaacttaccctgccacagtttgccttgtttacctgagctctgtttttaactggtctttgatcaaggatggccataaaggcaattgagttgttgaaaggaagcggaaaccatgaagagatatttgaagttcttgcagcagtggctgcatctttgggggatgtaatagatgatgtgaa

SEQ ID NO: 162343 - DNA, 193 bp, Glycine max
cactcataacacaaagcacaaagcaaagctcatccttgagttaaaaaatggtagcagcttcttccatggctctctcatccccatccttggctggcaaggccgtgaagctgggcccatcagccccagaagtgggaagggtgaccatgacgtagaccgtcaccaaccaggtctcctcaggtagcccatgcatacg

SEQ ID NO: 162344 - DNA, 244 bp, Glycine max
ggttgattggtcccattgattccgaagagaaaagaaaagatgtttgagccacaacagctatacactcgcgcgaagaccgaggaattcgacctcgaatcaggagaaaccctctacccagggctgagcgtcggcgagaaccagctccgatggggtttcatccgcaaggtctacggcatcctttccgagcagatcgtcctcaccatcctcgtctccgacatcagcgtattctatactccaatcaatg

SEQ ID NO: 162345 - DNA, 251 bp, Glycine max
cacaaagagatgatagctattgggaccatgaacgtagttggttctttcacctcttgctacctcacaactggaccattttcgcgttcagctgtgaactataacgctggatgcaagacagcagcatccaacatcataatgtcaattgcagtaatgttgacattgttattcctaacaccattgttccattacactcccctggtggtgctatcagccattattgtatctgcaatgcttggcctcatagattatga

SEQ ID NO: 162346 - DNA, 252 bp, Glycine max
gcttggtttggctaggaaaattaccatctccaaggattctaccactgtcattgctgatgctgcgacaaaggatgagttgcaagccagggttgctcagttaaagaaggagctgtctcagacagactcagtatatgatactgagaaactggctgagaggatagctaaactgtctggtggagttgcagtcatcaaggttggtgctgctacagagactgagcttgaggatcggaagctccgaatagaggatgccaa

SEQ ID NO: 162347 - DNA, 261 bp, Glycine max
tgtgagaacaagataaagaggcgcaagatgagtggtagggtttctgggaaggtgaagtggttcaatgatcagaaggggtttggattcataagccctgacgatggcagcgacgatctcttcgttcaccaatctcagatcaaatctgacggtttccgaagcctcgccgaaggagagtccgttgagttcgccattgaatctgaatctgacggacgcgcgaaggctgttgatgtcactggccccgacggcgccacgtccagggaa

SEQ ID NO: 162348 - DNA, 250 bp, Glycine max
tacgcttctcttctctgcagcaactatgcctaaccctaaggtcttcttcgacatgaccatcggcggtcaatctgctggccgcatcgtgatggagctctacgccgacgtcactccccgcaccgccgagaacttccgcgcgctttgcaccggcgagaagggcgtagggcggagcggcaagcccctccactacaagggctcgtccttccaccgcgtgatcccgagtttcatgtgtcagggtggcgacttcacc

SEQ ID NO: 162349 - DNA, 248 bp, Glycine max
ctggaacttgtctcaggagcaagaacaacccctttggagtgaaggcattaaggcgtactccagcgaaaccccattggaccttcggacgtaagaacaaggtcagcagtgcttaagcagtttaaggaaatgtgaacgtgcagaaggagccaatgatgaagtaaaagggaagacgaaggactaaagcaccagctggatgcacttcccccttcttcacataatgctgcacgtaacataaagatctttaccat

SEQ ID NO: 162350 - DNA, 245 bp, Glycine max
acaaaacccgaccctgatacaatgcagccactggatgaaggttttggcgcaattgttcagtcttgcaggcgactcaggcgcctatccctctcggggcaattgaccgaccaggttttcctttacataggaatgtacgctgagaagcttgaaatgctgtccattgcatttgctggggcgagcgacaagggaatgctctatgtgttgaatggatgcaagaagcttaggaagcttgagattagagactg

SEQ ID NO: 162351 - DNA, 245 bp, Glycine max
cctttatctgttggatagagcttcttgccttgtgttctacgttctgcattcttctcagcccgtaatctagctcctgtttgcagaaacaaggacctgtcatcaagatggtgaagttcacaactcacaggcttcggcacataatggactgcaaacacaatattcgtaacatgtctgttattgcacacgtcaatcatggccagtctaccctcactgattctcttgtggctgcttctggtaatatcata

SEQ ID NO: 162352 - DNA, 244 bp, Glycine max
acaaaacccgaccctgatacaatgcagccactggatgaaggttttggcgcaattgttcagtcttgcaggcgactcaggcgggtatccctctcgggggacgtgaccgaccaagagtggctctacatagggacgaaggctgactcgctgccgataacgacccttgcatcagcagcggttacatgacatacatgtttctatacgacagtgttcatggacactggaagcatcacgatgtcaccgttaa

SEQ ID NO: 162353 - DNA, 248 bp, Glycine max
cagaaatttaagtgaggagctagagaatgatgatgaagtctgctatgtgtgcagtggtggttgtagcacttcttcttctggcggaggtggggcccatggctgaggctgtgacatgcaccccaacagagttgagtccgtgtcttccagcaatcacttccggtgctaaaccttccaatgcttgttgcacgaagctgaagcagcaaaaaccatgcttatgtggctacctcaaaaacgctagcttgaagcag

SEQ ID NO: 162354 - DNA, 256 bp, Glycine max
ccttggtggagaaagtaaagttggagattcaggatttcttcaagcttccaatgtcagagaagaaaaagttttggcagagtccacaacatatggagggttttggacaagcatttgttgtgagtgaagaccaaaaacttgattgggctgaccttttctttatgactactcttccaaaacatttaagaataccccacttatttccacagctccctcttcctttcagggacgccttagaaatttactcacaggaacttaa

SEQ ID NO: 162355 - DNA, 258 bp, Glycine max
acaaagttcccgttttcaaaattgaagcttttgggtctctgaggtttgatctctgcacaagaaccttgttttctcatctgggtgtgttgcttttgcctctgctggctcgatatggctgtggaaaaccaaagggaagatgggggttgtgatcgttttcctgtgggtatgcgtgttcttgctgtggatgacgacccaatttgcctcaaggtgttggagaatctccttcgcaaatgccagtatcatgttactacaactaat

SEQ ID NO: 162356 - DNA, 261 bp, Glycine max
ccggcagaaagcaagctcatcctagagttttaaaaatggcagcagcctcctccatggctctctcttccccatccttggctggcaaggccgtgaagctgggcccatcagcccccgaagtcgggagggtcagcatgaggaagaccgtcaccaagcaggcctcgtccggaagcccatggtacggcccagatcgcgtcaagtacttgggcgcattctctggcgagctcccgtcctacctcactggcgaattcccaggtgactacg

SEQ ID NO: 162357 - DNA, 248 bp, Glycine max
acttgctccctcagaagcgaagaagaagccacagagaaccagtctcctactctctctcacccacaagaaaaatggcatctcacatcgttggatacccccgcatgggtcccaagagagagctcaagttcgctctcgagtctttctgggatggcaagaacagcgccgaagatttgcagaaggtggctgctgatctcaggtcatccatctggaaacagatggctggtgctgggatcaagtacatccccaac

SEQ ID NO: 162358 - DNA, 252 bp, Glycine max
cagaaagcaagctcatcctagagttttaaaactggcagcagcctcctccatggctctctcttccccatccttggctggcaaggccgtgaagctgggcccatcagcccccgaagtcgggagggtcagcatgaggaagaccgtcaccaagcaggcctcctccggaagcccatggtacggcccagaccgcgtcaagtacttgggcccattctctggcgagcccccgtcctacctcactggcgagttcccaggtga

SEQ ID NO: 162359 - DNA, 257 bp, Glycine max
tctcgagccgaatcggctcgaggctctctactgctacaggaaacgatccaggatgttccgcagccaccaaggcatgcatataaggcatccagtacggcgacagttccttctcagttggctacttcagccgcgagcgcctcaccgtgaccgccaccgacgtcgtcgacaacttcctcttcggctgcggccagaacaaccagggcctcttcggcggctccgcggcctcattggcctcggccgccaccccatctccttcg

SEQ ID NO: 162360 - DNA, 259 bp, Glycine max
cgcaagcaaaaagaaagaatcccaggcgaggagaaagatggaggggaaggagcaggatgtgtcgttgggagcgaacaagttccccgagagacagccgattgggacggcggcgcagagccaagacgacggcaaggactaccaggagccggcgccggcgccgctggttgacccgacggagtttacgtcatggtcgttttacagagcagggatagcagagtttgtggccacttttctgtttctctacatcaccgtcttaacc

SEQ ID NO: 162361 - DNA, 248 bp, Glycine max
agaatccacacaaactcagggtagggcagagagagagagagagagagagagagagagagagaatgggagggtgggctatcgcggtgcatggtggcgctggtgtcgaccctaatctcccactcgagcgccaagaagaagcgaaacaacttctcacgcgctgtctcaatcttggaatctctgctctaaattctaatcttcccgacatagatgtcgtcgaacttgtggtgagggaattggacacggatccg

SEQ ID NO: 162362 - DNA, 242 bp, Glycine max
caacttctgctacttcctactccaaccgcacttctgctccgcaattatcatgggcaaggtcaagatcggaatcaacggatttggaagaattggccgtttggtagccagagtggctctgcagagagacgatgttgaactcgttgccgttaacgaccctttcatcaccaccgattacatgacatacatgtttaaatacgacagtgttcatggacactggaagcatcacgatgtcaccgttaagg

SEQ ID NO: 162363 - DNA, 245 bp, Glycine max
ctcgagccgattcggctcgaggtgcaccttaactatagcttcgcaatgacaaccttgatcgactgtgtaggataggtgggaactgatgacacagaacgaccaatcctgaaagaccactctttcgtctaaggatgcctaaccgccgcaccgaaaattcgggggggggcgggacactgcgaggtgggtagtttatctggggcggatgcctcctaaagagtaacggaggtgtgcgaaggtaggctcaa

SEQ ID NO: 162364 - DNA, 252 bp, Glycine max
cacaagccaagtgaaagtgagataaaataaaaatcaaagagcataatgtcagggatcattcacaagattggggagacccttcatgtgggagggcacaagaaggaggaggagcataagggtgagcaccatgctggagaatacaaaggggagcaccatggtgaacacagtagtgagtacaaaggagagcatcatggtgaacacaaagctggagagtaccatggtgagcacaagccagagcacaaagaggggttc

SEQ ID NO: 162365 - DNA, 252 bp, Glycine max
gattactggtacctcccaggctgattgtgctgtccttatcattgactccaccactggtggttttgaagctggtatttctaaggatggacagactcgtgagcatgctcttcttgctttcacccttggtgtgaagcagatgatctgctgctgtaacaagatggatgccactaccccgaagtactctaaggctaggtatgatgaaattgtgaaggaagtctcttcctacttgaagaaggttggttacaacccaga

SEQ ID NO: 162366 - DNA, 258 bp, Glycine max
acaaagtatagagtgaaagaatgggtgagaaaagcaagattttgatcataggaggcaccggctacatcggcaaacatatagtggaagcaagcgcaaaggctggaaatcccacttttgctttggtgagggaatccacactctctgacccctccaaggcacaactcatccacaattttgaggctttgggcgttaaatttggccggggggtttctgtacgatcatgagaagttggtgaaagctatcaagcaagtagatgtc

SEQ ID NO: 162367 - DNA, 275 bp, Glycine max
gatgactggggggggtatcactatgcaatcgacgccgggaagctcaggatacttggatttgtatccagagcggaagatgtcctttttcaaaaatccttacattctcggactggctgctgtcgccggcatcggtggtctcctcttcggctacgacactggtgtgatatcaggggctcttttatacattaaggatgattttgaggaggttagaaacagcaatcttctccaggaaacaatagtcagcatggctattgccggggcaatcgtgggagcag

SEQ ID NO: 162368 - DNA, 257 bp, Glycine max
caaaccacaccaacatcacagccacaacaactaccagtgcaacgtcatcgtcatccgcgacggtatcagtgactcaagcattggggagccgggacctgcaggacgttgacacggcagcgctgtcgcgtcccttggatgagtacctcagagctggctccttggccccggcgagcagaagaagaagaagtacgtcgatctcggctgcatcatcgtcagccgcaagatcttcaagtggaccctcggcacaatcctcttcg

SEQ ID NO: 162369 - DNA, 288 bp, Glycine max
gcgtacggaagcacgattccacgagccctaaggcggtgcagtacgtgagaaacgaccgtggcactcccatgattctagacaacaactactacagaaacatattagacagcaagggtctcttgatagtggatcaccaactagccaatgacaagaggaccaagccttatgtgaagaaaatggccaagagccaagactatttcttcaaggagttctctagagccattaccttgctctcagagaacaaccctctcactggcacaaagggtgaggtcagaaagcagtgcaatg

SEQ ID NO: 162370 - DNA, 267 bp, Glycine max
gagaagggtcacggtgacttgaaagacaagccatggtggcctaagttgaacactcttcaagatctgattcacatttgctgcattattatatggactgcttcagcactccatgcagctgtgaatttcggacaatacccttatggcggtttcatcctaaatcgtccaactctaaccagaagattgctcccagagccaggaaccaaagaatatggtgaacttaccagtaatcatcaaaaggcttatttgagaacaattacaggaaagact

SEQ ID NO: 162371 - DNA, 266 bp, Glycine max
aatctctctctctccaatggccaaagacctcgaaacggagattcaaagtgggttgcctcacaaggactaccacgacccaccccccgccccattctacgaccccgccgagctccgaaagtggtccttcttccgagccctcatcgccgagttcgtcgccaccctcctcttcctctacgtcaccatcctcaccgtcatcggctacaaccaccagacagccaccgccgccgagccctgcagcggcgtcggcgtcctcggcatcgcttggg

SEQ ID NO: 162372 - DNA, 269 bp, Glycine max
atttctccatttccattttctctctcacttttcaagaatcgtaagctatgggaaagtcttacccaactgtgagtgctgattaccagaaggccgttgagaaggcgaagaagaagctcagaggcttcatcgctgagaagagatgcgctcctctaatgctccgtttggcatggcactctgctggaacctttgacaagggcacgaagaccggtggacccttcggaaccatcaagcaccctgccgaactggctcacagcgctaacaacggtctt

SEQ ID NO: 162373 - DNA, 268 bp, Glycine max
gttagactttgatagtttgattagctctaataaggttaaggaccagagaaagagagaaagaaacagaatttggaagaaaaaaagcacaagatgggttattggaagtctaaggttcttcccaagatcaagaaggtttttgagaagaatagcaccaagaaagctgctgctgctgaggccaccaagtcctttgatgagtcaaaggaggaatacaacaaagcctttgaagaaaagaagactgaacttcaaactaaagtagttgaaatatacg

SEQ ID NO: 162374 - DNA, 245 bp, Glycine max
cttttgaagtacagagaagaagaattgaagaatgtaagaggggatggaactggagagcgcaaggaatgggataggatctatgattatgatgtctacaatgacttgggcaacccggatagcggtgataaatatgcacgccccgttcttggtggttcagccttaccttaccctcgcagaggaagaaccggaagaggaaaaactagaaaagatcccaacagtgagaagccgagcgattttgtttacct

SEQ ID NO: 162375 - DNA, 273 bp, Glycine max
gctgaatcaagatggatgctactacaccaaagtactccaaggccaggtatgatgaaattgtgaaggaagtttcttcctatttgaagaaagtaggatacaaccctgacaagattccttttgttcctatatctggttttgagggagacaacatgattgagaggtccacaaaccttgactggtacaagggtcctactctgctagatgcacttgaccagatctctgagcccaagaggccttctgacaagcccctcaggctaccccttcaggatgtgt

SEQ ID NO: 162376 - DNA, 292 bp, Glycine max
gcgtacgtacactgctcgttcggatagatggaagcagaggcagaaggtgaagaaggtgcgaagtagagcatttacaaggcggcgagaagcataaagcgaagagagaacagtttgtacaacgcactgagatccatctaccaagactccatcttcgtctccgagatctctcttctatggcctcagctccctctcctcgccaacctccgctgcggcctctggtactcccgccccgccgccttccactccacctgctacttcaagtccaccgacggccacaccaacaactgctcct

SEQ ID NO: 162377 - DNA, 264 bp, Glycine max
gataataacaagtattctttttccttgaaggcatacatggtggagttgtatcaggatacccttatagatctgttgttaccaaagaatggaaagcctttaaaattggatatcaagaaggattcaacgggaatggtagttgtggaaaatgtgacagttatgtctatttctacaattgaagaattgaatagtataatacaaagaggatctgaacggcgacatatatcaggaacccaaatgaatgatgaaagttcaagatctcatctc

SEQ ID NO: 162378 - DNA, 267 bp, Glycine max
attgaattctccagagagaagaagaaacttaatcgatcatcacttcacttcactaatacatcatggcagacgagacccagaacaagtatgagagctctgaggttgaggtccaggatcgtggtgtttttgactttctcggtaagaaaaaggatgaagaagacaagcctcatcctcaggaggaggtcatcgccaccgagtttcaaaaagtcactgtctcagaccaaggagagaacaagcacagcctcttagaaaagcttcaccgatctg

SEQ ID NO: 162379 - DNA, 265 bp, Glycine max
gggagttcaagaatttggagacaaaaggggttcctttcccaaagaaccaacccatgagaatatactctagcctttggaacgctgaggattgggccacaaggggtgggcttgtgaaaacggattggagcaaggccccattcacagcctcatacagaaacttcaatgccctaacctcttcctccactggccaatcactggacgccacggggctggccaagatccattgggtgcaaagaattacatgatttacaactattgcactgat

SEQ ID NO: 162380 - DNA, 267 bp, Glycine max
  unsure (1)..(267): unsure at all n locations
attctctcacacaaaataatngacaagaagcttgggcaacacgtctcatgatcctgaagtgagaaaggggccatggacaatggaagaagacttaatcttgatcacctatattgccaatcacggggaaggggtttggaactctttggccaaggctgctggacttaaacgtaccggaaagagttgccggctccggtggctaaactacctccgtcctgatgttagaagagggaatattacacccgaggaacagcttttgatcatggaatt

SEQ ID NO: 162381 - DNA, 270 bp, Glycine max
aaaaataaaaaatggggataggggtactatttgttgggtttttcttgctatcttgtgttgtgtgtgtgaagggtgtggagccaaaagcctcacccacttgtacatttccggcagtttacaactttggggactcaaactcagacactggaggcatatcagcttcatttgtgccaattcctgcaccttatggcgagggcttctttcacaagccttctggaagggactgtgatggccgtctcattgtagatttcatagctgagaagctaaact

SEQ ID NO: 162382 - DNA, 272 bp, Glycine max
gctcggcccggtccatctcggtcgaagcgcttcgaccgagcgacaccttcccccggcggcacaactctgccaccccggaggagcagagcaagatggcagagtcgtgtggcttcgagtagcctcgactccctcgtggacgccaccgtgcctaagtcgatacgccttaaggatatgaagttcgggaaattcgatgcagggcttacagagaaccagatgatagagcacatgaaggacttggcctcaaagaacaaggttttcaagtcctacattgg

SEQ ID NO: 162383 - DNA, 263 bp, Glycine max
gatcactggggcaaatcctacaattcctggaatgtttccaaatatgtttccgttggctacaagtcagatgcagcaatttagtgctctccctgtcatgccagtgcaggctatgactcaacaggctacacgacatgctaggcgggtgtatgttggaggcctccctcctacagctaatgagcagtctgttgcaactttcttcagtcaagttatggctaagattgggggaaacactgctggcccaggtgatgctgtggtcaatgttt

SEQ ID NO: 162384 - DNA, 262 bp, Glycine max
atttttgctacttggaatggagttcttgaggacatgagtgatgtaaaggaattggttcctgagctattttacctacctgaggtcctcacaacttacgatttttttgattttggcacaacacaaatgggaggaaagcttgatactgtaaagcttcctgcttgggctgaaaatccaattgattttattcacaagaccggaaggctctagagagcgagtatgtatctgctcatttgcatgagtggattgcctcataatttgggta

SEQ ID NO: 162385 - DNA, 264 bp, Glycine max
cccaattcttccccctccacccacccagcatatccctctattcctatttattagcacccctcacattaccttgtgtcaccaactactttgactcctttaccataccattacaataattatcaaacctaaccagtaaaaatggtgaccgtggaggaaatccgcaacgctcagcgttcccatggacccgccaccatcttggccttcggcaccgccacgccgtccaactgcgtctcccaagccgattaccctgactactacttccgc

SEQ ID NO: 162386 - DNA, 264 bp, Glycine max
ctcaatttttctctcaaccggcccaatttagcataagcccagcatggccaccgcaacagcagcagccacctcgtccttcatggggacgcgcctcctggaggcccactccggggcggggcgggtgcaggcccggttcgggtttggcaagaagaaagccgccgccccgaagaaagtttccagggggtcgggctctagctccgataggcccctgtggtatccgggcgccaaggcgcccgagtacctggatgggagcctagtcggaga

SEQ ID NO: 162387 - DNA, 262 bp, Glycine max
agagcgagagagagagagaaacaaagcagcacccatttggatcctctcttctcttctttgatctccgttaccctttttgttttctcaacagagagagagagagagaatctttcgaagttcgtttgcgtgtgttgtgtggtcagtcaccgatggcagcaccacctgcgagggcacgtgccgattacgattacctcatcaagcttcttcttattggcgatacggtgtgggaaagagttgtctgcttttgcgatttctgatggtt

SEQ ID NO: 162388 - DNA, 267 bp, Glycine max
gtgattaatcaagtccgacaacgggttttacaacaagccttacagggagctctaggaactctaaagagttgcttgaacaacgagttacatttacgtactgtcagtgctaatattggcatgtttgggacgatgaaagaaaaaataactgattagtctttctattataaaatagagtataggcattatttttttcttctaaaaaaataaaattaagaaattttcatggtaaccattcgtgcagatgaaattagtaaaattatccgtgaa

SEQ ID NO: 162389 - DNA, 263 bp, Glycine max
aggaaaacatattggctgaagttatttttgacgcgtgaaataggcgccggcgttcatcgttgaaaagcgaaaatggatatacctcgtctgaaacttggaacccaaggcctggaggtttccaagttgggatttggttgtgcggggcttagtggagtgtttgacggccctgttcctgacgaggttgtcatctctctaatcaagtatgcattcagtaatggaatcactttctttgatacttccgatttttacggtccctacactaa

SEQ ID NO: 162390 - DNA, 260 bp, Glycine max
gctctctcactcacaaacgcacactgaattcaaaaacatcgaaagagagaggcatggccgagcaaaccttcatcatgatcaagccagatggcgttcaaagaggccttattggcgagattattagcagatttgagaggaagggtttttacttgaaagggttgaaactcgttactgtggaccgtccttttgctgagaagcactatgctgatttgtctgcaaagcctttctttagtggtttggtggattacattgtctctggc

SEQ ID NO: 162391 - DNA, 261 bp, Glycine max
cccgaagcagccatggggatcgatctcaaggccggaggtaagagcaaaaagaccaaaagaacagcacccaagtccaatgatatctatctcaagctcttggtcaagctttatcgcttccttgttcggagaactggcagcaacttcaatgctgttatacttaagagattgttcatgagcaaggttaacaaacccccattgtctttgtcaaggttgattaagtatacgaaggggaaggaagataagattgcagtggtggtgggg

SEQ ID NO: 162392 - DNA, 261 bp, Glycine max
agcactcatccacacattctccgtcgccacgacaacaatggctccaaagaaaggtgcgaaaggtggagttgtagcagcaaagaagaaggttcaggagaaggtaacgaaccctttgttcgagaagcgtccgaagcagttcgggatcggaggcgcgctgccgccgaagcgggacctgacgcgcttcgtgaagtggccgaagaacgtccaaatccaacgcaagaagcgcatcctcaagcagaggctcaaggtccctccggctct

SEQ ID NO: 162393 - DNA, 263 bp, Glycine max
cacaaattttatgtgattagtcgcggtatttaaaataaaaaatgaaagtagacaaataaaaaaggaaaggagatgtttgaataaaaataattccccttcaagttcttattttttgagaggacaggacaatatgaatgttttattatgctctatcaacacattaaaaagattatatgatatatctgctgtggaagtaggtcaacatttctattggcaaatagggagtttccaagtacatgcccaagtacttattacttcttggg

SEQ ID NO: 162394 - DNA, 263 bp, Glycine max
gtttcgctgtttgaaattttcagattccatggccaaaagctccttcaagcttgaacatcccttggaaagaagacaggctgagtctgctcgcattagagacaagtatcctgatagaatacctgtgattgttgagaaagcggaaagaagtgacatcccagacatcgataagaagaagtaccttgtcccagcggatttgactgttggtcagtttgtttatgttgtccgtaaaaggattaaggtcagtgcggagaaggctatttttg

SEQ ID NO: 162395 - DNA, 266 bp, Glycine max
aaagaatgcttgtccctggcagttgataatcttcctgttcttgatgggaagactccagtccaagtgtaccagagtttctgtgagagcttcaagtcttcattctctccattcatgggctctacgatcatgagcatttccatgggtttaggaccggatggtgagctacgttatccatctcacccccagctgccgagtaatggaaaaactcaaggtgctggggaattccagtgttatgaccaaaacatgctcagctttctcaagcaaca

SEQ ID NO: 162396 - DNA, 265 bp, Glycine max
atttggtgacaagctctggcttgaaaccaggaagttatggctcattgtggggccctctatattcagccgcctcgcgtcgttcaccatgaatgttgtcacccaagccttcgccggtcacttgggtgatgtcgaactcgctgccatttctatcgccaacaacgttcttgttggcttcaatttcggcctccttttggggatggcgagcgcgttggagacactgtgcgggcaagcgtttggggcgaagagataccacttgttggggata

SEQ ID NO: 162397 - DNA, 278 bp, Glycine max
tcgaagagatagccagcagcaagcagaaggatccccccggaccagcaacgtctcatcttcgccggaaagcagctcgaggacggccgcaccctcgccgactacaacatccagaaggaatcaacccttcacctcgtcctccgtctccgtggtggcatgcagatcttcgttaagaccctcaccggcaagactattaccctagaagtcgaaagctccgacaccatcgacaacgtcaaggctaagattcaggacaaggagggaatccccccagaccagcagag

SEQ ID NO: 162398 - DNA, 261 bp, Glycine max
caaccatcatggccacctctgctattcagcaatcagcattcactggtcaaactgctctgaagcagctcaatgagttcgtccgcaagaccggtggcgccggcaaaggtcgcactaacatgcgccgcaccgtcaagagtgctcctcagagcatttggtatggccctgaccgtcccaagtacttgggtccattctcggagcagattccatcatacctgaccggagaattccctggtgactacggatgggacactgctggattat

SEQ ID NO: 162399 - DNA, 261 bp, Glycine max
  unsure (1)..(261): unsure at all n locations
atcgcaggcaaaatctgttacgagaaatagttggttaccgtgcagatattattnngtcttcaggaggttcaaagtgatcattatgaagaatttttttctcctgaactggacaaacatggttattatggtctttacaaaaagaaaacaaatgaggtatacaatggaaacattaatacaattgatgggtgtgcaacatttttccgtagagacagattttcacatgtgaaaaaatatgaggttgaatttaataaggctgcacag

SEQ ID NO: 162400 - DNA, 256 bp, Glycine max
tctgcctttccttttccagggagctcattgacaatggctgaaacaaagtgggtcatgaaggacaaaagatggtctctccatggaatgacagctctagtcacaggaggcacccgaggcatagggcatgccattgttgaagagttagctgagtttggagcaactgttcatatatgtgcacgtaatcaagatgatattgataaatgtttagaagagtggaaaaacaagggacttaatgtgactggttcagtatgtgatt

SEQ ID NO: 162401 - DNA, 257 bp, Glycine max
ctccttttgtattacacactgactgtccacattactggcggtatcatcttccaggtgagacagaggaagaattttcaaccagattagccaataatttggagcagttgattctgaaagagggaccagagactattgctgcatttattgctgaacctgtaatgggggcaggaggtgtaatacctccaccatcaacttattttgagaaggtccaagccgttgtcaagaagtatgacattctttttattgcagatgaggta

SEQ ID NO: 162402 - DNA, 259 bp, Glycine max
cacaaacccgtccctcacactctccaaaccctagcggcactacacactagttctatcgctatctccccaagatgtcgagcgccgatcccgagcacagagaagaggaggaggcacccgccgttggcgacgacgaggacaccggagctcacgtcgctccaatcgtcaagctcgaggaggttgctgtcaccaccggcgaggaggacgaagatgcaatcctggatctcaaatcgaagctttaccggttcgacaaggacgggaa

SEQ ID NO: 162403 - DNA, 259 bp, Glycine max
gagcgagagaacaagaacataagggaaccacagcggcggtaacagaagaacaagcagagaatgggtcgagtgagaacgaagacggtgaagaaatcctctcggcaggtgatagagcgtcactactcgcgcatgaccctggacttccacacgaacaagaagcttctggaggaagtggcgataatcccgtcgaagaggctaaggaacaagatcgcggggttctcgacgcacctgatgaagcgcatccagaagggccctgtgc

SEQ ID NO: 162404 - DNA, 267 bp, Glycine max
gtctgtttacatatatgacctggtgagtggtgcacaagttgcaaaacttgatcatcatgaggcacctgtaagagattgtagttggcacccctattatccaatgatgatcacttcggcttgggatggtgatgttgttaggtgggaatttcctgggagtgatgaagcccctgcttctccaaataaaagagaaggtcgaattcataggagaaatttgctttatctatagttcatgctctttgtacatatgtgtctggatccatactatat

SEQ ID NO: 162405 - DNA, 256 bp, Glycine max
tgtgaaacggacatactggtttgacatttataagaacgttgataaaattccattggtgaagtgtccagtgctagtaattcatggaactgctgacgaggttgttgattgctctcatggcaagcagttgtgggagctatgtcaacagaaatatgaacctttgtggctcaaaggaggaaatcactgtaatttagaactctatcccgaataccttcgacatctcagaaaattcatatcctcggtagaaaagccgccatca

SEQ ID NO: 162406 - DNA, 253 bp, Glycine max
acaacttccgctacttcctactccaaccactttcttttttcccgcagtcatgggcaaggtcaagatcggaatcaacggatttggaagaattggccgtttggtggccagggtggctctgcagagagacgatgttgaactcgttgccgttaacgatcctttcattaccaccgattacatgacatacatgtttaaatacgacagtgttcacgggcactggaagcatcacgatgtcaccgttaaggatgagaagacc

SEQ ID NO: 162407 - DNA, 257 bp, Glycine max
ctaaaatggccactctttcctcctacgaccacttcatcttcactgccttagctttcttcatatctggcctaattttcttcctcaaacagtaatccaaatccaaaaagttcaacctccctccaggaccccccgggtggcctattgttgggaacctcttccaagttgctcgttctgggaaacctttctttgagtatgtgaacgatgtgagactcaaatatggctcaatcttcaccctcaagatgggaacaaggaccatg

SEQ ID NO: 162408 - DNA, 258 bp, Glycine max
ctggcctactgagtgggcaaaggcacgggaagcataagggatcaggaaaatcgaaaagatctgtcaaaatgatgagcaccttacgaatgcctgctttaagaatgtcgagtttctccggattacgtactcttaatcctatggattctctgtcgagaccacgccacacttttccgttgaatacaacttctaggcgcgagagggctaaaagatttgtacctaaagctatgtttgagcgtttcacagagaaggcaatcaaag

SEQ ID NO: 162409 - DNA, 259 bp, Glycine max
attcatatctctctctctctcccccaagaaattcaacagagttttgattaacttgaaattgttcaacaagaaatggagaattcattgggaaagtacggaaaagagcttaatctcgaggctacagagttgaggttggggttgcctggaagcgatgagcctgagaaacgttctgctgttagaagcaacaagagatcttcaccagaagcaagtgaagaagagtgcataagcaagggcaacatgaattcttctgatggttctg

SEQ ID NO: 162410 - DNA, 261 bp, Glycine max
gttggcagtcgcagctacagcagtactctcaaatgggttggatctatctttcttgcccagcgatttcctctttggcattgcttcttcctcttaccagtatgaaggagcttacaagagtgacggcaaaggactgagcaactgggataactacactcacggaccaggtagaagtgtaataatggatggaagcaatggggatatcgcgattgatcattatcatcgctacctggaggatatagatttaatggaaactttgggagt

SEQ ID NO: 162411 - DNA, 261 bp, Glycine max
acaaagtatagagtgaaagaatgggtgagaaaagcaagattttgatcataggaggcaccggctacatcggcaaacatatagtggaagcaagcgcaaaggctggaaatcccacttttgctttggtgagggaatccacactctctgacccctccaaggcacaactcatccacaattttgaggctttgggcgttaatttggtccgcggggatctgtacgatcatgagaagttggtgaaagctatcaagcaagtagatgtcgtca

SEQ ID NO: 162412 - DNA, 257 bp, Glycine max
cacaagccaagtgaaagtgagaaagaataaaaatcagagagcataatgtcagggatcattcacaagattggggagacccttcatgtgggagggcacaagaaggaggaggagcataagggtgagcaccatgctggagaatacaaaggggagcaccatggtgaacacagtagtgagtacaaaggagagcatcatggtgaacacaaagctggagagtaccatggtgagcacaagccagagcacaaagaggggttcctaga

SEQ ID NO: 162413 - DNA, 255 bp, Glycine max
gagagagagagagagaggcacttggaatccaaaaatgagagaaatcatcagcattcacataggtcaggccgggatccaggttggcaactcctgctgggaactctactgcctggaacatggcatccagcccgatggcatgatgccaagtgactcctccttcggtgtagcccacgacgccttcaacaccttcttcagcgagaccggatccggcaagcacgtccctcgcgccgtcttcgtcgatctcgagcccaccgt

SEQ ID NO: 162414 - DNA, 255 bp, Glycine max
ctgaactaacaaagcaaccctatgtcgaaggtggtttgtgtcaccggagccagcggcgccatcggatcatgggtggtcctactcctcctccagcgtggttacaccgtccatgccaccgtccaagatatcaaggatgaaaatgagacgaaacatttggaggaaatggaaggagcaaagagtcatctccatttttttgaaatggatcttcttgacatcgactccattgccgctgccataaagggttgttccggcgta

SEQ ID NO: 162415 - DNA, 254 bp, Glycine max
gttgtgcctaaagatgttaatgcagctgtgggaattatcaagaccaagcgcactattcaatttgttgactggtgccccactggtttcaagtgtggaatcaattaccagcctccaactgttgttcctggcggtgatcttgccaaggttcagagggctgtgtgcatgatctccaattccaccagtgttgttgaggtcttctctcgcatcgaccacaaatttgacctcatgtatgccaagagggcttttgttcattg

SEQ ID NO: 162416 - DNA, 252 bp, Glycine max
gcatttaccatttacaaatgtcttctccactggaaatcatttgaggctgaaagaacaagtgtatttgatcgtcttatccagatgattggttctgcaattgagaatcaagatgacaatgatcttatggcctattggctgtcaaatttgtctacactattgtttttgctccagcaaagtctaaaatctggtggtgcagctgatgcaactcctgtaaagaaaccgccaaatccgacatccctctttggaagaatg

SEQ ID NO: 162417 - DNA, 243 bp, Glycine max
gtaaaaggagggaagagtgggagcaacgggtgagtgaaaagtgtgagaaaatgtctaaccctcaagaccagaaaccatggaaagcggaatacgcgaagtctgggagatcttcatgcaggacgtgcaagagccccattgccagcgaaacgctgcgtctcgggaagatggttcaatccaccaaattcgatggcctcgtgcccatgtggaaccatgctgcttgcgtattgaagatagccatcagat

SEQ ID NO: 162418 - DNA, 254 bp, Glycine max
aaagaaaagaagaagaggttttgatcggatgcgatgagcacacaggggcaagtgattattgatgaggcggttctggatgacataatccggcgcttaacggaggtccgactggcccgacccggcaagcaggttcagctctccgagtctgagatcaagcaactctgcgtcgcttccagagacatcttcattaaccagcccaatttgcttgaactcgaagcccccatcaagatttgtggtgacattcatgggcagta

SEQ ID NO: 162419 - DNA, 240 bp, Glycine max
gccgaagaaggtattgacgtcgatgatgataatgaaattggtgaaaacattactgcttctcctttgtgtgaaactcttctgttatgcagtgattggtgctcctcaaacttgtcctgctaacaatgaggataaatgcggcgattcagatgaatggaaaggggagttcttccctgacattcccaaaattaaatatgagggtccgtcaagtaagaatgtgctttcatttaaatggtataatgc

SEQ ID NO: 162420 - DNA, 171 bp, Glycine max
gtcgccggaaagtgagcgtcaaagaacgagatgacttttgagagtttttagatttgtgtttggtgaagtacttcagataatgtgaattatcgtgtgtatccgaatccaacttaatgtgacttgctttttacaaaactcaagtgtcaaaaaagagaaagaatagagaagggg

SEQ ID NO: 162421 - DNA, 242 bp, Glycine max
ctgtacttcacaagtcacattaattattaggaaataatcgaattagagctgtagctatgagtgcgacagaaggtctaatgagaggaatggaagtgattgacacaggagctgccctaagtgttccagtaggtggagcaactctaggacgaattttcaacgtgcttggagagcccattgataatttaggtcctgtagatactcgcacaacatctcccattcatagatctgcgcctgcctttata

SEQ ID NO: 162422 - DNA, 247 bp, Glycine max
gtcaagctcgtggacttacatggttcattcctaacgatgagccaactctgatctccaaacaacaactctttgcaagaattgttggcggactaggtgggagggctgcagaagaaattatggtcggtgagcctgaagttacaactggcgcagctggtgatttgcagcaaatcaccagtttggcaaaacagatggtgaccacatttggaatgtctgatattggtccttggtcacttatggaaccatcagc

SEQ ID NO: 162423 - DNA, 251 bp, Glycine max
ctcgagccgtgattgttgtgactcgttcttcttcgtcgttatcttcttcttttgttctttgtgtgtttgttgtttctctcacctgaaaatgtcttgcttcggtggtaactgtggttgcggaagcgcctgcaagtgcggcaacggctgcggaggctgcaagatgtacccagacttgagctacaccgagtcaaccaccaccgagaccttggtcatgggagtggcaccagttaaggctcaattcgagagtgctg

SEQ ID NO: 162424 - DNA, 250 bp, Glycine max
aaaattttcaaagtcgaagcgagaacttgccatttcgagggttttagggttagggttttctcaaattgcaagaacatgggtttcaacattcaaccctatgggattcagtccatgctcaaggaaggccataagcacctttctggcctcgatgaagcggttctcaagaacatcgacgcctgcaaacaactttccactatcactcgaacttccctcggtcccaatgggatgaataagatggttataaatcact

SEQ ID NO: 162425 - DNA, 243 bp, Glycine max
ctttctccgatggctaatccctcactcttgttcttcagtctcctcctattatccggcagcgtagccgccgccgaacggatcgacgatgaagacgaccttctgatccgtcaagtggtgccggatgcggaggaccacccgctgctcaacgcggagcaccacttctccgccttcaagacaaagttcggcaagacctacgccacgcaggaggagcacgaccaccgcttccgtatcttcaagaacaac

SEQ ID NO: 162426 - DNA, 243 bp, Glycine max
agcagctatggcatctctcaaagaaatatggtcctttatgttcccttcaatttggattaaggccagccatagttgtttcctctccaaaattggccaaagaggtaatgaaagacaatgaccttgagtgctgtggacgacctaaattactaggccaacagaaactaacctataatgggttagacatgggattttcctcatacgatagttattggagagaaatcagaaaaatttgtgttgtccatg

SEQ ID NO: 162427 - DNA, 253 bp, Glycine max
ttgccatggaagcaagattgcttccccatatgctccgagtcaagccctttgtaccacacaagcaacaaacccgagcctcttaccccagaggaagaaaaagaccttcaacttgccatccagagattccatgagctttgccataagtgtgtgcaagtcaacattcctttgttggttgatgcagaacacacttctgttcaacctgctattgactacttcacatactcctctgccatcttgcacaacaaaggtgaca

SEQ ID NO: 162428 - DNA, 256 bp, Glycine max
gttcagacggagaaagtgagaatggagttggaggagcagcgagtgaggcaatcaagaatgttgatagcggcgattcaagaagccgtggcgaagaaattgaaggagaaggacgaggagattcagcgcgtggggaagctgaattgggttctgcaggaacgagttaagaacctctgcgtggagaatcagatttcgaaggagttagcacaaacaaacgaagccacggcaaataatcttcgaaacaatctagaacaagttc

SEQ ID NO: 162429 - DNA, 252 bp, Glycine max
tcataagctttacttaattagcaaatccaaatatggcactttcttcttcatcatcttcaacatccatatttgctttagctttgttcactcttttgcttataggaagttcttcagctcaactctctgagaacttctatgatagtaaatgtcccaaggttttctatgccgtaaaatccgttcttcaatctgctttggctaaagaacctcgccagggagcatctatcgttcgcctcttctttcatgactgctttg

SEQ ID NO: 162430 - DNA, 251 bp, Glycine max
tgaaaatgagagaaatcttgcacatccagggagggcaatgcgggaaccagatcggagcgaagttctgggaggtgatatgcgacgagcacggcatcgaccacaccggaaagtacagtggcgactctgaactccaattggaacgcatcaatgtttattacaacgaagcgagtggcggaaggtacgttccacgcgccgtcctcatggatctagagcccggcaccatggactccgtcagatccggcccctacggc

SEQ ID NO: 162431 - DNA, 248 bp, Glycine max
tgggtattttgagaatctacgggacaattctttctcctctaatgcttggtatcatgctcttcatattcctgatgttgatgtgatactggatgagcaaaatctccatcttgccaaagtcttatctcagactgacagaagcttggtgtacacagtttcgaatcctggttcagaattttcactttgtgattgttcctggtctaggctggggaacctctgtaaacatgtcatcaaggtggcaactttctgta

SEQ ID NO: 162432 - DNA, 248 bp, Glycine max
  unsure (1)..(248): unsure at all n locations
gaaccacacagactttatcatcaccagcaccttccaagagattgctggaagcaaggacactgttggacagtatgagagtcacactgccttcacccttccaggactctaccgtgttgttcacggtattgatccctttgatccaaagttcaacntcgtctctcccggtgccgacatgagcatatacttcccatacactgaaactgancgtaggttaacagagttccaccccganattgaaanacttcngt

SEQ ID NO: 162433 - DNA, 248 bp, Glycine max
agcagtttctgataatacatgtcttcagcgtaaaaggaaggctgttcttcaggaagttactaatgtttgccgtgaaaatgcatacaagggttgtttcaactcaactaaaattcaggctaagaaaagcaagctggctaaggctggtcaaattaatgtgtccaaagtggctccttctgttactgttgactccaaagcaaaggaaacagcattgcaatcggaagatactatgtgctcaattaatttggaaa

SEQ ID NO: 162434 - DNA, 248 bp, Glycine max
acagagagtccccagctcagctcaggtcaactctctagttgtttgttgcattgttcattttctaggcttagtcattagatagaaagagaaggaaaaaagggctattatggcaggaggaggagctccagctaaagcagatgagccacagccacatccaccaaaggatcagttaccaaatatttcttactgcattactagtcctcctccatggcctgaggccatacttcttggttttcaacattttcttg

SEQ ID NO: 162435 - DNA, 244 bp, Glycine max
gtttggaacaacaactcctctttaaccgttggagctagaggtccaattctgcttgaggattatcatcttgtggagaagcttgcaaactttgacagggaacgtatcccagaacgtgttgtccatgccatgggagctagtgcaaagggtttctttgaggtcacacatgacatttctcacctgacatgtgcagatttccttcgagcccctggagttcagacgcctgtaattgttcgtttctcaactg

SEQ ID NO: 162436 - DNA, 248 bp, Glycine max
aagaaatttaagtgaggagctagagaatgatgatgaagtctgctatgtgtgcagtggtggttgtagcacttcttcttctggcggaggtggggcccatggctgaggctgtgacatgcaccccaacagagttgagtccgtgtcttccagcaatcacttccggtgctaaaccttccaatgcttgttgcacgaagctgaagcagcaaaaaccatgcttatgtggctacctcaaaaacgctagcttgaagcag

SEQ ID NO: 162437 - DNA, 247 bp, Glycine max
gccttggggaatccagagttctttaatatggtttttcccttgttgtttgatctatgcaattcagagcccctaaagtccgggcaagcacctttggccagtgatgctgctggatagttgaacagtgttgaagagatttctgttccacataacaaaatagttgactgtttaacctcttgtatccatgtggcacatataaatgatattcttgaaaagcaaaagggcttagcacacatgtatacagcattct

SEQ ID NO: 162438 - DNA, 250 bp, Glycine max
gaatttggctggtgttgtgagtggaatccagctatgacgaagttaactggatggaagcgagaggaggtgctggataaaatgcttttgggagagctttttggcacccatatggctgcttgtcgcctaaagaatcaagaagcttttgttaatttgggtgttgtacttaataaagccatgactggtttggaaacagagaaggttccttttggtttctttgctcggaatggccaatatgtggaatgcctgcttt

SEQ ID NO: 162439 - DNA, 255 bp, Glycine max
atactctcctaccacggtcataattaccccataaagaaggacctgcaatgtgaaactgacaggttaactcatttctacacattcattctcaggccagatgccacatacagtgtcctggttgataatagagagagagattctggaagcatgtatacagattgggatattcttcctccacgaaaaatcaaagatgtcaaggccaaaaagcctgcagactgggaggaaagagaatacattgaagaccctgatgatgtc

SEQ ID NO: 162440 - DNA, 247 bp, Glycine max
ctccaaaccctagcggcactacacactagttctatcgctatctccccaagatgtcgagcgccgatcccgagcacagagaagaggaggaggcacccgccgttggcgacgacgaggacaccggagctcacgtcgctccaatcgtcaagctcgaggaggttgctgtcaccaccggcgaggaggacgaagatgcaatcctggatctcaaatcgaagctttaccggttcgacaaggacgggaaccagtggaa

SEQ ID NO: 162441 - DNA, 245 bp, Glycine max
gggtctaagaaaccaaatatccccctacctaaatgggtatctcagattggtgaatctcaacccagtattttcttcacagataggtcaggacagcattataaagaatgcctgtccatggcagttgataatcttcctgttcttgatgggaagactccagtccaagtgtaccagagtttctgtgagagcttcaagtcttcattctctccattcatgggctctacaatcacgagcatttccatgggttt

SEQ ID NO: 162442 - DNA, 244 bp, Glycine max
gaggaattcaatgtcaacaaaagtagtatgccctggcttgctgtcccatacgaggacaggacaaggcatgaccttcgaagaatctttgatgtaaagggcattcctgctttggttctcattggaccagatggcaaagtcattagtgtgaatgggaagttaatggtctcctcatacggtgcagaagctttcccgttcaccgaatcacggataagagacctcgaagcagctcttagaaaggaaggag

SEQ ID NO: 162443 - DNA, 247 bp, Glycine max
cagcattcccatattagaatcctcatcttatcatttgtactctcccccacccacttaatttatcgtatctctttgcagtgaagtctgagcgttgcacacaaagatatttaccaatataatataaggctgtaatttgtaagcaaagaaaatggtgaagatatgtggaattggagccgggtacgtagggggtccaacaatggctgtgattgccctcaaatgcccctcaattgaagtggctgtggttgac

SEQ ID NO: 162444 - DNA, 247 bp, Glycine max
ggcagaattaccggaatttatggcacaccgatctcatgagatccattcaggccgatactccttattgttgcctcgcgttgtggtgtgcaccatgtgtgtcttaccttcttcgcaaacgagctctctatgatgatatgtcaaggtacacatgttgtgctggctacatgccttgcagtggtaggtgtggagaaagtaaatgtcctgaattttgcctttgcactgaggttttcctctgctttggaaattc

SEQ ID NO: 162445 - DNA, 247 bp, Glycine max
gcagacaaaatgaagagttttttgttgtggcgtgtggccattgtggaaaaaaatagaccctatgttgcaatgttgttcattcagtttgtgtatgctggaatggccttgctttccaaggctgcaatttccaagggaatgagcccttatgtgtttgttgtttatagacaagcctttgcatcagttgctctatctccatttgctttctttgacagcaagcaaccagctcctttgtcatgcaacttgttgt

SEQ ID NO: 162446 - DNA, 248 bp, Glycine max
tgtcgctctgtgtctgtctctgggtttgcggctgaggattccgaacgagcgaccttcgtcgtttctcgcaaagttgaagtcatcatgggtaaggaaaagactcacatcaacattgtcgtcattggacatgtcgactctgggaagtcaactaccactggtcatttgatctacaagcttggaggtattgacaagcgtgtgattgagaggttcgagaaggatgctgctgagatgaacaagaggtcattcaa

SEQ ID NO: 162447 - DNA, 242 bp, Glycine max
atctctgtctaccttaccttacctcacctcacaagggacaaagataaaaaatgaagatcattgagaaaattcacgcagcctcggctgatccaaacagggtggtgttctcatttgagttcttcccgcccaagactgaggatggggtggacaatctgtttgagaggatggaccgcatggtggtgcacaacccctcgttttgcgacatcacttggggtgctggagggacaacggctgatcttaca

SEQ ID NO: 162448 - DNA, 242 bp, Glycine max
ctcacttttcattcttcgatcatacacttagttgcttccaattaagatggttctgctagagaagctctgggatgatgttgtggctggccctcaacctgagcgtggccttggcaagctcagaaaactcaccaccctcaaaactattgatgaaggagaaagtagcaagctgcagaagacgttgtcgatgccgtcgacaccaacaaccccgatgactccgacgactccaacgacaccgggatcgg

SEQ ID NO: 162449 - DNA, 243 bp, Glycine max
cttatttttggttttgttggtgtcatgtgctagaggggaagacccttatagattctacacttggaatgttacatatggagacatttatccacttggtgttaaacaacaggggattttgataaactggcaattcccagggccacaaattgaagctgtgaccaatgacaacttgattatcaatgtttacaacagcttggatgaacctttcctcttatcttggaatggagttctgcagaggagaaa

SEQ ID NO: 162450 - DNA, 244 bp, Glycine max
gtgctccttctccattttctatctatcgtcaacgttagtgctttgtttaggtgaactaattcggagaccttgcaagacttcatcaatggctgtcaaagtttatattgtgtactactccatgtatgggcatgttgagaaactagcagaagaaataaagaaaggggcttcctctgtggaaggtgttgaggccaagttatggcaggtacctgagacactgctggatgaggtgcttggtaagatgagt

SEQ ID NO: 162451 - DNA, 249 bp, Glycine max
cgtaacagaagggcccggaggcggcggcgcggctgccgacggtgacgccgctgtcgaagtgcaagctaaggctgctgaagctggagcgcataaaggactacctcttgatggaggaggagttcgtggcgaaccaggagaggctgaagccgcaggaggagaaggccgaggaagacagatccaaggtcgatgatctccgaggttctcctatgagcgttggtaacctagaggaactcattgacgagagtcatg

SEQ ID NO: 162452 - DNA, 254 bp, Glycine max
actccctcctcttcacacattttcttagctctctccaacaatccctctcgttcacactttcagattgtgtgaagatgggggctggtggccgaactgctgttcctcctgccaacaggaagtcagaggctgaccctttgaagcgggtaccatttgaaaaacctcagtttagtctcagccagattaagaaggccattccacctcactgtttccagcgctctgttctccgctcattctcctatgttgtttatgacctc

SEQ ID NO: 162453 - DNA, 253 bp, Glycine max
cggctttaatgatcctatcagcaatagcggcctatttaatatggttcaccttggtcactcgctccctcaaaggtccacgtgtctggcccctattgggcagcctccctggcctcatccaatacgccaaccgcatgcacgactggatcgctgacaacctccgcgcgtgcggcggcacgtaccagacctgcatctgcgccctccccttcctcgcccgaaaacagtgcctggtgactgtcacgtgcgaccccaaaaa

SEQ ID NO: 162454 - DNA, 257 bp, Glycine max
gcccggcgagaaaatgagagaaatcctccacatccagggcggccaatgcggcaaccagatcggagccaagttctgggaagtaatctgcgacgagcacggcatcgaccacaccggaaagtacagcggcgactccgaactccaattggaacgcatcaatgtctactacaacgaggccagcggcggaaggtacgttcctcgcgccgtcctcatggatctggagcctggcacgatggactcggtcagatccgggcctttcg

SEQ ID NO: 162455 - DNA, 256 bp, Glycine max
ctctgctcgtagggtttctccacctagagggaaatggctcccaaaccgcctagtacgggtctgtttgttggactgaacaagggtcacgtcgtcaccaagaaggaattgcctccacgcccctcagatcgtaaggggaaaacaagcaagagggtgcactttgtgaggaacctcataagagaggtagccggttttgcaccctatgaaaagcgtataactgagttgctgaaggttgggaaggataagagggcactgaagg

SEQ ID NO: 162456 - DNA, 262 bp, Glycine max
cactcttattgttttcttaaaatttcttccttgccactgccagtgtgtcaccaccatggccaccgtcacaacccaagcctccgccgcgattttccggccatgtgcctcgaaatcgaggtttctgaccggctcttccggtaaactcaaccgggaagtgactatgaggccaatggggtgccctccttctgcctctttcaaggttgaagccaagaagggagagtggttacctggcttggcctccccaacttacctcaatggcact

SEQ ID NO: 162457 - DNA, 250 bp, Glycine max
gcaagccgtagtgtcgggctccatcccgtcctactcactcgagtcgcggctcggtgacacccgtcgggccgccaccatccgccacgaggtggtgcagagactgacttcccgatccctgtcaggtttacctctggaaggtttcaactacgactcgatattggggcagtgctgcgagatgccgatagggttcgtgcagatccccgtgggagtagcggggccattattgttggatggaaaagaattcaccgtg

SEQ ID NO: 162458 - DNA, 252 bp, Glycine max
cgcttccatcccacggatgaggagttggtgatgtactatctgaagcggaagatttgtgggaagaggctgaagctcgacgtgattcatgaaaccgatgtgtataagtgggatcccgaggatttgcctgggcaatctatattgaaaacgggagataggcaatggttctttttctgtcacagagataggaaatatcctaatggtggaaggtctaaccgagcaaccagacgtgggtattggaaagcaacaggaaag

SEQ ID NO: 162459 - DNA, 256 bp, Glycine max
cctctttcttcctcttcctcagtagtgcgattttcgattctcttctctgcaactatgcctaaccctaaggtcttcttcgacatgaccatcggcggtcaacctgccggccgcatcgtgatggagctctacgccgacgtgactccgagcaccgccgagaacttccgcgcgctctgcaccggcgagaagggcgccgggcggagcggcaagcccctccactacaaaggctcgtccttccaccgcgtgatcccgaacttca

SEQ ID NO: 162460 - DNA, 255 bp, Glycine max
ctttctctagtcctgttatttctcagcgcgtaaagcatggctttcttggtggagaaaaccacgagtggtcgcgagtacaaggtcaaggacctttcccaggccgacttcggccgcctcgagatcgagctggccgaggttgagatgcccggcctcatggcctgtcggaccgagttcggcccctcccagcccttcaagggggcccgcatcaccggctccctccacatgaccatccagaccgccgttctcattgagacc

SEQ ID NO: 162461 - DNA, 257 bp, Glycine max
ggtgcattttacataaagaacttcttgcaagttgagttctatctcaagtctctaactctcgaagacattccaaaccacggaaccatccacttcgtatgcaactcctgggtttacaattcaaaaaactacaagactcatcgcattttctttgccaacaatacatatcttccaagcgagacaccagctccacttttgaagtacagagaagaagaattgaagaatgtaagaggggatggaactggagagcgcaaggcatg

SEQ ID NO: 162462 - DNA, 259 bp, Glycine max
attccgtgtgccgccgttaccgccggtggagaggatgggggtgctggacggtagcggcgtgatgacggaggattccaaggtgggggagttagatcccggtttcgaggaagattctctaaacgacaccttttcgagcgtttcaggtggtgggggtgtgagggagaaggtggagaagtataaaatgtgtgatgtgagaatggtggattatgtgccgtgtttggataacgtgaaaacgatgaagaaatacatggagagtttg

SEQ ID NO: 162463 - DNA, 256 bp, Glycine max
cggccttgctatgagtatgaaaggcgtgaagggatccaggcttgtcctcagtgcaataccagatataaacgtatcaaaggtagtcccagggttgaaggcgatgaagaggaagatgacactgatgacttggacaatgagtttgattatggggatgttgatgctctgggcccacaaccaatgtcggaatccttgtattctggacgccctaatactgggcgaggtgctgataacggatcttgcatggcgacaaacttgg

SEQ ID NO: 162464 - DNA, 262 bp, Glycine max
caacaacaacagcaacaacaacaacaacagcaacaatttcaacaacagcaacagcagcagcagccgcaacagcagttgtttttgtttactaacgatagaacccccgctagttatagtaccaattgggcggatcttcatcctgattcccagaagattctccttcagatcgaggagcggatattggagtttagggatgaaagccagagactagatcagtgtagtcgtctttatgattcttcagtttccaacgatggatttgagc

SEQ ID NO: 162465 - DNA, 253 bp, Glycine max
aaaaaaaaaacccttagccaacacaaccatcatggccacctctgctattcagcaatcagcattcactggtcaaactgctctgaagcagctcaatgagttcgtccgcaagaccggtggcgccggcaaaggtcgcactaacatgcgccgcaccgtcaagagtgctcctcagagcatttggtatggccctgaccgtcccaagtacttgggtccattctcggagcagattccatcatacctgaccggagaattccct

SEQ ID NO: 162466 - DNA, 253 bp, Glycine max
gtcgccgccagatctcagacgagactcagtcacactttctctctttctcttccacaatgcagctcctcccggcggtgctcgcggcggcgctgctcctcctcgccactctctccgacgcccacaacatcacaaccatcctctcaaagcaccctgagttctccagcttcaaccactacctgaccctgacccacctggccccggaaatcaacggcaaaaccaccatcaccgtctgcgccgtggacaacgccgccat

SEQ ID NO: 162467 - DNA, 253 bp, Glycine max
atttacttgtcaatctgggcgatcctgagcgacctgtatgtaaggttggagattttggcctatccagaattaaacgcaacacacttgtttccggtggtgtcagaggaacccttccatggatggcgcctgaattactagatggtaacagttgtagggtatctgagaaggttgatattttctcatttggcattgcaatgtgggaaatgttgaccggggaagaaccatatgctaacatgcactgcggggctatcat

SEQ ID NO: 162468 - DNA, 256 bp, Glycine max
gaagaaacttaatcgatcatcacttcacttcactaatacatcatggcagacgagacccagaacaagtatgagagctctgaggttgaggtccaggatcgtggtgtttttgactttctcggtaagaaaaaggatgaagaagacaagcctcatcctcaggaggaggtcatcgccaccgagtttcaaaaagtcactgtctcagaccaaggagagaacaagcacagcctcttagaaaagcttcaccgatctgacagcagct

SEQ ID NO: 162469 - DNA, 257 bp, Glycine max
tggcaaattagctactgatttcactgctgacacattgggtttcaagacctatgctccagcatatcttagcccacatgcatcagggaaaaacctccttattggagcaaactttgcttcagctgcatctggttatgatgaaaatgctgctactttgaatcacgcgattccgttgtcccaacagttgagttatttcaaggaataccaaggcaagctggccaaggtagctggcagtaaaaaagcagcctcaatcatcaagg

SEQ ID NO: 162470 - DNA, 253 bp, Glycine max
ctcagtctctgtgtttgcggctgaggattccgaacgagtgaccttcttcgtttctcgcaaagtttaagtaatcatgggtaaggaaaaggttcacatcaacattgtcgtcattggacatgtcgactctgggaagtcaactaccactggtcacttgatctacaagcttggaggtattgacaagcgtgtgattgagaggttcgagaaggaggctgccgagatgaacaagaggtcattcaagtatgcctgggtgctc

SEQ ID NO: 162471 - DNA, 249 bp, Glycine max
agcagtgcgaagagaaagaaagagaagaagcgcttatcgaactcggacggaagcactgagttaactcagagcgagtgaaagtgttgctgcgtgatgtctggtggtatcgcccgtggacgcctcaccgaggagcgcaagtcgtggcggaagaaccatccccatggttttgttgcgaagcggagacgctgcccgatggaaccgtgaacttgatggtgtggcattgcactattcccgggaagactgggactg

SEQ ID NO: 162472 - DNA, 252 bp, Glycine max
gaaaaatatggagggaaaagaagaggacgtaagagttggagccaacaggtacggagagaggcagccaatagggaccgctgctcaggctaaagactacagagagccaccgtcggcgcctctcttcgaaccgggagagttgtcatcgtggtctttctatagggctggcatagcagagtttgtggccactttcttgttcctctacatcacagtgctgactgtgatgggtgtgttcaaatctaacagcaagtgttc

SEQ ID NO: 162473 - DNA, 254 bp, Glycine max
gcggctatgaagaaccatccagataagggaggagatcctgaaaagtttaaggagttaggtcaagcatatgaagttttaagtgatcctgagaagaaagaactgtatgaccagtatggtgaagatgcccttaaagaagggatggggggaggaggctcgtttcataatccatttgatatatttgaatcattttttggaggagcaagctttggtggtggtggtagttcccgaggtagaagacagaagcatggtgaaga

SEQ ID NO: 162474 - DNA, 256 bp, Glycine max
gagaaaacagaagaaaacaaaatggaagacacagtttctgcgttgaggtctttgatggtttctcactctccgccgctggccgccttagtggtgccctctgaagattatcacctgagcgaatatgtgtctgcacgagagaagcgccgcgaattcgtttccggcttcactggaagtgccggcttggcacttataacaaagaaagaagcactgctgtggacggatggacggtattttttggaggctgagaaagaactta

SEQ ID NO: 162475 - DNA, 257 bp, Glycine max
gggaaaaagaaaaataaaatgggttccgataataccaacttggagttcttgaaggagatcggtttgggctcctccaacattggttcttacattaatggccaatggaaagccactggttcttctgtcacttctgttaatccttctaacaatcagagcatagctcaagtgactgaagcgactttgcaagattatgaggagggattgcaagcttgcagtgaagcagccaagacatggatgactattccggcaccgaagag

SEQ ID NO: 162476 - DNA, 258 bp, Glycine max
tatggttgttagtacctatcaggctgctagtggtgcgggtgctgctgcaatggaagagcttcagctgcaaactcgtgaggtgttggaaggaaaaccgcccacttgtaaaatatttaaccgacagtatgcttttaatctattctcgcataatgcgtctgttctttcaaatggatataatgaagaagaaatgaaaatggtcaaggagaccaggaaaatctggaataataaggacgttaaagtaactgccacatgcatacg

SEQ ID NO: 162477 - DNA, 254 bp, Glycine max
ctcgttgttcttcgctttcctgttttcaatttcgattctttcgttaatttaataagatgtttgggagggcaccgaagaagagcgataatacgaggtactacgaaatcctcggcgtctccaagaacgcttcgcaggatgatctgaagaaggcttacaagaaagccgccattaagaatcaccccgacaagggcggtgatcccgagaagtttaaagagctggcgcaagcttatgaggttctgagtgaccctgagaag

SEQ ID NO: 162478 - DNA, 250 bp, Glycine max
atccatcaccctttctttcattctgttgggaaatggaagtcacactttcagcgtgcaagtccattagctcgccttctgttcccgtcgcagctttatttgcggggaaagcaggaactaagagttcgcaatgcagttttttagctggagcaaacaaagtgaggtttcctaggcaagtcggtcaagttagccacgttcgcaaacagcgccaaacgcgtcactgtggtgctctccacgcgacttgcagcggtga

SEQ ID NO: 162479 - DNA, 247 bp, Glycine max
ttcttagcacacttgttgctgtttgtggttctttcacatttggcacttgtgtgggatattcagcacccactcaagcggctatcagagcagatcttaatctatctcttgctgagttttccatgtttggttcattagtgaccattggtgcaatgcttggagctataacaagcgggcggattacagatttcattggccggaacggggctatgaggatttcaacaggattctgcattactggatggttagc

SEQ ID NO: 162480 - DNA, 252 bp, Glycine max; identical to SEQ ID NO: 114712

SEQ ID NO: 162481 - DNA, 253 bp, Glycine max
caaaaaccctaggtagagagctcttcctccctttctcacagcaatggccgccgcagcacgccctctcgtcaccgtgcaggccctcgacggtgacatggcaaccgatgcctccgccaccgttcccatccctgacgtcatgaaggcctctatccgccccgacatcgtcaatttcgtacactcgaacatctccaagaacagccgccagccatacgccgtcagtcgtcgcgctggtcaccagacctccgccgaatcc

SEQ ID NO: 162482 - DNA, 262 bp, Glycine max
caaccttgatccatcaggtagagcagcacttggagtgcatgcatcagcttatggaaaccaggtcaaagctgtagaaccagagaagatcatacccaagatggaagtttctccactaggagttgccatatagagcttgtatgagccatagcaaggactagtagttgccctagaaccagcatataatattattatactagtcatcataaaatgaaaattttgcttgctttgtagtttatccagggaatggtatataaatagataa

SEQ ID NO: 162483 - DNA, 252 bp, Glycine max
ggtgacaagagcttccattcaattgcactaaatatctaggagtagtaaatgttattcagtttaatatgaattctcatgatgttttgaaaactctggtcttgcagtttgttgcttcgtcgggagtgttgttcctttagcaatggagaatatttgaaggcaggtttacatgagttggaacaatggtgtcttaaagcaacagaccagtttgctgggtcatcttgggctgaactcaaacacatacgccaagctgtg

SEQ ID NO: 162484 - DNA, 252 bp, Glycine max
ggctaaccaaccctgacactccttcttctccgcttcctcttcgatcatcgcttcagaatgccgccgaagttcgacccctcccagatcgtcgacgtcttcgtacgcgtcaccggcggtgaggtcggcgcggcgagttccctcgccccgaagatcggtcccctcggtctctcccccaagaagatcggagaagatatcgccaaggaaaccgccaaggactggaagggcctccgcgtcaccgtcaagctcaccgtg

SEQ ID NO: 162485 - DNA, 248 bp, Glycine max
ggcatggtgtgcactgctagggttgtgtccaaggctgtgatcactgggtacaaagatgggttcaaccagattaagtccttggttgatgttggaggtggcattggagggtctctttctgagattgttagggcttatcctcacatcaatgccatcaactttgacttgcctcatgtggttgccactgctcctaagtatgatggaatcacccatgttggaggtgacatgttcgtgtccattccagatgctga

SEQ ID NO: 162486 - DNA, 249 bp, Glycine max
aagattggaggtattggaactgtgccagtgggacgtgttgagaccggtgtcttgaagcctggaatggtggtgacttttgcaccaactggactgacaactgaagtcaagtctgtggagatgcaccatgaatctcttacagaggcacatcctggtgacaatgtgggattcaatgttaagaatgttgctgttaaggatttgaagcgtggttatgttgcctcaaactcaaaggatgaccctgcaaaggaggct

SEQ ID NO: 162487 - DNA, 251 bp, Glycine max
taaccattgaagaagtgcaatttcgtcctctaacactcttccaaatcatggctagctcactgcttgtgagggttgccagctgcatggttgtggtgtggatgtttagttttgggcacataattcccttggcagatgttgaaattccatgtggcagggtgcaaatcactgtggctccatgcatagggtacctaaggggtcctggtggaggtgtccctgcaccatgctgcaatgaggttaagagcataaacaac

SEQ ID NO: 162488 - DNA, 234 bp, Glycine max
  unsure (1)..(234): unsure at all n locations
cctcttctaacttctccatttcacacaggaagaagatcagancacatttagaacaaaaaagagagtttgagaaatggggaggggtaagattgagatcaagaggatagagaactcaagcaacaggcaagttacatactcaaagagaaagaatgggatcctaaagaaggccaaggaaatcactgttctatgtgatgctcaagtttcgcttatcatctttgctgcatctggaaagat

SEQ ID NO: 162489 - DNA, 263 bp, Glycine max
gaactttgacgccattggccattgagttaagtaagccacatcctcagggtgaagcatatggtcctgttagtgaagtctacgtgccttcgagtgaaggagttgaagcttacatttggttactggcaaaggcttacgttgttgtgaatgatgcttgctaccatcaaatcattagccattggctaaacactcatgcggttgtggagccattcgtcatagcgacaaacaggcatctgagcgtggttcaccctatttacaaacttctg

SEQ ID NO: 162490 - DNA, 272 bp, Glycine max
attccttttctctttctccggcgacgatctcagattccggccactcctctcgccggcgagcccttactcttccctcctccgtcgagccctctccgattcgaatcgttcccagcctcgcaccaccatgaatcccgaatacgattatttgttcaagcttttgctgattggagattctggtgtaggcaagtcatgtcttctcctgaggtttgctgatgattcataccttgacagctatatcagtaccattggagtggactttagaatccgcactg

SEQ ID NO: 162491 - DNA, 248 bp, Glycine max
tggagagtagtgcaataactcattgtacgttcctagtgtgtgggagacaaagaaagatggctaagtggtgtgttttggtgttggttcttgctctggctctggccacaagtgccagagatgttcccgatcccaaggatgctggtctcaaggaccagaagaacttcatcagctatggtggagttggtgcttattcggggattggtagcaatgggctaccttttggaggagttggtgccggaataggtggt

SEQ ID NO: 162492 - DNA, 265 bp, Glycine max
ctagcaatggaggcgattaggaacagtaggattcttatatttggaggaactggttacatagggaagtatatggtgaaggcaagcgtcacgttaggccatccaacttttgtctacactcgccctcttgatgcacaaactccttcctctaaggcacagctttgcaaggagttcaactctatgggggtcacacttgtccatggagaacttgagcatgaccagattctggcagtgattaaacaagtagacattgtgatatgttctcttc

SEQ ID NO: 162493 - DNA, 261 bp, Glycine max
gagaaaaagagatttagggtcttaagggtttcattctgcggcatcagacatgggaggaggcaatgggcaaaaggcaaagatggcacgcgagaagaacctcgagaagcagaaggccgcctcaaagggaagccagctggattcaaacaagaaagcaatgtcgattcagtgcaaggtgtgcatgcaaacatttatgtgcaccacatcggaagtgaagtgtacggagcatgctgaagccaaacaccctaaatctgatgtttatgc

SEQ ID NO: 162494 - DNA, 258 bp, Glycine max
ggttatcatttctccatttccattttctctctcacttttcaagaatcgtaagctatgggaaagtcttacccaactgtgagtgctgattaccagaaggccgttgagaaggcgaagaagaagctcagaggcttcatcgctgagaagagatgcgctcctctaatgctccgtttggcatggcactctgctggaacctttgacaagggcacgaagaccggtggacccttcggaaccatcaagcaccctgccgaactggctcac

SEQ ID NO: 162495 - DNA, 257 bp, Glycine max
aagggtcagaagaatgatgcttgccgctattttgaggaatgaagttggatggttcgatgaggaggagcacaactcaagccttgttgcagctcgccttgccacagatgcagctgatgtcaagtctgccattgctgagaggatatcagtgattctacagaacatgacatcgctccttacttctttcatagttgctttcatagttgaatggagggtttccttgctcatcttggcaactttccctctccttgttctagcca

SEQ ID NO: 162496 - DNA, 264 bp, Glycine max
cttacacttacccacagggaggcgaacagagaaactcagagacccgaaggcagatttcaagatgaagttcaacattgcgaatcccaccaccggttgtcagaagaagctggagatcgatgatgacctgaagctgcgagcattttgggacaagaggatctcacaagaggttgttggtgatgctctgggtgaggaattcaaaggttatgtcttcaaaattactggaggttgcgacaagcaaggatttccaatgaagcaaggagtgtt

SEQ ID NO: 162497 - DNA, 262 bp, Glycine max
gtaaagctatgggatgtggaacttgggaaactcatctacagcttggatggacacaggcatcctgtatattctgttgctttcagtcccaatggcgattatctagttagtgggtctcttgacagatccatgcacatatggtcattgagggacggcaagattgtcaaaacatacacaggcaatgggggcatttttgaggtctgctggaataaggagggtgacaagattgctgcatgttttgctaataatacagtttgcgttttgg

SEQ ID NO: 162498 - DNA, 254 bp, Glycine max
gcaaaaacatcctacgcttgacatgccagtgatcgactacgacttggcacttcttttccaaccagtgctggtgcttggaatcagcattggagttgccttcaatgtgatttttgctgattggatgatcacagtcttgttactaataattttcgtaggaattgcaaccaaggcattcttaaaaggagttgagacatggaaaaaagagaccattatcaagaaggaaactgctagacaatcacaatttaatggcactg

SEQ ID NO: 162499 - DNA, 258 bp, Glycine max
ctcgagccgcgcaaaaatggcacctgcaacactgtctctgtctctcctcctcctgttctcagtcagcatcgccgtaaccgttagatcgagcgactacgactacgattgtgtgtacactgcatacgttagaaccggttcggtgttgaagggcggaacggactctaagatcgggctgaagctgtacgacaagtacggctactacatctacattaaaaacctcgaagcatggggcggcttgatgggcaagggctacgacta

SEQ ID NO: 162500 - DNA, 255 bp, Glycine max
ttccatttgactcttgttctgaacgacttttcaagagaatcaaaccatggcagtgaaagtatacggtccccactgtgcttccaccaagcgggtgctggtttgtctggttgagaacgaagtcgaatttgaggttgtccctgttgatgtcactaagggggagcataaggatcctgagtacctcaaactacagccatttggagttgttcctgtcatcaaagatggagattataccttatatgaatctcgtgctataat

SEQ ID NO: 162501 - DNA, 254 bp, Glycine max
gacagatgatgatggagatggcgaacgaaacgctgtcgttgcgggactcgcggcgttggtgctactcgcggcgagtgtggcggtggatgctcaggagaactcggacgtgaagacgctggtgaagtacaagcacgggaagaagtactgcgacaaaggatgggaatgtaagggctggtcgatttactgttgtgacctcaccattaccgattatttccagacctaccagttcgagaatctgttctccaagcggaact

SEQ ID NO: 162502 - DNA, 261 bp, Glycine max
gaaagattttgatttggtgatgaaggttggagcatttcactgagttatataaaaggcgtggcttgtgggctgtgtagaactcaaatcgatcaaataaatggctactgaacatgaagacgatttcaaggatgagaagaatccccgccccctcgacgaggatgacatcgcccttctcaaaacctatggtttggggccttattccacaagcataaaaaaagtcgagaaggaaatcaaagacatggcaaaaaaggtcaatgattt

SEQ ID NO: 162503 - DNA, 258 bp, Glycine max
ggaaagtgatcgttttctaaagcaagtcacttttcatctccttcggcttgcagtcttccgagatgaaaacatcaggcaaagggcagttgttggtcttcaaatacttgtgaggagttcgtttcgttactttatgcatacagctagattgagagtcatgttgattgtcacattatcagagctaatgtctgatgtgcaagtgactcagatgagatctgatggaagcttagaagaaagtggtgaagcacggagacttaggaa

SEQ ID NO: 162504 - DNA, 266 bp, Glycine max
cgcaacaataagaaagaatcccaggcgaggagaaagatggaggggaaggagcaggatgtgtcgttgggagcgaacaagttccccgagagacagccgattgggacggcggcgcagagccaagacgacggcaaggactaccaggagccggcgccggcgccgctggttgacccgacggagtttacgtcatggtcgttttacagagcagggatagcagagtttgtggccacttttctgtttctctacatcaccgtcttaaccgttatggg

SEQ ID NO: 162505 - DNA, 259 bp, Glycine max
gtactgcgtttcggaagcagacacagatggctcgtacgaagcaaaccgctcgtaagtccacaggaggaaaggctcctaggaagcagcttgcaaccaaggctgcacgtaagtctgcaccaactactggtggtgtgaagaagccccaccgttatcgtcctggtaccgttgctcttcgtgagattaggaaataccagaagagtaccgagcttttgatccggaagctccccttccagaggctggttcgtgaaattgctcagga

SEQ ID NO: 162506 - DNA, 256 bp, Glycine max
tgcacgcaaatatatatgtgtatgaatctgcacttcatttcaaatcccaacaaaaaaccaaagtaatctaacaaagtaagcacaatgagggagatattgcacgtgcaaggtgggcaatgcgggaaccaaatcggttccaagttctgggaagtgatatgcgacgagcatggcatcgaccccaccggaaagtacaccggcgacgaggcctccgatctccaactggagaggatcaacgtctactacaatgaagcctccg

SEQ ID NO: 162507 - DNA, 255 bp, Glycine max
ggtgtgtcctgttccgttcctaaaagactatcccttttacaaactgaagtgaatcggaggatctgttctgttccataagatggctggacttttgggatataggagccttccacctaaggcaaagaatttggtagttgctgggggtttgacagcttttgtctttggtgcctacttctacaccatgagggctgttggaggcactgatgaactgcaggtagcaattgataagtttgaagctgacaagaacaagaatgc

SEQ ID NO: 162508 - DNA, 251 bp, Glycine max
tgtagctgttggaactctggcgtttcttggagcctttttcccttattacactgtcaacgaggagggagtttcaataatcttgaaggttattgcttccttactttcacctacagcctttgctttgggttcgatcaactttgctgattatgagcgtgctcatgttggactccgttggagcaacatatggcgggaatcatctggagtgaactttttggcatgtcttctgatgatgatacttgatacactgctat

SEQ ID NO: 162509 - DNA, 251 bp, Glycine max
ccgagatacgagcaggtggtggttgtggtgaggagggtgggaataatattactctgtctgggttgctgaattttactgatggcttgtggtcttgttgtggaagtgagaggatttttgtgtttaccaccaaccacattgagaagcttgacccggctctgctgcggagtgggagaatggatatgcatattttcatgagttactgttcgttcccggcgctgaagattctgctgaagaattacttggggtgtgaa

SEQ ID NO: 162510 - DNA, 253 bp, Glycine max
aaaaattggaacctgcctctcttaaagtttgtatttttttgagtgggtgggttgattgagagtactgtgcaagctttggaactttgtcccaacctgctacttcaatggctactgaagaggttaacaaacctcaatcacttcctccataccctgagatgatagtgaaagcacttgaagcactgaatgagccaaatggatcgaacaagtcagcaatatcaaagtacatagaaaccacctacggtgagttgccaga

SEQ ID NO: 162511 - DNA, 252 bp, Glycine max
tcttcttcgttgcgctttttcccaaaaccaattgcatcactctcgtccgttaccgccgctgccctagaccaccgcaagcgacgtcgcacaccgccttcatccgttagggcaaaaatgagtcgaggaagtggaggtggatacgatcgtcacatcactattttctcccctgaaggacgtctctttcaagtggagtatgctttcaaggctgtgaaggctgcaggaatcacctcgattggtgtccgaggaaaggat

SEQ ID NO: 162512 - DNA, 254 bp, Glycine max
gcggagagagagtttaggccttagtgagaaggataacgccatttggttttggcttggaatacgtcatccactatcaatcaactgggctttgaaatggtgaaggagaccgaatactatgacgtgctgggtgtcagccctacggcatccgaagccgagattaagaaagcttattacattaaggcacggcaagtgcatccagataaaaacccaaatgaccctcttgctgcacaaaattttcaggttttaggtgaggc

SEQ ID NO: 162513 - DNA, 258 bp, Glycine max
caggcaagccccactcaaccaccacacctctcctcgttcacgctacccctttctgctcttcttctacctttcaagttttaaaagtataaagatggcagagacattcctatttacctcagagtcggtgaacgagggacaccctgacaagctctgcgaccaaatctccgatgctgtcctcgacgcttgcctcgagcaggacccagacagcaaagttgcctgcgaaacatgcagcaaaaccaacttggtcatggtcttcgg

SEQ ID NO: 162514 - DNA, 254 bp, Glycine max
tgtaattcctgagtttccatttcaggtgtggagtttgagacctcgtgaccgtggcatgctggggaaaggagtttcagtagggacttttttctgcactagttgttggaacaatggagatgagctatctgttgtgtgcttgaagaacctaaatcgtgtgctgccagcaatgccacgcctccaccaaatacatgcacttatagagcattatggtcctactgttttctttcgtcctgaggaagtatacttgccctctt

SEQ ID NO: 162515 - DNA, 254 bp, Glycine max
ctagaagcaataagatgaaaatgaaagtgcttgttttgtttgttgctacagttttggtagcatatgaatgccatggctcagactaccagaagttccctctccaaatgaaaactgggtttggtgggcaatacagcaatgaggtggcatgtgccagttggaggcttggcgtggaagcaaacaacgtagtcaagtggcaaactgttcctgcagcttgcggagagtacatagctgactacgttctaggagaccaatat

SEQ ID NO: 162516 - DNA, 250 bp, Glycine max
gacagaaattgttgtccctgactggcgtgggcgtctgtgtatgaatgtgtttgtgagaaaatggaagctgcgatgggactgatgcggaggattcctccgaaacacacagaaacagctctgtcagcgcttctgagccttatgcctgacaactcctccgatctcctctctcaagtcgatcagcccctccaggttctgtgcgatgtggaatgcggcaaggagttcattttgtgcgaatacaatagagatgccg

SEQ ID NO: 162517 - DNA, 253 bp, Glycine max
ctagcaaatgggttctcaccaacaagaaccatggctattggagaatgggaaaccaagggttttgaccaaggagaccaggcatggccgttctgcacacagaatgtcctccacctctttgcgcaagaaatctagccgaactcttgtctcaaaggttccatgtgccactctcagaaactttctttcaaatttgcaagaggttattcttggcaccaagctttccattctcatccctgctattccagctgccatcgtt

SEQ ID NO: 162518 - DNA, 251 bp, Glycine max
cagcattcccatattagaatcctcatcttatcatttgtactctcccccacccagttaatttatcgtatctctttgcagtgaagtctgagcgttgcacacaaagatatttaccaatataatataaggctgtaatttgtaagcaaagaaaatggtgaagatatgtggaattggagccgggtacgtagggggtccaacaatggctgtgattgccctcaaatgcccctcaattgaagtggctgtggttgacatct

SEQ ID NO: 162519 - DNA, 250 bp, Glycine max
agctcaggattcggctcgggattaatcttatatacatatatataaagacatagataatagtcatgtagatataattatttcgttatattttccttgcatgggctgttaagatgtctcgcacgtgctcacagtgcggcaacaacggccacaactcacggacatgcaccgacggtggcgccgccgggtctccgagggagaacggcatcatgctgttcggcgtaagagtcatgacggaagctaactcctcctt

SEQ ID NO: 162520 - DNA, 251 bp, Glycine max
accaccacctgttgcatcattggagcatggtgaaggtgctcatcatgaaggagaggccaaggagaagaaaggtatattagaaaagataaaagagaagcttcctggttatcactccaagacagaggaggaaaaggaaaaggaaaaggagagtggtgctcattgatatttaagattgagacaaggcttttttgttggttggagatgcatgattgtggtgtgctttgttttcatttcatcatatgacagccttg

SEQ ID NO: 162521 - DNA, 247 bp, Glycine max
taaccattgaagaagtgcaatttcgtcctctaacactcttccagatcatggctagctcactgcttgtgagggttgccagctgcatggttgtggtgtggatgtttagttttgggcacataattcccttggcagaagctgaaattccatgtggcagggtgcaaatcactggggctccatgcatagggtacctaaggggtcctggtggaggtgtccctgcaccatgctgcaatggggttaagagcataaa

SEQ ID NO: 162522 - DNA, 250 bp, Glycine max
cgacgcgcccacgtcatctctgagttccacgcgtcctacaaagacctcttccacgagctcgaagccaacctggccgaagctggcaaagccagcttcggggacgccaacgaccaagccgccttcaacttcttggcacgctccctcttcaactccaaccccgccgacaccaaacttggccgcgacggccctaaaatcgttcagaaatgggtcctatttcagctcgacccaatcctccgcttggggctccctc

SEQ ID NO: 162523 - DNA, 259 bp, Glycine max
gcggaatcagctagaattttctaataatggccaaagacgttgagcaggttacagagcaaggtgaatactccgcgaaggattaccatgacccacctccggcgccgttgatcgacccagatgagctcactaagtggtccttgtacagagccgccatagctgagttcatagcaacactccttttcctttacatcaccgtgttgaccattattggctacaagagacagagtgacaccaaaatccccggtaacaccgagtgcga

SEQ ID NO: 162524 - DNA, 263 bp, Glycine max
cttttccctcgttgaaatgaaaatgggttcttctttgtggactttgtgtctaattttggcttcactagcctcttctgcattctgtgcctttccacggaggccagtggatgttccattcggcagaaactacgttcccacttgggcttttgatcacatcaaatacttcaatggaggttctgagattcaacttcatcttgacaagtacactggtactggcttccagtccaaagggtcatacttgtttggtcacttcagcatgaaca

SEQ ID NO: 162525 - DNA, 249 bp, Glycine max
ctggtacacattgggccctctgcttcctccaagaatcaattcaagcatggctgtgcttgttagtgttctcaaagggggcaaagagacctacgaggacttctttatgggaacggctcacttcaaagacatagcattggcacatattttggcacttgagaacaagaaagcagcaggaaggcacttgtgtgtggaatctattcgtcactttagtgatcttgtggacaaggttgctgagttataccctgaata

SEQ ID NO: 162526 - DNA, 247 bp, Glycine max
gttcaggggttgggcctggtgaacccgaagaaggtgttcacgttttacgaccaattacacagttatctggcgtccgcgggtgtcgacggcgttaaggtggacgtgcaatgcatcttagagactctgggtgcaggactcggtggaagggtggaactcacgaggaattaccatcaggcccttgacgcttcgatttctagaaacttccctgacaatgggtgcatcgcctgcatgagccacaacacggacg

SEQ ID NO: 162527 - DNA, 254 bp, Glycine max
attcattcaagattcagcaagtgcgttttggaagcagagaccgaaatacttcgagatggcccgtacaaagcaaactgctcgtaagtcaactggaggaaaagctcccaggaagcagcttgcaaccaaggctgcacgtaagtctgcaccaacaactggtggtgtgaagaagcctcatcgttatcgccctggaactgttgctcttcgtgagattaggaaataccagaagagcactgagctcctaatcaggaagcttc

SEQ ID NO: 162528 - DNA, 261 bp, Glycine max
gcgcaaccggtccacccaaacatactatttgtttctcagtttaaccagtacgctagctgaagatgggaagttccttcttgctgcacgcaaatgcagacgtccaacctgcacagattatatcatctctcttgacgcagatgatatgtcaaagggaagcaactcctatgttgggaaactaagatcaaactttcttggaacaaagttcacaatctatgatagccagctgcctcatacaggagcaaagattatgaaaagtcgctc

SEQ ID NO: 162529 - DNA, 257 bp, Glycine max
ggtccttcttccgccgccccaaggagatcgagaccgccgacaaagttcccgacttcgtcgacaccttctacaatctagtcaccgacatctacgagtggggctggggccagtccttccacttctccccctccatccccggtaagtcccaccgcgaggccacgcgcctccacgaggagatggccgtcgatctcatcgaggccaagcccggcaacaaaatcctggacgtgggctgcggcgtgggcgggcccatgcgggca

SEQ ID NO: 162530 - DNA, 248 bp, Glycine max
cgtatgtgactgttgcgactcgatcttctacgtcgttctcttcttctcgcgtcgtttgtgcgtccgtcttttctctcacctgaaaatgtcttgctgcggtggtaactctggttgcggaatcgcctgctagtgcggcaatggctgtggaggttgcacgatgtacccagacttgagctacttcgagtcaaccaccaccgagaccttggccattggagcggcaccagttctggctcaattcgagagtgctg

SEQ ID NO: 162531 - DNA, 248 bp, Glycine max
agaagctcctccagtgccacctgcaccgcccatagtggccatgctgccatcccctggcatgggccacctaatcccaatggtcgagttcgccaagcgagcggtgcgctaccataacctggccgtcaccttcgtcatccccactgacggcccaccttctaaagcccaaaaggccgtcttccaggccctcccggactccatttcccacaccttcctccctccggtcaatctctccgactttccaccgggca

SEQ ID NO: 162532 - DNA, 247 bp, Glycine max
cttgctccctcagaagcgaagaagaagccacagagaaccagtctcctactctctctcacccacaagaaaaatggcatctcacatcgttggatacccccgcatgggtcccaagagagagctcaagttcgctctcgagtctttctgggatggcaagagcagcgccgaggatttgcagaaggtggctgctgatctcaggtcatccatctggaagcagatggctggtgctgggatcaagtacatccccagc

SEQ ID NO: 162533 - DNA, 247 bp, Glycine max
ggtgggccatgctcgccactctcggagctctcactgttgagtggctcactggtgttacatggcaagacgccggaaaggtggagctagtagaagggtcatcataccttgggcaaccacttccattctcaatcaccacactgatctggatcgaggtactcgtaattggctacatagagttccagaggaatgcagagctcgacccagagaagaggttgtacccaggtggcagttacttcgacccattggg

SEQ ID NO: 162534 - DNA, 254 bp, Glycine max
gtcggcctcgacgatcctgacaaggccgccgtcctcaaatggctctcctccggcgcccggacgccgcgcaacgccttttccatcgccctcatcaatggccaaatccacgagctcaccgtcaaccttctctccccgcgaaacgttgtcttggacaaaatccacacagggaacgggttccccaccttaacggaggaggaacaaaccgaagccctagagcttcttcccaagtacggtccctttcttgagtccttgaa

SEQ ID NO: 162535 - DNA, 145 bp, Glycine max
gtccccggaaagtgagcgtcaaagaacgaaatgacttttgagagtttttagatttgtgtttggtgaagtacttcagataatgtgaattatcttgtgtatccgaatccaacttaatgttacttgctttttacaaaactcaagtgtc

SEQ ID NO: 162536 - DNA, 253 bp, Glycine max
aattgttgtaactttttgattcctaaattctctaaaattcgaaattctaatttcgttaggggaaagagattgtttgtgtgtgagtgagtatagctggaaaaggcgagggtcctgctatcggaatcgatttgggaacgacgtactcttgcgtcggcgtgtggcaacacgatcgtgttgaaatcatagccaacgatcagggtaacagaactaccccatcctacgtggctttcaccgacacagagaggttgatcgg

SEQ ID NO: 162537 - DNA, 249 bp, Glycine max
gggaaatcatattgttaatgttttctcattctcaaaagcatttggaatgatgggatggcgggttggatatatagcatatccctctgaagtaaaagactttgctgaacaacttctcaaagttcaagacaacattcccatctgtgcttcaatattatcacagtatcttgccctgtattcattggaagtggggcctcaatgggttgtagatcaggtaaaaactcttgaaaagaacagagaaattgttttaga

SEQ ID NO: 162538 - DNA, 249 bp, Glycine max
aaaatcttcatattcatcaaatttatcaaaatgaatctgtaccactcctccaccaccaccaccacctccaccatcttcaccgtcatattcctcctccttgcaatattattcactctcacaccccactaggccaactgtgccacgtgtcaccctgaggaagaagcgggcctgttgggcttcaaatccggtatccgatccgacccgtccggcctgctcagtaactggatatcgggtacggactgctgcaca

SEQ ID NO: 162539 - DNA, 246 bp, Glycine max
gtcaagctcgtggacttacatggttcattcctaacgatgacccaactctgatctccaaacaacaactctttgcaagaattgttggaggactaggtgggagggctgcagaagaaattattttcggtgagcctgaagttacaactggagcagctggtgatttgcagcaaatcaccagtttggcaaaacagatggtgaccacatttggaatgtctgatattggtccttggtcacttatggaaccatcag

SEQ ID NO: 162540 - DNA, 246 bp, Glycine max
gtcactttcgccattgtcattccatgccttgaggctggcattgctgagtttgatgactttctcaaagcccaagctgatgaagcacaaaaaattgctcttgaggcctatgtcccagtgccagaagatgtcaccgacgaactcaatttccatgttcatttgtcattagaaaactccacaaggagggaactaaggcaaaggaagggtagatcaggaaaaaaatgtgttgccagcaaccctattgacact

SEQ ID NO: 162541 - DNA, 240 bp, Glycine max
ggaacaattcaagcacctacaaacgtttgtaaccttaagggggcagaccaatggttaaaggttcaacatgttaactctttcaccctgtcagggaaaggagtttgtgatggtcaaggaccaactgcttggagacaaaatgattgtacaacaaacaagaactgcacgatactttgcatgaatatcggttttaatttcctcaataattcaattgtccgtgaccttacttccaaggatagcaaa

SEQ ID NO: 162542 - DNA, 246 bp, Glycine max
gtccagcacgccggcaacattttgccccgattgtacctcctctgtacgttaggatcagtatacatcaaatccaaggaagctcctgcaaaggatgttcttaaggatcttgtggagatgtgccgtggcattcagcaccctgttcgcggactctttctcagaagttacctttctcaagttagcagggacaaattgccagatattggttcagagtacgaaggggatgcagatactgtagcagatgctgta

SEQ ID NO: 162543 - DNA, 248 bp, Glycine max
gtgtgggtttcctagggaatccattctcattctcacagatgatatggaggagagaaacccacaaaaattcccgacgaaatataacattctgaaggccatgaggtggctaattgagggtagccagtcgggggattcattggtgttccagttctcaggacatggttgtcaggaactggatacgaatggggatttcgatgagcttgatgagcgtgacgaagcaatatgtccggttgattgggaaaagcagg

SEQ ID NO: 162544 - DNA, 248 bp, Glycine max
ctccgccttcttttatctctctctccactcccatatcgaaacaaagtcgttttgagttccgccgaaggtaccgataggtatgcagcagctatggatttggcatccaatctcggtggcaagattgacaaagccgaagttctctctgccgttcagaagtatgagaagtatcatgtttgctatggaggtcaagaggcagagagaaaagctaattataccgatatggttaataaatactatgatcttgttac

SEQ ID NO: 162545 - DNA, 240 bp, Glycine max
atcctggtgaggtaaacagaattagggaattgccacaaaattccaagatagtggctacacatacagacagccctgatgtccttgtttgggatgttgaaagtcaacctaatcgccatgctgtccttggagctacaaactctcgtcctgatttgatattgaccggacaccaagataatgcggaatttgctcttgctatgtgcccaactgaaccctatgttctttcaggaggaaaggacaaaa

SEQ ID NO: 162546 - DNA, 245 bp, Glycine max
caggacaaggagggaatccccccagaccagcaacgtctcatcttcgccggaaagcaacttgaggacgggcgcaccctcgccgactacaacatccagaaggaatcaacccttcacctcgtcctccgtctccgtggtggcatgcagatcttcgttaagaccctcaccggcaagactataaccctagaagtcgagagctccgacaccatcgacaacgtcaaggctaagatccaggacaaggagggtat

SEQ ID NO: 162547 - DNA, 249 bp, Glycine max
ctcccttattattaaattaaaaagctgacaaattggggggtcaactgatgaattagatccattccttggggttgatgcatgcgtccaagagtttccattcttcgcttccttcttccggtttatgatcgtattcccaccgagcagtcagtgggagagaaacaagtatactctctattctccctccagttttcagtccaaatgttgtacccctatcatataccaaattgaattcaacatatcgtccccttc

SEQ ID NO: 162548 - DNA, 244 bp, Glycine max
ggagtaccctggaagccttactccttttgtgacggtaacatgtatagttgcagccatgggtgggttaatcttcggttacgatatcggaatttcaggtggggtgacatccatggatccgttatctgctcaagtttttcccgtcggtgttccggaagaagaattccgacaaaacggtgaaccagtactgtcaatacgacagccagacactgacgatgttcacgtcgtcgctgtatctcgccgcgtt

SEQ ID NO: 162549 - DNA, 243 bp, Glycine max
ctcactccttccccatttcaaatcttcgtctccaattcgcgctcacataaaccctaccctcaatttccattcgcaatttttgttgctgctgagcacggaatcggagatgaaagtgaagatcttgcaatggcatgctattgcttcttggacttgggatgcacaggacgaaacgtgtgggatttgtaggatggcctttgatggatgttgtcctgactgtaaacttcctggagacgactgcccgct

SEQ ID NO: 162550 - DNA, 243 bp, Glycine max
  unsure (1)..(243): unsure at all n locations
aanacacctctctttctctctcttccaaaacctaattttcattttttctcttcaaacaaattttcaaaatgcgtgagatccttcacatccagggtggccaatgcggcaaccagatcggcgccaagttctgggaggtggtttgcgcggagcacgggatcgaccccactggaaggtacggtggggactcagagcttcagctcgagaggatcaatgtctactacaacgaagccagctgcggccggt

SEQ ID NO: 162551 - DNA, 245 bp, Glycine max
ctcagacacacactctcactctctctccctcaccttccataatgcagctcctccggccactgctcgcggcggcgctgctcctcctcgccaccctctccgacgcgcacaacatcaccagcatcctcgcaaagcaccccgagctctccaccttcaaccactacctcaccctcacccacctcgcccccgaaatcaacggcaaaaccaccatcaccgtctgcgccgtcgacaacgccgccatgtcggac

SEQ ID NO: 162552 - DNA, 241 bp, Glycine max
gaggagtacaagattgatgtattccaaaatgccagggcttgtctgaggttgagggctgcctgcgagaagctgaagaaggtgcttagtgctaatccggaggcccctttgaacattgagtgcttaatggatgagaaggatgtcagaggctttatcaagcgtgatgagtttgagcaactaagtcttccaattttggaacgggtgaagggacctttggagaaggcacttgcagaggcaggtctta

SEQ ID NO: 162553 - DNA, 243 bp, Glycine max
  unsure (1)..(243): unsure at all n locations
agaagatggagatgtatcagatctggagcaggagaatagcgttgggagcgttcgcgtttgatctgcttttcctatcggcctcagcagacgacgtcgttgtgctctctgaagataacttcgaggaggaagttggtcaggacagaggagctctcgttgagttctatgctccttggtgtggacactgcaaaaagcttgctccagaatatgaaaagcttggtagcagcttcaagaaagccanatctg

SEQ ID NO: 162554 - DNA, 243 bp, Glycine max
ccaactaaccaaaccagctatggcggcgatgcagaggccactcaagagaaccattgcaatcgccaagctacgcgcgtgcttttcctctctccgacccgccgccgccgccgacatcgtcgtctctcctccgccgcagctcccgccgttcgatcaccagccgcacccttacaacggtcccttcgccgatgaagtcctcgccaagcgcaaaacgttcctcggtccttccgtcttccactactataa

SEQ ID NO: 162555 - DNA, 247 bp, Glycine max
cacttgttgtttgaggttccctggtcagttaaactctgatctgcgaaagcttgcagtgaacctcattcccttcccgcggctccactttttcatggtgggatttgctcctttgacatctcgtggctctcagcaatacagagccttgagtgttccagagctcacccagcaaatgtgggattccaagaacatgatgtgtgctgctgaccctcgacacggccgctacctcactgcctcagccatgtttaga

SEQ ID NO: 162556 - DNA, 239 bp, Glycine max
gtcacttccaaaaggtgttgacatccattggtaacttttgtatctgctcaattgctgtgggcatgttgattgagctcgttgtcatgtaccctatccagaagaggtcttacagagatggtattgacaacttgttggtgcttctcattggaggaatcccaattgccatgccaactgtgctgtctgttaccatggctattgggtctcaccgcttgtcccaacaaggagccatcacgaagagg

SEQ ID NO: 162557 - DNA, 156 bp, Glycine max
ctaacctacctctttttcttctctctcaacaacttcaccttcttcctcctcgatcatgtctcacttcaagggcaagtaccatgatgagcttatcgccaatgctgcgtacattggcactcctggaaagggtattcttgctgctgatgacgtcaacag

SEQ ID NO: 162558 - DNA, 240 bp, Glycine max
tgaatatgaatcatggagagaaagcttggggcataatgcacatggttggaagataaagtactataagggtttgggtacaagtactcctcaggaagggagagagtactttcaagatcttgataagcataagaaagactttgtttgggatgatgagcaagatggaggtgcaattgagatggcattcagtaagaaaaaagctgaggataggaagatctggattcgtaattttgagcctggcac

SEQ ID NO: 162559 - DNA, 244 bp, Glycine max
cctaagaaccctttctggttcaaccgcgatcgcttcgttctctctgctgggcacgggtgcatgcttcagtacgcgcttctgcacctcgctgggttcgatagcgtcaaggaagaggatttgagggaatttcgccaatgggggagcagaactccgggacaccctgagaattttgagactccgggaattgaagttacaacaggtcctcttggtcaggggattgccaatgctgttggtttggcccttg

SEQ ID NO: 162560 - DNA, 240 bp, Glycine max
ctatcttctctcggagccgctattatccccagacgccaccgccgcagcaccagaagaagaagaagagtgatggctgagtacgacctaactccgcggatggcgccgaatctcgacaggcaccttgtgttccctctcctggagttcctgcaggagcggcagctctacgacgacgaccacatcctgaaggcgaagatcgaccttctcaacaacaccaacatggttgactacgctatggacatc

SEQ ID NO: 162561 - DNA, 239 bp, Glycine max
gcgttgcttgcttgagtgatttgactcgtgtcgagtgtattgtatttagtttaagcgtggctgatcgagtgagtatcagaatcaattcaattttgagctagtcatgaagatccactgcgacgtgtgtaacaagcaccaggcctctttcttctgcaccgccgacgaagctgccctatgcgacggctgcgaccaccgcgtccaccacgccaacaagctcgcctccaaacaccaacgcttct

SEQ ID NO: 162562 - DNA, 241 bp, Glycine max
atattttgctagtcattataacttccttcacatttggtttcattgagaaagttgtttcaaatccaagttctcgtccatatgcggcaattttcaactttggtgactctctaagtgacaccggcaatttccttgcatctggtgccattttattcccagttatcggaaagcttccttatggtcaaaccttttttaaacgtgcaaccggtcgttgctcagatggacgactaatgattgattttat

SEQ ID NO: 162563 - DNA, 240 bp, Glycine max
gaagaacgaatcgaaaaaagagagatcatggcgatggcaaacttggctcgacggaagggttacgccgtcgttttgtcgtcgaggtcgtcgctttgtctgacaaggtggagggggttcgcgtccggatctgacgaaaacgacgtcgtggtcatcggcggcggtcccggcggctacgtggcggccattaaagcggcgcactgggtctgaaaaccacttgcatcgggaaacgtggcactctcg

SEQ ID NO: 162564 - DNA, 244 bp, Glycine max
attcaaacaaaacaacttatgatagtaaaagggtagaattcgaaaaaaaaaaattgcagatattacaaagaagaagaaatgctcgattaactcgtaaatcacattcttttttaaaatttttcatgaaaaggatatacagagatatatttctatatatcagttgtattccgaggatcaatatacaactttttcttgaattaacaaaaaatttttaaataaatccatttacgataatgaagcaaat

SEQ ID NO: 162565 - DNA, 245 bp, Glycine max
gcaccacttcaggcgtggacatgcccggagcagattaccagctcacgaagcttctcggcctgaggccctccgtgaagcgcctcatgatgtatcagcagggctgcttcgccggcgggaccgtactccgcctcgcgaaggacctcgccgagaacaacaagggtgcgagggtgctcgttgtctgctccgagataaccgccgtgacgttccgcggcccctcggacacgcacctcgactcgctcgtggga

SEQ ID NO: 162566 - DNA, 246 bp, Glycine max
gcatattgaagagcaaggaagaaagtggagaagataagggtctaaattgggaagatgcaaaaaagatgccaataacttcaagggtcattcaggagactctaagagttgcttcaattttgtcttttactttcagagaagcagtagaggatgttgaataccaagggtatcttattccaaaagggtggaaagtgctacctctatttaggaacatacaccacagtccagacaacttcaaggagccagaaa

SEQ ID NO: 162567 - DNA, 241 bp, Glycine max
gaagaatagagagtgatggagtgcgtattcggattggtgggtaatggattcgcgatcgtggtggctgattcatcggcggtgcacagcatcctcgtccacaagtccaacgaggacaagatcatgcttctcgattcccacaaactcatcgccgctagcggcgagcccggagacagggttcaattcactgagtacattcagaaaaacgtcgccttgtatcagttccgtaacggcatccctctca

SEQ ID NO: 162568 - DNA, 238 bp, Glycine max
cttcttctcttgcggctagggtttcagcgcagttgcttctacatttaaggaagatgggtaaggaaatggttcacatcagtattgtggtcattggccatgtcgactctgggacatccactaccactggtcacctgatttacaagcttgcaggcattgacaagcgcgttattgagaggtttgacaaggtagctgctgagatgagcatgaggtctttcaagtatgcctgggtgctggacaa

SEQ ID NO: 162569 - DNA, 239 bp, Glycine max
cgagatttaaaacccgaaaatctactattggatgaaaatgagaatttgaaggtttctgactttgggttgagtgcacttgctgaatctaagtgccaagatggattgctccatactacatgtggtacccctgcctatgttgctccggaagtgataaacagaaagggctatgatgggattaaagctgatatatggtcatgtggggtaatcttgtatgttctattggctggtcatcttccatt

SEQ ID NO: 162570 - DNA, 243 bp, Glycine max
cggctcgagcttggttgagagtgagtttggaacttgaaagaaactagaatggccactttagacgaacgcccttctgcgaaaaggtggcttcctctcgaagctaaccctgacgtcatgaaccagttcctttggggtcttggccttccagtggatgaggcagagtgcggtgatgtgtttggcttagatgaagagcttctggaaatggttcccaagccagttctcgccgtgctttttctttatcca

SEQ ID NO: 162571 - DNA, 249 bp, Glycine max
gcacatcttttccttagacatggaaagggaatcctccaatcacaaggaaggttattaaggaaaatgaggtttatgccatcttccttgtcatcaaattctcatcggcctgctgactgcccttgttgactcaaggcataagaaggcttttaaggttaaaaactgcattactgacattgatcctgagcgggaaaaagaagaaaaagagaaggctgaaagtcaaaatatccgtgctaatgtgcttcttaaccg

SEQ ID NO: 162572 - DNA, 241 bp, Glycine max
gcagcgcattatagcacaccacacaaaaaagcaaaacagagagaacaactgttactcacacacgccatgggtaaatgaatggtttttgagcaacagcagttaaaagagaaaagggattcagcgaagatgacatcggttggtgtggcaccaacttcgggtttgagagaagccagtgggcatggagcagcagctgcggatagattgccagaggagatgaacgatatgaaaattagggatgata

SEQ ID NO: 162573 - DNA, 239 bp, Glycine max
gcatggactccgccgggtacacctccgacatcaacgaggattccaaaacgacaggtttaatgggcatgaaccgaggatccctctcgttggtaacacaaatgtcgcttccgaaattttcctactgcatctctggggaggacgctctcggtgtcctcctccttggcgacgggacggacgccccgtcgccactgcagtacacccctttagtgacggcgacaacctcgtcgccgtatttcaac

SEQ ID NO: 162574 - DNA, 238 bp, Glycine max
caaaaacgaagtactactacaagggaagaaaaacttagctactaaggaaggatcaaagagaatggctcaagcaatggcatcaatggctggcttgcgtggttcctctcaggctgtgttggaaggtagccttcaggtgagtggctccacacgcttgaatgtggggagtggaagcagggtggcctcagtcacacgtgcagggttcacagttagagcacaacaacaacaagtgagtggtgag

SEQ ID NO: 162575 - DNA, 238 bp, Glycine max
tcgatgttgatcgtatagctgccggattaccttgtggtagtgaagggtttctattaatgtatgctcggtggaaaaagctggaaagggacctgtataacgaacgcaaggagcgctttgacatcacccaaattcctgatgtctatgattcatgcaaatatgatctcttgcataatgcccatcttaatctagaaggattggatgagcttttcaaggttgctcaggcacttgctgatggtgt

SEQ ID NO: 162576 - DNA, 240 bp, Glycine max
cctagtaatgccgccgatggggaggaagcgaaaggtagcacccaaatcttctctatccaccgagccacctctcaagcagcaacaaccaaaacccgaaaatccccctcaagaatacgaagaagtcgaagaggaagttgaggaacaagaggtagaggaagaggtcgaagaggaagaagaagtagaagaggtggacgaagaagaacatgacgaggtagaagaagaggaagaagatgacgacgt

SEQ ID NO: 162577 - DNA, 234 bp, Glycine max
tgtttataaaggagttccaaaggattacaccggcgaagatgttactgttgataacttttttgctgctttacttggaaataagtcagcactgactggtggcagtgggaaggttgtggacagtggtcctgatgatcatatatttgtatactatactgaccatggaggtcctggggtgctcgggatgcctgctggtccttacttatacgcggatgatctgattgaagtcttgaagaa

SEQ ID NO: 162578 - DNA, 237 bp, Glycine max
gggatgcttcagattgggcaaccaatggaggcaaatatagagtatattacaagtatgcaccctatgttgctgagttctctgacctggtcctgcatggttgtgcagttgatcccattgagcatgtggccaagtgtgacagtgccctaggttctgaagaagttccctctggtgtcacccaagtacaaataaccaaaatgagaaacttcaggttgaggcacatgacatattcttactgct

SEQ ID NO: 162579 - DNA, 242 bp, Glycine max
ggctaatctctcactcttgttcttcggtctcctcctattctccgctgccgtagccaccgtcgaacgaatcgacgatgaagacaaccttctgatccgtcaagtggtgccggacgcggaggaccaccacctgctcaacgcggagcaccacttctccgccttcaagacaaagttcgccaagacctacgccacgcaggaggagcacgaccaccgcttccgtatcttcaagaacaacttgctccgcg

SEQ ID NO: 162580 - DNA, 246 bp, Glycine max
ggctatcctctttgttcctaagagggcaccttttgacctctttgacacaaggaagaagcctaacaatattaagctttatgtccgccgtgtctttatcatggacaactgtgaggagttgattcctgagtatttgggctttgtcaagggtattgtggattccgaagatctaccactcaacatttcaagagaaatgttgcaacagaacaagatcttgaaggtcatcagaaagaacttggttaagaagtg

SEQ ID NO: 162581 - DNA, 243 bp, Glycine max
caccaacttcgtccccggaaagtgagcgtcaaagaacgaaatgacttttgagagtttttagatttgtgtttggtgaagtacttcagataatgtgaattatcttgtgtatccgaatccaacttaatgttacttgctttttacaaaactcaagtgtcaatttgttctctcattttatacttctaagcttttgacgccacattgaatttgaactctaattgaactaaaaaatgtttcccttcaaaa

SEQ ID NO: 162582 - DNA, 237 bp, Glycine max
ttttgacctgagttaatgatcattaatgctgttttgaaattctacttttccattacttttcttgattagttattcctctttatgcagcttctttactccttgggatgaatgatgttagatctgacagggcaagaaggcaaagatcagatagccctttctcctttcctcgccaaaaacgttcagtaaggccccgcttgtacctttccattgattcagattcagagtaaaggtcatacc

SEQ ID NO: 162583 - DNA, 234 bp, Glycine max
aaaccccgttttcagtgacatcgagatcgatcgaacatggatgaggagtacgatgtgatcgtgttgggcacgggtctcaaggagtgcattctcagcggtcttctctccgtcgatggcctcaaggttctgcacatggacaggaatgactattacggaggagaatccacttcgctcaatcttattcagctttggaagagattcaggggagatgacaagcctcctccacatttggga

SEQ ID NO: 162584 - DNA, 240 bp, Glycine max
atccaatgattgttgcttgtcactgtgagggaaggggatggaagttttgggcagattctaatttgaaaggaaaattctgggggcgttctatccagttagatcctgtgggtgtcctcactctacagtttgaggatggtgcaacatttcagtggagcaaggtcaccacttcgatttacaatatcatactaggtaaaatttattgtgaccactacggtaccatgcacatcaagggcagtggca

SEQ ID NO: 162585 - DNA, 278 bp, Glycine max
gggactgataggagtaggcttgtattttttgatcggaggagtgagtgtgagttggaggatttgcttcgagcttcggcggagatgttagggaagggtagtttagggacggtttatagggcggtgcttgatgatgggtgcacggtggcggtgaagaggctcaaggatgcgaacccttgcgcgaggcatgagtttgagcagtacatggatgtgattgggaagcttaagcatcctaatgttgtgagactcaaagcttattactatgccaaggaggaaaagct

SEQ ID NO: 162586 - DNA, 266 bp, Glycine max
agagacaccactacacatcagcatattccttacagagagaacaagaatttgactggaactgctaggtatgctagtatgcatactcatctaggaattgagcaaagccgtagggatgatttagaatcacttggatatgttcttatgtactttttaagaggaagtctaccttggcagggattgaaagctggtactaagaagcagaagtatgagaagattagtgagaagaaagtttctacttctattgagtctctctgtcgtggctatcc

SEQ ID NO: 162587 - DNA, 266 bp, Glycine max
aaacacatcacgcaggagcagcagctggcagatctgtctcggcagattcttagggggctggcgtacctgcaccggcggcacatcgtccacagggacatcaagccgtcgaatctgcttataaactcgcggaagcaggtgaagatcgctgacttcggggtgggtcggatactgaatcagacgatggatccgtgcaattcgtcggtggggacgaacgcctacatgagtccggagaggatcaatacggacataaacgacgggcaatacga

SEQ ID NO: 162588 - DNA, 268 bp, Glycine max
ctgctacttcctactccaaccgcacttctgctccgcaattatcatgggcaaggtcaagatcggaatcaacggatttggaagaattggccgtttggtagccagagtggctctgcagagagacgatgttgaactcgttgccgttaacgaccctttcatcaccaccgattacatgacatacatgtttaaatacgacagtgttcatggacactggaagcatcacgatgtcaccgttaaggacgagaagacccttctcttcggtgacaagcca

SEQ ID NO: 162589 - DNA, 267 bp, Glycine max
cttcttctcttgcggctagggttttagcgcagttcttctagatataaggaagatgggtaaggaaaaggttcacatcagtattgtggtcattggccatgtcgactctgggaaatccactaccactggtcacctgatttacaagcttggaggcattgacaagcgtgttattgagaggtttgagaaggaagctgctgagatgaacaagaggtctttcaagtatgcctgggtgctggacaaacttaaggctgagcgtgaaagaggaatcac

SEQ ID NO: 162590 - DNA, 269 bp, Glycine max
attttcatagcattttcagaggaaaatggcgggtacggtttcgacttgtttcttcttcgtgtttcttctttctctccttcttccttttcagatctccgctgaggaatcctcggagaaggagttcgtactcacattggatcactctaactttcacgacactgtcagcaagcacgatttcatcctcgtcgattcctacgccccatggtgtggtcactgtaagaagcttgctccggagtatgagaaagctgcttctatcttgagtagtcatg

SEQ ID NO: 162591 - DNA, 265 bp, Glycine max
gaggaattcatttgaattagggttactctttttcttcgtttcatcatggacgctcagagagctctactcgacgaactcatgggtgcagcgcgcaacttgacggaggaagagaggaaggggtacaaggaagtgagttgggacgataaggaagtgtgtggattctacatggtgcgcttttgccctcacgatctctttgtcaacacgcgcagtgatctcggaccttgccccagaatacatgacccgaagttgaaagaaagttttgaga

SEQ ID NO: 162592 - DNA, 270 bp, Glycine max
gtatgtaacatgtacagtcatacaagtggtgtaaataatttattcatagcctaagagcttgtatctcaattggggtgtgacatttatgacggaagtttgatcctccgccaagctaccccttcttgtaccaaggtatatatattgaaaaaatcaatctacataaaatgtaatatatcattattttactcctccaaaaaaaaaaaaaaaaaaaaaaaaaaaaaaaaaaaaaaaaaaaaagaaaaaaaaaaaaaaaaaaaggggggggccccc

SEQ ID NO: 162593 - DNA, 269 bp, Glycine max
aaacttgtagcctctcatggaggctgataatggaactacactcaatgtgttgatgaaagcatggactaaaaacgagcttagagagtggaagccctgtgccaacgcaagtcttcctgaaacagaattgccaaagtcaaatgggttccttataattgaagcaaatggtggattgaatcagcaacgcttgtcgatatgtgatgcagttgctgtggctggactactaaatgcaactcttcttattcctatatttcatttaaatagtgtatggc

SEQ ID NO: 162594 - DNA, 267 bp, Glycine max
ggagtgctggctatttttcatttgctttgtgggatgctcgtacaagagagctactgaaagttttcaattcagatggacagattgagaatcggttggatgtgtcctcaattcaagacttttcagtggagcttatttcaagttcaaggaaagacaaaacacaaagttccattgggttctttcagcgttcacgtaatgccataatgggggcagcagatgctgttcgtcgagttgcagcaaagggaggctttggggatgataaccggagaa

SEQ ID NO: 162595 - DNA, 265 bp, Glycine max
gaaaaaaaggtgaaatatagagtgaagaagaagaaatagagggttttggtgtttgaatcgtgaaaatgttcagaaaccagtacgacacggacgtgacgacatggagcccggcggggaggctgttccaggtggagtacgcgatggaggcggtgaagcagggctcggcggcgatagggctccgatccaagacccacgtggtcctcgcatgcgtcaacaaggctaactccgaactctcatcgcaccagaagaagatcttcaaggtcga

SEQ ID NO: 162596 - DNA, 267 bp, Glycine max
ccttctgaggttaaagcaaaaaacaaagagagagagagagagaaaatgatgaagccatcgatgctcagatctctccactccgccgccacccgcggcgcctctcatctcttccgccgtgggtacgcctccgagccggtgccggagcgcaaggtagccgttctcggcgccgccggcgaggatcgggcagcctctctcccttctcatgaagctcaatcccctcgtttcgagcctctccctttacgatatcgccggaactcccggcgtcgc

SEQ ID NO: 162597 - DNA, 266 bp, Glycine max
gggagttcctaaggattacgttggtgaagatgttactgttgacaacttttttgctgctatacttggaaataagtcagctcttactggtggcagtgggaaggttgtggatagtggccccaatgatcatatatttatatactactctgatcatggcggtccgggagtgctagggatgcctactaatccatacatgtatgcatccgatctgattgaagtcttgaagaagaagcatgcttctggaacttataaaagcctagtattttatc

SEQ ID NO: 162598 - DNA, 274 bp, Glycine max
ggcctagccagctagcgcttcttctctcgcattccgtggagatctagtgctgccaaacctcgctgaaaattagggtttcgtttcggaggtagacgaagatgttcggaagggcaccgaagaaaagcgacagcaccaggtactacgaaatcctcggcgtttcgaagaacgcttcgccggatgatttaaagaaggcttacaagaaagccgccattaagaaccaccctgacaaaggcggtgatcctgagaagttcaaagagcttgctcaagcctatga

SEQ ID NO: 162599 - DNA, 264 bp, Glycine max
aacgggcgtgtggttcgtgttggtctttcagtacgacggcagactatggaggacgtcattatctggccactggcgagctcgtgagccttagcgagcaacagcttgtggattgcgatcacgtgtgtgatccagaagaatatggagcgtgtgactcagactgtcatggtgggttgattaacaacgcatttgagtacatacttcagtctgtgggagtacagaaagatgaggactatccatacaccgggagagatggcacctgcaaat

SEQ ID NO: 162600 - DNA, 267 bp, Glycine max
aacatagcatagagtgagaagtgagaagagaaaaatggcaatctccatacccagtagacaacttttcatagatggagagtggaaagtccctcttctcaacaatcggtttccgatcatcaaccccgctactgaagacatcatagggcatattccagccgctactaaggaagatgttgaccttgcggtggatgctgctaaaagagccttttcccataacaaaggcaaagattggtcttcagctcctggctctgttcgtgctcgctatct

SEQ ID NO: 162601 - DNA, 264 bp, Glycine max
ctggatctattgaagaagagtgccgcagttgcagagatcacgagatagttctcaacaaatgagaacacttttacagtaggagggtcttttgctgttgaccctctgacacaggtcaaagcaaggctcaacaatcatggaaagctcggggccctcctgcagcacgagatcataccaaagtcagtgtttactgtttctggtgagattgacaccaaggccctggataaaaatcccaggtttggattggcaattgcgctcaaaccttga

SEQ ID NO: 162602 - DNA, 264 bp, Glycine max
gttccatggagcaaaggagctgtttttgtctgaccattatgatgttcagagtgctcacacaattgaagggaagtgtgttgtgcactcttttaagaactataccaagcttgagaatgtaggtgctgaggattactatactaggtttgagtacaaggctgctactggggctttcacgcctgaccgtgttgctgtgtattgcaagtgcgagatgccttataacccagatgacctcatggtgcagtgtgaggggtgcaaggattggta

SEQ ID NO: 162603 - DNA, 262 bp, Glycine max
tcggaacaagcaaactagtcaatctgaaggttatgggtttattgagtttaatagtcgtgctggagctgagagaattctccaaacatataatggggctattatgccgaatggggggcagagtttcaggttgaattgggcaacttttagtgccggtgagaggtcgcgtcaagatgattctcctgattacaccatatttgttggtgacttggctgcagatgttactgattatcttcttcaggagacattcagggctcgttacaac

SEQ ID NO: 162604 - DNA, 255 bp, Glycine max
gacaagcagctcaagaaaaatctgcaaagaataaaacaagaggaggaaatgcaacttacttgttgatataaacttcagacagagcgagttgttgtaaagctagccttgttgcagccatggccacccacgcggctctagcttctacaaggatccccactaacaccaagttcccatccaaggcttcacactctttcccaacccaatgcgcctcaaagagacttgaggtgacagaattctctgggctaagatccactt

SEQ ID NO: 162605 - DNA, 262 bp, Glycine max
ctttagccgaggtcaggaggagcactagctaagttcacaatttcaaaatggctaggggactaaagaagcatttgaaaaggctcaatgctcctaagcattggatgcttgacaaactgggtggtgcatttgcgcctaaaccctcatctggaccacacaaatcgagggagtgcctccccctcattcttattctgcgaaaccggctgaagtatgctctgacataccgtgaagtcattgctattctgatgcagcgccatgttcttgt

SEQ ID NO: 162606 - DNA, 265 bp, Glycine max
ctctgtttctgtctctgtgtttgcggctgaggattccgaacgagcgaccttcttcgtttctcgcaaagtttaagtcatcatgggtaaggaaaagactcacatcaacattgtcgtcattggacatgtcgactctgggaagtcaactaccactggtcatttgatctacaagcttggaggtattgacaagcgtgtgattgagaggttcgagaaggaggctgctgagatgaacaagaggtcattcaagtatgcctgggtgcttgacaag

SEQ ID NO: 162607 - DNA, 273 bp, Glycine max
gaagcaggaacaagcagcaatggcgccgaatgtacacacgcaaggttagcagaaaccccgaattgataaggggaattggaaagtactcgaggtcgcagatgtaccacaagaggggcatttgggctatcaaggccaaaaatggtggcgttttacctcgccacgaccctagacccaaacctgaaacacccgctgaaaaaccacccaaattttaccctgctgatgatatcaagaagccccttgtcaacaagcacacacccaaacccgctaagctca

SEQ ID NO: 162608 - DNA, 262 bp, Glycine max
gaggacttcgacatgccgacggcggaggcaatgggcgaggacttcgacttcgccggcgccaccggcggcgacctcgacggcagcagcagcaaccccatcttgaaggtcggcgaggagaaggagattggaaaagagggtttgaagaagacactacttaaagaaggtgaaggatgggacactcctgaagttggtgacgaagttcaagttcactatactgggacgttgcttgatggcactaagtttgattccagcagagataggg

SEQ ID NO: 162609 - DNA, 263 bp, Glycine max
cggcaactcacaaaattggaggtaaaggagatagcagacataatgttgaatgaggtgtttgatagactgaaagccaaggaaattgatctctcagtaacagaaagatttagggagagggtggttgacgaaggatataatccgagttatggggctaggcctctaagaagagctataatgcgacttttggaggacagcatggctgagaagatgcttgctagagagattaaagagggtgactcagttatagttgatgctgactccga

SEQ ID NO: 162610 - DNA, 262 bp, Glycine max
gcttttccctcgttgaaatgaaaatgggttcttctttgtggactttgtgtctaattttggcttcactagcctcttctgcattctgtgcctttccacggaggccagtggatgttccattcggcagaaactacgttcccacttgggcttttgatcacatcaaatacttcaatggaggttctgagattcaacttcatcttgacaagtacactggtactggcttccagtccaaagggtcatacttgtttggtcacttcagcatgaa

SEQ ID NO: 162611 - DNA, 262 bp, Glycine max
gaagcaatgaatggtgttagacatcttcttgttcggaaatctatcccaaatggactagtttttgttggagaattgccttatggatctaacagtggtttcagcccaaaaatggatcacctggtgtgtttcctacctggtacacttgcaattggtgccactaaaggccttacaaagaaacaggcaatggaaaacaatatgcttaactttgaagacctagaaaatttgaagctagcagaagatctgactaaaacatgctttgaaa

SEQ ID NO: 162612 - DNA, 264 bp, Glycine max
gaagaaatcaaccgaaggttccaatcaattccatatgtggctgcactcttcagtgcaatgctttggatcttttatgcctatgtgaagaccggagaaacgcttcttatcaccatcaatgcattcggttgcgtgattgagacaatttaccttgccgtatttatcacttactgcccgaagaaagctaggatgtcgacattgaggatgattgttttgttaaattttgggggattttgcacaattgtcctcttaacccacctactagca

SEQ ID NO: 162613 - DNA, 278 bp, Glycine max
attcagctcgataaaaacacaaaaagacccacagagaggaacatggcatgtccagcaatggcaaatgggaacggctcattgaagaacttgaagctaaatgacaccaagggaaagaccatcacttgcaaagctgccgtggtatatggtcctggagagccctttgtggtggaaaacattcttgttcatcctcctcagaaaatggaggttcgaatcaagatcctctacacttccatttgtcacaccgatcttagcgcatggcgaggcgtgaacgaggctca

SEQ ID NO: 162614 - DNA, 258 bp, Glycine max
  unsure (1)..(258): unsure at all n locations
gggatgcttcaggttgggcaagcaatggtggcaaatatagagcacattgaacgtggggtccctgnggtgctgagttctctgacctggtcctgcatggttgtgcagttgatcccattgagcatgtggccaagtgtgacagtgccctaggttctgaagaatttccctctggtgtcacccaagtacagatgaccaaaatgagaaacttcaggttgaggcacatgacatattcttactgctatgacactgttagatacaaag

SEQ ID NO: 162615 - DNA, 262 bp, Glycine max
cacgagctagccggaaagggagaggaagacttcgaagttgtgctaatatccagcgaccgcgaccaagcatcctttgactcctactacagcaccatgccttggttagccttacctttcggtgacccagaaatcaagaacctcgttagacactacaacgtgcaagggattccctggttggtgatcataggccctgatggtaaaacaataaccgtacatggcaggagtttgataaacttgtaccaagaaaatgcgtaccctttca

SEQ ID NO: 162616 - DNA, 260 bp, Glycine max
gaatgattaacggtaacggaagaaacgagatctcgtcgtttcagtcgttatctgctcagctctggagagcggtgacacgtgcgaggaaattcaacgacccggccaaaacgtcgacgtttcggatggcggtgaattgccgccaccgtctggagccgaagatggacgcgttctacttcggcaatgcgattcagagcatcccgacggtcgcgaccgtcggagacattctctcgcgcgatctgcgcttctgcgcagatcttctg

SEQ ID NO: 162617 - DNA, 258 bp, Glycine max
ggagaagaagaagggtgagctaaagtcaattttccttcctttcctttccactagtcacataatcccgctagtggacatggccagactcttcgccttgcacgacgtcgacgtcaccatcatcaccaccgcacataacgccaccgttttccaaaagtccatcgatttagatgcgagtcgcggtcgccccatcagaacgcacgttgtcaacttccccgccgcacaagtgggtctccccgttgggatcgaagccttcaacgt

SEQ ID NO: 162618 - DNA, 256 bp, Glycine max
ccaggtggaacatgttagagctgagaggaatttgctggctgaagttgccagtcattgcattgtgaaactttactactcatttcaggatgctgagtacttgtatttaattatggagtatctgcctgggggtgatattatgactttgctgatgagggaagacacgttaagtgaaaatgttgctagattttacattgcacaaagtgttctggccatagaatctattcacaaacacaactacattcacagagatattaaa

SEQ ID NO: 162619 - DNA, 252 bp, Glycine max
tacaaacatggcaatgaagaagttcttgtgggttgttctgtccctttctttggtccttggagtggccaatagctttgattttcacgacaaggatttggagtccgaggaaagcctgtgggacttgtacgagagatggaggagtcaccacacggtttcgcgaaccttggtgacaagcacaagcggtttaacgtgttcaaagcgaatgtgatgcatgtccataacaccaacaaaatggataagccttacaagctg

SEQ ID NO: 162620 - DNA, 256 bp, Glycine max
tagtactctcgttaatttttttgctaattgctaattgggcacaatggaaaagcttcatgctgtgtgcatcccatacccagcacaaggccacataaacccaatgctcaagctagcaaaactccttcatgttagaggcttccacatcacctttgttaacacagaatacaaccacaaacgccttctcaaatcaagaggttctgattccctcaatagtgtcccatcatttcaatttgaaaccatccctgatggtctctct

SEQ ID NO: 162621 - DNA, 260 bp, Glycine max
tatctctcttcgttttgttcttccttgcgctcctcctcgttcgttcgttctccctcgcgtagatcggcaatggcggagaccgagacgtttgctttccaggctgagatcaaccagctcctcagtctcatcatcaacaccttctactccaacaaggaaatcttccttcgtgaactcatcagcaacgcctctgatgctttggacaagattagatttgagagtttgacggacaagagcaagctcgatgctcagccagagttgtt

SEQ ID NO: 162622 - DNA, 264 bp, Glycine max
ggaaattccacctttgcttgaaggagatgggaagatagaggtatggcgaatcaatggaaatgccaagactgcattgccgaaggaggagattggtaaattttatagtggagattgctacattgtattgtacacctaccattctggtgagcggaaagaagactacttcgtgtgctgttggtttggcaaagacagtgttgaggaggaccaaacaacagctactaggttagccaatacaatgtctacctcattaaagggtagacctgt

SEQ ID NO: 162623 - DNA, 261 bp, Glycine max
gattgccactgtggaatgcttctgtctagctgttcatcaggctgtaaatgtgggagctcctgtctcaacaaaccatttcagaaccgtcctgtgaaaaaaatgaaattggtcaagaccgagaaatgtggttctggaattgtggcggatgaagatatcaagcttggggagtttgtcattgaatatgttggagaagtcattgatgacaaaacatgcgaggaaaggctttggaacatgaaacatagtggggaaacaaacttctac

SEQ ID NO: 162624 - DNA, 263 bp, Glycine max
caaagttgcaggtgcatggccaatacttggtcacctaccactattgagtggttcagagacacctgatagggttttgggtgctttggctgataagtatggacccatattcaccatcaactatggtgtcaaaaaggctttggtaatcagcaactgggaaattgctaaggaatgcttcaccaaaaacgacatcgtcgtttcgtctcgccccaagcttcttgccattgaactcatgtgctacaaccaagccatgtttgggtttgcac

SEQ ID NO: 162625 - DNA, 262 bp, Glycine max
agccgctattctactcgcaagcaaatcagaacaagagaagagaatggcaggagcagaggggctaaacagagaacagtacgtgtaccttgcgaagctgtcggagcaggcggagcggtacgaagagatggtggagttcatgcagaaggtggtggtggggtggacgccggcgtcggagctcacggtggaggagcgcaacctcctctcggtggcctacaagaacgtgatcgggtctctgcgtgccgcgtggcgcatcgtgtcctcc

SEQ ID NO: 162626 - DNA, 261 bp, Glycine max
ctcagctgtgcaagttgatgtttctgggaaccgcaaggctgttgttattcatgtcccttacagattaaggaaaggtttccgtaagattcatgtcaggcttgtcagggagcttgagaaaaagtttagtggcaaggatgtaatcttggttgccacccgaaggattttgaggccaccaaagaagggttctgctgctcagcgtcctcgtagtcgcactcttactgctgttcatgaagcaatgctggaggatgttgtattgcctgc

SEQ ID NO: 162627 - DNA, 266 bp, Glycine max
atggatcttcttgacatcgactccattgccgctgccataaagggttgttccggcgtaatccaccttgcatgtcctaacatcattggtcaagtcgaagatcccgagaaacagatattggaaccggcgataaaaggaacggttaatgtgttgaaggcggcgaaggaagcaggggtggagcgcgtggtggcgacttcatcgatttcgtcgattatgccaagtcctaattggccagctgataagattaagggagaagagtgttggacgga

SEQ ID NO: 162628 - DNA, 265 bp, Glycine max
tgctgttcaaatacagtggtgcctcagctgctctcactgtagacccttcactacacttgtcaagagcttctagcattgtgatgttgattgcatatgttgtctacattgtctttcaactgtggacacacagggagttatttgaagaagaagatgacggtaaagatggcgaggatggttcagaagaacaagctgtgattggattatggagtggcattgcttggttggttggaatgactgtattcattgctgtgttgtctgaatatgt

SEQ ID NO: 162629 - DNA, 260 bp, Glycine max
ttcatttctacatccctggctctgttccgtcgatgacgatggcgtttagggtgcgaaaccctgacctccgctttctcattcttctctctctcttgtccatcacttccgccaaggtcttcttcgaggagcgtttcgatgacggatggggaaatcgttgggttaaatcagattggaaaaaagatgagaacctggctggggagtggaaccacacctctggccaatggaatggagacgctaacgacaaaggtattcaaaccagt

SEQ ID NO: 162630 - DNA, 258 bp, Glycine max
caagccccaccttcatatggttctagatggcaaaaccaagttcagctgatggtaggactagaagttctgtgcagatctttatagtagttggtctgtgctgtttcttctatattttaggtgcgtggcagagaagtggtttcggaaagggagatagcatagcattggagattactaagactaacacagaatgtaatatagttccaaatttaagttttgattcccaccatggtggagaagttaacgaatttgatgaagctg

SEQ ID NO: 162631 - DNA, 262 bp, Glycine max
ctcagtgaaagagaatccgaggcgaagagaagagaaaaattaagatggaggggaaggagcaggatgtgtcgctgggagcgaacaagttcccggagagacagccgattgggacggcggcgcagagccaagacgacggcaaggactaccaggagccggcgccggcgccactggttgacccgacggagtttacgtcatggtccttttacagagcagggatagcagagtttgtggccacttttctgtttctatacatcactgtctt

SEQ ID NO: 162632 - DNA, 263 bp, Glycine max
ctctgcgagagagaaagagagaggcggtgatgtcttcaattagattcctatggatcctgatggtgtctttgacggcatcatgcgcgttaagccaaccgcagaagctatcggcgtacgatgttctgatggagtacgggttcccggtgggtcttcttcccaagggagccatagggtattcgctcaacagagacagcggcgagttcgcagtgtatttccaaggagcgtgcagcttcgacatagagtcctacacgctcaagtacaaa

SEQ ID NO: 162633 - DNA, 266 bp, Glycine max
caccaacttccgctacttcctactccaaccactttcttttttcccgcagtcatgggcaaggtcaagatcggaatcaacggatttggaagaattggccgtttggtggccagggtggctctgcagagagacgatgttgaactcgttgccgttaacgatcctttcattaccaccgattacatgacatacatgtttaaatacgacagtgttcacgggcactggaagcatcacgatgtcaccgttaaggatgagaagacccttctcttcgg

SEQ ID NO: 162634 - DNA, 266 bp, Glycine max
aaggggcgtgtggttcgtgttggtctttcagtacgacgggagcgttggaaggagctcattatctggccactggtgagctcgtgagccttagcgagcaacagcttgtggattgcgatcacgtgtgtgatccagaagaatatggagcgtgtgactcaggctgtaatggtgggttgatgaacaacgcatttgagtacatacttcagtctgggggagtacagaaagaaaaggactatccatacaccgggagagatggcacctgcaaattt

SEQ ID NO: 162635 - DNA, 264 bp, Glycine max
cgatcaccaaagtttggtgagtgctataaagcaggtcgatgtggtaatttctactgtaggacacctgcagctagctgatcaagataagatcatttctgcaattaaagaagcaggaaatgttaagaagttctatccatctgagtttggaaatgatgtggaccggactcatgcagttgaaccagccaagtctgcatttgcaacaaaggccaaagttcgccgagctattgaggctgaaggaattcccttcacttatgtgtcaagcaa

SEQ ID NO: 162636 - DNA, 258 bp, Glycine max
ctcaacttctgctcttccaactcctacaacgcttttctctgcactcatgggcaaggtcaagatcggaatcaacggatttggaagaattggccgtttggttgacagagtcgctctgcaaagagacgatgttgaactcgttgccgttaacgaccctttcattaccaccgattacatgacatacatgtttaaatacgacagtgttcacggacactggaagcatcacgatgtcaccgttaaggacgagaagacccttctctt

SEQ ID NO: 162637 - DNA, 257 bp, Glycine max
atcgttcgcaaatgcctcgcccgcaacgaacagcagtgttccttcgttgagcatcgcaactacaaaattgtatatcgtcgctacgcctctttgtttttcctcgttggagttgacgatgatgagaatgagctggctattttggaatttatacatctcttggttgaaaccatggatcgtcattttggcaatgtgtgcgagctagatattatgttccatttagaaaaggcgcattttatgttggaggaaatggtcatgaa

SEQ ID NO: 162638 - DNA, 261 bp, Glycine max
ggtagctgcaagagatgaaaaaattggcctgcaacattttgtgcccataaggccgttgggttgtggagacactggcagtgttcatttggtggagctcaaaggtacgggtgaactatatgcaatgaaggcaatggaaaagtccgtaatgctaaatcgtaataaggttcaccgatcatgcattgagagagagattatatcattattggatcatccttttcttccaacactatacacctcatttcagactcctacacatgtatg

SEQ ID NO: 162639 - DNA, 265 bp, Glycine max
tcaagcgtggttttgttgcatccaactccaaggatgaccctgccaaggaagctgccaacttcacatctcaagtcattatcatgaaccaccctggccagattggaaatggatacgcaccggtgcttgattgccacacttctcacattgctgtcaagttttctgaaatcttgaccaagattgacaggcgatctggtaaggagcttgagaaggagcccaaatttttgaagaatggtgatgcaggtatggttaagatgattccaaccaa

SEQ ID NO: 162640 - DNA, 261 bp, Glycine max
gaagaaagaagcaaatggcaaactttccagttgttgacatggggaagcttaacaccgaagagagactcgcagccatggagattataaaagatgcctgtgagaactggggtttctttgagttggtgaaccatgggatatccattgagcttatggacacagtggagaagctcacaaaagagcattacaagaagactatggagcaaaggttcaaagaaatggtgaccagcaaaggtcttgagtcagttcagtcagaaatcaatg

SEQ ID NO: 162641 - DNA, 260 bp, Glycine max
gtaaaccctaacaataatggagttgtggaacgtggtgtttgtgtgttgtgttttatgttacagtttttgtcacactgcggaggctatcgttaagctacgaggcaatgaaacaataccagcattgattttgttcggggattcgatagttgacacaggaagtaacaataacctaataacggggcttaagtgcaattttcctccttatgggagggatttcgagggtgggataccaacaggaagattcagcaatggcaaggtcc

SEQ ID NO: 162642 - DNA, 256 bp, Glycine max
tgaatttagcgatcctcgggatgctgatgatgctagatatagcttggatggtcgtgatgttgaaggaagtcgtatcattgtggaatttgccaaggggggtcctcgtggttcccgggaaaacttgggtcggggtctacctcctggatctggacgatgctttaactgtggcattgatggtcattgggcccgagattgcaaagctggggattggaagaacaagtgttaccgttgtggggaaagaggtcatatagaaaag

SEQ ID NO: 162643 - DNA, 260 bp, Glycine max
cgccaatatgaccaccgacgacgtcgtcagagcttctcgtcttctcgacaacgagattcgcatcctgcaaagaagagttgcagaggaccaatttggagttggaatcgtacaaggacaagatcaaggagaatcaggagaagattaagctcaataagcagttgccctacctcgttgggaacatcgttgagatattggaaatgaacccagaagacgaagctgaagaagatggtgccatattgatcttgactcacaaaggaagg

SEQ ID NO: 162644 - DNA, 256 bp, Glycine max
ggttcagctgtgcctcaaatcaggttgcgcaggttctgctaacactgccatactctttctctcagctgggaatgctctctggcatcatattccaagtcttctatggaataatgggaagttggacagcttatctgattagcattctgtacatcgagtacaggaccagaaaagagaaagagagtgtcagcttcaaaaaccatgtcattcagtggtttgaagtgttggaaggtttactgggtccatactggaaagccat

SEQ ID NO: 162645 - DNA, 259 bp, Glycine max
ctcttcttccccaccatcacaccaatcaaacctcactctccctttctcccctgaccctctccctgccatggtcatgggagcctttggccacttcgaaccggtctccaaatgcagcaccgagaaccggtctaaccaaaccgtggcctcggacttggacggcaccctcctggtgtcccccagcgcatttccttactacatgctggtcgccatcgaagccggcagcttcctccgtggccttgtcctccttgcctccgtccct

SEQ ID NO: 162646 - DNA, 262 bp, Glycine max
gggcgccgacgtggttgaacaacagcaacgccgccacgctccgccagcagaatttcctccacctcgcagccggaatccgccgcgacggcggggcagcaaaacgacgacgttcgtgctatggatcggaaccggaccgagagcaactctgaagcggacgatttggcggaatacaaagcagatattttaggtcaccctctctacgaccagctcctatcggcgcacgtctcgtgcttgagaatcgccacgcccgttgaccagcttc

SEQ ID NO: 162647 - DNA, 260 bp, Glycine max
cgaggcgaagagaagagaaaaattaagatggaggggaaggagcaggatgtgtcgctgggagcgaacaagttcccggagagacagccgattgggacggcggcgcagagccaagacgacggcaaggactaccaggagccggcgccggcgccactggttgacccgacggagtttacgtcatggtccttttacagagcagggatagcagagtttgtggccacttttctgtttctatacatcactgtcttaaccgtcatgggagt

SEQ ID NO: 162648 - DNA, 259 bp, Glycine max; identical to SEQ ID NO: 153008

SEQ ID NO: 162649 - DNA, 257 bp, Glycine max
ttccaatatattccattctctctgtgtatttccctacctctcccttcaagatgcagatcttcgtcaagaccctcaccggcaagaccatcacccttgaggtggaaagctctgacaccatcgacaacgtcaaggccaagatccaggacaaggaaggaatccccccggaccagcaacgtctcattttcgccggaaagcaacttgaggacggccgtacccttgctgactacaacattcagaaggagagtactcttcacctc

SEQ ID NO: 162650 - DNA, 255 bp, Glycine max
catatacattttttagccttttgttagccccaaacacccacacgggcacacccctgcaggtacaaaagggggagttcacaacaaaaagaaaacaatgagaaaaccttgttgtgacaaggaaaacatcaataaaggtgcttggtccaagcaagaagaccaaaagctcattgactacatccaagtccatggtgaaggctgttggcgttccattcctaaagctgctgggctgcatcgttgtggcaaaagctgtaggat

SEQ ID NO: 162651 - DNA, 256 bp, Glycine max
atgaatttgaaggctacagagttgaggcttggtcttcccggattccaatcgcctgaaagggaaccggatcttttctctttaagctcaccaaagcttgatgagaagccactcttccctttgcttcctactaaagacgggatttgctcgtcggggcagaaagctgttgtttctggcaacaaaagaggttttgctgataccatggatgggttttctcaggggaagtttgctggtaatacagggatgaacgcggtgctat

SEQ ID NO: 162652 - DNA, 256 bp, Glycine max
ggcaactaagaaagaaagatgaagctgaaggtatatgcggaccgcatgtcccagccatcccgtgcggttctcatattttgcaaagtgaatggaatagattttgaggagatcaaagtcgatttatccaaacgtcagcagttatctcccgaattccgagcggttaaccctttaaggaaagtccctgctattgttgatggaaggttcaagctatttgagagtcatgctattctcatatatcttgcttctgcatttccag

SEQ ID NO: 162653 - DNA, 251 bp, Glycine max
ctcctctgtctctctctctccaccattgccatggatccttacaagctccggccatccagcgccttcaattctcccttctggactacaaattctggtgctcctgtttggaacaacaactcctctttaaccgttggagctagaggtccaattctgcttgaggattatcatcttgtggagaagcttgcaaactttgacagggaacgtatcccagaacgtgttgtccatgccaggggagctagtgcaaagggttt

SEQ ID NO: 162654 - DNA, 250 bp, Glycine max
attattattgtctgagaaattatcaataaaataaaacagagattgtatttgcatatctttgtaggttttgttagtaaacaaaagaaaaggaaacatgaaggacgcagatgtgtcaaggcagatccagcagatgatcaggttcatccgtcaagaggctgaagagaaagctaatgaaatatctgttgctgctgaagaggaattcaatattgagaaactgcaattgcttgaagctgaaaaaagaaagatcagg

SEQ ID NO: 162655 - DNA, 251 bp, Glycine max
ctcactttcttttcaaccagaactatgattaagctttttaaagtaaaggaaaaacagagagaactggcagaaaatgcgagtggcggaccacccgttaagaagcaaagtgccggcgagttgcgtcttcacaaagatataagcgagctgaatctaccaaaatcatgtaccatgcaattccccaatggcaaagatgacctgatgaactttgaagtttcaattcgacctgatgatggatattacttaggtggcac

SEQ ID NO: 162656 - DNA, 252 bp, Glycine max
cttcgaaacacactaaattctccttgctaccactctcattctcaacgatggaagctcctccagaaggttatcgtaggaacgttggtatctgtctcatgaacaatcacaaaaagattttcgcggcttcgaggctcgacattcccaatgcttggcaaatgcctcagggtggtattgatgaaggtgaggatccaagaaatgcagctatcagggagttacgagaagagacaggagttaattcagtagaagtgatcg

SEQ ID NO: 162657 - DNA, 248 bp, Glycine max
gtacaatgaagttgttagagtttgtagcttggagaaggacttggaaatgatggaacatggggaccagacagagattggagagcgcggaatcaacctaagtgggggtcagaagcagcgcatacagcttgccagggctgtgtatcaagactctgatatatatcttcttgatgatgtttttagtgctgttgatgcacacactggcactgaaatattcaaggaatgcgtgaggggggctctgaaaggcaaga

SEQ ID NO: 162658 - DNA, 248 bp, Glycine max
cagaagaaaactaccgtacccaagcctaccaacaaccacaccctctctacatcatcctacctctgattagctagggccacagcaccttcctcttcacttcgttcttcaggactctacaaatgagcaacgacaaggacacacttcaacgtggctgatctcactatcgctctcaacgaggacaatacaccacaccttgtcaatgctctcaagagcaagatacagagcttggctggacagcattctgatat

SEQ ID NO: 162659 - DNA, 257 bp, Glycine max
gaaagagatcacatagcagaatggcttctactcaatgtttcttgcaccaccatgctcttaccacccctgccagatccccatcacaacgcatcatggttagcaccaagcctaaccagcttgtttgcaaggcacagaagcaagaggatattgatgtcagcccaatctctcgccggttagctctaaccgtgctcattggtgctgctgctgttggctccaaagtccaacctgctgatgcagcttatggggaagctgccaat

SEQ ID NO: 162660 - DNA, 255 bp, Glycine max
caaacacatcacgcacgagcagcagctggcagatctgtctcggcagattcttagggggctggcgtacctgcaccggcggcacatcgtccacagggacatcaagccgtcgaatctgcttataaactcgcggaagcaggtgaagatcgctgacttcggggtgggtcggatactgaatcagacgatggatccgtgcaattcgtcggtggggacgatcgcctacatgagtccggagaggatcaatacggacataaacga

SEQ ID NO: 162661 - DNA, 257 bp, Glycine max
attttgttgaaattgctgtttcttcctctgagctccaactttcacctcagccaaatacacaacaaaatggggtttcagaagataagggtgggcaaccccatcgtcgaaatggatggggatgaaatgacccgagtgatttggaaactgataaaagataagcttactttcccttatttggagctggacattaagtactttgaccttggccttcttcatcgcgatgccactaatgatagagctactactgaaagcgctga

SEQ ID NO: 162662 - DNA, 258 bp, Glycine max
cgacaaaagcctttcacagtgagatagccctacaaatgtttcgtgaatctttgtttgctctctttctactttctgcattctcctcctcactcctacctttaaccactgctcaagattacgttctcgacacggacggtcacgcggttgaaaatcacggtacatactatttgctgccagcgaaatcaggaagcggcggtggtggaatagaggcagccgcaactggcaaagaaagttgcgctctcactgtagtgcaatctc

SEQ ID NO: 162663 - DNA, 256 bp, Glycine max
gtcaatccacgcctaattgagcgccttcaagtgttccctccaaagagcaagctagatcccacagtgtatggtgatcaaactagtacaacaaccaaagaacacttagagatcaaccttggtggactctctgtggaacaggcactgagtggtaacagatcgttcacattagatcaccatgatgcattcatcgcatatctgaggaagatcaatgacgttcccactgcaaagtctcatgccacaacgaccatccttttct

SEQ ID NO: 162664 - DNA, 254 bp, Glycine max
tgatgatgaagcgtcggttccttttggttctcttggttctgtacgtcacagtggagcagagtaagctactccaccacgtagaagcagatggtgggtttgtaaaaacaagaggagtgcagcttatgctgaatgggagtccctactatgctagtggcttcaatgcctattggcttatgcaccttgcctctgatccttcccacagaaacaaaatctcatcggtatttcaacaggcttcaaatcatggactcaacatt

SEQ ID NO: 162665 - DNA, 231 bp, Glycine max
cgcaagggaagtcggcaaaacggacccgcaacctcgggaaaaggactggctctgagggctgggcacgggggtcccagtcccgaacccgtcggctgtcggtggactgctcgagctgcttccgcggcgagagcgggtcgtcgcgtgccggtcgggggacggattgggaacgggcccttcggggcctctaccccgggcgtcgaacactcaactcagaactggtacggacaaggg

SEQ ID NO: 162666 - DNA, 256 bp, Glycine max
cagcaacagtcacaacaagccttaacgagacagagagtgaagttggtatgagggaagaagacaaggagttgcaacaacaagatcactccatgttcaacatcaagagcttcctctggcatggaggctctgtttgggacgcatggttcagctgtgcttcaaatcaagtggctcaagtgctgttgacactgccctattctttctctcaactgggcatgctatcaggaatcttgcttcagattttctatggaatcttggg

SEQ ID NO: 162667 - DNA, 254 bp, Glycine max
actccaagcaaggtccacaaagctgttgatgcatgcaagaatgttcttagaggcctgcatagcaacaaaactactgagagggaattggacagggctaaacggacccttcttatgagacatgaagctgaaattaagtcaaatgcctactggttaggattattagctcatttacaagcttcttctgttccaaggaaggacatatcatgtatcaaggatctaacatttctacatgaagttgccactactgaggatat

SEQ ID NO: 162668 - DNA, 257 bp, Glycine max
agaggaggagcgatctgaggtgaggagattaaaagagcaatgctagcacagggattcgaggacgaagagaaatggctcgccgaggggatcgccggcattcagcacaacgcactctcactgcatcgcgcagtggacgataacaatctcagagacgctctcaaatactccgcgcagatgctatccgagcttcgaacttgcaggctctcacctcacaaatactaccaactttatatgagagccttcgatgagctcaggag

SEQ ID NO: 162669 - DNA, 261 bp, Glycine max
cgtccccacaccagaaaccggcacggaacactatgacactgccttggcatatccagtgcagtcaccaggcgtgctaggaaaccaaccagacattgtcatggacagcttggctgtacatggccttggcctagtgcacccaaagaaggttttcaatttctacaacgagctccatgctcacttagcttcttgtggagtacatgtagtgaaggttgatgtgcagaacattactgagacccttggtgcgggacatggtggccgagt

SEQ ID NO: 162670 - DNA, 255 bp, Glycine max
atactttggcttggctttctgaattttggtttttcagtgctgagagctgaacaagaagatggggggtggaaatcaagaggcagtcaagcagctgcagaccctgatggaaaatgtggatgatgagcagctgaagaatacattccagattatgcaccacggttatcagacggaaacgttaatacggtttctcaaagctagggactggagtgttgccaaagcgcataaaacgtcaattgattgtttgaactggagggt

SEQ ID NO: 162671 - DNA, 254 bp, Glycine max
cgaaagttttgaatctctgtggatgtgttaaagctgcatctgacactgcgttacaggcaattgggcactactgcaatcagttacagtttttgaaccttgggtggtgtgaaaacgtcagtgatgttggagtgatgagtttagcatatggctgccctgatcttagaacacttgacttatgtggttgtgtccttacaacagatgacagtgcaattgtcttggcaaacagatgtcctcatctgaggtcccttgggctg

SEQ ID NO: 162672 - DNA, 252 bp, Glycine max
ttttcttgaaagatgatggcaccttaaagccattggccatcgaattaagtttgccacatcctaggggagatgagtttggtgccgttagtagagtcgtcttgcccgcagaccaaggtgctgaaagtacaatttggctaattgccaaggcatatgttgttgtcaatgactcctgctatcatcaactcatgagccactggttaaacactcatgctgtgattgaaccacttgtcatagcaacaaacaggcatctta

SEQ ID NO: 162673 - DNA, 248 bp, Glycine max
accacttttatatctatcctcttcctcctcttatctctcctcaccccgaccctcatttcctcttcccctgtccaagaccctgaatttgtggtccaagaagttcacaggaaaatcaatgcttctgtagctagaaggaatttggggtacttgtactgcgcaacagggaaccccattgatgattgctggaggtgcgacccaaactgggagaagaaccgccagaggctagcggattgtgcgattggtttcgg

SEQ ID NO: 162674 - DNA, 250 bp, Glycine max
tttgtacctcagttccaggttaacaccaaacaacacatatagtgcagattcataagcttccaaccatggaggatccaaatcaagctccagaagcgtcttctcagaagaaaatgggaagagggaagattgaaatcaaacggatcgagaacaccaccaataggcaagtcaccttctgcaagcgccgcaacggtttgctgaaaaaagcttatgaattatcagttctgtgtgatgctgaagttgcccttgttgt

SEQ ID NO: 162675 - DNA, 254 bp, Glycine max
ttttcacttccaaccagagaaaaactggatgaacgatcctaacggtcctatgtactacaagggatggtatcacttcttctaccaatacaacccgaacggtgcagtttggggtgacatagtttggagacacgcagtgtcaagggacatgatccactggcttcaccttccactagcaatggtggcagatcaatggtatgacatgcaaggtgtgtggacaggctcagccacgatcttaccaaacggtgaaatcatca

SEQ ID NO: 162676 - DNA, 247 bp, Glycine max
agtggccgcaacctcgccgcgcaggaactgtggtccgagcttgaccctttctctgacctccttggcttcgataccaccaccaccacaaccaaccaaccaccccttccagacaaaaaagtggtgtcatcatgtgagaagaagaagaagaaaagtgtgagtgcagaaaagaagagtggtgggcgagctcggaagaacgtgtacagaggaatcaggcaaaggccgtggggcaagtgggccgcggaaataa

SEQ ID NO: 162677 - DNA, 246 bp, Glycine max
ctcgtgcttcccgaggttgttgcttcgtaatttgtccgtcaagggaggaggcggataaggccgtcaatgcgtgtcacaataaaaggacgttacccggggcatctagtccattacaagtgaagtatgcagatggggacttggaaagattagaacacaaactcttcattggcatgcttccaaagaatgtttctgaagttgaaatatctgctcttttctccaagtatggaactataaaggatttacaaa

SEQ ID NO: 162678 - DNA, 247 bp, Glycine max
acgatcctcgatggcggcggcgtcgcggaggctccgggacctgcagtccgaggccgggaacaagatctgcgttgactgctcccagaagaacccgcagtgggcctccgtctcctacggcgtcttcatgtgcctcgaatgctccggcaagcaccgtggcctcggcgtccacatctccttcgtccgatcggtcaccatggactcctggtccgacatccagatcaagaaaatggaagccggcggcaacgac

SEQ ID NO: 162679 - DNA, 247 bp, Glycine max
tgaacatcaatggactcgcaagacaatcactcatcaatgcaggtggcattattgagcaatcatttctgcctgggccatttgctgtggagatgtcttcggcagtttacaaggggtgggttttcactgatcaagcccttcctgcggatcttatcaagagaggaatggcagtggaggatccatcctctccctatggccttcgccttgtgacagatgactacccttatgctgttgatggactagagatatg

SEQ ID NO: 162680 - DNA, 246 bp, Glycine max
cggttgctttgcttgctatcttgttggaggactttgtgttcaagagaagatggtaactagaattgtggatcttcgttcagacacagttacaaagccaactgaagcaatgagagctgctatggcaagtgctgaagttgatgacgatgttctaggctatgatccaactgcttttcgcttagaaacagagatggcaaagacaatgggcaaagaagctgctctttttgttccatctggcactatggggaa

SEQ ID NO: 162681 - DNA, 247 bp, Glycine max
ggttgatgaacattttcagttgttcagtttagtttgattcttttccatcatttgttagtatctttatctgatatgattctgcaacagaaaccacgagaacattccgcccgaaaaaaagtactccttctggaagtaagggagctcaaccttagaaaacacattgatgccacgttgggtagtggaaatctgagggaagcagtaaagctacctcctggggacgacttaaatgagtggctagctgtcaaca

SEQ ID NO: 162682 - DNA, 246 bp, Glycine max
  unsure (1)..(246): unsure at all n locations
agctctnttcaccctnttnttnttnttnttcttcttcactttgtaactttcgaatcttcttcnttncaccgcaatggccaccnccacgcttagccccgccgacgccgacaagctctccaacctcaaatcctccgtcgctgcattgagccaaatcagtganaatganaanaatggattcacaagcctcgttgctcgttacctcagtggcgaanaccagcatgttgagtggaggtgttgaagctcaat

SEQ ID NO: 162683 - DNA, 244 bp, Glycine max
acgccattgaattcttcttccatttctcttttttctgcatacccatttcgtttttcttcccaaatggccctttcttgctccaaagttttaagcttttatctctcgcccgttgtgggtggtggtgatgttccgaaaaagctcactttttcttcttttttgggtctttctaagggtgttggtggaagcaggagctcgagggtgtgtgctgcttcaaatgcacccgcaccactcgctggggtcatat

SEQ ID NO: 162684 - DNA, 248 bp, Glycine max
agatcctctgtactctcgaagctttcatcgttcaacatattctcaccatctcagtcatgggcctgctatcttgttttaggtctaccgtcctgagaaaatgttccaaaggaagctctggcatgtcaagattcctgtatacgaacaattttcaacgaaacttgatttcgtctggtggcaatgaatcgtattatgggtattttaacaggagatcatacacttcactttatatgggaactggaactgtgggt

SEQ ID NO: 162685 - DNA, 249 bp, Glycine max
attaattgcaagaatggcacttcgttgcttggtgatgtccctttctgttctcttcactcttggtcttgcgagagaaagccatgccagagacgaagatttttggcatgctgtttggccaaacactcccattccaagttcattgcgagatcttctaaagcctggccctgcaagtgttgaaatcgatgatcaacctatgcaaattgaagaaacacagtacccgaaaaccttcttctataaagaagaacttca

SEQ ID NO: 162686 - DNA, 270 bp, Glycine max
gagagtgagagagtgagtgagatagagagagacgcttcgcaaatctcaatcgaatctcagaaaaatgagagaaatcatcagcattcacataggtcaggccgggatccaggtcggaaactcctgctgggaactctactgcctcgaacatggcatccagcccgacggcatgatgccttctgactccaccttcggtgtagcccacgacgccttcaacaccttcttcagcgaaaccggatctggcaagcacgtcccccgtgctgtcttcgtcga

SEQ ID NO: 162687 - DNA, 266 bp, Glycine max
cgaacctttaatgatgtttagcacagatggcactggaacccttacgtcaccatctaaccagttgtgggatgataaggatcttgaattgcaggctgatgtggatcgctttgtggaggatggatctctagatgaaaatgttgagtcttttttgtcccatgatgacacggaccctagagatactgttggccgttgtatggatgtaagcaaaggcttcacattttctgatgtaaattctgtacgggcaagcacaagcaaagtttcctgtt

SEQ ID NO: 162688 - DNA, 268 bp, Glycine max
cgatgtagtgtcggagcagacatcggatagaagttttgggatgagaaacttcaagtacgtaaacactatcaaagcagcggttgagaaagaatgccccttcacagtgtcatgcgctgacattgttgctctttctgccagagatgccattgctttgttgggaggaccaagcattgaaatgaagacagggagaaaggacagcaaagaaagctatgcaatggaggtggaagacttgattccaaaccacaatgattccatgtcctcagtgctg

SEQ ID NO: 162689 - DNA, 265 bp, Glycine max
aaaagtagctctagtatatggtcaaatgaatgaaccgcccggagctcgtatgagagttggtttaactgccctgactatggcggaatattttcgagatgtcaatgaacaagatgtacttctatttatcgacaatatctttcgcttcgtccaagcaggatctgaagtatctgccttattgggtcgaatgccttctgctgtgggttatcaacccactcttagtactgaaatgggttctttacaagaaagaatcacttctaccaaagag

SEQ ID NO: 162690 - DNA, 270 bp, Glycine max
ggaatttgctagggagactttggcaggtgtcaacccatatagcatccaattggttaaggaatggcctttaacaagtaaactagacccgcaaatctatggtccacaggaatcaacaataactagggaagtcattgagccacaaattatcacttatggaacaattgaagaggcccttaaagaaaagaagttgttcatgctggattaccatgatttattcttaccatatgtaagcaaagtgagaaaaattaagggcaccacattatatggatc

SEQ ID NO: 162691 - DNA, 272 bp, Glycine max
gccgctcgcaagcaaaaagaaagaatcccaggcgaggagaaagatggaggggaaggagcaggatgtgtcgttgggagcgaacaagttccccgagagacagccgattgggacggcggcgcagagccaagacgacggcaaggactaccaggagccggcgccggcgccgctggttgacccgacggagtttacgtcatggtcgttttacagagcagggatagcagagtttgtggccacttttctgtttctctacatcaccgtcttaaccgttatgg

SEQ ID NO: 162692 - DNA, 271 bp, Glycine max
agtcgttgcacaagtgagagaggttgaaggcggcgtgagaatgttggacatcaacctattcagagaggagaagggccacaaccctgaactcatacgcgaatcccaacgccgtcgtttcgccagcgtcgaaatcgtcgacgaggtcatcaatctcgacaaagaatggcgaaaacgtcaattcgagttggaaaatctccgcaaggaattcaacaagatcaacaaggaagtctccaaactcaagcgtgctggggaggatgcttctaagttcatt

SEQ ID NO: 162693 - DNA, 276 bp, Glycine max
atcagtgcgagtactgactttgtgttattagatgagacaactttaatcaatatcattaagcatccagatctgacagtaacgtctgaagagaaagtccttaatgcaattctaatgtttggcatgaatgcaaaacagttgtttgggtgggaagtggtggatcagttaatggaaaattcaaaaccagaactcctttttggtgagaggcttcagttaatctatgacttgttgccatttgtgcgatttccactactacaatattccttacttgagaagttg

SEQ ID NO: 162694 - DNA, 276 bp, Glycine max
tgaaattgcctctttcaagaagcatctgagtgcttattatttgtaatatatatagtcactcaagcttctaggatttgtgccagctacatgaaaatgggaagcaacttcaggtttttgagtctttgcctcttggcattgattgcatcaacccatgctcaacttcagcttggtttttatgccaagagttgcccaaacgctgagcaaatcgttttgaaatttgtccatgaccatatccacaatgctccatcactagcagctgcattgataagaatgcac

SEQ ID NO: 162695 - DNA, 270 bp, Glycine max
caaagcaagaaaaaatggggtccgcaaaatttgctttgatattaacaattgttattatctcaatgtgtagcatttccttggcacaaaattcgcccaaagatttccttgacgcgcacaatgcagctcgtgcagaggttggtgttgagccactcgcatgggacgacaccgtcgcagcctacgctcagcaatatgcggactcgaggatcaaagagtgccaagtagtgcactctcaggggccttatggggagaacctggtggccagtcccggcg

SEQ ID NO: 162696 - DNA, 269 bp, Glycine max
  unsure (1)..(269): unsure at all n locations
cagactttatcatcaccagcaccttccaagagattgctggaagcaaggacactgttggacagtatgagagtcacactgccttcacccttccaggactttaccgtgttgttcacggtattgatccatttgatccaaagttcaacattgtctctcccggtgcagacatgggtatatacttcccatacactgaaactgagcgtaggttaacagaattccactctgacattgaancgcttctttacagctcagtggagaatgaggaacacata

SEQ ID NO: 162697 - DNA, 239 bp, Glycine max
tgggaaggggaagagtggagttgaagaggattgagaacaagatcaacaggcaagtgacctttgcaaaacgaaggaacgggcttttgaagaaagcttatgagctttccgttctgtgtgatgccgaggttgctctcatcatcttctccaatagaggaaagcagtacgagttttgcagcggttcaagcatgctcaaaacgctggagaggtaccagaaatgcaactatggagcgcctgaggac

SEQ ID NO: 162698 - DNA, 265 bp, Glycine max
caaggagtaggaggcgaagagcagcaaggtcatgtcggttgaaatcgaggatatccgcgatgctgaagagtccaaagctgttgatgagttccgtcaagctcttgtcttggacgagctactccctgagaagcacgatgattatcacatgttgctcagattcttgaaggccaggaaatttgaacttgagaaatctaagcaaatgtggtctgacatgcttcaatggaggaaggaatttggtgctgacaccatcagtgaggattttgaa

SEQ ID NO: 162699 - DNA, 264 bp, Glycine max
tgaatattagtggttaaggttgttggaggagctctaacaagagatatggagacacaaaattggttcgagagattgaagcctttcgcagctgtggtatcaatacagtttggatatgcagctatggatgttctatccaaggctgcaatgaacaaagggatgagcaattatgtgttcgtcgtttatcgccatgctgttgcattctttgttatggcccctttggcatggttttctgacaagacagtaaggccaaagatgacattctca

SEQ ID NO: 162700 - DNA, 267 bp, Glycine max
cagaaatttaagtgaggagctagagaatgatgatgaagtctgctatgtgtgcagtggtggttgtagcacttcttcttctggcggaggtggggcccatggctgaggctgtgacatgcaccccaacagagttgagtccgtgtcttccagcaatcacttccggtgctaaaccttccaatgcttgttgcacgaagctgaagcagcaaaaaccatgcttatgtggctacctcaaaaacgctagcttgaagcagtatgttaactctcctaatg

SEQ ID NO: 162701 - DNA, 270 bp, Glycine max
agggtttctctgtctgcttcttcactttctctcgtttcaatcgaaaccaaaacaaaaacatgggcagaaaattcttcgtcggtggcaactggaaatgcaatgggaccactgaggaggtaaagaagattgttactactttgaatgaggctaaagtccctggagaagatgtcgtagaagttgttgtgagccctccttttgtgttccttcctgttgtaaaaagtttgctgcgccctgatttccatgtttcggcacaaaactgttgggttcgca

SEQ ID NO: 162702 - DNA, 272 bp, Glycine max
ggtgtttttaggctttgcttttgctttggggctttcattaatggtcttattttttttaataaattgaccctttcttctgatattcaggcggaagtggtgctcttggtgcagggctcagtaaattcagcactgctgctgccattgaagaaccaattaaaccaccacttaaagttgaacacacccagctcttaattgatggaaaatttgttgatgctgctactggcaaaacttttccaacgttggaccccaggacaggagatgtgatttctcat

SEQ ID NO: 162703 - DNA, 274 bp, Glycine max
gtgcctcaccgcacggatacttgctgaaccgcgtcgccgagtacgccaccgccgcggctgctgctaccactcctccctctcctcctcctccggggaagaaggagctcggcggcggcgggaagatcaccgatgaattcaccgggcagggcgcgatcgggcaggtctgccaggtcattggtgccgtcgtcgatgtcagattcgacgagggtttgcctccgatcatgaccgcgctggaggttctggatcactcgtcgaggcttgtgttggaggtggc

SEQ ID NO: 162704 - DNA, 277 bp, Glycine max
acggaaaagagcatttacctatttatataacagatcgtatggtaggccataaattaggagaattttcacctactctaaatttccgaggacatgcgaaaaatgataatagatctcgtcgttaacgttaattttaacataaatttttaaatcgtaatttataactaaatattacaaaatggaattcttattaaaatgaaattcaaatcatttcttttataaaaaagaaaaaaattctttaattaaatatttaatgaaattaaatatttaaattaataaa

SEQ ID NO: 162705 - DNA, 267 bp, Glycine max
ctcaaatactcaactcattagcccttatcttgcccttattccacttcatgattctgatcctaaaactagggagaaaactcaagagaactgaattgtctctaaacataccccgaggaccatggaaactgcctattataggaaatttacaccagcttgttacatcgacaccacaccgaaaattaagagacctggccaaaatatacggacccatgatgcatctccaacttggggagatcttcacaatcgttgtttcctcagcagagtatg

SEQ ID NO: 162706 - DNA, 261 bp, Glycine max
cccaattttctagggttttattcattttccgatggcttctgcagatgttgagtaccgttgctttgtcggtgggctcgcttgggccactgacgaccatgccctcgagagagccttctctcagtacggcgaaatcgttgaaacgaaggtctgtttgttgcaggcatcacatctgatctcacacgattcggattcggaattttctcgatcccgtactgatctgtgatctctgatctgtttgcgttacttgatcttatgatactt

SEQ ID NO: 162707 - DNA, 263 bp, Glycine max
gcaaaaagtcatggtgacagcataagtgttgagacttgtcctcattacttagctttcacgtctgaagagataccaaatggggatactcgttttaagtgttccccacccattcgtgatgcatacaacaaagacaaattatgggaggctgtattagagggacacattgacctattaagtactgatcattcaccaactgtgcctgaactcaagcttatggaggagggtgacttcttaaaagcttgggggggcatatcatctttgca

SEQ ID NO: 162708 - DNA, 261 bp, Glycine max
ccgcgttgccattgctgaagctggtgcaatacctctccttgtcagtctcttgtctgtgcctgactcccgcactcaagaacatgctgtgacagcgctcctgaatctttccatatacgaaaataacaaaggaagtattgtttcttcaggagcagttccaggtatagttcatgtgctgaagaagggaagcatggaagctcgggaaaatgcagctgcaacacttttcagcctttcagttatagatgaaaacaaggttacaattgg

SEQ ID NO: 162709 - DNA, 260 bp, Glycine max
ggcctgcatatgctgtggagtatgattatttacctgctcatcaatgtgctaggtctctaatgacaaagaaaatacaaggattgttcttctctggtcagataaatggaactacaggctatgaagaagctgcggcccagggtattatttctggtatcaatgctgctagacatgcagacggtaagccagttattgttcttgagagggagagcagttatataggaacattaattgatgatctagtaaccaaggacctgcgagag

SEQ ID NO: 162710 - DNA, 257 bp, Glycine max
gttgcattatcacaaacacctcgtccctcacaatgcatctagcaatggcggccaacgctgtcgtttcaccgtcgccgttccgacctcagccctttctccggtcatccttctccggcgtctccgtcaagctcactccccaatccataacgctttcacgctccaagcccctcaccgtcttcgccgccaccaagaaggccgtcgccgtcctcaaggggacctccgccgtcgaaggcgtcgccactctcatccaagaagac

SEQ ID NO: 162711 - DNA, 265 bp, Glycine max
tgaaattgcgcaagacttcaagaccgatttgaggttccagagtcacgctgttcttgcgcttcaggaagctgcggaggcttacttggtgggtttgtttgaggacaccaacttgtgtgcgattcacgccaagagggtgaccatcatgccaaaggacattcaactcgcacgccgcatccgtggagaacgtgcttaggctaataataagagtaataacgtagttgctgctgctttttttcgttttgcaatacatttcttgttttagggt

SEQ ID NO: 162712 - DNA, 271 bp, Glycine max
gtgggttagccgtggtagtcaacgcagacctaatagcagaagcactccattcaggatgtgcattcttcaacagagccaccaccccggaagcatgagggcaggccatcgacgttcccgacatcaaattgtattcagtatttaaaaccacatttgggccaattcgggccgcgggcacatccggaatccaagcggccaaaatggacgagccaggggccacgacgtcgggcttcaatacccacgggcactccgaagacgggcctctggaactgta

SEQ ID NO: 162713 - DNA, 273 bp, Glycine max
gtggtgccttatcgctgtggttttcatcgtcttccttctcttatatttcttttgtttttttgccttcgccgaacgccgaaacaatggccggcaaaggagagggtcctgctatcggaatcgatctcggaaccacctactcttgtgtcggtgtgtggcaacatgaccgagttgaaatcatcgccaacgaccaagggatcagaacgacgccgtcttacgtcggcttcactgataccgagcgtctcatcggtgatgcggctaagaaccaagtcgcca

SEQ ID NO: 162714 - DNA, 263 bp, Glycine max
gttgcttgcaggtccttatcatggaggtgtatggaaagtaagagttgagctgccagatgcttatccttataaatctccttccataggctttatcaataagatctatcacccaaatgttgatgagatgtaaaaatattgtattttttaatattgctgcgaaactctatactttgagtagtttgccttgtgttaattttaagtattgtgtgcgatcatattggattataataatttcaggtcaggatcagtttgtcttgatgtta

SEQ ID NO: 162715 - DNA, 261 bp, Glycine max
gctgcgactctctttccttccctctttttccgaatctgaatcgaaatggcttcggagactgagacgtttgcttttcaggccgagatcaaccagctcctcagtctaatcatcaacaccttccacagaacatacgaggggtttcttcgtgagctcatcagcgatgcctctgatgctttggacaagattcggtttgagagtgttacagacaagagcgagcttgatgctcgcggggagttgttcattcacattattcctgacaag

SEQ ID NO: 162716 - DNA, 259 bp, Glycine max
gacaaaaacacgttcagaaccgcttcatcaataacatgccgaccgaaactctgtagtaagaggacattttctgcatcagacacacacatagatagaaaatacaacaaaaatgttggtgtccatgtccgtgtgcggccaagatgagattgagttgtcaagagatggcagccactacagtctctcaactggaatactaccttcccttggagccaaaagtaaccgcagactcaagctcaaacccttcattatatctccctat

SEQ ID NO: 162717 - DNA, 260 bp, Glycine max
cgcgtcgctgctccgtaccagtttcactgcataaatttgagagaaaactctgcaaacatgttggtttatcaggacctccttacaggtgatgagcttctctcggactccttccgttacaatgaaattgagaatggaatgctgtgggaagttgaggggaagtgggttgttaagggagcagttgatgttgacattggtgcaaacccttctgctgagggtggagaagatgagggagtcgatgacgcagctgttaaggttgttga

SEQ ID NO: 162718 - DNA, 263 bp, Glycine max
ggctgccacaaagcatgtaaccaatacgaatgccgtgaccttcggttatgatcttggaataaccggaggagtgacttctatggaaccatttctcatcaaattctttcccggtgtttataaacaaatgcaagatgatgttggccatagaagccaatattgcaaattagacaacgagctccttacactcttcacctcttccttgtatcttgctgcattagtagcttctttctttgcttccaccactacaaggattctgggacgca

SEQ ID NO: 162719 - DNA, 268 bp, Glycine max
ctttgatttcggttccgaagggacaaccaacgaccaccctctcttctgactcacttctcgaaccttccaaacatggaacgcatcgttggcggcaagtacaagctcggccgcaagatcggaagtggatccttcggcgaaatctacctcgcgacgcatattaataccttcgagatcgtcgccgtcaagatcgagaatagtaaaacaaaacatccacaactgctttacgaggcaaagctatacaatattcttcaaggaggaagtggcattc

SEQ ID NO: 162720 - DNA, 260 bp, Glycine max
ggaaattcaaggaagctctgaaagattttcagcaggtcaagaaaatgtgtccatatgatcctgatgcaacaaagaaattgaaggaatgtgaaaaagcagtaatgaaacttaaatttgaagaagcgattgctgcaccagagtctgaaaggcgttcaatagctgaatccatagatttccgaacaatagatgttgagccacaatattcaggagcaagaatagagggggatgctgttactttggattttgtgaaaaaaatgata

SEQ ID NO: 162721 - DNA, 258 bp, Glycine max
aatgggttcttctttgtggactttgtgtctaattttggcttcactagcctcttctgcattctgtgcctttccacggaggccagtggatgttccattcggcagaaactacgttcccacttgggcttttgatcacatcaaatacttcaatggaggttctgagattcaacttcatcttgacaagtacactggtactggcttccagtccaaagggtcatacttgtttggtcacttcagcatgaacataaagatggttcctgg

SEQ ID NO: 162722 - DNA, 260 bp, Glycine max
cagaaccatatttttcttgaaaagtgatggaactttgacgccattggccattgagttaagtaagccgcatcctcaaggtgaagaatatggtcctgttagcgaagtctacgtgccttcgagcgaaggagtttgaagcttatatttggttattggcaaaggcttatgttgttgtaaatgactcgtgctaccatcaactcgttagccattggctaaacactcatgcggttgttgagccattcgtcatagcaacaaataggcat

SEQ ID NO: 162723 - DNA, 260 bp, Glycine max
cacacatcattttctacgactggaatgctctaaacattcttaatattcccacactatacggaccatgttctcttcctcaacttccttctttctttgccttctcctcttctctgtaaccttttgtcatgttttgggggataaagtatttacaggaacatatggagtaaactacggtaggatagcagacaatctaccttctcctgagagtgtggttactcttctgaaagctgcaaagattaggaacatcagaatatatgatg

SEQ ID NO: 162724 - DNA, 263 bp, Glycine max
ctcaacccgcctcaatattcctaaactcatacgagcttgtgatgaacaacagcattggaaagaactgacctatttgtatatacaatatgatgagtttgataatgctgcaactaccatcatgaaccattcacctgaagcatgggatcacatgcaattcaaagatgttgttgttaaagttgctaatgtggagttgtattacaaggctgttcacttctacttggaagagcatccagatcttatcaatgatgttctgaacgtccttg

SEQ ID NO: 162725 - DNA, 266 bp, Glycine max
ccccaagcagcatgaagattaaggtggttgctccacctgagagaaagtacagtgtctggattggtggctctatcttggcttctctcagcactttccaacagatgtggattgcaaaggctgagtacgatgaggctggtccttcaattgtacacaggaaatgcttctaaatgctgcacagcctacagggtagcttggtgaaagaaattaaaatacggcgttctcgttttatatgatgaaaaaatgtgttgttaaatcagataactgag

SEQ ID NO: 162726 - DNA, 261 bp, Glycine max
ggcccacaacctcatcgttcactacggcctccaccgccgcatgcaggtcaaccgccccttccccgcggcggaggccgacatcggccgcttccacgccgacgactacgtcgacttcctctccaccgtctcgccgcaaatcctctccgagaattcccactcccactaccgtcagctcaagcgcttcaacgtcggcgaggactgccccgtcttcgacggcctcttcgacttctgccgcgcctccgccggcggctccatcggcgt

SEQ ID NO: 162727 - DNA, 255 bp, Glycine max
tttttacttcccctatggctcgtcactccttgctcttagccctcctcctcttcgccgccgtggccaccgccgcgatggcggtggccgcgtccgacgccgacgacatcctgatccgtcaggtggtgccagattctggcgaagcgaagaggaggacaacctgctgaacgccgagcaccacttcgcgagcttcaaggccaagttcgccaagacctacgccaccaaggaggagcacgatcatcgcttcggcgtcttcaa

SEQ ID NO: 162728 - DNA, 257 bp, Glycine max
cggctcgagcactcgcaagcaaaaagaaagaatcccaggcgaggagaaagatggaggggaaggagcaggatgtgtcgttgggagcgaacaagttccccgagagacagccgattgggacggcggcgcagagccaagacgacggcaaggactaccaggagccggcgccggcgccgctggttgacccgacggagtttacgtcatggtcgttttacagagcagggatagcagagtttgtggccacttttctgtttctctac

SEQ ID NO: 162729 - DNA, 254 bp, Glycine max
gcttcagtgtagtctgtaatcatgtcaggcaagtatatcatttctgctattcttggatcatttggagttgcatgggtttgtgattattatgtttcagacaaaaagctatttggaggttctacccctggaactattacaaacaatgagtgggcagaagagactgacaaaaaattgcaggcatggcctcgtactgccggtccaccagtggtcatgaatcccataagtcgccaaaatttcattgtcaagtctcgcgc

SEQ ID NO: 162730 - DNA, 256 bp, Glycine max
gtcgctccgcaccagtttcaccgcacgaatatcttgttgtttggagcgatccgagaaaaactctgtaaacatgttggtttaccaggacctccttacaggtgatgagcttctctctgactccttccgttacaaggaaattgagaatggaatgctgtgggaagttgaggggaagtgggttgttaaaggagcagttgatgtagacattggtgcaaacccttctgctgagggtggaggagaagatgagggagttgatgat

SEQ ID NO: 162731 - DNA, 257 bp, Glycine max
ctcgagccgctcgagccgttcggaagcagacacagatggctcgtacgaagcaaaccgctcgtacgtccacaagcggaaaggctcctaggaagcagcttgcaaccaaggctgcacgtaagtctgcaccaactactggtggtgtgaagaagccccaccgttatcgtcctggtaccgttgctcttcgtgagattaggaaataccagacgagtaccgagcttttgatccggaagctccccttccagaggctggttcgtgaa

SEQ ID NO: 162732 - DNA, 124 bp, Glycine max
cgataattgtgatcattattcacgagttgtgctgattagtgaaataaagtcaactgctttcatttcaaaaaaaaaaaaaaaaaaaaaaaaaaaaaaaaaaaaaaaaaaaaaaaaaaaaaaagag

SEQ ID NO: 162733 - DNA, 258 bp, Glycine max
gagaaagcacagttttcgtgccctccttcgtttcctgtgggagcaaagtctttaatacacacaatgctggacccaaatcctgaacgtcgtataaccattgagcagataaggaatgatgagtggtttcaaaaggaatatgttccggtcagtctcatcgagtatgaagatgtaaatctggatgatgtaaatgctgcatttgacaatgatgaggatcagaggactaaccagcaatgtgagaatgacgacatgggtcctcta

SEQ ID NO: 162734 - DNA, 260 bp, Glycine max
caataacatagcatagagtgagaagtgagaagagaaaaatggcaatctccatacccagtagacaacttttcatagatggagagtggaaagtccctcttctcaacaatcggtttccgatcatcaaccccgctactgaagacatcatagggcatattccagccgctactaaggaagatgttgaccttgcggtggatgctgctaaaagagccttttcccataacaaaggcaaagattggtcttcagctcctggctctgttcgt

SEQ ID NO: 162735 - DNA, 253 bp, Glycine max
gaactggagaaggcattacagaagtctgccttagtgggtttattgcttttgatgttcctcctccaaagggtccattgtggattcttggcgatgttttcatgagggcatatcacaccgtctttgactatggaatctccaagttggctttgccgaagcagtctaattacgctttctggaggattttctttgtaaatttgttaagcgtgttgtaaataagctgttataattgtagctctggttactttttgaaacc

SEQ ID NO: 162736 - DNA, 262 bp, Glycine max
gtcgaggtaggatgcagaggcgcggagaagacgtggttcaccctctcaaggtctctttggaggacctttatcttggaacttccaagaagctctccctctccagaaatgttatatgctccaagtgcagtggcaagggttctagtctggtgcttcgatgaagtgtgctggttgtcaaggaactggtatgaaggtttctataagacatcttggcccatccatgattcagcagatgcagcatgcctgcaatgaatgtaagggtact

SEQ ID NO: 162737 - DNA, 243 bp, Glycine max
ctcatacaaattctccacacgatacttctgggctgttgatggagagggtagatgagggtccccttgatgatcaatatgcttcggctatcagaaactgtgatcctgagggtcctctgatgctctagtctcaaagatgattccagcatctgacaagggcagattttttgcttttggtcgtgtattctctggcagagtttcaactggtttgaaggtgaggattatgggaccaaattatgtccctgg

SEQ ID NO: 162738 - DNA, 243 bp, Glycine max
atcagcccaaggaagctgattttccaaagcaaaatgtccccgaggtggcacctgaagccaaaaagagagcagcagaatcaaagtcaagaggggatgaggcttttaaaagaaatgactatcatatgctatagattcttatacccaagcaattgatctgaaccccactgatgctactttgctatccaatagaagtctttgttggattaagttgggtcaagctgagcatgctttagctgatgcaaa

SEQ ID NO: 162739 - DNA, 244 bp, Glycine max
gctcgaggcgacgatgatctgtatcgacaattctgaatggatgcgtaacggagattactctccttctcgatttcaagctcaagcagacgctgtcaatctcatatgcggtgctaaaacgcagtctaatccggaaaatacagtgggagttctcacaatggctgggaaaggcgttcgtgttttggttacccctaccagtgatctgggcaagatcttagcctgcatgcatggactagatataggtggt

SEQ ID NO: 162740 - DNA, 242 bp, Glycine max
tcaagacaaaatgactgcaaaggaaagtgcaacctggcttgccatcatcaaccaagaggaagccttggctagagagctttaccctgactattgccctccattttcctctgctggaggtaatggatcttggtgatcaatgattgcagcgagtatgatgttgatggggccgaagaagagctgaactttgatgtggaggaccggaagcctgaccatcttcttccatcaaacctcgggatggagag

SEQ ID NO: 162741 - DNA, 255 bp, Glycine max
ggagattgtcagagcatcaggtaagtttgaacttctagaccgtttgctcccaaaacttcgcagagctggtcacagagtcctccttttctcacaaatgactcgacttatggacactctcgaagtctatttgcgacttcatgattttaagtatcttagacttgatggctcaacaaaaactgaggaaagaggcaatcttctacgaaaatttaatgctcctgactccccgtacttcatgtttcttttgagcacccgtgc

SEQ ID NO: 162742 - DNA, 242 bp, Glycine max
tgctgatgcgtgtggtggggttggcattcttggcattgcatgggcctttggtggcatgatcttcatccttgtctactgcactgctgggatttcaggaggtcacattaacccagcagtgacatttggctgtttttggctcgcaaggtgtctttgatccgagccatcatgtacatggtggctcagtgcttgggtgctatctgtggagttggtttagttaaggctttccaaaagtcttacttcaa

SEQ ID NO: 162743 - DNA, 243 bp, Glycine max
ggcttggttagtcaagaaccagcactatttgcaacaacaatagctggaaatattttatttggaaaagaagatgcagacatggataaagtcatacaagctgccatggctgcaaatgctcattcttcattcaaggattacctgatggttatcaaactcaggttggagaaggtggcacccaactttcagggggccaaaagcaaagaattgccatagcaagagcagtgctaagaaacccaaaagtat

SEQ ID NO: 162744 - DNA, 241 bp, Glycine max
gtagatatctccaaatgagcctcagttggcatttaattctcggattgccttttgtcttaacatgcacaatgaggcagttcgagcactgcgttttccaccaaacacacagaaggaaaaggaaagtgtgagaagaggagagagaggcatcaacaagagcaagaattggctaaacatatcgcagaggaagatgatgatgacttttgataatgatttgctctttttatcttaccagtttgttgtc

SEQ ID NO: 162745 - DNA, 240 bp, Glycine max
gtgtaccaagaagaaactggaagaagcatggaatgttttgcataaaatggtggcttctggcattcagcctgatgttgtaacatacaacaccatggcaagggcatatgctcagaatggtgagacaagaaggctgaaaggctaatattgaaaatgccgtacaacatagtgaaacctaatgaacgaacttgtggcatcataataagtggttattgcaaggaaggcaatatgccagaagccttg

SEQ ID NO: 162746 - DNA, 253 bp, Glycine max
ccctcaaaccctagccagggtcgcaattcacttgcggctgcagtagagaagcactcttcgttcttcgactgtctacgatctgctttctctgaattgtgaaaatgtcgctcggagaaactgcttgttcatacgcagctctcatccttcatgaagatggaattagtgtaactgctgacaagatcagcaccttgttgaaaactgcaaaggttccagtagactcttattggccaaccttgtttgctaaacttgctga

SEQ ID NO: 162747 - DNA, 238 bp, Glycine max
ccaaaatgccagggcttgtctgaggttgagggctgcctgcgagaagctgaagaaggtgcttagtgctaatccggaggcccctttgaacattgagtgcttaatggatgagaaggatgtcagaggtttatcaagcgtgatgagtttgagcaactaagtcttccaattttggaacgggtgaagggacctttggagaaggcacttgcagaggcaggtcttacagtcgaaaatgtgcacatgg

SEQ ID NO: 162748 - DNA, 239 bp, Glycine max
ggccattaaggtgggaggagccaaccacagccatgccactcaagaccttcatgattcaattgctgctggtaactatcctgagtggaaactgttcgttcagacaatagatcctgagcatgaagcaaatttgactttgaccctcttgatgttactaagacttggcctgaggacattatacccttgcagcctgttggtcgcttggtcctgaataaaaacatagataatttctttgctgagaa

SEQ ID NO: 162749 - DNA, 240 bp, Glycine max
tgacttttggcccagagcaaaggcatccggaggaagaggcacttcttccaccaccacagaataaagaagcagggaaatctcagctggattctgatgaagtgatactgagcgagttggaagatagaagcctaaggaagtggacatgctccctgcatcagagaggcagaaacgtatcgcgcacttgcaacaaagactgctccaagcagctgcagaaggagcagtgagggttaagagaaggag

SEQ ID NO: 162750 - DNA, 237 bp, Glycine max
tctgactcctatagtttcctctgctaattccatatccccgttttccttcactcttgaaccccgattcatttccaccagcacaagaagcatggctgcaatatcaataccttctcacatgaaagcttggacatactctgagtatggaaaatccaaggaagttctcaagtttaatcagagtgtggctttgcctgaggtgaaggaagaccaggtcctcatcaaggtcgctgctgcttccct

SEQ ID NO: 162751 - DNA, 238 bp, Glycine max
attccatcatcaatggagaacaccgagggatccggatctgcgacgaacggggtgctggctccgccgcgcaaggtggcattgataaccggaattaccggacaagacggttcgtacctgacggattcctcctggacaaggggtacgaggtgcacggcctgatccgccgctcgtcgaacttcaacacgcagcgcatcgagcacatatacgtggatccccacaacgcccacaatgcccgcat

SEQ ID NO: 162752 - DNA, 253 bp, Glycine max
gaaaaatatggagggaaaagaagaggacgtaagagttggagccaacaggtacggagagaggcagccaatagggaccgctgctcaggctaaagactacagagagccaccgtcggcgcctctcttcgaaccggagagttgtcatcgtggtctttctatagggctggcatagcagagtttgtggccactttcttgttcctctacatcacagtgctgactgtgatgggtgtgttcaaatctaagagcaagtgttcca

SEQ ID NO: 162753 - DNA, 242 bp, Glycine max
cgcaggggagagcttggaaaatggattgctgcagttgctgttgtattacgccttttccttccaagacacttccctgattggctggaattgcctggtgctctgattcttcttatcgttgtagctccttctctaattgcaagcacctttagagacaacattgttggggtggtagtgtgcctcatcattgcatgttatttgctgcaagaacacattcgggcttctggtggtttcagaaactcctt

SEQ ID NO: 162754 - DNA, 240 bp, Glycine max
tcggtggtggaagttgcttgaacgctggcttttacactcgcgctagccctcaatatgtaagggaagcggggtgggatggaagggtagtgaatgagtcgtacgaatgggtggagaagatagtgcatttgagccacaattgaagcagtggcagtcatctgtgcgggatggactaatagagataggtgtggtgcctaataatggcttcacttatgaccatattgatgggactaaagtaggggg

SEQ ID NO: 162755 - DNA, 240 bp, Glycine max
caggaatcacattagctgagtatttcagagatatgggttataatgtcagtatgatggcagattctacatctagatgggcagaagcattgcgtgaaatctctggacgactggcagaaatgcctgcagatagtggatatcctgcataccttgctgcacgtttagcctcgttctatgaacgtgctgggaaggtaaaatgtcttggaggccctgaacgtacaggtagcgtaactattgttggtg

SEQ ID NO: 162756 - DNA, 248 bp, Glycine max
agcacaaccaacacctccacagcctctcctacctcccggagccatggccgccgccgactcctccgccgctccatcgcaccagttgtcgcagagggagacggacatccagatgatgctcgccgccgacgttcacctcggcaccaaaaactgcgactttcagatggaacgctacgtcttcaagcgcagaaccgatggtatttacataattaaccttggcaagacatgggagaagctccagctcgctgcta

SEQ ID NO: 162757 - DNA, 244 bp, Glycine max
acatattcttcagttagctcccccaacctatacacttcaccaccacaccacaaccctaccctctctctctgtcatggtcattggaggagccttccctcgtttcgacccaatcaccaaatgtacacccaagaccgctccaaccagaccatcgcctcggacctcgatggcaccctccttgtctcccggagtgccttcccctactacttcctcgtcgccctcgaagccggcagcgtcttccgagccc

SEQ ID NO: 162758 - DNA, 237 bp, Glycine max
tccatcttgactgtggacaaggttggaagaaaagttttattccttgaaggtggtgttcaaatgttgatttgccagattgctactggagtcatgattgctatgaagttcggggtgagtggcaaggctcgttttcctccggagaagccaaccttattttgttctttatatgtgcatttgttgctgcatttgcatggtcttggggtccactagggtggttggtgcctagtgaaatatgcc

SEQ ID NO: 162759 - DNA, 236 bp, Glycine max
tatttttcttcctcagtagtgtcatttacgcttctcttctctgcagcaactatgcctaaccctaaggtcttcttcgacatgaccatcggcggtcaatctgctggccgcatcgtgatggagtctacgccgacgtcactccccgcaccgccgagaacttccgcgcgctttgcaccggcgagaagggcgtagggcggagcggcaagcccctccactacaagggctcgtccttccaccgc

SEQ ID NO: 162760 - DNA, 238 bp, Glycine max
cgggactttcactagccgcagcagcctcaggaggagaataaggatgtctcacaggaagttcgagcacccaaggcacgggtcactgggatttctccccaggaagcgtgctgctcgtcacagggaaaagtgaaggcattccccaaggatgacccatccaaggcacccaagctcactgcattcttgggttacaaggctggtatgactcacattgttagagaggtcgagaagccaggatcaa

SEQ ID NO: 162761 - DNA, 242 bp, Glycine max
ctcgagccgctcgagccgttcggaagcagacacagatggctcgtacgaagcaaaccgctcgtaagtccacaggaggaaaggctcctaggaagcagcttgcaaccaaggctgcacgtaagtctgcaccaactactggtggtgtgaagaagccccaccgttatcgtcctggtaccgttgctcttcgtgagattaggaaataccagaagagtaccgagcttttgatccggaagctccccttccag

SEQ ID NO: 162762 - DNA, 244 bp, Glycine max
ggcaaagatagtggcagagctccaagctgtgaagcacaacagtggcaagtcctacaatcagttagcggaggagactggactcaccaacgtctatgttgctcagcttctcaggagacaggctcagtcaatccccaaactgcccctctacttcgggcagcgctgcccgacctgccccaagaccttgtttctgagatgatgagaccccctttgaggtcttatgaccctaatctcatccaagacccca

SEQ ID NO: 162763 - DNA, 239 bp, Glycine max
gaaagaaatgtgggagaagttgagaggtaaaaggctaatgtttgttggagattcactaaatagagggcaatggatatctatggtatgtttgttacaatcagtaattcctgctgataagagacaatgtcaccaaatgcccatctcaccattttcagagcagaggagtacaatgcgactgtggaatttctctgggctcctcttcttgctgaatctaattctgatgatcccagtaatcacag

SEQ ID NO: 162764 - DNA, 237 bp, Glycine max
ccttcactcaatcaagttttgactttatttggagtttctccaaaatgagccggccaatggaggaagatactgtgggtaagaatgaggaagaggagttcaacactggaccgctgtccgtaccatgatgagtgttaaaaataatactcaggtactgataaattgtcggaacaacaaaaagcttctgggtcgtgtaagggcttttgataggcactgcaacatggttcttgaaaatgtgag

SEQ ID NO: 162765 - DNA, 237 bp, Glycine max
ctttcttgcgaaaccgagagagcgaaggggcaaacacaatttttatttatcttcttttttattttttgtagagagagagagagagaaaatgttggggatcttcagcagttcagtggtgtcccgccggaggagctggtggccgctggcagcagaacgccgtcgccgaagacgacggcggggaagctgctgaaccggttcgtggagagcaaggcgtcggcggtgtcgctgcaggtgggg

SEQ ID NO: 162766 - DNA, 270 bp, Glycine max
ctctggagaagaaaacccgcgtttccttgggtagtcgaaaggaagcagaatgggatccaaaattcttccaaaatgggcatcgaagccttgcgtaatgggaatcgacgaagctggaagaggccccgttttagggcctatggtctacggttgcttatactgctctcagtcctatctgaagaccctttccacgttgagttttgcagattctaagacactcaaggaagagaagagggaagaattgtttgacactttaaaactcaatgattctat

SEQ ID NO: 162767 - DNA, 266 bp, Glycine max
ggcaagtaccatttttctcaaccttatcacccttttgcataaaagggccaccccttcttcttcttcccttctcaacttgtactacaatttctggattgaattatcttcaaaatgagagaaatccttcatgttcaagcctggtcaatgtggaaaccaaattggaggcaagttttgggaggtgatgtgtgatgaacatgggattgatgccactggaaattacgtaggtaactttcatcttcaacttgagagggttaacgtgtactaca

SEQ ID NO: 162768 - DNA, 262 bp, Glycine max
cagaaattaagctagagctacatagtttttttcttttctcaccttccttctctcccttcagacaagggacgaaaaatcagagagagagagagagagagagagagaaattccaaaaccatgtcgtcccacagtcatctaagtttcgcctttggggttctaggtaacatcgcctccttcgtgtgctttctggcaccactaccgacattttatagagtttgtaagaagaaatcaaccgaaggttccaatcaattccatatgtggc

SEQ ID NO: 162769 - DNA, 261 bp, Glycine max
agcctgctgtcgtgagctggacctggaccaaccactggatctactgggccgggcctctcatcggtggtggaatcgctggccttgtttacgaggttgtctttatcagccacacccacgagcagcttcccaccactgactactagagggggggaaatgaaaataaaaaaaaaaaaattgtgtattattgaatttctctggaatcttcttctgtgtatggttttccttccttgtgttttcttcctaattcactttcgagggttg

SEQ ID NO: 162770 - DNA, 275 bp, Glycine max
ctcatacacacgttgtcgcgcacacattccttcattccgcagcaacaaacaaacatcttttaccttaaacaacaatggccgatgccgaggatattcaacccctcgtttgcgataatggaaccggaatggtcaaggctggttttgctggagatgatgcaccgagggctgtgttccctagcattgtggggcgtccacgtcacactggggtgatggttgggatggggcagaaggatgcgtatgttggggacgaggctcaatccaagaggggtattttg

SEQ ID NO: 162771 - DNA, 262 bp, Glycine max
gattgctagaatggaatttcgatgctcagtcatctcttttaccattctcttctctcttgctcttgcaggagagagccatgtccatgcatcgctacctgaggaagattattgggaagctgtttggccaaacactcccattcccactgcactgcgagagcttctaaagcctctccctgcaggtcttgaaatcgatgaactccctaagcaaattgatgatacacagtacccaaaaacattcttctataaagaagaccttcatcca

SEQ ID NO: 162772 - DNA, 264 bp, Glycine max
gcagggagctctgccgcctccaacaaaacagagttcagaacacaaaccctcgaaccgaacgtttttgagggttgatagagcacgatggttcagtacaattttaagaagattaccgtggtgccaaatgggaaggatgtgctcgacattatcctctctcgcacccagcgtcagacaccaaccgttgtgcacaaaggatatgcgatttcacggctgcgccaattctacatgcgcaaagtgaagtatactcagcagaattttcacgac

SEQ ID NO: 162773 - DNA, 267 bp, Glycine max
aggagatgcgggcggcccgccgccgaagccgaaggagaaggcggaggaccggtaccgcgacgacgaggacgacgatcccatggagagctttctgatggcgaagaaggatttagggttaactctcgcgtcggacgcgctgcacgctgggtatgattccgatgaggaggtttatgctgccgcgaaagctgtagacgctggtatgattgagtatgattccgatgataaccctattgttattgacaagaagaagattgaacccattcctgc

SEQ ID NO: 162774 - DNA, 262 bp, Glycine max
tgggaacgatctttatgattctgctacaagactaaggctaccggaccttcctgcttttgctttggaatgtctcccaaatcgcaattcattacttttaagggatttgtatggaataactgaagcatcgaccattttccgtggaaccctccgctatgaaggatttagtgagatcatggggacactgtctaggattggcttatttaacaatgaagctcattcgttgctaatgaatgaacagagacaaactttcagaaaattctta

SEQ ID NO: 162775 - DNA, 265 bp, Glycine max
gctgagagggttgttgtttctacaaagagcccaagatcagataagcaatatgtgtgggaagcagaagctgacagtagctcttatgtgataaaagaagaaactgatcctgaaaaggttctgcgtcgtggtacacagattacactctatttaagagaggatgacaagtatgaattctcagagccaagcaggattcagggtttggtgaagaattactcacagtttgtttccttccccatctacacatggcaagaaaagtcaagaactg

SEQ ID NO: 162776 - DNA, 262 bp, Glycine max
ctctcttttcctaacctcaccggcggtggcgggtggtgttcgtgctgctgtcatgcctagaaggactgcggttatcgtgtcggcggcgacggcggagacgccgaagaagaagggcgagtcgaaagggttcgtggaagagatgaggtttgtggcgatgaggcttcacacgagggaccaggccagggagggcgagaaggaggtcaagcagcccgaggagaaagccgttaccaagtggaacccatccgtcgaagggtacctgaaa

SEQ ID NO: 162777 - DNA, 261 bp, Glycine max
gaatcttctttgctttctctcctttgcactttccttctcctcgtgattttttgtttgcatcaaagggagaaactgggagacacagaagatgagagagataattagtattcatattggacaagctggaattcagtgacacctctgttggcattgcacacgatgctttcaacaccttcttcagcgagaccggattcggcaagcatgtgccaagggctttatttgttgatttggaacctagtgttattgatgaagtaagaactg

SEQ ID NO: 162778 - DNA, 265 bp, Glycine max
agctgaatgagagaattgctaaattgtctggtggtgtggctgtgatacaggttggcgcacaaactgagacagagctcaaggaaaagaaattgagagttgaagacgctcttaatgctacaaaggcagctgtagaggaaggtattgttgttggtggtggttgcactcttctgagacttgcatcaaaggtggatgcaatcaaggatagccttgataatgatgaagaaaaagttggagctgatattgtgaaaagagctcttagttaccc

SEQ ID NO: 162779 - DNA, 271 bp, Glycine max
caaaatcttcatattcatcaaactcatcaaaatgaatctgtaccactcctccaccaccaccaccaccaccaccatcttcaccgtcatattcctcctccttgcaatattattcactctcacaccccacaaggccaacggtgccacgtgtcaccctgaggaagaagcgggcctgttgggcttcaaatccggtatccgatccgacccgtccggcctgctcagtaactggatatcgggtacggactgctgcacatggaccggagtagaatgccac

SEQ ID NO: 162780 - DNA, 267 bp, Glycine max
caaatcttaaaaatattcagtgaagatcaacctcaatggcatctcttggcgtgcgaccagttcttccccctccattaacttccatctccgacccacctcctcttttcgatggcaccaccaggttgtacatcagttattcttgcccctatgcacaacgtgtgtggatcgctaggaactacaaggggctacaagataagatcaatttggtccctattaaccttcaagacaggccagcttggtataaggagaaagtctaccctgaaaata

SEQ ID NO: 162781 - DNA, 263 bp, Glycine max
ccctatggctcgtcactccttgctcttagccctcctcctcttcgccgccgtggccaccgccgcgatggcggtggccgcgtccgacgccgacgacatcctgatccgtcaggtggtgccagatgttggcgaacgaagaggaggacaacctgctgaacgccgagcaccacttcgcgagcttcaacgccaagttcgccaagacctacgccaccaaggaggagcacgatcatcgcttcggcgtcttcaagtccaacctccgcagagcc

SEQ ID NO: 162782 - DNA, 258 bp, Glycine max
ggccaactctggtcaccctggtctccccatggggtgtgctccaatgggtcacattctctacgatgagataatgaggtacaatcctaagaaccccgcttggttcaaccgtgaccgtttcgttctctctgctggacatggctgcatgctccaatatgctctccttcaccttgctggctatgacactgttcaggaacaagaccttaaggaattccgacaatggggaagcagaactcctggacatcctgagaactttgagac

SEQ ID NO: 162783 - DNA, 266 bp, Glycine max
ccgatcagaaacatcgccgtcggaaggcctgaagaggcgactcaccccgacacgttgaaggcggctttggctgagttcatctcaaccttcatcttcgtgttcgccggctcaggctccggcatcgcctacaacaagctcaccgacaacggcgctgccacccctgccggcctcatctccgcctccatcgcccatgcattcgccctcttcgtcgccgtctccgtcggcgccaacatctccggcggccacgtcaaccccgccgtcacctt

SEQ ID NO: 162784 - DNA, 269 bp, Glycine max
cgaccttgaggatttatttaattacaaagatctggacgaggaatttctgagccgtgttactgataacactcggaggtatattgggattttttccaatgcaattgatgaactcatgccggagcccactgaggacttcacagatgatgatcatgacatattgatgactcagagatctgatgaaggagtagaaggcaccgacggttccgatccacgtcagaagatgcctcctgaaatcaagcgttactatgaactttatattaaagcatctt

SEQ ID NO: 162785 - DNA, 268 bp, Glycine max
ctcgagccgaatcggctcgagcgtcactatcgggagaagtaatcgagcttcagcaatggtgatacgtcaaggctcagaaatcacaagcctacttcaagagatatcaagtcaagttcaagagaagaagagagggagaaaccgattaccgtgccaggattcggttgattaatcaggacaagaacaaatataacactccgaaataccgatttgtggttcgctttagcaacaaggacattgttgcacaaataatatctgctagcattgccgg

SEQ ID NO: 162786 - DNA, 263 bp, Glycine max
tcttggcatattgtgccctccctctttctagctatttccctctcttaacacaattaacaaagatatatcatatcatatcaactccaaatgatgaaaaatattgggttgtttcttcttgtggtggtggctacttttgtggtggcagccacagctggtagcttttaccaagactttgaaataacatggggtggtgagcgtgccaaaatctatgaaaatggaaatcttctcaccctctccctagacagagcctctggctctggctt

SEQ ID NO: 162787 - DNA, 261 bp, Glycine max
caacattccacctagctccccaatcacatcttcaccacaccataaaccttcttaatttctctcttcattttctcctctattgtcataatcatggggaccttccctcgcttcgacccaatcaccacccaagaccggtccaaccagaccgtggcctccgaccttgacggcaccctcctcgtctcccggagcgccttcccctactacctcctcgttgccctcgaagccggcagcgtcctccgcgccctcctcctcctaacctca

SEQ ID NO: 162788 - DNA, 262 bp, Glycine max
acaaaatacctataaataacacaccaattaaacattttagcaacataataaagcaaaataattaaccctaaattccacaatacttaaataatcaagtctagcaatgcatcgttactagataattacttgcagaggtgatagtagtggtagaacattcttattgatggtttgatattgttagaggtgagggtttgattcaagaacaacacaccaaatggaggtatgttgaacccttaacacacagaaaacaacccaaaacgag

SEQ ID NO: 162789 - DNA, 261 bp, Glycine max
cactcttcttcaatcaagcgaaggtggtctcgattgcaagtgatccacgatacactctacgcttcacaaaaccttcaaacccaattccacagaattcttctgcttcaccatgccaccaaagcctttagactatgggtcaataaatgaaaacgtgaagaagagtcaatatgctgtcagaggtgaattataccttcgagcttctgaacttcagaaagagggcaaaaagattatctttactaatgttggcaacccgcatgcatt

SEQ ID NO: 162790 - DNA, 259 bp, Glycine max
gctggctggcaggttagcccagatttatatggtgataacaacacgcggctattcacctactggacgagtgatgcatatcaagctactggctgctacaatcttctttgctctggatttattcaagtcaacagtgaaatagcaatgggtgcaaccatttccccagtttctgcataccgaaactcccaattcgatatcagtatacttatctggaaggtaaaatcccaggaatcttcctggttattaatctgcagatggaaac

SEQ ID NO: 162791 - DNA, 260 bp, Glycine max
ctcagaagcgaagaagaagccacagagaactagtctcctactctcacccgcaagaaaaaaatggcatctcacatcgttggatacccccgtatgggtcccaagagagagctcaagttcgctctcgagtctttctgggatggcaagagcagcgccgaggatttgcagaaggtgtcttctgatctcagggcatccatctggaagcagatggctgatgctgggatcaagtacatccccagcaacactttctctcactatgacca

SEQ ID NO: 162792 - DNA, 264 bp, Glycine max
aagaaacttaatcgatcatcacttcacttcactaatacatcatggcagacgagacccagaacaagtatgagagctctgaggttgaggtccaggatcgtggtgtttttgactttctcggtaagaaaaaggatgaagaagacaagcctcatcctcaggaggaggtcatcgccaccgagtttcaaaaagtcactgtctcagaccaaggagagaacaagcacagcctcttagaaaagcttcaccgatctgacagcagctctagctctt

SEQ ID NO: 162793 - DNA, 265 bp, Glycine max
ggaagcaaagaaaatcccagaagtgatactaaactcagggaaaaagatgccagtgataggcctaggaaccgcatcaattcctcttccatcacatgaagctctcacctccatccttattgatgcctttgaggttggctacagacactttgatactgcttctctgtatgaaagtgaggagtctctaggcaaagctgtggcaaaggccttagagctaggcctcataaatagcagagaggaattattcatcacatcaaaactatggtcc

SEQ ID NO: 162794 - DNA, 270 bp, Glycine max
caagcctatggtgatcatacctgtataatagcaaaagaacatttggagcctaacttaggtgggctcactgttgagcaggctatccaaaacaagaagttgttcatcttagatcaccatgactatctcattccttatttgaggaaaataaatgcaaataccacaaagacttatgctacaagaaccatatttttcttgaaagatgatggaactttgacaccattggccattgagttaagtaagccacatcctcagggtgaagaatatggtcct

SEQ ID NO: 162795 - DNA, 262 bp, Glycine max
gattctcaaagacagattgagattttacacagagagagagagagagagagagagagagagagagagagagagagatgggaagagctccatgttgtgacaacgcgtgtgttaagagagggccatggtcaccagaagaagacacaaagctgagggtgtacatagagacgcatggcactggagggatctggatcgctcttcctcagagagctggacttgagatatgtggaaagagttgtagattgagatcgctcatctatctcag

SEQ ID NO: 162796 - DNA, 261 bp, Glycine max
aggtgattgtgatgagactctaggtgaggtaactgggaacaaaggcaagagctgtggttctgagtctcttggagtggtcatgggagagggatgcaagtagaagcccttttcagctatggctttatcctcctctgacgagttccccaatgaaggggaggacttgtcaaaagggtcatcattcaatggtgtaacagggcttagagcaagtctagggaagtcaagaaggcttggggagaggatctcaggcatgttgtttcttgg

SEQ ID NO: 162797 - DNA, 260 bp, Glycine max
gacagatgatgatggagatggcgaacgaacacgctgtcgttgcggcactcgcggcgttggtgctactcgcggcgagtgtggcggtggatgctcaggagaactcggacgtgaagacgctggtgaagtacaagcacgggaagaagtactgcgacaaaggatgggaatgtaagggctggtcaatttactgttgtaacctcaccattaccgattatttccagacctaccagttcgagaatctgttctccaagcggaactcgccg

SEQ ID NO: 162798 - DNA, 256 bp, Glycine max
gatctagtacggttcattaagacggtgcagaaggtggggctttatgccaatcttcggattggaccttatgtatgcgctgagtggaactttggaggaattcctgtatggttgaagtatgttcctggcgtaacttcagaacggataatgagcctttcaaggcggcaatgcaaggtttcacgcagaaaattgtccagatgatgaagagtgagaagttgtttcaatctcagggtggtccaatcattctctctcagattga

SEQ ID NO: 162799 - DNA, 259 bp, Glycine max
ctagagtaattgcggaatcagctagaattttctaataatggccaaagacgttgagcaggttacagagcaaggtgaatactccgcgaaggattaccatgacccacctccggcgccgttgatcgacccagatgagctcactaagtggtccttgtacagagccgccatagctgagttcatagcaacactccttttcctttacatcaccgtgttgaccattattggctacaagagacagagtgacaccaaaatccccggtaac

SEQ ID NO: 162800 - DNA, 261 bp, Glycine max
gtagttgcaaattccaggttttcttcctttagcctagcttttactcattatctctctttctctctctctcagaggttctagaaagatccactccgaaatggacggtgcgccacaatccgccggtgccggaggtccggcgccgttccttctgaagacctacgacatggtggacgatgcctccaccaacgacatcgtttcgtggagctctaccaacaacagcttcgtcgtgtggaaccctcccgagttcgctcgcctccttct

SEQ ID NO: 162801 - DNA, 262 bp, Glycine max
ggggtacatcaaattctttatttatgagatgaagtacactggggaagctttgggaagagatcttgagaacgtgaggaagtactacgggagtggaaaaacaaaggaagcatcatggagagaatcacagcttaaagggttgcacaattttctcgttgaaaaagaggaagaaattttgagggccctcaagcatgatttggggaagcattacgttgaggcttttagagacgaggttggaacattaatgaagaccttaaacttggca

SEQ ID NO: 162802 - DNA, 259 bp, Glycine max
gctattgagtatgaagaaccagccggggatgcatttaaagctaatcatcctgaggcattggtgttcattaacaattgcaatgttattcttagggctgtaatggagaagtgtggggacacagatgattgtatctcaacatctgaggctgcagaattggctgcaaagcttgatgagaaggaaataagtagtttaccaatgcctggacaagttgatttcattaatggtggtcctccatgccagggtttctctgggatgaata

SEQ ID NO: 162803 - DNA, 258 bp, Glycine max
tccaagtattgctgggttgggagtaacatatgggatcaatctgaatgtgttgcaagcttcagttatatggaacatatgcaatgcagaaaacaagatgatatcagttgaaaggatccttcaatatacaaatataacaagtgaagcacctcttgtgattgaagacagcagaccacctagcaactggccagaaactggaacaatatgtttcaaaaatttgcagatacgttatgctgaacatctgccatctgtgttgaaaaa

SEQ ID NO: 162804 - DNA, 258 bp, Glycine max
gtgatttcagtgagtgatcggtgttcacttgatctcatcataatcgtcagcgtcaattgaagaagatgccgatcagaaacatcgccgtcggaaggcctgaagaggcgactcaccccgacacgttgaaggcggctttggctgagttcatctcaaccttcatcttcgtgttcgccggctcaggctccggcatcgcctacaacaagctcaccgacaacggcgctgccacccctgccggcctcatctccgcctccatcgccc

SEQ ID NO: 162805 - DNA, 258 bp, Glycine max
aggaaggccacctgtgcttccatccaacaaactttctaacacagagaacttcctatacatgctagattcttttggcaatcgatcatataaacctaatcctcggctaactcgagcactggacattatcttcatcctgcatgcagaacatgaaatgaattgctctacatctgctgtacgacacctctcatcaagtggtgttgatgtatatactgctattgccggggctgttggagctctatatggacctcttcatggtgg

SEQ ID NO: 162806 - DNA, 256 bp, Glycine max
ctccctcgctctatttctcagtctctgtgtttgcggctgaggattccgaacgagtgaccttcttcgtttctcgcaaagtttaagtaatcatgggtaaggaaaaggttcacatcaacattgtcgtcattggacatgtcgactctgggaagtcaactaccactggtcacttgatctacaagcttggaggtattgacaagcgtgtgattgagaggttcgaaaagggcttccgcgatttacaagaggtcattccagtatg

SEQ ID NO: 162807 - DNA, 240 bp, Glycine max
atataattaagtgtggattgctgtgcaggtcaaggcccttttagttgctcgtccggttgttcccatcttctctctcgtactaatcaaatcacacttttgtgttgtgttgggaaacccaaaccccgttttcggtgagatcgagatcgatcgaacatggatgaggagtacgatgtgatcgtgttgggcacgggtctcaaggagtgcattctcagcggtcttctctccgtcgatggcctcaag

SEQ ID NO: 162808 - DNA, 258 bp, Glycine max
caggttgagcataccatgcgacctttcgtggctgcggctgttttgttgttgttgttggtggtggtggtggttgttgatgccaggtttgtggtggagaagagcagtataactgttctgtccccgcataagctgaaggcgacgcgatggcgccatcggtaacttcggtcttccggactacggaggattcatcgttggctctgtggtgtatcccgctaaaggctcacacggatgtgagaacttcgagggcgataagccttc

SEQ ID NO: 162809 - DNA, 250 bp, Glycine max
aaagtttcttcctttctctgctctttgtcttctctgacacatttggggccttgttgagtgtgtttttgcaagagggtatggcgaaggacgttgaggttgctgagcgtggctccttctctgggaaggactccaggaccctccaccagcaccactcattgatgctgaggagctcacaaagtggtccttttacagggctcttattgctgagttcattgccactttgctcttcctctacattactgtgctcaca

SEQ ID NO: 162810 - DNA, 241 bp, Glycine max
ctgtgctgtgctgccatgggtgtgacacagttgaaccccacttgctcaaaacctcgtcttcactcatctcagctctcttttctatcaaggactcttcctagacatcgccactgcacttttgcgccacttatagaactcaacaagctaggatttcctgttctgttgcaccaaatgaagtgcaggtgccaactgtgaaaacccaggatcccaagagtaagcctgagtgctatggtgtcttctg

SEQ ID NO: 162811 - DNA, 252 bp, Glycine max
ctggatttaaggaagttcgaatggttgaaacaaagccagggattgcctttgtggaatatggagatgaaatgcaatccacagtggccatgcagacactacaaggtttcaagataaccccacaaaaccctatgttgataacttatgccaagaaatagacagcggtttctttaacttatgagaaaggcaggaatcacatcttccgcaaagagttgttaatccatttaatgcagtggtgtatcttaattgatatct

SEQ ID NO: 162812 - DNA, 251 bp, Glycine max
caagattctcacaaacaactcttgagaaagaaagaatggctgccaacacattgatgagttctgccatctcagccttcccatctctcctttcctcctcaaaatccagatttgccgcagcagttcctctttcagctttgttgtcaccaatgcctcttcttctcgcttttccatgagtgctgactggatgcctggccagcctagacccccctaccttgatggttcagcacctggtgactttggattcgaccctc

SEQ ID NO: 162813 - DNA, 247 bp, Glycine max
attttacaatcagaaattggagagcagaaagaaagggccttggcagcagcagctaccgaacttgaaagatttttcaagaaggaagacttcagcagaatgaaggtgattgggcaattcaatcttggattttcatttgtaaattggatcaagatttattcattgtggaccagcatgctgctgatgagaagtataattttgagcgtttatcacagtcaaccatcttgaaccaacaacctcttcttaggcc

SEQ ID NO: 162814 - DNA, 254 bp, Glycine max
gatagagagagacgcttcgcaaatctcaatcgaatctcagaaaaatgagagaaatcatcagcattcacataggtcaggccgggatccaggtcggaaactcctgctgggaactctactgcctcgaacatggcatccagcccgacggcatgatgccttctgactccaccttcggtgtagcccacgacgccttcaacaccttcttcagcgaaaccggatctggcaagcacgtcccccgtgctgtcttcgtcgacctc

SEQ ID NO: 162815 - DNA, 247 bp, Glycine max
tactcgtcccgttcgtgccactctcttcaaaatggccgttaccttctcaaatctccacacagaatcaggtctcaagtccctcgacgacttcctctctgggaaggtctacgtttctggggatcagtcacaaaggacgacatcaaagtgtatggtgctgttttggagaagccaggtgactcttttcccaatgctgccaagtggtacgaggttgtctcatctcagcttgctgcaagcttccccggcaatg

SEQ ID NO: 162816 - DNA, 229 bp, Glycine max
taaggaagttattgctaatggactaagtgtgaatgtgacgctgatattctctcttgcaagatatgaagctgtaattgatgcatacttggatggtcttgaggcatctgagttaaatgacctctctagagttacaagtgttgcctctttcttcgtcagtagagtggacaccctcattgacaaggcccttgaggaaattggcaccccagtggcccttaatctacgcgggaag

SEQ ID NO: 162817 - DNA, 250 bp, Glycine max
agataaaataatgaaggaaccattgaactgattattgggggaaattctagaatctatgaagttactgattcagattacaattgtcatttgttgtttggatatacacctgttcgttcagattcagttgtcggagaacttgtcttatctgatccaactaacattgttctcccagagcttccatatgtggagatgcttgctctgactggaaacacagttgaaggtgacatacttacagctgttgaagtgattc

SEQ ID NO: 162818 - DNA, 247 bp, Glycine max
cgaagagatggatacagagttgggtgataaaattggctatgctatacgttttgaggatgtgaccgggccaaataccattataaagtacatgactgatggggtacttctacgtgaaacactcaaagatctgatctagacaagtatcgggttattgtcatggatgaagcccatgaaagatcactaagcacagatgttctttttggaatattgaagaaagttgtagcccaacgtcgtgatttcaagctga

SEQ ID NO: 162819 - DNA, 248 bp, Glycine max
agaaatttaagtgaggagctagagaatgatgatgaagtctgctatgtgtgcagtggtggttgtagcacttcttcttctggcggaggtggggcccatggctgaggctgtgacatgcaccccaacagagtgagtccgtgtcttccagcaatcacttccggtgctaaaccttccaatgcttgttgcacgaagctgaagcagcaaaaaccatgcttatgtggctacctcaaaaacgctagcttgaagcagta

SEQ ID NO: 162820 - DNA, 250 bp, Glycine max
caaattcattttaatcctaattctgcacttcttgatcattcgatttttctcctcaagatgcagatattcgtaaaaactttgaccggcaagaccatcacccttgaggtggaatcctccgacaccattgacaacgtaaaagctaagattcaagacaaggaagggatcccacctgaccagcagagacttatctttgcgggtaaacaacttgaggatggtcgcacccttgccgattacaacatccaaaaggaat

SEQ ID NO: 162821 - DNA, 247 bp, Glycine max
ccaaactctaacacaaaaccaaaaatatggactgagggttataccggatggtttcttgcatttggtgatgctgtgcctcacagaccagtggaagatcttgcatttgctgtggcacgcttttaccagcgaggtggaacttttcaaaattactatatgtaccatggagggactaattttggccgggcttctgggggaccttttgttgctagtagttatgattatgatgcaccaattgatgagtatggat

SEQ ID NO: 162822 - DNA, 246 bp, Glycine max
gaaaagattatgagcattatgccaatacatgcttcaaagcttttggagacagagttaagcactggattaccttcaatgagcctcataactttgcactccatggttatgatttaggcattcaagcacaggaagatgttcccttttgggtcatcttctatgtaagaaaggagaatcatccactgagccatacattgttgctcataacattctcttgtcacatgctgctgcctatagaagctaccaact

SEQ ID NO: 162823 - DNA, 245 bp, Glycine max
acttgccttatttttggttttgagattgagctaaaggccaactcaaccatcgaatttgttggtgattgaaagagaaggaagaagaagcaggaaatggaagcagtgagagctggtcgagaaggagcaataggtctaggtcaaggtgatggcgtagcagaggacagcactgagactgaactcaccaaaatccgtctcctcagggcaattgttgaaacccgtgatccctcttccaagatctattgtag

SEQ ID NO: 162824 - DNA, 241 bp, Glycine max
actatcctatcgtagcaaagaaataaagaaagaaaaccctagcttagcttttgaagtttcaagatgctgatcttcgttaagacactcactggtaaggcaatcacccttgaggtggagagttcagtaccatagataatgtaaagtccaagattcacgacaaggaagggatcccaccagaccagcaacgtctgatttttgctggcaagcagcttgatgatggacgtacacttgctgattacaa

SEQ ID NO: 162825 - DNA, 248 bp, Glycine max
gttacggtttgtcttggagcccttttaagaacgggtatcttttgagtggttcgcatgaccataaggtttgcttgtgggatgtgcctgctgctgcctctcaagataaggtgcttgatgcatttcatgtttatgagggtcatgagaatgtggttgaagatgtgtcctggaatttgaaggatgagaatatgtttgggtccggtggagatgactgcaaattgatcatttgggacttgcggacgaacaaaccc

SEQ ID NO: 162826 - DNA, 249 bp, Glycine max
caactactacaagtacttccttacaatcaaaaccaacaacaactatggcaagttatcaaaagcactacgatgatcagggtcgcaaggttgacgagtatggcaacgttgagaagcaaaccgacgaatacggcaaccctgttcatgctgctagtgtcacctatgtagccaccagaactgctgctggtggttacagtgatgacattaataagcaacatgataccaccaatgcctacggcgtagacactggta

SEQ ID NO: 162827 - DNA, 243 bp, Glycine max
aaaatggccaaatcaatcaaattctttgagttgaacacaggggccaagattccttctcttgggttagggacttggcaagctgaacctggtgttgtagctgaagctctcaccacagccattcagttggatacaggcatattgactgtgctagtgcgtataagaatcaagcagagattggttctgctcttaagaagctttttgatgatggtgtggtgaagcgtgaggacttatggatcacttcca

SEQ ID NO: 162828 - DNA, 244 bp, Glycine max
tcaagtattaacccttttctctctgaatactctctactcaatacattggcactcctggaaagggtattcttgctgctgatgagtcaacagggacaattggcaagcgtttggccagcatcagtgtagagaacattgaatccaacaggcgagctcttagggagctgcttttcactgctcctggtgttcttcaatatctcagtggtgtcatcctctttgaggaaaccctctaccagagcacagctgc

SEQ ID NO: 162829 - DNA, 244 bp, Glycine max
ccgcgtctcgccgtcttctcggcaaggatgggttgcccacttggttctctgctgctgatcgtaagcttttgagtcgtggatggagatcacgtgtcaagcccaatgttgtggttgcccaggatgcactggtcagttcaaaaccgttgccgatgctattgcttcctacccaaaggataacaaaggtagatacattatctacgttaaggctggtgtctatgacgagtacatcaccgttcccaagagt

SEQ ID NO: 162830 - DNA, 245 bp, Glycine max
gtgaacccagcagaagttggagacattgttgtgggcactgtactggcacctggatcagatagaggaattgagtgcagaatggctgccttttatgcaggtttcccagagacagtgcctcttcgaactgtcaataggcaatgttcatctggacttcaggcggtttctgacgtagctgcttatataaaagctgggttctatgaaattgggattggggctggattggagtctatgacagtagatcgtgt

SEQ ID NO: 162831 - DNA, 245 bp, Glycine max
  unsure (1)..(245): unsure at all n locations
ggattcttcatcgagtagcggattgacgttcaagctgcaccctctggtgatcgtaaacatctcggaccactacaccagggtcaagtctcagatgaacccaacccacgcgccaccgcacaacaacaacaacgccaacggtcncgacggcgtcgtttcgccgctctccccgcgggtctatggctgcgtcataggggtccagaagggccgcaccgtggagatcttcaacagcttcgaactcctctacg

SEQ ID NO: 162832 - DNA, 242 bp, Glycine max
cagaattctccagggaggaactggaattccaaatgtcagatggtttggagtggagggagattacaatgttttagtgatggatctgcttggaccgagtcttgaagatctttttaacttctgcagtagaaagctatcactaaagacagttctcatgcttgctgatcaaatgatcaaccgtgttgagttcattcattcaaaatcgtttctgcatcgggatatcaaaccggataattttctaatgg

SEQ ID NO: 162833 - DNA, 245 bp, Glycine max
attttgcatgttataaacccgatgacgaactcaaggtgtcaagggagcagttaatggaggtggcaaggaaatcaggcaagttcgacgaagcaagtctagagttccagaagaggatgctaatgtcctccggaatcggcgatgaaacctatataccgaaggccgtcatcgcctccaccgagaacaccgcaacgatgaaagagggtcgggccgaggcctccatggtaatgttcggagccctcgacgag

SEQ ID NO: 162834 - DNA, 247 bp, Glycine max
  unsure (1)..(247): unsure at all n locations
aacgaatcgaaaaaagaaagatcatggcgatggcaaacttggctcgacggaagggttacgccgtcgttttgtcgtcgaggtcgtcgctttgtctgacaaggtggagggggttcgcgtccggatctgacgaaaacgacgtcgtggtcatcggcggcggtcccggcggctacgtggcggccattaaagcggcgcagtgnggtctgaaaaccacttgcatcgaaaaacgtggcagtctcggcggtacctg

SEQ ID NO: 162835 - DNA, 247 bp, Glycine max
ccttgatagtgtgctcaattataagccaaaagctgggcttctgaagcctgcatttaccattatacgtgatacacaatcaaaatgtttacttctattgatccggggtactcatagcataaaacgacaactgacagctgcaactggtgctgttgtccccttccaccattcagtgttaaatgatggtgggataagcaacttggttttaggatatgcacactgcggtatggttgctgcagctcgttggatt

SEQ ID NO: 162836 - DNA, 98 bp, Glycine max
  unsure (1)..(98): unsure at all n locations
gagccgatctacacttgatttggattccaatctggctaggacccattcatcaagtaatcattcacacaattcctannctantgnncnaccatnatnnc

SEQ ID NO: 162837 - DNA, 242 bp, Glycine max
gtctgggaccattcgagtgcatgatgacctgcttctggctgcctctgaggctttggctgcacaagtgagccaagagaactttgataagggactcatatacccaccattcaccaacatcagaagatttcagcacacatagctgccaatgttgctgctaaggcttatgaacttggcttggccactcgccttcctcaacctaaagatttagtgaagtttgcagagagctgtatgtataccccagc

SEQ ID NO: 162838 - DNA, 241 bp, Glycine max
tgattgccaagcctgctgggtctgattctattgaagggtatggcacaaagcttcagaaagaggtgaatggcaagaaagggtgggtggatcatttgttccacattgtgtggcctccttcctcatcaactacagtttctggccccaaaaccccccttcttacagggaagttaatgaggaatattgcaagcacctaagaggagtggtagacaaattgttcaaaagtatgtcggtagggttgggg

SEQ ID NO: 162839 - DNA, 240 bp, Glycine max
ctggatttgtctaataatcatctatcgggagtggttcccgataatggctccttctcattattcactcctatcagttttgcaaacaacatggatctatgtggacctgtcactgggcaccctgtccaggctctcctccattttctcctcctcccccttttgtccctccacctccaatttctgccccagggggtaatggtgccactggagcaatagccggaggtgttgccgctggtggtgctc

SEQ ID NO: 162840 - DNA, 243 bp, Glycine max
atgcacagttgctgtggttgacagggggagtccctcaattcttgcactttctaggcaaaagttgacccaacttgcaggaacttctattgatggagttgcaaaaggtggctacagcatttcagacgcctcatcaggtaaccagcctgatgctattttgattggaactggttctgcagctggaacttgctgctgctgctgctgaagatctaacgtatgaacgaacagctgttagcgttgtatctc

SEQ ID NO: 162841 - DNA, 242 bp, Glycine max
ggactgtttaaatattcatggaaaacaaaagcaacatgccaggactactacgttcttcaacttctgcaaagcagaaaaggggatcttgctctgtactgatgttgctgctcgtggacttgacaacctgatgtggactggattgtgcagtatgatcctcctgatgaaccaaaggaatatatccacagggttggtagaacagctcgtggggaaggtggaaaaggaaatgctttacttttcctgat

SEQ ID NO: 162842 - DNA, 244 bp, Glycine max
ctcttcctcaccgattgctagaatggaatttcgatgctcagtcatctcttttaccattctcttctctcttgctcttgcaggagagagccatgtccatgcatcgctacctgaggaagattattcggaagctgtttggccaaacactcccattcccactgcactgcgagagcttctaaagcctctccctgcaggtgttgaaatcgaacgaatccctaagcaaattgatgatacacagtacccaaaa

SEQ ID NO: 162843 - DNA, 243 bp, Glycine max
gtcgcctgcaggaagagggtgtgaatatcacagccaactcggtccatccaggagtgataatgactcctcttatgagacactcatcttaccttatgcatttcttaaaggtcttcaccttttacatatggaagaacgtcccccagggagcagccacgacatgctatgttgctctccacccaagcgtgaaaggtgtaactgggaagtactttgtggattgcaatcaatgcaaaccaagttcacacg

SEQ ID NO: 162844 - DNA, 240 bp, Glycine max
ctccatcatccaaatatagttagaattcacgaggttattggcacaaaaacgaagatatacattgtgatggaatatgtttcaggaggacagctattagacaagatatcctatggagagaagtgaatgcatgtgaggcaagaaaactattccagcaacttattgatgccctgaaatactgccataacaaaggggtttatcatcgagatctcaagccagaaaacttgcttcttgacagcaagg

SEQ ID NO: 162845 - DNA, 239 bp, Glycine max
gattgtggacacacaggctgattgtaataaccggaagataactgcttttataggaggtcttgatctatgtgatggtcgctatgacacacccgagcatcgtctgtttcgtaatcttgacgatgtatttgatggtgatttccacaatcctacattttctgctggaacaagagttcctagacaaacatggcatgatttgcactgcagagtagatggagctgctgcatatgatgatcttatta

SEQ ID NO: 162846 - DNA, 241 bp, Glycine max
attattttcaggctagaatattccattatggctccatcagcttgattgatgagccatgcaagttcagctcaccttgctgctatgagcattgccaaaaactctggttgcattctatcatatgtccaaatttgagattggctctatggccttctgcagacgccgctcggaaaggcataatggatatatgggatcaagctgatgtcataaagataagtgaggatgagattacatttttgactgg

SEQ ID NO: 162847 - DNA, 243 bp, Glycine max
cgtgactagacactcatctcactcgcgccatcttagggtttctccttttgtttcgcaacatggttgccgctaagaaaactaagaagacccatgagagcatcaacaacaggctcgctcttgtcatgaagagtggcaaattcaccctcggttacaagaccgttctcaaatctcttaggaactccaaaggaaaattgattatcattgctaacaactgcccccctttgagaaagtcagagattgaat

SEQ ID NO: 162848 - DNA, 240 bp, Glycine max
cgcaaagagaagagatctgcctcctttttatcaaatctatctcttcttcaagaatagttgaaaatggggctgtctttcaccaagttgttcagccgactgtttgccaagaaagagatgcgatactgatggtgggtctcgatgctgcgggtaagaccaccattctgtacaagctcaagcttggagagattgtcaccaccattcccaccattgggtttaatgtggaaactgtggaatataaga

SEQ ID NO: 162849 - DNA, 238 bp, Glycine max
atcggagagtttgagtatgttgatgaccacagggctggtaaaatcgtggttgaattgaacggtagactgaacaagtgtggggttattagtccccgttttgatgtgggcgtcaaagagatgaaggttggactgctaggcttctcccctcaagacagtttgggtatattgtattgactacctctgctggcatcatggatcatgaagaggctaggaggaaaaatgttggtggtaaggtatt

SEQ ID NO: 162850 - DNA, 239 bp, Glycine max
agcgcctagggttttccaaggcggcggcggtggcgaggccggtgcagtggttcatcggagaccccgccgcagcaacaacaaccaggcaagaaggcggcggcgaagatagtgagggaaggggtggagttttacagcaatggggatttctacgaaggggagtttcacaagggaagaagcaacgggagtggggtctaccattacttcgtgaatgggaggtacgaaagggattgggtggatgg

SEQ ID NO: 162851 - DNA, 241 bp, Glycine max
tttcaacccaattcgtgcaacagatgtgcaacttcctgctggtgggacttttgtgatagctcattctttggcagagtctcaaaaggctgttactgctgccacaaattataataatagggtgtcgaatgccgtttggcttctattgtgctcgctataaagctagggatggatccaaaagaggcaatttcaaaagtgaacacactgtctgatgttgaagggttatgtgtatcatttgctggta

SEQ ID NO: 162852 - DNA, 272 bp, Glycine max
ctcttcttcaattcattctagttctggattccgactcgccgcattgactcggtccgggttggggtcgactcagttcggtttttcattctctcgcgaatctaatctataggaaaagctaagggcacatcacaatgaaggcattgattctggttggggggtttggaacaaggctgaggccactgacactcagttttcctaagcctcttgttgattttgctaacaaacctatgattctgcatcagatagaggcccttaaggccattggagttact

SEQ ID NO: 162853 - DNA, 265 bp, Glycine max
ctcgaccgaatcggctcgagccgccttgatctccgcagcaatagtgaacgttccgaagagaaagaagacctactgcaagacgcaaggagtgcaggaagcacacgctccacaaggtcacccaatacaagaagggcaaggacagcatcgccgctcagggaaaacgccgttatgaccgcaaacagtccggttacggtggccagactaagcctgttttccacaaaaaggccaaaaccaccaagaaaattgtgttgaggctccagtgtca

SEQ ID NO: 162854 - DNA, 266 bp, Glycine max
agccaccctgacgttgctgctgaggaaccatggtatggtattgagcaagaatataccttgttgcagaaagatgtaaattggccacttgggtggccacttggtgggtttcctggaccacagggcccatactactgtggaactggtgctgataaagcatatggccgtgatattgtagatgcacattacaaagcttgtatttatgctggcatcaatattagtggcatcaatggagaggttatgcctggtcagtgggaatttcaagttgg

SEQ ID NO: 162855 - DNA, 266 bp, Glycine max
gcaagccccactcaaccaccacacctctcctcgttcacgctacccctttctgctcttcttctacctttcaagttttaaaagtataaagatggcagagacattcctatttacctcagagtcggtgaacgagggacaccctgacaagctctgcgaccaaatctccgatgctgtcctcgacgcttgcctcgagcaggacccagacagctaagttgcctgcgaaacatgcaccaaaaccaacttggtcatggtcttcggagaaatcacga

SEQ ID NO: 162856 - DNA, 268 bp, Glycine max
aaaccggggtgcacaaggaaattgatgttcggaagctagatgtgaatgataggcaacaaatcattgacaaaattttcagggttgctgaagaagataatgaaaagttcctcaaaaagttcagaaacagaattgacaaggttggaatccgacttccaacagtagaagtgaggttccaaaatttgactgttgaagcagattcctatgtcggcagcagagctctaccaaccctaccaaatgttgcattaaaccttcttgaatcagctcttgg

SEQ ID NO: 162857 - DNA, 265 bp, Glycine max
tacaaattctctgtgttgtgttgtgtacttgtgttaattgtgttgttgttgtaggaaatttaagtgaagagagaatgatgatgaagtctgctatgtgtgcattggtgcttgtggcactggttgtggttgaagtggggcccatggctgaggctgcggtgacttgcaacccaacacagttgactccttgtcttccggcaattaattcaggttctgcaccttcgagtgcttgttgccagaagctgaaggagcaaaagccatgcttctg

SEQ ID NO: 162858 - DNA, 266 bp, Glycine max
gaagacgctcaccggaaaaacgattactctggaggtggagagttctgatacgatcgataacgtgaaggcaaagattcaggataaggaggggattccaccggatcagcagcgtcttatcttcgcagggaagcagcttgaggatggacgcacgtgtgcagattataatattcagaaggagtccacgcttcaccttgtcctcaggctccgtggtggtgatttctagttcagttgaatcttgctaatgagatgtttcagttctaataata

SEQ ID NO: 162859 - DNA, 262 bp, Glycine max
caggatccgagagatgatcatcaacgtgaaggaatcgacggtggtgcggccggcggaggaggtggcgcggcgggtggtgtggaactccaacgtggacctggtggtccccaatttccacacgcccagtgtatacttctataggtccaacggcacctccaactttttcgacggcaaggttctgaaggaggcactgagcaaggtgctggtgccgttctacccaatggctgggcggctccggcgagacgaagacggtcgcgtggag

SEQ ID NO: 162860 - DNA, 270 bp, Glycine max
gctgattacaacatccaaaaagaatctaccctccacttggttctccgccttcgtggtgggatgcaaatctttgtcaagactctcactggaaagaccatcacccttgaggtggagagctctgacactattgacaatgtcaaagccaagattcaggacaaagaaggtatcccaccagaccaacagaggctcatttttgctggcaaacagcttgaagatggccgaaccttggctgattacaacatccaaaaagaatctaccctccacttggtg

SEQ ID NO: 162861 - DNA, 264 bp, Glycine max
attggagcgggttatctggggatttggggatggatcaaccattccagtgtttgaaactcccgttggaaaaataggtgctgccatttgttgggagaacagaatgccactattaaggacagcaatgtatgccaaaggtgtggagatatattgtgctccaacagctgatgccagggatgtgtgtcaggcatcaatgacccatattgcacttgaaggtggatgttttgttttgtcagcaaaccagttttgtcggagaagggattaccc

SEQ ID NO: 162862 - DNA, 266 bp, Glycine max
ctatactctctctagagtaattgcggaatcagctagaattttctaataatggccaaagacgttgagcaggttacagagcaaggtgaatactccgcgaaggattaccatgacccacctccggcgccgttgatcgacccagatgagctcactaagtggtccttgtacagagccgccatagctgagttcatagcaacactccttttcctttacatcaccgtgttgaccattattggctacaagagacagagtgacaccaaaatccccgg

SEQ ID NO: 162863 - DNA, 266 bp, Glycine max
aggtagttggtgttctttgggcaaataagagggatagtggactatggtttgcgcctcctgagtggagagaatgtaggctcggcattcaactcttaccaatactgcctatttctgaagtcttgttttccaatgttgattttgtgaaggagcttgtggagtggacattgcctgctttgaatagggaaggtgttggagaaggatggaaggggtttgtctatgctctgcagggtatttatgacaatgaaggtgcaatgcagaagataaga

SEQ ID NO: 162864 - DNA, 261 bp, Glycine max
gttcacagagagaatggctgcggaaaacgttgttgagttcacagacttacccgtcaagaggccaagagaagaagaagaaggaaccaatggcgtctccaacgacgccgtttcagcgctccccaatgaccctcaataccctggcatctctgcggttattcccggttggttctccgaaatcagcccaatgtggcccggggaggcacattccttgaagatggaaaagattttgtttcaagggaagtctgactatcagaatgtcat

SEQ ID NO: 162865 - DNA, 265 bp, Glycine max
gaaaggtgttgttctcagatccatccatcagtggtgggcgatgttgttgttctcagatccagactgagggggtgaaggaaaatgaagtcgtcgaggcgtctgttgaggatcgggcttgtgtcggcgtggtactcgtcgaacattggggtgctgctcctgaacaagtacctccttagcaactatggcttcaagtaccctatcttcctcaccatgtgtcacatgaccgcttgctccctcttcagctacgtcgccatcgcctggctca

SEQ ID NO: 162866 - DNA, 263 bp, Glycine max
ggatgacctctatattgatcacaatctcagcttaaccgaggcactctgtggcttccagtttgctgtcaaacatcttgatggtaggcaactattgatcaaatcaaaccctggggaagtcatcaaaccaggtcaatataaagcaataaatgatgagggaatgccacaacacaataggccattcatgaagggtcgcctttacatccagtttaatgttgatttcccagactcagggtttctttcccctgaccaatgccagttactgg

SEQ ID NO: 162867 - DNA, 264 bp, Glycine max; identical to SEQ ID NO: 132359

SEQ ID NO: 162868 - DNA, 263 bp, Glycine max
aaacaatttaccagctatacttgttccttttgaaggttagaagtgctacaatacaaacaatggcagctactcaggaagatgtgaagcttttgggtattgtgggaagcccatttgtgtgcagggtccagattgcccttaagttgaagggagttgaatacaaatttttggaagaaaatttgggcaacaagagtgatttgcttctcaaatacaaccctgttcacaagaaggttccagtgtttgttcacaatgagaagcccatagca

SEQ ID NO: 162869 - DNA, 263 bp, Glycine max
gcgttgactacgtccctgccctttgtacacaccgcccgtcgctcctaccgattgaatggtccggtgaagtgttcggattgcggcgacgtgagcggttcgctgcccgcgacgttgtgagaagtccactgaaccttatcacttagagaatctgaggagaaagtgactggtctggaatcgagtattcttcaattgcgcaaggaagcaaaggaagctgagagggtgatcatatcgctgaatgagaaggcggtggagaccgttgagtc

SEQ ID NO: 162870 - DNA, 83 bp, Glycine max
ctgagatgcctcatatattatttcattattgtgtaccacttttcaaacttgcttggggtttgtaacaacaacaaccaccaaaa

SEQ ID NO: 162871 - DNA, 265 bp, Glycine max
ctctcgcattccgtggagatctagtgcttctgctgcaagacctcgctgaaaattagggtttcgattcggaggtagacgaagatgttcggaagggctccgaagaaaagcgacagcaccaggtactacgaaatcctcggcgtttccaagaacgcttcgccggatgacttaaagaaggcttacaagaaagccgccattaagaaccatcctgacaaaggcggggatcccgagaagtttaaagagcttgctcaagcctatgaggttctga

SEQ ID NO: 162872 - DNA, 262 bp, Glycine max
cagagaattagtccatagcaatggcagagcaagacaaggtgatcctacacgggatgtgggccagcccttatgccaagagggtggaattggcccttaattttaagggcataccctatgagtatgttgaagaagacttgagaaataagagtgatttgcttctaaagtacaaccctgttcacaagaaggttcctgtacttgttcataatggaaaggccattgctgaatccatggtgatccttgagtatattgatgaaacatggaa

SEQ ID NO: 162873 - DNA, 264 bp, Glycine max
tttccattttccaaagcctaattgatcgtgctcgaaggaccgtgcgaggatctgcagatgatataggatggcttcaacgtgatcctggaatgcctccggttgaagatggaacagagaggttcctggaaattctggacaacatcaagcatggtgttcacaagttaccaaattcggtggtttatttgttaattccaggtcttttcagtaatcatggtccactttactttgtcagtacaaaagtcagtttttcaaaaatgggtttgg

SEQ ID NO: 162874 - DNA, 261 bp, Glycine max
gaatctcgctgggatgaattagttggagaaatgcccctaaaaatatcttatcctgcaatagagagccatgagtggcgaattgttactggttgtgatcccaaaaataccagatggagttaccataatggaggatcttggccagtgctcctgtggctagtaacagctgcttgtatcaaaacggggagaccacagattgcaagacgtgcaattgaacttgccgagagtcgtttactgaaggatgggtggccagagtattatgat

SEQ ID NO: 162875 - DNA, 270 bp, Glycine max
ataaaattataaggaaggaaaagcttcaccctgccccatcaagagctgtggaatagaattgcatagctgaaaatgaggagtacttgtgatgaatggaaatcttttatagtaatgatagcaattgatttttcttttgcggcagtgaatattcttctcaagaaagtccttgaagagggaatgaaccatttggtttttatcacataccggctgtcaattgctaccattttcatagccccaatctgctactttagggaaagaaacgacagaccg

SEQ ID NO: 162876 - DNA, 266 bp, Glycine max
cagggaccgagttgttgaagctagagatgagttgcatagaatgttgaatgaggatgagttgagagatgccgtgcttctagtttttgccaacaagcaagatcttcctaatgctatgaatgctgcagagataactgataagcttggtcttcattccctccgtcagcgccactggtatatccagagcacatgtgccacatctggtgaagggctctatgaaggacttgactggctctcaaacaacattgcaaacaaggcgtagagatttg

SEQ ID NO: 162877 - DNA, 263 bp, Glycine max
agaaaagagaagaaacaaaacaaaaaagagcagagagagagaggaaccatcaccaaccctaatttcttagctaaaccctattcgtttagcatttcctctcttttctcccactcgtaaatcctctcccaaacttttcagatccaaataaatcatggttttctgggtttttggctacggttcactggtgtggaaccctggattcgattacgatgagaagattataggtttcattaaggactacagacgcgtgtttgatttagcgt

SEQ ID NO: 162878 - DNA, 262 bp, Glycine max
catcagtccttctgaactcaacaaccaatcaggctgagaagaatgctcctccaaatctcacagtaagaggctttgacttcattgacagaataaagagccttgttgaagctgaatgccctggtgtggtctcttgtgctgatatcctcactttggctgccagagacactattgtagccacaggtggacctttttggaaagttccaactggtcgaagggatggggtcgtctctaacttgacggaagccagaaataacattcctgc

SEQ ID NO: 162879 - DNA, 263 bp, Glycine max
gttcggttcagcaacaatgttatcggactccttaacttcctcaccttcctcttgtccatcccgatcctggtggccggagtgtggctgagcaagcaaggcgccaccgagtgcgagcggtggctggagaagcccgtcatcgcgctcggcgtcttcctcatgctcgtctcactcgccggcctcgtcggcgcgtgctgccgcgtgtcgtggctcctctggctctacctcctcgtcatgtttgtcctcatcgttcttctcttcgcctt

SEQ ID NO: 162880 - DNA, 261 bp, Glycine max
gcttgccaagctaggcataaggcccttctcatatgggcttgtggttctctctgtttatgataatggttcagtgttcagccctgaggttcttgatcttactgaggatgacctcattgggaagtttgctgctggtgtctcaatggttacttcactttcattggctatttcatatccaacacttgctgcagcaccacacatgtttgtcaatgcctacaagaatgttcttgctgttgcggttgagacagattattctttcccgga

SEQ ID NO: 162881 - DNA, 262 bp, Glycine max
cccaagcagtgggaggaggctcgggactctgaccgcgtgcctgttgaagaatgagccggcgactcataggcagtggcttggttaagggaaaccaccggagccgtagcgaaagcgacgtcttcacagggcaattgtcactgcttatggacccgaacctgggtgatctatccatgaccaggatgaagcttgggtgaaactaagtggaggtccgaaccgactgatgttgaagaatcagcggatgagttgtcgctaggggtgaaat

SEQ ID NO: 162882 - DNA, 265 bp, Glycine max
cagtcggcaacctcgccctcaaaattcccgttgcttctaaacccgcgctctccgttgttcatccttcttcttctccttgtttctgcaaaatcaagctcaagaattttcctcttcaatccgccgtcgttcctttcattcctccggaaagccacttccccgactcgcaggtgcatcctattgccgccacgttccacctcagcaagtccgatatcgacaagctcgccggataatccatcttcgccgggaagctctgcctcaaaatctc

SEQ ID NO: 162883 - DNA, 262 bp, Glycine max
gtcaaagttaagcattctcttcctcctagtcttatccttcagttctgtactctcagaactatgcaacccacaagacaaacaagccctactccaaatcaagaaagatcttggaaacccaaccactctctcctcatggcttctaaccactgattgctgcaacagaacatggctaggtgtttcatgcgacaccgacacccaaacataccgcgtcaacgacctcgacctctccgatcttaacctccccaaaccctactctattcct

SEQ ID NO: 162884 - DNA, 238 bp, Glycine max
ggttcatgttggattttaatagccatagtgacgtattgatcattcttggcctttcaactaaatagtatttgtgtagtaaattaaaggcacttggatgtaccaaacttcatgctttttgtaggagtgcgtaggttttaaaaattttctgatgtatctttcatgtgtttgttggttttgtaacagaatatttcctatattatacatatatttgagtcactaaaaaaagaaatataagata

SEQ ID NO: 162885 - DNA, 265 bp, Glycine max
aaaaaatctacactatctatccttccacaacacaacacaattcaataccatttaccaaactcactcatcaattctcatctttcttctcactaactattaattcatcatgtcgagcacagctggccaagtcatcaaatgcaaagctgcggtttcatgggaggcagggaagccacttgtgattgaagaagtagaggttgcgccaccacaagctggtgaagtgcgtttgaagatcctctacacctctctttgccacactgatgtttac

SEQ ID NO: 162886 - DNA, 260 bp, Glycine max
cggctcgaggaataggtcatggtggaaacgcgggtagaaagtggagacccaagggatgtgatctgtgatatgtctcaaaagttaggtgctgacttgttaatcatgggtagccacggctatggagttgtaaagagggctttccttggaagtgtgagcaattactgctcacagaacgtgaagtgcccagttttgatagtcaagaagccaaaaccatctgctggtgctggaaaatgatctgccacttttgttctgtttttggg

SEQ ID NO: 162887 - DNA, 262 bp, Glycine max
aaaatttttaaactttgtggttcaccttctgaggactattggagaaaatcaaagttgcctcatgcaacaatatttaagcctcaacaaccctataggcgatgtgtttctgaaacgttcaaggagtttcctgcacctgcaatagaattgatagagatccttttgtccatagatcctgctgatcgtggaacctcagcatctgctttgaatagtgagttcttctcaaccaagcctctaccttgtgatccctcaagcttaccaaagt

SEQ ID NO: 162888 - DNA, 260 bp, Glycine max
cggctcgaggttcacggtgtcaaatctatcaagctctatgttcctcctcgtgttattcatagctcttgtctctcatacacacggaagcaagatcgaccaccatagaagcaacaaacatgttgccctcttcatttttggcgattctttcttagatgctggcaataacaactacatcaacgcaacaacccttggccaagcaaatttctggccctatggggaaacatacttcaagttcccaacggggagattctctgatggac

SEQ ID NO: 162889 - DNA, 264 bp, Glycine max
cttcttaattcaacaatggcagataactcaattagcttattttctccatacaacaagatgggcaaattcaacctctctcatagggtggtattggctcccatgaccagatgcagagcgctcaatgggactccactggcagcacatgctgaatactacgctcagagatcaacaccgggtggatttctcatcactgaaggcaccttgatctctccaacttcttctgggtttcctcatgttcctggaatatactcagatgaacaggta

SEQ ID NO: 162890 - DNA, 264 bp, Glycine max
aacaccccaagtttgctatcactaagagtgtgaactatcttccaaatgtgctctcaaaggtggaagctgaagaagctggtgcttttgtaggcatttggcttgatggtgaaggttttgttgctgaagggcctaatatgaatgtggcctttgtcactaaagataaggaacttataatgccacactttgacaaaattctaagtggctgcacagctaagagagttttaacccttgctgagagcttgttaagggagggtaagcttaaag

SEQ ID NO: 162891 - DNA, 260 bp, Glycine max
ctcgagccgtgaaaacctaaggaaagtggatggggatgataacacatgtataatagtgggaaaggtggtggtcaccaaaaatccttgccttcacccaggagacatcagagtccttgatgctatctacagtgaagaattagaggagaagggtttgagggattgccttgtatttccacaaaaaggacataggcctcatccaaatgaatgctctggaggtgatctcgatggagatttgtttttcataagttgggacaaagatc

SEQ ID NO: 162892 - DNA, 263 bp, Glycine max
atttttcagcaccccaccaaggttttgtccgaaaagcttgaatttttcgcctaccctttacaatgatctcttcattgagacaacctgttgtagggatcagtggttctgatcttcttttgaggcaaagacatgcaaccctaattaaggcaaggtcctttttaccctctttgtcaagagaaaagggtcaaagatctcttgtttcagttcaaaagccacttcacattgctgcttctcttggtgttggaaattttgtgtcagtgaag

SEQ ID NO: 162893 - DNA, 262 bp, Glycine max
ggttattatgtaagctatgacaattggggtaataaagaagaggttgatcctgccaatataaggtcaattcaagaaggttctgttgatgctttattagaagctgagcgagttgctgaagcaacaaaacaggccatcaaacgaaaaattgtgcaagctgcatctatcgatttacagtctcggagtctacctgcaaagcttcgtatagaggctgatgatcctgaggatgtgaaagcttcgaaacgcaagaaaatacatgccttta

SEQ ID NO: 162894 - DNA, 263 bp, Glycine max
cggccatgttgagatacttaagagggctagggagcttggtgactttcttctagttggtatccactcagatgagacagtgagtgagcatagaggaaatcactatccaattatgcatctgcatgagcgtaccttagtgtgttagcttgccgttatgttgatgaagttattattggttcaccttgggaaattacaaatgacatgatcaccactttcaatatctcagtagttgtgcatggtactgttgctgagaagacattaaattg

SEQ ID NO: 162895 - DNA, 259 bp, Glycine max
ggagttgaaagaaagaaaggaaggatgggagtgacaccgaaaattgctccttcgatgctctcttccgacttcgccaatttggcttccgaggctcagcgcatgctccacttcggcgccgattggctccacatggacatcatggatgggcattttgtccccaatttaactattggcgctccagttattgaaagtttgagaaagcacacaaagggatatttggattgtcaccttatggttacaaatcctcttgattatgttg

SEQ ID NO: 162896 - DNA, 263 bp, Glycine max
gtagaagagaaggttcctttggaacacttatttctatttcagtataccgggtctctttctttcatttcaaaaaatttatagaatttcgattttgaaatgaaagaaaagtgtggggataaatataaatgacaaaaagatattggaacataatcttggaagagatgatggaagcaggagttcattttggccacggtactagaaaatggaatcctaaaatgtcaccttagatatctgcaaagcgtaagggtattcatattataaat

SEQ ID NO: 162897 - DNA, 260 bp, Glycine max
gccacgagtgttggtgagaagaatgtgttgatttttgaccttggtggtgggacatttgatgtgtctttactcaccattgaggagggtatctttgaggtgaaagccactgctggtgacacccatcttggaggtgaagattttgataacaggatggtgaaccactttgttcaagagttcaagagaaagaacaagaaggacattagtggaaaccccagagcacttagaaggttgaggactgcttgtgagagggccaagagaac

SEQ ID NO: 162898 - DNA, 261 bp, Glycine max
cagctccaagctggaggatctaccagcagtggccctttgcagggagcggtgtggtttccttgacgaagcaattcaccagcgctacgcactggccgcagctcacatggcctacatcaactccctcaaggcaattggtcactccttacaccttttcattcagcaagacatggatgctcctccctctccctctccctccccctccccttctccccctcacaaaccctccaaacacgcctcttcttctcactccgactccgccgg

SEQ ID NO: 162899 - DNA, 261 bp, Glycine max
gaaatggaggacccggaaccgtcaagaagataacagctagtgaaggtgaccaaaccagtttcgtgctgcaaaaagtggatgcaattgacgaggctaacttggtatacgactacagcatagtgggagggacggggttgcatgaaagtttggagaaggttacattccaaacaaaggtggttcctggcactgatggtaatggctctatcgccaaggccactctcacattccacaccaaagacgatgcaccactctcagatgcag

SEQ ID NO: 162900 - DNA, 262 bp, Glycine max
taacgcactcttctaaacttaacacaatggagcttagcaaattgacgttagagatcttctcaaaattggagcagcaatggctctcgcactacgaagcatcaaccaaaacgcgcattctcagcattgacggcggaggaaccaccgccattgtcgccggcgcttccctcgtccacctcgaggaccagatccgcgcccaaacctccgatcctcacgcgcaaatcactgatgactttgacatcatcgccggcaccggcattggcgc

SEQ ID NO: 162901 - DNA, 255 bp, Glycine max
atgatattgattttccaagaggtcatatagcacttaagagtttcaatgcagaggtagttgatgaagcagggaaccctgtgcctcttcatgaaacttatctccaccactgggttgttggaagatactataacctaaatatgtgacgacacacacaaactatgatggacataggatacttcacaactctgaccatatatttgtgaggaacagcggcatatgccagagagatattctaggacaatactatggccttgg

SEQ ID NO: 162902 - DNA, 256 bp, Glycine max
tgagaatggagtttcaagggttaccggaaggttgcattgctagtatactctctcgcactacgccggcggacgtgtgtaggttttccgtcgtatcaaagattttccgttcggccgctgaatcggacgctggtggaaacgttttctcccttccgattaccattccatcatttcccagtctccttcgcctctcaactatccttccaagaaggagctctatctcgctctctcggatcgccctatcatcatcgatcagggt

SEQ ID NO: 162903 - DNA, 253 bp, Glycine max
atcttgttgacatacatgttcctgatggaaaacattttactgtttgtggtgatgtgcatggtcagtactatgatcttctgaatatttttgagcttaatgggcttccttcagaagagaatccgtatctattaatggtgactttgtggataggggatccttttcattggaagttatcctcactttgtttgcatttaagtgcatgtctccatcagccatatatttagccagaggaaatcatgagagcaagagcatg

SEQ ID NO: 162904 - DNA, 255 bp, Glycine max
cacaagcacaagcacaagcacttctctaattccctttcacactctattacagatttcacaagtgcttacacttcaaatggctttggaagctcttcaatcacccaccacatccactccatcgtttattcctttgaagaaaccagtctcagttacttagagacaccgtggacgaaaggaaagcgttctaagcgtagcagcacggagcaacaactgcaacacccttcatgcaccgaggaagagtacctcactctttgt

SEQ ID NO: 162905 - DNA, 145 bp, Glycine max
attgggtggtccatcatggacaatagggttagggagaagagattcaaccactgcaagtaaagatgctgccactagtgatatcccatcccctctaatggatctcaatgatctcatatctgccttttcaacaaggggtttacctccc

SEQ ID NO: 162906 - DNA, 255 bp, Glycine max
gtaacactagaactcacaaaggacagaagaaacgcgaatgccaggagaactccaattaccacccgggttcagattccaccccactgacgatgagcttgtgaatcactacttgtgtagaaagtgtgctgcacaaaccattgctgttcccatcatcaaagaaatcgatttgtacaagtttgatccatggcagcttccagagatggctctttacggtgagaaagagtggtactttttctctcctcgagaccgaaaata

SEQ ID NO: 162907 - DNA, 255 bp, Glycine max
tgactgttgatttctttcggaagcttcctcaagatgttgataagggtggcaatcccacacattcaatttttgatagatataatgattcatatctaaggcgaattggaaccacaattttgtcatatgtcatatggtctgtgctacactgcggaattcaattcccaagtccatcgtctattgtcaagtgcgggaggcaaaacgaagtctacttgatcacttttttaccgagctaggcaaaatggagaccaagcgtct

SEQ ID NO: 162908 - DNA, 256 bp, Glycine max
ctctgcatctgactcctatagtttcctctgctaattccatatccccgttttccttcactcttgaaccccgattcatttccaccagcacaagaagcatggctgcaatatcaataccttctcacatgaaagcttggacatactctgagtatggaaaatccaaggaagttctcaagtttaatcagagtgtggctttgcctgaggtgaaggaagaccaggtcctcatcaaggtcgctgctgcttcccttaaccccattga

SEQ ID NO: 162909 - DNA, 254 bp, Glycine max
ctcagccatatccccatcgcaacttttctgaggaagttgctattcttgatggctactttggcaaacttggtgcaggaagcaatgcttatattttgggtggccaagacaaagcacagaactggcatgttactctgcttctgcagattctgtaactcaatgtgacaatgtttacactcttgagatgtgcatgactggcctggatagagagaaagcacaggttttctacaaagaacaatctgcttcagctgccatga

SEQ ID NO: 162910 - DNA, 255 bp, Glycine max
caaagggcactttgtttcccatgtgtggaatgaacttggcctttgatcgtgatctcataggagcagcaatgtactttggtctcatgggtgatggtcagcctattggacgctacgacgacatgtgggctgctggtgctgcaaggtaatctgtgatcacttgggattgggaatcaagactggtctgccctatatctatcacagcaaggccagcaacccatttgtgaacttgaagaaagagtacaaaggcatattctg

SEQ ID NO: 162911 - DNA, 253 bp, Glycine max
atccctagcatgaacaagccgaggaagatgtgctctggggtatttatggatggaaagttttatgttattggtggaattggtggaaaagattctaagcttcttacatgtggtgaggagtacaatataaaactagaacatggacagaaattcctaacatgtcccctggacgcagtgccaggggagctgaaatgcctgcaacagctgaggcgccacctctggttgccgttgtaaatgatgaattatatgctgctga

SEQ ID NO: 162912 - DNA, 253 bp, Glycine max
ggattatcttataggataataccaaattagaatgaaaattatcctgtgagaagtgaaattgtgattgtgaattgaatgaaggatgctcgaatttgagttattgatatggcttttgagtcgcactatgttttgttgctctgttccttcaaagaacaattgcagcagcatgtccgggtccatgcaatggaagcagtaatggcttgttgggatatagagcaatcattgcagagtctaacaggagtttcacctggag

SEQ ID NO: 162913 - DNA, 253 bp, Glycine max
cctaattgaatccaagcaagcaagggaagtgggggtattatttgatcagaagtacaaagctcttcaaaacccaaacaacagctccacggaccacccctactgctctgctctgcaatggccgacgagaacctgttgatcagaagagatatcttgaagagtcttgcaaaccaaaatgtgtaaaaccattactggaataccaggcgtgcattaaaaggatacatggtgatgattctgggcagaaacactgcactgg

SEQ ID NO: 162914 - DNA, 252 bp, Glycine max
tccaattgtaagatgcagtctagcatcgcagggttacaccgtcccgagtgttcttatatttgactgtttgattcattcatatcacatttatttcctttcttggtgctggtttggcttttgatctagctcatgtgtagctataatcatgtgtttcagtcatcctcagtttgtttattgaaaataagaaacgaaacttgctctttcaatatgtatttaggagaataaagttattttagaacatgaagtgcctgc

SEQ ID NO: 162915 - DNA, 254 bp, Glycine max
tgccactgccgctgcaggcatagcttccttgttttcttcttctattaacagtgtcaaatgtcttcgttcctccaagaactgctccattatagacccccttataaccacagtgccctcaaaccgtggcatgttgtgtcacacttggtggaacctttgtccattgggggtgccattaattcgcacaagttgtgggggcctagaatttctgctgctgttgcacaagaagaggctgttgttgtggctgatgatgaggt

SEQ ID NO: 162916 - DNA, 254 bp, Glycine max
agtcttcaatactgatgattattgctgcagagggacttatggaaaccctgcaacatgtttggcttcaaactactccaagatcttcaaacaagtgtgccctgcagcatatagttttgcacttgatgaccaacaagtctaataacttgttcaaaagcagactttgttgtgatattctgtggatcaaggaatcagacagcttgttcctatcaagacaagcaggttgtatgtaatcgaccaaataaagcctataaagc

SEQ ID NO: 162917 - DNA, 254 bp, Glycine max
tggaagttgtgctagagtctccaagggtggcaccacacagatgagatttcagcctcgtctcgggaggtaccttgcttcagcggcagagaatattgtgtctatttttgatgtggagacacaagtgtgtgatattcactaaagggacacacaaaaccggtggtttgtgtgtgttgggacccttctggggagttgctggcatctgtgagtgaggactctgtcagggtttggactcttggatcagggagtgatgggga

SEQ ID NO: 162918 - DNA, 251 bp, Glycine max
gaaaccccaatttcagtaagtatgtgaggttcaacactatgcaagccgttgtccttgatgtgctcttgattttccctgacctccttgaaagagggtttaatcccaaagatgggttgggattggatttataatgagtttggatagcactgtgtttttgttcctcttggtgtgcttgatttatggttcttcttcttgcttgctgggtcaaatccccagattacccattgttgctgaggcagctgataggcaag

SEQ ID NO: 162919 - DNA, 255 bp, Glycine max
aatcttcatcatgcacaagagctcttcagattccacgttgggcccgggtggcctggacctctcccaggccttcttcaggcccataaacaacgccgcccctccctccccgaccaagcgccacaacaagatctccgtcatcggcgccggcaacgtgggaatggccatcgcgcagaccatcctcactcaggacctcaccgacgagctcgtcctcgtcgacaccaactccgacaagctccgcggcgagatgctcgacct

SEQ ID NO: 162920 - DNA, 251 bp, Glycine max
atatcttccaagtgcaacaccgggaccattagttaagtatagagaagaagagttgaagattttaagaggagatggaacgggagagcgcaaggaacatgaaaggatctatgattatgatgtctacaagatttgggtaatccagatgaagatgtaaagcttgctcgtccagttcttggaggctccagcacctatccttatcctcgtagggttagaactggtagaaaagccaccaagaaagatcctaaaagcga

SEQ ID NO: 162921 - DNA, 252 bp, Glycine max
caacttcaccgtcttcttcctcgatcatgtctcacttcaagggcaagtaccatgatgagcttattgccaatgctgcttacattggcactcctggaaagggtattcttgctgctgatgagtcaacagggacaattggcaagcgtttggccagcatcagtgtagagaatgttgaatccaacaggcgtgctcttagggagctgcttttcaccgctcccggtgctcttaaatatctcagtggtgtcatcctctttg

SEQ ID NO: 162922 - DNA, 112 bp, Glycine max
ggcgatgactgcctccaaggatcgcgagaacttcgtctacatcgccaaactcgccgagcaggccgagcgttacgaagagatggtggaatcaatgaagaacgttgcgaatctc

SEQ ID NO: 162923 - DNA, 252 bp, Glycine max
gccaagggcttcgcaaggtgaagccttaccttgctatattgtcccttcagtttggctactcagggatgtatatcatcactatggtttctttcaagcatggcatgagtcattggatactctcagtgaccgtcatgtagttgctgctattataatagtcccttttgcacttgtccttgaaagaaaaataagaccaaagatgactcttcccatcttcctgaggatagtggcacttggtttccttgagccagtgct

SEQ ID NO: 162924 - DNA, 253 bp, Glycine max
cggatctagagtcttcagtttctcctcgttgttcttcgctttcctgttttcaatttcgattctttcgttaatttaataagatgtttgggagggcaccgaagaagagcgataatacgaggtactacgaatcctcggcgtctccaagaacgcttcgcaggatgatctgaagaaggcttacaagaaagccgccattaagaatcaccccgacaagggcggtgatcccgagaagtttaaagagctggcgcaagttatg

SEQ ID NO: 162925 - DNA, 253 bp, Glycine max
gcaatttggacctccaaaccaacctgaagtcagtattcttgactaccagtctcaacagcataagcttatgccaatgctggcttcaacttatgcttttcattttgccacgacaaatctagtggagaatactctcaaatgaaaaaaactcatgatgatgaattagttgcagatgtccatgccctttcggcaggtctaaaggcttatgtaacatcatacactgcaaagtcactcagcatctgtagggaagcctgtg

SEQ ID NO: 162926 - DNA, 254 bp, Glycine max
gggaagccaaagcgaaaccctaaccctaacggagagatggcggacacttggcatcgatattcgggacggagaaggacagggtgaactgtccgttctacttcaagatcggcgcgtgcaggcacggcgccggtgctcccggcttcacacgaagcccacaattagcccaacgttggttctgtcgaacatgtaccagaggcccgacatgaacatgaacatcatcaccaaccccgatcagccccagccccaatctctcg

SEQ ID NO: 162927 - DNA, 252 bp, Glycine max
ccacaacccacaagtctttacgaggtccaagaggtggtatgatattcttcaagaaagatactgtgcatggggttgatttggagcctgccattaacaatgctgtttttcctggtctacaggggggtctcataaccacacaattggaggactagcagtttgcttgaagtatgctcagtctccagaatttaaaaattatcaaaatcaggtggttgctaactgtagagctcttgctaagcgattaattgagcatgg

SEQ ID NO: 162928 - DNA, 250 bp, Glycine max
tgtttgtgtagaagatgaaaagggaacagcaagagggatgccgagctttgattcacaattgcccaattccaatgcatgctatacagagggaagcgcaattgattctttttgtgtgtttgactttgatcaatcagttggatatcgcatagaggattgtgttgccttgaggggaaactcagtttttgactcactaaaagtaagtagccaaacaatttctcggggtcctgttgaagttgattcctttgataag

SEQ ID NO: 162929 - DNA, 252 bp, Glycine max
ctgggacatcccaagctgactgtgctgttcttatcattgattcgaccactggtggttttgaagctggtatttccaaggatggacagactcgtgaacatgctctgctttcattcacccttggtgtgaacagatgatttgctgctgtaacaaaatggatgctactacacccaagtattccaaggccaggtatgatgaaattgtgaaggaagtctcttcctacttgaagaaagtaggatacaaccctgacaagat

SEQ ID NO: 162930 - DNA, 252 bp, Glycine max
accacacaattcctacacatttctactctttagtttctccaattttctttctcaattctcaacaatggccactacaacacaacttcacttaccccctggattcagattccatccaacagatgaagactcgtcatccactacctttgtcgcaaatgcgcttcgcaacatatcgcggttcccataatcgccgaaattgatctgtacaagtacgacccttgggaccttccaggaatggctttgtacggagagaaa

SEQ ID NO: 162931 - DNA, 253 bp, Glycine max
ctttcatagctactacactactttatcactttcattctttaattgggttcaaagaagcttaattaattggttgcagagattgaaaattaggaaaatggtgagtgttgaagagattcgtaaggcacacgtgcggaaggccctgccaccgtgatggctattggcacggccactcctcccaactgcgtagaccagagtacctatcctgactattatttcaggatcaccaacagtgatcacatgaccgagctcaaag

SEQ ID NO: 162932 - DNA, 248 bp, Glycine max
aagaaatttaagtgaggagctagagaatgatgatgaagtctgctatgtgtgcagtggtggttgtagcacttcttcttctggcggaggtgggacccatggctgaggctgtgacatgcaccccacagagttgagtccgtgtcttccagcaatcacttccggtgctaaaccttccaatgcttgttgcacgaagctgaagcagcaaaaaccatgcttatgtggctacctcaaaaacgctagcttgaagcagt

SEQ ID NO: 162933 - DNA, 250 bp, Glycine max
caccttcgtaggagccttacctctctctctctctctctctctctctccattccgtagtatccctctgttcgacccttttacttagcattccctgtttccggtattcgctccctttttttttctgattctgtctggttttacttagatctctgtcccgcaccagatctggtgcagggtgagagggttgggttcattaattttgtatcaatcttccttctgagcggtacgcgtggggataccagagtctttt

SEQ ID NO: 162934 - DNA, 251 bp, Glycine max
caccttcgtaggagccttacctctctctctctctctctctctctctccattccgtagtatccctctgttcgacccttttacttagcattccctgtttccggtattcgctccctttttttttatgattctgtctggttttacttatatctctgtcccgcaccagatctggtgcagggtgagagggttgggttcattaattttgtatcaatcttccttctgagcggtaggcgtggggataccagagtcttttc

SEQ ID NO: 162935 - DNA, 250 bp, Glycine max
atctaatcactctagctgttgcaaatttctactatttttcaatggcttctgcagatgttgagttccgttgctttgttggtgggcttgcttgggtcaccggcaacgatgccctcgagaaagcctttcaatctacggcgacatcgttgaatcgaaggttatcaacgaccgtgagactggaaggtccagaggattcggatttgtgaccttcgcctcagagcagtcaatgaaagatgcgatcgcaggaatgaac

SEQ ID NO: 162936 - DNA, 248 bp, Glycine max
gctgatgcacccggcgaatcggagggttttccgcaaggacgaaagaggggttgtgagtgcagttcatctcttgaacccttcgttgcaggggttggataagaagtaccctgtttcgttgctcgtttgcttgttcattccaagagttgcaggaagcaaatggtggctgctggagcctgtgtatatacgcagaagcttgttgagatggatgttcccgggtcgaagaaattcttggagagcctcgggcgtgg

SEQ ID NO: 162937 - DNA, 269 bp, Glycine max
attcccttgtgttgtgcctccaaaagtcacgtgcgacgacacgtcgtcacgtgtcgacaccgtgttgggcctttgtgtgtcgtttatgtataagaatgcgtgtgggtttgggtgttaaggtatcgttgggtgtgatcggtgtgagtctaatatttgcagtgctgaaaatgtcgcagttgttggacaaagccaaaaactatgttgcggagaaagtcacgaacatgcccaagcccgaggcgagtgtcaccgacgtggatttcaagcgcgtg

SEQ ID NO: 162938 - DNA, 275 bp, Glycine max
ggctcgagctcgagccgcaaaaatggatgattctggaagtaaaactaaactgttgaatccatggatgctccacttccagaaactcgctctcgaactcaagtgccctctctgtttgagtttgttcaagaggccggtgttacttccatgcaaccacttgttctgcaattcatgtttggctgattgcataacggctgggcctggatgtgctgtttgtaaggcaacgtatgctcaaacagatgttaggcatgtgccttttgtggaaaacgtggtggcaa

SEQ ID NO: 162939 - DNA, 264 bp, Glycine max
gcagtatgagtttaagatcacatcttgcttccatgaaaacttgcccctaatactgacaagggttgtccttgggatagccttacaagtcgtatgcagttacatcacattccctctctattccctagtaacacagatgggatctcacatgaagaaaacaatctttgaggagcaaactgcaaaggcacttaagaaatggcaaaaggctgcaaaggacaagagaaagttaaggaaagcaggaatagatattccttcagggactatgag

SEQ ID NO: 162940 - DNA, 262 bp, Glycine max
caaccttgactggtacaagggaccaactctccttgaggctcttgaccaaatcaatgagcccaagaggccctccgacaagcctctaaggcttccattgcaggatgtctacaagattggtggtattggtactgtgccagtgggacgtgtagagactggggttgtgaagcctggtatggtggtgacttttggtcccactgggctgacaactgaggttaagtctgttgagatgcaccatgaggctctcacagaggctcttccaggt

SEQ ID NO: 162941 - DNA, 263 bp, Glycine max
attcaggacaaagagggtatcccaccagaccaacagaggctcatctttgctggaaagcagctagaagatggccgaaccttggctgattacaacatccaaaaagaatctaccctccacttggttctccgccttcgtggtgggatgcaaatctttgtcaagactctcactggaaagaccatcacccttgaggtggagagctctgacactattgacaatgtcaaagccaagattcaggacaaagaaggtatcccaccagaccaaca

SEQ ID NO: 162942 - DNA, 263 bp, Glycine max
gttcgttcgctcttaccttcttcaccttccttcctctctctctctagagaatggaaccggaatccggaacttcgacttctcggaatccttctcagttgtcttgggtgaatctgtctaggaatttattattagcgtatcaaagctttggtgtggtgtatggagatctgagcacttctcctctctatgtcttcacaagcaccttcaaggggaagttgcagaatcaccatgacgaggaaactatattcggcacgttttcgttgatt

SEQ ID NO: 162943 - DNA, 264 bp, Glycine max
cacaaaatcaagcacacaagcagattcacttctctgttctgacacacatattaagttcccgagaaagatctagagagtaattaagatgggtacgtggttcacaaatgcaaggccgtatctgctgttagtggcagttcaatttgggtctgctggcatgttcatatttgcgatggatgctataaagaagggtatgagccattacgtgttcatcgtctatcgtaatgccatcgcctctgtatctcttgctcccttcgcatttgttct

SEQ ID NO: 162944 - DNA, 263 bp, Glycine max
ggcattttgggcatcgcttgggccttcggtggcatgatcttcatccttgtttactgcactgccggaatctctgggggacacatcaaccctgcggtgacattcgggttgttccttggacgcaaggtgtctttggtgagggcgttgttgtacatgatagcacagtgtgccggtgcaatctgcggtgctgggttggccaaagggttccagaaatcgttctacaacaggtacggaggtggggttaacactgtcagcgatggctacaa

SEQ ID NO: 162945 - DNA, 263 bp, Glycine max
tcccaatttcgcgataccaaaacctcagcaatcaacaatgtcgtttttctcaaggggccgtcgcgacgacgacacggtggacgactacgacgagtacgaccccaccccttacggcggcggctacgacatcgccctcacctacggccgccccatcccaccctccgatgagacctgctaccctctaggagcctcttcttctgatgacaacttcgattatgatcgccctcaatacacctctaacgctgaaccctctgcttatggtg

SEQ ID NO: 162946 - DNA, 263 bp, Glycine max
gcctgaaaaggggtctcctgaatatgatgcgttggctaagaaccctgagaaggagtttttgaagactattactggcaagaaggagaccctcattgaccttacagttatagaaatcttgtcaaggcacgcatctgatgagttctaccttgggcagagagatggtggtgactactggacttctgatgccggtccattagaggcatttaagaggtttggaaagaagcttgaagagattgaaaagaagcttatagagaagaacaaag

SEQ ID NO: 162947 - DNA, 259 bp, Glycine max
gtgttgatcactttggttttgaggattgtctaaatgacccccgtgagtcagagactttccggccattagacatgcatcatgggatggaagttcgccttggtctatctaagggaccagtgtacccaagtattatataattaaatttgactgttattctagtaccagaaaacagtattttgtgatcgaagcttcttgttattcattaaaatggaagtgtccgaggattctccatatgtagtcgtggacttgtgttttccta

SEQ ID NO: 162948 - DNA, 260 bp, Glycine max
tctcatggcatcttcttctggtagtttagacacctctgcaagtgcaaactccttcaccaacttcaccttctccacacaccctttcatgtccacttctttctctgaccttcttgcttctcccacagacaacaacaaaccaccacatggtggtggtggtggtttgtctgagagaactggctctggtgtccccaaattcaagtccacaccaccaccttctctgcctctctctccccctcccatttctccttcttcctactttt

SEQ ID NO: 162949 - DNA, 256 bp, Glycine max
ggtttctttaacaagggactggtccctgggctttgttttggtgcgggtcttggaattactgtctttgggatggcctacatgtttgtacacgatggattggttcacaagagattcccggtgggccccatagccaacgtgccctatctcagaagggtggcctctgctcaccaacttcaccattcggaaaaattcgatggagtgccttatgggctgtttatgggaccaaaggaagttgaagaggtgggggggctagaag

SEQ ID NO: 162950 - DNA, 259 bp, Glycine max
cttgctggttgccacactacaccgatatttccaccaaacccgtttgcgttgttgtttgcgaataaatggcgactaagaggagcgtgggaacgttgaaggagggtgatttgaaggggaagagggtattcgtgagggtcgatctgaacgtgcctttggatgacaaccttaacatcaccgatgacactagagtccgtgctgctgttcccaccatcaagtacttgactggttatggtgctaaagtgatcctttctagccattt

SEQ ID NO: 162951 - DNA, 260 bp, Glycine max
cagaggtgttgagtgagttcaaatcaattttaggcagaaaaatgaggtgttttggtcttgtagtgataggtctagtggttgtgcttggagggttacccttctcttcaaatgcaggattagatcccttcttttacaagaagagttgtccccaggtgcatttcattgtatttagagtcgtagagaaagtttcaagaaccgatacacgtatgcctgccagcctcgtcaggcttttctttcatgactgctttgttcaaggctgt

SEQ ID NO: 162952 - DNA, 260 bp, Glycine max
ctcactcgttcattccaacctacccttattcttcttcttcaattccacacccatcatggcacgttttccgatcctctttctcctcgccaccctcatcaccctcgcctccggtgcccgccacgatattctccggttaccctccgaagcatccacttttttcaaagcacccggtggcgatcaaaacgatgagggcacgaggtgggccgttttaattgccggttccaatggctactggaattacaggcaccagtctgatgttt

SEQ ID NO: 162953 - DNA, 259 bp, Glycine max
gctaacccacagtccctccctcacccacgtctctccccgcttcagatcttaaacgtctttcgctgttccaagatgggtgtggctgagaacattcccgatatggaggagggtaccttggagattggaatggaatacagaactgtatctggagttgctggaccattggtcattcttgacaaagttaagggacccaaatttcaagagattgttaatattcgtttaggagatggaactactcggcgtggacaagttctagagg

SEQ ID NO: 162954 - DNA, 260 bp, Glycine max
aatcaatcttctgagagcgtttggttgaaagtagcaaagatgtttcctttcgggcaaaagggtcaaaagataaaggggactatggtggttatgcagaagaatgtgttggatatcaacagcatcaccagtgttggagggatcgttgaccaagtcttaggcttcataggcagtgcagtcgatgcacttacttttgcagccaccaaaatctccatccagttgattagtgctaccaaggctgatggtgggaaaggaaaaattgg

SEQ ID NO: 162955 - DNA, 258 bp, Glycine max
ggttggcggattaaccctaatttgtacgaagaagggaaggtttgccttagccttctaaatacatggacaggcagaggaaatgaagtatgggatcctaaatcttctagcatccttcaggtcctagtttcactgcaaggcttagtactcaactctaagccttacttcaatgaagctgggtatgataagcaggttggaacagccgaaggagagaaaaattcattgtcatacaatgagaatacctttttacttaactgcaag

SEQ ID NO: 162956 - DNA, 150 bp, Glycine max
ttctcatatcctcaatcaccccccctcgcactcgctcttcccttcctctggtggcgacaatgtcgactcctgctaggcagaggctgatgagagacttcaagacgctgcaacatgacccgcctgcagggatcagtggtgccccccaggata

SEQ ID NO: 162957 - DNA, 257 bp, Glycine max
caaacgtttcagggaagtcgctgataagtgcggacattgcttctctgcgacatggcgcacactagctgccttctggcgcgcaagaagtgaacagctccttcaagtattccgacattatgaccaccacgactcacaatagcttacggtgcccacgtgcggggatgatcttttaccggaatggccccaagccgccgtagaaggggcagccggagaacgcggtttatgatttcgaggacaagattaacttcgcggtgttc

SEQ ID NO: 162958 - DNA, 258 bp, Glycine max; identical to SEQ ID NO: 156644

SEQ ID NO: 162959 - DNA, 258 bp, Glycine max
cacattttctgtgcgctctaacaaacattctcgttcacactttcagattgtgtgaagatgggggcgggtggccgaactgatgttcctcctgccaacaggaagtcagaggttgaccctttgaagcgggtgccatttgaaaaacctccatttagtctcagccaaatcaagaaggtcattccacctcactgtttccagcgttctgttttccgctcattctcctatgttgtttacgacctcaccatagccttctgcctctat

SEQ ID NO: 162960 - DNA, 258 bp, Glycine max
gccagctagggcttgagatctcatatatcatggctacctccatggtgaagcttatgcttttctctgctctcagactcttgtccttgcaagcagttgtgtctgtaacaccactgcattttcaacatccactagaccctttaaccaaacaagagataagtcttgtccaaaccatagtccaaaacaagtacccaagctcaagtaacaggttgagcttccactacattggactcgacgaacctgaaaaggatgccatcctca

SEQ ID NO: 162961 - DNA, 263 bp, Glycine max
gtcaacttccggcgccggcaggtacatggcttttccgccgtctccgtccgcgcctccgtcgccgcacctctccggtcttcgctccactcccctctccgacccggacaaatatctagctgagttgttgggagaacgtaacaagcttagtcccttcatggctgtgcttcctcactgctttcgattgtttaaccaagaaattttgcgtgtaaccacgctgatggggaatgcatcagttttaggtcaaagtgggcttgaacacgcta

SEQ ID NO: 162962 - DNA, 260 bp, Glycine max
tgttaactggcgtgatgctcttgctgtggtagcagaggttgcccaccaagtcaaaccggaagaaattgttggcatagctggcaaactttctgatgctgagtccatgattgcactaaaagatttcataaataggatggggtcaaatgatgtatggggtgaaggcattggtgtaaatactaatgctgatttcagatcaggatatattatgaatactagcattgctggtcttgaaaaagcggatgcgttcctgttggttggca

SEQ ID NO: 162963 - DNA, 253 bp, Glycine max
tatatatctggaatggcatttacacctgagccagtagttcccccagtcagtgctcgccctgatcaagtggaaaaggttcttaaaactcggtatcacgatgccaagaataaactgcaaggaaaagagcttgatttactcattgttatcttgccggataataatggatcactatatggtgacctcaaacgtatttgtgagacagatctaggacttgtttcacaatgttgctaactaagcatgtcttcaaatgagc

SEQ ID NO: 162964 - DNA, 272 bp, Glycine max
cttctccttgctttgaccttttgccggttgttgtgttgcattggtgcaaatggcgttcttcagaagcgtttctgcactttctcgacttcgctctcgcgtgggccagcaatctaatcttgcgaattcagttagatggctccaaactccgagctccagtaacactgatctttattctgagttgaaggaactagttccagagtatcaggaacgtgttaagaagctgaagaaagatcatggaagtgttgaattgggaaaaattactgttgatatgg

SEQ ID NO: 162965 - DNA, 258 bp, Glycine max
caggcaagccccactcaaccaccacacctctcctcgttcacgctacccctttctgctcttcttctacctttcaagttttaaaagtataaagatggcagagacattcctatttacctcagagtcggtgaacgagggacaccctgacaagctctgcgaccaaatctccgatgctgtcctcgacgcttgcctcgagcaggacccagacagcaaagttgcctgcgaaacatgcatcaaaaccaacttggtcatggtcttcgg

SEQ ID NO: 162966 - DNA, 254 bp, Glycine max
atcctgtcttctcgtgctggccagtctagagctgactaagaaaggagttgtgctgcaaaatattctttgaccacccatctgttttaacctctttttagagggggtgagggaggtaattattagtttttccgagcttagcaatgttcaggcagcattttcaggctttagcaattgtgtgaaagttcaattcaccatttgtggtgtttgtttgtgtaattaggtttatgtttacttaataaagcttcttaagcttc

SEQ ID NO: 162967 - DNA, 256 bp, Glycine max
ctaatctccatctaatagtgttaatttgtctttctctatctctatcggtcatgggtgcttttgcttttgatgaggaaaactcctccaccgtggctccggcaacactctacaaagctctgacaaaagatgctgacactatcatcccaaagattattggggccatccaaactattgaaatcgttgaaggaaatggaggacccggaaccgtcaagaagataacagctagtgaaggtgaccaaaccagtttcgtgctgca

SEQ ID NO: 162968 - DNA, 256 bp, Glycine max
  unsure (1)..(256): unsure at all n locations
cggctcgagctcgagccgattcggctcgagaatagtgttaatttgtctttctctatctctatcgactatgagtngttttgcttttgatgaggaaaactcctccaccgtggctccggcaacactctacaaagctctgacaaaagatgctgacactatcatcccaaagattattggggccatccaaactattgaaatcgttgaaggaaatggaggacccggaaccgtcaagaagataacagctagtgaaggtgaccaa

SEQ ID NO: 162969 - DNA, 256 bp, Glycine max
gcgattttcggtgaaaaagagtggtactttttcagccccagagacaggaaatacccgaacgggtctcgacccaacagagtagctgggtcgggttattggaaagccaccggaaccgacaagatcatcaccaccgaaggtagaaaagttggcataaaaaaagccctcgttttctacgttggcaaagcccccaagggcaccaaaaccaattggatcatgcacgagtatcgcctcctcgactcttcccgaaagaacactg

SEQ ID NO: 162970 - DNA, 256 bp, Glycine max
gaagaattaagatggctaccttgactgtacctccagttcctccttcccccagagatgatgccatgcagctttaccgtgcttttaagggatttgggtgtgatacaagtgctgttatcaatatacttgctcatcgagatgctacacagcgtgcctacatccagcaagaatacaaagcaatgtattctgaggaactttccaagcgcttagcttcggagcttagtggaaagttagagactgcagttctgctctggttgca

SEQ ID NO: 162971 - DNA, 256 bp, Glycine max
ggctaattcagaagcatgtgttggattctggttcaattgatactgttggcactgtcggtatcctggaactgcatcctggagcaatcaacagcatccccagcaaatctcacctagaaattgacacaagagacattgatgaggaaagaagaaataaagtggttgagaaaattcatcaatcagcaattaaaataaccaaaacacgaggtgtcaagctctctgatttccgtgtcatcaatcaggatccaccagccatttc

SEQ ID NO: 162972 - DNA, 252 bp, Glycine max
ggaacgggtgcaacaatgtccgacgatgaagaagatcaggcagagagtaatgccaacttgtacgaaggaagcatggatggagctgatagtctcagctttggtcctcttgttcccacagaaactgaaagatctttgatggagcgtgtgaggcaggagctgaagcatgagttaaaacagggttacaaggacaagattgtggacataagagaagaaattttacgaaagagaagagcgggaaagctaccaggcgac

SEQ ID NO: 162973 - DNA, 255 bp, Glycine max
aacaaattaaattagtggttaaggttgttggaggagctctaacaagagatggagacacaaaattggttcgaaagagtgaagcctttagcagctgtggtatcaatgcagtttggatatgcagctatggatgttctatccaaggctgcaatgaacaaagggatgagcaactatgtgtttgtcgtttatcgtcatgctgttgcattctttgttatggcccctttggcatggttttttgacaagaaagtaaggccaaag

SEQ ID NO: 162974 - DNA, 253 bp, Glycine max
gacgccgtagagtcagagagagagattcactgaaacagagcgcagaagaaaatacataaactaatccagaaaatgagcagcggcgctggaaaggtggtgtgtgtcaccggcgcttccggttacattgcttcctggatagtcaaattcctcctcaatcgcggctacaccgttaaggccaccgttcgcgacacaagtgatccgaaaaaaataaaccacttggttggcctcgacggtgctaaggagaggctgcacc

SEQ ID NO: 162975 - DNA, 254 bp, Glycine max
tccggcttcaacatgcacagttacctgaagaagcaagagagcttgacaaggagcatagacagattgtaaaggagaaagaagaatctgttcgcaatcaagactttgagaaggccggagagctaagagataaagaaatggatcttaaggcgcagatatctgcacttatagaaaaaggcaaggagatgagtaaggcagaaagtgaggcaggagatgaaggtcccatggtcactgaagttgacatacaacatattgtc

SEQ ID NO: 162976 - DNA, 253 bp, Glycine max
tatgcttccgtcatatctctgcttacactctgtcctccgtttgtcatacttctatggtacaccatgactcttgctgacggatctgtttccgagacattccattatttaaggcagaatgggttgcagggtttgctacatatatggcccacccccactcccaccgcctgcaaaatcattgcagtctatgctgcatttgaggcagcacttcagcttcttcttcccgggaaaaccgtttacggccctatttctccaa

SEQ ID NO: 162977 - DNA, 254 bp, Glycine max
cctcgctctatttctcagtctctgtgtttgcggctgaggattccgaacgagtgaccttcttcgtttctcgcaaagtttaagtaatcatgggtaaggaaaaggttcacatcaacattgtcgtcattggacatgtcgactctgggaagtcaactaccactggtcacttgatctacaagcttggaggtattgacaagcgtgtgattgagaggttcgagaaggaggctgccgagatgaacaagaggtcattcaagtat

SEQ ID NO: 162978 - DNA, 260 bp, Glycine max
gacagatactatcagatttcagaggcggaggcggaggctggagctgcctcaactcaagtcttcaactatctgaatctgaactcatccactcactcgttagcgctgctagaacgaaaactgagtaatggaaagtggagggaactcccttccatcagggtcagatggtgtgaagagaaaggtttcatatttctatgatccagaggttggaaactattattatgggcagggacacccaatgaaacctcataggattcgaatga

SEQ ID NO: 162979 - DNA, 132 bp, Glycine max
gtgttttacaggttagaattgctagaatctttaacacctacgggcctagaatgtgcttagatgatggccgtgttgttagtaacttcgttgctcaggcactacggaaggagcctttgaccgtttatggagatg

SEQ ID NO: 162980 - DNA, 251 bp, Glycine max
gttgaggtttccaatgactgttcctatggggactgctttggttgacatgtatttaaagtgtggttgcgttgaaaaagctaggatcttgtttgatgggatggcaaagaaggatgtgtggatatggaatgtcatgatttgtgggctggcttcacatgatcatgccaaggaggcactcgcgctgtttcagaggttcgttggtgaaggttttcagcccgtgaatgtgacgtttgtgggtgtgcttaatgcttgta

SEQ ID NO: 162981 - DNA, 252 bp, Glycine max
agcagcagcggaagctctagcttgggcagcgaatcacaatggcgagaggattgaagaagcatttgaagaggcttaatgccccaaagcattggatgcttgacaaactgggtggtgcatttgctcctaagccctcatctggaccacacaaatccagggaatgcctgccactcatactcattttgcgaaaccggctgaagtatgctctgacataccgtgaagtcattgctattctgatgcagcgacatgtccttg

SEQ ID NO: 162982 - DNA, 252 bp, Glycine max
ggatggctcaatacggttagtaatgctgcgtcttctgcggcagggaaagtctcaatcccatctggtgctgtttctgctgtctttcatagttccattccttataattcacacaatgcatactcaaaaattcatgccatggagcacttattagtttataccccttctggtcatttaattcaatataaactactgccaccattggtggcagagccaagtgaaactgcttcaagaacagccccagttccttcagca

SEQ ID NO: 162983 - DNA, 252 bp, Glycine max
aagaaagcggtttcacagaccgagaaatcccaatcctatggcagaggaagggaaacccgatgaacagctctttcagcttctctccaatcttctccaccaggtggaatcactgacgaatcaagaagaagttgagctgcgttctaaaattgaaactcttggattagaggttacaaaagttccttcaaagtcaacgcagcaccttaacgaggtgtttttcacttgatgcagagttctcttatccctgttgaaatg

SEQ ID NO: 162984 - DNA, 253 bp, Glycine max
gtcgctccgcaccagtttcaccgcacgaatatcttgttgtttggagcgatccgagaaaaactctgtaaacatgttggtttaccaggacctccttacaggtgatgagcttctctctgactccttccgttacaaggaaattgagaatggaatgctgtgggaagttgaggggaagtgggttgttaaaggagcagttgatgtagacattggtgcaaacccttctgctgagggtggaggagaagatgagggagttgat

SEQ ID NO: 162985 - DNA, 265 bp, Glycine max
cttacaatgatgctgtggtccattgtgcacgcaaaatgtcaagctttggattggtgtcaacacagactcagtatcttttagcatcaatgctaaatgatgatgagtttgtggaaagttttctggtagagagtgcaaaaaggctggcacaaaggcatagagttttcactggggggttggccaaagttggcataaagtgcttgcaaagcaatgctggtctctttgtgtggatggatttaaggcaacttctcaagaagccaacgcttga

SEQ ID NO: 162986 - DNA, 261 bp, Glycine max
attttcaagctctcaacgccatctccagctgcttccttatcagaagcgcttcgccccagagattctcgcttcctctccttcaatccttcttccaacgctattaattacaaaattaacctctccgcttccctccgatccattcactccctccctcttaaaacctccttgcggatcaaatgctcccaaacagatgggaatggaagtcctgcaaagaggacagtgcttcatgatctttatgagaaagaagggcagagtccatgg

SEQ ID NO: 162987 - DNA, 259 bp, Glycine max
tctttctcttgtttattatctcagatagatgatcacaaggccccaatgatgggaagagtcatggaaaaaccaagccaagatcttcttcagcagcaacaacaagccctaaagtgccctcgctgcgagtcttcaaacaccaagttctgctactacaacaactacagcttgtcacagcctaggcacttttgcaaagcctgcaagcgttactggacaagaggtggcactctcagaaacgttcccgttggtggtggctgcagaa

SEQ ID NO: 162988 - DNA, 260 bp, Glycine max
tcgggtgggaagaaacggggacccgctccgtatagaatatttaacctggggaacacgtcgccggttactgttcccactcttgtcagtatattggagcgccatttgaaggtgaaggccaagaggaatattgtggacatgcctggaaacggcgacgttccgtttactcacgcgaatattagttcggcccggagagaactcgggtacaagcccaccaccgatttgcaaaccgggttgaagaagttcgtcaagtggtacctttc

SEQ ID NO: 162989 - DNA, 259 bp, Glycine max
attttccctcactttctcgctccccaaacgcccctctctctcctccaatggccgaccagctcaccgacgaccagatcgccgagttcaaggaggccttcagcctcttcgacaaggacggcgatggttgcattactaccaaggaacttgggactgttatgaggtcacttggtcaaaacccaactgaggcagaactgcaggatatgataaacgaggttgatgctgatggcaacggaaccatcgatttcccagagttcctcaa

SEQ ID NO: 162990 - DNA, 262 bp, Glycine max
ttcttctcttgcggctagggttttagcgcacttcttctagatttaaggaagatgggtaaggaaaaggttcacatcagtattgtggttattggccatgttgactctgggaagtccactaccactggccacctgatctacaagcttggaggcattgacaagcgtgttattgagagatttgagaaggaagctgctgagatgaacaagaggtctttcaagtatgcctgggtgcttgataagcttaaggctgagcgtgaaagaggaa

SEQ ID NO: 162991 - DNA, 267 bp, Glycine max
ggagttaggttctgcacgctctgcttccagcgagtgttctttcttcgtttcaacaccttaatttgcacacgctgcttcttcagcttgagaaatggcacaagaaacctttctattcacatctgaatctgtaaacgagggtcaccccgacaagctgtgcgaccagatctctgatgcagtgcttgatgcgtgccttgaacaggaccctgacagcaaggttgcctgtgagacatgcaccaagaccaacatggtcatggtctttggagagat

SEQ ID NO: 162992 - DNA, 258 bp, Glycine max
gtcagagacagagacgcagccatggggcggagacctgcgaggtgttataggcaaattaagaacaagccataccccaagtcacgtttctgccgtggtgttcctgatcccaagatcaggatttatgatgttggtatgaagaagaagggtgttgatgagtttcctttctgtgtccatctggttagttgggagaaggaaaatgtttcaagtgaggccctggaagctgctcgcattgcttgcaacaagtacatggccaaattt

SEQ ID NO: 162993 - DNA, 258 bp, Glycine max
tctcgagccgaatcggctcgagcgggtttataaactccctaatgacaaagaggctgtttaaggggcgttagacaaatggacagcttgggaaacagagttccctgtgattgcagtgtctaaggctttaaaaatcttaaggaaaaggggtcactgggttcgtgtaattcaagtagctaagtggatgttaagcaaaggtcaaggagcaacgatgggaacatatgacacccttcttctggcatttgatatggacaagagggt

SEQ ID NO: 162994 - DNA, 258 bp, Glycine max; identical to SEQ ID NO: 131517

SEQ ID NO: 162995 - DNA, 258 bp, Glycine max
cttgaagaaagtaggatacaaccctgacaagattccttttgttcctatctctggttttgagggagacaacatgattgagaggtccacaaaccttgactggtacaagggtccaactctgcttgatgcacttgaccagattagtgagcccaagaggccctctgacaagccccttaggcttccccttcaggatgtgtacaagattggaggtattggaactgtgccagtgggacgtgttgagaccggtgtcttgaagcctgg

SEQ ID NO: 162996 - DNA, 260 bp, Glycine max
gctgagtgcagagcaaagggtggggcacctggattcaaagttgcaattttgggggctgctgggggaattggtcaacccctttctttgctgatgaagatgaacccattggtttcagttcttcatctttatgatgttgtcaacacccctggtgtcactgctgatgttagccacatggacactggtgctgtggttcgtggctttctggggcagcaacaacttgagagtgcactcactggcatggacttggtaatcatacctgc

SEQ ID NO: 162997 - DNA, 261 bp, Glycine max
tggcgtcttcataaacgccgcccaaaacttctcatacccttttattcattccattcctttctaagggttttcttttctttgccgagaaaatgagagagtgcatttcgatccacattggccaggccggtatccaggttggaaacgcctgctgggaactctattgccttgaacacggcattcagcccgatggacagatgccgagtgacaagaccgttggcggaggagacgacgccttcaacacatttttcagcgagaccggcg

SEQ ID NO: 162998 - DNA, 257 bp, Glycine max
cagaaattgtgatcctgaaggtcctctgatgctctatgtctccaagatgattccagcatctgataaggggagattttttgcctttggccgtgtattctctggcagggtttcaactggtttgaaggtgaggattatgggacctaattatgtccctggggagaaaaaggatttgtatgttaaaagtgtgcaacgaactgtcatttggatgggaaagaggcaagaaactgtagaggatgtcccctgtggtaatacagtgg

SEQ ID NO: 162999 - DNA, 255 bp, Glycine max
ctgatgagcagatagaaagagaagagaagttgatgtcaacagcagaagctcctcctccgttccaagaagcagcgcgatgcgttgtgtgcaattgcagtttcaacaccttcagaagaaggcatcactgtcgatcctgtgggagaacattgtgcaatgaacattcatcagatcaaatggctttaccacaatttggcatttactcaaatgtccgagtatgtgctgattgtttcaacaactcacggtctgggaaggatg

SEQ ID NO: 163000 - DNA, 255 bp, Glycine max
catttatcatttcatgggaacatccacttttagtcaatacactgttgttcatgacgttagtgtagctaagattgacccggtagctcccttggagaaagtttgccttcttggatgtggtgtttcaactggacttggagctgtctggaacactgcaaaagtggagtcagggtcaattgttgctatttttggccttggaactgttgggcttgctgttgcagagggtgcaaaaactgctggtgcatcccgggttattgg

SEQ ID NO: 163001 - DNA, 255 bp, Glycine max
gcaggccttcctgtttatttcattgagccccatcatcctgataagttcttctggagaggaaaattttatggcgagcatgatgatttcagacgattttcattttttagccgtgcagctcttgagtttcttcttcaagctggcaagaagccagacatcattcattgccatgattggcagacagcattcattgctcctctgtactgggatatatatgccccagaaggattaaattcagctaggatttgctttacatgc

SEQ ID NO: 163002 - DNA, 254 bp, Glycine max
tctcgagccgaatcggctcgaggttgaaagaaacatccccgaagatgatccaagaaatccaactgtgattgctgataatgatggtgataatgttggggatatcgctggtatgggatctgatctttttggttcatatgccgagtcatcctgtgctgctcttgttgttgcttccatctcttcttttggggtgaatcatgagttgactgctatgttataccctctcattatcagttctgtgggtatccttgtatgtt

SEQ ID NO: 163003 - DNA, 252 bp, Glycine max
ccctaccaaggttgacagaagtggtgcctatatcgtgaggcaggctgcaaagagtgttgtggcaaatggccttgccagaaggtgcattgtccaagtttcctatgccattggtgtccctgagcccttgtcagtgtttgtggacacttatggaactgggaagattcctgacaaggagattcttcaaattgtgaaggagaatttcgacttcagacctggaatgatcaccattaacttggaccttaagaggggtgg

SEQ ID NO: 163004 - DNA, 251 bp, Glycine max
attctattccatcatcaatggagaacaccgagggatccggatctgcgacgaacggggtgctggctccgccgcgcaaggtggcattgataaccggaattaccggacaagacggttcgtacctgacggaattcctcctggacaaggggtacgaggtgcacggcctgatccgccgctcgtcgaacttcaacacgcagcgcatcgaccacatatacgtggatccccacaacgcccacaaggcccgcatgaagctc

SEQ ID NO: 163005 - DNA, 254 bp, Glycine max
cggggctacccgctgagtttaagcatatcaataagcggaggaaaagaaactaacaaggattcccttagtaacggcgagcgaaccgggaaaagcccaccatgaaaatcggtcgccctcggcgtccgaattgtagtctggagaagcgtcctcagtggcggaccgggcccaagtcccctggaagggggcgccagagagggtgagagccccgtcgtgcccggaccctgtcgcaccacgaggcgctgtcggcgagtcgg

SEQ ID NO: 163006 - DNA, 254 bp, Glycine max
ctttctccaagattaagtttcagtagtaatgggtaaggaaaaggttcacattaacatcgtggtcattggccatgtcgactctgggaagtcaaccaccaccggtcaccttatctacaagctcggaggtattgacaagcgtgtcatcgagagattcgagaaggaagctgctgagatgaataagaggtctttcaagtatgcctgggtgcttgacaagctcaaggctgagcgtgacagaggaatcaccattgatattg

SEQ ID NO: 163007 - DNA, 252 bp, Glycine max
ggtaaaagtgttgtcccaaagaaagaccatctttctcctttctgtcatcaccgttggaagagactgagatgggttcaaaaaccaagacttttacctttgaggaggtggctaagcacaatcacaggaaggattgctggattatagtcaaagggaaggtgtatgatgtcaccccatttttggatgatcatccaggaggtgatgaagttttagtgactgcaacagagaaggatgccaccactgattttgaagata

SEQ ID NO: 163008 - DNA, 256 bp, Glycine max
cttgaggtggaaagctctgacaccatcgacaacgtcaaggccaagatccaggacaaggaaggaattcccccggatcagcaacgtctcatcttcgccggaaagcagctcgaggacggccgtaccctcgccgactacaacatccagaaggagtcaacccttcaccttgtccttcgtctccgtggtggcatgcagatcttcgtcaagactctcactggcaaaaccataaccctagaggtcgaaagctctgacaccattg

SEQ ID NO: 163009 - DNA, 261 bp, Glycine max
atcttcttcccaaccactactactcactcactgcagatctcaattgcatcgctgtccatggctaccatcgttagcatcaaggcccgccagatcttcgacagtcgtggcaatccaactgtcgaggtggatttgacttgctccgatggtacttttgccagagctgctgttccaagtggtgcatccactgggatttatgaggcccttgaattgagagatggaggatctgactaccttggaaagggtgtatcaaaggctgttgac

SEQ ID NO: 163010 - DNA, 254 bp, Glycine max
  unsure (1)..(254): unsure at all n locations
gtaggtactcagtgaagaggttcaggaaggcgcagtgccccattgttgagagactcaccaactctctcatgatgcacggaaggaacaatggaaagaagctcatggctgtcaggattatcaagcatgcaatggaaattattcacttgctcactgacctgaacccaattcaggtcattgttgatgccgtcatcaatagtggtcnccgtgaagatgcaactagaattggttctgctggagtggtgaggagacaggcc

SEQ ID NO: 163011 - DNA, 252 bp, Glycine max
tccaccttggcctagccagctagcgcttcttctctcgacattccgtggagatctagtgctgccaaacctcgctgcaaattagggtttcgtttcggatgtagacgaagatgttcggaagggcaccgtagaaaagcgacagcaccaggtactacgagatcctcggcgtttcgaagaacgcttcgccggatgatttaaagaaggcttacaagaaagccgccattaagaaccaccctgacaaaggcggtgatcctg

SEQ ID NO: 163012 - DNA, 247 bp, Glycine max
tgggaagatcgtgttgtgtgaccgtgggttgaccgctagggttcagaaaggctcggtggtgaaatccgccggagcgttggggatggtgctgtccaacaccgccgctaacggcgaggagctagtggcggatgctcatttattaccggccaccgcagttgggcagaaagccggtgacgctattaagaagtatttggtttccgatgcgaaaccgacggtgaagattttttttgagggaaccaaggtgggg

SEQ ID NO: 163013 - DNA, 254 bp, Glycine max
caacaatgaagacttaccacctccctggaaagtcatggttctcttggttcttacttggcctactttcaatcattgcttcccttgcttcagctgcagagaatcattaccatgagtttgttatccaaactgtgccagtgaagaggctgtgcagaacccaaaacatactcacagtaaatgggcagtttcctggcccaacagtggaagcaagaaatggagattctcttgcaatcaaagtagtaaatgctggaccatac

SEQ ID NO: 163014 - DNA, 251 bp, Glycine max
ctcgagccgtgttctcttccttggaatacaaaatgcttcctctgttcagccagtggtagcagttgaaaggactgtcttttatagagaaaaagctgcgggaatgtattctgccttaccctatgcatttgcacaggttctggtagagataccatatatcttcgctcaagctgtgacatacggtttaattgtttatgccatgatcggatttgactggactgcagagaaattcttttggtatctatttttcagtt

SEQ ID NO: 163015 - DNA, 247 bp, Glycine max
tagagatcctccgtttatatgcttgtccatatctagaaacacttcctcctagcatgtgtgacatgaagagattgaagtatattgatatttctcaatgtgttaacctcacatgcttccctgaagagattggtagattagtatgcttagagaagattgacatgagggaatgccccatgattaggtatttaccgaagtctgcagtgtcattgcaatctctgcagcttgtaatttgtgatgaggaggtaca

SEQ ID NO: 163016 - DNA, 249 bp, Glycine max
tgatgatacacagtacccaaaaacattcttctataaagaagaccttcatccaggcaaaacaatgaaagtacaattcaccaagcgtccctatgcacaaccttatggtgtatatacatggttaacggatattaaagacacctctaaagaaggatatagttttgaagagatatgcatcaagaaagaagcgtttgagggagaagagaagttttgtgcaaaatccttgggaacagtaattggttttgccatttc

SEQ ID NO: 163017 - DNA, 248 bp, Glycine max
ttctcgagccgaatcggctcgagctttgatgatgatgatgatggggaccttttgctagcttcaactttcttcttcctgtgtttgtatttgctaatagctcccatcaaaggcccaaaaatgggtaccatcgttgaagcagataacacatataccaagatcctaggaagatggccagtcttttattatggcatgggacacatgctcaatgacataactgctgcttgttggttcacatatttattattgtt

SEQ ID NO: 163018 - DNA, 250 bp, Glycine max
gtagcattcagtgaaacactagctagggtattgggagctctcgttgtttcggagttagggaccttacgcagccatggccactgctacgaatgccgccgccgccccaccacgccagctctcccagaaggaagctgacatccagatgatgttggccgccgacgtccacctcggcaccaagaactgcgacttccaaatggaacgttacatcttcaagcgccgcgccgacgggatttacattattaaccttggg

SEQ ID NO: 163019 - DNA, 257 bp, Glycine max
gagaaatggaattgcctctttcaagaagcatctgagtgtttattattcgtaatatatagtcactcaagcttctaggatttctgccagctacatgaaaatgggaagcaacttgaggtttttgagtctttgcctcttggcattgattgcatcaactcatgcccaacttcagcttggtttttatgcccagagctgcccaaaagctgagaaaatcattttgaaatttgttcatgagcatatccacaatgctccatcactag

SEQ ID NO: 163020 - DNA, 247 bp, Glycine max
cgacgatggaggacgcggaacggcgaacacgcttcgcattctggtggcgacggactgccacctcggttacatggagaaggatgaggtgcgccgccacgactccttccacgccttcgaggagaattgcgccgtcgccgagcgccaccgcgtcgacttcgtcctcctcggcggcgacctcttccacgagaacaagccctcacgctccacgctcgtcaaggccatcgagattctccggcgctactgcctc

SEQ ID NO: 163021 - DNA, 249 bp, Glycine max
aatttgttccgcaaaatggtgatggagattgtgaggaacaagaaagttaggttttggaagaaagtgtatgttatatacagctttttctttgttcgcaaaatcatcgcccacatggtcaccttcttcttctactgtgttgtgattccccttacaatcttggtcccagaggttcatgttccaatctggggagctgtttatattccttctgtcatcaccattctcaattcagttggaacaccaaggtccatt

SEQ ID NO: 163022 - DNA, 247 bp, Glycine max
gtgacgagcatcatggcctcgagagcagtgctattgttggctatgtgtgtgcttccggccatggttgtggccattcgcccagcaaagaaccctttttgcgtgaagggtcgcgtctactgtgacccttgccgtgctggttttgagacctcagcaaccacctacattgccggtgctgagattatgttgcaatgcaagagcagggttagcaacgaggttgtgtacaccaagaaggggtacactgactcaa

SEQ ID NO: 163023 - DNA, 246 bp, Glycine max
ctagtatccgatcctctgtcctctcgaagctttcatcgttcaacatattctcaccatctcagtcatgggcctgctatcttgttttaggtctaccgtcctgagaaaatgttccaaaggaagctctggcatgtcaagattcctgtatacgaacaattttcaacgaaacttgatttcgtctggtggcaatgaatcgtattatgggtattttaacaggagatcatacacttcactttatatgggaactgg

SEQ ID NO: 163024 - DNA, 246 bp, Glycine max
gcagaatcatttaagagtagctctaagaagaagaaaaaaaatatgaaggttgtgtacttccttgttgccatcttggctttgacatcctctcttgtctctgcctctgaccctagtcctcttcaagatttttgtgtggcagccaaagaaaaagatggtgtatttgtgaacggaaaattttgcaaagaccctaagcttgtcaaacctgaagatttcttcctacatgtggaacccgggaacactgacaac

SEQ ID NO: 163025 - DNA, 249 bp, Glycine max
caactccttctgttcacaaactcatcttcaattccttttctgatctacgcaaggttaaggttaattttatctatctacttggacatgaacgaaatcgatgttccttcgttctttctctgccccatttcgctagatatcatgaaggatccagtgacggtctcaacgggcatcacctacgaccgtgaaagcatcgaaacctggctgttctcgaagaaaaacacgacatgccccattaccaaactgcccttg

SEQ ID NO: 163026 - DNA, 215 bp, Glycine max
tacggctgcgagaagacgacagaagggggcacaagtgagtttgttgatcgagataactagaaacagtgtgatgaaaatgaaggtccttgttttcttcgttgctacaatttttgtagcatggcaatgccatgcgtacgatatgttgcctctccgaatgaacactggctatggtgcccgtactccggaggtgaaatgcgcaagttggaggcttgctg

SEQ ID NO: 163027 - DNA, 210 bp, Glycine max
tacggctgcgagaagacgacagaagggggcacaagtgagtttgttgatcgagataactagaaacagtgtgatgaaaatgaaggtccttgttttcttcgttgctgcaatttttgtagcatggcaatgccatgcgtacgatatgttccctctccgaatgaacactggctatggtgcccgtactccggaggtgaaatgcgcaagttggaggct

SEQ ID NO: 163028 - DNA, 208 bp, Glycine max
tacggctgcgagaagacgacagaagggggcacaagtgagtttgttgatcgagataactagaaacagtgtgatgaaaatgaaggtccttgttttcttcgttgctacaattttggtagcatggcaatgccatgcgtacgatatgttccctctccgaatgaacactggctatggtgcccgtacttcggaggtgaaatgcgcaagttggagg

SEQ ID NO: 163029 - DNA, 211 bp, Glycine max
tacggctgcgagaagacgacagaagggggtgcacaagtgagtttgttggtcgagataactagaaacagtgtgatgaaaatgaaggtcgttgttttcttcgttgctacagttttggtagcatggcaatgccatgcgtacgatatgttccctctccgaatgaacactggctatggtgcccgtactccggaggtgaaatgcgcaagttggaggc

SEQ ID NO: 163030 - DNA, 215 bp, Glycine max
tacggctgcgagaagacgacagaagggggcacaagtgagtttgttgatcgagataactagaaacagtgtgatgaaaatgaaggtccttggttggtcttcgttgctacaatttttgtagcatggcaatgccatgcgtagcgatatggttccctctccgaatgaacactggctatggtgcccgtagtctggaggtgaagtgcgcaagttggaggctt

SEQ ID NO: 163031 - DNA, 122 bp, Glycine max
tacggcgcgagaagacgacagaagggggcacaagtgagtttgttgatcgacataactagaaacagtgtgatgaaaatgaaggtccttgttttcttcgttgctgcaatttttgtagcatggca

SEQ ID NO: 163032 - DNA, 219 bp, Glycine max
tacggctgcgagaagacgacaaggatgcagtcaagaagatgtatggtattcaggccaagaaagtagacaccttgatcaggcctggtggaaccaagaaggcctatgtcaggttgacacctggttatgacgccctggatgtggccaacaagattggagttatctggactagtatatggcctcaccaaagtagatttgtgtttagatggtagtttgttgtgg

SEQ ID NO: 163033 - DNA, 220 bp, Glycine max
acggctgctagacgacagaagggggcacaagtgagtttgttgatcgatataactagaaacagtgtgatgaaaatgaaggtccttgttttgttcgttgctgcaattttggtagcatggcaatgccatgcgtacgatatgttccctctccgaatgaacactggctatggtgcccgtactccggaggtgaaatgcgcaagttggaggcttgctgtggaagcac

SEQ ID NO: 163034 - DNA, 223 bp, Glycine max
tacggctgcgagaagacgacagaagggggggaaaagttagaagtagtgaagaaaatgaaagtcgttgttttgttcgttgctatagtagttttaggtgcagaatggcaatgcaatgggtcagagcatgagcatgagcatggccacagctgccaagttttccctttgcgagtgaaaaccggccccggtggccactacattccggaggtatcgtgcaaaagttgga

SEQ ID NO: 163035 - DNA, 212 bp, Glycine max
tacggctgcgagaagacgacagaagggggcagcgcttgatgccaagccccactcaaccaccacaccactctctctgctcttcttctaggtttcaagtttttgaagtattgagatggcagagacattcctatttacgtcagagtcagtgaacgagggacaccctgacaagctgtgcgaccaaatctccggtgctgtcgtcgacgcttgccttg

SEQ ID NO: 163036 - DNA, 211 bp, Glycine max
tacggctgcgagaagacgacagaagggggcacaagtgagtttgttgatcgagataactagaaacagtgtgatgaaaatgaaggtccttgttttgttcgttgctacaattttggtagcatggcaatgccatgcgtacgatatgttccctctccgaatgaacactggctatggtgcccgtactccggaggtgaaatgcgcaagttggaggctt

SEQ ID NO: 163037 - DNA, 208 bp, Glycine max
tacggctgcgagaagacgacagaagggggttctagtgtatgtgattgctgtgactcgttcttcttcgtcgttatcttcttcttttgttgtttgtgtgtttgttttttctctcacctgaaaatgtcttgctgcggtggtaactgtggttgctgaagctcctgcaagtgcggcaacggctgcggaggctgcaagatgtacccagacttga

SEQ ID NO: 163038 - DNA, 218 bp, Glycine max
tacggctgcgagaagacgacagaagggggcacaagtgagtttgttgatcgagataactagaaacagtgtgatgaaaatgaaggtccttgttttcttgcgttgctacaatttttgtagcatggcaatgccatgcgtacgatatgttccctgctccgaatgaacactggctatggtgcccgtactccggaggtgaaatgcgcaagttggaggcttgctgt

SEQ ID NO: 163039 - DNA, 212 bp, Glycine max
tacggctgcgagaagacgacagaagggggttctagtgtgtgattgtttgttgttgtaactcgttcttcttcttttgttgttctgtgtttgtgtttgttttttctctcacctgaaaatgtcttgctgcggtggtaactgtggttgctgaagctcctgcaagtgcggcaacggctgcggaggctgcaagaatgtacccagacttgagctacact

SEQ ID NO: 163040 - DNA, 218 bp, Glycine max
gttcgagccgaatcggctcgagtacggctgcgagaagacgacactagggggcacaagatattttgttgatcgagataactagaaacagtgtgatgaaaatgaaggtccttgttttcttcgttgctacagttttggtagcatggcaatgccatgcgtacgatatgttccctctccgaatgaatactggctatggtgcccgtagtccggaggtgaaatgc

SEQ ID NO: 163041 - DNA, 218 bp, Glycine max
tacggctgcgagaagacgacagaagggggcacaagtgagtttgttgatcgagatgactagaaacagtgtgatgaaaatgaaggtccttgttttcttcgttgctacaatttttgtagcatggcaatgccatgcgtacgatgtgttctctctccgaatgaacactggctatggtgcccgtactccggaggtgaaatgcgcaagttggaggcttgctgtgg

SEQ ID NO: 163042 - DNA, 220 bp, Glycine max
tacggctgcgagaagacgacagaagggggttgtagtgtgtgattggtttgttgttgtaactcgttcttcttcttttgttgttctgtgtttgtgtttgttttttgctctcacctgaaaatgtcttgctgcggtggtaactgtggttgcggaagctcctgcaagtgcggcaacggttgcggaggctgcaagatgtacccagacttgagctacactgagtcaa

SEQ ID NO: 163043 - DNA, 223 bp, Glycine max
tactgctgcgagaagacgacagaagggggcacaagtgagtttgttgatcgagacaactagaaacagtgtgatgaaaatgaaggtccttgttttgttcgttgctgcaattttggtagcatggcaatgccatgcgtacgatatgttccctctccgaatgaacactggctatggtgcccgtactccggaggtgaaatgcgcaagttggaggcttgctgtggaagca

SEQ ID NO: 163044 - DNA, 221 bp, Glycine max
tacggctgcgagaagacgacagaagggggcacaagtgagtttgttgatcgagatgactagaaacagtgtgatgaaaatgaaggtccttgttttcttcgttgctacaattttggtagcatggcaatgccatgcgtacgatatgttccctctccgaatgaacactggctatggtgcccgtactccggaggtgaaatgcgcaagttggaggcttgctgtggaag

SEQ ID NO: 163045 - DNA, 214 bp, Glycine max
tacggctgcgagaagacgacagaagggggcacaagtgagtttgttgatcgagataactagaaacagtgtgatgaaaatgaaggtccttgttttcttcgttgctacgatttttgtagcatggcaatgccatgcgtagcgatatgttccctctccgaatgaacactggctatggtgcccgtactcctgaggtgaaatgcgcaagttggaggcttgc

SEQ ID NO: 163046 - DNA, 208 bp, Glycine max
tacggctgcgagaagacgacagaagggggcacaagtgagtttgttgatcgagataactagaaacagtgtgatgaaaatgaaggtccttgttttcttcgttgctacagttttggtagcatggcaatgccatgcgtacgatatgttccctctccgaatgaacactggctatggtgcccgtactccggaggtgaaatgcgcaagttggagg

SEQ ID NO: 163047 - DNA, 211 bp, Glycine max
tacggctgcgagaagacgacagaagggggcacaagtgagtttgttgatcgagataactagaaacagtgtgatgaaaatgaaggtccttgttttgcttgcgttgctacaatttttgtagcatggcaatgccatgcgtacgatatgttccctctccgaatgaacactggctatggtgcccgtactccggaggtgaaatgcgcaagttggaggc

SEQ ID NO: 163048 - DNA, 186 bp, Glycine max
attcggctcgagtacggctactagaagacgacagattggtactgttgtgagtatattggagcggcaattgaaggtgaaggcgaagaggaatattgtggacatgcctggaaacggtgacgttccttttactcacgcgaatattagttcggcccggagagagctcgggtacaagcccacgaccgattt

SEQ ID NO: 163049 - DNA, 181 bp, Glycine max
tatctaccgactcgagccgctcgagtacggctgcgagaagaatacagaagggggcacatatgtgagtttattgatcgagataactagaaacagtgtgatgaaaatgaaggtccttgttttcttcgttgctgcaattttggtagcatggcaatgccatgcgtacgatatgttgcctctccgg

SEQ ID NO: 163050 - DNA, 217 bp, Glycine max
tacggctgcgagaagacgacagaaggggagagaaagaaacatttgagcaaaaatggttcaagcacagcctctacaacatgttggtaatggtgcagggaaagaagatcaagcttattttgatccaagtgctccaccacccttcaagattgcaggtatcagatcagcaattccagaacattgctgggagaagaacacattgagatgtctgagttatgtt

SEQ ID NO: 163051 - DNA, 219 bp, Glycine max
tacggctgcgagaagacgacagaagggggcacaagtttgttgaggtagctagaagcaataagatgaaaatgaaagtgcttgttttgtttgttgctacagttttggtagcatatgaatgccatggctcagactaccagaagttccctctccaaatgaaaactgggtttggtgggcaatacagcaatgaggtggcatgtgccagttggaggcttggcgtgg

SEQ ID NO: 163052 - DNA, 220 bp, Glycine max
cggctgctagaagacgacagaagggggcacaagtgagtttgttgatcgagataactagaaacagtgtgatgaaaatgaaggtccttgttttcttcgttgctacaattttggtagcatggcaatgccatgcgtacgatgtgttccctctccgaatgaacactggctatggtgcccgtactccggaggtgaaatgcgcaagttggaggcttgctgtggaagc

SEQ ID NO: 163053 - DNA, 221 bp, Glycine max
tacggctgcgagaagacgacagaagggggcacaagtgagtttgttgatcgagatgactagaaacagtgtgatgaaaatgaaggtccttgttttcttcgttgctacaatttttgtagcatggcaatgccatgcgtacgatatgttccctctccgaatgaacactggctatggtgcccgtactccggaggtgaaatgcgcaagttggaggcttgctgtggaag

SEQ ID NO: 163054 - DNA, 221 bp, Glycine max
tacggctgcgagaagacgacagaagggggcacaagtgagtttgttgatcgagataactagaaacagtgtgatgaaaatgaaggtcctcgttttgttcgttgctacaattttggtagcatggcaatgccatgcgtacgatatgttccctctccgaatgaacactggctatggtgcccgtactccggaggtgaaatgcgcaagttggaggcttgctgtggaag

SEQ ID NO: 163055 - DNA, 135 bp, Glycine max
tacggctgcgagaagacgacagaagggtaatttgggaattattgctcccatcgccattggtttcattgtcggcgctaacattttgttgggtggggccttctctggagtggccatgaaccctgctgtgacatttgg

SEQ ID NO: 163056 - DNA, 212 bp, Glycine max
tacggctgcgagaagacgacagaagggggaacctttgcagttctattcattcaagattcagcaagtgcgttttggaagcagagaccgaaatacttcgagatggcccgtacaaagcaaagtgctcgtaagtcaactggaggaaaagctcccaggaagcagcttgcaaccaaggctgcacgtaagtctgcaccaacaactggtggtgtgaagaa

SEQ ID NO: 163057 - DNA, 209 bp, Glycine max
tctcgagcgaattcggctcgacggactgcgagaagacgacaattgggggcacaagtgtttttgttgatcgagatgactagaaacagtgtgatggaaatgaaggtccttgttttcttcgttgctacaattttggtagcatggcaatgccatgcgtacgatatgttccctctccgaatgaacactggctatggtgcccgtactccggaggt

SEQ ID NO: 163058 - DNA, 209 bp, Glycine max
gttcgagcgattcggctcagataagacgacagaagggggcactagtgagtttgttgatcgagataactagaaacatgtgtgatgaaaatgaaggtccttgttttcttcgttgctacaattttggtagcatggcaatgccatgcgtacgatatgttccctctccgaatgaacactggctatggtgcccgtactccggaggtgaaatgcgc

SEQ ID NO: 163059 - DNA, 209 bp, Glycine max
tacggctgcgagaagacgacagaagggggttctagtgtgtgattgtttgttgttgtgactcgttcttcttcttttgttgttctgtgtttgtgtttgttttttgtctcacctgaagatgtcttgctgcggtggtaactgtggttgcggaagctcctgcaagtgcggcaacggctgcggaggctgcaagatgtacccagacttgagctaca

SEQ ID NO: 163060 - DNA, 209 bp, Glycine max
acgtctgctagaagacgacagaagggggttgctgtcatcatccgcagctgctgttattcgcaccgcaaacaaacagtgagccatggccgtcggaaagaacaagcgcatctccaaagggaaaaagggtggcaagaagaaggcaggtgatgcctttgccaagaaggattggtatgacattaaggccccttctctttttggagtggaaagtg

SEQ ID NO: 163061 - DNA, 213 bp, Glycine max
tacggctgcgagaagacgacagaagggggttctagtgtgtgattgtttgttgttgtaactcgttcttcttcttttgttgttctgtgtttgtgtttgttttttctctcacctgaaaatgtcttgctgcggtggtaactgtggttgcggaagctcctgcaagtgcggcaacggctgcggaggctgcaagatgtacccagacttgagctacactga

SEQ ID NO: 163062 - DNA, 205 bp, Glycine max
ctgctcgagacggctgctagaagacgacagaagggggcacaagtgagtttgttgatcgagataactagaaacagtgtgatgaaaatgaaggtccttgttttcttcgttgctacaattttggtagcatggcaatgccatgcgtacgatatgttccctctccgaatgaacactggctatggtgccggtactccggaagtgagtgcgc

SEQ ID NO: 163063 - DNA, 205 bp, Glycine max
tacggctgcgagacgacgacagaaggggacagctattcctcttaagcttgctagtgagtttccacactgcataccttgagtcttccgaattcgaagttagtttgcaagatggctaaggaaaaggctcagatcaacattgtggtggttggtcatgtggaccctgaggaggcaaccaccattaacgagctgaagaagctgttgtgga

SEQ ID NO: 163064 - DNA, 218 bp, Glycine max
acggctgctagaagacgacagaagggggcacaagtgagtttgttgatcgagataactagaaacagtgtgatgaaaatgaaggtccttggttttcttcgttgctacaatttttgtagcatggcaatgccatgcgtacgatatgttccccctccgaatgaacactggctatggtgcccgtactccggaggtgaaatgcgcaagttggaggcttgctgtgg

SEQ ID NO: 163065 - DNA, 219 bp, Glycine max
gtgtcgagccgagttcggctcgagtacggctgctagaagacgagttgagggggttctggattgtgattggttgttgttgaatatcgttcttcttgttttgttgttctgtgtttgtgtttgttttttctctcgcctgaagatgtcttgctgcggtggtaactgtggttgctgaagtcctgcaagtgcggcaacggctgcggaggctgcaagatgtaccca

SEQ ID NO: 163066 - DNA, 248 bp, Glycine max
caccgtacgaactcggaatcagctcgaatcgagcgagtcgtatcagctgctcgagctgctcgaggctactagaagacgacagaaatgggaagcagtggaacaaatcaaggaagataaagaaatttgtttgtctctaaagagtctccgctgaactttttggtttcttgaagatgtcgttactctccgatgttatcaaccttaacctctccgacatcaccgataaggtgatcgccgagtacatatgggtt

SEQ ID NO: 163067 - DNA, 208 bp, Glycine max
gtctcgatcgctcgagcgctcgagacggctgctagaagacaactgaagggggcacaattgagtttgttgatcgagataattagaaacagtgtgatgaaaatgaaggtccttgttttcttcgttgctacaattttggtagcatggcaatgccatgcgtacgatatgttccctctccgaatgaacactggctgaggtgcccgtactccgg

SEQ ID NO: 163068 - DNA, 208 bp, Glycine max
tacggctgctagaagacgacagaagggggcacaagtgagtttgttgatcgagatgactagaaacagtgtgatgaaaatgaaggtccttgttttcttcgttgctacaatttttgtagcatggcaatgccatgcgtgacgatatgttccctctccgaatgaacactggctgaggtgcccgtactccggaggtgaaatgcgcaagttggag

SEQ ID NO: 163069 - DNA, 207 bp, Glycine max
tacggctgcgagaagacgacagaagggggttctagtgtgtgattgtttgttgttgtaactcgttcttcttcttttgttgttctgtgtttgtgtttgttttttctctcacctgaaaatgtcttgctgcggtggtaactgtggttgctgaagctcctgcaagtgcggcaacggctgcggaggctgcaagatgtacccagacttgagcta

SEQ ID NO: 163070 - DNA, 207 bp, Glycine max
tacggctgcgagaagacgacataagggggcacaagtgagtttgttgatcgagataactagaaacagtgtgatgaaaatgaaggtccttgttttcttcgttgctacaatttttgtagcatggcaatgccatgtggacgatgtgttccctctgcgaatgaacactggctatggtgcccgtgttccggaggtgaaatgcgcaagttggag

SEQ ID NO: 163071 - DNA, 203 bp, Glycine max
tacggctgcgagaagcgacataagggggcacaagtgagtttgttgatcgagataactagaaacagtgtgatgaaaatgaaggtccttgttttcttcgttgctacaatttttgtagcgtggcaatgccatgcgtacgatatgttccctctccggatgaacactggctatggtgcccgtactccggaggtgagatgcgcaatttg

SEQ ID NO: 163072 - DNA, 184 bp, Glycine max
tagtacggcagctagaagacgacagaagggggcacaagtgagtttgttgatcgagatgactagaaacagtgtgatgaaaatgaaggtccttgtttgcttcgtttctaggattttggtagcatggcagtggccatgcgtagcgatatgttccctgtccgcatgaacactggctatggtgcccgta

SEQ ID NO: 163073 - DNA, 213 bp, Glycine max
tacggctgcgagaagacgacacaagggggaatcacagtggtgccttatcgctgtggttatcatcttcttcttcctctttgttagatgtcttctttctctacgccgcacgccgaaaccatggccggaaaatgagagggtcgtgctatcggaatcgatctcggaaccacctactcttgcgtcggtgtgtggcaacatgaccgcgttgaaatcatc

SEQ ID NO: 163074 - DNA, 217 bp, Glycine max
tacggctgcgagaagacgacagaaggggacagctattcctcttaagcttgctactgagtttccacactgcataccttatgtcttccgaattcgaagttagtttgcaagatggctaaggaaaaggctcagatcaacattgtggtggttggtcatgtggaccctgaggaggcaaccaccattgacgagctgaagaagcctgttgtggagaaagaagctc

SEQ ID NO: 163075 - DNA, 217 bp, Glycine max
tacggctgcgagaagacgacagaagggggttctagtgtgtgattgtttgttgttgtaactcgttcttcttcttttgttgttgtgtgtttgtgtttgttttttgtctcacctgaaaatgtcttgctgcggtggtaactgtggttgcggaagctcctgcaagtgcggcaacggctgcggaggctgcaagatgtacccagacttgagctacgctgagtca

SEQ ID NO: 163076 - DNA, 221 bp, Glycine max
gtgtcgagcgaatcggctcagacggctgctagaagacgacacatatggggcacaagtgaaattgttgatcgagataacaataaacagtgtgatgaaaatgaaggtccttgttttcttcgttgctacaatttttgtagcatggcaatgccatgcgtacgatatgttgcgtctccgaatgaacactggctatggtgcccgtactccggaggtgaaatgcgcaa

SEQ ID NO: 163077 - DNA, 220 bp, Glycine max
tacggctgcgagaagacgacagaagggggcacaagtgagtttgttgatcgagataactagaaacagtgtggtgaaaatgaaggtccttgttttcttcgttgctacaattttggtagcatggcaatgccatgcgtacgatatgttccctctccgaatgaacactggctatggtgcccgtactccggaggtgaaatgcgcaagttggaggcttgctgtggaa

SEQ ID NO: 163078 - DNA, 207 bp, Glycine max
tacggctgcgagaagacgacagaagggggcacaagtgagtttgttgatcgagataactagaaacagtgtgatgaaaatgaaggtccttgttttcttcgttgctacaattttggtagcatggcaatgccatgcgtacgatatgttccctctccgaatgaacactggctatggtgcccgtactccggaggtgaaatgcgcaagttggag

SEQ ID NO: 163079 - DNA, 207 bp, Glycine max
tacggctgcgagaagacgacagaagggggcagttcagttccagtatattccattctctctgtgtatttccctacctctcccttcaagatgcaggtcttcgtcaagaccctcaccggcaagaccatcacccttgaggtggaaagctctgacaccatcgacaacgtcaaggccaagatgcaggacaaggaaggaattcccccggatcag

SEQ ID NO: 163080 - DNA, 207 bp, Glycine max
tacggctgcgagaagacgacagaagggggcacaagtgagtttgttgatcgagataactagagacagtgtgatgaaaatgaaggtcgttgttttcttcgttgctacaattttggtagcatggcaatgccatgcgtacgatatgttccctctccgaatgaacactggctatggtgcccgtactgcggaggtgaaatgcgcaagttggag

SEQ ID NO: 163081 - DNA, 209 bp, Glycine max
tacggctgcgagaagacgacagaagggggcacaagtgagtttggttgatcgagataactagaaacagtgtgatgaaaatgaaggtccttgttttcttgcgttgctacaattttagtagcatggcaatgccatgcgtacgatatgttccctctccgaatgaacactggctatggtgcccgtactccggaggtgaaatgcgcaagttggag

SEQ ID NO: 163082 - DNA, 165 bp, Glycine max
tacggctgcgagaagacgacacaaggggagtgcacaagtgagtttgttgatcgagatgactagaaacagtggtgatgaaaatgcaggtccttgttttcttcgttgctacaatttttgtagcatggcaatgccatgcgtacgatatgttccctctccgaatgaaca

SEQ ID NO: 163083 - DNA, 180 bp, Glycine max
tacggctgcgagaagacgacagaagggggccattgttgttgctattatcatccgcagctgcttttattcgcaccgcaaacagtgagccatggccgtcggaaagaacaagcgcatctccaaggggaagaagggtggcaagaagaaggcagctgatccctttgccaagaaggattggtatga

SEQ ID NO: 163084 - DNA, 216 bp, Glycine max
ctgctgcgagaagacgacagaagggggcacaagtgagtttgttgatcgagataactagaaacagtgtgatgaaaatgaaggtccttgttttcttcgttgctacaattttggtagcatggcaatgccatgcgtacgatatgttgcctctccgaatgaacactggctatggtgcccgtactccggaggtgaaatgcgcaagttggaggcttgctgtgg

SEQ ID NO: 163085 - DNA, 219 bp, Glycine max
tacggctgcgagaagacgacagcagggggcagccaaagaaaagaaaatcctcaattttctgagcagccaaacactctctctgtgtctctcgaaaattctcagtttgcagagagaatctgaatcatgccgtggcaagcgtatgtcgacgatcaccttctgtgtgacatcgaaggtaaccacctcactcacgctgctatcatcggccaagacggcagcgtt

SEQ ID NO: 163086 - DNA, 219 bp, Glycine max
tacggctgcgagaagacgacagaagggggcacaagtgagtttgttgatcgagatgactagaaacagtgtgatgaaaatgaaggtcgttgttttcttcgttgctacaatttttgtagcatggcaatgccatgcgtacgatatgttccctctccgaatgaacactggctatggtgcccgtactccggaggtgaaatgcgcaagttggaggcttgctgtgga

SEQ ID NO: 163087 - DNA, 178 bp, Glycine max
tacggctgcgagaagacgacagaagggggcacaagtgagtttgttgatcgagatgactagaaacagtgtgatgaaaatgaaggtccttgttttcttcgttgctacaattttggtagcatggcaatgccatgcgtacgatgtagaccctctccgaatgaacactggctatggtgcccgt

SEQ ID NO: 163088 - DNA, 224 bp, Glycine max
ggctcgagtacggctgcgagaagacgacagatgggggcacaagtgcaattgttgatcgagataactagaaacagtgtgatgaaaatgaaggtccttgttttcttcgttgctacaattttggtacatggcaatgccatgcgtacgatatgttccctctccgaatgaacactggctatggtgcacgtactccggaagtgaaatgcgcaagttggagggctgctgtg

SEQ ID NO: 163089 - DNA, 249 bp, Glycine max
tacggctgcgagaagacgacagaagggggcacaagtttgttgagatagctagaagcaataagatgaaaatgaaagtgcttgttttgtttgttgctacagttttggtagcatatgaatgccatggctcagactaccagagttccctctccaaatgaaaactgggtttggtgggcaatacagcaatgaggtggcatgtgccagttggaggcatggcgtggaagcaaacaacgtagtcaagtggcaaactgt

SEQ ID NO: 163090 - DNA, 243 bp, Glycine max
tacggctgcgagaagacgacagaagggggcacaagtgagtttgttgatcgagataactagaaacagtgtgatgaaaatgaaggtccttgttttcttcgttgctacaattttggtagcatggcaatgccatgcgtacgatatgttccctctccgaatgaacactggctatggtgcccgtactccggaggtgaaatgcgcaagttggaggcttgctgtggaagcacaaaacatctttggctttga

SEQ ID NO: 163091 - DNA, 249 bp, Glycine max
tacggctgcgagaagacgacagaagggggcacaagtgagtttgttgatcgagataactagaaacagtgtgatgaaaatgaaggtccttgttttcttcgttgctacaattttggtagcatggcaatgccatgcgtacgatatgttccctctccgaatgaacactggctatggtgcccgtactccggaggtgaaatgcgcaagttggaggcttgctgtggaagcacacaacatctttggctttgagaccat

SEQ ID NO: 163092 - DNA, 250 bp, Glycine max
acggctgcgagaagacgacagaagggggcacaagtgagtttgttgatcgagataactagaaacagtgtgatgaaaatgaaggtccttgttttcttcgttgctacaattttggtagcatggcaatgccatgcgtacgatatgttccctctccgaatgaacactggctatggtgcccgtactccggaggtgaaatgcgcaagttggaggcttgctgtggaagcacacaacatctttggctttgagaccattc

SEQ ID NO: 163093 - DNA, 249 bp, Glycine max
tacggctgcgagaagacgacagaaggggacttcaattgcaatcaaattagttcattctctttgcgcagttccctacctctcctttcaagatgcagatcttcgtcaagaccctcaccggaaagaccatcacccttgaggtggaaagctctgacaccatcgacaacgtcaaggccaagatccaggacaaggaaggaattcccccggatcagcaacgtctcatcttcgccggaaagcagctcgaggacggcc

SEQ ID NO: 163094 - DNA, 236 bp, Glycine max
tacggctgcgagaagacgacagaagggggcacaagtgagtttgttgatcgagataactagaaacagtgtgatgaaaatgaaggtccttgttttcttcgttgctacaattttggtagcatggcaatgccatgcgtacgatatgttccctctccgaatgaacactggctatggtgcccgtactccggaggtgaaatgcgcaagttggaggcttgctgtggaagcacacaacatcttgg

SEQ ID NO: 163095 - DNA, 233 bp, Glycine max
tactcgagccgaatcggctcgagtacggctgcgagaagacgacagaaggggaattgcaaggaaattagttcattctctttgcgcagttccctacctctcctttcaagatgcagatcttcgtcaagaccctcaccggaaagaccatcacccttgaggtggaaagctctgacaccatcgacaacgtcaaggccaagatccaggacaaggaaggaattcccccggatcagcaacgt

SEQ ID NO: 163096 - DNA, 229 bp, Glycine max
actcgagccgattcggctcgagacggctgcgagaagacgacagaaaggggcacttcaatggaaatcaaattagttcattctatttgcgcagttccctacctctcctttcaagatgcagatcttcgtcaagacctcaccggaaagaccatcacccttgaggtggaaagctctgacaccatcgacaacgtcaaggccaagatccaggacaaggaaggaattcccccggatc

SEQ ID NO: 163097 - DNA, 249 bp, Glycine max
atacggctgcgagaagacgacagaaggggacagctctttggtctgcctccacggtacagagattcagttagaacaataactccagggttgcccctttttctgtacaactactccactcaccaactccatggtatctttgaggctgcaagttttggaggatctaatattgatccaacggcttgggaggataagaagtgccctggtgaatctcgtttccctgctcaggttcaagtgattactaggaaagtt

SEQ ID NO: 163098 - DNA, 244 bp, Glycine max
tgcgagaagacgacagaaggggagagaagttattagggtttttgagtgcggcggtccaaacactcttctctgcagcttttgcctacaactcccttcaccatggctgaacaaaccgagaaagcttttctgaagcaaccaaaagtgtttctcagcacaaagaagactgggaagggaaagagacctggaaaaggtgggaaccgcttttggaagtccattgggcttggatttaagactcccagggaag

SEQ ID NO: 163099 - DNA, 225 bp, Glycine max
tacggctgcgagaagacgacagaagggggctgtgggaagaggaaccctagctagggtttggaagaagctgatccgagaagatggtgcagcgtcccacctaccgcaaacgccacagctatgctaccaaatccaccagcacagagtcgtcaagactcccggtggcaagcttgtttatcagaccacgaagaagagggccagcggacccatgtcgcctgtcactggaaa

SEQ ID NO: 163100 - DNA, 251 bp, Glycine max
tacggctgcgagaagacgacagaaggggagagccggcttctccctctgcgcaggaattgggaacattcgacaggtagagtttcttcaatggctcctaaagttgataagaagaacgacccaaaggcacaggccttgaagactgctaaggcagttaagtctggtgctacctttaagaagaaggcaaagaagatccgaacttctgtcactttccacagaccgaggacattgaagaaggataggaaccccaagta

SEQ ID NO: 163101 - DNA, 226 bp, Glycine max
tacggctgcgagaagacgacagaagggggcgcattgaacgaaaattagggtttgtagtgtagcaggaagaagcagcaatggcgccgaagataacacgtaaggttagcagaaaccctgaattgataaggggaatcggaagtactcgaggtcgcagatgtaccacaagaggggcatttgggctatcaaggccaaaaacggtggcgttttacctcgcaacgaccctaaa

SEQ ID NO: 163102 - DNA, 244 bp, Glycine max
tacggctgcgagaagacgacagaagggggcacaagtgagtttgttgatcgagataactagaaacagtgtgatgaaaatgaaggtccttgttttcttcgttgctacaattttggtagcatggcaatgccatgcgtacgatatgttccctctccgaatgaacactggctatggtgcccgtactccggaggtgaaatgcgcaagttggaggcttgctgtggaagcacacaacatctttggctttgag

SEQ ID NO: 163103 - DNA, 253 bp, Glycine max
tacggctgcgagaagacgacagaaggggacacaccgtttgttctattcttaactcaacttctgctacccactctcttcttccaagtccaaccacgcttttctctacagtcatgggcaaggtcaagatcggaatcacggatttggaagaattggccgtttggttgccagagtcactctgcaaagagacgatgtggagctcgttgccgttaacgaccctttcattaccaccgattacatgacatacatgtttaaa

SEQ ID NO: 163104 - DNA, 244 bp, Glycine max
tacggctgcgagaaaacgacagaagggggcacaagtgagtttgttgatcgagataactagaaacagtgtgatgaaaatgaaggtccttgttttcttcgttgctacaattttggtagcatggcaatgccatgcgtacgatatgttccctctccgaatgaacactggctatggtgcccgtactccggaggtgaaatgcgcaagttggaggcttgctgtggaagcacacaacatctttggctttgag

SEQ ID NO: 163105 - DNA, 144 bp, Glycine max
tacggctgcgagaagacgacagaaggggacacactgctattcctcttaagcttgctactgagtttccacactgcatatcataagtcttccgaattcgaagttaatttgcaagatggccaaggaaaaggctcagtcaacattgtg

SEQ ID NO: 163106 - DNA, 244 bp, Glycine max; identical to SEQ ID NO: 163102

SEQ ID NO: 163107 - DNA, 246 bp, Glycine max
acggctgcgagaagacgacagaagggtacggctgcgagaagacgacagaagggggcacgagtttgttgagatagctagaagcaataagatgaaaatgaaagtgcttgttttgtttgttgctacagttttggtagcatatgaatgccatggctcagactaccagaagttccctctccaaatgaaaactgggtttggtgggcaatacagcaatgaggtggcatgtgcaatttggaggtttggcgtgga

SEQ ID NO: 163108 - DNA, 243 bp, Glycine max
tacggctgcgagaagacgacagaagggggcacaagtgagtttgttgatcgagataactagaaacagtgtgatgaaaatgaaggtccttgttttcttcgttgctacaattttggtagcatggcaatgccatgcgtacgatatgttccctctccgaatgaacactggctatggtgcccgtactccggaggtgaaatgcgcaagttggaggcttgctgtggaagcacacaacatctttggctttga

SEQ ID NO: 163109 - DNA, 248 bp, Glycine max
tacggctgcgagaagacgacagaagggggcagcgcttgatttgaggccaggcaagccccactcaaccaccacacctctcctcgttcacgctacccctttctgctcttcttctacctttcaagttttaaaagtataaagatggcagagacattcctatttacctcagagtcggtgaacgagggacaccctgacaagctctgcgaccaaatctccgatgctgtcatcgacgcttgcctcgagaaggacaa

SEQ ID NO: 163110 - DNA, 248 bp, Glycine max
tacggctgcgagaagacgacagaagggggcaccgcttgagcagacttaacaacagcacaaagcgggttactgtctgttcaagctaccatctctctctctctttcttagtgcctccttgccagaagttaaaatggcccaagaaactttcctattcacatctgaatcagtgaacgaggggcaccctgacaagctctgtgaccagatctccgatgctgtgctcgatgcatgcttggagcaggaccctgaca

SEQ ID NO: 163111 - DNA, 250 bp, Glycine max
tacggctgcgagaagacgacagaagggggcacaagtgagtttgttgatcgagataactagaaacagtgtgatgaaaatgaaggtccttgttttcttcgttgctacaattttggtagcatggcaatgccatgcgtacgatatgttccctctccgaatgaacactggctatggtgcccgtactccggaggtgaaatgcgcaagttggaggcttgctgtggaagcacacaacatctttggctttgagaccatt

SEQ ID NO: 163112 - DNA, 260 bp, Glycine max
tgcgagaagacgacagaagggggcacaagtgagtttgttgatcgagataactagaaacagtgtgatgaaaatgaaggtccttgttttcttcgttgctacaattttggtagcatggcaatgccatgcgtacgatatgtccctctccgaatgaacactggctatggtgcccgtactccggaggtgaaatgcgcaagttggaggcttgctgtggaagcacacaacatctttggctttgagaccattcctgaagagtgcgttga

SEQ ID NO: 163113 - DNA, 243 bp, Glycine max
tacggctgcgagaagacgacagaagggggcacaagtgagtttgttgatcgagataactagaaacagtgtgatgaaaatgaaggtccttgttttcttcgttgctacaattttggtagcatggcaatgccatgcgtacgatatgttccctctccgaatgaacactggctatggtgcccgtactccggaggtgaaatgcgcaatttggaggcttgctgtggaagcacacaacatcttgggctttga

SEQ ID NO: 163114 - DNA, 255 bp, Glycine max
tacggctgcgaaagacgacagaagggggttctagtgcgtgattgtttgttgttgtaactcgttcttcttcttttgttgttctgtgtttgtgtttgttttttctctcacctgaaaatgtcttgctgcggtggtaatgtggttgcggaagctcctgcaagtgcggcaacggctgcggaggctgcaagatgtacccagacttgagctacactgagtcaaccaccaccgagaccttggtcatgggagtggcacctgtta

SEQ ID NO: 163115 - DNA, 147 bp, Glycine max
tacggctgcgagaagacgacagaagggggcacaagtgagtttgttgatcgagataactagaaacagtgtgatgaaaatgaaggtccttgttttcttcgttgctacaattttggtagcatggcaatgccatgcgtacgatatgttccc

SEQ ID NO: 163116 - DNA, 251 bp, Glycine max
tacggctgcgagaagacgacagaagggggcacaagtgagtttgttgatcgagataactagaaacagtgtgatgaaaatgagggtccttgttttcttcgttgctacaattttggtagcatggcaatgccatgcgtacgatatgttccctctccgaatgaacactggctatggtgcccgtactccgtaggtgaaatgcgcaagttggaggcttgctgtggaagcacacaacatctttggctttgagaccattc

SEQ ID NO: 163117 - DNA, 249 bp, Glycine max; identical to SEQ ID NO: 163091

SEQ ID NO: 163118 - DNA, 219 bp, Glycine max
tacggctgcgagaagacgacagaagggggcacaagtttgttgagatagctagaagcaataagatgaaaatgaaagtgcttgttttgtttgttgctacagttttggtagcatatgaatgccatggctcagacaccagaagttccctctccaaatgaaaactgggtttggtgggcaatacagcaatgaggtggaatgtgccagttggaggcttggcgtgga

SEQ ID NO: 163119 - DNA, 245 bp, Glycine max
atacggctgcgagaagacgacagaagggggcacaagtgagtttgttgatcgagataactagaaacagtgtgatgaaaatgaaggtccttgttttcttcgttgctacaattttggtagcatggcaatgccatgcgtacgatatgttccctctccgaatgaacactggctatggtgcccgtactccggaggtgaaatgcgcaagttggaggcttgctgtggaggcacaaaacatctttggctttgag

SEQ ID NO: 163120 - DNA, 234 bp, Glycine max
tacggctgcgagaagacgacagaagggggttctagtgtgtgattgtttgttgttgtaactcgttcttcttcttttgttgttctgtgtttgtgtttgttttttctctcacctgaaaatgtcatgctgcggtggtaactgtggttgcggaagctcctgcaagtgcggcaacggctgcggaggctgcaagatgtacccagacttgagctacactgagtcaacaaccaccgagacctt

SEQ ID NO: 163121 - DNA, 145 bp, Glycine max
tctcgagccgaatcggctcgagcggctcgagtacggctgcgagaagccgacagaggggggcacaagtgagtttgttgatcgacataactagaaacagtgtgatgaaaatgaaggtccttgttctcttcgttctacaattttggta

SEQ ID NO: 163122 - DNA, 245 bp, Glycine max
tacggctgcgagaagacgacagaagggggcacaagtgagtttgttgatcgagatagggagaaacagtgtgatgaaaatgaaggtccttgttttcttcgttgctacaattttggtagcatggcaatgccatgcgtacgatatgttccctctccgaatgaacactggctatggtgcccgtactccggaggtgaaatgcgcaagttggaggcttgctgtggaagcacacaacatctttggctttgaga

SEQ ID NO: 163123 - DNA, 241 bp, Glycine max
attcggctcgagcggctcgagtacggctgcgagaagacgacagaagggggcacaagtgagtttgttgatcgagataactagaaacagtgtgatgaaaatgaaggtccttgttttcttcgttgctacaatttggtagcatggcaatgccatgcgtacgatatgttccctctccgaatgaacactggctatggtgcccgtactccggaggtgaaatgcgcaagtcggaggcttgctgtggaag

SEQ ID NO: 163124 - DNA, 245 bp, Glycine max
tacggctgcgagaagacgacagaagggggcacttcaattgcaatcaaattagttcggtctctttgcgcagttccctacctctcctttcaagatgcagatcttcgtcaagaccctcaccggaaagaccatacccttgaggtggaaagctctgacaccatcgacaacgtcaaggccaagatccaggacaaggaaggaattcccccggatcagcaacgtctcatcttcgccggaaagcagctcgagga

SEQ ID NO: 163125 - DNA, 233 bp, Glycine max
agacgacagaaggggatagcgaaacagagagtggtttcagtgagtgatcggtgttcacttgatccttcataagtcgtcatcatcatcatcatcatcaccgttgattgaagaagatgccgatcagaaacatcgccatcggaaggcctgaagaggctactcaccccgacacgttgaaggcggggttggctgagttcatctccaccttgatcttcgtgttcgccggttcaggttcg

SEQ ID NO: 163126 - DNA, 242 bp, Glycine max
cggctcgagcggctcgagcggctcgagtacggctgcgagaagacgacagaaggggacaagtgagtttgttgaacgagataaatagaaacagtgtgatgaaaatgaaggtccttgttttcttcgttgctacaattttggtagcatggcaatgccatgcgtacgatatgttccctctccgaatgaacactggctatggtgcccgtactccggaggtgaaatgcgcaagttggaggttgctgtgg

SEQ ID NO: 163127 - DNA, 224 bp, Glycine max
tacggctgcgagaagacgacagaagggggcacaagtgagtttgttgatcgagataactagaaacagtgtgatgaaaatgaaggtccttgttttcttcgttgctacaattttggtagcatggcaatgccatgcgtacgatatgttccctctccgaatgaacactggctatggtgcccgtactccggaggtgaaatgcgcaatttggaggcttgctgtggaagcac

SEQ ID NO: 163128 - DNA, 251 bp, Glycine max
cggctcgagtacggctgcgagaagacgacagaagggggttctagtgtgtgattgtttgttgttgtaactcgttcttcttcttttgttgttctgtgtttgtgtttgttctttctctcacctgaaaatgtcttgctgcggtggtaactgtggttgcggaagctcctgcaagtgctgcaacggctgcggatgctgcaagatgtacccagacttgagctacactgagtctaccaccaccgagaccttggtcatgg

SEQ ID NO: 163129 - DNA, 245 bp, Glycine max
tacggctgcgagaagacgacagaagggggcacaagtgagtttgttgatcgagataactagaaacagtgtgatgaaaatgaaggtccttgttttcatcgttgctacaattttggtagcatggcaatgccatgcgtacgatatgttccctctccgaatgaacactggctatggtgcccgtactccggaggtgaaatgcgcaagttggaggcttgctgtggaagcacacaacatctttggctttgaga

SEQ ID NO: 163130 - DNA, 152 bp, Glycine max
aggctcgagctcgagcagaattcggctcgagtacggctgcgagaagacgacagaagggggcacattgaatttgttgatcgagataactagaaacagtgtgatgaaaatgaaggtccttgttttcttcgttgtacaattttggtagcatggaa

SEQ ID NO: 163131 - DNA, 191 bp, Glycine max
atacggctgcgagaagacgacagaaggggcacaagtgagtttgttgatcgagataactagaaacagtgtgatgaaaatgaaggtccttgttttcttcgttgctacaattttggtagcatggcaatgccatgcgtacgatatgttccctctccgaatgaacactggctatggtgcccgtactcaggaggtga

SEQ ID NO: 163132 - DNA, 246 bp, Glycine max
atgccgagaagacgacagaagggggcacaagtgagtttgttgatcgagataactagggacagtgtgatgaaaatgaaggtccttgttttcttcgttgctacaattttggtagcatggcaatgccatgcgtacgatatgttccctctccgaatgaacactggctatggtgcccgtactccggaggtgaaatgcgcaagttggaggcttgctgtggaagcacacaacatctttggctttgagaccatt

SEQ ID NO: 163133 - DNA, 242 bp, Glycine max
tacggctgcgagaagacgacagaagggggcacaagtgagtttgttgatcgagataaggagaaacagtgtgatgaaaatgaaggtccttgttttcttcgtcgctacaattttggtagcatggcaatgccatgtgtacgatatgttccctctccgaatgaacactggctatggtgcccgtactccggaggtgaaatgcgcaagttggaggcttgctgtggaagcacacaacatctttggctttg

SEQ ID NO: 163134 - DNA, 244 bp, Glycine max
tacggctgcgagaagacgacagaagggggcacaagtgagtttgttgatcgagatagggagaaacagtgtgatgaaaatgaaggtccttgttttcttcgttgctacaattttggtagcatggcaatgccatcgtacgatatgttccctctccgaatgaacactggctatggtgcccgtactccggaggtgaaatgcgcaagttggaggcttgctgtggaagcacacaacatctttggctttgaga

SEQ ID NO: 163135 - DNA, 244 bp, Glycine max
acgggaagacgacagaagggggcagttcaattccaatatattccattctctctgtgtatttccctacctctcccttcaagatgcagatcttcgtcaagaccctcaccggcaagaccatcacccttgaggtggaaagctctgacaccatcgacaacgtcaaggccaagatccaggacaaggaaggaatcccccgggaccagaagcgtctcattttcgcgggaaagcatcttgaggacggccgtac

SEQ ID NO: 163136 - DNA, 247 bp, Glycine max
tacggctgcgagaagacgacagaagggggcacttcaattgcaatcaaattagttcattctctttgcgcagttccctacctctcctttcaagatgcagatcttcgtcaagaccctcaccggaaagaccatccccttgaggtggaaagctctgacaccatcgacaacgtcaaggccaagatccaggacaaggaaggaattcccccggatcagcaacgtctcatcttcgccggaaagcagctcgaggacg

SEQ ID NO: 163137 - DNA, 245 bp, Glycine max
ggctcgagtacggctgcgagaagacgacagaatggggcacaagtgagattgttgatcgagataactagatacagtgtgatgaaaatgaaggtccttgttttcttcgttgctacaattttggtagcatggcaatgccatgcgtacgatatgttccctctccgaatgaacactggctatggtgcccgtactccggaggtgaaatgcgcaagttggaggcttgctgtggaagcacacaacatctttgg

SEQ ID NO: 163138 - DNA, 242 bp, Glycine max
tactcgagccgaatcggctcgagtacggctgcgagaagacgacagaactgggcacaagtgagtatgttgatcgagataactagaaacagtgtgatgaaaatgaaggtccttgttttcttcgttgctacaattttcgtagcatggcaatgccatgcgtacgatatgttccctctccgaatgaacactggctatggtgcccgtactccggaggtgaaatgcgcaagttggaggcttgctgtgga

SEQ ID NO: 163139 - DNA, 245 bp, Glycine max
tacggctgcgagaagacgacagaagggggcacaagtgagtttgttgatcgagataactagaaacagtgtgatgaaaatgaaggtccttgttttcttcgttgctacaattttggtagcatggcaatgccatcgtacgatatgttccctctccgaatgaacactggctatggtgcccgtactccggaggtgaaatgcgcaagttggaggcttgctgtggaagcacacaacatctttggctttgagac

SEQ ID NO: 163140 - DNA, 242 bp, Glycine max
taacggctgcgagaagacgacagaagggggcaagagtttgttgtgagctataagctagtttatcgtgaggagaatatgaagttgtttgttttctttgttgctgcagtagttttggtagcatggccatgcctggcgcaggctaccaaaggttccctctccgaatgaaaactggctatggtgagcgttcttcggaggtaaaatgcgcaagttttaggcttgctgtggaagcacacaacatccga

SEQ ID NO: 163141 - DNA, 144 bp, Glycine max
acggctgcgagaagacgacagaagggggcacaagtgagtttgttgatcgagataactagaaacagtgtgatgaaaatgaaggtccttgttttcttcgttgctacaattttggtagcatggcaatgccatgcgtacgatatgttc

SEQ ID NO: 163142 - DNA, 210 bp, Glycine max
tacggctgcgagaagacgacagaagggggaaacagagagtgatttcagtgagtgatcggtgttcacttgatctcatcataatcgtcagcgtcaattgaagaagatgccgatcagaaacatcgccgtcggaggcctgaagaggcgactcaccccgacacgttgaaggcggctttggctgagttcatctcaaccttcatcttcgtgttcgcc

SEQ ID NO: 163143 - DNA, 194 bp, Glycine max
tacggctgcgagaagacgacagaaggggacacacagctattcctcttaagcttgctactgagtttccacactgcataccttaagtcttccgaattcgaagttaatttgcaagatggctaaggaaaaggccagatcaacattgtggtggttggtcatgtggaccctgaggaggcaaccaccattaacgagctgaa

SEQ ID NO: 163144 - DNA, 226 bp, Glycine max
tacggctgcgagaagacgacagaagggggcacaagtgagtttgttgatcgagatggctagaaacagtgtgatgaaaatgaaggtccttgttttcttcgttgctacaattttggtagcatggcaatgcctgcgtacgatatgttccctctccgaatgaacactggctatggtgcacgtactccggaggtgaaatgcgcaagttggaggcttgctgtggaagcacaca

SEQ ID NO: 163145 - DNA, 206 bp, Glycine max
tacggctgcgagaagacgacagaaggggttctagtgtgtgattgtttgttgttgtgactcgttcttcttcttttgttgttctgtgtttgtgtttgttttttctctcacctgaaaatgtcttgctgcggggtaactgtggttgcggaagctcctgcaagtgcggcaacggctgcggaggctgcaagatgtacccagacttgagctac

SEQ ID NO: 163146 - DNA, 244 bp, Glycine max
tatcgagccgaatcggctcgagtacggctgcgagaagacgacagataatgggcacaagtgagtatgttgatcgagataactagaaacagtgtgatgaaaatgaaggtccttgttttcttcgttgctacaatttggtagcatggcaatgccatgcgtacgatatgttccctctccgaatgaacactggctatggtgcccgtactccggaggtgaaatgcgcaagttggaggcatgctgtggaagc

SEQ ID NO: 163147 - DNA, 245 bp, Glycine max
tacggctgcgagaagacgacagaagggggcacaagtttgttgagatagctagaagcaataagatgaaaatgaaagtgcttgttttgtttgttgctacagttttggtagcatatgaatgccatggctcagactaccagaagttccctctccaaatgaaaactgggtttggtgggcaatacagcaatgaggtggcatgtgccagttggaggcttggcgtggaagcaaacaacgtagtcaagtggcaa

SEQ ID NO: 163148 - DNA, 219 bp, Glycine max
tacggctgcgagaagacgacagaagggggcacaagtgagtttgttgatcgagataactagaaacagtgtgatgaaaatgaaggtccttgttttcttcgttgctacaattttggtagcatggcaatgccatgcgtacgatatgttccctctccgaatgaacactggctatggtgcccgtactcaggaggtgaaatgcgcaagttggaggcttgctgtgga

SEQ ID NO: 163149 - DNA, 211 bp, Glycine max
tacggctgcgagaagacgacagaagggggttctagtgtgtgattgtttgttgttgtaactcgttcttcttcttttgttgttctgtgtttgtgtttgttttttctctcacctgaaaatgtcttgctgcggtggtaactgtggttgcggaagctcctgcaagtgcggcaacggctgcggaggctgcaagatgtacccagacttgagctacact

SEQ ID NO: 163150 - DNA, 142 bp, Glycine max
tacggctgcgagaagacgacagaaggggatctggcagcagaagaacaagtagttgagaactaagaaggagaagcaaatggcatcctcaatgatcccttccccagctgttaccactgtcaaccgtgccggtgccggcatggtt

SEQ ID NO: 163151 - DNA, 240 bp, Glycine max
tacggctgcgagaagacgacagaagggggcagcgcttgagaccaagccccactcggccaccacaccactctctctgctcttcttctacctttcaagtttttaaagtattaagatggcagagacattcctatttacctcagagtcagtgaacgagggacaccctgacaagctctgcgaccaaatctccgatgctgtcctcgacgcttgccttgaacaggacccagacagcaggtgttgctg

SEQ ID NO: 163152 - DNA, 243 bp, Glycine max
tctcgagccgaatcggctcgagtacggctgcgagaagacgacagaatctgggcacaaggttgtacagatagctagaagcaataagatgaaaatggaagtgctcgttttgtttgttgctacagttttggtacatatgaatgccatggctcagactaccagaagttccctctccaaatgaaaactgggtttggtgggcaatacagcaatgaggtggcatgtgccagttggaggcttggcgtggaa

SEQ ID NO: 163153 - DNA, 244 bp, Glycine max
tacggctgcgagaagacgacagaagggggcacaagtgagtttgttgatcgagatggctagaaacagtgtgatgaaaatgaaggtccttgttttcatcgttgctacaattttggtagcatggcaatgccagcgtacgatatgttccctctccgaatgaacactggctatggtgcccgtactccggaggtgaaatgcgcaagttggaggcttgctgtggaagcacacaacatctttggctttgaga

SEQ ID NO: 163154 - DNA, 237 bp, Glycine max
tacggctgcgaaaagacgacagaagggggcacaagtgagtttgttgatcgagatgactagaaacagtgtgatgaaaatgaaggtccttgttttcttcgttgctacaattttggtagcatggcaatgccatgcgtacgatatgttccctctccgaatgaacactggctatggtgcccgtactccggaggtgaaatgcgcaagttggaggcttgctgtggaagcacacaacatcttggg

SEQ ID NO: 163155 - DNA, 244 bp, Glycine max
acggctgcgagaagacgacagaaggggggcacaagtgagtttgttgatcgagataactagaaacagtgtgatgaaaatgaaggtccttgttttcttcgttgctacaattttggtagcatggcaatgcctgcgtacgatatgttccctctccgaatgaacactggctatggtgcccgtactccggaggtgaaatgcgcaagttggaggcttgctgtggaagcacacaacatctttggctttgaga

SEQ ID NO: 163156 - DNA, 230 bp, Glycine max
ggctcgagtacggctgcgagaagacgacagaatggggcacaagtgagattgttgatcgagataactagaaacagtgtgatgaaaatgaaggtccttgttttcttcgttgctacaatttggtagcatggcaatgccatgcgtacgatatgttccctctccgaatgaacactggctatggtgcccgtactccggaggtgaaatgcgcaagttggaggcttgctgtggaagca

SEQ ID NO: 163157 - DNA, 272 bp, Glycine max
ctgcgagaagacgacagaaggggactcgcagattcaaacgtttccgaggtgaggctgaggcatctctctctgctttctagaatgggagctgggcgtggagtctccatctcacttgatggggtgagggacaagaaccttatgcagctcaaaaagctcaatctcgctcttttccccgttcgttacaatgacaaatactatgtcgatgcactcgcttccggtgaatttaccaaactagcttactatagtgatatttgtgttggagcattgcatgc

SEQ ID NO: 163158 - DNA, 274 bp, Glycine max
acgctgcgagaagacgacagagggggaatgatggtagttcctgtagttacacggtgagcataaaaacaagctgcagttctccctcctacaccagagattacatcggtcttgcatttggtgatgcttatggctatcaggtttatgttccaagactggatgatcctggttcaggtacattcgagcggtgctctacggatacatttgagatatacgatccatgtacgtaccagacatgttatcctttgctataccggagtggatacgacggttggat

SEQ ID NO: 163159 - DNA, 266 bp, Glycine max
acggctgcggaagacgacagaagggggcacttcaattgcaatcaaattagttcattctctttgcgcagttccctacctctcctttcaagatgcagatcttcgtcaagaccctcaccggaaagaccatcacccttgaggtggaaagctctgacaccatcgacaacgtcaaggccaagatccaggacaaggaaggaattcccccggatcagcaacgtctcatcttcgccggaaagcagctcgaggacggccgtaccctcgccgactac

SEQ ID NO: 163160 - DNA, 246 bp, Glycine max
gaacgggagtgtttgtggatggccctggggctggcaaacacatccaagcaggtgctaagaaggttatcatcactgctccagcaaagggtgctgatattccaacttatgttgtcggagtaaatgaaggggactacactcatgagatctctaacattataagcaacgcttcctgcaccacaaactgtcttgctccctttgtgaagatcctggatgcagagtttggaattgtgaagggaaccatgacaa

SEQ ID NO: 163161 - DNA, 282 bp, Glycine max
tccaaagtttgtatagtgtaggatttgttggtattcgtgataaaaacacctcatcctattcattttgccatgacgggcgaactccagataaaggttttgaaagtaatgagaaattattaattcatccatgttactggcttggtttgaatctaaatcgtaatgcacttgctccagaggaagcagaggagataaatgacgaatatgatattaatattatttcagataattcagccattagaaataaaacaataggtcaaataactactcatctagatcagatac

SEQ ID NO: 163162 - DNA, 267 bp, Glycine max
acggctgcgagaagacgacagaagggaggaccagaacttcttgtttcagaaggtgaatctatcaaacttgatcagccattaacaagtaatccaaatgtgggtggatctggtcagggggatgcggaaatagtacttcaagatccgttacgtgtccaaggtctcttgttcttcttcgcatctattattttagcacaaatctttttagttcttaagaagaaacaatttgagaaggttcaattgtccgaaatgaatttctagtcccgcata

SEQ ID NO: 163163 - DNA, 271 bp, Glycine max
tacggctgcgagaagacgacagaagggggaagaaggttggttgattggtcccattgattccgaagagaaaagaaaagatgtttgagccacaacagctatacactcgcgcgaagaccgaggaattcgacctcgaatcaggagaaaccctctacccagggctgagcgtcggcgagaaccagctccgatggggtttcatccgcaaggtctacggcatcctctccgcgcagatcgtcctcaccaccctcgtctccgtcaccaccgttttctatac

SEQ ID NO: 163164 - DNA, 271 bp, Glycine max
tacggctgcgagaagacgacagaggggggagcatagagctgtggctcatgaggagaaagatagactctcaattgtgacattttttgctcctagctatgaagtagagcatggtccaatgccagagtttgtggatgaaaaccacccatgcaagtataaaagatacagtcatggagagtacagtaaacactatgtaacaaacaagttacaaggaaaaaagaccctggactttgccaagatccaaaccaaaaacaaaaactaggaaggtccccaa

SEQ ID NO: 163165 - DNA, 264 bp, Glycine max
tacggctgcgagaagacgacagaagggggcacaagtgagtttgttgatcgagataactagaaacagtgtgatgaaaatgaaggtccttgttttcttcgttgctacaattttggtagcatggcaatgccatgcgtacgatatgttccctctccgaatgaacactggctatggtgcccgtactccggaggtgaaatgcgcaagttggaggcttgctgtggaagcacacaacatctttggctttgagaccattcctgaagagtgcgt

SEQ ID NO: 163166 - DNA, 252 bp, Glycine max
tacggctgcgagaaacgacagaagggggaaaccgagaagaagaagatggagatgtatcagatctggagcaggagaatagcgttgggagcgttcgcgtttgttctgcttttcctatcggcctcagcagacgacgtcgttgtgctctctgaagataacttcgagaaggaagttggtcaggacagaggagctctcgttgagttctatgctccttggtgtggacactgcaaaaagcttgctccagaatatgaaaag

SEQ ID NO: 163167 - DNA, 260 bp, Glycine max
acggctgcgagaagacgacagaaggggatgcggagtaccaacggctagacggtaagaccccgtgcaccttaactatagcttcgcagtgacaaccttgatcgaatgtgtaggataggtgggaggtgatgacacagaacgaccaatcctgaaagaccactctttcgtctaaggatgcctaaccgccgcaccgaaaattcgggggggggcgggacactgcgaggtgggtagtttatctggggcggatgcctcctaaagagtaa

SEQ ID NO: 163168 - DNA, 259 bp, Glycine max
cgagaagacgacagaagggggagaagagagatggatccagacgcgttggcaaaggcattcgtggagcactactacagcaccttcgacaccaaccggaacggtttagcgaatctgtatcaggagggttccatgctgaccttcgaagggcagaagatccagggcgcttccagcatcgtcgctaagctcacttccctccctttccagcagtgccaccactccatctccaccgtcgactgccagccctccggtgtcaacgctg

SEQ ID NO: 163169 - DNA, 222 bp, Glycine max
  unsure (1)..(222): unsure at all n locations
ggttgcaaaaaggatcggaaacagactctctgatangcactgggagcttaggaacttcagtgctaatcttgttacttcaatatgccaaagatttgggcatatttatcacaatctgcagccacgtgtgatgaagacatttcttcattctttcttggaccctacaaaagctttgcctcaacactatggtgcattaaagggatagaagctcttggatcaagactg

SEQ ID NO: 163170 - DNA, 264 bp, Glycine max
acggagaagacgacagaagggggggatccaaatgcgaaaaaaggtggcgaattagtttttggtggtgttgacccaaagcacttcaaaggaaaccacacttatgttccaattactgaaaaaggttactggcagattgaaataggagattttttcattggaggtgtttcaactggtgtttgtgagggtggctgtgctgctattgtggattcaggaacatctttgcttgctggtccaactcctgttgtggctgaaatcaaccatgct

SEQ ID NO: 163171 - DNA, 265 bp, Glycine max
tacggctgcgagaagacgacagaagggaaagcacagtttgttttcattgggtgctgatcggaacaaacagggaatagaagagaggagaagatgggtttcataatggaatttgcggagaacttggtattaaagttgatggaagatccgaaggaaagggatcggaggttcagggagcacgtttatagagtgaaggacaggtgcgagaagacgaaggagatgtggagctaccctatgcgaccctatgggttttggacattcgaacgcc

SEQ ID NO: 163172 - DNA, 259 bp, Glycine max
ctcgagccgctcgagccgattcggctcgagtacggctgcgagaagccgacagaaggggggacacctaattctgcgaggtgagtgaaaatggcggtacccttgctctccaagaagatcgtgaagaagcgcgtcaagaagtttatacgcccccagagtgatcgcaagatctccgtcaagccaagctggcgcagacccaagggtattgatcctcgtgtcaggagaaagttcaaaggatgcactttgatgcccaacattggtt

SEQ ID NO: 163173 - DNA, 259 bp, Glycine max
tacggctgcgaaagacgacagaagggggtgatggagcagaagaaggcaaagatagtggcagagctccaagctgtgaagcacaacagtggcaagtcctacaatcagttagcggaggggactggactcaccaacgtctatgttgctcagcttctcaggagacaggctcagctcaatccccaaactgcccctctacttcgggcagcgctgcccgacctgccccaagaccttgtttctgagatgatgagaccccctttgaggt

SEQ ID NO: 163174 - DNA, 258 bp, Glycine max
acggctgcgagaagacgacagaagggggcgtacacagcctcaacaaccctaacgcgtgcagagcagagagagacgcagccatggggcgaagacccgcgaggtgttataggcaaattaagaacaaaccataccccaagtcacggttttgccgtggtgttcctgatcccaagatcaggatttacgatgttggtatgaagaagaagggtgttgatgagtttcctttctgtgtccatctggttagttgggagaaggaaaacg

SEQ ID NO: 163175 - DNA, 138 bp, Glycine max
tctcgagccgattcggctccgagacggctgcgcagatagacgacagatactggacaagtgagtttgttgatcgagataactagaaccagtgtgatgaaaatgaaggtcccttgtttcctcgttgccaaaattttggta

SEQ ID NO: 163176 - DNA, 266 bp, Glycine max
ctcgagccgattcggctcgagtacggctgcgagaagacgacagaaggggtacaaggctcgggagaaggcgagtgggagcctggtggctctgaagaagacgcgtctggagatggacgaggagggtgtccctcccaccgcactacgcgaggtgtctctccttcagcttctctcccaatccatctacatcgtccgcctcctctccgtcgaacacgtcgacaaggtccccaagtcccagaaatcctcctccaaccccctcaccaagccca

SEQ ID NO: 163177 - DNA, 259 bp, Glycine max
tacggctgcgagaagacgacagaagggcaaagaacaacaagtaaacgcattaaaaaaaaaaattagaaaacaatatagatacgatcttttatcctataattttatcaattatgcagataagaaagactcatatatttatggatatagatccctatttcaagtaaaaaaaaaccaagtgatttcttctaattacaacacgtataaaaaagaattattggatatcatagataatctctttatcaagaattatatatcggaa

SEQ ID NO: 163178 - DNA, 262 bp, Glycine max
acggctgcgagaagacgacagaagggggtggcactcaaacattgtttgttgtaggaagaggaatcttgagaaatggcaggggacagcaagagcaagattctgttcatcggagggactggttacatcggaaaattcatcgtggaagccagcgccaaagctggccacccaactttccttttggtgagggagtccactctctccaaccccgcaaaatcacccctcatcgacaatttcaaaggcctcggtgtcaatcttgttttag

SEQ ID NO: 163179 - DNA, 256 bp, Glycine max
acggctgcgagaagacgacagaaggggggggtctgattaattctctagttatggctgagagcagagcgaatcacacagtgagcgtatttgggtgggcagctcatgattcgtcgggcaagattaccccctacagcttcaaaagacggcagaacggtgtgaacgatgtgacaataaagatcctctactgtgggatctgccacacggatctccactgtgctaaaaatgaatggggcatcactatgtaccctgtggtacc

SEQ ID NO: 163180 - DNA, 255 bp, Glycine max
cggctcgagtacggctgcgagaagacgacagaagggggaaaaagggagtgcctgataacccataaccgaccgcaccaccgttttcctttgctttgcgttctacaatgtcgaaaacctcagagattattacatgcaaagctgctatttgctggggaataggaaaacctgtgactgtggaagagatacaagtagaccctcccaaagccaccgaagttcgagttaagatgctttgtgccagtatatgctccacagaca

SEQ ID NO: 163181 - DNA, 264 bp, Glycine max
tacggctgcgagaagacgacagaagggggatgcacaagtttgttgagatagctagaagcaataagatgaaaatgaaagtgcttgttttgtttgttgctacagttttggtagcatatgaatgccatggctcagactaccagaagttccctctccaaatgaaaactgggtttggtgggcagtacagcaatgaggtggcatgtgccagttggaggcttggcgtggaagcaaacaacgtagtcaagtggcaaactgttcctgcagctt

SEQ ID NO: 163182 - DNA, 137 bp, Glycine max
gacgacagaaggggaaggaagaacaaggatgtaactgaagcaattcagaagattgccgcagcgtatgattgtaaaattgttgagggtgttcttagccaccaaatgaaacagtttgtgattgatgggcataaggttgt

SEQ ID NO: 163183 - DNA, 253 bp, Glycine max
tacggtgcgagaagacgacagaagggggcacaagtttgttgagatagctagaagcaataagatgaaaatgaaagtgcttgttttgtttgttgctacagttttggtagcatatgaatgccatggctcagactaccagaagttccctctccaaatgaaaactgggtttggtgggcaatacagcaatgaggtggcatgtgccagttggaggcttggcgtggaagcaaacaacgtagtcaagtgtcaaactgttcct

SEQ ID NO: 163184 - DNA, 272 bp, Glycine max
acggctgcgagaagacgacagaaggggaggggcacatcaaattctttatttataacatggagtactctgtggaaactttggaaagagatcttaagaacacgaggaaatactacgggagtggaaaaacaaaggaagcaccatggagagaatcacagcttaaagggttgcacaattttctcgtggaaaaagaggaagaaattgtgacggccctcaagcatgatttggggaagcattacgtggaggcttttagagacgagcttggaacattaatg

SEQ ID NO: 163185 - DNA, 264 bp, Glycine max
acggctgcgagaagacgacagaaggggatcaattcaaaatatatcatcaattataagcatgggtttgtggaacacaacgaatgcagtgtcttgccgctttcacaagtttggtgatgaccaaaagaatctggtcttccaaggtgatgccacgtcttcttccaggggcatagaactcacaaagttagacggtggaggaaaaccagtgggtggcagtgtggggagagtgttatactcttctccagtgcacctttgggaaagctctac

SEQ ID NO: 163186 - DNA, 263 bp, Glycine max
acggctgcgagaagacgacagaagggatcagcggtgccccccaggataacaacataatgctgtggaatgctgtcatatttggtcctgatgatactccatgggatggaggcacgttcaagttgactctccagtttactgaggattatccaaataaaccaccaactgtgcgatttgtgtctcgcatgtttcatccaaatatttatgctgatggaagtatttgtttggatatactacaaaatcagtggagtcctatatatgatgtg

SEQ ID NO: 163187 - DNA, 259 bp, Glycine max
tacggctgcgagaagacgacagaagggagagcaggcctttaccaaaggtgcctactttattgggaagatgatatggagcaaaggctacaaggaactactccaacttcttaaagatcatcaaaaggaattatctgctcttgaggttgatttatttggcagtggagaggactcaaatgaagttcaaaaagctgcagaaaagttggaactagcagttagcgttcacccagctcgtgatcatgctgatgctcgatttcatgat

SEQ ID NO: 163188 - DNA, 260 bp, Glycine max
gctgcgagaagacgacagaaggggagagtggtggagtgtgtaaaagagcgtcgtagtcgcaaccctaatcagaagaagcgtagttcaagcgagtgacagccaccagccatgggtcgtatgcacagccgcggtaagggtatatcctcttctgctttgccctacaaaaggacacctcctagctggctcaagatctcttcgcaagatgtcgaagaaaatatctgcaagtttgcgaagaaaggtttgaccccgtctcggattga

SEQ ID NO: 163189 - DNA, 262 bp, Glycine max
gctgcgagaagacgacagaaggggatcgtggcgaaagaacttctgaatgggcagaaggtggtggtggtacgctgcgaggagatttgcatctccggtgggctcgtcaggcagaagatgaagtacttgcgtttcctccgcaagcgcatgaacaccaagccctctcacggccccatccatttccgtgcacccggcaagatcttctggcgcaccgttcgtgggatgataccacacaagacaaagcgcggggaagctgctcttgcgc

SEQ ID NO: 163190 - DNA, 262 bp, Glycine max
ctgcgagaagacgacagaagggggtgctctgctcgtgcctctagggttatcatttctccatttccattttctctctcacttttcaagaatcgtaagctatgggaaagtcttacccaactgtgagtgctgattaccagaaggccgttgagaaggcgaagaagaagctcagaggcttcatcgctgagaagagatgcgctcctctaatgctccgtttggcatggcactctgctggaacctttgacaagggcacgaagaccggtgg

SEQ ID NO: 163191 - DNA, 269 bp, Glycine max
tagaagacgacagaaggggaaatcgagaagaagaagaagaagaagatggagaagtatcagatctggagcaggagaatagcgttggcagcgtttgcgtttgctctgctgttccaatcggcctcagcagacgacgtcgttgtgctctctgaagataacttcgagaaggaagttggtcaggacagaggacgctctcgttgagttctatgctccttggtgtggacactgcaaaaagcttgctccagaatatgaaaagcttggtagcagcttca

SEQ ID NO: 163192 - DNA, 249 bp, Glycine max
tacggctgcgagaagacgacagaaggggaggacagtgaggactgagaactactacaatactcaaacgctgttgaagcgaccgacgagtcttgtgtgtgacctcaaaaccctgccgtcagtcaccgtcttctctgccgccatgaagcttgtcaggtttctcatgaagctgaacaacgaaaccgtttcaatcgagctcaagaacggaacagttgttcatggcaccattacaggtgttgatatcagtatgaa

SEQ ID NO: 163193 - DNA, 263 bp, Glycine max
gaggttcaacatcttcttcatctatggcgacgccggattctgacgctaccactcagcctcaagattccgacactgctcccaattccagtcctcccaacgccctcgtccccgccgctcccgccgtttgcctccttcgcttcgccaccgactccgccggcggcgctctcatgggctccgtctttggatacggtgctggattgtttaagaagaaaggttttaaaggatcctttgtagaagcagggtcttatgcaaagacatttgca

SEQ ID NO: 163194 - DNA, 259 bp, Glycine max
acggcgagaagacgacagaaggggaagcaaagtctttggtgtgaggaaagtgttgatggcgcagagagctgaaccaatattggtcaccacagatgttttccaaatgggaaatatcaaatggaagcaattcaacattgatacatccaatgcttcctcctcacctccaaaaccattgttaatctttacaccaaccgtgcctggctcataccctgtaatattgttctgccatggattttcccttcgcaatagctactactct

SEQ ID NO: 163195 - DNA, 258 bp, Glycine max
tacggctgcgagaagacgacagaagggggagagaagttattagggtttttgagtgcggcggtccaaacactcttctctgcagcttttgcctacaactcccttcaccatggctgaacaaaccgagaaagcttttctgaagcaaccaaaagtgtttctcagcacaaagaagactgggaagggaaagagacctggaaaaggtgggaaccgcttttggaagtccattgggcttggatttaagactctcagggaagccatcga

SEQ ID NO: 163196 - DNA, 262 bp, Glycine max
tacggctgcgagaagacgacagaagggcaacaggggcaacccccttctctttggtgtatggtatggaagcagtactccctgtggaggttgagattccatcaatgagagttctaatggaggcccagttatcagaagctgaatggtgccaaagcagatatgatcagttgaatctaattgaagaaaaacgcatgaaggccttgtgccacggacaactttatcaacagaggatgaagcaggctttcgacaagaaggttcgtcctcg

SEQ ID NO: 163197 - DNA, 240 bp, Glycine max
  unsure (1)..(240): unsure at all n locations
gctacatatatatattatagagattttatacattctaaattttgtgagtgtggacatactctgagcgtgaganagagaaggggaagaaagagagagagtgatgggaaggggaagagtggagttgaagagaattgagaacaagatcaacaggcaagtgacctttgcaaaacgaaggaacgggcttttgaagaaagcttatgagctttccgttctttgtgatgccgaggttgctctcatcac

SEQ ID NO: 163198 - DNA, 268 bp, Glycine max
tacggctgcgagaagacgacagaaggggcacgaatttatgacagcagtcaagcaaacttatggggaaaaggtcctaattcagtttgaagactttgcaaaccacaatgcttttaatctgtttgagaaatatagatctacacatctggtctttaatgatgatattcagggaacagcatccgtggttcttgctggactagttgcatctctgaagttggttgggggtaacttagctgatcacagattcttattccttggtgctggagtggct

SEQ ID NO: 163199 - DNA, 261 bp, Glycine max
tacggctgcgagaagacgacagaaggggacggacgagggtttcgtttcgggtttgacgttgttcacaatcactttctgcgcttcactcactcccttcgtgcggttttctttctttgtcgaactcgtgcgaaaatgcgttagattcttcacatacagggagggcaacgcggaaaccagatcggagcgaagttctgggaggtggtgtgcgcggacacgggatcgattccacggggaggtaccagggggacaacgagttgcaac

SEQ ID NO: 163200 - DNA, 256 bp, Glycine max
tacggctgcgagaagacgacagaagggtgatccttctttttctccttgaactcaaacatggcagatgaggtggctctgctagatttctggccaagtccatttgggatgagggtcaggattgcacttgctgaaaagggtatcaaatatgagtaccaagaagaggacttgaggaacaagagtcctcttctcctccaaatgaacccggttcacaagaagattccggttctcatccacaatggcagacccatttgtgaat

SEQ ID NO: 163201 - DNA, 256 bp, Glycine max
acggctgcgagagacgacagaagggggccccctttctcactccctcctcttcacacattttcttagctctctccaacaatccctctcgttcacactttcagattgtgtgaagatgggggctggtggccgaactgctgttcctcctgccaacaggaagtcagaggctgaccctttgaagcgggtaccatttgaaaaacctcagtttagtctcagccagattaagaaggccattccacctcactgtttccagcgctct

SEQ ID NO: 163202 - DNA, 257 bp, Glycine max
cggctgcgagaagacgacagaaggggacaagtgagtttgttgatcgagataactagaaacagtgtgatgaaaatgaaggtccttgttttcttcgttgctacaattttggtagcatggcaatgccatgcgtacgatatgttccctctccgaatgaacactggctatggtgcccgtactccggaggtgaaatgcgcaagttggaggcttgctgtggaagcacacaacatctttggctttgagcacattcctgaagagtg

SEQ ID NO: 163203 - DNA, 255 bp, Glycine max
ggctgcgagaagacgacagaagggggcacaagtttgttgagatagctagaagcaataagatgaaaatgaaagtgcttgttttgtttgttgctacagttttggtagcatatgaatgccatggctcagactaccagaagttccctctccaaatgaaaactgggtttggtgggcaatacagcaatgaggtggcatgtgccagttggaggcttggcgtggaagcaaacaacgtagtcaagtggcaaactgttcctgcag

SEQ ID NO: 163204 - DNA, 260 bp, Glycine max
tacggctgcgagaagacgacagaaggggatatcagtgattctacagaacatgacatctctccttacttctttcatagttgctttcatagttgaatggagggtttccttgctcatcttggcaactttccctctccttgttctagccaattttgctcagcaactatctctaaaagggtttgctggagacacagccaaggctcatgcaaagacaagtatgatagcaggagagggagtgagcaacatcagaacagttgcagcat

SEQ ID NO: 163205 - DNA, 263 bp, Glycine max
tacggctgcgagagacgacagaaggggattgctgttctttccttcgatcaaagatcagtgaccatgtatcttcagttttacataaacgataacggcgacaaagtctacaccactaagaaagagtcgccggtagggctacctacacaatctgctcatccagcccggttttcacccgatgataaatattcaagacagagagttcttctgaagaagcgttttggattattaccaacccagcagccacctccaaattattgagtgat

SEQ ID NO: 163206 - DNA, 259 bp, Glycine max
acggctgagaagacgacagaagggggcacaagtgagtttgttgatcgagataactagaaacagtgtgatgaaaatgaaggtccttgttttcttcgttgctacaattttggtagcatggcaatgccatgcgtacgatatgttccctctccgaatgaacactggctatggtgcccgtactccggaggtgaaatgcgcaagttggaggcttgctgtggaagcacacaacatctttggctttgagaccattcctgaagagtgc

SEQ ID NO: 163207 - DNA, 257 bp, Glycine max
acggctgcgaagacgacagaagggggaacggaaaagcactggcgcactaccctgaggcttctcttctcttctcttctctgtcgtgagtcaccatggtgagggttagtgtgctgaacgatgctctgaagagcatgtacaatgctgagaaaaggggaaagcgccaagtcatgattaggccatcctccaaagtcattatcaaattccttttggtgatgcaaaagcacggatacatcggagagtttgagtatgttgatgac

SEQ ID NO: 163208 - DNA, 254 bp, Glycine max
cggctcgagtacggctgcgagaagacgacagaagggcagatcaggcaagtgtggaattgcaattgagccatcttatccccttaagaatggtccaaatccccctaatcctggaccatcacccccttcacctgtgaagccgccaaatgtctgtgacaactactacagctgtgctgatagtgctacttgttgctgtatttgtgagttcggaaatgcttgcttcgagtggggttgctgtcctcttgagggtgcttcct

SEQ ID NO: 163209 - DNA, 244 bp, Glycine max
acggctgcgagaagacgacagaagggtcccctaactctctgcagcaataatagatatgatatggaggaagtagagatgataatttgaggagttggaatccaatgcaggaattgacttcttagaattcagaccctcagagattgcagcagcagtggcaatatctgtggtgggggagggccaaacagtgcacactgagaaagcaatttctgttctgattcagcttgtggaaaaggtagatacatat

SEQ ID NO: 163210 - DNA, 263 bp, Glycine max
tacggctgcgagaagacgacagaaggggggggcccggtggtgatcgcagtggtgctgttcgtgctgttaagcccggggcttctgtttcagatgccagccaggggaagggtagcagagtttggaacatgcaaaccagtggggcctccattttggttcacgccatcatctactttggcctcatcactagcttcctcattgccattggcgttcacatctacactggctaactcctggatctggttcagtttcacgcatctatggtt

SEQ ID NO: 163211 - DNA, 264 bp, Glycine max
acgcgagaaggcggcagaaggggatctcaatttcttttctctttgtcgcaaagagaagagatctgcctcctttttatcgaatctatctcttcttcaagaatagttgaaaatggggctgtctttcaccaagttgttcagccgactgtttgccaacaaagagatgcgtatactgatggtgggtctcgatgctgcgggtaagaccaccattctgtacaagctcaagcttggagagattgtcaccaccattcccagcattgggtttaa

SEQ ID NO: 163212 - DNA, 260 bp, Glycine max
cggctgcgagaagacgacagaaggggaagaaagaagatcaaaagaaaaaagagaaccaaatggcagcactgggtggctttaccgacatcaccggagcacagaacagcatcgatatcgaaaatctcgctcgctttgctgttgatgaacacaacaaaaaagagaatgcagttctggagtttgtgagggtgattagtgcaaagaaacaagtggtttctggcaccttgtactatatcactttggaggcaaatgatggtgtgacg

SEQ ID NO: 163213 - DNA, 255 bp, Glycine max
aagacgacagaaggggacggcaacagaggaataatcaaatttctcagatctatccgacgtcgtcgcagatccaccaaccgttatggctgccttcagcggtgatgaaacggctccgtttttcggcttccttggagccacagctgccctcgtcttctcctgtatgggagctgcctatggcactgcaaagagtggtgtgggcgtggcttccatgggtgtgatgagacctgagctggtgatgaagtctattgtccctgt

SEQ ID NO: 163214 - DNA, 259 bp, Glycine max
tacgagaagacgacagaaggggggaggaaagtgagtgagagaaagagatcgcagacacagagcagaatggcttctacccaatgtttcttgcaccaccatgctcttaccacccctgccagtgccagatccccatcactacgcatcttggttagcaccaagcctaaccagcttgtttgcaaggcacagaaacaacaaacaccacaagaggatattgatgtcagcccaatctctcgccgtttagccctaactgtgctcattg

SEQ ID NO: 163215 - DNA, 261 bp, Glycine max
cggctcgagctcgagccgaatcggctcgagtacggctgcgagaagacgacagaaggggacagaagaccgaaaaaaaagaagcgaaactaaagtcagcatacgaaaaagatgagtagcatcggtacaggttacgatctatcggtcaccactttctcccctgatggccgcgttttccagatcgagtatgccgctaaagccgtcgacaacagcgggactgttattgggatcaagtgcaaagatggggttgtgttgggcgttgag

SEQ ID NO: 163216 - DNA, 256 bp, Glycine max
tacggctgcgagaagacgacagaaggggaagaaggccttcaccaagtactcaaagcagtatgaaactgaggagggaaagaaaaacattgaggcacagctggagaaactgaagaagtatgctactgtggttcgtgttttggctcacacccagatcaggaaaatgaaagggttgaagcacaagaaagcccatatcatggaaattcaggttaatggtggtactattgcacagaaggtggactttgcatacagtttcttt

SEQ ID NO: 163217 - DNA, 252 bp, Glycine max
cggctcgagcggctcgagtaccgagaagacgacagaaggggggtcaaagaagtagcacctgagaaccctgaatattcaacctgtgatatggggtacctcaattcagttctgtcctcttcaagccaggttcatgctgcagaagagtcacctgtcagtggagggggcctcagtcagaatggaaaattcagctatgggtatgctagctcccctggcaagagatcttcaatggaagatttttatgagacaaaaatt

SEQ ID NO: 163218 - DNA, 254 bp, Glycine max
acggctgcgagaagacgacagaaggggatagaagaagcagaaagagaagcattagcaaaagcaagaagaactagtctaagcagaaatggcctcttcagtgatggcatctgtggccctcaaacctgcccctttcactgttgagaagtcctcagttagaggccttccctccctctcaaggaactcctcttcattcagagttgtggccagtggtggcaagaagatcaagactgacaagccttatggaattaatggtg

SEQ ID NO: 163219 - DNA, 256 bp, Glycine max
tacggctgcgagaagacgacagaagggggcactttcattctctaaaaaaatctaagtccctttggtcttcatcttctgttctgatccaggtatggcttctaaacgcatcttgaaggagctcaaggatttgcagaaggatcctcctacctcatgcagtgcaggccctgtggctgaggacatgtttcactggcaagccacaatcatgggacctgctgatagcccatatgcaggtggtgttttcctagtttcaattcat

SEQ ID NO: 163220 - DNA, 256 bp, Glycine max
cggctcgagaagacgacagaagggggcacaagtttgttgagatagctagaagcaataagatgaaaatgaaagtgcttgttttgtttgttgctacagttttggtagcatatgaatgccatggctcagactaccagaagttccctctccaaatgaaaactgggtttggtgggcaatacagcaatgaggtggcatgtgccagttggaggcttggcgtggaagccaacaacgtattcaagtggcaaactgttcctgcagc

SEQ ID NO: 163221 - DNA, 259 bp, Glycine max
aggtcgagaagacgacagaaggggctgtgcagacatggtacagattcgtttctttgttttctgttttctgtttcctgattttcgtttgagtggtgaaaattgggtgggttgtggtggcagttgttcttctcgtacttcaaggatttggtggggagggaagtaatcgtggagctgaagaacgatttggccatcaaaggaacattgcattctgttgatcagtacctcaacatcaagctcgaaaacactagcgtcgtcaatc

SEQ ID NO: 163222 - DNA, 265 bp, Glycine max
attggagtctagaatggcaagaccttcaaccaggttgaaatcaaacccgagatgattggacattatctcgctgagttctctatttcatacaaacccgtcaagcacggtaggcctggtattggtgccactcactcttccaggttcattcctctcaagtgaaaaaaacctctgcaaaatccccatctttttcagattttgtttttattttcagctgcctattgtatggtttatcatgacttgattccatagtatccaccattttatt

SEQ ID NO: 163223 - DNA, 254 bp, Glycine max
gacacagagagtgagagagggagatggggagcgacacgaggcagagaagtcggtgcagaaagagaaggagaagaagaagatgttggccctggctcccattgctaaacctcttgctgggaagaagctttgcaagcgaaccctaaaacttgttcgtagagctgccgaacacaaatgcttgaaaagaggagtgaaggaggtcgttaaaagtataaggagaggtcataaaggattgtgtgtgattgctggggacatat

SEQ ID NO: 163224 - DNA, 250 bp, Glycine max
cggtattcggctcgaggtttgttgtgagctataagctagtttatcgtgaggagaatatgaagttgtttgttttctttgttgctgcagtagttttggtagcatggccatgccatggcgcaggctaccaaaggttccctctccgaatgacaactggctatggtgagcgttcttcggaggtaaaatgcgccagttttagggctgctgtgggagcacacaacatccgagcctttaaaaccaatcctgaagagtg

SEQ ID NO: 163225 - DNA, 254 bp, Glycine max
gttaagtctgcagacaggatctcagatgctgctctagaatctgcggttctgcaatttatcccatgcatccgttctggtagttttgctgacattgggccacggagatacatggaagatgaacatataaggatagatgatttgtcgtctcatctgggatctctatacaactttccaaaaccaagtgccttctatggggtgtttgatggtcatggaggacctgaagctgcgggctaaataagaaaacacgtgataaa

SEQ ID NO: 163226 - DNA, 252 bp, Glycine max
ctcgagccgtggtgttagatctgtacctgcctagccattgatttggaaaagtccaagcttcaaagatgagtaagcttcagagtgatgctcttagagaagctatctcaggaatcatgactgattccaaggaaaagaacaggaaatttgtggagaccattgaactccaaattgggctgaaaaactatgatccccagaaggacaagcgttttagtggctctgttaagttgcctcccattcctcgccccaagatga

SEQ ID NO: 163227 - DNA, 256 bp, Glycine max
atacaataacatagcatagagtgagaagtgagaagagaaaaatggcaatctccatacccagtagacaatgtttcatagatggagagtggaaagtccctcttctcaacaatcggtttccgatcatcaaccccgctactgaagacatcatagggcatattccagccgctactaaggattatgttgaccttgcggtggatgctgctaaaagagccttttcccataacaaaggcaccgattggtcttcagctcctggctc

SEQ ID NO: 163228 - DNA, 245 bp, Glycine max
gggtcatgagaaaatggtaacatcacaagaagagcaggcaaagatcactgaggttagagggttgatagggccactatcagataaggaatctgtgtactgttctgatgcttccatctcaaggtatttaaggtcgcgaaattggaatgtcaagaaggcagctcaaatgttgaaacagagcctaaaatggagaaaagaataacaacctgaagagattcgctgggaagaggttgctgaagaagcacaga

SEQ ID NO: 163229 - DNA, 116 bp, Glycine max
gaatcccttaaccacccttttgtgcaagaagtccttcctcctagagacccactttttaccttcttcaaagcccgctatgaaagtgcttctgcttcaaaatagacttatttaaggat

SEQ ID NO: 163230 - DNA, 194 bp, Glycine max
attctgggctgattctcttggatccaagtacatatattcaagattggagaaatggtcagagttgtatggggaattcttcaagccttgtgcctacttggctgcaagagctgccaaaggaattcctctgagtgcctctttggagcagcaggcaaagtctcgcatgtaagaaaaaaacagctcattacgtcgttact

SEQ ID NO: 163231 - DNA, 218 bp, Glycine max
ggaggaagagagaaaaaccatggcaacaacactcaacaatggcttcaagatgcctatcattggattgggcgtgtggcgcatggaaggaaacgaaatcagggacctaattctcaattccatcaaaattggttatcgccattttgattgtgctgctgactacaaaaacgaagcagaagttggagatgcgcttaaggaggcttttgatagtggccttgtga

SEQ ID NO: 163232 - DNA, 262 bp, Glycine max
ggtcattacaataggttctgagagattccgttgcccagaagtactgttccagccttctctaattggtatggaagctactggaattcatgaaacgacgtacaactccatcatgaaatgtgatgttgatattagaaaggatctgtatggaaacatcgtgcttagtggagggtctactatgtttccgggaattgctgatcgtatgagcaaggaaattggtgctcctgcacccagcagcatgaaaatccaggtggttgcacctcct

SEQ ID NO: 163233 - DNA, 254 bp, Glycine max
attgaagtctaaagaaaacatagaacgaagaagaagaacagatcagaaaaatggcgtccaaagttccaaagaaggccaatctcctggatcaccactccatcaagcacatccttgacgagtctgtctccgaggtcgtaacgagtcgtgggtatgtggaagacgtgagattgagcaatgcgaggcttttcattggggcaatcatcatcgtcattgctttaatcgctcaattctacaagaagaagttccccgaaaat

SEQ ID NO: 163234 - DNA, 248 bp, Glycine max
gcaatcaaccatctttggatcaaccctccaatttgtttacaatatggaacagaccctctcctttgaatttgagcatgaatttgttcaaaacacggcaagagtgaaatctgttgatatgcatccaactgagccatggattctactgggtttgtattcaggaactatttctatttggaactatcagacaaagactgaagagaagtctttaaaaatccgcgaatctccagtgagatcagccaagtttcatg

SEQ ID NO: 163235 - DNA, 230 bp, Glycine max
tcgatatgaaggagatgaggtcaacttgaccctggcaaaaactgaggcaaaattgccgcatgagaagatttcaaacaaggcttatcatgatgacgacttcatcaggattttggccacaaggagcagagcacagattaatgctactttgaatcactacaaagatgcatttggacaagtcatcaacaaggacctgaaggctgatccaaaggacgagttcctgtccttactaa

SEQ ID NO: 163236 - DNA, 252 bp, Glycine max
gtctatctgtggagattttggccgtgtttttgagattggtcctgtgtttagagcagaagactcctacactcacaggcatctgtgtgagtttacgggccttgacgttgaaatggagatcaagaagcattactttgaggttatggatttagtcgatagattgtttgttgcaatgtttgacagtttgaaccagaattgtaagaaggatctggaagctgtggggtctcagtacccattgaaccttttaagtatctg

SEQ ID NO: 163237 - DNA, 245 bp, Glycine max
gttgcgaatcactgtccaatcccgatcgcttgatccagacagtgaatcagaatcagaatcagaatcagaatcagagagaaacgatgagggcagtaagtgcgttaatggtggctcggatgttgacgcgggaccactcgctccctgtccttggcaacgaaagcatacccttcggatcggtgtggtggttcgcctatgccggcgtctcctgtttcctcgtcctcctcgctggcatcatgtccggtctc

SEQ ID NO: 163238 - DNA, 187 bp, Glycine max
ccaactccaagtcacattggtgacaaagttagaaacaaggagaaagaaagaagatggcaggaaagaaaatcccagatgtgttgctgaattcaggacacaaaatgccagttataggcatgggaacttcagtggagaatcgtccatcaaatgagacccctgcttctaactatgttgaagccattgaggt

SEQ ID NO: 163239 - DNA, 234 bp, Glycine max
cgaccttgggttatagatgatcttgaaactttcaaaatgaaatggagcaagaagtcctggaagaaggtaatcatatttgttgataactctggtgcagatatcattttgggtattctgccatttgcaagggagctacttcggcatgggagtccaggttatattggctgctaatgacctaacttccctcaatgatgtgacttatgctgagctacttgaaattatatccaagttaaa

SEQ ID NO: 163240 - DNA, 238 bp, Glycine max
ggacagactcgtgaacatgctctgctttcattcacccttggtgtgaaacagatgatttgttgctgtaacaagatggatgctactacaccaaagtactccaaggccaggtatgatgaaattgtgaaggaagtttcttcctatttgaagaaagtaggatacaaccctgacaagattccttttgttcctatatctggttttgagggagaccacatgattgagaagtccaaaaaacctgact

SEQ ID NO: 163241 - DNA, 244 bp, Glycine max
ttcaaagcgaaaagagattcgaatccaaggaagggaaaggaaagtaagagaagagaagaatggccgaagagggacaagtgattggtgtccacagcgtggaggagtgggaggaacatctcaagaagggacaagagtccaagaaattgattgtggtggattttactgcttcttggtgcggcccatgccgtttcattgccccaattcttgcggatatggctaaaaagttgccgaatgtcaacttcct

SEQ ID NO: 163242 - DNA, 245 bp, Glycine max
aaaagagaaggcaatggctatcaggttgatggatttggactctccattcttcaacactctgcacagaatcatggatctgacggaggacgccgagaagaacttgaacgctccgactcggacatacgtgcgcgacgccaaggcgatggctgcgactcctgctgacgtgaaggagtaccctaactcgtacgttttcgtgatcgacatgcccggcctgaaaactgggggacttaaagtgccagtgggag

SEQ ID NO: 163243 - DNA, 246 bp, Glycine max
gctgttcttgcgcgtgaacaagcctcaggtaagccaaaaccatggttaagcataacaatgttatcccaaacggacacttccgtaagcactggcagaactatgtgaagacttggttcaatcagccagcacggaagacaaggagacgattggctcgtcagaagaaagctgtgaagatattccccagacctacggctggacctctcaggcccattgtacatggtcaaacttgaaataccacatgaaagt

SEQ ID NO: 163244 - DNA, 244 bp, Glycine max
ttttgctctttcttcaagccaacctcttcccaactctttgttcctttcttcctctcactctcaccatgattacagtaagcgtaagatggcaaaaggagattttcaaagatgtagaacttgacactacccagtctccttatgtttttaaatgccaattgtatgatttgactggtgtgcctcccgaaagaccaaaaattatggtcaagggtggtcttttgaaggatgatgctgattggtcaacagt

SEQ ID NO: 163245 - DNA, 231 bp, Glycine max
ccaaatcacgaaactcaagaagatggagaaagcgatcaacagacagaagattttgcttcatcatctcaacccttcatcatccacccaccccaacgaatcatcctccctccatgcttcagcatgtgtggcgggggatagcgctgcttatcaaaggacatcgacattcggggacgatgttgtgatcgtggctgcttatcggactgctccatgcaaagctaaacgaggtggttt

SEQ ID NO: 163246 - DNA, 112 bp, Glycine max
gcagactcaattttctctctcaatcgtctttcatggctcgtaccaagcaaaccgctcgcaaatccaccggtgggaaggctcctaggaagcaactcgccaccaaggctgcaag

SEQ ID NO: 163247 - DNA, 243 bp, Glycine max
tactggagatggcgcttgatcgactcagctacctccgatgaagacaaagtcacacctgtctacaaactcgaagaaatctgccaactcctactctcttcccacgctactatcgtcaaagagctctcagaattcatccttaaacgcctcgaccataaaaaccccatcgtcaaacaccaggctttaagattgatcaaatacgcggttggaaagtgtggtgtggagtttaggaggggaatgccgaga

SEQ ID NO: 163248 - DNA, 215 bp, Glycine max
gctacgcaacgacggacaccatcaccaagggtcagccactccctgatgatggcaacaccttgctttccaaggacggaacctttgagttgggtttcttcaaccccgggagttcaaataaccgctatgtcggaatttggtacaaaaacattgtggtcaaaacagtggtttggatcgccaaccgtgacaaaccaatcagaaacaactcaagcaagttg

SEQ ID NO: 163249 - DNA, 235 bp, Glycine max
cgacgatgacgccaatttcggcgacttcgaggaggacccggaggcgtacaagcagcccgaggtggacgagaaggacgtcgtcattttgaaggagaagaacttcaccgacaccgtcaagagcaaccgcttcgtaatggtcgagttctacgcgccctggtgcggccactgccaggccctcgcccccgaatacgcccgcgccgcaacggagctcaagggcgaagacgtaattttggcg

SEQ ID NO: 163250 - DNA, 247 bp, Glycine max
ccgtcatcaactagaagaagaagcttcaatttctgcaaaatggatccgtctgcggcattgctgtttaaccacctcaaaggtgcagacccgttcttcctgctagcgggtcctaatgtgattgaatcagaggagcacattctgcggatggctaagaacatcaagactattgcatctgaagttggaataccgttggttttcaagtcaagctttgacaaagctaaccgaacatcatcaagatcatgtcgtg

SEQ ID NO: 163251 - DNA, 249 bp, Glycine max
cgttgccacataacacacattgaaactaaactccaacaagttcctaccatagtctgaggaaagtgagtgagagatagagatcgcagacacagagcagaatggcttctacccaatgtttcttgcaccaccatgctcttaccacccctgccagtgccagatccccatcactacgcatcttggttagcaccaagcctaaccagcttgtttgcaaggcacagaaacaacaaacaccaccagaggatattgatg

SEQ ID NO: 163252 - DNA, 242 bp, Glycine max
ggtttggcaatggttttctggcatagattttgcaaccctggaagaccacagctgcattgccgaaaatgaagtccacagttccatagatttcacattgggaaatacttggcttcctgacacagatataccttacactgaaggactactaagatagacagctgaaagcttaaattgaaaaaaataaatttgattccattattgttagatgtaatgtaactaccatgttttccctttaaagggat

SEQ ID NO: 163253 - DNA, 251 bp, Glycine max
  unsure (1)..(251): unsure at all n locations
tgttaccatttgctcccagtacagagcttaaccgagcttcacaaagatgaatcgggaaaagttgatgaagatggccggttcggttagaactgggggaaagggtaccatgagaagaaagaagaaggctgtccacaagacaacaaccacagatgacaaaaggcttcagagcaccctgaagagaataggggtgaatgccntcccggcnattgagggaggtccatancnttaagggntgacgtanttatccnatt

SEQ ID NO: 163254 - DNA, 209 bp, Glycine max
gtcgttgataacagatttgctccgtcaaaccggcggcaccgccgtcatcgacggcggtctggcgacggagctggagcgccatggcgccgacctcaatgatcctctttggagcgccaagtgcctcttttccttccctcacctcattcgccaagtggcccttgattacctggaaaatggtgcagacattataatcacagcatctttacaag

SEQ ID NO: 163255 - DNA, 223 bp, Glycine max
gggaaatggctcccaaaccgcctagtacgggtctgtttgttggactgaacaagggtcacgtcgtcaccaagaaggaattgcccccacgcccctcagatcgtaaggggttcttacttcaggtgttgtttgccaaaaacaagcaagagggtgcactttgtgaggaacctcataagagaggttgctggttttgcaacctatgaaaagcgtataactgagttgctga

SEQ ID NO: 163256 - DNA, 256 bp, Glycine max
ctcgagccgaatcggctcgagaaccatatctatctattgagaaacatgaagaaggtttcacccttggcattttccattctctttttggccttcaccatagaaccctttattggcattgctgcagcagcaccagaagcagtgcttgacacctcaggccagaagctgagaacaggtgtccagtactacattctgccagtgttcagaggccaaggtggaggcctaacagtttcaagcagtggccacaacacatgccccc

SEQ ID NO: 163257 - DNA, 206 bp, Glycine max
gccattcgtattgtcgcagagaaagaaaaccctagctcaccgtttcaagatgcaaatcttcgttaagaccctcactggtaagaccatcactctcgaagtcgagagttcagataccatagacaatgtaaaggccaaaattcaagacaaggaagggattcccaccagatcagcaacgggtcatttttgctggcaagcagtttgaggat

SEQ ID NO: 163258 - DNA, 235 bp, Glycine max
ttgtttgttgttgtaactcgttcttcttcttttgttgttctgtgtttgtgtttgttttttctctcacctgaaaatgtcttgctgcggtggtaactgtggttgcggaagctcctgcaagtgcggcaacggctgcggaggctgcaagatgtacccagacttgagctacactgagtcaaccaccaccgagaccttggtcatgggagtggcacctgttaaggctcaaatttgaggtgct

SEQ ID NO: 163259 - DNA, 238 bp, Glycine max
attgagtccaattctccttcgctttccctctttatctgaaaggtatggagtgttttgacttctggaagagataatggtgcagtgcctagacggattaaagcatttgtgtgctgctctggtaaattgttgtgatgccgattcgtcaaagcaacctaaaggtttagaaaatccagaagttcttgcaagagaaacagtgtttagtgtaagtgagattgaagcgctatatgaattgttccag

SEQ ID NO: 163260 - DNA, 249 bp, Glycine max
gcacaatcaagagatagccctgatgaggacactggcatctcattccaaaactgctcaatcatagcaacccttgatctctattccaactctagtagcttcaagagctaccttgggaggccatggaggatctattctcgcaccgtttaccttgagtcctacattgatgacttcattgacccaaagggttggacaaagtggtctaatgagcaaggattggaaactttgtaatatggtgagtatgaccactat

SEQ ID NO: 163261 - DNA, 263 bp, Glycine max
aatggcttcaactctgcttcccctggcaaccttcttcttagttctctccgcttcttatctccagattgctggggcgaaagcacaaccgttgactagtctcaagcttaactctccgatccttcaggagtctattgctaaagagatcaatgaaaatcctgaggcaggatgggaggctgctataaatcctcatttctccaattatacagttgaacaatttaagcgccttcttggagtcaaaccaacgcctaagaaggactgagaag

SEQ ID NO: 163262 - DNA, 269 bp, Glycine max
gcacgagcctgaaagcgatacttaactgcgagagacatagtggaaggatccccaaatcttaatcttgcctttgttgctcatattttccagcacaggaatggactttcagcccagacaaaacaacagatgtctctccttgagacatttccagatgacaccctagactctagagaagaaagagcatttcgcctttggatgaatagctttggaaattcaacatatatcaacaatgtcttcgaggatctccgaaatgggtgggtcttctagag

SEQ ID NO: 163263 - DNA, 255 bp, Glycine max
cgcacgtgccgttgcagatgagctgaaatcgagaagaagaagaagaagaagaagatggagaagtatcagatctggagcaggagaatagcgttggcagcgtttgcgtttgctctgctgttcaatcggcctcagcagacgacgtcgttgtgctctctgaagataacttcgagaaggaagttggtcaggacagaggagctctcgttgagttctatgctccttggtgtggacactgcaaaaagcttgctccagaatatg

SEQ ID NO: 163264 - DNA, 259 bp, Glycine max
aagaagagcatcactgaactaacaaagcaaccctatgtcgaaggtggtttgtgtcaccggagccagcggcgccatcggatcatgggtggtcctactcctcctccagcgtggttacaccgtccatgccaccgtccaagatatcaaggatgaaaatgagacgaaacatttggaggaaatggaaggagcaaagagtcatctccatttttttgaaatggatcttcttgacatcgactccattgccgctgccataaagggttgt

SEQ ID NO: 163265 - DNA, 251 bp, Glycine max
agtggagcatgtggatcatgcccgtcgctctgcacagcactgtgtgaaagcattactcagtgcacaaactcacacgtatgattatcttccatacttctactcgaggatttttgaatatgaaggaagccctagaaaagtgtggtggcagttctttggagacaatgttggagaaacagttgaaattggaaattttgatccctaaaatatctaccttctggattgaatctggtaactgaaaagagttcttcttg

SEQ ID NO: 163266 - DNA, 256 bp, Glycine max
cctcgagccgaatcggctcgagtcaacaacacactactttccttcccccaataatgtcttctctcattctctgttcgttttcttgctcctccatcatcatgcttccccagctctcggccaagacatggctctgcgccgccaccaccccaacggtggctccggcaactgcctcctcggaggtggaggcttcaaggttggagcctagagtggaggagagagatgggttctgggttttgaaagaagagtacaggggagg

SEQ ID NO: 163267 - DNA, 252 bp, Glycine max
cttccacaagagttcttgcagttgggagcagctgcaatttgtgtcaaggatcctgttccttctgctgaagacttagcagatcaaataattgaggtcctcaactattttgggcttggtgcagtgatgtgtatgggagtgacagctggtgcttatatccttactctttttgctatgaaatatagggagcgtgttcttggtttaatacttgtatctcccttatgcaaagcaccttcttggacggaatggttttat

SEQ ID NO: 163268 - DNA, 259 bp, Glycine max
cagtctaccactctcctccaccaccaccatacaacaagccttataagtacaagtctcctcctcccccagtccactctccacctccaccacactactactacaaatcaccccctccacctaccactactagaatatagccctttcatatcacacccccacatggatgtatacagaaagtgtgaaaatgaaagccatggagggggaaggtgcagttgcagtttgcaaatccacaaagaagtataaatgtttgattattgtt

SEQ ID NO: 163269 - DNA, 252 bp, Glycine max
ggactgtaactagccgcagcacgaggagcagcctcaggaggagaaggatgtctcacaggaagttcgagcacccaaggcacggttcactgggatttcttcccaggaagcgtgctgctcgtcacaggggaaaagtgaaggcattccccaaggatgacccatccaaggcacccaagctcactgcattcttgggttacaaggcccgtatgactcacattgttagagaggtcgagaagccaggatcaaagcttcaca

SEQ ID NO: 163270 - DNA, 250 bp, Glycine max
attctttcgcaccttcgaaaatcaattttctgtcttctctgcgtctgcttcctctctgagtcgtgggggatgggtcgtgccaggctaaccgctcgcaaatccaccggtggaaaggacctaggaagcaactcgccaccaaggctgcaaggaaatctgcaccgacaaccggtggagtcaagaagcctcatcgctatcgccctggaaactgttgctcttcgtgagatccgaaaataccaaaagagcacagagc

SEQ ID NO: 163271 - DNA, 253 bp, Glycine max
acatagtgtaaataaatactcaattatatatgattcactatagtatttttaaataatgaaaaagaaaatatagtaaatgtttatggaaaaataaaaatagggaggacttccgtaactatgctgacttttgcttcaagacatttggtgatcgggtgaagcactgggtaaccctaaatgaaccatatggctacagcgtgaatggctacagtcgtggaaagtttgcaccaggtagatgttctaactacgtttggaa

SEQ ID NO: 163272 - DNA, 251 bp, Glycine max
agcgctgctgcccttcagtccttcagcaatggtttacgtgaagtcacagaaatcaaaagcctacttcaagaggtatcaagtcaagttcaagagaagaagagagggaaaaaccgattaccgtgccaggattcggttgattaatcaggacaagaacaaatataacaccccgaaatatcgctttgttgttcgtttcagcaacagagacattgttgcaacaataatatctgctagcattgctggcgatattgttc

SEQ ID NO: 163273 - DNA, 233 bp, Glycine max
gttttgtcgtttgcttctttctttgattaatgatgactagctttaaggttgcatgtgtggttgcgatgatgtgcatggttgtcgccatgagtgttacacccatggcacaggcccaatcacgtgcgggcaggtcgccggcgacgtgtctccgtgcctcagttatcttcgaagcggcggaaaaccgtcggacgcctgctgcaacggagtgaagtcgctcagcggcgcggcgaaga

SEQ ID NO: 163274 - DNA, 250 bp, Glycine max
gcgacatcgttggttctcaccctcttcaatcttcactccaatctacaaggagaatggatgaagcgatgaagaggcaatgcaaagttaacctgtacggaactgcttttcccatgaaggaggagcttgacaggcaaatcctgtccaggttccagcggcctcctggaccaattccttcttcaatgctgggtttggagactgttacaggaagtgttgatcactttggttttgaggattgtctagatgacccccg

SEQ ID NO: 163275 - DNA, 251 bp, Glycine max
ctcacactgtgtttggagcagaatcagatcgtgtgttccgtacgttcgttcgttcatttccagtgtcaaacatggcgtctcagatgagcaagaagagaaagtttgttgcggacggagtgttcttcgccgaactgaacgaggttctgacacgtgaattggcggaggacggttactccggcgtggaagttagggttacgccgatgcgcaccgagatcatcatcagagccaccagaacccaggctgttctaggt

SEQ ID NO: 163276 - DNA, 251 bp, Glycine max
ctccgcatacactctgctcgtagggtttctccacctagagggaaatggctcccaaaccgcctagtacgggtctgtttgttggactgaacaagggtcacgtcgtcaccaagaaggaattgcctccacgcccctcagatcgtacgccggaaaacaagcaagagggtgcactttgtgaggaacctcataagagaggtagccggttttgcaccctatgaaaagcgtataactgagttgctgaaggttgggaagga

SEQ ID NO: 163277 - DNA, 259 bp, Glycine max
ctttttcttctctctcaacaacttcaccttcttcctcctcgatcatgtctcacttcaagggcaagtaccatgatgagcttatcgccaatgctgcgtacattggcactcctggaaaggtattcttgctgctgatgagtcaacagggacaattggcaagcgtttggccagcatcagtgtagagaacattgaatccaacaggcgagctcttagggagctgcttttcactgctcctggtgttcttcaatatctcagtggtgtc

SEQ ID NO: 163278 - DNA, 257 bp, Glycine max
cgaatgaagagtctgaaatcgaacggcagagctctcagccatgggtcgagaaataccggccaaagcaagtgaaagatgttgcccaccaagatgaagttgttcgagtactaacaaacacccttgaaactggaagttgcccccacatgctcttctatggtcctcctggcacgggaaaaacaactactgcccttgctatcgcccatcagctttttggtcctgagctatataagtctagggtgctggagttgaatgcaagt

SEQ ID NO: 163279 - DNA, 254 bp, Glycine max
aacgtgaataccctaattcggagggtttcagttttcgccctcttttctcatctccaacatcttcgtcgtcacggaggctagtcttcctgttatcacaaacaatgtctgacggtcagaatcagacaagaatattgagatatggaagatcaagaaattgataaaggcattggaagctgctcgaggtaatggtaccagcatgatttctctgataatgcctccacgtgatcaaatatctcgggtcactaagatgttgg

SEQ ID NO: 163280 - DNA, 250 bp, Glycine max
ggaagcacaccctgcacaaggttacccaatacaagaagggtaaagatagcattgctgcccaaggaaaacgccgttacgatcgcaaacaatctggttatggcggacaaactaagcccgtcttccacaagaaggctaagaccaccaagaagattgttctgaggttgcaatgccagggttgcaagcatgtctcccaacacgctattaagaggtgcaagcactttgagattggtggtgacaagaggggcaaggg

SEQ ID NO: 163281 - DNA, 250 bp, Glycine max
cgcggaaccatgatggctgcgtatttgcgtgtatccatgcccacttccccacagtcccccaccactacgaggaggagatgcagaaatctgaaaacttcttgctccgttaacagacccaaaattccaatgccccctctcaaccctaaagacccctttctctccaagctcgcttccgtcgctgcttcttcccctgaaacgctcctcaacactcccaaaaactccgacacccttccttatctcgacatcttcg

SEQ ID NO: 163282 - DNA, 247 bp, Glycine max
ctgaaccagcagcaacatttgcgcaaatcgaaattgattctctgccacttaacctaaaatggaaatctttccgattcccgccgaatcctacactctcggcttcatcggcgcggaaaaatggccgagtccattgcccgacgcgccgtccgctccggcgtcctgccgccttctcgcattcggaccgccgtccacttcaacctcgcccgccgtggcgccttcgagtccttcggcgtcaccgttctccctt

SEQ ID NO: 163283 - DNA, 241 bp, Glycine max
acctaatagaagaaaaatgatgggcattgaatcgacggggagtaaatggcttggcttggtggcggcggtgtggatacaagcaatctccggcaacaactacactttctcgaattactcggacgctctgaaatccctcatgagcctaacccaaatcgagctcaacaatctgtccgtggccaaggatgttggctgggctggcctcagacaaattcccgactttggccattctcctcattgggtc

SEQ ID NO: 163284 - DNA, 249 bp, Glycine max
aagcgtcgcagtcgcaaccctaatcagaagaagcgcacttcaagcgagtgacagccaccagccatgggtcgtatgcacagccgcggtaagggtatatcctcttctgctttgccctacaaaaggacacctcctagctggctcaagatctcttcgcaagatgtcgaagaaaatatctgcaagtttgcgaagaaaggtttgaccccgtctcagattggtgtcattctcagagattctcacggtattgctcag

SEQ ID NO: 163285 - DNA, 245 bp, Glycine max
ctgttcgaagccaaaaccctagcagccggcgagaatggcagacgttgaggttgatgcggcggcagcggcaggggcagcgcaccgaagaagagaacgttcaagaaattcacttcaggggcgtggatctggacgcgcttctggacatgtccaccgacgaactggtgaagatgttcagtgcgcgtgcacgtagaaggttccagagaggtctgacgaggaagcccatggccttgattaagaagctccgc

SEQ ID NO: 163286 - DNA, 253 bp, Glycine max
ctccgattgagaggataaagtctgtgattcaaaaaccaaaccagttgttagagctgggtcggataggcaatcaacatgattggtcccgacccagtttaagtagttggatgtgagtgcgcttcttcaatctaggtaagcgaaagcaagcagtagatcgagaaaagaaagaatacggattgcaacctacagatgaagaatagaattacataagaagaggaatcaatcgttcagtgatcgctacgcttgattgggg

SEQ ID NO: 163287 - DNA, 244 bp, Glycine max
cgtcaccatgacttgtaagcgcaggaatggaggtcgcaacaaacacggccgtggccacgtcaagttcattcgatgctccaactgcggcaaatgctgtcctaaggacaaggctatcaagaggtttctggtgaggaacattgttgaacaggctgcagtcagagatgttcaggacgcttgtgtctatgaacaatacacgcttccgaagctttatgtgaagatgcagtattgtgtttccctgtgctat

SEQ ID NO: 163288 - DNA, 243 bp, Glycine max
ctctttcacagcacactcctcccagggtttctccaccaagagggaaatggctcccaaaccgcctagtacgggtctgtttgttggactgaacaagggacatgtcgtcaccaagaaggaattgcccccacgcccctcggatcgtaaggggaaaacaagcaagagggtgcactttgtgaggaacctcataagagaggttgcttgttttgcacctatgaaaagcgtataactgagttgctgaaagtt

SEQ ID NO: 163289 - DNA, 254 bp, Glycine max
cagaggttgatcttcgccgggaaacagctggaggatggccgtaccctcgccgattacaacatccaaaaagagtcaacattgcatcttgttttgaggcttcgtggtggtattattgagccatctttgatggcactggcgaggaaatataaccaggataagatgatctgccgcaagtgctatgccccgtttacacccccgtgctgtgaactgcaggaaaaagaagtgtggtcacagcaaccagttgagggccaaag

SEQ ID NO: 163290 - DNA, 255 bp, Glycine max
gattatcctaagtctttgggaatagtgctgcaatggcttcaagtcaggaggaggtgacccttttgggagctactggaagcccatttgtgtgcagggttcatattgccctcaagttgaagggagttcaatacaaatatgtcgaagaaaatttgaggaacaagagtgaactgcttctcaaatccaacccagttcacaagaagattcccagtgtttaatccacaatgagaaagtcaatagcagaagcctcttgtgaat

SEQ ID NO: 163291 - DNA, 214 bp, Glycine max
atcaaattggtctcttgtcttcctcctcatctctacactactccacatacagcccagcctctcaagcccaagcccaagcccaagcccaagcccgttcataaaatcctcctgcagcagcacccagtacccagccctctgcgtctcatccctctccgtctacgcctccagcatccaacaggaccctcaccaactggttcagacagcactctccctc

SEQ ID NO: 163292 - DNA, 245 bp, Glycine max
atccactctctcttaattaaattaaaacaaaaaatgtgcgctgccatatccgaagtggaacaagaagagttgctcgaaaaattggaggtgttcaagatcaaaggcagggacaagcatggccgcaagatccttcgcattatcgccaaattcttcccagcacggttggtgagtgttgaggttctgaaaaagtacctggaggagagggttttcccgaagctgatggggaagaggaaattcgcggtgct

SEQ ID NO: 163293 - DNA, 252 bp, Glycine max
cacaaacccgtccctcacactctccaaaccctagcggcactacacactagttctatcgctatctccccaagatgtcgagcgccgatcccgagcacagagaagaggaggagcacccgccgttggcgacgacgaggacaccggagctcacgtcgctccaatcgtcaagctcgaggaggttgctgtcaccaccggcgaggaggacgaagatgcaatcctggatctcaaatcgaagctttaccggttcgacaagga

SEQ ID NO: 163294 - DNA, 251 bp, Glycine max
ccgagaggggcagtagccgagattccgtgagttgcaaaaatgaagacgattctttccaccgagaccatgaacatcccggacggcgtgagcatcaaagttcatgccaaggtcatcgaagtcgagggcccccgcggaaaattggtgcgagacttcaagcatttgaatctcgattttcagctcattactgacgaaaacggtagaagaaagctgaaaatcgacgcgtggtttggttctcggaaaacatccgccgc

SEQ ID NO: 163295 - DNA, 245 bp, Glycine max
gcaaattgaatcgagcgaattcacaaaccctagttttcgacgatgggtcagatccagtactccgagaagtacttcgatgacacttatgaatatagacatgtggttcttctcctgaagtcgcaaaactgcttcccaagaatcgtcttctctccgaaaatgagtggcgagctattggggttcagcagagccgtggctgggttcactatgcaattcatcgccctgagccacacataatgcttttcagg

SEQ ID NO: 163296 - DNA, 247 bp, Glycine max
cgatctcaaaatgcccgccgtttatggagctcgcttgaccaccttcgaagactccgagaaggagagtgaatacggttacgttcgcaaggtttcaggacccgtcgtcgttgcggatggcatggctggtgctgctatgtatgaactcgtgcgtgttggtcatgataatctcattggtgaaattattcgtcttcaagggggattctgctaccatccaagttttatgaggaaactgctggtttgatggtta

SEQ ID NO: 163297 - DNA, 247 bp, Glycine max
agagactcaggcgctgctgcccttcagtccttcagcaatggtttacgtgaagtcacagaaatcaaaagcctacttcaagaggtatcaagtcaagttcaagagaagaagagagggaaaaaccgattaccgtgccaggattcggttgattaatcaggacaagaacaaatataacaccccgaaatatcgctttgttgttcgtttcagcaacaaagacattgttgcacagataatatctgctagcattgct

SEQ ID NO: 163298 - DNA, 249 bp, Glycine max
gcagaacaaagctgaagcagacagaggtggactgcgagttcctaaagaaatgttgtgaaacattaacagatgaaaacagacggttacagaaggagcttcaagagctgaaggcactgaaactggctcagccgttgtacatgcctatgcctgcggcaacactcgccatgtgcccctcttgcgagaggctcggcggcaagggcgtccaacgtgccggcggttccccccaagacatcattctccatgggccct

SEQ ID NO: 163299 - DNA, 244 bp, Glycine max
attttcttctttctctctcccttattcaaagggactcattgttcttctcccaggttatgtagaaaagcaaaatggtgaagagttgctgcattggtgctggatatgttgggggtcctactatggcagtcattgcacttaagtgcccatccattgaagttgctgttgttgatatctctaaatcccgcattgcagcctggaacagtgaccagcttcctatctatgaacctggccttgatggtgttgt

SEQ ID NO: 163300 - DNA, 227 bp, Glycine max
ggagcacgcaatcttgcataaatacagagaagaagagaagagtgaagagacgaaggatggggaaggcaaaagaagcggcggtggtggcgggagcctagcattcgcgtggctcgctatagagctcgctctcaaacccttccttaccaaggcacgtgcttccatcgacaagtccgacccggcacgtgaccccgacgacgatgctcttcctaaaaccaccgccgacgacg

SEQ ID NO: 163301 - DNA, 242 bp, Glycine max
ccgagagagagagagagagaggagagagtattggcgcttcatcaagatgggtatttctagggattccatgcacaagaggcgtgccactggtggcaagaaaaaggctggagaaagaagagaaagtatgagcttgggcgtcaggcagcaaacaccaagttatcaagcaacaagacaatcaggaggattcgtgttagaggtggcaatgttaaatggagggcattgaggctggatactggcaatta

SEQ ID NO: 163302 - DNA, 246 bp, Glycine max
  unsure (1)..(246): unsure at all n locations
cttaactcaacttctgctacccactctcttcttccaagtccaaccacgcttttctctacagtcatgggcaaggttaagatcggaatcaacggatttggaagaattggccgtttggttgccagagtcgctctgcaaagagacgatgtggagctcgttgccgttaacgaccctttcattaccaccgattacatgacatanntgtttaaatacgacagtgttcacggacactggaagcatcacgatgtc

SEQ ID NO: 163303 - DNA, 250 bp, Glycine max
ctgtgacattacaggcaccatagacttcatattcggcaatgcagctgctgtgttccaaaactgcaaaataatgcctagacagcctctaccaaaccagttcaacaccatcacagctcagggcaagaaggaccccaaccagaacaccggaatcataatccagaaatcaaaattcattccccttggaaacaatctcacagctcccacataccttggtaggccatggaaagatttctccaccactgtgatcatg

SEQ ID NO: 163304 - DNA, 248 bp, Glycine max
aggagggagccgtagcagcggaagctctagcttgggtagcgaatcacaatggcgagaggattaaagaagcatctgaagaggcttaatgccccaaagcattggatgcttgacaaactgggtggtgcatttgctcctaagccctcatctggaccacacaaatcgagggaatgcctgccactcatactcattttgcgaaaccggctgaagtatgctctaacataccgtgaagtcattgctattctgatgca

SEQ ID NO: 163305 - DNA, 243 bp, Glycine max
tcacaaactagtaaatagtaatattattcttcgaatccattttattattcataatgggtgttttcacatttgaggatgaaaccacctcccctgtggctcctgctacctttacaaagctctagttacagatgccgacaacgtcatcccaaaggctgttgatgccttcaggagtgttgaaaaccttgaggggaacggtggccctggaaccatcaagaagatcactttcgttgaggatggagaaag

SEQ ID NO: 163306 - DNA, 241 bp, Glycine max
caatatattccattctctctgtgtatatccctacctctcccttcaagatgcagatcttcgtcaagaccctcaccggcaagaccatcacccttgaggtggaaagcctgacaccatcgacaacgtcaaggccaagatccaggacaaggaaggaatccccccggaccagcaacgtctcattttcgccggaaagcaacttgaggacggccgtacccttgctgactacaacattcagaaggagagt

SEQ ID NO: 163307 - DNA, 237 bp, Glycine max
  unsure (1)..(237): unsure at all n locations
atgaaagaagccaaaaatttattagctgtgatgacgaaagaaggagtaaaacctaatgttgtttcttataatactttaatggatgggtattgtttaattggtgagtgcagaatgcaaaacaaatgtttcacactatggtccaaaagggagtanatcctaatgtgtacagctacaatataatgattgatagattatgtaagagtacaagggtggatgaggccatgaatctcctaagag

SEQ ID NO: 163308 - DNA, 243 bp, Glycine max
atgcaaagcatccttcgcttcaatctctctctctctctttgcgctttctgcaaaccgaacatttcatctccaaagggatcaacaggtcgaaggagaaatggggcgacattcacgaagcttttcagccggcttttcgcgaagaaggaaatgcgaattctgatggttggtcttgatgctgctggtaagaccactatcctctacaagctcaagctcggagagatcgttactacaattcctaccatt

SEQ ID NO: 163309 - DNA, 265 bp, Glycine max
gataactagaaacagtgtgatgaaaatgaaggtccttgttttcttcgttgctacaattttggtagcatggcaatgccatgcgtacgatatgttccctctccgaatgaacactggctatggtgcccgtactccggaggtgaaatgcgcaagttggaggcttgctgtggaagcacacaacatctttggctttgagaccattcctgaagagtgcgttgaagcaacaaaggaatacatccatggcgaacaatatagatcagactccaaa

SEQ ID NO: 163310 - DNA, 263 bp, Glycine max
gatatcctattacaattggcactgcaattcctttgaaagcaagtttcttcatcacttatataatggttgatggatgggctggtatagctgcagaggttttgatgttgaaacccctaatcatatatcacttgaagaattttttcttggtgaagactgaaaaggatagggaagaggctatggatcctgggagtattggcttcaacactggagaacctcgaatacagttgtactttttgctgggtctagtctatgcttcagttaca

SEQ ID NO: 163311 - DNA, 266 bp, Glycine max
ctccatacctactttcagctcctaagagcacgcatcactgttgcacttcttactcgttctccctcttttttttcttcttcttcttcttcgctaaaccccccctttatttttcctatctcactaacatcgatgggagacgagaataagaccaagtcccctgcttccggcgtgtggtccaccatcaagcctttcgtcaatggcggagctcccggcatgctcgtcacctgcgtcattcaacccatcgatatgatcaaggtgaggattca

SEQ ID NO: 163312 - DNA, 263 bp, Glycine max
gttcccttctccaacatgccaaacgacagcgttctgagtcttgtcttcttcgttaccctcttcacatgccttctctctgctaattcccacgatgaccatattttcctaccgagtcaactccatgacgatgactcagtgagttgcactgctaccgacccaaaccttaactacaagccggtgatcggaatcctgacccaccccggcgacggtgcctctggccggctcagcaacgccaccggggtttcttacatcgccgcctccta

SEQ ID NO: 163313 - DNA, 260 bp, Glycine max
ggcaaattaatcaaacatggctagggttagtgctttgtttcactctttgctcttgatttcttcccttgtattggcttctcaaatccatgtttcctctgggaaactagtccctggactatcatggaattactatttgttgacatgtcccaagcttgagaggattataaggaagcatcttgaggatgtcttcgagaaggacagtggagtagctcctggcatacttcgactcttcttccatgactgctttcctaatggatgcg

SEQ ID NO: 163314 - DNA, 263 bp, Glycine max
tagaactagtcgaaagatctagcagtggactctcctcttccttggtatttgcctttagacaaaagtcacttctcactgagtagcttccgtctaactgctgtcgggcgacttttcaccaaaaacatggtcaaggttctggagtatgttggactggctccaaagggtagtctaagggttcaagacttcctggagaaggctgcagagggactagttgaaggagggaagagagagattttcacaccaatgtacttcttcctggcacg

SEQ ID NO: 163315 - DNA, 265 bp, Glycine max
agcagctgagcttgtttccgtcgccgcttcacccaccgtagcaaccatgatcattcccgagaagaaccgcaaagagatctgcaaatacctcttccaagagggagtttgctttgcgaagaaggacttcaatctggcaaagcacccagagattgatgtgccgaatctgcaggtgataaagctgatgcagagcttcaaatccagagagtatgtgagggagacatttgcgtggatgcactattactggttcctcaccaacgatggaatt

SEQ ID NO: 163316 - DNA, 264 bp, Glycine max
gtctcatctttgcggcatcacttttccttttgcttctcgattgttgctctgggagttttgttggggtctgctatggaagaagtgctgatgacctccctacacctgacaaggtggcacagttggttcaacttcataaaatcaaatatgtcacgatttatgattctaatatacaggttctgaaggcctttgcaaacactggaattgagcctatgattggggttacaaattcggacttgctttcattctctcagttccactctaatg

SEQ ID NO: 163317 - DNA, 261 bp, Glycine max
gcttctctcactacattgcagggtcttgagggcattgtgggcaaagataagcttgttgtgtccacctcctcctcccttcttcacactgctgttgatcttgttaacgagaccaagttggatgacgagatcaagtcatggctagcatttgctgcacaaaaaattgttgaagttaacgcattggctaaggcattgtctggcaacaaggatgtggccttcttctctgctaatgctgcagctcaggcttcaaggaagtcctctcca

SEQ ID NO: 163318 - DNA, 262 bp, Glycine max
tcaaagatgaagatgatccacgttcttttcctctttgctcttgtctcgttcacttcccatgcttctgtcaatgatttctgtgtagcagacctaaaaggtccagatagcccttcaggctatcagtgcaagccacctaacacagtcacagtggatgactttgtgttctctggctttgtagctggaaacaccacaaacactttcaatgctgcattaacctccgcatttgttactgattttccaggtgtgaatggtcttggtgtat

SEQ ID NO: 163319 - DNA, 260 bp, Glycine max
gctgggcattgagaaggaaggacgctttcagaggcgaaaggccatggggagataccgtctgtgatccatggatctccgatcgggaaaccgtatccaagctccgcggctagtctgcgctctttggacttttaaaacttagcgaactgaaacatcttagtagctaaagaaagggagaggcgcgaaaatgagcggagctcaggggtagaagaagggagcgagcttcgtgatcgattgcgcgaaccggtggaggataagattat

SEQ ID NO: 163320 - DNA, 263 bp, Glycine max
ataaagaaagaatcccaggcgaggagaaagatggaggggaaggagcaggatgtgtcgttgggagcgaacaagttccccgagagacagccgattgggacggcggcgcagagccaagacgacggcaaggactaccaggagccggcgccggcgccgctggttgacccgacggagtttacgtcatggtcgttttacagagcagggatagcagagtttgtggccacttttctgtttctctacatcaccgtcttaaccgttatgggagt

SEQ ID NO: 163321 - DNA, 197 bp, Glycine max
atttgcagtaatggcttcaatgaataaccaaaaagaaattgagctctttgagggccaatctcttctgtacatgcagctatatgggcacctaagacctatgtgtcttaagtgggctgttcaactaggtattccagacataatacagcaccatgcccaaacccatttctctgtctgacttggtctctactcttcaaatt

SEQ ID NO: 163322 - DNA, 257 bp, Glycine max
agcgaatcacaatggcgagaggattaaagaagcatctgaagaggcttaatgccccaaagcattggatgcttgacaaactgggtggtgcatttgctcctaagccctcatctggaccacacaaatcgagggaatgcctgccactcatactcattttgcgaaaccggctgaagtatgctctaacataccgtgaagtcattgctattctgatgcagcgacatgtccttgttgatggcaaagtcaggactgacaaaacatac

SEQ ID NO: 163323 - DNA, 256 bp, Glycine max
gtcttcttctcttgcggcttgggttttagcgcagttcttctagatttaaggaagatgggtaaggaaaaggttcacatcagtattgtggtcattggccatgtcgactctgggaaatccactaccactggtcacctgatttacaagcttggaggcattgacaagcgtgttattgagaggtttgagaaggaagctgctgagatgaacaagaggtctttcaagtatgcctgggtgctggacaaacttaaggctgagcgtg

SEQ ID NO: 163324 - DNA, 257 bp, Glycine max
ttcttccttattttcttccctagtcaaggagattcatctctgcaggttgttttagaaaagaaaaaatggtgaagatttgctgcattggtgctggatatgtggggggtccaacaatggcagtcattgctctgaagtgcccctccattgaagtggctgttgttgacatctccaaatcccggattgcagcatggaacagtgaccagcttcctatctatgagccaggccttgatggtgtggtgaagcaatgtcgtggcaag

SEQ ID NO: 163325 - DNA, 261 bp, Glycine max
ctgagttaaggcttggactgcctggaaacggaggcactgaagaggtgctcatcaggaagaggggtttctctgagactgaaactggtcatgaagatgagtctgccaccactgtggatttgatgcttaatctttcttctaaggaggccgcaagcactgctgctgctgctgcagatccaactgataagcacaagactttgcctaaggagaagacccttctgccagcagatcctgctaagcctccagccaagacgcaggtggtgg

SEQ ID NO: 163326 - DNA, 260 bp, Glycine max
tgtcgtggcggaagaaccatccccatggttttgttgcgaagcggagacgctgcccgatggaaccgtgaacttgatggtgtggcattgcactattcccgggaagactgggactgattgggagggtggctacttcccgcttacgctgcactttagtgaagactacccaagcaagcctccaaagtgtaaattcccacaaggtttcttccaccctaatgtttatccttctgggactgtttgcttgtctatacttaatgaggata

SEQ ID NO: 163327 - DNA, 248 bp, Glycine max
ctgcgatcctagtcctacactctccgctcccgctcgaaccttggcgccgtcatcgacgcgaggacttctagaaggaagaaatttgaagaaagatgggagagaggaaggtgttgaacaagtattacccaccggactttgatccctccaagcttcccagagcaagaaggccaaagaaccagcagatcaaggtccgcatgatgcttccggtgagcattcgatgcaacattgcggcaattacgtctacaaag

SEQ ID NO: 163328 - DNA, 261 bp, Glycine max
gtactgctttctttaagtgccatggacatgagcaatttgagatgacgggtttggatcctgagtataataggttgttcaatgatggcatcgtgtgcactgctagggttgtgtccaaagctgtgatcactggctacaaagatgggttcaaccagattaagtccttggttcatgttggaggtggcattggatggtctctttcggagattgttagggcttatcctcatatcaatgccatcaaccttgacttgcctcatgtagttg

SEQ ID NO: 163329 - DNA, 248 bp, Glycine max
aacagagagtggtttcagtgagtgatcggtgttcacttgatccttcataagtcgtcatcatcatcatcatcatcaccgttgattgaagaagatgccgatcagaaacatcgccatcggaaggcctgaagaggctactcaccccgacacgttgaaggcggggttggctgagttcatctccaccttgatctgtgcgttcgccggttcaggttccggcatcgcctacaccaagctcaccgacaacggcgacg

SEQ ID NO: 163330 - DNA, 262 bp, Glycine max
gtgaaggcatcgttagcagttttgtagattcaacctcaatttgcagagttacgttctaatatatttacacaagactgataagagaaaatgtctctgattccaagtttcttcggtggccgaaggagcagtgttttcgaccctttctccctcgatgtgtgggaccccttcaaggattttccatttcccagttctctttctgctgaaaattcagcgtttgtgagcacacgagtggattggaaggagacaccagaagcacacgtgt

SEQ ID NO: 163331 - DNA, 256 bp, Glycine max
gtgagacaaaagctgaaattcttcagaatctggctgagttccagttttcttgtgtcatgtacaatgctgtgttggagaatgcttgtagtgagcaaggagcaagaatgtctgcaatggacagctctagcaggaatgctggggatatgcttgatcgtctcaccctcacctataacagaactcgtcaagcatcaatcaccactgaattgatagagattatctctggagcttcagcactggaaggttaattacaggagag

SEQ ID NO: 163332 - DNA, 255 bp, Glycine max
ttctgcttcgcgtggaccaacaagaagtgtaagttttcattcaatggccagcgctcagctctcagcaatatcttcgtcgatctctacggcgtcgtttgaagggcttcgaccttcggctgttcagtttgcttccgcgggcagaattagaattggcaatctctcccaaaggtctttccggggcttggttgtcaaagccgccaccgttgttgcccccaaatacaccgcgattaagcctctgggagacagagtgctgat

SEQ ID NO: 163333 - DNA, 261 bp, Glycine max
ccaagattgacaggcgatccggcaaagagcttgagaaggagcccaagtttttgaagaacggtgatgctggttttgttaagatgattccaaccaaacccatggttgttgaaactttctccgagtatcctccacttggtaggtttgctgttagggacatgcgtcaaactgttgctgtgggagtcatcaagaacgttgagaagaaggatcctaccggagccaaggtcaccaaggctgcccagaagaagaagtgaatcgtgcggg

SEQ ID NO: 163334 - DNA, 260 bp, Glycine max
ggactctctttccttccctctttttccgaatctgaatcgaaatggcttcggagactgagacgtttgcttttcaggccgagatcaaccagctcctcagtctaatcatcaacaccttctacagcaacaaggagatctttcttcgtgagctcatcagcaatgcctctgatgctttggacaagattcgatttgagagtcttacagacaagagcaagcttgatgctcagccagagttgttcattcacattattcctgacaagacc

SEQ ID NO: 163335 - DNA, 259 bp, Glycine max
  unsure (1)..(259): unsure at all n locations
gttctttctctgcgattttttcttcaatttccagatcacgaaactaaagaagatggagaaagcgatcagcagacagaagattttgcttcatcatctcaacccttcatcgtctacccacgtcaacgaatcatcctccctctatgcttcagcatgtgtggcgggggacagcgctgcttatcaaaggtgatcgacattcagggatgatgttgtgatcgtggctgcttatcggactgctcattgcaaaggtanacgtggtggt

SEQ ID NO: 163336 - DNA, 256 bp, Glycine max
accagcggtgactctctgagatctattccgacgccgtttctcaccaaaaccttccaactcgtcgacgatcacaccatcgaccatgtgatttcgtggaacgattctggatcgtccttcatcgtctggaacaccaccgctttcgccaaggatttgcttcctaaatatttcaagcacaacaacttctccagcttcgttcgccaactcaacacttatggattcagaaaagttgtacctgaccgctgggagttctcgaacg

SEQ ID NO: 163337 - DNA, 258 bp, Glycine max
aagaaatctgcgactcttttctctctctgtttcggtggtgcctgactgcttcatccctctttcttctcttcaatcaaagtctccaaccttttcctctgaattgaagcagcggaggagatggcgagtcccatgaaggaagatgagaagaacgagcgcgtgattcgaggtcttctcaagcttcaacataatcgcagatgctcaactgcaacagtctggggccacaatatgtgtgcataaatttctggacgtttgtttgca

SEQ ID NO: 163338 - DNA, 136 bp, Glycine max
cgttgttgttgttctaaaacgtccacacattctccgtcgccacaacaacaatggctccgaagaaaggtgtgaaaggttccgttgtagcagcgaagaagaaggttcaggagaaggtgacgaatcctttgttcgagaa

SEQ ID NO: 163339 - DNA, 258 bp, Glycine max
gtttttctctacttgtttcttctttcatggaataggagaaaatgctctgatgggtttgccagagacaggacttgcaataatccctggggcaggtggaactcagcgactgcctagattggttggaaaagcaatagcaaaggatattatatttactggtcgaaagattgatggcaaagaggcactgtccttgggtctagtcaattactgtgttcctgctggtgaagcttattcaaaagcacttgcaattgctcatgatat

SEQ ID NO: 163340 - DNA, 256 bp, Glycine max
gtgctctaactgacaactccatcattgagcaggcgctgggcaaatatggaatcatttccactgaagatctgatccatgagatcatcactgttgggcctcactttaaggaggctaacaacttcctttggccatttaagctcaaggctcctttgggtggcttaaagaagaagagaaaccactatgtcgagggaggtgatgctggaaaccgggagaattacatcaatgagctaatcaggagaatgaattgagctgtggc

SEQ ID NO: 163341 - DNA, 259 bp, Glycine max
gtgagctataagctagtttatcgtgaggagaatatgaagttgtttgttttctttgttgctgcagtagttttggtagcatggccatgccatggcgcaggctaccaaaggttccctctccgaatgaaaactggctatggtgagcgttcttcggaggtaaaatgcgcaagttttaggcttgctgtggaagcacacaacatccgagcctttaaaaccattcctgaagaatagcgttgaacaacaaaggactacattaatggcg

SEQ ID NO: 163342 - DNA, 258 bp, Glycine max
gtgaaaagaaaatcctcacccattttcttcgtagccaaacactctgaaattctcagttatgtcgtggcaagcgtatgtggatgatcacctactgtgtgaaatcgaaggtaaccacctcactcacgccgctatcatcggccaagacggaagcgtttgggctcagagcaccaacttccctcagttcaaacctgaggaaataactgccatcaataatgactttaatgagcctggatcacttgctccaactggattgtatat

SEQ ID NO: 163343 - DNA, 255 bp, Glycine max
gtcgcgtcgctgctccgtaccagtttcactgcataaatttgagagtgaactctgcaaacatgttggtttatcaggacctccttacaggtgatgagcttctctcggactccttccgttacaatgaaattgagaatggaatgctgtgggaagttgaggggaagtgggttgttaagggagcagttgatgttgacattggtgcaaacccttctgctgagggtggagcagatgagggagtcgatgacgcagctgttaagg

SEQ ID NO: 163344 - DNA, 258 bp, Glycine max
gtagaacaagtagttgagaactaagaaggagaagcaaatggcttcctcaatgatctcttccccagctgttaccactgtcaaccgtgccggtgccggcatggttgctccattcactggcctcaagtccatggctggcttccccaccagaaagaccaacaatgacattacctccattgctagcaacggtggaagagtgcaatgcatgcaggtgtggccaccagttggcaagaagacgtttgagactctttcctacctgcc

SEQ ID NO: 163345 - DNA, 256 bp, Glycine max
gtaaatacacattacattactaagtctttgttcatttgagtagtagtgatggctagcctcaaggttgcatgtgtggttgctgtgatgtgcatggttgtggtggccatgagtgctgcacccatggcacaggccgcaatcacgtgcgggcaggtcgccggcgacatgtctccgtgcttcagttatcttcgaagcggcggaaaaccgtcgcaggcctgctgcaacggagtgaagtccctcagcagcgcggcgaagacca

SEQ ID NO: 163346 - DNA, 256 bp, Glycine max
tgtttttttgttgagaagagagaatggctgtggcgtcgtcatcatcccttatcacgttgaaggtgaaaccttgcattttcgggtctcctcggagatccgcggtggttcggaattgtgcgaagtcaacggcggggacaatatcgacgagttggagcctggacagctggagggcgaagaaggcgcttcagcttccggagtacccagatgcgaatgaattggacctagtcctccaaaccctctcttcttttcccccaat

SEQ ID NO: 163347 - DNA, 258 bp, Glycine max
gtacgcattgtgtttctctctttccgcggcgtagatctgagcagtttgggaaaccctaactgctctcaccactctactttgctttttttcctctccgatcaacgacctctttcgtcgccctaagtcatggcaggacttgcacccgagggatcacagtttaatgctcgtcaatatgataccaagatgaatgagttgcttacatctgatggacaggatttttttcacatcttatgatgaggtttatgacagttttgatgc

SEQ ID NO: 163348 - DNA, 251 bp, Glycine max
tcttcatccaacggggcaacgttggatctgctgaactgaacttctttttatatgcactctgtgatttcactctgcttcgccatcctatgggggacaacaacagcaacaacgatgccttcatgcgcaaccaaaacgccgccgttcaggcccgcaccaaagcgcagaaccgctccaacgtccttcagctcaaactgattggacagagtcacccaaccggtctcacagcgaacctgttgaagctcttcgagcct

SEQ ID NO: 163349 - DNA, 258 bp, Glycine max
gtaagagaatccgaggcgaagagaagagaaaaattaagatggaggggaaggagcaggatgtgtcgctgggagcgaacaagttcccggagagacagccgattgggacggcggcgcagagccaagacgacggcaaggactaccaggagccggcgccggcgccactggttgacccgacggagtttacgtcatggtccttttacagagcagggatagcagagtttgtggccacttttctgtttctatacatcactgtcttaa

SEQ ID NO: 163350 - DNA, 256 bp, Glycine max
gttcaaagatgaagatgatccacgttcttttcctctttgctcttgtctcgttcacttcccatgcttctgtcaatgatttctgtgtagcagacctaaaaggtccagatagcccttcaggctatcagtgcaagccacctaacacagtcacagtggatgactttgtgttctctggctttgtagctggaaacaccacaaacactttcaatgctgcattaacctccgcatttgttactgattttccaggtgtgaatggtct

SEQ ID NO: 163351 - DNA, 256 bp, Glycine max
gagatagccagccatgtcgatcttttctattccctcaccaacgtaccgttgttcaatttcaatttcaatttctcggcagccattgccatgttctttcacggctcaagtgagaagaagagggaaagggaaagtggtaatgagcatggaggcaggcattggagtgatgggcaccaagttgggtatgatgagctatttcgaatccgacggagaggttgttcctgtcactgtcgtgggtttcaaagaaggcaacatcgtc

SEQ ID NO: 163352 - DNA, 253 bp, Glycine max
agctgctatcgataacatatttcacttgagacagttatctttatctacgcaagagaagaatagaaaatggatatcaggttgatggatttggactctccattgttcaacactctgcaccgaatcatggatctgacagaggacgcagagaagaacttgaacgctccgacgcggacatacgtgcgcgacgcgaaggcaatggctgcgactcctgcggacgtgaaggagtaccctaactactacgtgttcgtgatcg

SEQ ID NO: 163353 - DNA, 255 bp, Glycine max
atcaaatcaaagccatggccacctccaacttctctattgttctctccgtctccctagccttctttttggtgctacttaccaaggcacactcgaccgataccgtttctttcaccttcaacaagttcaacccagtccaaccaaacattatgctccaaaaagatgctagtatttcatcctctggggtgttacaactcaccaaagttggcagcaacggcgtgcccacctcgggatctctcggtcgtgccctttacgctg

SEQ ID NO: 163354 - DNA, 249 bp, Glycine max
gtccgatgccactaagggttctgaccatttgagagatgtgtttggcaaagctatggggcacactgaccaagatatcgttgctctatctgggggtcacactattggagctgcacacaaggagcgttctggatttgagggtccctggacctctaatcctcttattttcgacaactcatacttcacggagttgttgagtggtgagaaggaaggtctccttcagctaccttctgacaaggctcttttgtctga

SEQ ID NO: 163355 - DNA, 251 bp, Glycine max
gtttatttcaatggatcgggcggcgttgacggttggaccgggcatggacatgccgatcatgcacgacagcgaccgttacgatctggtacgcgacatcgggtccggaaatttcggcgtggcgaggctgatgcaggataaacaaaccaaggaactggtcgccgtcaagtacatcgaaaggggtgataagattgatgacaatgtaaagagggaaatcattaatcacaggtctctgaggcatcctaacattgtta

SEQ ID NO: 163356 - DNA, 252 bp, Glycine max
gttgtaactcgttcttcttcttttgttgttctgtgtttgtgtttgttttttctctcacctgaaaatgtcttgctgcggtggtaactgtggttgcggaagctcctgcaagtgcggcaacggctgcggaggctgcaagatgtacccagacttgagctacactgagtcaaccaccaccgagaccttggtcatcggagtggcacctgttaaggctcaatttgagggtgctgacatgggtatgcccgctgagaacga

SEQ ID NO: 163357 - DNA, 251 bp, Glycine max
gttctgttctttggccagtctattcgcagagctaggccctttccatggcagcatgatttgtttgaagatagcttaagagctgctgggattcaaggagtagaagttggcaccaagttgtatgtttccaatttggaccatggagtgaccaatgaagacataagggaacttttctctgagcttggagagttgaagcgttttgctgttcattatgacaaaaatggacatccaagtggttcagctgaagtcgttta

SEQ ID NO: 163358 - DNA, 250 bp, Glycine max
cttcttcccaaccactactactcactcactgcagatctcaattgcatcgctgtccatggctaccatcgttagcatcaaggcccgccagatcttcgacagtcgtggcaatccaactgtcgaggtggatttgacttgctccgatggtacttttgccagagctgctgttccaagtggtgcatccactgggatttatgaggcccttgaattgagagatggaggatctgactaccttggaaagggtgtatcaaag

SEQ ID NO: 163359 - DNA, 251 bp, Glycine max
gttggatgcatttctatttctaactaattattgtgcttattattattgttgagatagataagaatggcaaagttaataaaattctttgagttgaacacaggggccaagattccttctgttgggttaggcacttggcaagctgagcctggtgttgtagccaaagctgtcaccacagccattctggttggatacaggcatattgattgtgctcaagcgtataacaatcaagcagagattggttctgctcttaa

SEQ ID NO: 163360 - DNA, 249 bp, Glycine max
cgaaaccctcttcatcttgttctatctgtgacgagcatcatggcctcaagagcagtgttattgttggctatgtgtgtgcttccggcgatggttgtggccattcgcccagcaaagaaccctttttgcgtgaagggtcgtgtctactgtgacccttgccgtgctggttttgagacctcagctacctgctacattgctggtgctgagattatgttgcaatgcaagagcagggttagcaacgaggttgtgtac

SEQ ID NO: 163361 - DNA, 257 bp, Glycine max
ttgaaaagaaaatcctcacccattttcttcgtagccaaacactctgaaattctcagttatgtcgtggcaagcgtatgtggatgatcacctactgtgtgaaatcgaaggtaaccacctcactcacgccgctatcatcggccaagacggaagcgtttgggctcagagcaccaacttccctcagttcaaacctgaggaaataactgccatcaataatgactttaatgagcctggatcacttgctccaactggattgtata

SEQ ID NO: 163362 - DNA, 250 bp, Glycine max
ctcgagcgctcgagccggtctccttgtattacccaacagatgcagcagttcaacaagatactgagctacaagcatggtggaaggaagctgtggagaagggtcatggtgacttaaaagaaaagccttggtggcctaaaatgcagacaactgaagatctcattcaatcatgctctattatcgtttggacagcttcggctctccatgctgctgttaattttggacaatatccttatgggggcttaatcctgaa

SEQ ID NO: 163363 - DNA, 256 bp, Glycine max
tatgaaagcaataagtccctccttcctctgccttataattcttgtgacccttttggctggtagcattgaaagtgcaccagcaaacgtgaagccaagccattatgctgcacccttcaataggagtgtttttccttctggttttctatttggaataggctctgcagcttaccagatagaaggagcagcagctatagatggcagaggaccaagtatatgggacacctatactaaacagcaaccagggaagatttgggat

SEQ ID NO: 163364 - DNA, 248 bp, Glycine max
tcgatcttcgatcttcgtcgctgaaaatgagagagtgcatttcaatccacatcggccaggccgggattcaggttggaaacgcctgctgggagctttactgcctcgaacacggcattcagcctgatgggcagatgccaagtgacaagaccgttggtggaggtgatgatgctttcaacaccttcttcagtgaaactggggcaggaaagcacgtgccccgtgcgatttttgtagatcttgagcccactgtg

SEQ ID NO: 163365 - DNA, 241 bp, Glycine max
tctagttcaaagatgaagatggtccccggtcttttcctctttgctcttgtctcggtcacttcccatgcttctgtcaatgaattctgtgtagcagacctaaaaggtgcagatagcccttcagggtatcagtgcaagccacctaacacagtcacagtggatgactttgtgttctctggggttgtagctgggaacaccacaaacacttttaatgctgcagtaacctccgcatttgttactgatt

SEQ ID NO: 163366 - DNA, 252 bp, Glycine max
gccaaagtagtgcctaagtcttcctcatatcttccaccctttggcttattagtgggagcaatacatatcattcattcagaggcaacaaaggagttgtaaattaagagcatggctgcacaagctcttgtatcatcatcatctcttaccttctcagccgaggctacaagacaaagtgcttggaccaagatcactccaatctccatttggcttctcaagaaaagcctcctttcttgttaaggcagctgctactcc

SEQ ID NO: 163367 - DNA, 255 bp, Glycine max
gttatttggtgtagggattgcgggaaacaagtctatttgggtatggatttttaatttatgaatttatgaatttcagtgtttattttagggtacatagtttttgtactatctgaaatcgtattctatggtttactattttaagcatcttttgacaaaattggtatttgagcttgtaggtggatttgacacggctcatgctgctgccagagcctatgatcgagccgctattaagttcaggggagttgatgctgatat

SEQ ID NO: 163368 - DNA, 259 bp, Glycine max
agtggaatggacctgaggagcaaagcaaggactctcccaggaccagttagcgacccttacagagcttcccaagtggaactatgatggttccagcacaggtcaagctcctggtgaagacagtgaagtgattttatccccacaagccattttcagggctccattcagaaggggtaacaatatcttggttatctgtgatgactcacactcctgctggagaacctattcccactaacaagaggcacgctgctgccaaggtttt

SEQ ID NO: 163369 - DNA, 255 bp, Glycine max
gtattcaaagatggcgtcttcataaacgcctttattctccgtttccgtttccttcccggaattcgatttttcatctctgaaaatgagagagtgcatctcgatccacattggtcaggccggtatccaggtcggaaatgcttgctgggagctctactgtcttgagcacggcatcgggcccgatgggcaaatgccaagtgacaaaacagttggcggaggtgatgatgctttcaacactttcttcagtgagactggtgc

SEQ ID NO: 163370 - DNA, 253 bp, Glycine max
ggcgcattgtctccgacaatattcactccgggaatggcttccctaccctttccgttgatgaacaagtcgttgccatagagctgccactgaaatacggtccattcattgagtcagtgaacaagagagggctgaacctctctgaggtggtgtgttccacattcacaatggggtggtttggagaaaccaaggacagaaggacagtgagagtggaatgcttcatgaaagaaagcagccccaatatctgggtgaggcc

SEQ ID NO: 163371 - DNA, 255 bp, Glycine max
gtgaacactatactcttcttctgcatttatgcaggaaaaaaatggttcatcttggcttcttccttctggggtgtctctccatgatctcatatgctaatggttatgtcagcaatgggggttggaccaatgcccatgctacattctatggtggaagtgatgcttctgggacaatgggtggggcttgtggttatggaaacttgtatagtcaaggatatgggactaacacagcagcacttagcactgccttgttcaaca

SEQ ID NO: 163372 - DNA, 249 bp, Glycine max
tgaaacttatatgatgaatgggttaacaagggcgacgcaccggcattgccagagactcttaaaaattacaacaagctgttgtctcttggcttcaagattgtattcttgtcaggaagatatcttgacaaaatggccgtaacagaagcaaacctaaagaaggctggcttccacacatgggagcagttaattctcaaggatccacatcttatcactccaaatgcactttcatacaaatcagcaatgagagag

SEQ ID NO: 163373 - DNA, 252 bp, Glycine max
ggtagtctctactctgattgggatcttctccctccaaagacaatcaaggatcctgaggctaaaaaaccagaagattgggatgacaaagaatatattcctgatcctgaggataagaaaccagaggggtatgatgacatcccaaaagagctcccagaccccgaagccaagaagcctgaagattgggatgatgaggaagatggtgagtggacaccccctaccattgccaaccctgagtacaagggcccatggaag

SEQ ID NO: 163374 - DNA, 246 bp, Glycine max
tgtctttagtcttgttcttagagatggcttgtgaaaccaagtcatggttggttatgtttcttgttttcttggttgctaattgcatgcaacattgtgtccacggggtgtctcaagtgccttgcctttttatctttggggactctatgtctgatagtggaaacaacaatgaacttccaaccacttcaaaatctaatttcagaccatatgggatcgactttccattaggaccaactgggagatatacca

SEQ ID NO: 163375 - DNA, 246 bp, Glycine max
ctcgttcttcttactcacctacgggacacaggctaagcctccaaaaccaacccaccgttggcgcgatggctttcccctccaaaggcgatgacgagcaggttctggtgcagcgtaaatcgaatgcgagagttttgacactaaacaggactaaacagttgaatgccctctctttttatatggtttctcggctacttgaaattttttctgaagatgagaaagattctgatattaaattggttgtcgtga

SEQ ID NO: 163376 - DNA, 259 bp, Glycine max
tttggatccgttcttcgtgttctccattccctctctcactccttcatctacgtaatttccttccttcctttctttctttctttctttctttatcttctcatttttctcaatacaatttttttctttctttctcaagttttgctacttttctcttcttaaccatagttcacatattatatcatcacatatcatagtgatatcatatcacaatgtgtggcatacttgctgtgcttggttgctctgattcatctcaagccaa

SEQ ID NO: 163377 - DNA, 253 bp, Glycine max
ttaaatgaaaacccaaagtgcttctctcctctgtctttttctctctcttgctatccttttggctagtggcactgctgcaagtgcaactccaagaagcgcagtgccaagccaccatgtttcaacattcaacagaagcctttttccttccacttttctctttggaattggttcttctgcttaccaggcagaaggagcagcaagtgtagatgggagaggacctagcatatgggacacctacactagacagcatact

SEQ ID NO: 163378 - DNA, 253 bp, Glycine max
gtgctataagctagtttatcgtgaggagaatatgaagttgtttgttttctttgttgctgcagtagttttggtagcatggccatgccatggcgcaggctaccaaaggttccctctccgaatgaaaactggctatggtgagcgttcttcggaggtaaaatgcgcaagttttaggcttgctgtggaagcacacaacatccgagcctttaaaaccattcctcgaagatgcgttgaaccaacaaaggactacattaat

SEQ ID NO: 163379 - DNA, 247 bp, Glycine max
gtctttaccagttgccactctacaccgagattccccctacacccgtttgcgttgttgtttgcgaagaaatggcgactaagcggagcgttggaacgttgacggagggtgatttgaaagggacgagggtgttcgtgagggtcgatctgaacgtgcctttggatgacaaccttaacatcaccgatgacactagagtccgtgctgctgttcccaccatcaagtacttaactcgtcatggagccaaagtgat

SEQ ID NO: 163380 - DNA, 248 bp, Glycine max
ttcgggtttgacgttgttcacaatcactttctgcgcttcactcactcccttcgtgcggttttctttctttgtcgaactcgtgcgaaaatgcgtgagattcttcacatacagggagggcaatgcggaaaccagatcggagcgaagttctgggaggtggtgtgcgcggagacgggatcgattccacggggaggtaccagggggacaacgagttgcaactcgagcgagtcaacgtctattacaatgaagcg

SEQ ID NO: 163381 - DNA, 250 bp, Glycine max
agttcattggtgatctgggaggctcaatttggtgattctgctaatgcggctcacgttatatttgacaatttcttgagttctggtgagtctaagtggctccgtcagactgggcttgtagtgttacttcctcatggttatgatggctagggtcctgagcattcaagtgcacgattggaacgctttcttcagatggctgatgaccatccttatgttattcctgagcatggatcctactcttcggcaacagatt

SEQ ID NO: 163382 - DNA, 252 bp, Glycine max
ggtttctctctctagcttggacgagtgaattagattcatcatcaagatgtcgtctctgatagcagaagatgtgaagagcagatcagaggtgtaccacggggacgaaatgtgccaagtgaagtccaaggagcttctcaaggaaatcgccgtccccaacggccttcttcccctcaaggacatggcggagtgcagctacgacagacaaaccggcttcgtctggctcaaacaaaagaagagttacacccacaagtt

SEQ ID NO: 163383 - DNA, 250 bp, Glycine max
cattgacctatataaccttttctctccggttaccagaaccgtaagttgctgaacatgaacccgcaatcgccggttcgggcggaaccggagcctccggttccgacgttctccccacggttcgcgctcacgtccggttcgcagcggaaaatcgcgatcgcggtcgacgtgagcgacgaaagcgcctacgcggtgcgctgggcggtgcagaactacctgcgaccgggctgagccgtgatcctcctgcacgtgc

SEQ ID NO: 163384 - DNA, 248 bp, Glycine max
ctttaaacgccgaagaaagttcatccaatctccgaagcccttcaccgcattgcaaccatgtcgagaagaaaggttagagagccaaaggaagaaaacgtgactctgggcccagctgttagagatggcgaacatgtctttggcgtcgctcgcatctttgcctccttcaatgataccttcattcatgtcactgatctgtccgggagggaaacacttgtccgcatcacaggtggaatgaaggttaaggctga

SEQ ID NO: 163385 - DNA, 246 bp, Glycine max
agctgctatcgataacatatttcacttgagacagttatctttatctacgcaagagaagaatagaaaatggatatcaggttgatggatttggactctccattgttcaacactctgcaccgaatcatggatctgacagaggacgcagagaagaacttgaacgctccgacgcggacatacgtgcgcgacgcgaaggcaatggctgcgactcctgcggacgtgaaggagtaccctaactactacgtgttc

SEQ ID NO: 163386 - DNA, 254 bp, Glycine max
gtggtactgtcttagctttgattctctgttctctgttttgttctgtttcgcgtattgtcttcatacaggaacttgaacaatgaagaatgcaaagggcaagggagcagcaagggcctcaaaagaatcactgaagcccgttgatgaccgaaaggttggaaagcggaaggcttccggtaagcctgggagaagtagtgcaccaaagaaggagaagaaggccaagatagaccccaacaagcctaaaagaccacccagtg

SEQ ID NO: 163387 - DNA, 245 bp, Glycine max
atccaagttcaaagatgaagatgatccacgttcttttcctctttgctcttgtctcgttcacttcccatgcttctgtcaatgatttctgtgtagcagacctaaaaggtccagatagcccttcaggctatcagtgcaagccacctaacacagtcacagtggatgactttgtgttctctggctttgtagctggaaacaccacaaacactttcaatgctgcattaacctccgcatttgttactgatttt

SEQ ID NO: 163388 - DNA, 251 bp, Glycine max
cttcccccaagtcattctcaccgcagcttccttcgacccaaacctctggtaccaaattagcaagactattgggagggaagcgagggcggtgtacaatgcggggcaagcgacggggatgacgttttgggctccgaacataaacgttttcagggatccacggtgggggagagggcaagagactgcaggagaagaccctttgatgaatgccaagtatggtgtggcgtatgtgagagggcttcaaggggattcct

SEQ ID NO: 163389 - DNA, 243 bp, Glycine max
gtaacaaccacttatcccctttctccttctaacgagtgaggaggaatggcgcgtaagaagatcagagagtatgactcacagaggttgttgaaggagcactttaagagactctctggcaaggagttgccgatcaagtctgcgcaaattaccgcatcaactgatttcactgagctacaagagaaggaaccctggctttcatcttctaaattggttgttaaacctgacatgttatttggcaagcgt

SEQ ID NO: 163390 - DNA, 239 bp, Glycine max
cttcatggctttgataactccctttgctattttattctttatgcttatggcctcttcaagcaatgcctactggccaccttcacctggttacaggccaagttccaaattcaggcctgtgaacttctatagagggtttagaaatctttggggccctcagcaccaaagcatagaccaaaatgcattaacaatatggcttgatagctcctcaggaagtggcttcaagtcaaatcgaccatttc

SEQ ID NO: 163391 - DNA, 249 bp, Glycine max
ttaaaaatgaaataagaaaaactcaactttgtaattcgtggagggaatacttttccattacgcacgcactttaattacagacgagaaaattataattaatagtaatacagacagcagcatgcgcccaccggttattctcaaaactaccacctctcttttggattcttcttcttcttcaccaccctgtgatcgcagactcaacactctcgctagacacttccttccgcaaatggcttctcacgacagcat

SEQ ID NO: 163392 - DNA, 247 bp, Glycine max
cggctcgagggtttccaagttgggatttggttgtgcggggcttagtggagtgtttgacggccctgttcctgacgaggttgtcatctctctaatcaagtatgcattcagtaatggaatcactttctttgatacttccgatttttacggtccctacactaatgaagttctcgtaggaaaggcactgaaggagttgccacgagatcaaattcagattgcctcaaaatttgggattgtgaaagttgagtcc

SEQ ID NO: 163393 - DNA, 239 bp, Glycine max
cttacggctaaattctcaaagatttaaactttgtctcagagattccaaattcacccaaccccagagagaaaatgtctctaatcccaaatttcttcggtggcagaaggagcaacgttttcgatcctttttccctcgacgtctgggaccccttcaaggattttcctttcccaaacactctttcttcagcttcctttcctgaattttctcgggcaaattctgcattcgtgagcaatcgtgtg

SEQ ID NO: 163394 - DNA, 249 bp, Glycine max
tcttatcagaaagaccactgagtctaggggatgtaacagccaagaacttaaaggaggttggattcaacacatgggagaagttaattctcagggatccatctgagtactctggtaagttatcatttgaatacaaatcagctgagagagagaagctggagaaggagggatacagaatcattggaaacgttggagaccaatggagtgacctcctgggaagcaacaaagggactaggacttttaagctgccta

SEQ ID NO: 163395 - DNA, 250 bp, Glycine max
gtctctatatgcatgaatatcaatgggtgggaagccatgctcttcattggagtaaatgcagctgtcagtgtcagagtttccaatgaacttgggcttggacatccaagagctgccaagtactctgtctatgtgatagtctttcagtcacttttcttgggaatctttttcatggctattattatggcgactagagattattatgccattatttttacaaacagtgaggttttgcataaggccgttgcgaaac

SEQ ID NO: 163396 - DNA, 250 bp, Glycine max
gtgctgaccaatccgtcataaaccgctgtcgcattgatgccttccaagacactctctacgctcactccaacaggcagttctaccgagactcttttattactggcactgttgactttatatttggaaatgcagctgttgttttccaaaagtgcgacttggtggcccgaaagcccatggataaacagaacaacatggtcactgcccaaggacgagaagatccaaaccagaacacaggaacttcaattcaaca

SEQ ID NO: 163397 - DNA, 249 bp, Glycine max
gtgagctataagctagtttatcgtgaggagaatatgaagttgtttgttttctttgttgctgcagtagttttggtagcatggccatgccatggcgcaggctaccaaaggttccctctccgaatgaaaactggctatggtgagcgttcttcggaggtaaaatgcgcaagttttaggcttgctgtggaagcacacaacatccgagcctttaaaaccattcctgagagatgcgttgaaccaaccaaggactac

SEQ ID NO: 163398 - DNA, 248 bp, Glycine max
gtcgaccgctcgtgttgcagcttcacaagattgaagagggaagcagagagtacgcggagttcctccacctcccgaggaagaggttcaccgattttgttgctgtgaggaaggagattcaagacgaaactgatagagagactggacgaaccaaacaaatttctactgttcccattcatcttagtatatactctcccaatgttgttaacttgacactcgttgatcttcctgggcttacgaaagtagctgtt

SEQ ID NO: 163399 - DNA, 241 bp, Glycine max
cttcttcttcgttgaatcgcgattgttctgttgtgcgactgaaagaagagagatcgaaaatggcgttggctttcgacgagttcggaaggcctttcataatcctgaaggaacaggagcagaagagcagacttcgaggtttggacgctcagaaagccaacatctccgccggcaaagccgtcgctcgcatcctccgaacctccctcggccccaaaggcatggacaagatgctccagagccccga

SEQ ID NO: 163400 - DNA, 244 bp, Glycine max
tctcaatacccttttgatttgtgaaaggaaagcaaacatgcttgatcaggtccaacaccctacaatcatggacaaggttgctggccagctccatctccgttctggtgtttctggtattaggagttatgaaggagcctactgccaccccacaatgtaccaaagaccctcttttgggaattactcgaatgctgcattgcagtatcctgtgatgccctcatgcaaagctactatggatttgtctgct

SEQ ID NO: 163401 - DNA, 244 bp, Glycine max
gatacaaaggcttgatcagcccataattcttactggtttttcagcattaaacaaacttcttggtcgggaggtatacagctctcacatgcaacttggtggacctaaaatcatggcaactaacggagtcgttcatcttacagtttccgatgatcttgaaggtatttcttctattttgaagtggcttagctacattccttctcatgtaggtggtgcacttcccattgtaaagccgcttgatcctcca

SEQ ID NO: 163402 - DNA, 251 bp, Glycine max
gtagctaagaggtgcacgtaagcaaaagctcgtggaattgctagcaatggcgaggatcaaggtttacgagctgaggcagaagacgaaggctgatctgctgaatcaactgaaggacctgaaggcggagcttgccttgcttcgtgttgctaaggacaccggtggtgcccctaacaagctttccaagataaaggtggtgaggttgaacattgcccaggttttgacggtgatttctcagaagcagaaggctgcgt

SEQ ID NO: 163403 - DNA, 248 bp, Glycine max
ggagcagcagtcaattgctacaagaacaaataccaggctcatcagaaaggacaaattggtgtcaccatagtgactttcttctttgaaccaaaatctaatagtgatgctgatcgcaaggcagcaaggcgagctctggactttatgtttggctggtttgctaatcccattacatttggtgactatcctgagagtatgagatctttagttggttctagactccccacattcaccaaagctcaatctgaaag

SEQ ID NO: 163404 - DNA, 245 bp, Glycine max
tgatgatgttggtcttgatgctgacaaatgcaaggtgttggtcaacattgagcagcagagccctgatatcgcccagggtgtgcacggtcacttcaccaagcgcccagaggaggttggtgctggtgaccagggtcacatgtttggctatgccactgatgaaacccctgagtacatgcccctcagccatgtccttgcaaccaaactcggtgctcgcctcaccgaggttaggaaaaatggtacctgtg

SEQ ID NO: 163405 - DNA, 250 bp, Glycine max
acaccaggcgcacgttagcacaaactatcatggccacggcaacagcagctgccacctcgtcctttatggggacgcgtctcctggaggctcactccggagcggggcgagtgcacgcccgattcggcttcggcaagaaaaaggctcccgccccaaagaaagcctccaggggatcgggccgagacaccgacagacccctttggtatccgggcgccaaagcgcccgaatacctcgatgggagtcttgtcggaga

SEQ ID NO: 163406 - DNA, 246 bp, Glycine max
ggaggaggcactgtggcagaagtcctaggagtgtaaaacagagacgcaaaatgaagacgatcttgtcgtctgagaccatgaatattcccgacggcgtgagcatcaaggttcacgctaaggttatcgaggttgagggccctcgtggaaaactcgtgcgagacttccaccatctgaacttggacttccaacttattaccgacgatggcggtaaaaggaagctcaagattgattcttggtttggttctc

SEQ ID NO: 163407 - DNA, 244 bp, Glycine max
ggaaaatctaagaggcgatggaaaaggagagcgcaaggaatatgataggatctatgattatgatgtctataatgatttgggtaacccagacaagagcaatgatctagctcgtcctgttcttggagggtctagtgcctatccatatcctcgcaggggaagaactggtagaaaaccaacaacaaaagactctaagagtgagtcaccatccagcagcacctacatcccaagagatgagaactttggt

SEQ ID NO: 163408 - DNA, 243 bp, Glycine max
gacaaattcaacactcacacacacatcaagtgactcttccgatgatgttaatcggcgacggtgccggttgccggaaagtcctcgtcggcgttaaattagatcctcgcagccgcgaattgctgacgtgggctctcgtcaaggtcgccaagccccggcgacctcgacattgcgcttcaagtcctcgactccatcactgagggaccggcatcgctgttatctctcgtgaagacgttcgattccgtt

SEQ ID NO: 163409 - DNA, 244 bp, Glycine max
tggcgatggtgaagagaagcattggtgtttgtaagaggctttctggttcttcttcttgtttgagcacttcaactgcaacaagtgataatgatattgctcggaggcttcagcttccaccatttgattacaaaccagggcatacaaagggacctttggctgatgaagtttttgccaaacggaaaaagttccttggtccttccttgttccacttctatcaaaaacctctcaacattgtggagggcaa

SEQ ID NO: 163410 - DNA, 242 bp, Glycine max
gtgatttcagtgagtgatcggtgttcacttgatctcatcataatcgtcagcgtcaattgaagaagatgccgatcagaaacatcgccgtcggaaggcctgaagaggcgactcaccccgacacgttgaaggcggctttggctgagttcatctcaaccttcatcttcgtgttcgccggctcaggctccggcatcgcctacaacaagctcaccgacaacggcgctgccacccctgccggcctcatc

SEQ ID NO: 163411 - DNA, 264 bp, Glycine max
ctctgtctttcgcactttcattctctcttaaaaatctaaatcccttttggtcttcatctttccctctcacccaggtatggcttctatacgcatcctgaaggtgctcaaggacttgcagaaggatcctcctacgtcatgcagcgcaggtgccgtgagcgaagacatgtttcactggcaagccacaatcatgggacctgctgatagcccatatgcaggtggtgttttcttagtttcaattcattttcctcctgactatcccttcaa

SEQ ID NO: 163412 - DNA, 256 bp, Glycine max
tggaggagtctacataggtgtagagcagttggtgcagaactataggatgaagagggatttagtcaatggagctgttggcggatttgttgcaggtgcaactattctgggttacagaggaaggagcatcaaaactgcactttctgctggatcagcattggcattcacatctgcattccttgatttcggtgatcagacattaaaacatgatgctgggaaggagtatgcggcttacaccacaaagaaaagacccagtact

SEQ ID NO: 163413 - DNA, 252 bp, Glycine max
gagaagagtgcgtttgtttgtttgaaattaagtagtaaagatgtttggaatcatcggaggaaacaagggtcacaagataaaggggaacttggtgattatgcgaaagaatgtgttggatatcaacagcatcaccagtgttaagggtgtcattggaaccggcattaacatcattggaggtgtcgtcgacaccgttactgctttggcgtcccacatctccatccagctcatcagtgccaccaaggctgatggaca

SEQ ID NO: 163414 - DNA, 250 bp, Glycine max
agtcagcctcttcttgtttctcctgcaatcaacgacacccccccaaaaatgacaggagagacagtgaacccaaaagcttaccctttggccgatgcgcaactcgcaataacaatactggatcttgtgcaacaagctgccaactacaagcaactcaaaaagggtgctaatgaagcgaccaagacactgaacagaggcatctctgagttcgttgtgatggccgcggacactgagcctcttgagattcttctcc

SEQ ID NO: 163415 - DNA, 251 bp, Glycine max
gagagtggtttcagtgagtgatcggtgttcacttgatccttcataagtcgtcatcatcatcatcatcatcaccgttgattgaagaagatgccgatcagaaacatcgccatcggaaggcctgaagaggctactcaccccgacacgttgaaggcggggttggctgagttcatctccaccttgatcttcgtgttcgccggttcaggttccggcatcgcctacaacaagctcaccgacaacggcgccgccactcc

SEQ ID NO: 163416 - DNA, 252 bp, Glycine max
ctcgcttggttgcagcttcagcagcagcggcaagcaactccatccgcaatgggaatcgatttgaaggcaggaggtaagtccaagaagaccaaacgtacagcccccaaatccaatgatatttacctcaagctcctcgtcaagctgtaccgttttcttgttcggaggactggtagtaacttcaatgccgtcatcctcaaacgccttttcatgagcaaggtcaacaagcccccgctatccctctctagattgatt

SEQ ID NO: 163417 - DNA, 253 bp, Glycine max
gagagaaactgagagaaattcgcaaaccctaatttcggaaagatcggcgatggctgcctccaaggatcgcgagatcttcgtctacatcgccaagctcgccgaacaggccgagcgatacgaagagatggtggaatcaatgaagaacgttgcgaatctcgacgttgaactgactgtggaggagcggaatttactttctgttgggtacaagaatgtgattggtgctcggagacatcgtggaggatcctgtcttcca

SEQ ID NO: 163418 - DNA, 263 bp, Glycine max
cccaattcctaattgtttaaacctaattctcatttcttcatcgttcgattcttctcctcctaaagatgcagatcttcgtgaaaactttgaccggtaagaccatcacccttgaggtggagtcctccgacaccatcgataacgtgaaagctaagattcaagacaaggaagggatcccacctgaccagcagagacttatctttgcgggtaaacagcttgaggatggtcgaacccttgccgactacaacatccaaaaggaatccact

SEQ ID NO: 163419 - DNA, 258 bp, Glycine max
taacgatctgaggaagacaccaagcttctctccacgcccttcttgggtaatctgaagtgcagcgatggcggatggattgcactcgcggcatccatcagtagttcagaagttatctggacagtcttatttgttgtctaggcttgcccctactcactcaagaaactattccacaactggtagttacttcaatggaggcttgcagtcttcgggtttggttccagtcatggcacatgcaccggctgagaaaggagtgtctgg

SEQ ID NO: 163420 - DNA, 255 bp, Glycine max
gatattttggggtggacaggggcccaacgacaaggggctctcccgcaagcacgtcgttgagggaaccaaggcctccttgaaacgcctcgacatggaatacgtggatgttctctactgtcaccgcccggattcctctactcccatagaggaaaccgtgagggccatgaaccatgttattgataggggctgggccttctactggggcactagcgagtggtcggctcagcagatcaccgaggcgtgggctgtggctca

SEQ ID NO: 163421 - DNA, 258 bp, Glycine max
gtttgttccatctcttgcttcttgcttctattacttgcttctttcttcaccatgtcacttgctgggaaaatcaccactgaaattggggttcatgcaaccgctgcaaagtggttcaacctctttgcaacacaacttcatcatgttcaaaaccttactgatagagtacatggaaccaagctgcatataggtgaagactggcatcacaacgagacagtcaaacactggacttataccatagatggtaaggctacaacatgt

SEQ ID NO: 163422 - DNA, 258 bp, Glycine max
gcaaagatggtgaatatatcctaataattgagaccacaacttgtagagtattaaggtattggctagaaacaccaaaaactggaaccttggaagtctttgctgatctaccaggtttcccagacaacatcaaacggagtccaagaggaggattttgggtgggaatttactcaagaagagaaaaaattatccaatggattctatcatatccttggattggaaaagttttgcttaggcttcctttggacatcccaaaagctt

SEQ ID NO: 163423 - DNA, 259 bp, Glycine max
cggcaacggatatctcggctcttgcatcgatgaagaacgtagcgaaatgcgatacttggtgtgaattgcagaatcccgtgaaccatcgagtctttgaacgcaagttgcgcccgaagccattaggccgagggcacgcctgcctggctgtcacaaaagaatgatattaaatattttaaaagtccaagttattgtgtagttggaggcagatgcccaggctgtaatttccgttatataattgtattcttacttggtagttcat

SEQ ID NO: 163424 - DNA, 260 bp, Glycine max
cgcagagagaaattgagtttctgagataaccacttttctctttgattcatcaatggcaaccgcgaggaccgtgaaggatgtttcgcctcacgatttcgtgaaggcttacgcctcccatctcaagcgttccggcaagatggagcttcctgagtggactgatattgtaaaaacagcaaaatttaaggaattggctccatatgatcctgactggtattatgttagggctgcctcaatggcaagaaagatttatttgagaggcg

SEQ ID NO: 163425 - DNA, 265 bp, Glycine max
ctcatttcaatttgcatttgcatttcatttggcgttttgtttctttctggaagcttcacttcggcatccatggcgtcgttcgaagaagctcctcccggaaactccaagaacggcgagaagatcttcaagaccaagtgcgctcagtgccacaccgtggacaaaggtgccggtcacaaacaaggacccaatctgaatggtttgtttggaaggcaatctggcacaactcctggatattcctattctactgctaacaaaaacatggctg

SEQ ID NO: 163426 - DNA, 285 bp, Glycine max
cacgcgaacgcgagcattcggctcgagcgtaaacacagtgcaggggctcaattatggagaaagcaattcaaagacagagagttctgcttgaacatcttcaacccatttcttcaagttcaaatttttcctctcaaacccatcaatctacggatctctcagcttcattatgttttgctgggaattcttcgcatggtcaaacaggtggatcagatgatgacgtggtgattgtagctgcatatcgtactgccatctgcaaagcaaagcgtgggggctttaaggataccc

SEQ ID NO: 163427 - DNA, 254 bp, Glycine max
aaacactcttcttcatattcttcttcttcttcttgttcttgttctatctgtgacgagcatcatggcctcgagagcagtgctattgttggctatgtgtgtgcttccggccatggttgtggccattcgcccagcaaagaaccctttttgcgtgaagggtcgcgtctactgtgacccttgccgtgctggttttgagacctcagcaaccacctacattgccggtgctgagattatgttgcaatgcaagagcagggtta

SEQ ID NO: 163428 - DNA, 252 bp, Glycine max
ttttcttctcttcactctgcccgctgcatcaatggcttcagagaagaaactttcgaacccaatgagggagataaaagtgcagaagctcgtcctcaatatctctgttggcgagagtggagatcgtctcaccagagcctccaaggtgttggaacaacttagtggccaaaccccagtgttttccaaagcaaggtacactgttcgttcctttgggattagaagaaatgagaagattgcatgctatgtcactgtcag

SEQ ID NO: 163429 - DNA, 250 bp, Glycine max
ctgagaggaagagggagtgagagagagtgttcttcgtttgctaccttctcccagaaatggttacgttcaggtttcaccagtaccaggtggtcgggagggctctcccaacggaagcagatcagcatccgaagatctaccgaatgaagctctgggccaccaacgaggttcgcgccaagtctaagttctggtattttttgaggaagctgaagaaggtgaagaagagcaatggtcaagttcttgctatcaacga

SEQ ID NO: 163430 - DNA, 249 bp, Glycine max
tcaatcttctgagagtgtttggttgaaagtagcaaagatgtttcctttcgggcaaaagggtcaaaagataaaggggactatggtggttatgcagaagtatgtgttggatatcaacagcatcaccagtgttggagggatcgttgaccaaggcttaggcttcataggcagtgcagtcgatgcacttacttttgcagccaccaaaatctccatccagttgattagtgctaccaaggctgatggtgggaaagg

SEQ ID NO: 163431 - DNA, 258 bp, Glycine max
gttagaaacaaggagaaagaaagaagatggcaggaaagaaaatcccagatgtgttgctgaattcaggacacaaaatgccagttataggcatgggaacttcagtggagaatcgtccatcaaatgagacccttgcttctatctatgttgaagccattgaggtgggttaccgtcattttgacactgctgcagtgtatggaacagaggaagccataggcctagccgtggccaaagccatagacaaaggccttataaagagta

SEQ ID NO: 163432 - DNA, 254 bp, Glycine max
gtttgttgtaggaagaggaatcttgagaaatggcaggggacagcaagagcaagattctgttcatcggagggactggttacatcggaaaattcatcgtggaagccagcgccaaagctggccacccaactttccttttggtgagggagtccactctctccaaccccgcaaaatcacccctcatcgacaatttcaaaggcctcggtgtcaatcttgttttaggagatctatacgatcaccaagtttggtgagtgcta

SEQ ID NO: 163433 - DNA, 258 bp, Glycine max
agagaaagagagagagagaaagacccttacccttctctatcgctcgctttcctttgacgcttctgacccttgctttgtctgcgtcttccttctttctttctttctttctctgtgtgtcgtaatggctctcccagactcttcttcccgtcgcaactccctgatcccctccttcatctactcctcttcctccaaaacgctccctctccaccacatgctcaacaccgcctccgctgccgccgccgccgctccctccccgcc

SEQ ID NO: 163434 - DNA, 257 bp, Glycine max
ccgcaccagtttcaccgcacgaatatcttgttgtttggagcgatccgagaaaaactctgtaaacatgttggtttaccaggacctccttacaggtgatgagcttctctctgactccttccgttacaaggaaattgagaatggaatgctgtgggaagttgaggggaagtgggttgttaaaggagcagttgatgtagacattggtgcaaacccttctgctgagggtggaggagaagatgaggagttgatgatgcagctgt

SEQ ID NO: 163435 - DNA, 267 bp, Glycine max
atcgacggccgcatgacagtcacgcagctcgctgccgccggtggtcccggcggcggtgacgtgtcgctccgcaaggtcttcgtcgggaacgtccccttcgagatttcctcggagaggctcctcgacgagttcctcaagttcgcgtgaagtcgaggaagggcctctagggtttgacaaatcgagtggcaaaagcagaggctttgccttcttcgtttacaagaccgaggaaggtgcaagggcttcgttggttgaacctttgaaaactat

SEQ ID NO: 163436 - DNA, 258 bp, Glycine max
gaggaaggaagatgagtttgagggcatcagagatagcgaagaagttgaatctgcaacctcacccagaaggtgggttttacgtggagacattccgagaccattccgtccagctttcgacctctcagctcccccccgaatacaaagtggatcgccctgtatcgacctccatctattttctcgttccttctgggagtgtgtctcgcctccatcgcataccctgcgccgaaacctggcatcattacatcggcgaccctctca

SEQ ID NO: 163437 - DNA, 249 bp, Glycine max
aagctagctaggttgaaaatagtttggttttgtagtaagtgaggtgaggtgccaaaatggtgaagataactcttggtactttcgatgactcttttggtgttgcctctcttaaggcttatttggcagagttccatgcaactctgattttcgtgttcgtgggtgttggttcagccatcgcttacaacgagcttacaaaagatgcagccttggatccaacggggctggtggcagtgctgtggcccatgcatt

SEQ ID NO: 163438 - DNA, 253 bp, Glycine max
gataactagaaacagtgtgatgaaaatgaaggtccttgttttcttcgttgctacaattttggtagcatggcaatgccatgcgtacgatatgttccctctccgaatgaacactggctatggtgcccgtactccggaggtgaaatgcgcaagttggaggcttgctgtggaagcacacaacatctttggctttgagaccattcctgaagagtgcgttgaagcaacaaaggaatacatcatggcgaacaatatagat

SEQ ID NO: 163439 - DNA, 260 bp, Glycine max
tacctttctctctcgctcgcaaacgcaaataataaaaaacaaggttttagccatggcatcgaagcggatcttgaaggaactcaaggatctccaaaaggatcctcctacctcatgcagcgccggtcctgttgctgaagacatgtttcactggcaagcaacaattatgggtcctccagacagtccttatgctggaggtgttttcctagtcactattcatttccctccagattatccctttaagccacccaaggttgcattca

SEQ ID NO: 163440 - DNA, 254 bp, Glycine max
tatcgagccgattcggctcgagccccaatcgtagccgtcgcactatgcgttttctgcgtcatctccgattccccgacaatgcccacccaaatgagcaagaagagaaagttcgtagctgatggagtgttcttcgctgaactgaacgaggttctgacaagggagttagccgaggacggatactccggcgtggaagttagggttacgccgatgcgcaccgaaatcatcatcagagccaccagaacccaagccgttct

SEQ ID NO: 163441 - DNA, 258 bp, Glycine max
gattttgattcgattcgattcgattcagtcgaggttttaagcagcagcaagatgtctgggcgtggaaagggaggaaagggattgggaaaaggaggagcaaaacgacatcgtaaggtgctccgcgacaacattcagggaattacgaagccagcgattcgtcgtttggctcgcaggggtggcgtgaagcgtatcagcggtttgatctacgaggagactcgcggtgttctcaagatcttcttggagaatgtcatccgtgac

SEQ ID NO: 163442 - DNA, 264 bp, Glycine max
gccacttcgaaaccaaattttcttcgttcgtccttctgtgatctcttcttccaccatgagcaggtcagggcaaccaccggatttgaagaagtacatggataagaagcttcagatcaagctgaacgcaaatcgcatggttgttggtactctccgtggctttgaccagtttatgaatttagttgttgacaacactgtggaagtgaatggcaatgagaaaaatgacatagggatggtggtaattagaggaaatagtgtggtcactgt

SEQ ID NO: 163443 - DNA, 248 bp, Glycine max
gggtcattgcccatctatacccattcttgaagggtctcttgggcaggcaaaatcgtaccccaaccattgttattgtttggtccgttcttcttgcttcaatattctccttgctgtgggtgaggattgatcccttcacctctgactccaacaaattaaccaatggtcaatgtggcatcaactgttagttctcttgtatgattcattttgtgttgttattcccttttgcttggagatacacaaggttgctg

SEQ ID NO: 163444 - DNA, 241 bp, Glycine max
ctcccttcaagatgcagatcttcgtcaagaccctcaccggcaagaccatcacccttgaggtggaaagctctgacaccatcgacaacgtcaaggccaagatccaggacaaggaaggaatccccccggaccagcaacgtctcattttcgccggaaagcaacttgaggacggccgtacccttgctgactacaacattcagaaggagagtactcttcacctcgtcctccgtctccgtggtggcat

SEQ ID NO: 163445 - DNA, 249 bp, Glycine max
cattgtgtttctctctttccgcggcgtagatctgagcagtttgggaaaccctaactgctctcaccactctctttgctttttttcctctccgatcaacgacctctttcgtcgccctaagtcatggcaggacttgcacccgagggatcacagtttgatgctcgtcaatatgataccaagatgaatgagttgcttacatctgatggacaggatttttttcacatcttatgatgaggtttatgacagttttga

SEQ ID NO: 163446 - DNA, 254 bp, Glycine max
cagaaacgaaaaagggttcggtgttctgttcgcgatgagagccaagtggaagaagaagcgtatgaggaggttgaagaggaagcgccgaaagatgagacagagatccaagtagtgcgttaaacctagtttgtttctgttgcttttacaattgcttatgttgtcgaatgggacacccagttgttagtggcactggtttctcctttttgatgtttgatacattttgttggattcaagtagtttatgttcgtcttatg

SEQ ID NO: 163447 - DNA, 256 bp, Glycine max
cgcagagtagagcagcacagaagagggaaaacggcaccgccgccgtagaagaaaacaaccatggtgcacgtctccttttacaggaactatgggaagacattcaagaagccgcgtcgtccgtacgagaaggagcgtctcgacgcggagttgaagctggttggtgagtacgggcttcggtgcaagagagagctgtggagggtgcagtacgcgctcagccgcatccgcaacaacgcgcggaacctcctcaccctcgacg

SEQ ID NO: 163448 - DNA, 254 bp, Glycine max
tatttgtagtcagggatgctgtgatttgttactgttggaatttgtacgtcattccagacacttcacatatattataggttgtgctttgttactataaaaaaaaagctagtttatcgtgaggagaatatgaagttgtttgttttctttgttgctgcagtagttttggtagcatggccatgccatggcgcaggctaccaaaggttccctctccgaatgaaaactggctatggtgagcgttcttcggaggtaaaatg

SEQ ID NO: 163449 - DNA, 260 bp, Glycine max
gttttagatcgtaaaaactaatcactacgaaaacaagagatatcgaagatggctctgcccaaagctaaggagatcgtgtcgtccaattccgtcgtcgttttcagcaaaacctattgccctttctgcgtcgatgtgaagaagctcttcggtgacctcggtgccaattacaaggccatcgaactcgacactgaatccgatggaaaagagctccaagcagcattagttgagtggacggaccagcgaaccgtgcctaatgtgtt

SEQ ID NO: 163450 - DNA, 253 bp, Glycine max
gttttatggcaggatatggcagcccattcggcctgcgattttggtggaggaaaagctgaaaaattggcccttgcaaagtatagacaggttatttggcaagggagggttcttaattcccaattcactgatgaagagttgaggagtcaaggccgttgccctatgacaccggaagaggttggattgttgctagcagctatgggatttgacaatagcactcgtttatatcttgcctctcacaaggtctatggtggag

SEQ ID NO: 163451 - DNA, 246 bp, Glycine max
gcggagagtttgctgctacatcgatcatcatcacctcatggacggacacgatccacaagacccaaagcagagccctgctgacatgactgcctttgtgcaaaatcttcttcagcagatgcaaaataggttccagacaatgtccgactccattgttacaaagattgatgatatgggaagtcgcataaatgagttggaacaaagcatcaatgacctgagagcagagatgggagtggagtcctctccatc

SEQ ID NO: 163452 - DNA, 255 bp, Glycine max
gttacagccgcaccttgattcagagcagagcgaccttgaagagctatggctgtcggaaagaataagaggatttccaagggaaagaagggtggcaagaagaaagccgctgatccctttgccaagaaggactggtacgatatcaaggccccttccgtctttcaggtcaagaatgttggcaaaaccctcgtctctcgtacccagggaaccaagattgcttctgaaggactcaaacatagagtgtttgaggtctcattg

SEQ ID NO: 163453 - DNA, 249 bp, Glycine max
ggatcttttgggtaggaccatttattggggcagccattgcagccttctaccatcagttcatcttaagagcaggtgcagctaaggctcttggatcattcaggagtaacccccataattgagttgtctttctcttccttatgatggctctagtggaaagaagataattggagagatggaggttgatatggcaagtttaataataattgggaatgcttttggcttgtgttttgcaacgtttctttgaccctc

SEQ ID NO: 163454 - DNA, 250 bp, Glycine max
gagataactagaaacagtgtgatgaaaatgaaggtccttgttttcttcgttgctacaattttggtagcatggcaatgccatgcgtacgatatgttccctctccgaatgaacactggctatggtgcccgtactccggaggtgaaatgcgcaagttggaggcttgctgtggaagcacacaacatctttggctttgagaccattcctgaagagtgcgttgaagcaacaaaggaatacatccatggcgaacaat

SEQ ID NO: 163455 - DNA, 254 bp, Glycine max
gcttgatcattatcagatcctgaaataccctctgaccactgaatccgccatgaagaagattgaggacaacaacactttggttttcattgtcgacctgcgtgccgacaagaagaagatcaaggatgccgtgaagaaaatgtatgacatccaggccaagaaagttaacaccttgatcaggcctgatggaaccaagaaggcttatgtccggttgacccctgattacgatgcattggatgtggcaaacaagattggga

SEQ ID NO: 163456 - DNA, 255 bp, Glycine max
tgaagttcaacatcgcgaatcccaccactggatgccagaagaagctcgagatcgacgacgatctgaaactgcgagcatttttggacaagaggatctcacaggaggtcatcggagatgcactcggtgaggaatttaagggctatgtcttcaaaattaccggaggttgtgacaaacaaggatttccaatgaagcagggagtgctgactcctggtcgtgttagacttttgcttcacaggggaactcttgcttccgtgg

SEQ ID NO: 163457 - DNA, 245 bp, Glycine max
ggaaaattagcctcacaaaagcaaagatcaaacaaaccaaggacgagaacacgatgttgcttgaacttgcacttggtttattggttttggctctgtttctgcacttgcgtcccacacccactgcaaaatcaaaagcacttcgccatctcccaaacccaccaagcccaaagcctcgtcttcccttcataggacaccttcatctcttaaaagacaaacttctccactacgcactcatcgacctctcc

SEQ ID NO: 163458 - DNA, 250 bp, Glycine max
gatctgcagctacgatgggtaagggaacggggagtttcggtaagaggaggaacaagacccacaccctctgtgtgaggtgtggccgccgcagcttccacctccagaagagtcgttgctctgcgtgcgcttaccccgctgcgcgcaccaggaaatataactggagcgtgaaggccattaggagaaagaccaccggaactggaaggatgaggtacttgcgtaacgtgcctcgcagattcaagagcggcttcag

SEQ ID NO: 163459 - DNA, 239 bp, Glycine max
ttacagaggcgaaagcaggacctttaagcttcctaatcccctgtactacattcagtagttccttcacctctcaacaatctagcttgctcctatctatctatatgtaataagatgcgttcaaataggggcactagcttcactttatgttgtttcagctgtgtgtcaacaagtcatgtaagagacttcactatgttgttttctctttcgtggctttaataaattatgcgcccttgttccat

SEQ ID NO: 163460 - DNA, 253 bp, Glycine max
cagtttcaaagcaaacatcgacaacaacaaactagaaagaaagaaaggaacacgaaacctcaaaaaagcagaacaccatgaagtttcggtacgcgatggtgtgttcttcgaaccagaaccgaagcatggaggctcatttcctgctcaagaggcagggcttcgacgtgtcctcgtacggcaccggtgcccacgttaagctccctggtccttccctcagagaacccaatgtctacgacttcggaaccccctacaa

SEQ ID NO: 163461 - DNA, 192 bp, Glycine max
ctacactgagccaactctagcaggaaatgcaggtttagtggctgcacttgtggcattgtccggtgataaaaccacaggaattgacaaaaacaccctcttctctgctgttcccccaatgtttcccacaccaccaccacctccagcaccatggaaaccatgattttgaagatggaggtagatcgaagaagtcaa

SEQ ID NO: 163462 - DNA, 252 bp, Glycine max
ccaagttcaaagatgaagatgatccacgttcttttcctctttgctcttgtctcgttcacttcccatgcttctgtcaatgatttctgtgtagcagacctaaaaggtccagatagcccttcaggctatcagtgcaagccacctaacacagtcacagtggatgactttgtgttctctggctttgtagctggaaacaccacaaacactttcaatgctgcattaacctccgcatttgttactgattttccaggtgtg

SEQ ID NO: 163463 - DNA, 249 bp, Glycine max
ctacactatacttgtcaaccctttgagagttagaatggctgctgctattgaaatccccacaatagtgtttccaaactcctctgcccaacagaggatgccagtggttggaatgggatctgcccctgacttcacatgcaagaaagacacaaaggaggctatcattgaggccgtgaaacagggttacagacacttcgacactgctgctgcttatggctctgaacaggctctcggtgaagctctcaaggaagc

SEQ ID NO: 163464 - DNA, 255 bp, Glycine max
ctgatgtaggccttggttacattggacaatacagtccaaatgtgagatggatgctgcttggttatgtgggggagtctgatgcagggcttttggagttcgctaaggggtgtcctagtcttcagaaacttgaaatgagagggtgtttatttttcagtgaacgtgcacttgctgtggctgcaacacaattgacttctcttaggtacttgtgggtgcaaggttatggtgtatctccatctggacgtgatcttttggtaa

SEQ ID NO: 163465 - DNA, 257 bp, Glycine max
tgggatacagaattgttggaatcattggagaccaatggagcgatctgcttggagaccacagaggcgaaagcaggacctttaagcttcctaatcccatgtactacattgagtagtaccttcacctctctcaacaatctagctagagtttgctcctatctatatgtaataaggtatgctgatatgcactattcaaataggagcattagctatgtttgttaatgtcactttatgttatgtgggtaagcccctaagacact

SEQ ID NO: 163466 - DNA, 170 bp, Glycine max
cggctcgagcgcgtgcatagcagagtcagagacagagacgcagccatggggcggagacctgcgaggtgttataggcaaattaagaacaagccataccccaagtcacgtttctgccgtggtgttcctgatcccaagatcaggatttatgatgttggtatgaagaagaaggg

SEQ ID NO: 163467 - DNA, 269 bp, Glycine max
cccaagtgctgcagagccgcattttgcttgcaattcagaaactttgtgcgtagaggggacgaaacaatacaatggcttacgctgcaatgaagcctactaaggccggcttggaggagcctcaggagcagatccataagattaggatcaccctttcctctaagaacgtcaagaatctcgagaaagtgtgcgccgaccttgttcgtggtgccaaggacaagcgcctcagggtgaagggacctgttaggatgccaactaaagtacttaacatc

SEQ ID NO: 163468 - DNA, 159 bp, Glycine max
gtcaaaattcctgtcactttgatttatgatgacatcaagcaaacatatgctgatattaaacctggaagcatcattccttatagggtgaaggttagtctcatttttgatgttcccatcttgggaaggctaactctacctttggagaaaactggagaaatt

SEQ ID NO: 163469 - DNA, 260 bp, Glycine max
atgtgattgttgtgactcgttcttcttcgtcgttatcttcttcttttgttgtttgtgtgtttgttttttctctcacctgaaaatgtcttgctgcggtggtaactgtggttgcggaagcgcctgcaagtgcggcaacggctgcggaggctgcaagatgtacccagacttgagctacaccgagtcactcaccaccgagaccttggtcatgggagtggcaccagttaaggctcaattcgagagtgctgaaatgggtgttcccg

SEQ ID NO: 163470 - DNA, 260 bp, Glycine max
gcaacttccaacaccatagtgaaatggcttccaaggctgcacttctcttgtgtttcaatgttctcttcttcaccgtggttagctccacatatgtgccatgcaacccaccccccaaaactccaaaacacccacctgtcccaaagccaccttccccaaagcaagcaagttgccccaaagacactattaagtttggtgtgtgtgctgatgtgttaggtttgatcaacgtgcaacttgggaagccaccaaagaccccatgctgc

SEQ ID NO: 163471 - DNA, 165 bp, Glycine max
cggctcgaggagagatggatccagacgcgttggcaaaggcattcgtggagcactactacagcaccttcgacaccaacaggaacggcttagcgaatctctaccaggagggttccatgctcactttcgaagggcagaagatccaaggcgcttccaacatcgttgcca

SEQ ID NO: 163472 - DNA, 258 bp, Glycine max
cacactgcataccttaggtcttccgaattcgaagttaatttgcaagatggctaaggaaaaggctcagatcaacattgtggtggttggtcatgtggaccctgaggaggcaaccaccattaacgagctgaagaagcctgttgtggagaaagaagctccagggcatgccatatgagggcatgcacgtacggcctcggaggggaaccagaaaattatgttaacaaaataatctggaaccctaatgtatcagtgtcatcatca

SEQ ID NO: 163473 - DNA, 257 bp, Glycine max
gtttcactcccattaacagcaaccatggtgcagaggctcacttatcgcaagcggcatagttatgctaccaaatccaaccagcaccgggttgttaagacccctggagggaagttggtgtaccagaccactaagaagagagcaagtggacctaagtgccctgtcactggcaagaggatccaagggattccacacttgagacctgctgaatacaagaggtctagattgcctcggaaccgcaggaccgtaaaccgagccta

SEQ ID NO: 163474 - DNA, 259 bp, Glycine max
agtttgttgtgagctataagctagtttatcgtgaggagaatatgaagttgtttgttttctttgttgctgcagtagttttggtagcatggccatgccatggcgcaggctaccaaaggttccctctccgaatgaaaactggctatggtgagcgttcttcggaggtaaaatgcgcaagttttaggcttgctgtggaagcacacaacatccgagcctttaaaaccattcctgaagagtgcgttgaaccaacaaaggactacat

SEQ ID NO: 163475 - DNA, 232 bp, Glycine max
gcttcttgttgttggaaagaaaccctagcaagcggaacaatggcagacgttgaggtcgatgtggcggctgcagcagcagcagggcagccgaagaagagaacgttcaagaagttcagtttcaggggcgtggatctcgatgcgcttctggacatgtccaccgatgaactcgtgaagatgttcagtgctcgcgcacgtagaaggttccagagaggcctcaccagaaagcccatgg

SEQ ID NO: 163476 - DNA, 226 bp, Glycine max
agaagaataatcgagacacagatcatagtgatcattttttaatttctcagatttatccgacgtcgctgcagatccaccaaccgttatggctgccttcagcggtgatgaaacggcaccgtttttcggcttccttggcgccgcagctgccctcgtcttctcctgtatgggagctgcctatggcacagcgaagagtggcgtgggcgtggcttccatgggtgtaatgaga

SEQ ID NO: 163477 - DNA, 219 bp, Glycine max
gtttgttgtgagctataagctagtttatcgtgaggagaatatgaagttgtttgttttctttgttgctgcagtagttttggtagcatggccatgccatggcgcaggctaccaaaggttccctctccgaatgaaaactggctatggtgagcgttcttcggaggtaaaatgcgcaagttttaggcttgctgtggaagcacacaacatccgagcctttaaaac

SEQ ID NO: 163478 - DNA, 165 bp, Glycine max
caaaaagtgacccatcgtcttccattttcatggaagatgaggaggctgaagtgaatgtgaaaataaaaaaggcttattgcccgcccaagatagtggaaggaaacccatgcttggagtacatcaaatatcttgtcttaccttggttaaatgagttcacagtggagc

SEQ ID NO: 163479 - DNA, 197 bp, Glycine max
gtgagtttgttgatcgagataactagaaacagtgtgatgaaaatgaaggtccttgttttcttcgttgctacaattttggtagcatggcaatgccatgcgtacgatatgttccctctccgaatgaacactggctatggtgcccgtactccggaggtgaaatgcgcaagttggaggcttgctgtggaagcccacaacat

SEQ ID NO: 163480 - DNA, 260 bp, Glycine max
ggcgaatctagcacacttctccaagagagccctaagaagcgcacacgcgctcgcaaggcaccacgtgcagccgcagctgctggcagcggaacgcgcttttgcgacggaggcggcgaaatcgatatccccgtcggcggatcgcgtgaagtgggactaccgagggcagaggaagataatcccgttagggcagcggctccccaaagtggccgtggatgcttacgtagcacccaacgtggtcctcgccggccaagtcaccgtct

SEQ ID NO: 163481 - DNA, 226 bp, Glycine max
tcacaaacacacactgaactaaaaaacatcaaaagagacatggctgagcaaaccttcatcatgatcaagcctgatggcgtccaaagaggccttattggcgagatcattagcagatttgagaagaaaggtttctacttgaaaggtttgaaacttgttactgtggaccgtccttttgctgagaagcactatgctgatttgtctgccaagcctttctttagtggtttgg

SEQ ID NO: 163482 - DNA, 256 bp, Glycine max
atcgagataactagaaacagtgtgatgaaaatgaaggtccttgttttcttcgttgctacaattttggtagcatggcaatgccatgcgtacgatatgttccctctccgaatgaacactggctatggtgcccgtactccggaggtgaaatgcgcaagttggaggcttgctgtggaagcacactacatctttggctttgagaccattccagaagagtgcgttgaagcaacataggaatacatccatggcgaacaatata

SEQ ID NO: 163483 - DNA, 244 bp, Glycine max
tcgcaacacaacaaaaaaagacaacccagagagcgcgtcttaataaacgctcttctctgaaaacccccatttcttttcttctttcttcttctctttcgcttcttcgatcttcgatcttcgtcgctgaaaatgagagagtgcatttcaatccacatcggccaggccgggattcaggttggaaacgcctgctgggagctttactgcctcgaacacggcattcagcctgatgggcagatgccaagtg

SEQ ID NO: 163484 - DNA, 259 bp, Glycine max
ctcaacttctgctcttccaactcctacaacgcttttctctgcactcatgggcaaggtcaagatcggaatcaacggatttggaagaattggccgtttggttgccagagtcgctctgcaaagagacgatgttgaactcgttgccgttaacgaccctttcattaccaccgattacatgacatacatgtttaaatacgacagtgttcacggacactggaagcttcacgatgtcaccgttaaggacgagaagaccttctcttcg

SEQ ID NO: 163485 - DNA, 258 bp, Glycine max
ggcggggctaccgctgagtttaagcatatcaataagcggaggaaaagaaactaacaaggattcccttagtaacggcgagcgaaccgggaaaagcccaccatgaaaatcggtcgccctcggcgtccgaattgtagtctggagatgcgtcctcagtggcggaccgggcccaagtcccctggaagggggcgccagagagggtgagagccccgtcgtgcccggaccctgtcgcaccacgaggcgctgtcggcgagtcgggtt

SEQ ID NO: 163486 - DNA, 256 bp, Glycine max
ccaccacctagtatctctctaactttgagaaagtgtgtgttgtgtgttctcttctctcactaaaaaaggtttcattaattctatattatggctcagaccacagcgaatcacacagtgaccgtatctgggtgggcagctcatgattcttcgggcaagattaccccctacactttcaaaagaagggagaatggtgtgaacgatgtgacaataaagatactgtattgtgggatctgccacacggacctccactatgcaa

SEQ ID NO: 163487 - DNA, 254 bp, Glycine max
ctttcaagttcctttgtcaataagcaagaccaatacactgtggaaggagtgcagaatcttggagacaaagcagtgatgtgtcataggctaaatttcagaactgcagtattttactgccatgaagtccgtgaaacaacagctttcatggttccattggtggctggtgatggaaccaaaactcaggcacttgctatttgccactcaaatacttctggaatgaatcatcaaatgcttcatcaacttatgggagttga

SEQ ID NO: 163488 - DNA, 256 bp, Glycine max
gtgagctataagctagtttatcgtgaggagaatatgaagttgtttgttttctttgttgctgcagtagttttggtagcatggccatgccatggcgcaggctaccaaaggttccctctccgaatgaaaactggctatggtgagcgttcttcggaggtaaaatgcgcaagttttaggcttgctgtggaacaacacaacatccgagcctttaaaaccattcctgaagagtgcgttgaaccaacaaaggactacattaatg

SEQ ID NO: 163489 - DNA, 256 bp, Glycine max
tgctactgagtttccacactgcataccttacgtctgccgaattcgaagttaatgcgcaagatggctaaggacaaggctcagatcaacattgtggtggttggtcatgtggaccctgaggaggcaagcaccattaacgagctgaagaagcgtgttgtggagacagcagctccagggcatgccatatgagggcatgcacgtacggcctcggaggggcaccagaaaattatgtcaacagaataatctggaaccctaatgt

SEQ ID NO: 163490 - DNA, 110 bp, Glycine max
gacggcagcacgcgcaaaaatggtgaagtttctgaaaccaaacaaagccgtcatcgtccttcagggacgctacgccggcaaaaaagccgtgatagtgcgaaccttcgatg

SEQ ID NO: 163491 - DNA, 260 bp, Glycine max
aaggaactaagaatttcattgaggctagagaaagtggtgatcaatatgtcaaagaatccaaaagttttctttgatattctaattggaaagatgaaagctggacgagtagtgatggagttgtttgccgatgcaaccccaaaaacagctgaaaacttcagggctctctgcactggggaaaaggggattggacgatctgggaaacctttacactacaaaggttctgtatttcatcgtattattccagaatttatgtgtcaggg

SEQ ID NO: 163492 - DNA, 181 bp, Glycine max
ctggtgaatgcgtagaaaaggaaaataaagaaattagcgtgaaaaatgttgggtgtgttcagcagctccatagtgtcgccgccggaggagctcgttgccgccggcagccgtacaccgtcgccgaagatgacggcggcggcgctgcggaagtggttcgaggagaagaccccctccgcagtgt

SEQ ID NO: 163493 - DNA, 258 bp, Glycine max
gatcgagataactagaaacagtgtgatgaaaatgaaggtccttgttttcttcgttgctacaattttggtagcatggcaatgccatgcgtacgatatgttccctctccgaatgaacactggctatggtgcccgtactccggaggtgaaatgcgcaagttggaggcttgctgtggaagcacacaatatctttggctttgagaccattcctgaagagtgcgttgaagcaacaaaggaatacatccatggcgaacaatatag

SEQ ID NO: 163494 - DNA, 254 bp, Glycine max
ggaaggagccgtagcagcagcggaagctctagcttgggcagcgaatcacaatggcgagaggattgaagaagcatttgaagaggcttaatgccccaaagcattggatgcttgacaaactgggtggtgcatttgctcctaagccctcatctggaccacacaaatccagggaatgcctgccactcatactcattttgcgaaaccggctgaagtatgctctgacataccgtgaagtcattgctattctgatgcagcga

SEQ ID NO: 163495 - DNA, 259 bp, Glycine max
tggctacctccatggtgaagcttatgcttttctctgctctcatactcttgtccttgcaagcagttgtgtctgtaacaccactgcattttcaacatccactagaccctttaaccaaacaagagataagtcttgtccaaaccatagtccaaaacaagtacccaagctcaagtaacaggttgagcttccactacattggactcgcggaacctgaaaaggatgccatcctcaaatgggaatccatcaaaccaactgttataat

SEQ ID NO: 163496 - DNA, 246 bp, Glycine max
ctttcttcttcttcttctcttcttcttcaagattgcgacgacgatccaagtgatagacactcgttgcgatggaacttgtagctgaatccgagcgaactctgtacccatacgtgactggatcctctgtagtcgctatcaaatacaaagatgggattctaatggccgctgacatgggaggttcgtatggatctaccctgcggtataagagtgttgagcgtatcaagcctattggaaagcattctcttc

SEQ ID NO: 163497 - DNA, 217 bp, Glycine max
gctataagctagtttatcgtgaggagaatatgaagttgtttgttttctttgttgctgcagtagttttggtagcatggccatgccatggcgcaggctaccaaaggttccctctccgaatgaaaactggctatggtgagcgttcttcggaggtaaaatgcgcaagttttaggcttgctgtggaagcacacaacatccgagcctttaaaaccattcctga

SEQ ID NO: 163498 - DNA, 242 bp, Glycine max
ccacttgagagaaaatggcggtgcctctgctctcaaagaagatcgtgaagaagagggtaaagaagttcaagaggcctcagagtgacaggaaaatttccgtcaagactaactggcgcagaccaaagggtatcgattctcgtgttaggagaaagttcaagggatgcactttgatgccaaacattggttatggttcagacaagaagacccgccactatctccctaatggtttcaagaatttgttg

SEQ ID NO: 163499 - DNA, 244 bp, Glycine max
ttcatttctacatccctggctctgttccgtcgatgacgatggcgtttagggtgcgaaaccctgacctccgctttctcattcttctctctctcttgtccatcacttccgccaaggtcttcttcgaggagcgtttcgatgacggatggggaaatcgttgggttaaatcagattggaaaaaagatgagaacctggctggggagtggaaccacacctctggccaatggaatggagacgctaacgacaa

SEQ ID NO: 163500 - DNA, 215 bp, Glycine max
attacccatagatagagagcgcggcataacctaaacttacccttcttctctctgtgtgtgtgcgcatcaaacgcaaccagaagcagccatggccactgcaagaactgtgaaggacgtttctcctcatgagttcgtcaaagcttactcttctcacctcaagcgatctggcaagatggagctgccagagtggactgatattgtgacaactgcaattt

SEQ ID NO: 163501 - DNA, 194 bp, Glycine max
cacatgtggagtatgagaagaagcaaggcgaactttttcaggattatgggagttttgggtggattaattgctgtaggaaaatggtttgaccagatttgcaactggaaaaatccaatcacaacagttctgatccatatcctgttcataatatgggtcatgtaccctgagcttatcttaccaacaatcttccttaa

SEQ ID NO: 163502 - DNA, 272 bp, Glycine max
ctttcttggaactttgttactctcacacatgtctcgctccgtgcctttggtttcaaccatttttgtcttgcttctgcttctggtggccactgagatgatggggccaacaatggtggcagaagcaagaacttgtgagtctcagagccaccgtttcaaggggccatgtttgagtgacaccaactgtggctctgtttgccgaaccgaacgtttcactggaggacactgccgtggcttccgtcgcagatgcttctgcaccaaacattgttaatttt

SEQ ID NO: 163503 - DNA, 260 bp, Glycine max
cgtcgctccgcaccagtttcaccgcacgaatatcttgttgtttggagcgatccgagaaaaactctgtaaacatgttggtttaccaggacctccttacaggtgatgagcttctctctgactccttccgttacaaggaaattgagaatggaatgctgtgggaagttgaggggaagtgggttgttaaaggagcagttgatgtagacattggtgcaaacccttctgctgagggtggaggagaagatgagggagttgatgatgca

SEQ ID NO: 163504 - DNA, 218 bp, Glycine max
gtcgtttgtaacgcctttgtttgcgttttttgcacagaagaattaacacgtatatagcaagcatggcagtcacactctacgaccttagctctgcctctgggttgaagaagcttgatgagtaccttctcccacgcagctacatcaccgggtaccaagctacaaaggatgatcttactgtttatgcagctttgccaactgctccatcagatgattatggg

SEQ ID NO: 163505 - DNA, 182 bp, Glycine max
caacaagcagatcaatctctctctctctctcaaccataatagtcatgggtttgaaggaggattttgagcagtatgctgagaaagcaaagactttgccaccgactcaatcaaacgaagacttgcttatcctttatggattgtacaaacaggccaccgttggacctgtcaacaccagccgtcct

SEQ ID NO: 163506 - DNA, 256 bp, Glycine max
ctaacgcgtgcatagcagagtcagagacagagacgcagccatggggcggagacctgcgaggtgttataggcaaattaagaacaagccataccccaagtcacgtttctgccgtggtgttcctgatcccaagatcaggatttatgatgttggtatgaagaagaagggtgttgatgagtttcctttctgtgtccatctggttagttgggagaaggaaaatgtttcaagtgaggccctggaagctgctcgcattgcttgc

SEQ ID NO: 163507 - DNA, 241 bp, Glycine max
cacggatccacctgaaatttgagattccttcgaattgttaactctctcaatttcaagttggaaactttttcgattttcgctttctggaggtgtgaattgttatttgaaagtcacaagcaatggtgaaggacactgcatattatgacatattaggtgtcaattttgatgcatctgctgcagagatcaagaaggcttattatgtcaaggctagaattgttcaccccgataaaaatcctgggga

SEQ ID NO: 163508 - DNA, 255 bp, Glycine max
ctcagaattctctaaaagagatctttttctgctctttgaagaaagaagggtctttgcttgattttggagatgtctctgctctcagatctcatcaaccttaacctctccgataccaccgagaaggtgatcgcagagtacatatggatcggtggatcaggaatggacctgaggagcaaagcaaggactctcccaggaccagttagcgacccttcagagcttcccaagtggaactatgatggttccagcacaggtcaa

SEQ ID NO: 163509 - DNA, 262 bp, Glycine max
gtaatggcgaacatagacatcgaagggatcttgaagcagcagcagccttatgatgggcgcgttccgaagacgaagatagtgtgtactttgggccctgcttctcgatccgtagaaatgaccgagaagcttctgagggcagggatgaacgttgctcgtttcaatttctctcatggcacccacgactatcaccaggaaaccctcaacaatctcaagactgccatgcacaacactggcatactctgtgccgtcatgcttgacacta

SEQ ID NO: 163510 - DNA, 259 bp, Glycine max
aaattttcagactcaacaagcttcgaaccaaatcttattgagaaaatgtctggtcgtggaaagggtggaaagggtttgggaaagggaggtgccaagaggcacaggaaggttcttcgtgacaacatccagggcatcacgaaacctgcgattcgtaggttagcgagaagaggtggcgtgaagaggatcagtggtttgatctacgaggaaaccagaggagttctgaagatattcttggagaacgtgattcgcgatgctgtga

SEQ ID NO: 163511 - DNA, 255 bp, Glycine max
ctcgtcgttctttttatttgcggtttcttcttcttctcacgttctacctaacattttctaaaacatgtctggggaagaggaagaaaacgccgcagagctcaaaattggagacgagtttttgaaggcaaagtgcttaatgaactgtgaagtttcattgattcttgagcacaagtatgagcagcttcaacagacatccgatgatcccatgaatcaagtttctcaggtatttgaaaagtcactgcagtatgtgaagcg

SEQ ID NO: 163512 - DNA, 256 bp, Glycine max
gaacagatgaaagttccattgaggatgagaaagaagagttgcctgagccagtaccagaaccaccaaaattggttcgtatggcaaatttgtgtgttgtgggtggtcatgcagtgaatggggttgcagagatacatagtgaaattgtaaaagatgatgttttcaatgcattttataagttgtggcccgagaagttccaaaacaaaacaaatggtgtgacaccaaggagatggatcaggttctgcaatccagatctgag

SEQ ID NO: 163513 - DNA, 253 bp, Glycine max
gcataatcaaatcaaccatggctaccctcattgctcccatcaccttttcgcctggtttagatgcagaagctcttagaaaagctttccaaggatgggggactgatgagaagaccgttatagcaatattgggtcacagaaatgttcatcagaggcaacaaatcagaaagatttatgaggaaatttaccaagaggacctcatcaaacgcctagagtctgagctttctggtgactttaagagagctgtgttaccgtt

SEQ ID NO: 163514 - DNA, 254 bp, Glycine max
gatggcgtcgagcggaggggtgccgttttggagggcagcggggatgacatacatcacatactcaaacatatgcgcgaatctggtcaggaattgcctcaaggaaccctacaaggctgaagccatctctcgtgagaaggtccattttgctctctccaaatgggtcgacgccaagcctgaaaaacctactattcgttcagacaccccagagcagtgatccggaatagttggaagctataaatgcataaatctttgag

SEQ ID NO: 163515 - DNA, 200 bp, Glycine max
ctctctcaccaaattcttattagaacgaaaaaagaaaagaaaagaaaaaagagcgatttttccctcaccaaagaagaaccaaaacaatggcggatcaactcaccgatgaacagatctccgagttcaaggaagccttcagcttgttcgataaggacggcgatggttgcatcacaaccaaggagcttggaactgttatgcgt

SEQ ID NO: 163516 - DNA, 236 bp, Glycine max
ccaaaactggaaagcacggtcacgctaagtgtcactttgttggaattgatattttcactgccaagaaacttgaggatattgtgccctcttctcacaactgtgatgttcctcatgtgaatcgtactgattaccagctcattgatattgctgaggatggatttttgagtctgcttactgaaaatggtaacactaaggatgacctcaagcttcccactgatgagagtctgctcactcag

SEQ ID NO: 163517 - DNA, 253 bp, Glycine max
gaagaagatggctttaggtgttcctgctcttccgttgacatacgtggctcacgttctggcagttgttgccagcgtcttggtcgtggtctgggtcgtcaatttcaggggtggcttggcttgggattctgataacaagtccctcatcttcaacattcatccagttcttattgttattggctacaaattccatgggggtgaagctattataagttacaaagcttttcccctaaagaaggaagtgaagaaattgata

SEQ ID NO: 163518 - DNA, 259 bp, Glycine max
ctctggttgattaggatctagagtcttcagtttctcctcgttgttcttcgctttcctgttttcaatttcgattctttcgttaatttaataagatgtttgggagggcaccgaagaagagcgataatacgaggtactacgaaatcctcggcgtctccaagaacgcttcgcaggatgatctgaagaaggcttacaagaaagccgccattaagaatcaccccgacaagggcggtgatcccgagaagtttaaagagctggcgca

SEQ ID NO: 163519 - DNA, 191 bp, Glycine max
ctctcactcttgttcttcggtctcctcctattctccgctgccgtagccaccgtcgaacgaatcgacgatgaagacaaccttctgatccgtcaagtggtgcaggacgcggaggaccaccacctctcaacgcggagcaacacttctccgccttcaagacaaagttacgcaagacatacgccacgcaggaggag

SEQ ID NO: 163520 - DNA, 248 bp, Glycine max
ttgcaatcaaattagttcattctctttgcgcagttccctacctctcctttcaagatgcagatcatcgtcaagaccctcaccggaaagaccatcacccttgaggtggaaagctctgacaccatgacaacgtcaaggccaagatccaggacaaggaaggaattcccccggatcagcaacgtctcatcttcgccggaaagcagctcgaggacggccgtaccctcgccgactacaacatccagaaggagtca

SEQ ID NO: 163521 - DNA, 247 bp, Glycine max
attctaagaaagattcgaaacgaagaaagaaagcgttgtgaagaatggcggaagagggacaagtgatcggagtccacagcgtagaggagtggaaggaacatctcaagaagagagaagagtccagaaattgattgtggtggattttactgcttcttggtgcggatcatgccgtttcattggccccaattcttgcagagtttgctaaaaagttgccgaatgtcaccttcctcaacgtggatgtggatga

SEQ ID NO: 163522 - DNA, 244 bp, Glycine max
gtggaattaatggagaagtgatgcccggtcagtgggaattccaagttggaccttcagttggaatctcagctggtgacgaggtgtgggcagctcgttacatcttggagaggatcactgagattctggtgtggtggtttcctttgatcacaagccaattcagggtgattggaatggtgctggtgctcacacaaactacagcactaagtccatgagaaatgatggtggctatgaagtgatcaaaaac

SEQ ID NO: 163523 - DNA, 247 bp, Glycine max
  unsure (1)..(247): unsure at all n locations
atcattttcctatacttcgttttttatgagtctgatctttttgttctcagacttatgcatcttcttgtgctaaaacaaaaggagttgaagaatgggaanggggaagatcgaaatcaanagatcgagaacacaacaaatcggccaagtgaccttntgcaagagaagaantgggcttctgaagaaagcttatgagctgtcagtgctgtgtgatgctgaagtttccctcatcgtgctctgccagccgtgg

SEQ ID NO: 163524 - DNA, 107 bp, Glycine max
atcttatttccattcgacaagaaattgctgagattgagaaaggaaaggccgacattaacaacaatgttctaaagtgtgcccctcgtccaccatcagtgctcatggga

SEQ ID NO: 163525 - DNA, 199 bp, Glycine max
gtttcactcttcttcgtctcaaatctcttcgttccttcgagtcgttccatttcttccaaaatggccaaagacccagttcgcgttctcgtcactggagctgcagggcaaattgggtatgctttgtccctatgattgctaggggagtgatgttgggtcctgaccagcccgtgatcctccacatgcttgacattcctccggc

SEQ ID NO: 163526 - DNA, 240 bp, Glycine max
gagatctaactattatgatgctcttcttgctgctgaatcacgtgcaatttctggaacgaaaggcacccactctgccaaggatcctccagtgatgcatataactgatttgaccacggcatcgctaagaaagccagagacttcttgcctttcctgcaccgaagtagaagagttcctgctgttgtggaatatgtgctcagtggtcatcgttttaagttgttaattccaaaagaaacttgcagc

SEQ ID NO: 163527 - DNA, 235 bp, Glycine max
gtaactgcgattttggatcggaacctcttctgcggcgtacaaatgggacactccaacgtttggagttctcacccaaaaaactacggtcctggttctcgcacttgccgagtgtgtgggaatcacatggattgatcaggaagtatggccttatgtgcagcaggcagtgcttccgtagcaatgccaaggaaattggcatcatcaagtatcgataaaagagctgttgtcacctacggac

SEQ ID NO: 163528 - DNA, 176 bp, Glycine max
gggaaatcttcggatcattctgctgcgattaaggatctggtgggagggtactatgatgcaggggatgctatcaagtttagctttcctgcttcgttttccattactatgttgagttggagttgattgagtacagtgcaaagtatgaggctgcaggggagcttgatcatgtgaaggag

SEQ ID NO: 163529 - DNA, 238 bp, Glycine max
ggtggatgggctaaaagtggtttatattttgaaactgtcacaaaaatatttaagaaaattttagagaagaatgatgctggagatcatttcccattatttgccacctgattaggctttgactcataacgatgatcataagccaggacaataatattcttgaagagtttagtgcatcaaatcaggcaagtactcatcaatttgtggagaatgcaaatatcggagagagtgtcattcaaag

SEQ ID NO: 163530 - DNA, 149 bp, Glycine max
tacgagcttgacattcctccggcagcagagtcattgaatggggttaaaatggaattggtggatgctgcattccctcttcttaaaggtgttgttgccacaactgacatggttgaggcatcagtggggtcaatattgccgtgatggttggt

SEQ ID NO: 163531 - DNA, 240 bp, Glycine max
gcttttgttcccaattttctcaaattgctttcggttttcgttctgattctgcaaaatcatggagatggagcgcatcgttgaattccctcacacatacatggatcgacccccgagaaaggagcgcgtttgggcagggacatcgcagaggtccccaaggctcaggtaggattgttttgtggacaagaggttgagaatatttcaagcattgctccttcagaacatccccctagttctcagttt

SEQ ID NO: 163532 - DNA, 235 bp, Glycine max
tgcttctgcagaagtagagttccgatgatttgttggtgggattgcttggtccaccgaccacgatgctatcgagaaagccttatatcaatttggcgaaatcgtcgaatcgaaggtcataacgatcgtgaaactggaagatccagagggtttggatttgtgaccttcgccacagagcaggcgatgagagacgcaattgaaggagtgaacggccagatactcgacggtcgtaatataa

SEQ ID NO: 163533 - DNA, 234 bp, Glycine max
ttttcacacattcacagttatactctctctctctttgtcgcttggatcactgatctcatctcaattttcagatatgtcgacatctgataagccagaagtggtggaaaggggtagcaagatgaaaaacacaaggaagatgatcaagaggaggggaagggtggattcattgagaaggtgaaggatttcattcatgacattggtgagaagattgaggaagctattgggtttgggaag

SEQ ID NO: 163534 - DNA, 238 bp, Glycine max
  unsure (1)..(238): unsure at all n locations
antttttcccaaagctgatcgagaagccagccaggccagagttgaagaagaatgggaagggggaagatcgaaatcaaaaggattgagaacacaacaaatcggcaagtgaccttctgaagagaagaaatgggcttcngaagaaagcttatgagctgtcagtgcngtgtgatgcagaagttgccctcatcgtcntcnccagccgtggccgtcncnatgagtattccaacaacaacataag

SEQ ID NO: 163535 - DNA, 241 bp, Glycine max
gatccatgtagtgagaattatgtgtacgcatatcttaatagaaaagatgttcaagaggcactccatgccaatgtaaccaacctcaaacatgactgggaaccatgcagcgatgtcataacaagtgggtagatctaggtttcaacagttcttccacttttacatgaattccacaacaatagcctcagggtttggattttcagtggtgacacagattgaaaggtgccaattacatcaaccaagt

SEQ ID NO: 163536 - DNA, 246 bp, Glycine max
attcttttcatcctcttcgcagagcctcagtagcttcgcattagcaatggcgagaatcaaggtgtacgagctgaggaacaagacaaaagcagagcattctgaaccaactgaaggatctcaaacagaactcgatctcctccgcgtcgccaaggtcaccggcggagcccgcaacaagctttccaaaatcaaagtggttaggctttcgatagcgcaggtgctgacggtgatttcccagaagcaaaaagc

SEQ ID NO: 163537 - DNA, 240 bp, Glycine max
acggacgaggagaggatgagcgtgcaaagagagctatcagcagccagcaccaggtccgagaggaaattgaatcactttttgatggagttgatttttctgagccaatcacccgagctcggatagagggttgaacaatgactagttccggaagaccatgggaccagtgaagaaggcaatggaagatgcaggattacagaagagtcagattgatgagattgttcatgttggaggaagcacaag

SEQ ID NO: 163538 - DNA, 237 bp, Glycine max
gaatggatcccaagggtttaacctttctggatgtgttaatatgcgtttcagcactgtcactgagtccttctgttgcgggggaagggcaaaataatggccttgttatgaacttctacaggaatcatgccctcaggcagaagacatcatcacagaacaagtcaagcatcactacaagcgccacaagaacactgatttctcaaggctcaggaacatcttccatgactgtgctgttcagag

SEQ ID NO: 163539 - DNA, 233 bp, Glycine max
gcactatagtaaaaaaaggacattcattcatctatggatacccttattgctcccagcaaccactctccccaagaagatgctgaagatcacagaaaggcttttgaaggatggggaaatatgagaacacagtcatagtaattttgggtcatagaacagtgtatcagaggcagcaaatcagaagagtttatgaggaaatttaccaggaggatcttgtgaagcgcatagagtcagag

SEQ ID NO: 163540 - DNA, 231 bp, Glycine max
tatcgagccgattcggctcgagggaggtggtcgaggatctaaacttaggtgaatgcttgaagtgtggaaaacctggagcttttgctagggaatgcccaggtgaagggtccaggggagaaggtatggtggtagggaaagtagatatggtggaagcagtggtggtggttatggaccggatagaaatgcagatcgttcttcaggggggcacagaaggatggtggtagtcagggg

SEQ ID NO: 163541 - DNA, 224 bp, Glycine max
ggctcccaagggattaatctttttggctgagttatgcatctcagcactgtcactgagtcgttgtcatgcggaggataatggacttgttatgaacttctacaaggaatcatgccctaggcagaagacatcatcaaagaacaagtcaagcatcacaacaagcgccacaagaacacagcattcaccaggcacagaaacatcatccatgacagtgcagttcagagttg

SEQ ID NO: 163542 - DNA, 240 bp, Glycine max
atcgaaaaggatataagggcaaacatgttcaagacagcaagccaactagacccatctgccacactctttgtgaatgattatcatgttgaagatggatgcgacaccagatcatgtccagatagtacatccatcacattcatgatttgcaagagcaaggtgcaccggttgggggaattggaattcaaggccacatagacagtccaatagggccatatgttagttcatccatggacaagttgg

SEQ ID NO: 163543 - DNA, 215 bp, Glycine max
ctcgaccgctcgagccgtgcagatcaaaacatctcttcagtttttggcattgagacgagagggtaatgcagtaagtggacatagtcatattttttgcagatttccattcattcagactatattcgttattaaaactactcatattccaggtagatgccaagaaacagagatcagcatttccaccaaacttcgtacattcacaggatggttcacac

SEQ ID NO: 163544 - DNA, 233 bp, Glycine max
ggaggactatcttggaaagcgtttaatgaagaaacaaccactactgatgatagttcgttcactgtgacaggattgttggagcagataaatgcaaccagagatttatcagattactgtggtactccacagatgttgtgatcaattccaatgaaggatttttgaggaatggaaagaatcctgttcatacagttttgtcatgagggcaagctttgcatgtttttatcaacaatcag

SEQ ID NO: 163545 - DNA, 225 bp, Glycine max
gagaaattcagctacactcaaggtctccgaagatgggaaaaaagttggcaggaaaactgaacttccaaagctagaagaggttgagcaggtggagataagaacacatgcagtatcgcatttgaacatgatctgaagcttgaagatgtggagaaaatcattggtcaatatgccaaggttaatagtgtccggcatccccatcatgttggagacaaagagttcttcagt

SEQ ID NO: 163546 - DNA, 212 bp, Glycine max
cgatcattttcctatacttcgttttttatgagtcagatctttttgttctcagacttatgcatcatcttgtgctaaaacaaaaggagttgaagaatgggaagggggaagatcgaaatcaaaagatcgagaacacaacaaatcggcaagtgaccttatgcaagagaagaaatgggcttctgaagaaagattatgagctgtcagtgctgtgtgat

SEQ ID NO: 163547 - DNA, 246 bp, Glycine max
cattcttttcatcctcttcgcagagcctcagtagcttcgcattagcaatggcgacaatcaaggtgtacgacgagaggaacaagacaaaagcagagcttctgaaccaactgaaggatctcaaacagaactcgctctcctccgcgtcgccaaggtcaccggcggagccccgaacaagctttccaaaatcaaagtggttaggctttcgatagcgcaggtgcatgaggtgatttcccagaagcaaaaagc

SEQ ID NO: 163548 - DNA, 252 bp, Glycine max
agactatactcatggggctaactttgcgtcttcagcctccactgtgattccgcccacaacttccttctctgtcagtgggctaagtccattttccctctctgttcaactcaggcaaatggagcaattcaaagccaaagttgatgaatttcatcaaacaggaacaaggatatcatctggaacgaaaatcccttctccagatatatttggaaaggccctttacacgttctatattgggcaaaatgacttcacttc

SEQ ID NO: 163549 - DNA, 210 bp, Glycine max
tcgagctcgagcgcttggtaatcggtggtgaaggtccatgtaatgggataacaaatgactatattggtgtactggcaaagaagtttggagcagctatggttactcttgaacatcgctactatggaaagagttccccatttaattctttggagacagaaaatttgaaatatctttcatccaagcaggcactctttgatttggctgtttttc

SEQ ID NO: 163550 - DNA, 246 bp, Glycine max
cggctcgagctcagtcactgtgatcctgttgtttggaatattgttttgtctgggttttcagggtctaacaaatgtgatgatgatgtgatgagggtgtttaggatgatgcatttgagcggagaggctatgccaaattctgttaccgttgcctgtgtccttcctgtttgtgctcatttgggtgacctggatgctggaaagtgtgtgcatggttatattatcaagtctggttttggacaagacatgctt

SEQ ID NO: 163551 - DNA, 249 bp, Glycine max
gccaggcaagccccactcaaccaccacacctctcctcgttcacgctacccctttctgctcttcttctacctttcaagttttaaaagtataaagatggcagagacattcctatttacctcagagtcggtgaacgagggacaccctgacaagctctgcgaccaaatctccgatgctgtcctcgacgcttgcctcgagcaggacccagacagcaaagttgcctgcgaaacatgcaccaaaaccaacttggtc

SEQ ID NO: 163552 - DNA, 244 bp, Glycine max
aaaagatgctgacacaagaattgcttttggttgtggccaagttcaaactggggtgtttctaaatggggcagctccaaatggcctatttggacttggattggataatatatctgttcctagtatcctagccaaagaagggcttatttcaaattccttttcaatgtgctttggacctgatggtgctggaagaatcacgttcggtgatactggcagcccggaccaacgaaaaacaccattcaacgtc

SEQ ID NO: 163553 - DNA, 241 bp, Glycine max
caggatcaacactgacaggggtgttatgctgagtgatggaaaaacaaggttctccaaaaatggccaacccatttaccacttcgttggaacctccactttcagtgaatacactgttctccatgaaggatgtgtagccaagattagacctaatgccccacttgacaaagttgctattgtcagctgtggattctgcacaggttttggggctactgtgaatgttgcaaaaccaaagcctaataat

SEQ ID NO: 163554 - DNA, 241 bp, Glycine max
gaaaaaatggcggtgcctcttctctcgaagaagatcgtgaagaagaggctgaagaagttcaagaggcctcaaagtgacaggaagatttctgtgaagacaaactggcgcagaccaaagggtatcgattcccgtgttaggagaaagttcaagggatgcactttgatgccgaacattggttatgcttcagacaagaagacccgccactatctcccgaatggtttcaagaaatttgttgttcaca

SEQ ID NO: 163555 - DNA, 246 bp, Glycine max
cctttgttcactcttcttctcttgcggctagggttttagcgcagttcttctagatttaaggaagatgggtaaggaaaaggttcacatcagtattgtggtcattggccatgtcgactctgggaaatccactaccactggtcacctgatttacaagcttggaggcattgacaagcgtgttattgagaggtttgagaaggaagctgctgagatgaacaagaggtctttcaagtatgcctgggtgctgga

SEQ ID NO: 163556 - DNA, 243 bp, Glycine max
gggtgatggtcttggtgctgagattgttggcactttcatccttgtttacaccgttttctccgccaccgatgccaaacgtagcgccagagactcccacgtccccattttggcacccttgccaattgggttcgctgtgttcttggttcacttggcaaccatccccatcaccggaactggtatcaaccctgctcgtagtcttggtgctgctatcatcttcaacaaggaccttggttgggatgaaca

SEQ ID NO: 163557 - DNA, 247 bp, Glycine max
cacttttcatccttcgatcatacacttagttgcttccaattaagatggttctgctagagaagctctgggatgatgttgtggctggccctcaacctgagcgtggccttggcaagctcagaaaactcaccaccctcaaaactattgatgaaggagaaagtagcaagctgcagaagacgttgtcgatgccgtcgacaccaacaaccccgatgactccgacgactccaacgacaccgggatcggcccgtaa

SEQ ID NO: 163558 - DNA, 241 bp, Glycine max
tgggaagcgtgcattaaattttccgagaggccaaaatatccattgcacctttctctttctccgatggctaatccctcactcttgttcttcagtctcctcctattatccgccaccgtagccgccgccgaacggatcgacgatgaagacgaccttctgatccgtcaagtggtgccggatgcggaggaccaccacctgctcaacgcggagcaccacttctccgccttcaagacaaagttcggca

SEQ ID NO: 163559 - DNA, 240 bp, Glycine max
aagagtttgatcctggctcagaaggaacgctagctatatgcttaacacatgcaagtcgaacgttgttttcggggagctgggcagaaggaaaagaggctcctagcgtgaaggttgcttgtctcgcccaggaggtgggaacagttgaaaacaaagtggcgaacgggtgcgtaatgcgtgggaatctgccgaacagttcgggccaaatcctgaagaaagctaaaaagcgctgtttgatgagcc

SEQ ID NO: 163560 - DNA, 241 bp, Glycine max
agaagagggaaaacggcaccgccgccgtagaagaaaacaaccatggtgcacgtctccttttacaggaactatgggaagacattcaagaagccgcgtcgtccgtacgagaaggagcgtctcgacgcggagttgaagctggttggtgagtacgggcttcggtgcaagagagagctgtggagggtgcagtacgcgctcagccgcatccgcaacaacgcgcggaacctcctcaccctcgacgaga

SEQ ID NO: 163561 - DNA, 238 bp, Glycine max
ggattctacccgccgctcgatgggaattgcgcttcaaggcgtctcgtagggctaatccgcctcacgagggtcaccaacggcacgtgcctttggggggccgaggcccctactgctggtcggcaaacggacggcgggcgcacgcgtcgcttctagcccggattctgacttagaggcgttcagtcataatccaacgcacggtagcttcgcgccactggcttttcaaccaagcgcgatgacc

SEQ ID NO: 163562 - DNA, 204 bp, Glycine max
ggcgttttcgtcacatatatcgtggtcagcccaaacgacacttgcttactagcggttggatcttattcgtgaatgcaatgaaacttgttgctggagattcatgcattttcgttagaggggaatctgtagaacttcgtgttgtgattcgtcgcgcataccacaatctcagcaatatatcgcaagcttcagctctgatatcgggtc

SEQ ID NO: 163563 - DNA, 244 bp, Glycine max
gtgaaacatatcttgacaggcttgcactgaggtatgatcgggaaggagaaccgtcacaactagctactgttgacatttttgtcagtactgttgatccattaaaggagcctccacttgtgactgccaataccgtactatctattcttgcagttgactatccagtggataaggtctcctgctatgtgtctgatgatggtgctgctatgttgacatttgaagcacttgctgagacatcggaatttgc

SEQ ID NO: 163564 - DNA, 225 bp, Glycine max
gttgaaagacatgggtacggtggctccaagagttgaaagcttggcgagcagcgggataaagtgtatcccgaaggaatacgtgaggcctcaagaagagctcaagagcatagggaacgtgtttgaggaggaaaagaaggaagggctacaggttccgacaattgacttgagagagatagattcggaggacaaggttgttcgagggaaatgtcgtgacaagctgaagaa

SEQ ID NO: 163565 - DNA, 236 bp, Glycine max
tgtcgagcgaatcggctcgagccacaccaccccttcttccttatcatcaggtttattacttttcttttggttcaattttgctgaatggagagtgcaagaatcagcaaatggttaaatcttctagtttgtgtactgctattgcttaaggcagaaggatctcttgttccattgactttggtgaagaatgcagaatcaaaaggagctgtttgtttggatggaagccccccagcatacca

SEQ ID NO: 163566 - DNA, 236 bp, Glycine max
gctggagccaagtagtgttgagaaaattatggaaattgatgagcacataggatgtgcaatgagtggattgattgctgatgctcgaacacttgttgagcatgcacaggttgaaactcagaatcataggttctcctatggtgaaccaatgactgttgagtccacaacccaagctctttgtgatctagccttgcgttttggtgaaggtgatgaagaatccatgtctcgaccatttggag

SEQ ID NO: 163567 - DNA, 244 bp, Glycine max
taacgcctcgaatccacacagttctactctacgctctaaaccctctctctctctctctctcgaactatcatggctttgcccaatcagcaaaccgtggattaccctagtttcaaactcgtcatcgtcggtgacggcggtacaggaaagacaacgttcgtgaaaaggcatcttaccggtgaattcgagaaaaaatacgaaccgaccattggagtggaggttcacccattggatttcttcacaaact

SEQ ID NO: 163568 - DNA, 245 bp, Glycine max
gtcgaaagctccgacaccatcgacaacgtcaaggctaagattcaggacaaggagggaatccccccagaccagcagaggctgatcttcgccgggaagcagctcgaggacggacgcacccttgctgactacaacatccagaaggagtcaactctccacttggtgttgcgtcttcgtggtggtatgcagattttcgtgaagactcttacgggtaagactattaccctcgaggtggagagctctgacac

SEQ ID NO: 163569 - DNA, 243 bp, Glycine max
ggcttttctaatgttgttaaagatttgaagtatgctgattctcatgagtgggtgaaagttgatgaaaattctgcaaccgtcggcataactgatcatgcccaagatcatttaggtgatgttgtatatgttgaattgccagaagtgggagcagctgtaacacaaggaggtagttttggtgcagttgaaagtgtgaaggcaactagtgacattaactctcctgtttcaggaaaagttgttgaagtt

SEQ ID NO: 163570 - DNA, 244 bp, Glycine max
gtgccctcatcggtggtcttggtgacattgaagccattgtgtgcctttgcatccaactcagggccctcggaatattaaaccttaaccgtaatttgcagttaatattaaactcctgtggacgaagctacccgtcaaacgccacttgcccccgaacctaagaacagaatatgtatggcactaattaccatattacttcgtatcatggtgtttgtttgtttgtctgtgtttaaagttaaggatgtta

SEQ ID NO: 163571 - DNA, 239 bp, Glycine max
aaaactttcgaaagattttatccaattgaaattttaaaaatgactgggataaacttaagaattcaattattgaaattgaataagtaaacaatttaattggattggtcgaatggtatcaaaaaaatggagtactaactcccatttcttatttattattgaattaaccgatcaacttgctttgttatcgaacatttctttttgatttcaaaaattttccggaaaaaatttgaatctatttt

SEQ ID NO: 163572 - DNA, 238 bp, Glycine max
aagggtttgacccaccgcttgaccacggagaacgtggtggacgtgcttcaactcgcgcgtctctgtgacgcgccggatctccatcttcgctgcatgaagctcctcgccaacaatttcaaagcggtggaagcaacggaggggtggcagttcctcgtcaaacacgacccctggctcgaactcgacattctccgcttcatcgacgaacacgaaaccaggaaaaagaaatcgaggaagtata

SEQ ID NO: 163573 - DNA, 232 bp, Glycine max
tggcgacgcaatcctccagtacatcaactcaactagccatccagtgggaacaatactagcaacagttacaattcctgattataagcctgctccccgggtgggttatttttcatcaagagggccttcattgattacaagcaatgttctcaagcctgatattgcagccccgggagttaacattctcgctgcatggtttggaaatgacacatcagaggttccaaaaggaagaaag

SEQ ID NO: 163574 - DNA, 244 bp, Glycine max
cacactctcttattgtctctccatcatggctcacattctccctttcctcctcctcaccctcctcgccgccaccgcctccgcccacaatatcaccgacattctcgccgccaaccccgactacagcgacttcaacggcttcctctcccaaaccggcctcgccggcgaaatcaacacccgccagaccatcaccgtcctcgtcctcaacaacgccgacctctccgccgtggccgcaaaacaccccctc

SEQ ID NO: 163575 - DNA, 241 bp, Glycine max
  unsure (1)..(241): unsure at all n locations
ccgtcactggttttgaaacctttatgtcaagtttgaaaaataagtcatttcgcccaaataaacaagggagtggtgtggatctggtattaagttgcgaggataattatgaagcaagaatggctgttaaccaggcttgtaatgaattgagccaaacctggatggagtcaggtgtttctgaggatgctgtttctaccnctgactcattacttattcctggtgaaactgcctgttttgcgtgtgc

SEQ ID NO: 163576 - DNA, 243 bp, Glycine max
caatctcctatatcacatatttcttcagcacttatagtgtagtgagagagaaattaaggaagagcttaattgagtgcttctatcatagaagttctatggctacccttgttgctccaaaccaaaaatctccggttgaagacgttgaggctctacataaggctttcaaaggatgggggactgatgagaagaccgttatagcaatattgggtcacagaaatgttcatcagaggcaacaaatcagaa

SEQ ID NO: 163577 - DNA, 240 bp, Glycine max
cttctctctctttctctctttctagttcgtgttcttcgtcgcaaatccgaagtaggatctctcttgttttttctctaggtttttcgcgatggcgtcgaagcgaattttgaaggagcttaaggatttgcagaaggatcctccaacatcttgcagtgccggtcctgttcatgaagatatgtttcattggcaagctacaattatgggtcctccagacagtccctatgctggaggtgttttcct

SEQ ID NO: 163578 - DNA, 233 bp, Glycine max
atagctctctcatatctcatacagactacagtaatattttatttgcactactactactactttatttaagcagaagcaggcgagtgaggtagagcgaagagtgaagagaatggctcccaagggtttaacctttctggctgtgttaatatgcgtttcagcactgtcactgagtccttctgttgcgggggaagggcaaaataatggccttgttatgaacttctacaaggaatcat

SEQ ID NO: 163579 - DNA, 236 bp, Glycine max
gcgaagtcgaagatctagctagaggcagagaacgttctccctaatcttctgccgatggcgatcttctacgctttggtggccagaggcaccgtcgtcctggcggagttcagcgccgtcaccggcaacaccggcgccgtctcccgccgcatcctcgagaagcttccggcggagtccgactccaggctctgcttctctcaggatcgctacatcttccacatactccgatcggatggcat

SEQ ID NO: 163580 - DNA, 234 bp, Glycine max
atcacactttgcatattattccagattctagacaagtgaaggcagaggagttgcagcttggtgtctgttaccttcagattactgccgttgatccagtaatggaagatgaggatttaggaagtaggagagaaagaattttctctctctctactggaagcgttcgagcccgcgtatttgatcgattcttgtttgacaccccatttaccaaaaatggcaagactcaaggtggattgg

SEQ ID NO: 163581 - DNA, 235 bp, Glycine max
ctttctccgatggctaatccctcactcttgttcttcagtctcctcctattatccgccaccgtagccgccgccgaacggatcgacgatgaagacgaccttctgatccgtcaagtggtgccggatgcggaggaccaccacctgctcaacgcggagcaccacttctccgccttcaagacaaagttcggcaagacctacgccacgcaggaggagcacgaccaccgcttccgcatcttca

SEQ ID NO: 163582 - DNA, 240 bp, Glycine max
caaatcttagccgccattgatttttcctcttccatttctcttactttctcagcctttttcgattacccatttggttatttcgccctaatggctcttgctccatccaaagtttccaccttttctggttttactcccaaacccagtgttgggggtgctcagataaacccaacttgctctgtttctctgagctttttgaatgagatacttggaagcagaatccttagggtttgtgcctcaacg

SEQ ID NO: 163583 - DNA, 242 bp, Glycine max
ggaagtctcttcctacttgaagaaagtaggatacaaccctgacaagattccttttgttcctatctctggttttgagggagacaacatgattgagaggaccacaaaccttgactggtacaagggtcaaactctgcttgatgcacttgaccagattagtgagcccaagaggccctctgacaagcccctcaggcttccccttcaggatgtgtacaagattcgaggtattggaactgtgccagtgg

SEQ ID NO: 163584 - DNA, 234 bp, Glycine max
tggactgattcgccggaatgccaggagaaggcatcatacattttgatggttatggcacacaagtcctatggtgacaagcaggccatgattgatgcaggggttgcatcatccctgcttgagttgtcccttttgggttccacattggctcagaaaagggcctcaagaatattggagattttgagggtggacaaagggaagcaagtttctgggagctatggcttgggtgcagctgtc

SEQ ID NO: 163585 - DNA, 235 bp, Glycine max
cttaatttctctctgccttgctcatttacacacctctccaacatttcactttcagctttatttgaatccctctctctcctttccaaatggccagcgttgaggttgcacatcaaacaccaacaacagttccagaaaatgaaacaaccgaggtaatcaagacccaggaaacaaccccggaaccagtaccagccactgaggctcctgcaacagaacaagcagcagctgaggttcctgc

SEQ ID NO: 163586 - DNA, 228 bp, Glycine max
caacagcacaaagcgggttactgtctgttcaagctaccatctctctctctctttcttagtgcctccttgccagaagttaaaatggcccaagaaactttcctattcacatctgaatcagtgaacgaggggcaccctgacaagctctgtgaccagatctccgatgctgtgctcgatgcatgcttggagaggaccctgacagcaaggttgcctgtgaaaactgcaccaaga

SEQ ID NO: 163587 - DNA, 250 bp, Glycine max
cagattagtaacattgcaagtatatggtttatctctctctttctttccatctttgcaaccggtatccttgagatgaggtggagtggtgttggaattgatgagtggtggagaaatgaacaattttgggttattggtggtgtttcggcccatctttttgccgtgttccaaggtttactcaaagtgcttgctggaattgacactaacttcaccgttacctcaaaggcatcagatgaggatggagacttcgcag

SEQ ID NO: 163588 - DNA, 247 bp, Glycine max
ctcaggggctgtttggcttggcctctttggaggaccgtggaatggtgatgctcattaacttggctttcagtgagggtgagtatgctggcagcactctcagcatgcttgggaggaaccctgttcaggacactgttagggaaatgcccattgttggaggcacgggcgtgttcaggtttgccaagggctatgccattgccaagagtctttgggaaatttctgacaatgagcattttgtggtggagtatca

SEQ ID NO: 163589 - DNA, 251 bp, Glycine max
  unsure (1)..(251): unsure at all n locations
caacaaaccaaaaaggtaaactttttgcaacaaccatggttgcaatggcagcagcaacagcatccacccagttgattttctcaaagccttgttcaccttcacgtctatgccccttccaactatgtgtatttgacactaaacaagtgctatcaagtggcaggagaaggcatgtggggggttctggaatancgtgcatggctgtgggggaagcagcaaccactgggacaaagaagagaagtggatatgagctt

SEQ ID NO: 163590 - DNA, 248 bp, Glycine max
ctcagggttatttcaataatgtttcagaatatctcagaattggacctcctgtgtattttgttgtgaaaaactataactacagctcagaatcagcgcatacaaatcagctttgctccattagccattgcaattcagactctcttttaaatgagattgctagagcggcccttgtaccagacacaagttatattgccaagccagctgcctcatggcttgatgattgtcttgtgtgggtgtctccagaagca

SEQ ID NO: 163591 - DNA, 277 bp, Glycine max
cacgcgtactcagaattcggctccagctcgacatctcttgcggcaagggttttagcgcacttcttctagatttaaggaagatgggtaaggaaaaggttcacatcagtattctggtcattggccatgtcgactctgggaaatccactaccactggtcacctgatttacaagcttggaggcattgacaagcgtgttattgagaggtttgagaaggaagctgctgagatgaacaagaggtctttcaagtatgcctgggtgctggacaaacttaaggctga

SEQ ID NO: 163592 - DNA, 251 bp, Glycine max
caagaacaagaccaacaaagtaacgtgaaagagaaagagatggaggaaattgttccagtggtggatttccagaggctttcagaggaagaggagcgcaagaagctgagaaaaacatgtgagaaaccagggtgtttcagaatcatcaaccactcaattccaccaacactcatggctgacatgaagtcagtggttaaatacttgcatgaccttcccacggaaatcaaaatgcgcaacaaaccctccgtccctga

SEQ ID NO: 163593 - DNA, 249 bp, Glycine max
cgggaagagatccagcagcaatggtgtacgtcaaggctcagaaatcaaaagcctacttcaagagatatcaagtcaagttcaagagaagaagagagggaaaaaccgattaccgtgccaggattcggttgattaatcaggacaagaacaaatataacactccgaaataccgatttgtggttcgctttaggaacaaggacattgttgcacaaataatatctgctagcattgccggcgatttagttcttgcta

SEQ ID NO: 163594 - DNA, 246 bp, Glycine max
ggcaaaagcgttctaggtatgcagccgaggcaactgcggaagttgttggccgaaaggctaggggtttgggattgaaatctgttgtcatgaaagtgaatggatttactcattttaggagaaaaaggaatgcaataatgagctggaaggagggctttactgctggttctcgaggggatagaaatccaattgtatacattgaagatactacaagaaacaccccataatggttgcagactcccaaagaaa

SEQ ID NO: 163595 - DNA, 249 bp, Glycine max
cggctcgagaatccataaaacacacaaaaactcagggtagggcagagagagagagagaaatgggcggttgggctatcgcggtgcatggtggcgctggtgtggaccctaatcttccactcgagcgtcaagaagaagcgaaacaacttctcacgcactgtctcaatcttggaatctctgctctaaattctaatcttcccgccatagatgtcgttgaacttgtggtgagggaattggaaacggatccgctgt

SEQ ID NO: 163596 - DNA, 251 bp, Glycine max
ccgtgacttgagaagagccagggctgcagcactgaacattgtcccaaccagcactggagctgccaaggctgtgtctctagtgttgccacagctgaagggcaagcttaatggaatagcgctccgtgtgcctacacccaatgtttcagttgttgaccttgttgtgaatgttgagaagaagggtcttactgctgaagatgtgaatgcagcattcagaaaggcagctgagggtccactgaaaggtgtgttggacg

SEQ ID NO: 163597 - DNA, 251 bp, Glycine max
ggaggttcacattcacattacaagcaacaacttaacgcttaacaacagcactctccctaatccttctgtgtatgcaaaatgagaccatgcaaatgcaaatgcaatgttctctctgctctcattcttcttgtcacattcctttttattgcttcttccgtccactgtgaagacccatatcggtacctcacttggaaggtcacctatggtgacatctatcctcttggtgtcaagcaacaagggatcttaattaa

SEQ ID NO: 163598 - DNA, 248 bp, Glycine max
ctttcttcgctacgtcgtcgttagggtcttcttcggatcggtggaacttgaccctgccggcgtgaattccgacgctactcgtggcgccgaattgctatagcggtgacgaatatgaaggttttcgttaagactctcaaaggcactcacttcgaaatcgaagtgacgccgcaagacacggtttctgaagtgaaaaaaaatatagaaactgttcagggtgcagatgtctatcctgctgcacagcaaatgct

SEQ ID NO: 163599 - DNA, 247 bp, Glycine max
tagaattttttttctctctttcataacctagtgagactctgtgtcagagtttgtgaagtgaatcccataatcatgaagaaaggaaacttgggacttggtctcaaactctcagttcctgtgtctgatcaatctaattttgccaggttcctgactgaaagtgggacttttaaggatggggatctgcttgtcaacagggatggagttcgaattgtctctcagaatgatgtcgaagctccacctccaatca

SEQ ID NO: 163600 - DNA, 247 bp, Glycine max
tctctctccatccaacatcgaaacgaggtcgttttgtgttccgccgaaggcaccggaggttgtagcaggctagcagctatggatttggcatccaatctcggtggcaagattgacaaagccgaagttctctctgccgttcagaagtatgagaagtatcatgtttgctatggaggtcaagaggaagagaggaaagctaattataccgatatggttaataaatactacgatcttgttaccagcttttatg

SEQ ID NO: 163601 - DNA, 248 bp, Glycine max
cttaaagcaaatatggatgctgcttcattttggagtcagcaaccattaactgcaagggagtatgctttgagcactataattccagcatgtgctgctgttgccaaggcttcaaataatgcaaaggatctcattgagaaagaagtgtctacattttatcgaagtccagataatagtctctacatgcttccttcttccccacaggcactgcttgaggccatgggtgctagtggaccacctggccaggaagt

SEQ ID NO: 163602 - DNA, 246 bp, Glycine max
gaaggcttgcaatgcccttctgttgaaggtgaatcaaattggtagtgtaactgaaagtattgaagctgtgagaatgtctaaacaagctggttggggtgtcatggctagccacaggagtggtgaaactgaggataccttcattgctgacctatcagttggattagcaactggccagatcaagactggagctccctgccgatctgaaaggcttgccaagtacaaccagcttctgaggattgaggagga

SEQ ID NO: 163603 - DNA, 219 bp, Glycine max
ggctcgaggaacgctgctgccgaaacccttaccgatccctaaggtaactgagtaatcggtggttgagactggtggagaaggcgaagggtaggaaggaggaggtggttaccagagagtacaccattaacctccacaagcgcctccatggctgcacatttaagaagaaagctcctaaagctattaaggagatacggaaatttgcccaaaaggccatgggga

SEQ ID NO: 163604 - DNA, 248 bp, Glycine max
catcgctattctcttcattccatggctttgcccaaccagcaaaccgtggattaccctagtttcaaactcgttatcgtcggcgatggtggcacaggaaagacaacctttgtgaaaaggcatctcaccggagaattcgagaagaaatatgagccaaccatcggtgtggaggttcacccattggattttttcacaaactgtggaaagattcgattttactgctgggatcactgctggacaggagaaattgg

SEQ ID NO: 163605 - DNA, 250 bp, Glycine max
  unsure (1)..(250): unsure at all n locations
ctactatactgcttcaccttctgctctagaaaattcagtggctgaaacatggcttcggctactctctctgtagccaaaccagcccttcaggcaaatgggaaaggcttctctgaattctctggcctccgaagctcatcaggcttccttcccttttctagaaaatcttcagaggatttccattctgtcattgccttccagacctatgcagttggaagcagtggaggatacnagaagggtgtgacagaagcaa

SEQ ID NO: 163606 - DNA, 246 bp, Glycine max
ctcgagccgcgaagggctatatagcataaacatttgattcttcattgcacaatgtcgacctcttccattaacgggtggtgcttctcttccatctccccagccatatcctctctcaagaaggccacattaggcccttctgtcttcgcaatcgttagcactccttcttctccttcttcttcttcttcttcttccttcccttctctcatcaaatatgggtctttctttgctgcgcctgtgcgcatcatc

SEQ ID NO: 163607 - DNA, 250 bp, Glycine max
cactcaccctcattaccaacacgaaagcatagccaaaaccttttttcgaagtctctgattttcctaatggctccggcaaaggcagagaagaagccggcggagaagaagccagcggcggagaaggcaccggcggagaagaagccgaaggcagaagaagatctcgaaggaaggagggagcgagaagaagaagaagcgcacgaagaagagcgtggagacctacaagatctacatcttcaaggtcctcaagcag

SEQ ID NO: 163608 - DNA, 232 bp, Glycine max
cgagaagcacgacaaagacgcaaactttgcagtgtacagagacaagaacttcaccaactatggaacgggtcgacccggtgggctcgactcgttcaaaaactactccgagggagagaatattccagtgaacgatttccggcgatacagccgtgactccgccggccacaaggacgggtttttaagctgcggcacgagcggcaacgtcgtgcagcagagcttccacacctacgcc

SEQ ID NO: 163609 - DNA, 244 bp, Glycine max
cgcagctgcttctcctatggcaagccaactcaagtccaccttcactaaaactcttgtagctcccaagggcctctctgcctcttcaccattccacctcctgccttctaagaggcaatttagcttcactgttagggccatccaatcagaaaagccaacctatcaagtgattcaaccaatcaacggtgatcccttcattggaagccttgaaaccccagttacatccagccccttgattgcatggtac

SEQ ID NO: 163610 - DNA, 245 bp, Glycine max
attcactcttcagttctcgttgttgttcttcgctttcctgaaactagggttttcaatttcgattcattcgttaataattaaagatgtttgggagggcaccgtagaagatcgataatacgaggtactacgaaatcctcggcgtctcgaagaacgcttcgcaggatgatctgaagaaggcttacaagaaagccgccatcaagaatcaccctgacaagggcggtgatcccgagaagtttaaagagctg

SEQ ID NO: 163611 - DNA, 246 bp, Glycine max
acacaaagcacaaagcaaagctcatccttgagttaaaaaatggcagcagcttcttccatggctctctcatccccatccttggctggcaaggccgtgaagctgggcccatcagccccagaagtgggaagggtgagcatgaggaagaccgtcaccaagcaggtctcctcaggaagcccatggtacggcccagaccgagtcaagtacttgggcccattctctggcgagcccccgtcctacctaaccggg

SEQ ID NO: 163612 - DNA, 245 bp, Glycine max
aagtatttgtgccaaagcagaagtccagtatcatgtggtactctaaataccttaacaatccaccaggcagagtcctcactcttgccgtcaccctcacgcttggttggcccttgtacttggcttttaatgtttctggaaggccttatgatagatttgcttgccactatgacccttatggtcccatttactctgaccgagaacgacttcaaatatatatatcagatgcaggagtacttgcagtatgc

SEQ ID NO: 163613 - DNA, 248 bp, Glycine max
cccgaactattgtcccgcaacggggtcaagtttggagaagctgtgtggttcaaggccgggtcccagatcttcagcgagggtgggctggactacttgggcaacccaagccttgtccacgcccagagcatcctcgccatctgggccacccaagttatcctaatgggtgctgttgagggttatcgtattgctggtgggcccctcggtgaggtcactgacccaatctaccctggtggcagctttgacccatt

SEQ ID NO: 163614 - DNA, 242 bp, Glycine max
atcaagggttgtgaaagcagagaagtgagatacactaagttatcctcataaatacactctaattaggtggcaagataagtgtctaaccttagtaacattgccacatattgtgttcattttggaattgtgccactaaaattctattcaattcatctatggctgcctcttcttatgctatgcaatcaatcctggcaaaccctttgatccgcatttccagcgggtctagggtgaacaatttggcg

SEQ ID NO: 163615 - DNA, 244 bp, Glycine max
cgctgtggttttcatcgtcttccttctcttatatttcttttttttttgtcttcgccgcacgccgaaacaatggccggaaaaggagagggtcctgctatcggaatcgatctcggaaccacctactcttgtgtcggtgtgtggcaacatgaccgagttgaaatcatcgccaacgaccaagggaacagaacgacgccgtcttacgtcggcttcactgataccgagcgtctcatcggtgatgcggtta

SEQ ID NO: 163616 - DNA, 245 bp, Glycine max
gcaaatattgcctattccgcaatatggcggaaaatgcttcgattgagctgaacaagtttgtgctcttttgtttgttggtgctaatacaagtggcagtttctgaaatcatttttgaagagcgttttgatgatggatggcgaggtaggtgggtgaagtcagactggaaaagcagtgaaggcaaagcaggttcattcaagcacacagctggaaaatgggccagtgatccagatgataaaggtattcaa

SEQ ID NO: 163617 - DNA, 238 bp, Glycine max
ctcgagccgcgggaatatccgctattctagttgctgcttctgtctgtaacacaatacaatcatcattcatcaaatcactgaaaccaaagccacaagctgcgacatcagaagaatggaagacggtgttgaccacttggctttcgagaggaacaaggcgcagttcgatgttgaggacatgaaaattatttgggccggttctcgtcaagactttgagctttcggatcgaatttctcgcctt

SEQ ID NO: 163618 - DNA, 240 bp, Glycine max
gatcgagataactagaaacagtgtgatgaaaatgaaggtccttgttttcttcgttgctacaattttggtagcatggcaatgccatgcgtacgatatgttccctctccgaatgaacactggctatggtgcccgtactccggatgtgaaatgcgcaagttggaggcttgctgtggaagcacacaacatctttggctttgagaccattcctgaagagtgcgttgaagcaacaaaggaatacat

SEQ ID NO: 163619 - DNA, 242 bp, Glycine max
agagaaagagggttctggattttcatcttcttccactgccgaggaagttactgaaggaatcgatggcactgccctcactgctattgttacaggggcatctagtggtattggtgctgagactacccgtgttcttgctatgcgtggtgtccatgtaattatgggggtgaaaaatatgaatgctgcaaataatataaaagaaacaatacttaaagggattccctcagctaaagttgatgctaggg

SEQ ID NO: 163620 - DNA, 243 bp, Glycine max
cgcgggtgaggtagaacccttccacggtggtgactgcgcgatgggtgcctacaagtatgtttcagagctatggcgcaagaagcagtctgatgtcatgcgcttcttgcagcgggtgaggtgctgggagtataggcagcaaccttccattgttcgcttgacaaggtcgacccgccctgacaaggctcgtcgcttgggcttcaaggctaagcagggctatgtgatataccgtgttcgtgttaggag

SEQ ID NO: 163621 - DNA, 247 bp, Glycine max
aaagaatcccaggcgaggagaaagatggaggggaaggagcaggatgtgtcgttgggagcgaacaagttccccgagagacagccaattgggacggcggcgcagagccaagacgacggcaaggactaccaggagccggcgccggcgccgctggttgacccgacggagtttacgtcatggtcgttttacagagcagggatagcagagtttgtggccacttttctgtttctctacatcactgtcttaaccg

SEQ ID NO: 163622 - DNA, 251 bp, Glycine max
tcggctcgagattccccttatctttctctcttctctctccccgcccaaaccctaactccctaccctattccgctttctctcatccatcatgaaaggaggaaagtccaagaccgaatctaagagagccgatgccaaacttgctgtgaataagaagggcgccgccaccaagactaggaaacccgccggaaaggggaaggcagcgaaagatcctaacaagccaaagaggcctccaagtgctttcttcgttttca

SEQ ID NO: 163623 - DNA, 244 bp, Glycine max
gcttgggcatgtcatatgtatctaatgcagctgtgcagtggaattgatgaaaatgcaattggagcgtgtgcacagcttgtgtttgcacctattgatgaatcatttgcagatgatgctctcttactgccttctggtttccgtatcataccattggatcctaaaacagatggcttggtttcatctaggatctgggtcttatcatcaacactggacacaggatctggtaatgcctgctcagctggtg

SEQ ID NO: 163624 - DNA, 244 bp, Glycine max
cgcgcactctctctttttctctctgttttttgttctctcttcgcttaaaccctatcgttcttctcgttttcgccgattctcgccatgccgaaagctaaatccgacgccaaagccgccgatagcaggttgaagcggaagggcgctggtgctgggaggaagcaatcgaggaaagctgctaaggaccctaacaagccgaagagacctccaagcgctttcttcgttttcatgtccgagttcagagagc

SEQ ID NO: 163625 - DNA, 243 bp, Glycine max
atactcctctcttgtctgtgcaatcaaaacaacaacattcattcatactgatcacttccttgcctattgcacattcttcatcacttcattcaacatttctctctcccttagctagtttttaccaatggctgctgcggttagtgctgcagtctcttttccatccaccaagtctacctctctcccaagcaggacctccatcattaccccagagagagttgtattcaagaaggcttcattgcaata

SEQ ID NO: 163626 - DNA, 240 bp, Glycine max
tctcgagccgattcggctcgagtaactttcggttcctcccattttcaggttcaataaattaaattaaaaaaaccgaaccggcggatctcggtggtttcatggaggctcatggcggagggctccgtcgcatccttgtgctcgccttctgcgtcgccggaatctggtccgcgtacatctaccaaggcgttcttcaggaaaatgtgtcgacgaagcgattcaacggtgaaaggttcgagcacc

SEQ ID NO: 163627 - DNA, 244 bp, Glycine max
caaaagctgttggagttgatgcaaagaaggctttccctttccgcacctatcacttctatgcagaacctagagcagccaaagctaaattgggatggcaatcaaccacaaacctccctgatgacctattataacggtttgaggagtacgtaaagattgggagagataagagatccatccagttcgagctagatgataagatattggaggcattgaaggttccggtgtcagtgtgatccatttatat

SEQ ID NO: 163628 - DNA, 243 bp, Glycine max
ggttggcattcttggcattgcatgggcctttggtggcatgatcttcatccttgtctactgctatgctgggatttcaggaggtcacattaacccagcagtgacatttgggctgtttttggctcgcaaggtgtctttgatccgagccatcatgtacatggtggctcagtgcttgggtgctatctgtggagttggtttagttaaggctttccaaaagtcttacttcaacaagtatggtggtggggc

SEQ ID NO: 163629 - DNA, 243 bp, Glycine max
gttgaatgcacatgctggtctccggtccggttagggcatttctgggaccttaaatcaccaatttctcacccaatcaattccaattaagctgagagtgtttctgatctatatgtgatgggtgctccgaagcagaaatggactgcagaagaggaacaagcacttaaagccggagttgtcaagcatggtgttggtaaatggcgcaccatactgaaggatccagagtttagtagtgtcttgtacctg

SEQ ID NO: 163630 - DNA, 244 bp, Glycine max
gttgaaagttaagaagtagcaaagatgtttccattcgggcacaagggtcaaaagataaaggggactatggtggttatgcagaagaatgtgttggatatcaacagcatcaccagtgttgacgggatcgtcggcaccggcttagacttcttaggcagtgcactcgatacagttacttttttagcctcctccatctccatccaacttattagtgctaccaaggctgatggtgggaaaggaaaagttg

SEQ ID NO: 163631 - DNA, 242 bp, Glycine max
ggtttgaggagatgaacatggatttgttcaggaagtgcatggagccggtggagaagtgtttgcgtgacgccaagatagacaagagtcaggttcatgaggttgtgcttgttggaggttccactaggatccccaaggttcagcaactcttgcaggatttcttcaacggaaaagagctttgcaagagtattaaccccgatgaagctgtggcgtacggtgctgctgttcaggccgcgatcttgagc

SEQ ID NO: 163632 - DNA, 232 bp, Glycine max
taaaagaagagcatcactgaactaacaaagcaaccctatgtcgaaggtggtttgtgtcaccggagccagcggcgccatcggatcatgggtggtcctactcctcctccagcgtggttacaccgtccatgccaccgtccaagatatcaaggatgaaaatgagacgaaacatttggaggaaatggaaggagcaaagagtcatctccatttttttgaaatggatcttcttgacatc

SEQ ID NO: 163633 - DNA, 242 bp, Glycine max
atccttccatctagcagcaccttaggatggcatagccttaaagttaagggcgaggttcaaacgaagaaaggcttatggtggatacctaggcacccagagacgaggaagggcgtagtaagcgacgaaatgcttcggggagttgaaaataagcgtagatccggggattcccgatataggtcaacctttcgaactgctgctgaatccacgggcaggcaagagacaacctggtgaactgaaacatc

SEQ ID NO: 163634 - DNA, 244 bp, Glycine max
acctttcttatattcaggaaagtaagatcatctgcatcgccgacgcttccaacaataacaatggccgataatgcaacaacgcaaggaagcaacaccctattttctccttacaagatggccaaattcaacctctctcatagggtggtgttggctcctatgacaagatgcagagcgttgaactggattccacaggcagcgcttgctgaatactacgctcaaagatcaacaccaggtggatttctca

SEQ ID NO: 163635 - DNA, 245 bp, Glycine max
caaaaaggggttcaattctagctagttctattacgtcgtccgctaccatgaacatggcgatcgcgcttctgttcatggttttcgcagtttcatcagctttagacatgtcaataatatcacacgacaacgctcatgcggatagggccacgaggcgcaccgacgaggaggtgatgtcaatgttcgaggagtggctggtgaaacacgacaaggtgtacaacgcgctcggtgagaaggagaagaggttt

SEQ ID NO: 163636 - DNA, 243 bp, Glycine max
atcttccttcccctctctcattcaagacaggcctgtttttgctgcccctgcccccatcatcaccccaactgtgagagaggatatggcaaaggaatacgagaaagctattgaagaacttcagaaattgttgagggagaagagtgaactcaaagcgacagctgctgaaaaagtggagcagataacagcttctctagggacatcatcatctgatggcatcccatcatcagaagcctcagacaggat

SEQ ID NO: 163637 - DNA, 243 bp, Glycine max
atcgagataactagaaacagtgtgatgaaaatgaaggtccttgttttcttcgttgctacaattttggtagcatggcaatgccatgcgtacgatatgttccctctccgaatgaacactggctatggtgcccgtactccggaggtgaaatgcgcaagttggaggcttgctgtggaagcacacaacatctttggctttgagaccattcctgaagagtgcgttgaagcaacaaaggaatacatccat

SEQ ID NO: 163638 - DNA, 245 bp, Glycine max
cctcgagccgattcggctcgagcttatggtggatacctaggcacacagagacgaggaaggaccgggtaagcgacgaaatacttcggggagttgaaaataagcgtagatccggggattcccgatataggtcaacctttcgaactgctgctgaatccacgggcaggcaagagacaacctggtgaactgaaacatcttagtagccagaggaaaagaaagcaaaagcgattcccgtagtagcggcgagc

SEQ ID NO: 163639 - DNA, 228 bp, Glycine max
  unsure (1)..(228): unsure at all n locations
ctcaaattctgaggtacagaaatncgaatttgagcttcttagattggattcacgcccagangtcccatgtgaaagccttgaatggttggctggtaagatgtctattatacgaacccgaagaagtacccgatgattcaactcccttctcacctagcaagattggggcaccacctgtgtttgtgatctgtcacaaatggtcaagggcagtggataatctctcagagaaga

SEQ ID NO: 163640 - DNA, 246 bp, Glycine max; identical to SEQ ID NO: 119271

SEQ ID NO: 163641 - DNA, 241 bp, Glycine max
ttgtgagctataagctagtttatcgtgaggagaatatgaagttgtttgttacctttgttgctgcagtagttttggtagcatggccatgccatggcgcaggctaccaaaggttccctctccgaatgaaaactggctatggtgagcgttcttcggaggtaaaatgcgcaagttttaggcttgctgtggaagcacacaatatccgagcctttaaaaccattcctgaagagagcgttgaaccaac

SEQ ID NO: 163642 - DNA, 243 bp, Glycine max
gcatggagagggaggaagatgttaaggttggagcacagaaattctcagagaggcaagcattggggacaggagctcagggtgacaaggactacaaggaggcaccaccagcacccttgtttgagccaggggagttaaagtcatggtctttttacagagctgggattgcagagtttgtggccacattcttgttcctctacatcactgtcttgactgtcatgggtgtcaacagggcacccaacaagt

SEQ ID NO: 163643 - DNA, 243 bp, Glycine max
tttcaagtaacttaaggtttcaaacctaggaagttggaagtcatggcagcaacattgatggcagcaacaacaagttctggtactcttaaagcaactcctttccttggccaaggcaagggtgccaatgccaatgctcttagggatgttgtctccatgggaactgggaagtacaccatgggcaatgatttgtggtatggaccagacagagtgaaatacttgggacccttctcagctcagacccct

SEQ ID NO: 163644 - DNA, 243 bp, Glycine max
gtagtaagagccttatttgaacatctatcgtatccaaaaacacaagtttggaaaaacgttaattgtgggaaacaaaggaacagaacaatgagcgggaagccagtgagacctcgtacccgtgtgggaaagtacgagctgggaaaaaccattggtgagggaagctttgctaaggtcaagtttgctaagaacgttgagaatggtaaccatgttgccatcaaaatccttgatcgtaaccacgtcctc

SEQ ID NO: 163645 - DNA, 242 bp, Glycine max
ctcaatgaagggagttacagtgaaagttgaagaaacaatggcgtatgctaatgctgcttcaactagcccagcaacatcttcaaacctctccccgcaacccatggaagggttgcacgaggtgggtccccctccgtttctcaccaaaaccttcgacgttgtggaagacccatccaccaacgacatcgtttcgtggagcagagcccgcaacagtttcgtcgtttgggactctcacaagttctcta

SEQ ID NO: 163646 - DNA, 133 bp, Glycine max
gcactattcaaataggagcattagctatgtttgttaatgtcacattatgttatgtgggtaagtcacctaagacactccacgtacctacgttgttgtctcttaccggctttaataaatcttctgcccttgttcc

SEQ ID NO: 163647 - DNA, 244 bp, Glycine max
caatttcattgctcagagttcccaaattctccccaagagataaaatgtctctaatcccaaagggcttcggtggccggagaaacaatgtgttcgatcctttctcactggacgtgtgggatcccttcaaggattttcctttcccaaatacgctttcttcagcttccttccctgaattttctcgggaaaattcagcatttgtgagcacccgtgtggactggaaggagaccccagaggcgcacgtgtt

SEQ ID NO: 163648 - DNA, 240 bp, Glycine max
cttcttcagtggtggaagctactagaacactagtttgttgagcactgcgatgaggaagtggacggttgcttccgctctccttcttctctctctcctctttctctttgcagatcaaggtcgaaagtttcaggcgaatgccgagggagattccgacgagcttgtagatcctccgaagtggaggacaagatcggtgctgtgcctcatggcctttccaccgattcagatgtcgtcaagagggag

SEQ ID NO: 163649 - DNA, 238 bp, Glycine max
cacttgcaaactagttttgttttgggaacatcatcacattacattagattggtggtaatggcagcgtcactacaagcagcagctactttcatgcaacccaccaagttgagcaggagcaacactttgcagcaaaagtctactcagtccatttccaaggcttttggtttggaacctgttggagctaaaaaggtcacatgctcccttcaggctgatcttaaggacttggctcacaagtgtg

SEQ ID NO: 163650 - DNA, 239 bp, Glycine max
ctcataacacaaagcacaaagcaaagctcatccttgagttaaaaaatggcagcagcttcttccatggctctctcatccccatccttggctggcaaggccgtgaagctgggcccatcagccccagaagtgggaagggtgagcatgaggaagaccgtcaccaagcaggtctcctcaggaagcccatggtacggcccagaccgagtcaagtacttgggcccattctctggcgagcccccgtc

SEQ ID NO: 163651 - DNA, 235 bp, Glycine max
gcagtgctcaccagcagggcaattttccaaaggatgaagaattatactatctatgctgtgtcaatcaccattcgtatagtgtttggtttcatgtttattgcattgatttggaaatttgattttgcacccttcatggtgttgattattgccatactagacgatggtaccatcatgacaatatccaaggatcgagtgaaaccatctccaatgccagacagctggaagctgagggaga

SEQ ID NO: 163652 - DNA, 239 bp, Glycine max
ggtccgcaaaattgaatgttccgaaatggaggacgagaagccggagattctgccgccagatccgccgtatacggcgacgacggtggcggattgcctgtacttcgaggcttccgactcggtgccccggctgcacacgacggactcgagctgctccgagcaggtggtgtcggcggagtttgcgagcgaggtgcagagcgagccgaagaggggcaacaacaacaacgagtttgcatataatt

SEQ ID NO: 163653 - DNA, 229 bp, Glycine max
gaacaagcctcagccaaaaccatggttaagcataacaatgttatcccaaacggacacttgggtaagcactggcagaactatgtgaagacttggttcaatcagccagcacggaagacaaggagacgattggctcgtcagaagaaagctgtgaagatattccccagacctacggctggacctctcaggcccattgtacatggtcaaactttgaaatacaacatgaaagtga

SEQ ID NO: 163654 - DNA, 245 bp, Glycine max
gcagggtctaatgggtaactgcctagattcttctgccaaagttgatgcagctcagagctccagatccacttctgcatcaggaatctcaaaaactactccttccagtttatctattccatcatacagtgaaaaaagcaatgcctcaagtcttcccacaccaaggtccgagggtgaaatcttgtcttctcccaatcttaagcccttcacattcaatgagctgaagaatgccaccagatatttgcgcc

SEQ ID NO: 163655 - DNA, 240 bp, Glycine max
caagcttgagaaagaatctgggttcttttttaacatgaagtactttgaggaaaaagtgcaggctggcgagtgggaagaggttgagaagtacttatcaggatttaccaaagttgatgataatagatactcaatgaaaatattttttgaaatcaggaaacagaaatatctggaagcacttgatcagcaagacaaggcaaaggccgtggagatattagtgggtgatttgaaaatgttctccac

SEQ ID NO: 163656 - DNA, 235 bp, Glycine max
gaagaatcactcccttatccatttccacaccacaccatggccacaaccaacgctctctcttcagcctccattctacgctctcccaaccgccagtctctgacccgaagagcgaaccataatggaagagtaaattaccggaaaccggataaccgtttctccgtgaaagcctccgccaaagagattgcctttgaccagcattcccgctctgctatgcaggccggcattgacaagctcg

SEQ ID NO: 163657 - DNA, 240 bp, Glycine max
  unsure (1)..(240): unsure at all n locations
aatccaacaggcgagctcttagggagctgcttttcactgctcctggtgttcttcaatatctcagtggtgtcatcctctttgaggnaaccctctaccagagcacagctgcaggcaagccctttgtgaatgtcttgaaggaagctggtgtgcttcctggcatcaaggttgacaagggcacagtcgagcttgctggaactaanggagaaaccaccantcagggtctagatggccttggtcagc

SEQ ID NO: 163658 - DNA, 269 bp, Glycine max
gctgccagtaatcatatgcttgtctcagagattacgccatgcatgtgtaagtatgaactaattcagactgtgaaactgcgaatggctcattaaatcagttatagtttgtttgatggtatctactactcggataagcgtagtaattctagcgctaatacgtgcaacaatacccgacttctggaaggggtgcatttattagataagaggtctacacaggctctgcctattgcgtcgatgattcatgatgactcggcggatcgcacggcctt

SEQ ID NO: 163659 - DNA, 276 bp, Glycine max
ccctctttcaccgcagtgttagggtttctgaagcctccaaccagaaagagacggcaatggctcccaaacatcctagtacgggtttgtttgttggattgaacaagggtcacgttgtcaccaagaaggagttgcctccacgcccttcatatcgtaaggggaaaacaagcaagcgagtgcactttgtgaggaacctcattcgagaggttgccggctttgcagcttattgaaagcgaataactgagttgctcaaggttagaaacagataagagggcactg

SEQ ID NO: 163660 - DNA, 285 bp, Glycine max
ctctttaccagttgccacactacaccgagattccccctaaacccgtttgcgttgttgtttgcgaagaaatggcgactaagaggagcgtgggaacgttgaaggagggtgatttgaaagggaagagggtgttcgtgagggtcgatctgaacgtgcctttggatgacaaccttaacatcaccgatgacactagagtccgtgctgctgttcccaccatcaagtacttaactggtcatggagccaaagtgatcctttctagccacttgggacgtcctaaaggtgtaacac

SEQ ID NO: 163661 - DNA, 283 bp, Glycine max
atcttggagctcttcaagagcgtattacaacaaccaagaagggctcaattacctctgtccaagctatctatgtgcctgctgatgacttgacagatcctgctcctgctaccacttttgctcacttggatgccacaacagtgttatcacgacagatctccgagcttggtatctatcctgctgttgaccccttggattctacatctcgtatgctttccccccttattttgggtgcggatcactatgaaactgctcgtggtgtacagaaagtacttcagaactacaa

SEQ ID NO: 163662 - DNA, 228 bp, Glycine max
tgtgaataagaccttggatgctctaaaagatgaattgcttgtgccagtgtcatggaggatcgaaaagaataagggtatggttcaacaaaacgatggttcgtggaagctgatggatcatgaagaagatgacttttgatccttaattaattgagacttgagaatgcctttatttcgttaagttacacatttgaggttgatgtcgattggagacaatattaactaattgga

SEQ ID NO: 163663 - DNA, 278 bp, Glycine max
ctcgagccgctttttgattcctaaattctctaaaattcgaaattctaatttcgttacgggacagagattgtttgtgtgtgagtgcgtatggctggaaaaggcgagggtcctgctatcggaatcgatttgggaacgacgtactcttgcgtcggcgtgttgcaacacgatcgtgttgaaatcatagccaacgctcagggtaacagaactaccccatcctacgtggctttcaccgacacagaacggttgatcggcgatgcggcgaagaaccaagtcgctat

SEQ ID NO: 163664 - DNA, 282 bp, Glycine max
ccacctttcccttcccccaacaacctcaatcactctctttcgctaaacctctcaaactcatgtctcaacctttgaccaccaactctgttcttgttgaagaggctgctgctgatggtgattcctccgccgccgcacctcccctcttcgattatcatcgtatcgaccaaaaactgctccaaaacatagtttacgatgctcttgtctggagcaccctcaactgcctccttgttggtgacaaatctgttcagagatcatgaagagttcctggtgtcggcctggtac

SEQ ID NO: 163665 - DNA, 276 bp, Glycine max
cgctttttctgctccttactagaaatgctgctttcttcttcttcttctcgcggttatcttcactaacaacttctctctctctctccgtctgtgcattttccattgttgaagaaggagaaaggtcttgaggtgtggggtcggtgatggacggtggagtgaactacaaccctcgcactgtggaagaggttttccgggacttcaagggtcgtagagccggcatgatcaaggctctcaccactgatgttgaagaatttttccagcagtgcgatcctgaaa

SEQ ID NO: 163666 - DNA, 290 bp, Glycine max
catcaaagtactcaaattagcatggctgtcatggttgcattcttgaatttgatcatcatcttttcagtagtctctacaacaggcaagtcactgagcttaaactactatgcaaaaacatgccctaatgtggagttcattgttgccaaggcagtaaaggatgccactgctagggacaaaactgttccagcagcaattctgcgaatgcacttccatgattgtttcgttcgggggtgtgatgcctctgtgctgctaaattcaaaaggaaacaacaaagcagaaaaagacgggcc

SEQ ID NO: 163667 - DNA, 268 bp, Glycine max
gcgaggagatagatggctgggaaggagcaggatgtgtcgttgggagcgaactagttccccgagatacagtcaattgggacggcggcgctgagccaagacgacggcaaggactaccaggagtcggcgccggcgccgctggttgacccgacggcgtttacgtcatggtcgtttttcaaagcaggggtagcagagtttgtggccacttttctgtatctctagatcactgtcttaaccgttatgggattctccggggctaagtctaagtgta

SEQ ID NO: 163668 - DNA, 270 bp, Glycine max
cttttcttcttgtctttgttcagggcaccatcagctataattcataggatttctaccatccaaagaccattcctttgggggggtaaaccagatggtcggtagattgcttggatgtcttggcgccagtgctgcactcctaagcatatgggacgattggggatcagagatatcccaagtcttaacaaggctttgctgttcacatggacgtggatgatgttccaccaaccagaccagctttggactagaatcctgaactctaagtataatggc

SEQ ID NO: 163669 - DNA, 278 bp, Glycine max
cggctcgagaattccttgatgacagtcacttcacgaatgtggagtcagcatttgtcgcattgggcgcaaacagtgcattctgcctatagagtctagcgaatctactgacaataggatgttgtgtgatgtagttgactaaatgtggtgtgatgttaactgagagagagaaatctgaatttagaactagggatctggtacaggatctttgcaagcttgttaaaggccctattgaaccagttcgagatttagtgtctggatatggatctgcacctggtgct

SEQ ID NO: 163670 - DNA, 270 bp, Glycine max
tatctgtgacgagcatcatggcctcgagagcagtgctattgttggctatgtgtgtgcttccggccatggttgtggccattcgcccagcaaagaaccctttttgcgtgaagggtcgcgtctactgtgacccttgccgtgctggttttgagacctcagcaaccacctacattgccggtgctgagattatgttgcaatgcaagagcagggttagcaacgaggttgtgtacaccaagaaggggtacactgactcaactggagcatacacaatgt

SEQ ID NO: 163671 - DNA, 289 bp, Glycine max
attctgtggacccaaaggaaaagcaaaatgcttttgatatcggccagaaatacatagatttggctgcatctctggagggactatctccacatgtaccactatataaagtaacagaagggaatgaaccttgctttttcacaacatacttttcatgggatcatgcaaaagctatggttctggggaactcatttcagaaaaaagtgtcactactctttggatttggccatgctgtggaggaaaagtcgaatgggtcaagtctagggggaccaagacaaagagcagaagcctt

SEQ ID NO: 163672 - DNA, 282 bp, Glycine max
aaaaaaagtagatggcaggtaacatagcaagaaaatggagagacctcagtggcagaagccaactggaaaggtctgctagatcctctagacattgatcttcgccgttacataatacactatggacaacttgctcaagctacatatgatgctttcaactcagaaaagacatcaaagtatgccggcaacagccgataccctaagaaagatttcttttccaaagtaggtttggaaaacggaaaccctttcagatacgacgtgaagaagttcctctacgcaacttcc

SEQ ID NO: 163673 - DNA, 268 bp, Glycine max
attaagaagcgaaattcagcactttcgcaacacgatgatgaccttgaagtggacattgatagtgtggatactgagactctctgggagcttgatagatttgtgcccaactataagaacagtttgagcaaaaacaagaggaaggctgagcttgctattcaagcgagagcgacaagctgatgcgaatgcccagcagaatagtcaggcaccagttgaagttgagattccgacagcaacaccagcaggtgacagacatgttcccccgtcgttg

SEQ ID NO: 163674 - DNA, 279 bp, Glycine max
tggtgatgccaaattgatgcgtgaaaggacacacctgctgttggcttgttgttcaaggatggcaatttgtaagatagatgtgtggcgaattgaatgtggaatcccttctggattgccgctcacagttatttgcaatagcatttttagtgagatgctcattagatatagctatgaaaaattactgcgccaggctaaagctccaagtatgattttacaatccttcataaattgtgtttcttcgagtgtgtatggtgatgataacttaatctagagggcatg

SEQ ID NO: 163675 - DNA, 271 bp, Glycine max
  unsure (1)..(271): unsure at all n locations
gcgatctgtgagggctatgttaagcattccccagaagttttctatgctggttctttgtggattgncattgtacaagcttttaatgatgaagacccccaagggcggcgaacccttgggttgtttcttcaccgtcggaaggcagagataactgatatacatagataggtgcatatgtatgttgactcgcgtgaaaaggtgactgcacgctaccagttgactgttccatcgaagagggaaatgacggtgtttggaagctttaaacaaacaggca

SEQ ID NO: 163676 - DNA, 275 bp, Glycine max
ctctctaattacatttctaatctcattctccttctgttcaaacactctcatggcatcagataagaagattaggatcggcatcaacggatttggaaggattggccgtttggtggccagggttgcccttcaaaggaatgatgttgaacttgttgctgtcaacgatcctttcatcaccactgattacatgacatacatgttcaagtacgacaccgttcatggccagtggaagcattttgatgtgaaggtgaaggactctaagacccttctctttggtg

SEQ ID NO: 163677 - DNA, 272 bp, Glycine max
ctcgagccggtcgctactaagagttgctgcttcttcagccactccgcacctcgcagcctctgtgccctcaacaaccatggctgaaatcgaaactaccgttccagatcccacccaaatcgacgtcaaactcttcaatcgctggagcttcgaggatgttgaggttaatgatatgtctctggctgattacattggagtgtccccatcaaagcatgctacatatgttcctcacactgctggtaggtactcagtgcagaggttcaggaaagcgcagt

SEQ ID NO: 163678 - DNA, 270 bp, Glycine max
gttcatttctacacatccctagctctgtcgttccgtcgttgacgatggcgtttcgggtgcgaaccctgacctccgctctctctttcttctctctctcttgtccatcgcttccgccaatgtcttcttcgaagagcgtttcgatgacgggtgggaaaatcgatgggttaaatcagattggaaaaaagatgagaacgtggctggggagtggaaccacacctctggtcaatggaatggagacgctaatgacaaaggtattcaaaccagtgagga

SEQ ID NO: 163679 - DNA, 271 bp, Glycine max
ctcactcacaactcagtgaaagagaatccgaggcgaagagaagagaaaaattaagatggaggggaaggagcaggatgtgtcgctgggagcgaacaagttcccggagagacagccgattgggacggcggcgcagagccaagacgacggcaaggactaccaggagccggcgccggcgccactggttgacccgacggagtttacgtcatggtccttttacagagcagggatagcagagtttgtggccacttttctgtttctatacatcactgtc

SEQ ID NO: 163680 - DNA, 275 bp, Glycine max
  unsure (1)..(275): unsure at all n locations
ggaagaggaggatctggtgttgtgtacagaggaaccatgccaaagggagaggaagtggcagtgaagaagctcttaggaaacaacaaaggatcttcccatgacaatggcctctctgcagaaataaaaacattggggagaatcaggcacaggtacattgtgaagctactagcattttgttcgaacagagagaccaatttgcttgtttatgattacatgccanatggcagcttgggagaagtcttgcatgggaagaggggtgagtttctcaagtggga

SEQ ID NO: 163681 - DNA, 271 bp, Glycine max
caaaaatcttctatctaatgaccggcagctaacgttggcgaggacagttgaagccttgattgaaaggaggccaaaccctgaaacagatttatacctctcgtttgatccccgtagctccaaagtctggttcgggagcaagtagcagccatatgaaaggaccactttaaggaagcaattgtgttcatgattggtggtgggaattacgttgaatattgtagtctgctagagccttgacaacatcagcaacctgccttacatattatatatggca

SEQ ID NO: 163682 - DNA, 275 bp, Glycine max
cttctttccaaatcccaactactactcacactcactgcagatctcaatccatggctaccatcgttagcatcaaagcccgccagatctttgacagtcgtggcaatccaaccgtcgaggtggatttgacatgctccgatggtacttttgctagagctgctgttccaagtggtgcatccactgggatatatgaggtccttgaattgagagatggaggatctgactaccttggaaagggtgtatcacaggctgttgacaatgtgaacaccattattgcc

SEQ ID NO: 163683 - DNA, 274 bp, Glycine max
ggggtgttagatagacaagaggagtttgataatggcaacgatcatcgcggttcacgtggagttcctggagtttccagcggtggttacttcaccagcctccggcaagacctatttcctcggcggcgcacgggagagaggattgacgattgatgggtagttcataaagttcacaggcataggagtatacttggcggataatgcggtgccatcactcgccgctaagtggaacggtaaaacttcagaggagttagttcacaccctccacttctacagg

SEQ ID NO: 163684 - DNA, 275 bp, Glycine max
cagaggaggagctcaaagaggctttcaaggtttatgacaaagatcaaaatggctacatgtcagctagtgagttgagacacgtaatgatcaatctaggggaaaaactaaccgatgaggaggtggagcagatgattaaagaagcagatttagatggtgatggccaagttaactatgatgacttcgtcaagatgatgatgaccgatcgatgaaacactctcacctaattggattggacagatttgttattcaaaattcattggcttgtccaacctccc

SEQ ID NO: 163685 - DNA, 275 bp, Glycine max
gtagcttataaaatctttagctaaatttgagcatcagagtcatggatgcttgtcagttcacaactatcatttcaggcattcatgccctgctagcatgcgccttgttttatcaatttaagataacactttgtggcaatacaatgaagatctgtagggcacctcaagctgcaggtgcatggcctatcattggccatttgcacctcttcaatgctcatcaactcacacacaaaacacttggcataatggctgagaaacatggttcaattttcacaata

SEQ ID NO: 163686 - DNA, 271 bp, Glycine max
attttggaattgtatttccatctgaaaaaatgtcacaagtggctctacaaggaggcaatgttaaaggatgagcttcgcagtatggaaagatcaaagaaaagggaaggtgttgatatgacatatttgaaaaatgttatcttaaagctgcttgagactggtgaagttgaggtattgctaccagttattggaatgctgcttcagtttagtccagaagagatacagaagtgtcaacaggcatatcacaactccacagatgttccaccaccaaatc

SEQ ID NO: 163687 - DNA, 262 bp, Glycine max
cggaaatggactcaacttctccggcgtttcgctttaccgcggtaacgctttgccggattcttctttgcctttggtttatgcagggaatgtgagtaatggtgctatgaatgggaacttgtgtatcacgggaacgttgtctcctgagaaagttgctgggaagatcgtgttgtgtgaccgtgggttgaccgctagggttcagaaaggctcggtggtgaaatccgccggagcgttggggatggtgctgtccaacaccgccgctaac

SEQ ID NO: 163688 - DNA, 271 bp, Glycine max
ggctttcagagttggaggagcgggaggaggaaatgcctcttctggcatgggtgttgctgagcatagcgtaacacgttcctggaattgcagaggaagaaagttcatcgctatgtgatttttaaaattgacgagaaaaagaaagaggttgttgttgaaaaaactggaggccctgctgagagctatgatgatttcactgcatccttgcctgaaaatgattgccgatatgctatctttgactttgatcttgtgacatctgagaactgcctaaaga

SEQ ID NO: 163689 - DNA, 270 bp, Glycine max
ttccaccgcaatggccaccgctgccgagaaactctccgctctcaaatccgccgtcgccggattgaacgaaatcagtgagactgagaagaacggattcatcagcctcgtcggccgctatctcagtggcgaacgcagcatgtggaatggagcaagatccagacgcctacggacgaagtggttgtgccttacgacactttggcgccaactcctgaaggttcttcggaggtgaagaatctattggacaagcttgtggtgttgaagctaaatgga

SEQ ID NO: 163690 - DNA, 273 bp, Glycine max
gccatgaaccacacagatttcattatcaccagtaccttccaggagattgctggaagcaaggacactgttggacagtacgaatctcacacagccttcacccttcctggactctaccgcgttgtgcatggtattgatgtctttgatccaaaattcaacattgtctcccctggagctgatcaaaccatttacttcccccacactgaaaccagccgtaggttgacatccttccaccctgaaatcgaagaactcctttacagctcagtggagaatgaa

SEQ ID NO: 163691 - DNA, 264 bp, Glycine max
attcattcaagattcagcaagtgcgtttcggaagcagagaccgaaatacttcgagatggcccgtacaaagcaaactgctcgtaagtcaactggaggaaaagctcccaggaagcagcttgcaaccaaggctgcacgtaagtctgctccaacaactggtggtgtgaagaagcctcatcgttatcgccctggaactgttgctcttcgtgagattaggaaataccagaagagcactgagctcctaatcaggaagcttcctttccagag

SEQ ID NO: 163692 - DNA, 266 bp, Glycine max
ggctttgtgagggccaggttaagcattccccagaagttttctatgctggttctttgtggaaggtcagtgtacaagcttttaatgatgaagacccccaagggcggcgaacccttgggttgtttcttcaccgtcggaaggcagagataactgatatacatagaaaggtgcatatgtatgttgactcgcgtgaaaaggtgactgcacgctaccagttgactgttccatcgaagagggaaatgacggtgtttggaagctttaaacaaaca

SEQ ID NO: 163693 - DNA, 271 bp, Glycine max
atcatctttagttcttcagtaatttattgtgggattctattctaagattttgagaatgtctagctgtgggtgtggaagcagctgcaactgtggcagcaactgcggttgcaacaagtactcttttgacttgagttacgttgagaagacaaccacagagactctagttttgggtgttgggcctgtgaaggcccaattggagggtgctgaaatgggtgttgcatctgagaacggtggctgcaactgtggatcaagctgcacctgtgacccatgc

SEQ ID NO: 163694 - DNA, 267 bp, Glycine max
agtgagtcttgggagtgagtcactcttcctgcagaacccagatctgtagacaatatgggaagcactggtttgctacatttgatatgccttgtcattgctttagtaagtgtgtcgcttgtgcaagcagaagatgcgtataagtatttcacatggacggtgacttatgggactctttatcccttggctagtccccagcaggttattcttatcaatggtcagtttcctgggcctagacttgacttggtaactaatgaaaatgtaattctc

SEQ ID NO: 163695 - DNA, 267 bp, Glycine max
aaacccctgaattgatgccattgagccatgttcttgcaacaaaactcggtgctcgtctcaccgaggttcgcaagaacggtacctgcccttggctgaggcctgatgggaagacccaagtgaccgttgagtattacaatgacaatggtgccagggttcctattcgtgtacacaccgtgctaatctccacccaacacgacgagactgtcaccaatgacgaaattgctgctgacctcaaagagcatgtgatcaagcctgtgatcccagaga

SEQ ID NO: 163696 - DNA, 266 bp, Glycine max
ctaacctcactcgtattagcgttgctgtgtgagagaaagagaaatggcaacaagcgaagaagtggttgccgcggcgccggaggcagccgcgccggaggagggttgaagcacaaactggagagaaaatggacgttttggtgcgacaaccaatccaaacccaagcaaggcgctgcttggggaacctctcttcgcaaggtctacaccttcgacaccgttgaagagttctggtgtttgtatgatcaggtattcaagcccagcaagttgcc

SEQ ID NO: 163697 - DNA, 283 bp, Glycine max
atcggagggaggagcaagttgagcagaggaaaaacaagcgaaaagagaaagaaaagaagagaaaatggtgggagaagaagtagtaccaatggacgacgaagcgaagaggatgcgagatctgctatcgagtttctactcccctgaccttccatctccaacaacacctccaaacacgcttctctcgacgacatcaattctacttccttcgatcccgatcagtacatgagcatcctggcacacaagtccaatttggaaggcctgctccaacgccacgttgaaatgg

SEQ ID NO: 163698 - DNA, 273 bp, Glycine max
tcgagctgtctgctgttagatctgtacccgcctagccattgatttggaaaagtccaacttcaaggatgagtaagcttcagagtgatgctctaagagaagctatctcaggaatcatggctgattccaaggaaaagaacagaaatttgtggagaccattgaactccaaattgggttgaaaaattatgatccccagaaggacaagcgtttcagtggctctgttaagttgcctcatattcctcgccccaagatgaagatttgtatgcttggagatgc

SEQ ID NO: 163699 - DNA, 271 bp, Glycine max
gcagacttaacaacagcacaaagcgggttactgtctgttcaagctaccatctctctctctctttcttagtgcctccttgccagaagttaaaatggcccaagaaactttcctattcacatctgaatcagtgaacgaggggcacctgacaagctctgtgaccagatctccgatgctgtgctcgatgcatgcttggagcaggaccctgacagcaaggttgcctgtgaaacctgcaccaagaccaacatggtgatggttttcggagagatcacaa

SEQ ID NO: 163700 - DNA, 264 bp, Glycine max
cgggtgtactttcttgcgaaaccgagagagcgaaggggcaaacacaattttttttatcttcttttttattttttgtagagagagagagagagaaaatgttggggatcttcagcagttcagtggtgtcgccgccggaggagctggtggccgctggcagcagaacgccgtcgccgaagacgacggcggggaagctgctgaaccggttcgtggagagcaaggcgtcggcggtgtcgctgcaggtgggggaacacgtgcagttggctt

SEQ ID NO: 163701 - DNA, 267 bp, Glycine max
ttccaatctaaaatcaaccatgggttcagcagctgagactcagattactccaacccatgtatctgatgaagaggcaaacctttttgccatgcaactagccagtgcctctgtactccctatggttctcaaatcagctttgagcttgatctgttggaaatcatagccaaggctggccctggtgttcatctttcccccactgacatttcttctcagcttccaacacagaaccctgatgcacccgttatgttggaccgcattttgcggctc

SEQ ID NO: 163702 - DNA, 280 bp, Glycine max
ggtgcctcagatataattgctgtggatgtacgggatgaaaagctacagaaagcaaagacatttggtgctactcacactgtaaattcagcaaaggaagatcccattgaaaagatacttgaaattactggtggaaagggtgttgatttgctgtggaagccttggggaaaccacagacatttgctcagtgcacacaaagtgtgaaggatggggggaaagctgtgatgattggactggcacaagctggttctttaggagaggtggatataaatcggcttgttcg

SEQ ID NO: 163703 - DNA, 275 bp, Glycine max
cgaagaattacagacgaatatgcaaaaaaaactgaattgtgtgaatcgaaaactaaacattgctattgtaaaagttgcaaatgcttataaacaccctaatattattgcagaatttatagctggacaattaaagaatagagttcgtttcgtaaagcaatgaaaaaagctattgaattaactgaacaggcgggtacaaaaggagttcaagtacaaattgcaggacgtatcgacggaaaagaaattgcacgtgttgaatggatcagagaaggtagagt

SEQ ID NO: 163704 - DNA, 277 bp, Glycine max
agcaacacaagcaccagtgtgaataccctaaatcggagtttcagtttcacccctcttttctcatctctaacatcatagtcctcagaggctagtcttcctattatcacaaacaatgtctgacagtcaagaatctgacaagaaattgagatatggaagatcaagaaattgatcaaggctctggaagctgctcgaggtaatggtaccagcatgatttctctgataatgcctccacgcgatcaaatttcccgggtcactaagatgttgggagatgaatttg

SEQ ID NO: 163705 - DNA, 272 bp, Glycine max
ctgttcttcgagcagcttcagctacgacacgccatcgccggaacgctgatggcggcggaggcagccgcggagcctgggcggcagtcggcggcgctggaacgggaagcggagggcggcggacgagaaggattagggttagattagagcacgtgcaggaacggaacggcacgtggcgcgtggcggtgagggagaatcaggtgctgcgcttggacatggatagcatgaggacgcgagtgcatcaactggaacgcgagtgttcctctatgaagaga

SEQ ID NO: 163706 - DNA, 273 bp, Glycine max
tgtcgcagcaaaaccaagccacccactaacttgtttggtccaagacatggctctgatcctgcatgctaccaaaacaaacaagaatgccttcaagactctgattgcggcagagtacagtggcgtccaagtggaattggccctaatttcgagatgggtgtctctaacaaaactcctgaatttctcaagatgaatcctattggaaaggttcctgttttggaaacgcccgatggtccagtctttgagagcaatgcaatcgctcgttacgttgctcga

SEQ ID NO: 163707 - DNA, 267 bp, Glycine max
cgcaggcatcccataaaacctgtttctattgaccatgcattcccatattgagagaattctatggagcgaggaccaaatttctcgccgtgttttcgagctcgccgccgaaatctctgacgacttcggcggccattctcggcgcccgtggtcgtcggcgtggccactggcgcgttcctcttcttggctgaccttgttcgcaaaatagatctctccatcgccgttgatttcgtccgagtcgaatcctacggttccggaaccgtgtccaat

SEQ ID NO: 163708 - DNA, 266 bp, Glycine max
cattagttagggtttattctccaagaaaagcaatgagtgcgtccaggttcatcaagtgtgtcactgtgggtgacggtgccgttggcaagacttgcatgctcatctcctacaccagcaacacttttcctacggactacgtgccaactgtctttgacaatttcagtgcaaatgtagttgtggatggaagcactgtgaatcttgggttgtgggatactgctggccaagaagattacaatagattaagacccttaagctatcgtggagca

SEQ ID NO: 163709 - DNA, 264 bp, Glycine max
ctgcaattccctttggagggtacaaaatgagtggtcaaggcagagaaaaaggagagtatagtctcaaaaactacttgcaagtgaaggctgtcgttaatcccttgaagaacccagcatggctttgagaaacactatgccttccttggatgatcaactatcagtgcctcaatgataatgatgataaaaacaaaatccttttttttttttgttacacgagttgagttatgacattgtaaacataatagtaaagaatcttgtcaatga

SEQ ID NO: 163710 - DNA, 269 bp, Glycine max
ctcaacaacttctgctacttcctactccaaccgcacttctgttccgcaattatcatgggcaaggtcaagatcggaatcaacggatttggaagaattggccgtttggtagccagagtggctctgcagagagacgatgtgaactcgttgccgttaacgaccctttcatcaccaccgattacatgacatacatgtttaaatacgacagtgttcatggacactggaagcatcacgatgtcaccgttaaggacgagaagacccttctcttcggt

SEQ ID NO: 163711 - DNA, 275 bp, Glycine max
cctcgagccgattcggctcgaggttacatctcgtgaattgttacaatctgttaaccattttccattgcagatggcttcgtcacttctctccgcagcttcgcactctgtctcaccctcatgttctctgtccaccacgcacagggaaagcccatgattagagacaacactttgggtttccacagaggacccaattccttctctagttcaaggtctagaggtcggatctctatggctgttgcagttaacgtttctcggtttgaaggcatacctatggc

SEQ ID NO: 163712 - DNA, 274 bp, Glycine max
ctctctctccattccgtagtatccctctgttcgacccttttacttagcattccctgtttccggtattcgctccctttttttttctgcattctgtctggttttacttagatctctgtcccgcaccagatctggtgcagggtgagaggttgggttcattaattttgtatcaatcttccttctgagcggtaggcgtggggataccagagtcttttcggggaaccagaaaagggtctctccgttttccataaaactcccaacggcttcctttgaaggg

SEQ ID NO: 163713 - DNA, 275 bp, Glycine max
cgcatacactctgctcgtagggtttctccacctagagggaaatggctcccaaaccgcctagtacgggtctgtttgttggactgaacaagggtcacgtcgtcaccaagaaggaattgcctccacgcccctcagatcgtacggggaaacaagcaagagggtgcactttgtgaggacacctcataagagaggtagccggttttgcaccctatgaaaagcgtataactgagttgctgaaggttgggaaggataagagggcactgaaggttgcaaagaga

SEQ ID NO: 163714 - DNA, 277 bp, Glycine max
ccgattgctagaatggaatttcgatgctcagtcatctcttttaccattctcttctctcttgctcttgcaggagagagccatgtccatgcatcgctagctgaggaagattattgggaagctgtttggccaaacactcccattccactgcactgcgagagcttctaaagcctctccctgcaggtgtcgaaatcgatgaactccctaagcaaattgatgatacacagtacccaaaaacattcttctataaagaagaccttcatccaggcaaaacaatgaa

SEQ ID NO: 163715 - DNA, 272 bp, Glycine max
cagtgactgacttttcgagaaagaaaaacaaaaatgagtttccgtcattccatcatgaacgctcttcccattctcctcttcttcctcttcgtttctgcattagtttctgcgaagaaaactggtgatgtgacggagctgaaattggcgtgaagcataaaccagtatcatgtgaagttcaggcacacaaaggtgacagagtcaaagtacactatcggggaaaactcactgatggaactgttttcgattctagctttgaaagaaataatccaatt

SEQ ID NO: 163716 - DNA, 270 bp, Glycine max
gtttcgggtgctctggaaccttgtttagttatgtaataaattaaatctgacttgtgcattccctttaagggagaagagcttaggaagctgattaatgcaccagcttacattgaatgcagttcaaaaacacaggagacgtgaaggcagtctttgatgcagccataagagttgtccttcaaccacctaagcagaagaaaaagaagggtaaagcacaaaacgcatgctcgatattgtgattcactaggtgttaacatttgactgccctttgtt

SEQ ID NO: 163717 - DNA, 264 bp, Glycine max
ctaaactcactcagtcctacgatacgattctcttccgcctcccttcccttcaactccacggcgcagatccgaggagtttgggaaaccctaattcattcctctttgcttcttctatctctattcctctaacaccatgatggcaggtttggctccagaaggatcgcagtttgatgctcggcaatatgcttctaagatgaatgaattgctttccgccgatggacaagaatttttcacttcatatgacgaagtctatgatagttttga

SEQ ID NO: 163718 - DNA, 262 bp, Glycine max
gtcttgctgcggtggtaactgtggttgcggaagctcctgcaagtgcggcaacggctgcggaggctgcaagatgtacccagacttgagctacactgagtcaaccaccaccgagaccttggtcatgggagtggccctgttaaggctcaatttgagggtgctgaaatgggtgtgcccgctgagaacgatggctgcaaatgtggaccaaactgctcctgcaacccctgcacttgcaagtgaggtgttgggagagcaagcttcaagc

SEQ ID NO: 163719 - DNA, 261 bp, Glycine max
attaattttctcatctttctcctcttcacaagtaacaataacaaaggcgatgacacaaattctactgcatgggaccctccaagtcacaatctatgagctggataacctcaaggctggaagtggtggtaatatttaaccaagttggtacataacatcgaagagactattggtattgggaaaggcattactaaactatatgcacccattgatctagagtaggcacgggtgggaagaaccagaatcatagaaaaggagcacaca

SEQ ID NO: 163720 - DNA, 272 bp, Glycine max
ccgagacccgaagcagccatggggatcgatctcaaggccggaggtaagagcaaaaagaccaaaagaacagcacccaagtccaatgatatctatctcaagctcttggtcaagctttatcgcttccttgttcggagaactgcagcaacttcaatgctgttatacttaagagattgttcatgagcaaggttaacaaacccccattgtctttgtcaaggttgattaagtatacgaaggggaaggaagataagattgcagtggtggtggggtctata

SEQ ID NO: 163721 - DNA, 268 bp, Glycine max
caaaaagaggcgcaagatgagtggtagggtttctgggaaggtgaagtggttcaatgatcagaaggggtttggattcataagccctgacgatggcagcgacgatctcttcgttcaccaatctcagatcaaatctgacgtttccgaagcctcgccgaaggagagtccgttgagttcgccattgaatctgaatctgacggacgcgcgaaggctgttgatgtcactggccccgacggcgacagtctccagggaatcagacgaggcggtgatg

SEQ ID NO: 163722 - DNA, 264 bp, Glycine max
ggattttctttgggaagacgttgagtctgatcgactcaacctcaaccttctcctggttcctgcattgcgttgctctctctatacattctaattcccaaatttctagggtttggtacagagagaaaaaggaacatagatgtctcagaacgggaagctgatgccaaatctagaccagcatagcaccaagcttctcaatctcactgttcttcaacgaatcgacccttttgtcgaggaaattctcatcaccgctgcgcatgtcacctt

SEQ ID NO: 163723 - DNA, 264 bp, Glycine max
caagctcaaagtgtggaatgtgccactactcttggtggtgtttgcatgttcactgcttggtcaagcttcagcttctgtgtcctatgaccataaggctatcatcatcaatggacagagaaggatacttctttctgctccattcactaccccagaagcacccctgagatgtggccagatcttattcagaaggcaaaggaaggaggtttggatgtcattcaaacttatgttttctggaatggacatgaaccttcacctggcaaatat

SEQ ID NO: 163724 - DNA, 264 bp, Glycine max
caaaacagagcaaagagagagtgtgtgaaaagtgaaacaaaaaacagaacaacaatggcgacacttaaggttcctcagcctcttccccccgttgcagatgattgtgagcagctccgaaaagccttctcaggttgggaactaacgaggagctgattgtatcgatcttggctcataggaatgctgctcagaggaagcttatcagagaaacttatgcccagacctatggagaagatctcctcaaggccttggacaaagaactcacga

SEQ ID NO: 163725 - DNA, 269 bp, Glycine max
aaaacctagtgcaccgtaagggttgtgaagcaggcagagaagagccatggtgcacgtttctttctaccgaaactatgggaaaacgttcaagaagcctcgtcgtccctacgagaaggagcgtttggacgccgagttaagctggtcggtgagtacgggcttcgctgcaagagggagttatggagggtccagtacgccctgagccgcatccgtaacaacgccagaaacctattgacccttgatgagaagaaccctcgccgtatcttcgaggg

SEQ ID NO: 163726 - DNA, 274 bp, Glycine max
ctcttcctcaccgattgctagaatggaatttcgatgctcagtcatctcttttaccattctcttctctcttgctcttgcaggagagagccatgtccatgcatcgctacctgaggaagattattgggaagctgtttggccaacactcccattcccactgcactgcgagagcttctaaagcctctccctgcaggtgttgaaatcgatgaactccctaagcaaattgatgatacacagtacccaaaaacattcttctataaagaagaccttcatccag

SEQ ID NO: 163727 - DNA, 271 bp, Glycine max
gagcgagcagtttcagacacagagagaggggtttgggattggagggattgacgctgcgtctcttcctcttctctttcgatccatccctcattcctaatcctccaatccaaccacctcagcctcacactcacatataacatatctgaacgcgtatcgtccctcctatggcttcaaagcgcatcctcaaggagctcaaggacttgcagaacgacccaccaacttcttgcagcgctggtccagtagctgaggacatgttccattggcaagcaac

SEQ ID NO: 163728 - DNA, 261 bp, Glycine max
gcaattttcatttttctctctcccttagtcaaagggattcatcgttcttcttcccaggttatttagaaaagcaaaatggtgaagatttgctgcattggtgctggatatgtggggggtcctactatggcagtcttgcacttaagtgcccatccattgaagtcgctgttgttgatatctctaaatcccgcattgcagcctggaacagcgaccagcttcctatctatgaacctggccttgatggtgttgtgaagcaatgccgtg

SEQ ID NO: 163729 - DNA, 262 bp, Glycine max
gtcagtcgcaggcttcctgcacgctactgaaaaagaaagaaaatccgtttggatgaatgcgcgaggggaagagagactctctctcctcttccttctacacgtttagagagagaaaggtttaattcgccactatcgaatggaacctcgggttgcgaacaagttccgtcttggccgcaagattggtagcggatccttcggcgagatctatctcggtacgaatactcagacaaatgaagaggttgcagttaagctcgaaaatgtc

SEQ ID NO: 163730 - DNA, 261 bp, Glycine max
caacaaggcagcagtgcgaagagaaagaaagagaagaagcgcttatcgaactcggacggaagcactgagttaactcagagcgagtgaaagtgttgctgcgtgatgtctggtggtatcgcccgtggacgcctaccgaggagcgcaagtcgtggcggaagaaccatccccatggttttgttgcgaaccggagacgctgcccgatggaaccgtgaacttgatggtgtggcattgcactattcccgggaagactgggactgattg

SEQ ID NO: 163731 - DNA, 276 bp, Glycine max
aaaaaaccctctctttctctctcttccaaaacctaattttcattttttctcttcaaacaaattttcaaaatgcgtgagatccttcacatccagggtggccaatgcggcaaccagatcggcgccaagttctgggaggtggttgcgcggacacgggatcgaccccactggaaggtacggtggggactcagagcttcagctcgagaggatcaatgtctactacaacgaagccagctgcggccggttcgtgccgcgcgcggttctcatggacctcgaacc

SEQ ID NO: 163732 - DNA, 264 bp, Glycine max
ctcgtttttactttgacggtttctagagagagaaagtttgttatagagagagaaagcgcgctgctgcttcttctgctgctgcttcgacagtgagaagagagagagaagcgctcttctccgtaccgtttctagagagaaaactgatggccggagttaatccgaacggcgtcgccgattttccggcgactccaacgcacggcggacagttcattcagtacaacatattcggaaacctcttcgaggttacggcgaagtaccgtcctc

SEQ ID NO: 163733 - DNA, 267 bp, Glycine max
cagaagttggtaatatttctattattggtaaatgggagaacactactgaaacttcactcgtgctgcgccatttggaggtgaaccatagagaggtagaagatgcgccattatctgttttgcatattcagtatcctaatggcctgaccatggagttcccaaagatacatttgctgtgcgtgacattctgaaaagattataccatttaccaccaaactttggtccaatagtggtgcactgcagtgcaggtattggtagaactggaacata

SEQ ID NO: 163734 - DNA, 259 bp, Glycine max
caaatatggcatactctcaacttcaaaaggtggaagctaatgtgcacatcaaggcttctgctgatcagttccataatgttttatgcaacaggacacaccatattgccaacattttccctggaaaagtacgtctgttgaaattcataaaggtgaatggggcactgagggatccgtcatctcctggaattatttacatgagggcaaagtttgtgtggctaaggagatggttgaaggcatagacatgaaaaacaataaaatg

SEQ ID NO: 163735 - DNA, 261 bp, Glycine max
attctctctgtgtatttccctacctctcccttcaagatgcagatcttcgtcaagaccctcaccggcaagaccatcacccttgaggtggaaagctctgacaccatcgacaacgtcaaggccaagatccaggcaaggaaggaatccccccggaccagcaacgtctcattttcgccggaaagcaacttgaggacggccgtacccttgctgactacaacattcagaaggagagtactcttcacctcgtcctccgtctccgtggtg

SEQ ID NO: 163736 - DNA, 271 bp, Glycine max
ctcgagccgctaaaatcacgcaaatggcatccaagagaatactgaaggagctcaaggacttaccgagagatccaccaacttcatgcagtgcaggacctgtgggtgaggacatgttccattggcaagcaaccatcatggtccaaatgacagtccctatgctggtggtgttttccttgtgaccatccatttccctcccgattatcccttcaaacctcccaaggttgcattcaggaccaaggttttccatcccaacattaacagcaatggcaat

SEQ ID NO: 163737 - DNA, 283 bp, Glycine max
atatgattggatctagatggcaaaaccaagttcagctaatggtaggactagaagccatgtgcagatctttatagtagttggtatgtgctgtctcttctatatattgggtgcatggcagagaagtggttttggaaagggagatagtatagcattggaaattactaagaaaggcgcagactgtaatgtagttcccaatttgagttttgattctcaccatggtggagaggttagcaaaattgatgaatttgagtcaaaatccaacgattttgaaccgtgtgatgct

SEQ ID NO: 163738 - DNA, 284 bp, Glycine max
cgcgtcttcataaacgcctttcttctccgtttccgtttcctcgttcaaattcgctttttgatctgcgaaaatgagagagtgcatctcgatccacattggtcaggctggtatccaggtcggaaatgcttgctgggagctctactgcctcgagcacggcatcgggcccgatgggcaaatgccaagtgacaagacagttggcggtggtgatgatgctttcaatactttcttcagcgagactggtgctggaaagcacgtgccacgtgcagtgtttgtagatcttgagc

SEQ ID NO: 163739 - DNA, 277 bp, Glycine max
atcaatcaatccatcttcaattgctttgtttcgatcggaggaaaatggccgatcagttatcgaagggagaggaattcgagaaaaaggctgagaagaagctcagcggttggggcttgtttggctccaagtatgaagatgccgccgatctcttcgataaagccgccaattgcttcaagctcgccaaatcatgggacaaggctggagcgacatacctgaagttggcaagttgtcatttgaagttggaaagcaagcatgaagctgcacaggcccatgtcga

SEQ ID NO: 163740 - DNA, 277 bp, Glycine max
cactcgagcgaatcggctcgaggttgcctcttacacaggcaacatatttgttgccaacgttgccaaaacttgcagactggggacttgccatctttcttgaacaaatatgggtcctatccaggctactttgatgtagttgtgaatcaatttgtcaacattgataaagcagattgggttcttgcaaacagtttttatgaactggagcaaggggttgtggattggctggtgaagatttggccattaaagccaataggaccatgcctgccatctatctact

SEQ ID NO: 163741 - DNA, 278 bp, Glycine max
tttggaaatcaatcccattgcggagacagctgataaccaattggtggctgctgatgctaagttgaattttgacgataatgctgcatatcgccagaaagagatatttgctctccgtgatacaacacaagaggaccctcgagaggtgactgctgcaaaggcagacttaaattatattgggctagatggagaaataggctgcatggtgaatggagcagggttagcaatggccacaatggatataattaaattgcatgggggtactcctgccaattttttgg

SEQ ID NO: 163742 - DNA, 283 bp, Glycine max
gaaaaagttgtattgaaattttcacaagaggaatttcttacagcttggtcaactcaggtgcgtcctgcaacaactctgttggctgatgggtgtccatatttgtatgctatggtgcatgatagttcagtgtctacaataccaggtgattttgtcattggtgttaagttgacaaccataaacaatatgtgtgcatatgggctcaatcctggtatttcaggttctcgtcttttgggcaccattcctcagtccatttcacagcaaactgtttggaatcaaatggcaa

SEQ ID NO: 163743 - DNA, 283 bp, Glycine max
attactttagtgttttctcttgtcacataaaagtcatctaagaagaattacaagatcatcatcacaataacaagatgagttcaggaattagagcatggagtgtggcagcaagtgttggaattgtggaggccttgaaagaccaaggcatatgcaggtggaatcatgccttaagatcagctcaacaccatctcaaaaaccatgttggctcattctctcaggctaacaagctttcttcttctgctatgatatccacaacactaaaacatgagaaggcaaatcaatc

SEQ ID NO: 163744 - DNA, 282 bp, Glycine max
tgcctctttcaagaagcatctgagtgcttattatttgtaatatatatagtcactcaagcttctaggatttgtgccagctacatgaaaatgggaagcaacttcaggtttttgagtctttgcctcttggcattgattgcatcaacccatgctcaacttcagctctggtttttatgccaagagttgcccaaacgctgagcaaatcgttttgaaatttgtccatgaccatatccacaatgctccatcactagcagctgcattgataagaatgcacttccatgactg

SEQ ID NO: 163745 - DNA, 285 bp, Glycine max
ggcgagcgctcccactccacgcgaagagttcgtgtacatggcgaactggcggacaggccgagcgctacgaggagatggtggagttcatggagaaggtctccgcctccgccgagagcgaggagctgaccgtggaggagcgtaacctcctgctccgtcgcctacaagaacgtgatcggcgctcgccgcgcctcctggcgcatcatctcctcaatcgagcagaaggaggagagccgcggcaacgaggaccacgtcgccgtcatccgcgactaccgctccaagatcgag

SEQ ID NO: 163746 - DNA, 277 bp, Glycine max
caaaggtcctgagctactaacaatgtggtttggagaaagtgaggctaatgtgagggaaatttttgacaaggctcgtggttctgctccatgtgtcctattctttgatgaacttgactctattgcaactcagaggggtagtagtgtcggagatgctggtggtgctgctgacagggttttgaaccaactgcttacagaaatggacggaatgtcggcaaagaaaactgtgttcatcattggggccactaatcgaccagatattattgacccagctcttctg

SEQ ID NO: 163747 - DNA, 277 bp, Glycine max
cataaaacacacaacaactcagggtagggcagacagagagagagaaatgggaggctgggctatcgcggtgcatggtggcgctggtgtggaccctaatcttccactcgagcgtcaagaagaagcgaaacaacttctcacgcactgtctcaatcttggaatctctgctctaaattctaatcttcccgacatagatgtcgttgaaattgtggtgagggaattggaaacggatccgctgttcaattcgggccgtggatctgccctgacagaaaaaggaacg

SEQ ID NO: 163748 - DNA, 268 bp, Glycine max
gagaaataagggaaaaatggtgtcgctgaaactgcagaagcgcctctccgcaagcgtgctcaagtgcggcagaggaaaggtttggcttgaccccaatgaagtcaacgaaatctccatggccaattctcggcaaaacatcaggaagttggtgtaaggatgggtttatcatcaggaagccaaccaagatctcactcccgctcacgtgctcgtaggatgaaggaggcaaacacgaagggccgacactccggatatggtaagcgtaagggca

SEQ ID NO: 163749 - DNA, 278 bp, Glycine max
atctgaacaactgctattctttgccacgttagttgcaaaaaagattttcaagatgaagatcaaaccttatattccagatttcaagctagcttttgaacatttttgcatccatgctggtggtagagctgttttggatgaactggagaataacttgcagctatctccttggcatatggagccttcaaggatgacgctctatcgttttggaaacacctccagcagttcactttggtatgaactggcttacactgaagccaatgggaggatcctaaggggag

SEQ ID NO: 163750 - DNA, 284 bp, Glycine max
ctcgagccgctattatactctctagagtaattgcggaatctgctagaattttctaataatggcgaaagacgttgagcaggtcacagagcaaggtgaatactccgcgaaggactaccatgaccctcctccggcaccgttgatcgacccagatgagctcacaaagtggtccttgtacagagccgccatagctgagttcatagcaacactcctttttctttacatcaccgtgttgaccattattggctacaagagacagagtgacaccaaaatccccggtaacaccg

SEQ ID NO: 163751 - DNA, 282 bp, Glycine max
gtcaaaactaatggacaactaccttgctgaaattgcccctgatgcaaatctaaaactttccaagtttatggtcattgcagaaaccctacccgcacatgcacgcacgattcatgatgggttatatcgagcaattgatatttacttaaaggctcatcaaggattgacagatttggacaagaagaaactatgcaaattgattgattttcaaaagctttctcaagaagctggagcacatgctgcacaaaatgagcgccttcctgtccaatcaatagtgcaagttct

SEQ ID NO: 163752 - DNA, 282 bp, Glycine max
gctagtttcatgctctcctattagctccctcagaaaatctctcaagcaatttaattcttagttctatttatcttatctgagcaaaaccattttctcgcttcataagatcagaagagataactatcccaaagtcatctgagctggccattgaagagctgaagaagcttctcagagacaaggaggaatttgatgccgtggcggctgcaaaagttgaggagcttatagctgagttgcagggatgtggcccgcgtccatatgagcctgctgtgcaaagaatcgtag

SEQ ID NO: 163753 - DNA, 276 bp, Glycine max
cttcaattcattctagttctggattccgactagccgcgttgactcggttccgtttttcattctcgcggatctaatattaaggaatagcttaagggcacattacaatgaaggcattgattctggttgggggatttggaacaaggctgaggccactgacactcagtttccctaagcctcttgttgattttgctaacaagcctatgattttgcatcagatagaagcccttaaggccattggagtgactgaggtagtgctagccatcaattaccaaccag

SEQ ID NO: 163754 - DNA, 279 bp, Glycine max
gattgctagaatggaatttcgatgctcagtcatctcttttaccattctcttctctcttgctcttgcaggagagagccatgtccatgcatcgctacctgaggaagattattgggaagctgtttggccaaacactcccattcccactgcactgcgagagcttctaaagcctctccatgcaggtgttgaaatcgatgaactccctaagcaaattgatgatacacagtacccaaaaacattcttctataaagaagaccttcatccaggcaaaacaatgaaagt

SEQ ID NO: 163755 - DNA, 280 bp, Glycine max
ggttgatccactagcttctagcagctgggaacaggtttcatcctctaaaacattgattacacctgtccagtgcaagtctttgtggaggcaattcaagacagagacagagtacagtgtctctcaggccatttctgcacaggaggccaacaagcgcaacaacaactggttacctcccccatgggcaatagttgctttggttatcctgggatttaatgaacttatgacacttctaagaaatcccttgtatttgggtgtcatctttgttggttttcttctcatt

SEQ ID NO: 163756 - DNA, 277 bp, Glycine max
ctgaatacctagctcatggtcagttaacagaaaaggcagacgtatatagttttggagtgttgctgctagagatagtcactgctagacagaacaacaggagcaaagcatcagaatattcagacagcttagttacagtggcatggaagcattttcaggcagggactgctgaacaattatttgatccaaacctagacttgcaggaagatcacaatagcaatgttaatgttaaggatgagattttaagagtggttcacataggacttctatgcacccaaga

SEQ ID NO: 163757 - DNA, 273 bp, Glycine max
gcaagtggaaataggaacaaagttgtcagaagatagcaggaaatatggtgcagaaaatacatgtaccagcggtaatacactgtctagagctgcactaagttttgcgcgagcccatgctcaaatggagaaagagcgtggaaacttactaaaagctcttggtacccaggttgcagagccattaagggcaatggtggtgggagctccattggaggatgctcggcatcttgctcaacgttatgacagaatgcgacaggaagctgaagcccaggctat

SEQ ID NO: 163758 - DNA, 278 bp, Glycine max
ggaactgcagatgctgtgaggcaattcacttgggtatttgaggatgccaagaatacaaatgttgagaatgtattgatcttggctggagatcatctatatcgtatggattacatggaccttgtgcagagtcacgttgatagaaatgctgatattacagtttcatgtgctgctgtgggtgacagccgtgcatcagattatggattggttaaagtagatgacagaggccgcatcattcaattttctgaaaaaccaaatggtgatgatctgaaagcaatgca

SEQ ID NO: 163759 - DNA, 281 bp, Glycine max
gcgaagaagaagccacagagaaccagtctcctactctctctcacccacaagaaaaatggcatctcacatcgttggatacccccgcatgggtcccaagagagagctcaagttcgctctcgagtctttctgggatggcaagagcagcgccgaggatttgcagaaggtggctgctgatctcaggtcatccatctggaagcagatggctggtgctgggatcaagtacatccccagcaacactttctcgttctatgaccagctgctcgacgccaccgccaccctcg

SEQ ID NO: 163760 - DNA, 278 bp, Glycine max
tgtttctgtctctgtgtttgccgctgaagattccgaacgagcgaccttcttcgtttctcgcaaagtttaagtcatcatgggtaaggaaaagactcacatcaacattgtcgtcattggacatgtcgactctgggaagtcaactaccactggtcatttgatctacaagcttggaggtattgacaagcgtgtgattgagatgttcgagaaggaggctgctgagatgaacaagaggtcattcaagtatgcctgggcgcgtgacaagctcaaagctgagcgcg

SEQ ID NO: 163761 - DNA, 279 bp, Glycine max
ggaaaggctgaagaacacatagagagagagagagaagtgcagaaaaaatgagactgttcgatccatggcctgttttcttcaagagagaatggaagcggaattggcccttcttggttggattcgccatcaccggaactctcatcaccaaactttcccttggtctctctgaggaggaagccaaaaagtcgaaattcgtccaggcacacaagaggtgactttagaatggaagatttgcagtggctttgcacattgtattagatgtgtgaagagagcttttgt

SEQ ID NO: 163762 - DNA, 277 bp, Glycine max
acgaatggaggaccttgaaaaggctggcatcactgttatccaaattgatgaagctgctttgagagagggtctgccactgaggaaatcagaacaagctcactacttggactgggctgtccatgccttcagaatcaccaatgttggtgtgcaggataccactcagatccacacccacatgtgctactccaacttcaacgacatcatccactccatcatcgacatggacgctgatgttatcaccattgagaactctcgctccgatgagaagctcctgtca

SEQ ID NO: 163763 - DNA, 276 bp, Glycine max
ctgatctgctacattcttccaccaagcttctcgaacaagctgctccttctgctcagttccctccacttcagaggaacttagatcaactggaagcattatccaagaagcttagatccaagacagtaaggactgaagcaccttctcaatctattgctgcaacaaggctccttgctcgtgaggggataaatgcagagcagcttgcaagggatctgaagtcatttgaactgaagacaacttttgaggatgtttttcctgttgaggcaacaagcgttgaag

SEQ ID NO: 163764 - DNA, 275 bp, Glycine max
tagaacatctctttctgtgtcttaggttttagttgtagccgctgcatctgaacgaaacacagagggagagagagtgagagaagcagtaattcatcacaatgggtaaggttcacggatctctcgcacgtgcggggaaagtgagaggacaaactcccaaagtggcgaacaagacaagaagaagaagccacgcggacgtgctcacaagagaatgcaatacaaccgccgattcgtcaccgccgtggtgggattcggaaagaagcgtggaccaaactcgt

SEQ ID NO: 163765 - DNA, 272 bp, Glycine max
ttttgattccaagggagaccccgttgcaattctcaataatattgagatttataagcatcctaaagaagatagaatagcccgaacttggggaaccattgcccctggcctaccttatgttgaacaaactataaccaatgctggaaattggttgattgggggtgacctagaggtcattgaaccaattcagtacaatgatggacttgatcattttcgtctatctccgacacaactccgtgcagagttcacaaggcgcaatgcggatgctgtgtttg

SEQ ID NO: 163766 - DNA, 274 bp, Glycine max
gggactccagcttttcatcgacaaattgctgcacacttggagaaaatgccattatggcaaaaagcaattttgtgtggaatgggacattgtttgtctcggaaaagcaaagaaacatggtattctgggatgaaggaaaaatttgtacaaatgatgaagagcatctatgaaacagaagttacagattggccagtaccactgaaaatcatttctggaaccattcttgcaacaattttgggaacaaccttctggaaactcttttcctttcttagagatg

SEQ ID NO: 163767 - DNA, 262 bp, Glycine max
gaaaataattgcagatgagatgcgagcagtcgaggccctcgcaggactgttgcaagaggggactccaagaggaaagaaggatgctgtgacagctttgttcaatctttccacacacactgagaattgtgttagaatgatcgaggccggggcagtgacagctcttgttagtgctttggggaatgaaggagtttcagaagaagcagctggtgcactggccttgatcgtccggcagccaattggggcaaaacagtggtgaatgagg

SEQ ID NO: 163768 - DNA, 274 bp, Glycine max
cgaaaccctcttcatcttgttctatctgtgacgagcatcatggcctcaagagcagtgttattgttggctatgtgtgtgcttccggcgatggttgtggccattcgcccagcaaagaaccctttttgcgtgaagggtcgtgtctactgtgacccttgccgtgctggttttgagacctcagctaccacctacattgctggtgctgagattatgttgcaatgcaagagcagggttagcaacgaggttgtgtacacgaagaaggggtacaccgactcaa

SEQ ID NO: 163769 - DNA, 276 bp, Glycine max
tgaaaatagtttggttttgtagtaagtgaggtgaggtgccaaaatggtgaagataactcttggtactttcgatgactcttttggtgttgcctctcttaaggcttatttggcagagttccatgcaactctgattttcgtgttcgctggtgttggttcagccatcgcttacaacgagcttacaaaagatgcagccttggatccaacggggctggtggcagtagctgtggcccatgcatttgcactgtttgtaggtgtctccgtcgcagccaacatctc

SEQ ID NO: 163770 - DNA, 277 bp, Glycine max
cacaaaagcaatgactatgtcatttaatccaaacccgtgttctgatgcatggagtttggaatttttgaagcgtaccggatttcactgtgatatcatttgtgtcactggatggactgccaccccaatgcaggatgttcaggttacaattgattggtttatttcctctcaggaatgtgttcccaggacttattgtgttttaaatccacaaaatccttttgtgttaaataggtggatggggaaactgactttcccccagggcacttcccgaaatgttaag

SEQ ID NO: 163771 - DNA, 267 bp, Glycine max
ctcgagccgcaaaccttaaagaaatagccgagaaaaatctgaatgctgccgatgttgactgctgcattggaattccactttatattactgaacttcagaggagggcggtcttggatgctgctactattgctggtttgcatccacttcgtctgtttcatgaaacaactgcaactgcattggcttatggaatttataagaccgatcttcctgaaaatgatcaactgaatgttgcctttgatgatgttggacatgctagcatgcaagtat

SEQ ID NO: 163772 - DNA, 274 bp, Glycine max
  unsure (1)..(274): unsure at all n locations
ccaaactcaagttcaccaaaagcaaccacaacaagcacttctcttatttcctatcacaccctattacagattcacaagcgcagacacttcaaatggctctggaagctcttcaatcacccagaactgccactccatcgtttagtccctttgaagaaaccaacctcagttacttggagacaccgtggaccaaaggaaagcgttctaagcgtancggcatggagcagcaactgcaacactcttcatgcaccgangaagagtacctcgctctctgtct

SEQ ID NO: 163773 - DNA, 262 bp, Glycine max
ccctctttcaccgcagtgttagggtttctgaagcctccaaccagaaagagagggaaatggctcccaaacatcctagtacgggtttgtttgttggattgaacaagggtcacgttgtcaccaagaaggagttgcctccacgcccttcagatcgtaaggggaaaacaagcaagcgagtgcactttgtgaggaacctcattcgagaggttgccggctttgcaccttatgaaaagcgaataactgagttgctcaaggttggaaaaga

SEQ ID NO: 163774 - DNA, 265 bp, Glycine max
gcagactagtatccgatcctctgtcctctcgaagctttcatcgttcaacatattctcaccatctcagtcatgggcctgctatcttgttttaggtctaccgtcctgagaaaatgttccaaaggaagctctggcatgtcaagattcctgtatacgaacaattttcaacgaaacttgatttcgtctggtggcaatgaatcgtattatgggtattttaacaggagatcatacacttcactttatatgggaactggaactgtgggtggga

SEQ ID NO: 163775 - DNA, 263 bp, Glycine max
ctttcttcaacgtttccatcatacacagatcccaatcctctctcaagccctaatttcccctcatttccatggccacagaagagcccactgtcgcggtggaacccgctcccgaacctgcctccgccgatcctcccccggaggagaaggaggagaccaaacctgaagccaaggctaagaaaaccaaggagcccaaacctaaaaaggtttccagacctcgcaaccctcccactcatccttcctacgaagagatggttaaagatgca

SEQ ID NO: 163776 - DNA, 259 bp, Glycine max
tgacgatggcgtttcgggtgcgaaccctgacctccgctctctctttcttctctctctcttgtccatcgcttccgccaatgtcttcttcgaagagcgtttcgatgacgggtgggaaaatcgatgggttaaatcagattggaaaaaagatgagaacgtggctggggagtggaaccacacctctggtcaatggaatggagacgctaatgacaaaggtattcaaaccagtgaggattacagattctatgctatttcagctgag

SEQ ID NO: 163777 - DNA, 255 bp, Glycine max
ccattatctccttagctggtgttttgatcatgacactgtacaaaggacccgttatgagaaatttatggcatccactaatccatattccagggaaaagtgctgctataaatgaagactggttaaagggttcaattcttacagtttcaagttgtgttacatggtctttatggtacattatgcaggcatccactttgaaaagataccctgcccaactctcactcaccacgtggatgagctttgttggagcagcacaat

SEQ ID NO: 163778 - DNA, 254 bp, Glycine max
ggaatggattccccacaatgtgaaatccacagtctgtgacattcccccaaccggcttgaagatggcttcaacattcattggcaactctacctccattcaggagatgttccgtagagtgagtgagcaattcactgctatgttcaggaggaaggccttcttgcattggtataccggggaacgcatggacgagatggagttcactgaggctgagagcaacatgaacgatcttgtgtcagagtatcaacagtaccagg

SEQ ID NO: 163779 - DNA, 252 bp, Glycine max
caaccttctttctttttctgtgagcctttctttcaggttcttaacttgatcagtgtgcagtgtccaaatcataagggtagttgcaaattgcaatggctaagcatgatgttgagggtggttccttctctgcaaaggactaccatgatcctcctccagcaccgttgattgatgctgaggaactcacacagtggtccttctacagggctttgattgctgagttcattgccacaatgctcttcctttacatcacag

SEQ ID NO: 163780 - DNA, 251 bp, Glycine max
gagaattccaactgataaaaagaatattcagagaattccaaagacagagatgactgtcattaaggaagagcaacaaccaaaccaaatagctggccacaaagaacttggtcacaaaagtctccttcagagcgatgcactctatcagtatatacttgaaaccagtgtgtacccaagagagcatgagagcttgaaggagctacgagagttgacggaaaaacacccttggaacctgatggctacaccacctgacg

SEQ ID NO: 163781 - DNA, 260 bp, Glycine max
ctttctcgcttttgcatattcttgtgacaaacaaaaatccccagaacaaaaataggtcttcttcttctctgatctaccaaagcttcaaattctccttagtttggtttgtctgtgagtttggagtgtaatgtcgccgccgacgctggtaacggaggaggaggggcggagaccgtggcgtccgattcttcgcaatccttggactgtttctctcagaatggtgctggattgaaagaacggaattacttagggttgtctgattg

SEQ ID NO: 163782 - DNA, 264 bp, Glycine max
tttcagagcacagctttttggtcctatgaaagatcagaatacccagcgtattaaagttgaagacatggaggctccagttttcaaggcattgcttcattttatatactgggactcactaccagacatgcaagagcttactgggttgaactcaaaatgggcatcaaccttgatggctcagcatcttctagcagcagctgatcgatatggcttagagagacttaggctgatgtgtgaagcgagtctctgtgaagatgttgctattaa

SEQ ID NO: 163783 - DNA, 196 bp, Glycine max
cattcccttcttcaatttcatcaacacaaccatcaatttcatcaaccatcgcataataatagtattatcatgatagccgtggcccgaaaggacatggaccggatcaagggcccgtggagcccggaggaggacgaggcccttcagaagcttgtggagcggcacgggcccagaaactggtcgctcatcagcaggtcca

SEQ ID NO: 163784 - DNA, 257 bp, Glycine max
caaggcttgtactgttctactaaggggtgctagtaaggatctattaaatgaagttgaaagaaacctacaggatgccatgtctgtcgcaaggaacattataaaaaatcctaaacttgttcctggaggcggtgctacagagttgacggtgtcggctgccttgaaacaaaagagttcatctattgagggcatagagaagtggccttatgaagctgctgccctagcttttgaagccataccacgaactttggctcaaaatt

SEQ ID NO: 163785 - DNA, 250 bp, Glycine max
ctttgcttattcttcactgtcaaccgaaaaaattataaaaaaaacaaaagcagggaagaataaggaaatgggtgtgttcagtgcagtgctgtgccttatgtccctaatgtggatggtggaagctcgaattccaggcgtttacacgggcggcgcctggcaaagtgctcacgctacattctacggaggatccgatgcatccggcaccatgggaggagcatgcgggtacgggaacctgtacagccaagggtac

SEQ ID NO: 163786 - DNA, 255 bp, Glycine max
gtcaagaccatcaagacgaatgtgatgggcacgcttaacatgcttggccttgcgaagagaattggggctaggtttctgcttactagtactagtgaggtttacggtgatccgttggagcatcctcagaaagagacttactggggaaatgtgaatccaattggtgagaggagctgttacgatgaagggaaaaggactgcggagacgttggccatggattatcatcggggtgctggtgttgaggttcgtattgctcga

SEQ ID NO: 163787 - DNA, 248 bp, Glycine max
ctcgagcgcttaattagtgttcatgaatatgtcaagccttactttagtggttctaaattgaaaagctttctagctggtcataatatcaccattactgatggtattgacaaaactagtgcaactttgcaatttagaaagttagcagattgcgattttctcaagagaaactttaagcagatgtctaatgttttgtgggtggctcctgagacaaggcgagtttatggtcacaacttcattatgtttcgtgt

SEQ ID NO: 163788 - DNA, 252 bp, Glycine max
gctatctctcccattctctcgcaatctcggacccttttgattcgtgaaaggaaagcaaacatgcttgatcaggtccaacaccctacaatcatggacaaggttgctggccagctccatctccgttctggtgtttctggtattaggagttatgaaggagcctactgccaccccacaatgtaccaaagaccctcttttgggaattactcgaatgctgcattgcagtatcctgtgatgccctcatgcaaagctact

SEQ ID NO: 163789 - DNA, 254 bp, Glycine max
gtctgaatattgacgctctgcaaaatcgtgttggccctgaaactgaaaatgtgtttcatgataccttctgggaaaacttgagtgtcgtgattaatgcactagacaatgtgaatgcaagactgtatgttgatcagaggtgcttgtatttccagaagtcacttcttgaatctggaactcttggggccaaatgcaatacccaaatggtcattccccactaacagataattatggccgctcaagagatccacctgaga

SEQ ID NO: 163790 - DNA, 263 bp, Glycine max
ctcagtgaaagagaatccgaggcgaagagaagagaaaaattaagatggaggggaaggagcaggatgtgtcgctgggagcgaacaagttcccggagagacagccgattgggacggcggcgcagagccaagacgacggcaaggactaccaggagccggcgccggcgccactggttgacccgacggagtttacgtcatggtccttttacagagcagggatagcagagtttgtggccacttttctgtttctatacatcactgtctta

SEQ ID NO: 163791 - DNA, 242 bp, Glycine max
aaacactcttcttcatattcttcttcttcttcttgttcttgttctatctgtgacgagcatcatggcctcgagagcagtgctattgttggctatgtgtgtgcttccggccatggttgtggccattcgcccagcaaagaaccctttttgcgtgaagggtcgcgtctactgtgacccttgccgtgctggttttgagacctcagcaaccacctacattgccggtgctgagattatgttgcaatgca

SEQ ID NO: 163792 - DNA, 260 bp, Glycine max
tctgtctcgtttacacatctctccaacctttcactttcgtttctcagttttattcgaatccctctctcaatctcctttccaaatggccagcgttgaggttgcacagcaaacaccaacaacagttccagaaaatgaaacaaccgaggtaagcaagacccaggaaacaaccccagtcactgaggctcctgcaacagaacaaccagcagctgaggttcctgcaacagaacaaccagccgctgaggctcctgccccagaatcaa

SEQ ID NO: 163793 - DNA, 252 bp, Glycine max
caacgcggcagagcgaagagaaggggcaaaagagaaagaagcgcttatcgaactcggacggaagcactgagttgactcggagggagtggaaagtgttgttgcgtaatgtctggtggtatcgctcgtggacgcctcaccgaggagcgcaagtcgtggcggaagaaccatccccatggttttgttgcgaaccggagacgctgcccgatggaaccgtgaatttgatggtgtggcattgcactattcccgggaaga

SEQ ID NO: 163794 - DNA, 260 bp, Glycine max
ctcaagtctctcgaagcctctttctctctcttctagaagctatctgtgtttggtgttactaagtctccaacaagcaaagtacatggttgatttggaaatccaggtccccaccccattcgacccgtttgccgaggcgagagaatcggatgcccccggagcaaaggagtatgtgcatattcgaattcagcagaggaatgggaagaagagtctgaccacagtgcaagggctgaagaaggagttcagctacgagaagatcctca

SEQ ID NO: 163795 - DNA, 250 bp, Glycine max
cagaaccccttctggaatttcaaaaactagtccttcatctgttccttccaacttatctattctgtcatatagtgaagcaagtgatttctcaaatcttccaacaccaaggtctgagggcgaaatcttgtcttccccaaatcttaaggcctttaccttcaatgagctaaagaatgccaccaggaactttcgcccggacagtcttcttggtgaagggggatttggttatgtttacaaggggtggattgatgaa

SEQ ID NO: 163796 - DNA, 250 bp, Glycine max
cacttcccccctcttcattttgtagtcctcctttacctgcaaaaaacagcagatggctcagcttaacctcatacttatctggttatttttattgagtctgtgcctttattcatgtcctacttcggcccagttaagtagacaccactatgcaaaaacatgccccaatgttgaaaacattgtcagagaagcagtcaaaaagaagtttcatcaaacatttgttacggttcctgctaccattcgtctcttcttc

SEQ ID NO: 163797 - DNA, 253 bp, Glycine max
agttattacaggtcgaaaatctaaagtggaaacatttgccggtgcttgcaagacctatacgattgaggctatgatgggtgataagaaagcattacaagcaggaaccagtcataaccttgggcaaaactttgcccgtgcctttggaacacagttcacagatgaaaatgggttaagggaatatgtttggcagacatcatgggcaattagtacacgttttgttggtggtatcatcatgacacatggagatgacgca

SEQ ID NO: 163798 - DNA, 135 bp, Glycine max
ccgcaatggaggatcggtccactagggcccaaaacactttgcaacgcttgcggggttcgattcaagtctggtcggctttttccagagtatagaccggcctgtagcccgaccttttgtggccacattcactctaac

SEQ ID NO: 163799 - DNA, 254 bp, Glycine max
gattgctagaatggaatttcgatgctcagtcatctcttttaccattctcttctctcttgctcttgcaggagagagccatgtccatgcatcgctacctgaggaagattattgggaagctgtttggccaaacactcccattcccactgcactgcgagagcttctaaagcctctccctgcaggtgctgaaatcgatgaactccctaagcaaattgatgatacacagtacccaaaaacattcttctataaagaagacc

SEQ ID NO: 163800 - DNA, 255 bp, Glycine max
attagcatttgctagtgattaggaatataaagatacgccaaccacaaacagtttaagatggcctccaaaacatgttcatcccttgctcttttcctcacactcaacctcctcttcttttcacttgtctctgcatgcggtagttattcatgccctagtccaaagccaaagccaaagcccaagccaaagcccaaccctaaccctagtccttctggtgcatcgtgcccccgtgacgcactcaagctaggtgtatgtgcc

SEQ ID NO: 163801 - DNA, 253 bp, Glycine max
tgccgtgccaccatcttctccaaagttatcatattcgaagagaaaaaaggagtgactgtccaggttgggcaattagggacggaaaaggagaaacacgaaaatgtttttccacatagtactggagcgaaatatgcagcttcatccacgctactttggtcgtaaccttcgcgataatctcgtttccaagcttatgaaagacgtggaaggcacttgcagtggccgacatggatttgtggtggcagttacagggata

SEQ ID NO: 163802 - DNA, 248 bp, Glycine max
ccaaagtcccctgcggttcgttcggttattcttcgaaccgttgtctgaagtttacaactcaaaacttcaccgaacgcatttcattcaccaattcgtccaagtctcgtatcaatcaatcagcctatccgtcttgcggttggagagatcggaggggagagcagccatggcgcatcgagtagaccacgagtatgactatctgttcaagatcgttttgatcggagactcaggtgtaggcaaatccaacatcc

SEQ ID NO: 163803 - DNA, 250 bp, Glycine max
cgcaacaaaaagaaagaatcccaggcgaggagaaagatggaggggaaggagcaggatgtgtcgttgggagcgaacaagttccccgagagacagccaattgggacggcggcgcagagccaagacgacggcaaggactaccaggagccggcgccggcgccgctggttgacccgacggagtttacgtcatggtcgttttacagagcagggatagcagagtttgtggccacttttctgtttctctacatcactg

SEQ ID NO: 163804 - DNA, 252 bp, Glycine max
gaaggcttccgtgatgcactctacttgattgatattggacaaaatgaccttgctgattcatttgccaaaaatctgtcatatgcgcaagtcatcaagaaaatcccagcagttataactgaaattgagaatgctgttaagaatttatataatgatggtgccaggaagttttgggttcacaatactgggccgttgggctgtcttccaaaaatactcgcactggctcagaagaaggatctagattcattgggatgt

SEQ ID NO: 163805 - DNA, 255 bp, Glycine max
  unsure (1)..(255): unsure at all n locations
tctcgagccgattcggctcgactggttggatctatggttcagttacacanggatatcttaacggggttcaagatgcaatgccggcgatggagatcagtttactgcatgcccttaaggcctgcattcaaaggatcagcaccaatcaatctttctgatcgtttgcaccaagttcttcgatgggcccttggatcagttgaaattttcttcagcagacattgccccctctggtatggttttgcgggaggtcgcctcaaa

SEQ ID NO: 163806 - DNA, 258 bp, Glycine max
tgaaagggcaatattggacaacgtgaatgttctttctttatctctcggtggtggcatttctgattattacagagacagtgtcgctattggagctttttcagcgatggagaaagggattttggtttcatgctccgctgggaactcgggtccgggtccctacagtctctccaatgtggctccatggatcactaccgtaggcgctggtacactggatcgtgacttccccgcatacgtggcgctcggaaatggactcaactt

SEQ ID NO: 163807 - DNA, 256 bp, Glycine max
gttaaatagaaaagaggagtttgagaatggcaacgatcagcgcggttcaggtggagttcctggagtttccagcggtggttacttcaccagcctccggcaagacctatttcctcggcggcgcaggggagagaggattgacgattgaggggaagttcataaagttcacaggcataggagtatacttggaggataaggcggtgccatcactcgccgctaagtggaagggtaaaacttcagaggagttagttcacaccct

SEQ ID NO: 163808 - DNA, 256 bp, Glycine max
agacaggttcccaaacagacgcaaaattgagctccttaaacaaagcaacctatttgaatccaaatgcagcagagtttgttccatttgccctcagatcatcgccatctggaagcaccagcttggtagatgcaacagcgaggtttgctgctgccggatctcttgggaaagcagttttagatcgagcagaatcatccatttcaaataattccgatgatgaggctcaccagtactggcgttgtcagcttcctgatgatat

SEQ ID NO: 163809 - DNA, 253 bp, Glycine max
accactcttaatttctctctgccttgctcatttacacacctctccaacctttcactttcagctttatttgaatccctctctctcctttccaaatggccagcgttgaggttgcacatcaaacaccaacaacagttccagaaaatgaaacaaccgaggtaatcaagacccaggaaacaaccccggaaccagtaccagccactgaggctcctgcaacagaacaagcagcagctgaggttcctgcccaagaagaaca

SEQ ID NO: 163810 - DNA, 247 bp, Glycine max
gttcttctttcctcaaccttctttcttcttatatatcgaacatggctaagtatcattcaagtgggaaaagctcttccatgactgctatagccttcctgtttatccttctaatcacttatacaggcacaacagatgcacaatccggggtatgttatggaagacttggcaacaacttaccaacccctcaagaagttgtggccctctacaatcaagccaacattcgcaggatgcgaatctacggtccaag

SEQ ID NO: 163811 - DNA, 250 bp, Glycine max
aagagggggtcagagtgagaaagagaaagagagaattcgtaaaccctaatttcggaaagatcggcgatgactgcctccaaggatcgcgagaacttcgtctacatcgccaaactcgccgagcaggccgagcgttacgaagagatggtggaatcaatgaagaacgttgcgaatctcgacgttgaactgacggtggaggagcggaatttgctttctgttgggtacaagaatgtgattggtgctcgcagacgtc

SEQ ID NO: 163812 - DNA, 289 bp, Glycine max
atcccaggcgaggagaaagatggaggggaaggagcaggatgtgtcgttgggagcgaacaagttccccgagagacagccaattgggacggcggcgcagagccaagacgacggcaaggactaccaggagccggcgccggcgccgctggttgacccgacggagtttacgtcatggtcgttttacagagcagggatagcagagtttgtggccacttttctgtttctctacatcactgtcttaaccgttatgggagtcgccggggctaagtctaagtgtagtaccttgggattc

SEQ ID NO: 163813 - DNA, 283 bp, Glycine max
cggatctgttatttcaaagcatctagaagaattggagcaacttctgaaggggatagctatgatgaaagaattgactaaaaggactcaggactatttagtctcctttggagaatgcatgtcgacaaggatctttgctgcatatcttaataaaataggtgtcaaggctcgccaatatgatgcatttgagattggttttataacaactgacgacttcacaaatgcggacattttggaagccacttatccagctgttgcaaagagattgcatggtgattggctctcc

SEQ ID NO: 163814 - DNA, 282 bp, Glycine max
ctctccagtgggttcttcttcttctattacaacaacgtcacaccaagaccatgcccatggccatggccacgatcctgctcctgttcacggtcttcgcggtttcatcggccctagacatgtcgataatctcgtacgacaacgcccacgccgccacgtcgcgcagggagcgcacctgatgtccatgtacgagcagtggctggtgcagcacggcaaggtgtacaacgcgctcggggagaaggagaagaggttccagatcttcaaggacaacctgcgattcatcga

SEQ ID NO: 163815 - DNA, 280 bp, Glycine max
gttttccattacggatcaatcagtttgatcgtggagccatgcagatcagcacacttgaaggcaatggaagtagccaaggaatctgggtgcttgctctcctatgaccccaaccttcgtctacctttgtcgccttcggctgaggaagctcgtaagcaaatactgagcatttgggagaaggctgatttgatcaaggtcagtgatgcggacttgagttcctcacaggaagtgacaagattgatgatgaatctgctttgtcattgtggcaccccaatttgaagtt

SEQ ID NO: 163816 - DNA, 288 bp, Glycine max
ctcttcctcaccgattgctagaatggactttcgatgctcagtcatctcttttaccattctcttctctcttgctcttgcaggagagagccatgtccatgcatcgctacctgaggaagattattgggaagctgtttggccaaacactcccattcccactgcactgcgagagcttctaaagcctctccctgcaggtgttgaaatcgctgaactccctaagcaaattgatgatacacagtacccaaaaacattcttctataaagaagaccttcatccaggcaaaacaatgaa

SEQ ID NO: 163817 - DNA, 290 bp, Glycine max
cctcgagccgaatcggctcgagaaagaagaagaagaagaagaagaaccagaaaagggttttgacgtgtgtcgaagtggataaacccttccttcaattaatctccgatccgaaaccgtatggggattctatacgcactggtaggtcgcggatcggtggtgctggcggagttcagcggcaccaccaccaacgccagcgcaatcgcgcgtcaaattctcgagaaaacccccggcaacaacgacatgcacgtttcttactctcaggatcgctacatcttccacgtcaaacgcac

SEQ ID NO: 163818 - DNA, 288 bp, Glycine max
cctgcatgagatttagggattgaactttcggaagaacattaaggtttctacttcttgtgtaggtacttttggttgcccaaagtcagaaagaagcaaagaacatggctatcagccacagtactttggcatttgccttcggcatgctaggtaacgtcatttcgttcttggtattcttggctccaataacaacattttaccgaatattcaagaagaaatcgactgagggctttcagtcactgccttacctggtggcattgttcagttccatgctttggttgtactatgctt

SEQ ID NO: 163819 - DNA, 291 bp, Glycine max
aaacaaagtatagagtgaaagaatgggtgagaaaagcaagattttgatcataggaggcaccggctacatcggcaaacatatagtggaagcaagcgcaaaggctggaaatcccacttttgctttggtgagggaatccacactctctgacccctccaaggcacaactcatccacaattttgaggctttgggcgttaatttggtccgcggggatctgtacgatcatgagaagttggtgaaagctatcaagcaagtagatgtcgtcatatccacgctgggtcacctgcagcttgc

SEQ ID NO: 163820 - DNA, 285 bp, Glycine max
cagccacacgcttcagaagacatggcctcattgggtgggttacaaaatgtgagcggcatcaattttcttatcaaagagggtccaaaagtcaatgcaaagttcgagctgaagccgccaccatatccactgaatggtttggagccggtgatgagccagcagacacttgagtttcactgggggaagcaccacaagacttatgtggaaaatctgaaaaaacaagttgttgggacagcagcttgatgggaagtcactagaagagattattgtcacatcatacaataaggg

SEQ ID NO: 163821 - DNA, 277 bp, Glycine max
agaagattaggttgagagctgaagatgtgcaagggaagaatgttctgacaaatttctggggaatggatttcacaacagacaagctgaggtcattggtacgaaaatggcaaactcttattgaagcccatgtggatgtgaagacaactgataattacacattgaggatgttttgcattggatttaccaagagaagagctaaccaggtgaagagaacctgttatgcacaatcacgccagattagacagattcgtaggaagatgagggagatcatgaccaa

SEQ ID NO: 163822 - DNA, 260 bp, Glycine max
ctcgtacttcatcggaaccgaaacccttcgccgcaaaaaatgcctcccaaatctgccaaatccaaggaagctccagctgagcgacccatcctcggtcgattctcttctcacctcaaaattggcattgttggcttgccaaatgttggaaagtctactctctttaatactctcaccaagttggcaatacctgctgagaacttccccttttgcaccattgagcctaatgaggcacgggtcaatgtacccgatgaacggttcga

SEQ ID NO: 163823 - DNA, 312 bp, Glycine max
  unsure (1)..(312): unsure at all n locations
gctccgcattcggctcgagcatatacgttcattcactgntcatagtgaggatcctctgaagaaatggcaactcaccctttgacacactcacactccttccgcgagaggtatgatccaactctcactggtcacaggaatgcaatcatggccctaatgtccaggcttgaagccaagggcaagggcatcctgcaacaccaccaggtggttgcagagtttgaagaaatccctgaggagagcagaaagacactccaaagtggtgtctttggagaagttttgacctctacacatgaagccatcccgctgccaccattt

SEQ ID NO: 163824 - DNA, 286 bp, Glycine max
aggtgaggtgccaaaatggtgaagataactcttggtactttcgatgactcttttggtgttgcctctcttaaggcttatttggcagagttccatgcaactctgattctcgtgttcgctggtgttggttcagccatcgcttacaacgagcttacaaaagatgcagccttggatccaacggggctggtggcagtagctgtggcccatgcatttgcactgtttgtaggtgtctccgtcgcagccaacatctcgggtggccatttgaacccagctgttacttttggattgg

SEQ ID NO: 163825 - DNA, 274 bp, Glycine max
ctcgagccgcgaatacattgacatggctgacaccttgtgtcagacgcgtgcacttgaagcttttcagctggatccagcaaaatggggagtcaatgtgcaatcattatctggatccccttctaacttccaagtttacactgctttattgaaacctcatgagagaattatggcacttgatcttccccatggtgggcatctatcgcatggttatcagactgacaccaagaagatatcggctgtatctatattctttgaaacaatgccatacagattg

SEQ ID NO: 163826 - DNA, 283 bp, Glycine max
ctgcagttcaccttcaacgttgctctgctttcaattttcgggaaagaagagattctgtacagagatgctctgaaacggtgctactacactctggagcaagggtacaactcaatgcccataaacgttccagggacactgttccacaaggcgatgaaggcaaggacggaacttgcacaaatcgtggcccaaataatctcgagcagaaggcagaggaagcaggattttcacaaggaccttttgggttcattcatggatgagaaatcagggctcaccgatgagcaga

SEQ ID NO: 163827 - DNA, 283 bp, Glycine max
ctcgagccgctcgagccgcgccacttctgaatctattgaatcaacaatcatgtcggacgaacagcaccatactcgagtccaaggccgacgccggagcctccaaaacctaccctcagcaagccggtaccatccgcaagaacggctacatcgtcatcaaaggccgcccctgcaaggttgtggaagtttcgacttccaaaactggaaagcacggtcacgctaagtgtcactttgttggaattgatattttcactgccaagaaacttgaggatattgtgccctcttc

SEQ ID NO: 163828 - DNA, 275 bp, Glycine max
gcctcctggtgttctgaatatcatatctggctttggtccaactgccggtgctgctattgctagtcacatggagataaatcagcttgctttcactggttcaaccgaaactggaaaaattgtccttgaactggcggctagaagtaaccttaagcctgtaactttggagcttcgtgggaaatccccattcattgtatgcgaagatgctgatgtagattaggctgttgagttaagcaactttgcattattctttaatcagggagaagctgctgtgcggg

SEQ ID NO: 163829 - DNA, 282 bp, Glycine max
cgcttcttctctcttcactctgcgaaggtgcaacctgacagcctccaaatccaatggcttcagagaagaaactttcgaacccaatgagggagataaaagtgcagaagctcgtcctcaatatctctgttggcgagagtggagatcgtctcaccagagccgccaaggtgttggaacaacttagtggccaaaccccagtgttttccaaagcacggtacactgttcgttcctttgggattagaagacatgagaagattgcatgctatgtcactgtcagaggtgaca

SEQ ID NO: 163830 - DNA, 284 bp, Glycine max
ctcgagccgctcgagccgttttttggcatcaaagtggttgaactcctggattctgattatggtattcccacggaactctcagatcttcaacagattcggtctttgtaccagccagagctccctccttgtctccagggaaccactgtgagggttgaatttggtgacgcaaccaccactgctgaccccactgatgtcatcaccgtctgcacggcttttcctaacacttatggacaccctttggctcactttctcagggccactgccaaagtccctgatgctcagat

SEQ ID NO: 163831 - DNA, 282 bp, Glycine max
gtttgtgtttgtcttttctctcacctgaaaatgtcttgctgcggtggtaactgtggttgcggaagctcctgcaagtgcggcaacggctgcggaggctgcaagatgtacccagacttgagctacactgagtcaaccaccaccgagaccttggtcatgggagtggcacctgttaaggctcaatttgagggtgctgaaatgggtgtgcccgctgagaacgatggctgcaaatgtggaccaaactgctcctgcaacccctgcacttgcaagtgcggtgttgggaga

SEQ ID NO: 163832 - DNA, 291 bp, Glycine max
ttcggatctagagtcttcagtttctcctcgttgttcttcgctttcctgttttcaatttcgattctttcgttaatttaataagatgtttgggagggcaccgaagaagagcgataatacgaggtactacgaaatcctcggcgtctccaagaacgcttcgcaggatgatctgaagaaggcttacaagaaagccgccattaagaatcaccccgacaagggcggtgatcccgagaagtttaaagagctggcgcaacttatgaggttctgagtgaccctgagaagcgtgagatatat

SEQ ID NO: 163833 - DNA, 263 bp, Glycine max
cttaaccatcactggcacataggtgtttattgctacacactagaagaattatggaagctctcaagaccctcttcttagccatttttgttgtcttggcttccgcattgtattcagcccatgccaaaatccaggagcatgaatttgttattcaagcaacgccagtgaagaggctgtgcaacacccacagcaccatcacagtgaatggacaattccctggtccaacattggaagtcaacaatggtgacactttggtcgtcaaagtc

SEQ ID NO: 163834 - DNA, 282 bp, Glycine max
gaaggagcaaaagccatgcttctgtggctacctcaaaaaccctagcttgaagcagtatgttaactctcctaatgccaaaaaaaccgttagttcttgtggtattgcctatccaacttgttaagcacctcttatatatatatatatatataaactgtgtgaacaatatatatatattgattaaaaaatatagtttaatttatatacacactttgatcctataaaaacatcttgacacaagcattcaatagaatttcaccactttatcatgacattttactataa

SEQ ID NO: 163835 - DNA, 283 bp, Glycine max
ctcgctcgacctagttagaactgtgctagggttttacgaaaccaccgaagttgcagaaagaagaagaaaaatggtggctgacaggagcaagaagccgaaggtctccgacaagggcgaaaacctcgatgaaatcgacggagaactcgtcctctccatcgagaagttgcaggagatccaagacgagcttgaaaagatcaacgaggaagccagtgacaaagttctggacatagagcagaagtacaatgagatacggaagcccgtttatgataagcgccatgatatt

SEQ ID NO: 163836 - DNA, 287 bp, Glycine max
aagaaacccatcctaagaataagaaggcagatctacgaaagaagagacccaatgaatctgcatcaaaaactccagtttcctccaagaaagctaagaatgccactcctgaaaagactgctggtaagaaaggtggacatacagcaactcctcaccctgcgaagaaaggtggaaagactcccagcagtgaagccaaagccaagactcccaacaatgaagccaagactcccatgtctggtggactctcttgcaaaagctgcagcaagtctttcaactctgaaagtggtctg

SEQ ID NO: 163837 - DNA, 290 bp, Glycine max
cccattccctgaaatagttaaatccttctgctccgcgtcttcttgttcctctcgcccagaatccgagatcaaccccgacgaaggcaaggggtttttctcggcttcttcagatttctgaaatggcgcctgtttcagctttagccaagtacaagctcgtcttcctgggtgaccaatccgtgggaaaaaccagcatcatcactcgcttcatgtatgataaattcgctaacacctatcaggctacaattggtattgattttctatcaaaaactatgtatcttgaagatcgaact

SEQ ID NO: 163838 - DNA, 292 bp, Glycine max
ggaaatggaagggatgagacactattttatgcttggcttggctccaagtgtgtaacggaggataaagcagctgccatttcccacatgagtactatggctgattcaatcagaactagtccggctatggctcaaatccatgagggtaacgaaccagctcaatttttctcaatacttcagagagtaatcatattcaagttcaggatataggaagtttatagaagaacaaggtatagtggatgacacttacaataaaaacctggttactttgtttcgggtacaaggtacaagtcca

SEQ ID NO: 163839 - DNA, 291 bp, Glycine max
gacttgatacaaccaaaaaacactccatctcctgtttctccaacaccaccagcagcttcttcaggtaacagtaatactggagctattgctggaggagttgctgctggtgctgctctgttgtttgcagcccctgcaattgcacttgcttattggcgaagaaggaaacctcaggatcatttctttgatgttcctgctgaggaggatcctgaagttcaccctgctcagcttaaaaggttttctttgcgtgagtgcaagttgcaacagataactttagtaacaaacacattctgg

SEQ ID NO: 163840 - DNA, 260 bp, Glycine max
  unsure (1)..(260): unsure at all n locations
ggtttttctttttctcttctcactaccatcgcttcaggttcnctctgaaaagatgtctcgcnngtatgttggtaacttggattcacgagtcactgagaganatctcgaagacgaattccgcgttttcggagttattcggagtgtttgggttgcacgtagaccacctggtnatgcttttattgactttgatgaccgcagagacgcacaggatgctatccgtgaatggatggcaagaatggttggagggttgagctttctcc

SEQ ID NO: 163841 - DNA, 280 bp, Glycine max
acaagaaggaggaggagcacaagggtgagcagcaccatggtggagaatacaaaggggagcatcatggtgaacacagtactgaatacaaaggagagcatcatgttggtgagcacaagccggagcaccatggaggagaagagcacaaagaggggttcctagacaagatcaaggacaagatccacggcgaggagggtggcaccgctgagggcgagaagaagaagaagaagaaggagaagaagaagcatgaacatggccatgacagcagcagcagcagtgacag

SEQ ID NO: 163842 - DNA, 277 bp, Glycine max
atccaaacgaagtaacgaaccaaccaatcaccctgtctttctgacccaaaaacatagtcccaaatcgaacaaaatcaatcaactaactcctccaacgttgttgttattatgcagacaacaagttccaacacctccggcgccacctcgatccgttccggcatggagctcttccaccgcgcgaacgcggtgcgcctccgtagccaccacgacaagtacctcctggccgacgaggacgaggagtccgtcacgcaagaccgcaacggatcctcccgcaacg

SEQ ID NO: 163843 - DNA, 270 bp, Glycine max
tcgagcacggcagggtttttagcgcgcactgttgtttcttgtggcgatataggtatcctgtgaactcagttggttataacttgctaacaggcagaaagttgttgaagtccctcaattgtgcttccctgcatcctttcccaaagtctctgtctggtgcaatggtttatataactgagtgggacaagtttgtggagcaatccattgagctgttccgtgcagatcctgattctacacggtacgtcatgaagtacaagcactgtgatggcaagt

SEQ ID NO: 163844 - DNA, 277 bp, Glycine max
atagtagcttccttcttcagtgaagctctttcgcgaaacactcccctttgccgctgttgttgttgctgcaccaccgaatcaattcccctgtaaatcgcgtttcgtttgtgcaaggttttaaaagatggctgatgctgaggacattcaacctcttgttgttgataatggaactggaatggtcaaggctggttttgcaggtgatgatgctcctagggccgtgttccccagcattattgggagaccacgccatactggtgtaatggttgggatgggtcag

SEQ ID NO: 163845 - DNA, 283 bp, Glycine max
tgggttcaacaggtgagactcagattactccaacccatgtatctgatgaagaggcaaaccttttcgccatgcaactagccagtgcctcagtactccctatggttctcaaatcagctcttgagcttgatctgttggaaatcatagccaaggctggccctggtgttcacctttccccctccgacattgcttctcggctcccaacacacaaccctgatgcacccgttatgttggaccgtatattgcgcctcttggcttgctacaatatcctctctttttctcttcg

SEQ ID NO: 163846 - DNA, 282 bp, Glycine max
ctgtattctaacgagtcacttgagcatgaccttcccggtcaccttctccgctaccccatcggggttgccagtgaaggagatgtcaccgagctgccaggatttgaattctttcccgacaccaaggctcgcattcttggtggcaaagctgactacctcccccctattctcactacttaatttgattttgtactttgttacaaacttgttattgcttacatcctaatctgtgttttcattactacttagtaataatcttaatatagtctgtgatgtcttgtggag

SEQ ID NO: 163847 - DNA, 276 bp, Glycine max
caacaaccatagccatggctttctccttctccaaagcacttgtccttgcctgctccttctgcttatttgcgtctttggcttttggacgcgatttctccattgtgggctattcatcggaggacttaaagtccatggataagctcattgaactctttgaatcatggatgtcaaaacatggcaagatttaccaaagcattgaggagaagcttcttaggttcgagattttcaaggataacctaaagcacattgatgagagacacaaggtggtcagcaact

SEQ ID NO: 163848 - DNA, 283 bp, Glycine max
caatttcattgctcagagttcccaaattctccccaagagataaaatgtctctaatcccaaacttcttcggtggccggagaaacaatgtgttcgatcctttctcactggacgtgtgggatcccttcaaggattttcctttcccaaatacgctttcttcagcttccttccctgaattttctcgggaaaattcagcatttgtgagcacccgtgtggactggaaggagaccccagaggcgcacgtgttcaaggcagatattccaggactgaagaaggaggaagtgaa

SEQ ID NO: 163849 - DNA, 284 bp, Glycine max
aattgttgtaactttttgattcctaaattctctaaaattcgacattctaatttcgttaggggaaagagattgtttgtgtgtgagtgagtatggctggaaaaggcgagggtcctgctatcggaatcgatttgggaacgacgtactcttgcgtcggcgtgtggcaacacgatcgtgttgaaatcatagccaacgatcagggtaacagaactaccccatcctacgtggctttcaccgacacagaacggttgatcggcgatgcggcgaagaaccaggtcgctatgaac

SEQ ID NO: 163850 - DNA, 288 bp, Glycine max
gcgcagttgaagttcttcttggaggatcctctcaacttcgattcgcttgctgtcgttttcaataagtcaagcagatttgccaggttgcagaacattcagtgtgctattgcgggcaagaatctgtacatgagattccgatgcagcactggtgatgccatggggatgaacatggtgtcaaaaggtgttcaacatgttcttgattttcttcaggatgacttccctgatatggatgttattggaatctctggcaatttctgttcggacaagaaagccgcagccgtgaattgg

SEQ ID NO: 163851 - DNA, 235 bp, Glycine max
gtggtcatgtcttgcctttcagcaagttcaagtgttttggacttgtgatgggtgtgttaagctcatggttgcttctttttttttttttttaatgtttggtaattggtcgcttctgtataaagttcggctaatctgaattatgaatctctgcttataatattaaatactattactggaaaaaaaaaaaaaaaaaaaaggggggccccccgcttattgaccccttcccccggggatt

SEQ ID NO: 163852 - DNA, 288 bp, Glycine max
ctttcttttttcccgcagtcatgggcaacgtcaagatcggaatcaacggatttggaagaattggccgtttggtggccagggtggctctgcagagagacgatgttgaactcgttgccgttaacgatcctttcattaccaccgattacatgacatacatgtttaaatacgacagtgttcacgggcactggaagcatcacgatgtcaccgttaaggatgagaagacccttctcttcggtgacaagccagtcactgtttttggacacaggaaccctgaagagatcccatgga

SEQ ID NO: 163853 - DNA, 288 bp, Glycine max
  unsure (1)..(288): unsure at all n locations
gatgtccttaaaatcaccaacaatttcaatacaattgttggtaaaggaggatttggaacagtttatctgggctatattgatgacactccagttgcagtgaaaatgctttccccatcgaccattcaaggttatcaacaatttcaagctgaggttaaacttctaatgagagttcatcacaaaaatttgacctcccttgttggttattgtaatgagggaaccaataaggctctcatatacgagtacatggctaatggaaacttacaagaacatctatctggtanacgcagc

SEQ ID NO: 163854 - DNA, 286 bp, Glycine max
ggaaccaagtttttgaagaatggtgatgctggttttgttaagatgattccgaccaaacccatggtggttgaaactttctctgagtaccccccacttggtcgctttgctgtcagggatatgcgtcaaactgttgctgtgggagtcatcaagaacgtggagaagaaggatcctactggagccaaggtcaccaaggctgcccagaagaagaagtgaatcgtgcggtttggttcatcaggggatgtcgtttcttatggttacaataaatgttggtttcttgcacttgtgt

SEQ ID NO: 163855 - DNA, 293 bp, Glycine max
tttctcatcatcgaagcccgtcgcgagaagaagctgcttcgtcgcggttcccaaaatcgcgtttaccaagctccgtttcaaacccgtcgctatggctacgctcggcgctcgcatggtggccgccgcacccaccgtcactccgccggcctcgctcgacttcgaaacctccgttttcaagaaggagaagattaacctcgctggacacgacgagtacatcgtgacaggagggcaggatttgttccctctgttgcagggtgctttcaaggggattaagcagattggcgtcattggat

SEQ ID NO: 163856 - DNA, 286 bp, Glycine max
gacgatgttgggtgtcctccgcagcaacgctgggttcctccgccgcctcacctccctctccgtccccctccggcaccggtcgagcaaggcggcggcggcgggtggacatgtggtggaggttgacatggcggagtacgacgtggcgctgaagcacttcgacgacctaatccagcgcatcctcgtcaagaagaacacaccggactggctccccttcgtgcccgggtcctccttctgggtcccaccgcgactctctccctccaacgtcgccgacctcgtccacagctct

SEQ ID NO: 163857 - DNA, 285 bp, Glycine max
attgtgcattcctgtgctgtgctggtgatgggtatggtttggatttcaaatgtcattcttctcgggtaatgagatgcatcaagttttgaagtacagtgagcagggatggacattgctgctcttttaacttctgctggaattaatattgctgtgtgtgtggtgctcttttcattttattctgtattaagaaaacaacccagcaatgttaatgtgtactttggaaggagactagcctctcagcattcaagacgcattgatctctgcttggaaagatttgttccctcc

SEQ ID NO: 163858 - DNA, 284 bp, Glycine max
cagatcggtgctctcgccgtggcgctgaagcaggccgcgtcgcccgggtttaaggcctacgcgaacaggttaaggcgaacgccgttgcgcttggaaaatacttgatggggaaagggtacagccttgtcactggcggaacggagaaccatcttgttttgtgggatctgagacctcttggattgactgggaataaggtggagaaactctgtgatctctgtaacattactgttaacaagaacgctgtttttggtgatagcagtgccttggcccctggtggagtgcga

SEQ ID NO: 163859 - DNA, 287 bp, Glycine max
gagaagggaagagagtccatttataagacggaagtcagagaagcttcaaagttagagaaaaacaacaagaggaaggaggacagagtgagcaacttacccgatgaagtgcttcatcgcatactttccactttggacgcaaaaacagcggttcaaacgtgcgttttgagcaagcgatggaggcacgtttggacttccctaccagtcctcaacttcctcgactcttccttcgacgattttcaccatttccagtgtttcgtggaccattttctgtctcgcagagatgcttc

SEQ ID NO: 163860 - DNA, 283 bp, Glycine max
caaatgtcgaaccatttgatttgtctggagaaacacatattcttcgctgcgttgttaaatagggttttggtgattcctagctccaaggtggattaccagtacgatagggttgtggacattgatcacattaacaagtgcttggggaagaaagtggtggtttcgtttgacgtgttttcgaatttgaagaaggggcatttgcacatcgataagttcttgtgctacttttcgcagcctcagccttgttacttggatgatgaacggttgaagaagttgggtgcgttgg

SEQ ID NO: 163861 - DNA, 286 bp, Glycine max
cctcaaacagtcttagtcaaagggcaggttgaagaggagaagggtggaatcaagaccgatgctttcttcaaaactaatctctccgatgtatatgctgttggtgatgttgctactttccctttgaaattatacggtgaattgagaagagttgaacatgttgatcattctcgcaaatcggctgaacaggctgtgaaggccatcaaggcagctgaggaaggaaaaacagttgaggagtatgattaccttccatacttctattcccgttcattcgatctgtcttggcaat

SEQ ID NO: 163862 - DNA, 293 bp, Glycine max
gtgaattgggaggatgctgtgtctgggtcgattcggcggggtctctcactacccaatcaaatccggttggagtcggagggactacaccaataacaggcccagatggtgtttgatggccgcccaggaatccgactcttcttttgcaccctctcttgactccgacaaaaccgccactgctggattctgcatcattgaaggcccagaaacggtacaggattttgccaagatggaacttcaagaaattcaggacaacattcgaagtcggaggaacaaaatcttcttacacatggaag

SEQ ID NO: 163863 - DNA, 291 bp, Glycine max
caagccccactcaaccaccacacaactctctctgctcttcttctacctttcaagtttttaaagtattaagatggcagagacattcctatttacctcagagtcagtgaacgagggacaccctgacaagctctgcgaccaaatctccgatgctgtcctcgacgcttgccttgaacaggacccagacagcaaggttgcctgcgaaacatgcaccaagaccaacttggtcatggtcttcggagagatcaccaccaaggccaacgttgactacgagaagatcgtgcgtgacactgc

SEQ ID NO: 163864 - DNA, 258 bp, Glycine max
ctctaattacatttctaatctcattctccttctgttcaaacactctcatggcatcagataagaagattaggatcggcatcaacggatttggacggattggccgtttggtggccagggttgcccttcaaaggaatgatgttgaacttgttgctgtcaacgatcctttcatcaccactgattacatgccatacatgttccagtacggcaacgttcaatggccagtgcaagaattttgatgtgaaggtgaaggcctctaag

SEQ ID NO: 163865 - DNA, 280 bp, Glycine max
tacaggaccaattcccggttgcacttctcagggttacactctgcatgttgaaagtggcaagacctatcttctacgcataataaacgcagctttgaacgatgaactgttcttcaaaattgcggggcacaagttaacagtggttgaagcagatgcatcttacgttaagccttttgaaacagacacaattttcatgagcccaggccaaaccaccaatgtcctattaaccgctaaccaagttgttggcaaatacctaatagcagttactcctttcatggacgcc

SEQ ID NO: 163866 - DNA, 284 bp, Glycine max
tgcaatcgctcaaccagctttggacatgcctgagctgttgtggaaggcatacattaactttgagactgctgagggtgaatttgagagagcaagagcactttatgaaaggcttcttgatcgaacaaagcacttgaaggtatggttaagttatgcagaatttgaggcaacagctatggatatggacagtttagacttaccagaagatgaacaaaagaagcaatgcattcagtgtgctagaagggtgtttgagcaagctcttaactacttcagatcatcagctccag

SEQ ID NO: 163867 - DNA, 182 bp, Glycine max
tcaattttgagcacttaccaacaccacttccaatggcttcatatcatgaagaagaagtgaggctattgggcaagtgggccagcccatttagcaacagagtagaccttgctctcaagctcaagggtgttccctacaaatactccgaggaagatcttgctaacaagagtgctgatcttctcaag

SEQ ID NO: 163868 - DNA, 275 bp, Glycine max
aaagcagagaagaataagaaaatgggtgtgttcagtacagtgctgctgtgccttatgtccctaatgtggatggtggatgctcgaattccaggcgtatactctggcggcgcttggcaaaatgctcacgctacgttctacggaggatccgatgcttccggcaccatgggtggagcatgtgggtacgggaacctgtacagccaagggtacggagtgaacactgcagcgttgagcacggcactcttcaacagcgggctgagctgcggacgtgcttcgag

SEQ ID NO: 163869 - DNA, 278 bp, Glycine max
actcgagccgattcggctcgagtccagccatgacttttgtgatggacctgttttgccggatacagaagatagaaataaagaacgtgagatgcatggcaaagatagtgggaacattagtcacagtggcaggggctatgctgatgaccttatatagaggtcctatagtggagatggtatgggccaaacatccacacaataaaaccaatgcaacaaccacgacagaatcatttgacaaagattggttcttaggatgcacctttcttatcattgccacccta

SEQ ID NO: 163870 - DNA, 251 bp, Glycine max
  unsure (1)..(251): unsure at all n locations
tacttgcaagaatggcacttcgttgcttggtgatgtccacttctgttctcttcactcttggtcttgcgagacaaagccatgccagacacgaagatttttggcatgctgtttggccaaacactcccattccaagttcattgcgacctattctanagcctggccctgcaagtgttgaaatcgatgatcaccctatggaaattgaagaaacacagtacccgaaaaccttcttctatagagccgaccttcatcca

SEQ ID NO: 163871 - DNA, 276 bp, Glycine max
cttcacgttcgatctttcgcttctgaatctccaacgatggtgctcgaggcgactatgatctgtattgacaattcggaatggatgcgtaacggggattactctccttcacgatttcaagcccaaacagacgccgtcaatcttatttgcggtgctaaaacccagtctaatccagaaaatacggtgggagttctcacgatggcggggaagggcgttcgtgttttggtgacccctaccagtgatctgggcaagatcttagcttgcatgcatggactagaa

SEQ ID NO: 163872 - DNA, 212 bp, Glycine max
agcgttgttgcattgcagaagcgtctccattttctttcgcgatggccgcgcgaaccctgttgaccagaaaaaccctagccaccgttctccgcaacgacgcgaacccataatcacagatggcatagctgcagctactcattctcgtgggttgcacgtgtacacgctccccgatctggattacgactatggcgctctggagccagccatcagcg

SEQ ID NO: 163873 - DNA, 225 bp, Glycine max
gatggcacaaacgctggcaatgcccgtggcaccttcgctcgctatcatctccaattctcgcctctccaagacactctccgttcccgttctcaacaacccaaagtttcaagggttaagcatcaagtgcgttcgtgttggaggtgtggagattccgaacaacaagcgaatcgagtactcgctgcagtacattcatggagttggcaggcccagaccaaacagttctgt

SEQ ID NO: 163874 - DNA, 273 bp, Glycine max
gacaaaaggtttaagaccttgcctgctgcggagacactcccgcgcaatgaggtgcttggaggatacatctttgtctgtaacaatgacacaatgcaggaagacttgaaacgtcagctatttggtttgcctccaaggtatcgagattctgttagggctataacacctgggttaccattatttctttataactatactactcatcagctgcatggtatttttgaggcagcaagttttggtggctctaacatagatccaactgcctgggaggataaa

SEQ ID NO: 163875 - DNA, 275 bp, Glycine max
atccctctctctatctctcacacacactttctcactctctctctctcacccagatcttgtagcaatggcgagcgctcccactccacgcgaagagttcgtgtacatggcgaagctggcggagcaggccgagcgctacgaggagatggtggagttcatggagaaggtctccgcctccgccgagagcgaggagctgaccgtggaggagcgtaacctcctctccgtcgcctacaagaacgtgatcggcgctcaccgcgcctcctggcgcatcatctcct

SEQ ID NO: 163876 - DNA, 272 bp, Glycine max; identical to SEQ ID NO: 154425

SEQ ID NO: 163877 - DNA, 276 bp, Glycine max
gcaagaatggcacttcgttgcttggtgatgtccctttctgttctcttcactcttggtcttgcgagacaaagccatgccagagacgaagatttttggcatgctgtttggccaaacactcccattccaagttcattgcgagatcttctaaagcctggccctgcaagtgttgaaatcaatgatcaccctatgcaaattgaagaaacacagtacccgaaaaccttcttctataaagaagaccttcatccaggcaaaacaatgaaagtacaattcagcaag

SEQ ID NO: 163878 - DNA, 273 bp, Glycine max
cttcatcagatcacacaatcaagataattggggtgagcaactcggcctctcagcatctagcaaccttgaccggtcaccaaggacctgtatggcaagtggtgtgggctcaccctaagtttggttctctacttgcgtcttgttcctatgatggccgtgtcattgtttggaaggagggcaaccaaaatgaatggactcaagctcatgtgtatgacgaccacaagtcatctgtgaattcggttgcttgggcgcctcatgagttgggtctctgcttgg

SEQ ID NO: 163879 - DNA, 279 bp, Glycine max
gtggaaaatgggagcttcattgcaatgccaagggagcacaactcttggaagccaattgcaaagatttaaacttggatgatttgggtgattttgtgcctacccatttggtgtcacaactcatacccaacattgactacaatgtcctagttgaggacatacctttgttggttgtgcaactaacgaggttcccttgtggcggtgttaccattggggtggccttgtgtcgttgcacaatcgacggaaccgcgtccatgcggttcatgaccacgtgggccaagt

SEQ ID NO: 163880 - DNA, 264 bp, Glycine max
actcgagccgattcggctcgagtgaggatgcggttggagaagatgtactgggtggactaaccacagtcttagaaaaaattggtctggatatgcgtgttgcagctctagttaatgacacagttggaactgtggctagagctagattcagcaatcaggatgtcattgctggagtgattcttggtacagggacaaatgcagcttatgtagagtgtgcacatgcaattccaaaatggcaaggtcttctaccaaaatcaggagagatgg

SEQ ID NO: 163881 - DNA, 269 bp, Glycine max
ttttgatctgtgcaagtgatcttgaaaggagggaacaacaatggtgaagtctataaactttctcctacttctgtctctactagcctttgctcccttatgtcactgtaaaaagaaaataggaggttacctctaccctcaattctacgacggttcatgccccagagctcaagagattgtccaatccatcgttgccaaggcagtggcaaaagaaccccgcatggctgcttcgttgctcagactacatttccatgattgttttgtcaagggct

SEQ ID NO: 163882 - DNA, 274 bp, Glycine max
cacacaatagcaaagaagggaagactaaaactaaaaccccactctctttttccgagtcatccagtgaaagaaaggcagcgatggaagaagacttcgacatccccggcggcgaggaaatggatctcggcgaagacgaggtcggcgaggagagggagatcggctctggcggcctcaagaagaagctcctcaaggaaggtcaaggctgggaaacccccgaagtcggtgacgaagtccaagttcattacacggggactttgctcgacgggactaagtt

SEQ ID NO: 163883 - DNA, 295 bp, Glycine max
tggcattagaaaaattcttccagattctgagatttgtgactttgactttgagccatgtggttattcaatgaactctgttgaaggtgctgctgtttctaccattcatgttaccccagaagatggtttcagttatgcaagctcttgagactgttgggtatgacttcaaagtggtgaatctgaacgacatggttaagcagggtattggcatgttttctcccaactgagttctctgttgcagttcatgtggatggtgcaagcacgctgtttgatcagacgtgttttctggatgttaagg

SEQ ID NO: 163884 - DNA, 150 bp, Glycine max
  unsure (1)..(150): unsure at all n locations
agattccgatgcagcagaggtgatggganggggaggaacatggtgtcacaaggtgcaaaatgtgtgcatgcttgtctacaacatgacgtccctggtatggatgttagtggaatctctggcaatgtctggtcggacaagacagtcgcagcc

SEQ ID NO: 163885 - DNA, 256 bp, Glycine max
gccgccctttttttttttttttgatggggggaccgaaattgtttcgacctgttccacccagtctttcttgggatttctactgaaggggtcggtcctcccatcgggtttgttttagaacgtttacctagggtttctttatcaagagttccccggggatgtcagaggccgtaccccgcttgttttggaggggcacctttttttttcagaataggccttggacgattttccctcccctgggtagtttaggtgtttacgt

SEQ ID NO: 163886 - DNA, 287 bp, Glycine max
gtcacaaccaaacaccatttcattaattcttgcagaatattgcttagttttgtactatctgaattttgaaacagcttttgaatggctttttcaagagttgcactgctaatatgcacggtcgggtattttgtgattgcctctgccggcaatttccaccaagattttgatagaacatggggagatggtcgggctaagatactcaacaatggagagcttctcactctgtcacttgacaaagcctctggctcgggtttccaatccaagaacgaataactttttggcaaaat

SEQ ID NO: 163887 - DNA, 288 bp, Glycine max
ctggaatacaagaacatcagcttcactgtctgggatgttcactctcaggacaagatccgtcctttgtggagacattacttccaaaatacacaaggactcatttttgtggttgatagcaatgacagggaccgagttgttgaagctagagatgagttgcatagaatgttgaatgaggatgagttgagagcaatgacagggaccgagttgttgaagctagagatgagttgcatagaatgttgaatgaggatgagttgagagatgccgtgcttctagtttttgccaacaagc

SEQ ID NO: 163888 - DNA, 293 bp, Glycine max
aagataagaaaaaagaaaaaatgtttgcagggaaagggcgtgtttggttctccagagcgcgtggcgttggcagcaatcgcggtggtagcttgcgttggccttacacaggcccaacccgaggccaggttcaactgcaacagcgcgaacatccccacgtgtcgcgcgctcataagctactctcacccgaacaccaccaccctcggcgacatccaaaagctcttcaacgtgaaacacatcctcgacatcgtgggagcgaacaacctcccaagcaacgccacaaaaacatacgcggt

SEQ ID NO: 163889 - DNA, 286 bp, Glycine max
  unsure (1)..(286): unsure at all n locations
ctcgagcgtgttgatcgtgggaagcaaagtttggagacaatatgtctccttctggcttataaaataaaatatcccaacaactttttcctactgaggggcaaccatgaatgtgcttctataaaccgcatctacggattttatgatgagtgtaaacgaaggtacaatgtgaggctttggaaagtgttcacggaatatttcaactgcttgctngtggcagctctaattgatgaaaagatactttgtatgcatggtggactctctcctgagttacacaatctgaatcaga

SEQ ID NO: 163890 - DNA, 285 bp, Glycine max
tcagagagagaagttttcagtttcagaaagaaagcaaaagcaatagcaatgggttggatcggtgagactgttgattccatcaaatctcttcagatccgccaggtcctcacccaggctgtgagcctaggcatgattgttacgtctgcactgataatatggaaggcattgatgtgcgttactggcagtgaatctcccgttgttgttgttctttctggaagcatggaacccggattcaagcggggagacatcttgttcttgcacatgagtcaagatcctattcgggca

SEQ ID NO: 163891 - DNA, 276 bp, Glycine max
atgagactgacaaaaagttcagtgtcggtatgaggtttaagatgagattcgagggggatgattctgctgagactgacaaaagattttcgggtaccatagttggagtggaagatatttctcctcattgggtaaattcaaaatggcgataactcaaggttcaatgggatgaacctgcagctgttcccagacctgatagggtctcaccatgggagatagaaccctttgttgcttctgcttctacaccctcagttcaaactactatggtaaagactaaaa

SEQ ID NO: 163892 - DNA, 282 bp, Glycine max
gtcgagtttgaaaaataagtcacttcgcccaaataaacaagggagtggcgtggatctggttttaagttgtgtggataattatgaagcaagaatggctgttaaccaggcttgtaatgaattgagccaaacatggatggaatcaggtgtttctgaggatgctgtttctggccatattcaattacttattcctggagaaactgcctgtcttgcgtgtgcacctcctcttgttgttgcatctggggtagatgaacgtacgctcaagcgggaaggggtttgtgctgc

SEQ ID NO: 163893 - DNA, 189 bp, Glycine max
aggtagaatacacaaccaactgccatgatccactcgctaaggtaatgaataacaggtctggcattgtcgctagtttgctcaccactggagatgccatcactgatacccaggcgactgttgatgggccatcagccaaggactggagatgtagaagtctgcttcacatatcatcactcctagcaccatgga

SEQ ID NO: 163894 - DNA, 307 bp, Glycine max
ttcggctcgagcgaatttcgatgctcagtcatctcttttaccattctcttctctcttgctcttgcaggagagagccatgtccatgcatcgctacctgaggaagattattgggaagctgtttggccaaacactcccattcccactgcactgcgagagcttctaaagcctctccctgcaggtgttgacatcgatgaactccctaagcaaattgatgatacacagtacccaaaaacattcttctataaagaagaccttcatccaggcaaaacaatgaaagtacaattcaccaagcgtccctatgcacaac

SEQ ID NO: 163895 - DNA, 291 bp, Glycine max
cacatacattcccctaaccaagttttaagtttttctcaacagaatggaagcaaccaacagaagctctttcctccacttcctcttcctctgattgctgctcttccgagtccaaccccaacaagcccgacagaatcaaaggcccatggagcgccgaagaggatcggatcctgaccggactcgtcgaacgatacggcccacgaaattggtccctcatcagccgctacattaagggaaggtccggcaagtcatgccggctccgatggtgcaatcagcttagccccgccgtggagc

SEQ ID NO: 163896 - DNA, 284 bp, Glycine max
tgctacccggtgagaattaagttttatcacgcatctaaccttgtacaaattgcaggacagatcaatatgccctcaatttgtaggggtagtagagtttttggagtgaaaatccgtttcaaattgtggtcgtccagggtggtgggtcttcgggttttatagtaattttgattcaatttcacgctattgacaacaggtgaaggactttcatagggtgtgttgttcggttttggaactggacttaccattgaaactgttgtcttgcatagtgtggccatctgagatgc

SEQ ID NO: 163897 - DNA, 285 bp, Glycine max
ctagtcaccaaccaaacctctgcattattctcttctctcactctctctaagctctcttttagtcttactcacaaacacttttttcactgcttccattacgaacatatatttattatatggctcctgaacttgtccccaccgttgtgaaatccagtgctgcgttcacgaaacccgcgacccttccaaggcgtgcctacgtgacattcctcgccggaaacggtgactacgtgaaaggggtggttggcctcgccaaagggttgcgaaacgtgaaaaccgcgtacccgt

SEQ ID NO: 163898 - DNA, 270 bp, Glycine max
cttcttccttcactcaatctagtttatacggtatttggagtttctccaaaatgagccggccaatggaggaacttactgtgggtaagaatgaggaagaggagttcaacactggaccgctgtccgtactcatgatgagtcttaaaaataatactcaggtactgataaattgtcggaacaagaaaaagcttctgggtcgtgtaagtagcttttgataggcactgcaacatggtgcttgaaaatgtgagggagatgtggactgaggtgccataa

SEQ ID NO: 163899 - DNA, 280 bp, Glycine max
ctcgagcgtttgtgtggcaggttctcgtgtgtttgtccaggaagagatctatgatgaatttgagaagaagttggtggagaaggcaaaatcttgggtcgttggggatccttttgatcccaaatcgctgcaagggcctcaggctgacaggaaccaattggagaaaatactttcatatattgagcacggaaagagagaaggagccacccttttgacaggaggtaatacagtgggcaacaaaggttactacatagaacctacaattttctccaatgtaaaggag

SEQ ID NO: 163900 - DNA, 283 bp, Glycine max
agaatatagtatggcacaatctagtggtaaaaaattggttgagtggctggttgcagcattattgttcattgccttgttgagtggtagtgcacatgctgttgcaatatgtaacattgactcaagtcaactgaacttgtgtcgtgctgcagttactggtcaaaaccctccaccacctgatgagaaatgctgtgcagttattcgccaggccaatttgcgttgcctctgcagttacaagtctatcctaccttcatttggcattcaacccagaaatgctttggccttg

SEQ ID NO: 163901 - DNA, 281 bp, Glycine max
atctatcttgtgccacttatatagtacgtccatcctagtgaaacaaaccatggtttccgaaacaaaccagtccaagaatgtgtgtgtaattggagctggaccatcagggctagtggcagcgagggagctgaaaagagaaggtcatcaggtggttgtgttggagcagaaccatgatattggaggtcaatggctatataacccaaatgtacaagaggaggaccctttgggaagagaccttggctaaaggtgcatagcagcatctatgagtctttaaggctcat

SEQ ID NO: 163902 - DNA, 281 bp, Glycine max
ttgatttctccctcttcgctctctctcagtgaccagagacagatgatgatggagatggcgaacgaatacgctgtcgttgcggcactcgcggcgttggtgctactcgcggcgagtgtggcggtggatgctcaggagaactcggacgtgaagacgctggtgaagtacaagcacgggaagaagtactgcgacaaaggatgggaatgtaagggctggtcaatttactgttgtaacctcaccattaccgattatttccagacctaccagttcgagaatctgttctc

SEQ ID NO: 163903 - DNA, 284 bp, Glycine max
cgctataatttctgcccccagtaaggatgcccccatgtttgtagtcggtgttatcccagcacgagtacaagccagagcttgatattatttccaacgctatctgcacaaccaactgccatgctccactcgccaaggttatcaatgacaggtttggcattgttgagggtttgatgaccactgttcattccatcactgctacccagaagactgttgatgggccatcagccaaggactggagatgtggaagagctgcttcatttaacatcattcctagcagcactgga

SEQ ID NO: 163904 - DNA, 279 bp, Glycine max
ctggattgcacaccctggtgggcctgcgattttagaccaagttgagcacaagttgggtctcaaacctgagaagatgaaggccactagagatgtgcttagtgaatatgggtacatgtcaagtgcttgtgttctattcatcttggatgagatgatgcggtaatctgctaaaaatggacataaaaccatacgtgaaggactttcacggggtgtgtcgttcggttttggacctggacttaccattgaaactgttgtttcgcatagtgtggccatctgagatgc

SEQ ID NO: 163905 - DNA, 279 bp, Glycine max
tcattttccaaacgagcatcttcgtagtttcttaagtcaagagaagaagtgaagtgctgcttcaatggcatcaagtcaggaagaggtgatccttttgggggttattggaagcccatttctgcacagggtgcagattgctctcaaattgaagggagttgaatacaaatatttggaagatgatttgaacaacaagagtgatttgctcctcaagtatgacccagtttataaaatgattccagtgtttgttcacaatgtcaagcccatatccgagtcccttgt

SEQ ID NO: 163906 - DNA, 277 bp, Glycine max
ctacaacaggtatggtggtggagccaatgaactcagtgaagggtacagcacaggtgttggattgggtgctgagattattggaaccttcgttttggtctacactgtcttctctgcaactgaccccaagaggaatgctagagattctcatgtgccggttttggcaccacttccaattggctttgctgtgttcatggttcacttggcaaccatcccagtaacaggcactggcattaaccctgctaggagcctaggagctgctgtcatgtacaaccaacag

SEQ ID NO: 163907 - DNA, 280 bp, Glycine max
gattgctagaatggaatttcgatgctcagtcatctcttttaccattctcttctctcttgctcttgcaggagagagccatgtccatgcatcgctacctgaggaagattattgggaagctgtttggccaaacactcccattcccactgcactgcgagagcttctaaagcctctccctgcaggtgttgaaatcgatgaactccctaagcaaattgatgatacacagtacccaaaaacattcttctataaagaagaccttcatccaggcaaaacaatgaaagta

SEQ ID NO: 163908 - DNA, 278 bp, Glycine max
cacatagtagctattatactctctagacacttgcggaatctgctagaattctctaataatggcgaaagacgttgagcaggtcacagagcaaggtgaatactccgcgaaggactaccatgaccctcctccggcaccgttgatcgacccagatgagctcacaaagtggtccttgtacagagccgccatagctgagttcatagcaacactcctttttctttacatcaccgtgttgaccattattggctacaagagacagagtgacaccaaaatccccggta

SEQ ID NO: 163909 - DNA, 281 bp, Glycine max
tgagcagcaactcaggaaaactggtgtgtgtgactggtgcttctggtttcattgcttcatggatcatcaaactgcttctccaacgtggtaccactgtcagggccactgttcgcgacccatctaaacccgaaaaggttgatcacttgctcaaacttgatggtgcaaaggagaggctacatctctttaaggtagatctgctagaagaaggttcctttgactctgcttttgagggttgtgatggtgtctttcatactgcttcacccgttcatttcattgttact

SEQ ID NO: 163910 - DNA, 285 bp, Glycine max
caggtccacacatagtaaggatagaccagactgagagctctttcttgattctatgggtggtggtgcatccccgttcttagttggtggagcgatttgtctggttaattccgttaacgaacgagacctcagcctgctaaatagctatgtggaggtaaccctccacggccagcttcttagagggactatggccgcttaggccacggaagtttgaggcaataacaggtctgtgatgcccttagatgttctgggccgcacgcgcgctacactgatgtattcaacgagtct

SEQ ID NO: 163911 - DNA, 217 bp, Glycine max
accaaaccaaagcaagaatagtgttctaagagtgagcaacaacttcaaacaccattgtgagaaatggcttccaagggtgcacttctcttgtgtctcaacattctcttcttcactgtggtaagctccacatatgtcccatgcaacccaccccctaaaactcctaaacacacacctgtcccaaagccatcttccccaaagcaaccaagttgccccaaag

SEQ ID NO: 163912 - DNA, 267 bp, Glycine max
atttaaggagcctgttattcaaaattataccaggcagattgtctctggaattgcttatctgcatacgcgaaatacagtacacagggatattaaaggggcgaacatactagttgatcctaatggtgaaatcaaactggcagactttggaatggctaaacatataaattcttctgcctcgatgctttcattcaaaggaagtccatactggatggcacctgaggttgtaatgaatacaaatggctatagtcttccagttgatatatggag

SEQ ID NO: 163913 - DNA, 276 bp, Glycine max
agaatatagtatggcacaatctagtggcaaaaaattggttgagtggctggttgcagcattattgttcattgccttgttgagtggtagtgcacatgctgttgcaatatgtaacattgactcaagtcaactgaacttgtgtcgtgctgcagttactggtcaaaaccctccaccacctgatgagaaatgctgtgcagttattcgccaggccaatttgcgttgcctctgcagttacaagtctatcctaccttcatttggaattaacgccaaaaatgcttt

SEQ ID NO: 163914 - DNA, 279 bp, Glycine max
atgagctgcttacgtccgatggacaggatttcttcacatcctacgatctcaattacgacagttttgatgctatgggcttgcaagagaacctcctctgaggcatttacgcatatggttttgagaagccatcagctattcagcaaaggggaatagttccattctggaagggacttgacgttatagaacaggcccagtctcgaactgggaaaacagcaactttctgctctggaattctgcagcaacttgactatagtgtgactgaatgccaagccttggttt

SEQ ID NO: 163915 - DNA, 226 bp, Glycine max
cacatatacaaattctctgtgttgtgttgtgtacttgtgctaattgtgttgttgctgtaggaactttaagtgcagagagaatgatgatgaagtctgctatgtgtgattgcgtgcttgtggcactggttgtggtctgaagtggggcccatggctgaggctgcggtgactttcaacccagcacagttgactccttgtcttccggcaatcaattcaggttctgcacctt

SEQ ID NO: 163916 - DNA, 222 bp, Glycine max
gcttcttctccttctgaactaagagatggggttgtctttcaccaagctttttagccggctctttgctaagaaagagatgcgtattctcatggtaggtcttgacgctgctggtaagactaccatcttgtacaagctcaagctgggagaaattgtcacaaccattcccacaattggattcaatgtggagactgtggaatataagaatattagctttactgtatg

SEQ ID NO: 163917 - DNA, 223 bp, Glycine max
cttctcttgaattcacatttcaacaaccatagccatggctttctccttctccaaagcacttgtccttgcctgctccttctgcttatttgcgtctttggcttttgacgcgatttctccattgtgggctattcatcggaggacttaaagtccatggataagctcattgaactctttgaatcatggatgtcaaaacatggcaagatttaccaaagcattgaggaga

SEQ ID NO: 163918 - DNA, 222 bp, Glycine max
catcaattgactgtattgcaaatactccgcaatcattgttgcctgggatgaaccttttcttatcacatcttgatatcacatttagaagggacccaactaattatcgcccaaggatcaacaaacttgattcaaccaaggacagagaacaaaagtctgccgggtcttattattaccttgatgactgagttcatactttggggctgttctttcaccaacacaacc

SEQ ID NO: 163919 - DNA, 226 bp, Glycine max
gcagcttgattacagcttagtagaatgccaggcactggttcttgctcccactcgtgaacttgcacaacaaattgaaaaggtcatgcgagcactaggggactatccggtgtcaaggttcatgcttgtgttggtgggaccagtgttcgtgaagatcaacgcatcctctcaagtggggttcatgttgttgttggtactcctggacgtgtatttgacatgctgcgcaggc

SEQ ID NO: 163920 - DNA, 220 bp, Glycine max
  unsure (1)..(220): unsure at all n locations
cccaattctcaagccaaccatgtcttccttcaagagcaagtaccaagatgaactcattgccaatgctgcttacattggcaccccagggaagggtatcctgctgtgatgagtcaactggtacaattggcaagcgattggccagcattaatgtcgagaatgttgaagcaaataggnctgctcttcgtgaactcctattcaccacacctggtgcttttgagtg

SEQ ID NO: 163921 - DNA, 221 bp, Glycine max
tgcacaactccaccactgtgcaattctcgacgaggaacctgttgatcagaagagatatcttgaagagtcttgcaaaccaaaatgtgtaaaaccattactagtataccaggcgtgcattaaaaggatacatggtgatgaatctgggcagaaacactgcactggacaatattttgattattggtcttgtattgacaaatgtgttgcaccgaagctattcacca

SEQ ID NO: 163922 - DNA, 216 bp, Glycine max
tgaaacacagttggtgttccatctgggggatggactgctatcagattcagagctgataatccaggtgtttggtcttatgcattgccatttggcaattcatacacttggggattgaagatggcatttgtcgtggacaatggtaaaggaccaaatgaatctctactaccagctccaagtgatcttcccaagtgttgagaagacgactaatacgcaatc

SEQ ID NO: 163923 - DNA, 224 bp, Glycine max
gcttgtgtaattgtaggtggtttcggttcttatctcctgggtttgaataggaggacttatgagcaagcaggggttggcacagaggggaataatccgggtagtacaaggagcctggaattggatggatgacagcctttctctttgtgaccagctttgttggattgttggcgttggttcccattcgaaagattatgataatagactacaaattaacttatccaagt

SEQ ID NO: 163924 - DNA, 221 bp, Glycine max
ctcgagcgtgcaattgttggccatgttgattctggaaaatcaactctatctggcaggttactgcacctattgggacggatttcccagaaagaaatgcacaatatgaaaaggaggccaagttacagggcaagggatcctttgcttatgcttgggcacttgatgaaagttctgaagaaagagaaagggggataactatgacagtggctgttgcttattttgac

SEQ ID NO: 163925 - DNA, 220 bp, Glycine max
gagctggttccgctgattgtttcagccagatgatgtcgtcgatgccgggttttcgcttccatcccacggatgaggagttggtgatgtactatctgaagcggagatttgtgggaagaggctgaagctcgacgtgattcatgaaaccgatgtgtataagtgggatcccgaggatttgcctggttagggtaccaatcgttgacttgggtttgcttcaataagg

SEQ ID NO: 163926 - DNA, 220 bp, Glycine max
  unsure (1)..(220): unsure at all n locations
ggtggaggtgccttttcagggaaggaccctaccaaggttgacagaagtggtgcctatatcgtgaggcaggctgcaaagagtgttgtggcaaatggccttgcagnaaggtgcattgtccaagtttcctatgccattggtgtccctgagcccttgtcagtgtttgttgacacttatggaactgggaagattcctgacaaggagattcttcaaattgtgaagg

SEQ ID NO: 163927 - DNA, 220 bp, Glycine max
aaaatttacaacagatgttgaaagtaaagtcggtggtatgattcatcattctctttcagtttttggcattgaagaatctgagatcggaaaattcacctctcaacccccaatcccatcgttgcaaatgatccgattcattctgttgcagaacaggcagggcaagacacgtcttgccaaatactacgttcctctcgaggattccgagaagcacaaggtggaa

SEQ ID NO: 163928 - DNA, 221 bp, Glycine max
atttaatcctatcctatcgtagcaaagaaagaaagaaagaaaaccctagcttaccttttcaactttcaagatgcaaatcttcgttaagacactcactggtagacaatcacccttgaggtggagagttcagataccatagataatgtaaagtccaagattcaagacaaggaagggatcccaccagaccagcaacgtctcatttttgctggcaagcagcttga

SEQ ID NO: 163929 - DNA, 224 bp, Glycine max
ctcctccatctacgtttcttaaatcatttccttctttctctctttctttatcttctcattttcctcattacactcttttttttctctcaacttttctcttattaccatagttcacatattatatcatcacatatcatagtgatatattatatcatatcacaatgtgtggcatacttgctgtgcttggatgctctgattcatctcaagccaaaagggttcgcgtc

SEQ ID NO: 163930 - DNA, 220 bp, Glycine max
gcaagaatggcacttcgttgcttggtgatgtccctttctgttctcttcactcttggtcttgcgagagaaagccatgccagagacgaagatttttggcatgcgtttggccaaacactcccattccaagttcattgcgagatcttctaaagcctggccctgcaagtgttgaaatcgatgatcaccctatgcaaattgaagaaacacagtacccgaaaacctt

SEQ ID NO: 163931 - DNA, 221 bp, Glycine max
tggtgaatgagaccaaattggaccaagagattaagtcttggcttgcatttgcagcacaaaaagttgttgaagtaaatgccttggccaaggcattgtctggaagaaggatgaggttttcttttctgctaatgctgctgccttggcttcaaggaagtcctccccaagggtgataaatgaggctgtccaaaaagccgctgctgctctgaagggctctgatcatc

SEQ ID NO: 163932 - DNA, 220 bp, Glycine max
gaacacttcaccggagccggttgggcaccttggtgtccattccggaaggtctgctaagcaccaaggccaagaagcacgtcattaacatgccatcaaacgggacgttcccttcacacacgccaatgtcagcttggcctacagggatttctcttacaatcccaccaccgatctcgccaccggtctcaggaagttcgtcaagtggtacctcggttattacggc

SEQ ID NO: 163933 - DNA, 217 bp, Glycine max
agataagccatgggatgaccattggatcttttgggtaggaccatttattggggaagccattgcagccttctaccatcagttcatcttaagagcaggtgcactaaggctcttggatcattcaggagtaacccccataattgagttgtctttctcttccttatgatggctctagtggaaagaagataattggagagatgggggatgatatggcaagttt

SEQ ID NO: 163934 - DNA, 217 bp, Glycine max
gcgaaccgcccccaaatccgatgatatctacctcaagcttctcgtcaagctgtaccgttttcttgttcggaggactgggagtaacttcaatgctgttgtctcaagcgccttttcatgagcaaggtcaacaagcccccgctatccctctctagattgatccgttacacgaagggaaaggaggataagatagctgtggttgttggtgccgtgaccgatg

SEQ ID NO: 163935 - DNA, 221 bp, Glycine max
attccctggagttctccaaccatgagggcaagaattggttgaatgctgaaaagtgtgcggagaaagaagaaagaagcaatgaattgagataatagaatggaggttaaataccagagctccggggaaaattatcttgagcggcgaacatgatgtggtacatggatccaccgctgttgcctcttccattgacttatacacctacgtttctctccgcatctcca

SEQ ID NO: 163936 - DNA, 218 bp, Glycine max
gtcgccggggctaagtctaagtgtagtaccgttgggattcaaggaatcgcttgggccttcggtggcatgatcttcgccctcgtttactgcaccgctggcatctcagcggggacacatggacccggcggtgacatttgggctgttttaggcgaggaagttgtcgttgcccaaggcgattttctacatcgtgatgccatgcttgggtgctatttgtggcg

SEQ ID NO: 163937 - DNA, 224 bp, Glycine max
tggaatactagcattcctacaaagatggaagatgtactcacaacacattttgataaccaaaccaatatcttgattcatgtatacgagggtgagaggaaaagacttagagacaacaacttgttgggtaagtttgtgctagaaattcctccagttccacgtggtgttcctcaaattagcgtttgctttgaacttgattatgatggcatcctacatgtttctgccga

SEQ ID NO: 163938 - DNA, 214 bp, Glycine max
ctcgaccgcgaagacggtcgcggaggatcggcagggaacaagttccgcatgtcactgggtctgccggtggcggcgacggtgaactgcgccgacaaaccggcgcgaagaatctctacatcatatcagtgaaggggatcaagggaaggctgaaccggttgccgtcagcttgcgtgggtgacatggttatggccaccgtcaagaagggaaagcctga

SEQ ID NO: 163939 - DNA, 215 bp, Glycine max
cactacctctgcatttttctctcgctctctgccttccatcaccctcgccatttcccttcccaagatagtagaagatggcagacgctgaggatattcaactcttgtttgtgacaatggaacaggaatggttaacgctggttttgctggagatgatgccccacgtgctgtgtttcccagcattgtaggttgtcctcgtcacactggtgtgatggttg

SEQ ID NO: 163940 - DNA, 206 bp, Glycine max
caaaaatgtggacacaaaggacaggttgatttggtcacagtcactgataaagcatgtgaagacctcatatctaatcatctgacacagctttatcccactacaagttcattggggaagagccacagctgccttggactacagaacttcggatgaaccacatggatagttgatcccctggatggaactactaactttgtgcatgggtt

SEQ ID NO: 163941 - DNA, 256 bp, Glycine max
gttcctcctggcaacacagggctcgatccctcccagacctctttcttccaggtgctcaacattcctaccaagattaacaagggtactgttgaaatcattacccctgtggagctcattaagaagggagacaaggttggatcttctgaagctgcattgcttgccaagctagggataaggcccttctcgtatgggcttgtggttctttctgtttatgataatggttcagtgttcagtcctgaggttcttgatcttactg

SEQ ID NO: 163942 - DNA, 254 bp, Glycine max
tacttgcaagaatggcacttcgttgcttggtgatgtcccttactgttctcttcactcttggtcttgcgagagaaagccatgccagagacgaagatttttggcatgctgtttggccaaacactcccattccaagttcattgcgagatcttctaaagcctggccctgcaagtgttgaaatcgatgatcaccctatgcaaattgaagaaacacagtacccgaaaaccttcttctataaagaagaccttcatccaggc

SEQ ID NO: 163943 - DNA, 252 bp, Glycine max
gaatccgaggcgaagagaagagaaaaattaagatggaggggaaggagcaggatgtgtcgctgggagcgaacaagttcccggcgagacagccgattgggacggcggcgcagagccaagacgacggcaaggactaccaggaaccggcgccggcgccactggttgacccgacggagtttacgtcatggtccttttacagagcagggatagcagagtttgtggccacttttctgtttctatacatcactgtcttaa

SEQ ID NO: 163944 - DNA, 253 bp, Glycine max
ctcttcctcaccgattgctagaatggaatttcgatgctcagtcatctcttttaccattctcttctctcttgctcttgcaggagagagccatgtccatgcatcgctacctgaggaagattattgggaagctgtttggccaaacactcccattcccactgcactgcgagagcttctaaagcctctccctgcaggtgttgacatcgatgaactccctaagcaaattgatgatacacagtacccaaaaacattcttc

SEQ ID NO: 163945 - DNA, 252 bp, Glycine max
gccaaaaggagctcatgttcattagtgagttggaagagattttggaaatggctagcatggctgagtttcagaagatcatggtcccactgttccgacgaatggcttgctgcctcaatagttctcattatcaggtggctgaaagagcacatttgctatggaacaatgagcacattctgaacctgataacgcaaaacagacaggtgattctgcctctggtgttctcagcacttgtacataatgctcgaagtcatt

SEQ ID NO: 163946 - DNA, 213 bp, Glycine max
gtgcaatctgtggtggggttggcattcttggcattgcatgggcctttggtggcatgatcttcatccttgtctactgcactgctgggatttcagggggtcacattaacccagcggtgacatttgggctgtttttggctcgcaaggtgtctttgatccgagccatcatgtacatggtggctcagtgcttaggtgctatctgtggagttggttggt

SEQ ID NO: 163947 - DNA, 252 bp, Glycine max
tgggcaatatagggcaaaagtagcagactttggtgcatcaagaatggtttccattgaagctactcatctcactactacagttcaaggaacttttggatacttagaccctgaatacttccgtactagtcaattaacagataagagtgatgtctacagctttggagtggttcttattgaacttttaacagggaaagagccaatatcctctgcgaaacaacaagaacttaaaagtttagtttcatattttctcct

SEQ ID NO: 163948 - DNA, 251 bp, Glycine max
caaagatcaaacaaagaggccatctgtggagaagttactcaaacactccttcttcaaacaagctaagccaccggagctttctgtaaagaaattatttgctgatttaccgcctttgtggaaccgtgtaaaatccctccagcataaagatgcagccgagctagcactaaagaaaatgccttctgcagaacaagaagctatatctcaaagtgaatatcaccgaggagttagtgcatggaacttcgatattgatg

SEQ ID NO: 163949 - DNA, 249 bp, Glycine max
cttcggttcgaccttgctggccgtgatttaacagagtacttggtgaaaatccttaccgagagaggatactccttcagcacctctgccgaaaaggaaattgtccgtgatgtgaaggagaaattggcatacgtggcccttgatttcgaacaagaaatggagactactaagagtagttctgcagtactaaagagctatgaattgcctgatggacaggtcattacaataggttctgagagattccgttgccca

SEQ ID NO: 163950 - DNA, 252 bp, Glycine max
caaaaaatgggttcttcttcttccatatggaccgtgtgtttgattttggcatcactggcctctgcagcactctgtgccaaccctcgtagaccagtggatgtacaatttggccgaaactacgtgcccacatgggcctttgatcacatcaaatacttcaatggaggttctgacattcagcttcatcttgacaagtacactggtactggcttccagtccaaagggtcatacttgtttggtcacttcagtctgtac

SEQ ID NO: 163951 - DNA, 250 bp, Glycine max
accaattcttataaacccctttggagatctgcttcaagctctgtccccttcttccacatccacactcccctctcaggtttttgtggataagattgagctataatggctgccaggagaccgggtttgattgctttgtttgatgttgatggaactcttacagctcccaggaaggtggtcacaccggagatgttgacattcatgcaagaactgcggaaggttgtaacggttggagttgttgggggttctgacc

SEQ ID NO: 163952 - DNA, 250 bp, Glycine max
tgatgatgccccatcatctgctccacctgctggaagtcagcaaaatggggtgaatgttgctgagttaatagttggccgtggctttggaactgtcattagacatcgtgactttgaagagagatctaactattatgatgctcttcttgctgctgaatctcgtgctatttctggtaggaatggcacccactctgccaaggatcctccagtgatgcatataactgatttgaccacggcatcggctaagaaagcc

SEQ ID NO: 163953 - DNA, 250 bp, Glycine max
tggacttcaaccttgcattagtgattgtagtaaccaccattttgcggaattgggcttcaaggatgcgatagcaaggttgtgcagttcatttttggagactcactttcggatgttggaaataacatgcatctctcaagaagccttgctcaagcaagcttgccttggtatggtatagacatgggtaacgggttacctaatggaaggttcactaatggccgcacagtttctgacattataggtgacaatatgg

SEQ ID NO: 163954 - DNA, 252 bp, Glycine max
cattctctctgtgtatttccctacctctcccttcaagatgcagatcttcgtcaagaccctcaccggcaagaccatcacccttgaggtggaaagctctgacaccatcgacaacgtcaaggccaagatccaggacaaggcaggaatccccccggaccagcaacgtctcattttcgccggaaagcaacttgaggacggccgtacccttgctgactacaacattcagaaggagagtactcttcacctcgtcctccg

SEQ ID NO: 163955 - DNA, 248 bp, Glycine max
ctcgagccgcaaaatggaaaagaatgtggggattctcgccattgacatctacttccctaccgcttgcgttcagcaggcagcattggagactcatgatggtgccagtaaagggaagtataccattggacttggccaagactgcatgtcattctgtaccgaagtagaagatgtcatctcaatgagtttgacagtggttacttctcgtcttgagaagtatgggattgatcctaaacaaatcggtcgtctgg

SEQ ID NO: 163956 - DNA, 249 bp, Glycine max
gcttgcacaaaagcaatgaccatgtcatttaatccaaacccgtgttctgatgcatggagtttggaatttctgaagcgtaccggatttcattgtgatatcatttgtgtcactggatggactgctaccccaatgcaggatgttcaggttacaactgattggtttatttcctctcaggaatgtgttcccaggacctattgtgttttaaatccacaaaatccttttgtgttaaataggtggatggggaaattg

SEQ ID NO: 163957 - DNA, 248 bp, Glycine max
cttgagggtacctattgaagccaaacatggtcacccccggatccaattctgctaaggtttcccctcaggtggttgcggacacactgttagagcccttcagagaaccgtgcctgctgcagttcctgctatcgttttcttgtctggtgggcagagtgaggaggaggcatccgttaacctcaatgccattaaccaggtcaatggaaagaagccatggtcactctctttctcctttggaagggcacttcaac

SEQ ID NO: 163958 - DNA, 251 bp, Glycine max
ggatctttggtgtctggtgtacagattgctatttctgcatccaacaccggtggtgcttgggataatgccaagaagtacattgaggctggtgcttctgagcatgcaagacgccttggtccaaaagggtcagattgtcacaaggcagctgttattggtgacaccattggagaccctctaaaggatacatctggaccttcacttaacatccttattaagctcatggcggttgagtctcttgtgtttgctccctt

SEQ ID NO: 163959 - DNA, 252 bp, Glycine max
gattgctagaatggaatttcgatgctcagtcatctcttttaccattctcttctctcttgctcttgcaggagagagccatgtccatgcatcgctacctgaggaagattattgggaagctgtttggccaaacactcccattcccactgcactgcgagagcttctaaagcctctccctgcaggtgttgaaatcgatgaactccctaagcaaattgatgatacacagtacccaaaaacattcttctataaagaaga

SEQ ID NO: 163960 - DNA, 274 bp, Glycine max
ctcgagccggcagaatctctaccccctgtgtggaacagcttagagcctgtacaatagctgtcaacagtgacaggcactgcttcttcgagatggaaccagactgcaagttactagcatttgatcgagtacgccagagcgccctgaccagcacaaggtgtgcggagagcaatgtgacgtacctaagcaaatgttgctacagcaacaggactggcggtactggcggatcagctggcttcattatctcttaatgacaaccttgtttcttaaggtttat

SEQ ID NO: 163961 - DNA, 249 bp, Glycine max
ctcgcaagcaaaaagaaagaatcccaggcgaggagaaagatggaggggaaggagcaggatgtgtcgttgggagcgaacaagttccccgagagacagccaattgggacggcggcgcagagccaagacgacggcaaggactaccaggagccggcgccggcgccgctggttgacccgacggagtttacgtcatggtcgttttacagagcagggatagcagagtttgtggccacttttctgtttctctacatc

SEQ ID NO: 163962 - DNA, 249 bp, Glycine max
gtaagctgcgtccgtttcagccctagcacccttcagcccactattgtttctgcctcgtgggaccgcaccgttaaggtttggaacctgacaaactgcaagttgaggaacacgcttgctggacacaatggttatgtgaacactgttgctgtttcccctgatggctctctgtgtgccagtggtggcaaagatggggttattcttctgtgggatttggctgagggtaagcgtctttactccctcgatgctggt

SEQ ID NO: 163963 - DNA, 233 bp, Glycine max
ggagaaagaagctccagggcatgccatatgagggcatgcacgtacggcctcggaggggaaccagaaaattatgttaacaaaataatctggaaccctaatgtatcagtgtcatcctcagtgtgtagtttaagctagctttgctatggttacgttctttgagatgagagtcttgatgaacagtaccattctgatgtattgctttccttgaaagttaatgcatgcttcttatcttc

SEQ ID NO: 163964 - DNA, 250 bp, Glycine max
ctagcttcttcttcctcctcctcctctgccattgcagcaaggcacacacctcaggctccaagccatttcacgagggatcggattcgctcgccatcatggggaagaagaagaagagagtttcctcgaaggtgtggtgttattactgcgatcgcgaattcgacgacgagaagatcttggtgcagcatcagaaagccaagcactttaagtgccatgtctgccacaagaagctctctaccgctggcggcatggc

SEQ ID NO: 163965 - DNA, 251 bp, Glycine max
ctctgatctcactcaccattcaccaacctgcttctctgttctcttctttcccttcccaagaagaagaagaagaagatgccttcttcagaatcatcaacaggcttctccgaaaccacttgtgtgaccggcgctggtggcttcatcgcctcttggatggtcaaactcctcttggagaaaggctacactgtccgaggaaccctcagaaacccaggcatgcctatctatttaagttatatgacgtgtagcgggga

SEQ ID NO: 163966 - DNA, 247 bp, Glycine max
cagtcctggtatttctcagcgcgtatagcatggctttgttagtggagtgaacgacgactggtcgcgagtacacggtcacggaccttacccaggccgacttcggccgcctcgagatagacctggccgacgtttagatgaccggcctcatggcctgtcggtccgagtacggcccctctcagctcttcaaaggggcccgcatcacaggatccctccacatgaacatgcagactgccgttctcatttagac

SEQ ID NO: 163967 - DNA, 251 bp, Glycine max
tagctagattgttacttctcttcgccttttactttgcaattgtcaccaaacaattcttgattagctctcacaagcaagcattatcaacaatgaagaaaattgtgttaaaggtggacttacatgatgacaggatcaagcgaagagctatgaagacagcatctggcctttcgggggtgcaatcagtttctgttgacattaatgacaagacgatgaccttattgggggatgttgatccagtgagtgcagtgtca

SEQ ID NO: 163968 - DNA, 248 bp, Glycine max
ctcgagccgcgaccatggtccttgtgtctctggtgctcacaatactattgtgacagcaacggcagggaaagacctagtttccagtctcgtatcaggtttgctaacaattggtcctcgatttgggggtgccatcgatgatgctgctcgctacttcaaggatgctcatgacagggcacttactccttatgagtttgttgaaggtatgaaaaagaaggaattcgtgtggcaggaatagggcacaggatcaa

SEQ ID NO: 163969 - DNA, 252 bp, Glycine max
gaacgaacgagagtgcagcggcaatgggtagaagcactttggctttggttctcgcgattctgatctcttttcagggaacccacgttagatccgatgcctccgatcaccgttacaaggatggagactccgtccctctttacgccaacaaagttggtccctttcacaaccccagtgaaacgtatcggtactttgacctgccattctgtgtaacaggtcatgagaaagaaaagactgaagccctcggtgaggtgt

SEQ ID NO: 163970 - DNA, 289 bp, Glycine max
gtacggaattccgctcgactgttcttgttgagacctactttgctgacatccctgctgaggcatacaagaccctcacatctctgaatggcgtcactgcatatggatttgatttggtccgtggaaccaacactcttgatttgatcaagggtggatttcccagcggaaaatacctctttgctggagtggttgatggaaggaacatctgggccaatgaccttgctgcttctctcactaccttgcagggtcttgagggcattgtgggcaaagataagcttgttgtgtcccctcc

SEQ ID NO: 163971 - DNA, 272 bp, Glycine max
caaagtatagagtgaaagaatgggtgagaaaagcaagattttgatcataggaggcaccggctacatcggcaaacatatagtggaagcaagcgcaaaggctggaaatcccacttttgctttggtgagggaatccgcactctctgacccctccaaggcacaactcatccacaattttgaggctttgggcgttaatttggtccgcggggatctgtacgatcatgagaagttggtgaaagctatcaagcaagtagatgtcgtcatatccacgctgg

SEQ ID NO: 163972 - DNA, 269 bp, Glycine max
caagattgtcgatttcatcaagtttgatgttgggaatgtagtcatggtgacaggtggaaggaataggggtcgtgttggagtgatcaagaacagagagaagcataagggaagctttgagactatccatgttcaggatgccactggccacgagtttgcaactcgtatgggcaatgtgttcaccattggcaagggaacaaaaccatggatatctcttcccaagggtaaaggtattaaactatcaatcattgaggaagctaggaaaaggattg

SEQ ID NO: 163973 - DNA, 271 bp, Glycine max
cccagaaccagatctagggtttattttccttttcttttagaatttgaacaagttaggcgtcttcaaaggaaataggatgggagaattgaaggacactgaggcttacgaggaagagctcatcgactacgaagaagaagaagaaaaagctcccgattccgctaaacccgttactgaatctggcaagaagggttatgttggcatccatagttcgggatttcgagacttcctgttgaaaccagagcttcttcgagccattgtagattcaggattt

SEQ ID NO: 163974 - DNA, 272 bp, Glycine max
agccaaggtccgggcttatattttgatattggaaagaaggccagagatgttcttcacaaggactatgctcaacaatcaccaatccactttaactacagattcttgaactggaatttagatctctcctgtcaagaagaactggtgcatggactaaggggccttttcacatgtaacatacctgactctgggaagttggaaattcaacacttgagtagattcagtggatttagtgcaagcattggattatcgggagaggcagaaaaaggatataa

SEQ ID NO: 163975 - DNA, 272 bp, Glycine max
ctgaatctcaagattctaagattcatattcctgctctttgaagaagggtgtttgcctgattttggtgatgtcgctgctctcagatctcatcaaccttaacctctcagacactactgagaaggtgatcgcagagtacatatggatcggtggatcaggaatggacctgaggagcaaagcaaggactctcccaggaccagttagcgacccttcaaagcttcccaagtggaactatgatggttccagcacaggccaagctcctggagaagacagtg

SEQ ID NO: 163976 - DNA, 271 bp, Glycine max
atttcagaaagtcagggaattcttctaaaggaaggtgttgcataaaagcaatggggatagagaaatccttggaggaattgtacaatgtgaaggtggaaagaaaagtgtctcctgagaaactagctgagcttggagtttcaaaatggtcggtgtggaagactgggaaaagcaagttgccctgggactggcaggtagaccaactggtgtacattgaagaaggggaagtgagagttgtgcctgaagggagcaaccgtttcatgcaatttgtggc

SEQ ID NO: 163977 - DNA, 271 bp, Glycine max
attgaattcaaaaacttaagttcattccttgtgttttgctttcttcctcaaaaccaaacatgtcgaacacatgcggcaactgcgactgcgctgacaagactagctgcaccaagggaaacagctatggtgttattgtagagactgagaagagttacatcgagactgttgtcatggatgttccagcagctgagcatgatgggaagtgcaagtgtggcactaactgcacttgcacggactgcacctgtggccattaaggaatatgtatgaaaat

SEQ ID NO: 163978 - DNA, 272 bp, Glycine max
gttccgatataaatttgagcaactagggtttttacttgtccttctttgcgacattgaatcgtaagcagcggctaccctaatcctctcctcttcctctctactaatttcagctatggccgacgaagctgtggttgttccagatcccacccagatcgatgtcaagctctttaaccgctggagcttcgacgatattgagattactgacatttctgcggctgattatatcggagtggcgacatccaagcacgccacgtatgtgcctcacaccgccg

SEQ ID NO: 163979 - DNA, 272 bp, Glycine max
  unsure (1)..(272): unsure at all n locations
gttaccatttgctcccagtacagagcttaaccgagcttcanaaagatgaatcgggaaaagttgatgaagatggccggttcggttagaactgggggaaagggtaccatgagaagaaagaagaaggctgtccacaagacaacaaccacagatgacaaaaggcttcagagcaccctgaagagaataggggtgaatgccatcccggctattgaggaggtcaatatctttaaggatgacgtattatccagtttctaaatcccaaagttcaagcatcc

SEQ ID NO: 163980 - DNA, 267 bp, Glycine max
gtgattcctgaaatcgttgaggttcccagtttcagtgatggtgctaaatctttcttagaaggcctgattgataactttagtgttgaggatgccttggaggttaaaaacattgagagggtcacgaatcatgacgtgaaagcggtggagtacttcttgaaacataagtgtcaatccaatgctgaagtggctaaggtggttgagttttttcactttgcttgcacatctgaggatataaataatcttgcccatgccttgatgctgagggaa

SEQ ID NO: 163981 - DNA, 269 bp, Glycine max
atggaatctgacagcaaatgctgctaggcctaatccacaagggtcattccattatgggaagattactcctacaaaagtaattaagttggccaattcagcacctttgatcaatggaaagctccgttatgctgttaacagtgtctcatatgttaaccctgacacccctctcaagcttgctgattacttcaacattcccggagtcttcagtgtgaatttactccaaaactctccctcaaacggtccaggatacataggcacctcagtgttgc

SEQ ID NO: 163982 - DNA, 269 bp, Glycine max
gctttacgaagatgactttacagacagatttgacggccttttatatcaagagaatgatctttcttacagctttgattttaaaaaatctccagaattgatggaggatgaatttggttctcatggaaatgctgtgaaagtcaatagtcttgaggaacttgatcctgagatacagaccattgtattactaagtgatgcttatggagctgaaggtgaactgggcattgttttatctgagaaattcgtggagcatgacgcatactgtatgtttg

SEQ ID NO: 163983 - DNA, 270 bp, Glycine max
catcgagccgattcggctcgagaattcacttccggttgtctatgacggttcctttacaaggctgaaacaatttcttggaataatggaagaagctactagatcttctttgaaacagaattctatgccgcttcctccatggagatctctagcatatctgcaagccaagtggcagtcaccgtatgaacgatacacacattcagaaggcaatattgttagcagcagtgattgcttcgatcacaagcaatgttgtggacatttgaagaggctgca

SEQ ID NO: 163984 - DNA, 270 bp, Glycine max
taaatcctgaatggaatgaagaattcaatatagttgttaaagatccagactcccaggttttagagattaatgtttatgactgggagcaggttgggaagcgtgacaagatgggtatgaatgtgatccctttaaaagaagtttcccctgaagagcctaaacgttttactcttgacctcctaaaaaatatggatcctaatgatgcccaaaatgagaagtcacgagggcagattgttgtagaattgacatataaacccttcaaggaggaggatt

SEQ ID NO: 163985 - DNA, 270 bp, Glycine max
atcaccattactgatggtattgacaaaactagtgcaactttgcaatttagaaagttagcagattgcgattttctcaagagaaactttaagcagatgtctaatgttttgtgggtggctcctgaggacaaggcgagtttatggtcacaacttcattatgtttcgtgtaataatctggaaatgcaagaagcttatcttgtcaatctcgtaaatgtgttacgagaattgtatttgcacagtccagaggcagctcgccaattgagaaggaaagct

SEQ ID NO: 163986 - DNA, 269 bp, Glycine max
tgacaatgtcttagttgctgctccaacagggagcggtaagactatatgtgcagagtttgctattttgaggaatcatcaaaaagggcctcatagtctcatgcgtgtcgtttatgttgcacccgttgaagctcttgccaaggagcggtatcgtgattgggagaggaaatttggaggtggtcttaaattgagggtggttgaattgactggagaaactgcgaccgacttgaaactgcttgagaaaggtcagattattattagtaccctgagaa

SEQ ID NO: 163987 - DNA, 261 bp, Glycine max
tgggtaatatgttctgcacagaattaaggatccataggagatatgatttgaaaggttcagctcttggacgttcttcggacaagatagaaattgatgaaaacaccactcttaaagatttggagctgaactaatgcgtgtacttggaaccatcttggcaggagtctttattgacataatggattacagcctcctcctaggtgttcattatcgagctccccagcagctgcatccatacaaccataatagaactgcagatggatt

SEQ ID NO: 163988 - DNA, 275 bp, Glycine max
tccaatctaaaatcaaccatgggttcagcagctgagactcagattactccaacccatgtatctgatgaagaggcaaacctttttgccatgcaactagccagtgcctctgtactccctatggttctcaaatcagctcttgagcttgatctgttggaaatcatagccaaggctggccctggtgttcatctttcccccactgacatttcttctcagcttccaacacagaaccctgatgcacccgttatgttggaccgcattttgcggctcttggcttg

SEQ ID NO: 163989 - DNA, 266 bp, Glycine max
cgcacagtgctggtggtttcacttggaggacttggtggtgtaaccacgggtggagtaaccaccggtggagttggtacaacaggtggatacacaataggtggtgtaacaattggtggtgttggcacaactggtggataaacaattggtggtttcacaatgggtggttctggcacataaggtggtgtaacaattggtggttttggcacaactggtggataaacaattggtggtttcacaatgggtggttttggcacataaggtggtgt

SEQ ID NO: 163990 - DNA, 267 bp, Glycine max
gaatccgaggcgaagagaagagaaaaattaagatggaggggaaggagcaggatgtgtcgctgggagcgaacaagttcccggagagacagccgattgggacggcggcgcagagccaagacgacggcaaggactaccaggaaccggcgccggcgccactggttgacccgacggagtttacgtcatggtccttttacagagcagggatagcagagtttgtggccacttttctgtttctatacatcactgtcttaaccgtcatgggagtcg

SEQ ID NO: 163991 - DNA, 268 bp, Glycine max
ctcaaatgcagattagcaactatgccagtattgtgttcatggccctcttcatatccattgcagcaactggcatccttgagatgcaatggggcggtgttagcatagacgactggtggaggaacgaacagttttgggtgatcggaggtgtatcttctcatctttttgccctatttcagggtttactgaaggtcttggctggtgtgaacacaaacttcactgtgacgtcaaaagcagcagatgatggagaattctcagaactctacatctt

SEQ ID NO: 163992 - DNA, 267 bp, Glycine max
ggagagtggaacataataaacatgacaatgaagctgctgcttttggtagccgttgttgaagttgcatgcttagtttctgggatcttgtcctttggatctgagacactctctgagctttctttcttagaaaacgatgtcgtctcaacagcaagaccttcctcttcatctcaacctcttatggtcgacctcactctcattcaaggagctgattctaaaggagctgtctgtttggatggaacggtgcctggataccatttggatcgtgga

SEQ ID NO: 163993 - DNA, 269 bp, Glycine max
caaaccatggcttccgaaacaaaccagtccaagaatgtgtgtgtaattggagctggaccctcggggctattggcagcgagggagctgagaaaagaaggtcacaaggtggttgtgttggagcagaaccatgatattggaggtcaatggctatatgacccaaatgtacaagaggaggatcccttaggaagagacccttggctaaaggtgcatagcagcatctatgagtctttaaggttcatgtctcccagagagatcatggggtcaactga

SEQ ID NO: 163994 - DNA, 262 bp, Glycine max
gggaaatatgttctgcacagaattaaggatccataggagatatgatttgaaaggttcatctcttggacgttcttcggacaagatagaaattgatgaaaacaccactcttaaagatttggatctgaactactgcttttacttggaaccatcttggcaggagtctttattgaaataatggattacagcctcctcctaggtgttcattatcgagctccccagcagctgcatccatacaaccaaaatagaactgcagatggattgc

SEQ ID NO: 163995 - DNA, 266 bp, Glycine max
ctccgcaccagtttcaccgcacgaatatcttgttgtttggagcgatccgagaaaaactctgtaaacatgttggtttaccaggacctccttacaggtgatgagcttctctctgactccttccgttacaaggaaattgagaatggaatgctgtgggaagttgaggggaagtgggttgttaaaggagcagttgatgtagacattggtgcaaacccttctgctgagggtggaggagaagatgagggagttgatgatgcagctgttaaggt

SEQ ID NO: 163996 - DNA, 270 bp, Glycine max
gtatcacagtgaaacgaagaagccctaactacgcacgcactcattcttgagaaagctcaatattcattcgtccatggcactctcttctcgtctcttttccaaatccaaattgatctatggctgtcaaatacttctgcaaaaggagcatgctattccagttcgtcactttgctaaagagtctgcccctcctgcccttaagggagatcagatgctgaagaacatttttgtggaggtgaagaacaaatttgagactgccataggaatattaaa

SEQ ID NO: 163997 - DNA, 270 bp, Glycine max
gttgaattataatggaattgcatcttcaggccggtgggcctttctacgaggttgaattgggaagatttgatgggctaagatctaaagattcagatgtaaacgggaggctgcctcatccagagttcaacttgaaccagctcaattcactgtttgcggccaacggtctcacccaaacggaaatgatagctctatcaggtgctcacactgttggattctcccattgcaacaaattcacgaacagagtatacaatttcaagagcaaaagtcgag

SEQ ID NO: 163998 - DNA, 268 bp, Glycine max
tggccgctccaagatactaaaccatggagagttactcactctttcattggacaaagcatctggctcaggttttcaatcaaagaatgagtatctctttgggaagattgacatgcagctcaagcttgtccctggaaactctgctggcaccgtcactgcctattatttatcttcaaaaggatcaacgtgggatgaaatagactatgaatttcttggaaatctgagtggtgatccatacatccgtcacacaaacgttttcagccaaggcaag

SEQ ID NO: 163999 - DNA, 268 bp, Glycine max
ctcgattagccgaaaattgcaagaacggcttctggctcttgcgatcaacaaacgcagcgttttgacctcagatttgagggggagagaatggcaacaacagtgagaagtctgaagataaacacaagtacgtgcaaacgtatagtgaaggagctgcattcttatgagaaggaagttgagagagaagctgccaaaacagctgatatgaaggaaaaaggagccgatccctatgatctcaagcaacaggaaaatgtcttggctgagtctagga

SEQ ID NO: 164000 - DNA, 267 bp, Glycine max
acagtgtcattttccttcataaccgatttcgattttatgattgtgcgcaacagttcgcagactcacaatggccgcaatatccaactccttatcactgaagcacagtttctctctgagtcgagcttctccttcttcctcttccatcaaattcaaattcggaagatgttacgccgcgttcgccaatgagaatcgcgagtacgtgatcgttggcggcggaaatgccgcgggatatgctgcgcgcactttcgttgagcatggaatggctga

SEQ ID NO: 164001 - DNA, 266 bp, Glycine max
gtgagcgaaactagaatccgaaaaacaatggcggcgaagctagacagccacgccgtggcttccgatatgatcgacttcctcaacgcttctccgacggctttccacgccgtcgacgaggcaaagaggcgtttgcgaagcgcggggtaccaccaactctcggagagggaaccgtggaaacttcaaccgggcaacaagtacttcttcaccagaaaccactccaccatcgtcgccttcgccatcggcaaaaagtatgttcctggaaatgg

SEQ ID NO: 164002 - DNA, 267 bp, Glycine max
ggtagcagcagctgagcttgtttccgtcgccgcttcacccaccgtagcaaccatgatcattcccgagaagaaccgtaaagagatctgcaaatacctcttccaagagggagtttgctttgcgaagaaggacttcaatctggcaaagcacccagagattgatgtgccgaatctgcaggtgataaagctgatgcagagcttcaaatccagagagtatgtgagggagacatttgcgtggatgcactattactggttcctcaccaacgatgg

SEQ ID NO: 164003 - DNA, 266 bp, Glycine max
caccttttcagtttaaagcttcagatcacaaccgatccaccattcaccactttctcttcacaagctcaagttactgacaggcaaatctaacaagaaaagtagtctctgaagccgctccagtgccttgtgaatttggaattggtggtgaatttagatctaaaagccatagcaatgtcttttatcggtacccagcaaaagtgcaaggcttgtgagaaaacggtttatcccgttgatcagctttctgctgatggtactgactatcacaa

SEQ ID NO: 164004 - DNA, 264 bp, Glycine max
  unsure (1)..(264): unsure at all n locations
cgtcaaggacctttcccaggccgacttcggccgcctcgagatcgagctggccgaggttgagatgcccggcctcatggcctgtcggacccagttcggcccctcccagcccttcaagggggcccgcatcaccggctccctccacatgaccatccagaccgncgttctcattgagaccctcaccgcccttggcgccgaggtccgctggtgctcctgcaacatcttctccacccaggaccacgccgccgccgctattgcccgcgacag

SEQ ID NO: 164005 - DNA, 263 bp, Glycine max
gggtgcagaagcaaatggcggcgagaagcaattgaaatttctgatctacggtcgcagcggttggattggtggtctactgggtaagctctgcgaagagcgcgggatccaatatgagtacggcaccggcagattggagaaccggtcgtcgttggaggcggacatagcggctgtgaagcccagccacgtgttcaacgccgcgggtgtcacgggtagacccaatgtggactggtgcgaatctcacaaagttgaaaccatccgaacca

SEQ ID NO: 164006 - DNA, 261 bp, Glycine max
ctcgagtcgctctgtttatctcagcactccgtcttcatcaatcagcatcaccaccgctccaacacaggggaaaatgagggagatccttcacgttcagggagggcaatgcgggaaccagatcgcctcgaagttctgggaagtggtgtgcgacgagcacggcatagatccgacggggaagtacgtcggaaactcagatctacaactcgagcgcgtgaacgtgtactacaacgaagcttcctgcgggcggtttgtcccacgcgc

SEQ ID NO: 164007 - DNA, 268 bp, Glycine max
cgagattgattattattatcgtcatttcttttatcttcgatcagcaattaaggctggcgcaaacgttaagggattttttgcatggtcatttttggactgtaatgaatggtttgcagggttcactgttcggtttggattaaactttgtagattacaaagatggcttaaaaaggtaccctaagctttctgctcaatggtacaagaactttctgaaaagaaactagtgttagacccacgtttgaaagtatgcagcacctaaaacggttagg

SEQ ID NO: 164008 - DNA, 265 bp, Glycine max
gcagatgtctaatgttttgtgggtggctcctgaggacaaggcgagtttatggtcacaacttcattatgtttcgtgtaataatctggaaatgcaagaagcttatcttgtcaatctcgtaaatgtgttacgagaattgtatttgcacagtccagaggaagctcgccaattgagaaggaaagctctctctcgtattgaatggctgcaaaaagctgatgtgcctaccatagcacagattgaagagttccattcgatgcagaggatgatg

SEQ ID NO: 164009 - DNA, 265 bp, Glycine max
gttttggaaggaaagccattgttggtttcatttcccgttatccagatgcagagcttagaactgccaagaatggacaatttgtgaaggtttctggggtggttacctgcggtaatgttccactagagtcctcctttcagaaagttcctagatgtgtatatacatccacaagcttgtatgaatatcgaggatgggattcaaaagcagcaaacccaaaacatcgccgttttacatggggacttagagcagctgagagacatgtggtgga

SEQ ID NO: 164010 - DNA, 263 bp, Glycine max
ggcgatccggcaaagagcttgagaaggagcccaagtttttgaagaacggtgatgctggtgttgttaagatgattccaaccaaacccatggttgttgaaactttctccgagtatcctccacttggtaggtttgctgttagggacatgcgtcaaactgttgctgtgggagtcatcaagaacgttgagaagaaggatcctaccggagccaaggtcaccaaggctgcccagaagaagaagtgaatcgtgcgggctggttcatcaggg

SEQ ID NO: 164011 - DNA, 266 bp, Glycine max
gtccaaggtcttctacttgaagatgcagggcgattaccaccgctatctcgccgagtttaaggttggggacgaaagaaaaaccgctactgaggataccatgttgtcttacaaggctgcccaggatattgcttctgcggatcttccccctactcaccccatcagattgggtcttgctctcaacttctccgtcttctactatgaaatcctcaaccagtctgataaagcgtgtgccatggctaaacaggcttttgaggaagcaattgctg

SEQ ID NO: 164012 - DNA, 266 bp, Glycine max
ggctttagcaaattccaattcccaattcccaattcccaattcgaaacccttattcctttcaaagaaccaaattgagtgatcgtgatggcaccaaaggcagagaagaagccagcggagaagaagcccgcggaggagaagaagtccacggtgggagacaaggctccggcggagaagaagccaaaggccggaaagaagcttccgaaggagggaggcgccggcggagaagggaagaagaagaagagaaacaagaagagcgtggagacata

SEQ ID NO: 164013 - DNA, 262 bp, Glycine max
ggaaaatggctcttcttggattcctccgggacttttcttaatggtcactcatgtcaaggggtatggttttggaggttggaccaatgcacatgccaccttctatggaggtggtgatgcttctgggacaatgggtggggcttgtggttatggaaatctgtatagccaaggttatggaactgatacaacagcactgagcactgctctgttcaacaatggcttgagctgtggtgcatgctatcaaattaaatgtgtgaatgatcca

SEQ ID NO: 164014 - DNA, 264 bp, Glycine max
ggggaggcatcaaaatggtcaactgggacttggcaacacagaggattctcttgtgccacaaaagattcaagcccttaagggagttcctatcaaaatggttgctgcaggtgcagaacacagtgtagctattactgaaaatggagaactgtatggatggggttggggccgatatggaaatttggggttgggagatagaaatgatcgctggaatcctgagaaagtttcttctgttgattgtgacaagatggtcatggttgcttgtgg

SEQ ID NO: 164015 - DNA, 262 bp, Glycine max
attcattcaagattcagcaagtgcgtttcggaagcagagaccgaaatacttcgagatggcccgtacaaagcaaactgctcgtaagtcagctggaggaaaagctcccaggaagcagcttgcaaccaaggctgcacgtaagtctgctccaacaactggtggtgtgaagaagcctcatcgttatcgccctggaactgttgctcttcgtgagattaggaaataccagaagagcactgagctcctaatcaggaagcttcctttccag

SEQ ID NO: 164016 - DNA, 265 bp, Glycine max
tttttctctctcccttagtcaaagggattcatcgttcttcttcccaggttatttagaaaagcaaaatggtgaagatttgctgcattggtgctggatatctggggggtcctactatggcagtcattgcacttaagtgcccatccattgaagtcgctgttgttgatatctctaaatcccgcattgcagcctggaacagcgaccagcttcctatctatgaacctggccttgatggtgttgtgaagcaatgccgtggcaagaacctctt

SEQ ID NO: 164017 - DNA, 263 bp, Glycine max
tcatattcttgtctcaaagattaagccatgcatgtgtaagtatgaactaattcagactgtgaaactgcgaatggctcattaaatcagttatagtttgtttgatggtatcttctactcggataaccgtagtaattctagagctaatacgtgcaacaaaccccgacttctggaagggatgcatttattagataactcgtcaacacaggctctgcctgttgctttgatgattcatgataactcgtcggatcgcacggcctttgtgc

SEQ ID NO: 164018 - DNA, 261 bp, Glycine max
cacagcgcttagaatctgcggtgtcgcgcttggactgcgtatccgccggattccacccctccgccacaccatccggcggcgccgacgctcccgatgcggcgctcgatccctccatcgtcgccttcgccgatctgatcgaccagtacgtcggtagggtttccggcgctgccgaggtacccggtggtcaagtcttggatgtcaccaaactggtgcaggaagctttcaatgttcagaaagagcttctcattaagctcagacaga

SEQ ID NO: 164019 - DNA, 259 bp, Glycine max
agtcactcttcttgcataacccagatctgcagacaatatgcgaagaactggcttgttacatttgttatgccttgtcattgccttagtaagtgtgcaagcagaagatgcgtataagtattacacatggacggtgacttatggaactatttctccattgggtagtccccagcaggttattcttatcaatggtcagtttcctgggcctagacttgacttggtgactaatgagaatgtaattctcaaccttatcaacaagctg

SEQ ID NO: 164020 - DNA, 258 bp, Glycine max
caacaattatccaggaaaagaatccagtggtttaacaaatggtattaaaagtgaaaaccttgtgtcagctggggtgtcagttgaaactattgctgcaacaaggatccagactgcatttcgagcctataaggctagaaaagctttacgtcgcatgaaaggatttacaaaactgaagatcctaacagaaggcttttctgttaaaaagcaagctagtacagctgtaacataccttcattcatggagcaagatacaagctga

SEQ ID NO: 164021 - DNA, 258 bp, Glycine max
ctcgagccgctgcactcttcatcaagctccgctccaacacaggggcaaatcagggagctcactcacgtgcagggagggcaatgcgggaaccagatcggttccaagttctgggaagtggtgtgcgacgagcacggcatagatccgacggggaagtacgtcggaaactcagatctgcaactcgagcgcgtgaacgtctactacaatgaagcctcgtgcgggcgcttcgtgccacgcgcggtgctgatggacctggagccc

SEQ ID NO: 164022 - DNA, 255 bp, Glycine max
tgtttctgtctctgtgtttgcggctgaggattccgaacgagcgaccttcttcgtttctcgcaaagtttaagtcatcatgggtaaggcaaagactcacatcaacattgtcgtcattggacatgtcgactctgggaagtcaactaccactggtcatttgatctacaagcttggaggtattgacaagcgtgtgattgacaggttcgagaaggaggctgctgagatgaacaagaggtcattcacgtatgcctgggtgct

SEQ ID NO: 164023 - DNA, 262 bp, Glycine max
ctagccaatgtcctcttggtccttctcttgaacttgagcactttgctcaatgttcttgcttgtccctattgcccttacccatctcccaagcactctccaaaaaagcctcccattgtgaaaccaccagttcacaaacaaccaaaaccatgtccaccacccaagtcatccccaaaaccaccccatgtacacccaccctatgtcccaaaacctcctctctaccctaaaccaccagttcatccacatccaccccatgtcgcaaaac

SEQ ID NO: 164024 - DNA, 262 bp, Glycine max
  unsure (1)..(262): unsure at all n locations
gtgagtgaattcggatcagggacgtggaggctgaagatagcagatggaggcaatgatccatacatattcagcaccaanaatttcgcccggaggcagacatgggagtctgatcctgaagcaggcagtccagaggaacgggcccaggttgaagcagctcgtcagcatttctaccacaaccgcttcacggtcaagccctgcgctgacctcctttggcgttttcaggttctcagagaaaataacttcaaacaaacaattcctcgtg

SEQ ID NO: 164025 - DNA, 267 bp, Glycine max
cgcacactgaattcaaaaacatcgaaagagagaggcatggccgagcaaaccttcatcatgatcaagccagatggcgttcaaagaggccttattggcgagattattagcagatttgagaggaagggtttttacttgaaagggttgaaactcgttactgtggaccgtccttttgctgagaagcactatgctgatttgtctgcaaagcctttctttagtggtttggtggattccattgtctctggccctgttgttgccatgatctgggag

SEQ ID NO: 164026 - DNA, 261 bp, Glycine max
ctcgttgagaaataaggggaaaaaatggtgtcgctgaaactgcagaagcggctggccgcaagcgtgctcaagtgtggcagaggaaaggtgtggcttgaccccaatgaagtcaacgaaatctccatggccaattctcggcaaaacatcaggaagttggttaaggatgggtttatcatcaggaagccaaccaagattcactcacgctcgcgtgctcgtaggatgaaggaggcaaagaagaagggccggcactctggttatggt

SEQ ID NO: 164027 - DNA, 258 bp, Glycine max
ccgattttctcaaattgctttcggttttcgttctgattctgcaaaatcatggagatggagcgcatcgttgaattccctcacacctacatggatcgacccccaagaaagagagcgcgtttgggctgggacatcgctgaggcccccaaggctcaggtaggattgttttgtggacaagaggttgagaatatttcaagctatgctccttcagaacatccccctagttctctgtttaagggaattgcccgaaatggttctccc

SEQ ID NO: 164028 - DNA, 254 bp, Glycine max
  unsure (1)..(254): unsure at all n locations
cttctttccaaatcccaactactactcacactcactgnagatctcaatccatggctaccattcttagcatcaaggcccgccagatctttgacagtcgtggcaatccaaccgtcgaggtggatttgacatgctccgatggtacttttgctagagctgctgttccaagtggtgcatccactgggatttatgaggcccttgaattgagagatggaggatctgactaccttggaaagggtgtatcaaaggctgttgac

SEQ ID NO: 164029 - DNA, 263 bp, Glycine max
attctgatcgctccctgagagagctcgtcgcggcggttgcagaagaagattgcaagatgaagttcaacatcgcgaatcccaccactggatgccagaagaagctcgagatcgacgacgatctgcaactgcgagcattttgggacaagaggatctcacaggaggtcatcggagatgcactcggtgaggaatttaagggctatgtcttcaaaattaccggaggttgtgacaaacaaggatttccaatgaagcagggagtgctgact

SEQ ID NO: 164030 - DNA, 194 bp, Glycine max
tccagttataactcctcccactattgctgtgcccagtatctatgatcatgcagcatcaaatcttatggcaggaagtaatttagaaacaactattcaacaaattctagaaatggggggaggaaattgggaccgggatactgttaccggtgctcttcatgctgcatttaacaatcctgaaagagctattgaatatc

SEQ ID NO: 164031 - DNA, 263 bp, Glycine max
ccagagaacaacaagcaactgacgttcctgccccagaatcaaccaccgaagcaccaaaggaagaaaccaccgaagcaccaacaacagaaacagtagaaacaacaactacagaagaagccaagccagaggagcctaaagaagttgcagttgagaccgaggaggtggtgacaaaggagacagaggaagagaagccagcagcagaagagaaatcagaggagaaaactgaagaagtgaaagaagaagcagaagagcctaaagaaact

SEQ ID NO: 164032 - DNA, 267 bp, Glycine max
tctttaggttgggatttgggaattagggttgttcgcgtggcgaagatgattgaggtggttttgaacgatcgattggggaagaaggtgcgcgtgaagtgcaacaccgatgataccatcggcgacctgcagaagcttgtggcggctcagactggcacaagagccgacaagatccgcatccagaagtggtacaccatctacaaggatcacatcactctcaaggattacgagatccatgacggcatgggtctcgaactctactacaactaa

SEQ ID NO: 164033 - DNA, 259 bp, Glycine max
gttaaaactaatgctttgcttcaggcccatttctctagacaattcgtaggtgggaaccttgcattggaccagaaggaggtgcttctttctgcaaatagactgcttcaggcaatggtagatgtgatatccagcaatggttggctgggcctggcccttcttgctatggaagttagtcaaatggtgacacagggaatgtgggaacgtgactccatgctgcttcaactacctcatttcacaaaggatctggctaagaaatgcc

SEQ ID NO: 164034 - DNA, 258 bp, Glycine max
cttcacttcactaatacatcctagctgacacttcccagaacaagtctgagagctctgaggttgaggtccaggatcgtgttgttcttgactttctcggtaagaaaaaggatgaagaagacaagcctcatcctcaggaggaggtcatcgccaccgagtttcaaaaagtcactgtctcagaccaaggagagaacaagcacagcctcttagaaaagcttcaccgatctgacagcagctctagctcgtcaagtgaggaggaag

SEQ ID NO: 164035 - DNA, 259 bp, Glycine max
gtgattgtttgttgttgtaactcgttcttcttcttttgttgttctgtgtttgtgtttgttttttctctcacctgaaaatgtcttgctgcggtggtaactgtggttgcggaagctcctgcaagtgcggctccggctgcggaggctgcaagatgtacccagacttgagctacactgagtcaaccaccaccgagaccttggtcatgggagtggcacctgttaaggctcaatttgagggtgctgaaatgggtgtgcccgctga

SEQ ID NO: 164036 - DNA, 260 bp, Glycine max
ctcgagccgcacatttcaaaatgaagcattgcatctcaaaacattctctaagttgtttcgcactgtttctcttgctagtcgcaacaacctatgccactgttgtccctaccaccacccaaaagccaccaagaagctttgcaaaccaattcctcatcccccagaacgcggcacgtgcggtgctgaggctgcggccattggtgtgggactccaaattagcacactacgcgcaatggtatgccaaccagaggcgcaacgattgt

SEQ ID NO: 164037 - DNA, 261 bp, Glycine max
cgacaatggtgggggcgcggaagaaaacacaaacttctcagttcagtgtgactcaaactttctctccaaattcatcatgtggccgaaatttgagaaagaaccaacttggtggcatcatcttcggatgcaagaatgccacaatgaaagaatgtctatctaagcaactgtttggcttaccagctcatcacttctgttatgtgaagaatattgatccagggttgcctctgtttctgttcaattatactgacaggcaacttcatg

SEQ ID NO: 164038 - DNA, 256 bp, Glycine max
catcagttagcggaggagactggactcacctacgtctatgttgctcagcttctcaggagacaggctcagctcattccccaaactgcccctctacttcgggcagcgctgcccgacctgccccaagaccttgtttctgagatgatgagaccccctttgaggtcttatgaccctaatctcatccaagaccccactgtctataggttgaatgaagctgttatgcattttggggagagcatcacagaaataatcaatgagg

SEQ ID NO: 164039 - DNA, 254 bp, Glycine max
cggcaagtgaaagtaatctggagaataaagattcaaacaaggaggatgctcttgcaacaaagaaagatggcgacaatgagtttgagaagcgcatgagagcagaggttgtgcctgcaaatgagataggggttacatttgaagatattggtgcattggatgatattaaagaattacttgaagatgtggtcatgcttcccctcagaagaccagacttattcaaaggtgggcttctgaagccttataaaggaatattg

SEQ ID NO: 164040 - DNA, 251 bp, Glycine max
cttctcttgcggctagggtcttagcgcagatcttctagatttaacgcagatgggtaaggcaaaggttcacatcagtattgtggtcattggccatgtcgactctgggaaatccactaccactggtcacctgatttacaagcttggaggcattgacaagcgtgttattgagaggtttgagaaggaagctgctgagatgaacaagaggtctttcaagtatgcctgggtgctggacaaacttaaggctgagcgtg

SEQ ID NO: 164041 - DNA, 246 bp, Glycine max
ctttaggttgggatttgggaattagggttgttcgcgtggcgaagatgattgacgtggttttgaacgatcgattggggaagaaggtgcgcgtgaagtgcaacgaccgatgataccatcggcgacctgcagaagcttgtcgcggctcagactggcacaagagccgacaagatccgcatccagaagtggtacaccatctacaaggatcacatcactctcaaggattacgagatccatgacggcatgggt

SEQ ID NO: 164042 - DNA, 260 bp, Glycine max
gatttcagtgagtgatcggtgtgcacttgatctcatcataatcgtcagcgtcaattgaagaagatgccgatcagaaacatcgccgtcggaaggcctgaagaggcgactcaccccgacacgttgaaggcggctttggctgagttcatctcaaccttcatcttcgtgttcgccggctcaggctccggcatcgcctacaacaagctcaccgacaacggcgctgccacccctgccggcctcatctccgcctccatcgcccatgc

SEQ ID NO: 164043 - DNA, 274 bp, Glycine max
cagctcgatccgcgcacgagttcatgaacgagatcgagatgctatcgcagctccgccacctccacctcgtatctctcataggttattgcaacgagaacaacgagatgatcctcgtctacgacttcatggcgcgtggaacgctacgcgatcatctatacaacaccgacaaccgccctttgacgtggaagcagcgcttgcagatctgcatcggcgccgcgcgtggactgcattacctccacaccggcgcgaacacacgatcatccaccgcgacgtg

SEQ ID NO: 164044 - DNA, 257 bp, Glycine max
  unsure (1)..(257): unsure at all n locations
ctttacacaacatattattgtaaggctagctagctagccatggctgngtcggacaacgagtccggaggtcacacggggaacgcaagcggaagcaacgaattctccggttgcagggagcaagacaggttccttccgatagcgaacgtgagcaggatcatgaagaaggcgttgccggcgaacgcgaagatctcgaaggaggcgaaggagacggtgcaggagtgcgtgtcggagttcatcagcttcataacaggagaagc

SEQ ID NO: 164045 - DNA, 255 bp, Glycine max
gtgtctgtgtggctttgatttcgcttcccaagcgacaagcagcacccactctctcttctcggaccttccaaacatggaacgcatcgttggcggcaagtacaagctcgggcgcaagatcggaagtggatccttcggcgaaatctacctcgcgacgcatattgataccttcgagatcgtcgccgtcaagatcgagaatagtaaaacaaaacatccccaactgctttacgaggcaaagctctacaatattcttcaagg

SEQ ID NO: 164046 - DNA, 253 bp, Glycine max
tcaagattctaagagagattttgctgctctttgaagaagggtgtttgcttgattttggtgatgtcgctgctctcagatctcatcaaccttaacctctcagacactactgagaaggtgatcgcagagtacatatggatcggtggatcaggaatggacctgaggagcaaagcaaggactctcccaggaccagttagcgacccttcaaagcttcccaagtggaactatgatggttccagcacaggccaagctcctg

SEQ ID NO: 164047 - DNA, 256 bp, Glycine max
gttccgttgttgtgttgtgtgctgcaacataatcggtggtctgagaaatcttgtttgtgttgggtttgttatggctcggagagcagaggaagagtacgattacctgttcaaggttgtactgatcggtgattccggtgttggaaaatccaatcttctgtcccgattcactcgcaacgagttttgcctcgaatccaagtccaccattggagtcgaattcgccactcgcactcttcaggtggagggaagaactgtgaaa

SEQ ID NO: 164048 - DNA, 256 bp, Glycine max
cttgttaagggctgcactataccagaatgtctcagggaagaggcagcgcatctttgcctattgtggtcactgtggtttcactactgtgccttttggaacgtgctaacgcagcaacttactccgttggaggacctgggggatggaccttcaacactaatgcttggcccaatggaaaaagattcagagctggtgatatcctaatcttcaactatgactcaacgacccacaatgtggttgctgtggacagaagtggata

SEQ ID NO: 164049 - DNA, 258 bp, Glycine max
catcgctacctgaggcagattattgggaagctgtttggccaaacactcccattcccactgcactgcgagagcttctaaagcctctccctgcaggtgttgaaatcgatgaactccctaagcaaattgatgatacacagtacccaaaaacattcttctataaagaagaccttcatccaggcaaaacaatgaaagtacaattcaccaagcgtccctatgcacaaccttatggtgtatatacatggttaacggatattaaag

SEQ ID NO: 164050 - DNA, 261 bp, Glycine max
ctcatgcctgctgacaagttcagaatggctaccttgctccacaatgcgcccatcttgaaccacaccaatgcaatcaacccctctaatggttgacaaacgatgagccacgagcaccgtggtgcgacccctcattagcttttccaaggcttctggtagcacaaattcggattcagcttcaatgcacttgtgggctcatctagtagaagaattgtggggtccttaagcacggctcttgcaatggcaatactttgcttttgcccc

SEQ ID NO: 164051 - DNA, 249 bp, Glycine max
gagtctaaggccatggttaaatttcaactgaagaaagtgctctgcatgggagtagctgtgggcaatgttagtatggaggaaaagcaaatcttccaaaatgttcaactgagtgttaacttccttgtctctttgttgaaaaagaactggcaaaatgttaggtgcttgtatctgaagagtacaatggggaaatgttaccgtgtcttttgaggaatttctttttttatttcggtgaaattgtgatcgtgcatg

SEQ ID NO: 164052 - DNA, 249 bp, Glycine max
gcgggttactgtctgttcaagctaccatctctctctctctttcttagtgcctccttgccagaagttaaaatggcccaagaaactttcctattcacatctgaatcagtgaacgaggggcaccctgacaagctctgtgaccagatctccgatgctgtgctcgatgcatgcttggagcaggaccctgacagcaaggttgcctgtgaaacctgcaccaagaccaacatggtgatggttttcggagagatcaca

SEQ ID NO: 164053 - DNA, 266 bp, Glycine max
ccatctcttgtttcttgctttctttcttcaccatgtcacttgctgggaaaatcaccactgaaatcggggttcatgcaaccgctacaaagtggttcaacctcttcgcaacacaactccatcatgttcaaaacctaactgatagagtgcatggaaccaagctgcatcaaggcgaagactggcatcacaacgagacagtcaagcactggacttataccatagatggtaaggttacaacatgtctggagagtattgaatccattgatgaa

SEQ ID NO: 164054 - DNA, 253 bp, Glycine max
ccatggcttccgaaacaaaccagtccaagaatgtgtgtgtaattggagctggaccctcggggctattggcagcgagggagctgagaaaagaaggtcacaaggtggttgtgttggctcagaaccatgatattggaggtcaatggctatatgacccaaatgtacaagaggaggatcccttaggaagagacccttggctaaaggtgcatagcagcatctatgagtctttaaggttcatgtctcccagagagatcat

SEQ ID NO: 164055 - DNA, 252 bp, Glycine max
tcttgtgccactcacatttgcttccaggctctagcattagttttctttcaagtcttctttctcagcaatgggagatgaggtgattctgctgaatttctggttaagcccttatgggatgagggtccggattgcattagaacaaaagggcatcaagtatgaaagtagagaagaggacttaagcaacaagagctctttactcctccaaatgaacgcattcataagaaaataccagttctcatccacaatggcaaa

SEQ ID NO: 164056 - DNA, 267 bp, Glycine max
cctcgagcgctcgaggtatctttctctgttctattcctacgatggagttttggggtgacgaggttaacgttggtgagtctgttaaggtagatccagccgaattcgaggcatgcatacacctttctcaggctgctcttggtgaggcaaagaaagacaaatcaaatgaaccagttgttctctacttgaaagttggtcaacagaaatttgtcttgggaaccctttccagggagaaaattcctcaaatacctctggaattggttttggaaa

SEQ ID NO: 164057 - DNA, 268 bp, Glycine max
cgcctcccttcccttcgactccacggcgcagatccgaggagtttgggaaaccctaattcattcctctttgcttctatctctattaccctaacaccagtgatggcaggtttggcaccagaaggatcgcagtttgatgctcggcaatatgactctaagatgaatgaattgctttccgctgatggacaagaatttttcacttcatatgatgaagtctatgatagttttgatgcaatgggccttcaagaaaatcttctcagaggcatatatg

SEQ ID NO: 164058 - DNA, 271 bp, Glycine max
gttcagcaacgctgggatccttagtccctcccaacagacggtgcccgaactggacatgtcccaactagacaggctgttcgcggtcaacgtacggggaatggcggcgtgcgtgaaacacgcggcgcgtgcgatgttggaggggcgcgtgaggggaagcatagtgtgcacggcgagcgtgggtgggagccacggtgggccaaatgcgacggactacataatgtcgaagcacgcggtgttggggttgatgcgttcggcgagcgtgcagcttgcg

SEQ ID NO: 164059 - DNA, 270 bp, Glycine max
ctgcttcttcagccactccgcacctcgcagcctctgtgccctcaacaaccatggctgaaatcgaaactaccgttccagatcccacccaaatcgacgtcaaactctgcgatcgctggagcttcgaggatgttgaggttaatgatatgtctctggctgattacattggagtgtccccatcaaagcatgctacatatgttcctcacactgctggtaggtactcagtgaagaggttcaggaaagcgcagtgccccattgttgagaggctcacca

SEQ ID NO: 164060 - DNA, 268 bp, Glycine max
attactttttgttaaaatttggtttacttggaaagatgatgatcgcgagggcgtggtgtgtaggatgttcgtggggacgtggaatgttggaggaaagtctccgaacgagggattgaacttgaggaattggttgatgttgccttcaccagctgatatctatgtcattgggttccaagaaattatacctctaaacgcagggaacgtgcttggaccagaggatagtggaccagcatcgacgtggttgaaccttattcatcaagccttgaac

SEQ ID NO: 164061 - DNA, 262 bp, Glycine max
caaaaagtaggcataccacgtacaaaaagttcatgcccctctttatctctaaagacaggatgtcctaaccaaccgacggctattccatctccattgtccattgaacctgctctaaataaccccccttttgctggattatttccgatataatcataaaaagttaattttttgggaattttagaccaagcttctgataaatacaaaccgctgcattgaaccttccaattcagattgatttagtttgtcaacttttatctgactt

SEQ ID NO: 164062 - DNA, 266 bp, Glycine max
  unsure (1)..(266): unsure at all n locations
ctcgagcccanaagacagatctgactctgattaaggaattagagcaacaatcaaaccaaattgctggccacaaagaagctcgtcccnngatnctctttcagagcgatccactctatcagtatatacttgaaaccagtgtgtacccaagagagcatgagagcttgaaggagctaagagagttgacggaaaaacacccttggaacctgatggctacaccacctgacgaacgacaacttctacgcatgctacttaagcttatcaatgcc

SEQ ID NO: 164063 - DNA, 269 bp, Glycine max
tgcagctcgaggacggccgcaccctcgccgactacaacatccagaaggaatcaacccttcacctcgtcctccgtctccgtggtggcatgcagatcttcgttaagaccctcaccggcaagactattaccctagaagtcgaaagctccgacaccatcgacaacgtcaaggctaagattcaggacaaggagggaatccccccagaccagcagaggctgatcttcgccgggaagcagctcgaggacggacgcacccttgctgactacaacatc

SEQ ID NO: 164064 - DNA, 268 bp, Glycine max
cgttttcttttctgctaatgctgctgccttggcttcaaggaagtcctccccaagggtgataaatgaggctgtccaaaaagccgctgctgctctgaagggctctgatcatcggagggccacaaatgttagtgccaggttggatgctcaacagaagaaattgaatctttctgttcttccaacaactacaattggctctttccctcaaactgccgatcttagaagagttcgtcgtgaattcaaggctaacaagatctccgaggaagattat

SEQ ID NO: 164065 - DNA, 273 bp, Glycine max
atttatcaactcactcatcaatctcgtttgttctcactaactattacttcatcatgtcgtcgagcacagttggtcaagtcatcaaatgcaaagctgcggtttcatgggaggcagggaagccacttgtgattgaagaagtagaggtggcaccaccacaagctggtgaagtgcgtttgaagatcctctacacctctctttgccacactgatgtttacttctgggaagccaagggccaaactccattgtttcctcgtatatttggtcatgaagctg

SEQ ID NO: 164066 - DNA, 268 bp, Glycine max
ctggtctccggtccggttagggcatttctgggaccttaaatcaccaatttctcacccaatcaattccaattaagctgagagtgtttctgatctatatgtgatgggtgctccgaagcagaaatggactgcagaagaggaacaagcacttaaagccggagttgtcaagcatggtgttggtaaatggcgcaccatactgaaggatccagagtttagtagtgtcttgtacctgcggtcaaatgtggatctcaaggataaatggagaaatctg

SEQ ID NO: 164067 - DNA, 269 bp, Glycine max
tcaccattgagaactctcgctccgatgagaagctcctgtcagtcttccgtgaaggtgtgaagtatggtgctggaattggccctggtgtctatgacatccactccccaagaataccaccaactgaagaaatcgctgacagaatcaataagatgctcgcagtgctcgagaagaacatcttgtgggtcaaccctgactgtggtctcaagacccgcaagtacactgaagtgaagccagccctcacaaacatggttgccgcagcaaaactcatc

SEQ ID NO: 164068 - DNA, 268 bp, Glycine max
aaatgccacacaagaatggagggaagccgccgcttagttatcaatcgtttgtcaagcttgctggggaaccaccatcttctctctctactgtgtactcttcacttcctccagttggcaatcttggaagttgtgatatttctgaagttccaacaatcagagatcttggatatggagatgctgaacaggatgagttctctcctttcaaaggtggtgagtctgaagcattgaagaggttagatgaatgcatgacagacaagaagtgggtggc

SEQ ID NO: 164069 - DNA, 267 bp, Glycine max
aataccatgtgttagtgattatagctgatgggcaggtgacgagaagtgttgacactgagcatgggcagttgagtgcacaagaaaagaaaactgtagaagctattgtgaaagctagtgaatatcccttgtcaatcatattagttggagttggagatgggccgtgggatatgatgaaacaatttgatgataacatccctgcccgagcatttgataatttccagttcgtgaatttcacagaaataatgtcaaagaacatggatcggtcca

SEQ ID NO: 164070 - DNA, 264 bp, Glycine max
caacaatggacctccgtgaatcgataagcaaccaaaccgacgtggccctgagcatctcaaagctcctgttgtcgaaagaagctcgggacaagaacctcgtgtattcgccgctgtcgttgcacgttgttctgagcatcatcgccgctggctccaagggccccacactcgatcagcttctctccttcctccgatccaaatccaccgatcatctcaactccttcgcctctcagctcttcgccgtcgtgctcttcgacgcctctcccg

SEQ ID NO: 164071 - DNA, 239 bp, Glycine max
agaaaagaaaaaagagcgatttttccctcaccaaagaagaaccaaaacaatggcggatcaactcaccgatgaacagatctccgagttcaaggaagccttcagcttgttcgataaggacggcgatggttgcatcacaaccaaggagcttggaactgttatgcgttcattggggcaaaacccaactgaggcagaactccaggacatgatcaatgaagtggatgctgatgggaatggtacca

SEQ ID NO: 164072 - DNA, 266 bp, Glycine max
ttcaaaagggagaagaaaaggaaagaaaactctcaaaaaactattatagcaatggcagaacaaaaccaaaaccaaacaactgcagctacaaggcaccaagaggttggtcacaagagccttctcctgagtgatgctctttaccagtatattctggagacaagtgtctacccaagagaacctgaatccatgaaagaactgagagagttgacagcaaaacacccatggaacatcatgacaacctctgcagacgaagggcagttcttgaa

SEQ ID NO: 164073 - DNA, 267 bp, Glycine max
cttgcctattgtataaatagttatagagaagctgcaatgtcaaatgatcccaagtttgatcacattgacatcaatgagaaacaaaaggtcttaaatgaatgtgtggaagctgagaactggctcagggagaaaaaacagcatcaggactcgcttccaaaatatgccacccctgtacttttgtcagctgacgtaagacagaaagctgaagctgtggacaggttttgtaagccaattatgacgaaaccaaagccactgccacccaagcca

SEQ ID NO: 164074 - DNA, 263 bp, Glycine max
ttgcaatcaaattagttcattctctttgcgcagttccctacctctcctttcaagatgcagatcttcgtcaagatcctcaccggaaagaccatcacccttgaggtggaaagctctgacaccatcgacaacgtcaaggccaagatccaggacaaggaaggaattcccccggatcagcaacgtctcatcttcgccggaaagcagctcgaggacggccgtaccctcgccgactacaacatccagaaggagtcaacccttcaccttgt

SEQ ID NO: 164075 - DNA, 263 bp, Glycine max
gtgacttcaaaaactaaaatgaagggtcttttggagattctgtcttcagcttcagagtatgctcagcttccaatacgacctggagaggaagaggttgttcgtaagttaattaatcaccagacgttttcctttgaaaaccccaaggttacagatccgcatgttaaagctaatgctttgcttcaggcccatttctctaggcaatttgttggtgggaaccttgcattggaccagaaggaggcgcttctttctgcaaatagactgct

SEQ ID NO: 164076 - DNA, 268 bp, Glycine max
gagaccgatttgcagggatgaaatataaccctactagtgttatatttttgaagattccaaccatatctcatcttcaatggcactctttcagtatcatatctagttccagggctgatgatcacattttatctgtgataattaaatgtgaagggtggtggactaattctctttatgatctgatccatgctgaactagacaaaactgcagataaaaggaagggaataccgattgctatcgaaggaccttatggacctgcttcattagactt

SEQ ID NO: 164077 - DNA, 265 bp, Glycine max
ctcgagcgaatcggctcgagcttttctctctctgtctctgtaccattctcccttttcacccctcgtagatcgaaagacaatattcttccatggcctccaagcggattctgaaggagctcaaggacctacagaaagaccctccaacctcttgcagtgccggtcccgtagcagaagatatgtttcattggcaagcaactataatgggtccccctgatagcccttatgctgggggtgtttttctagttactattcattttcctccgga

SEQ ID NO: 164078 - DNA, 265 bp, Glycine max
ctctgatctcactcaccattcaccaacctgcttctctgttctcttctttcccttcccaagaagaagaagaagaagatgccttcttcagaatcatcaacagcgctctccgaaaccatttgtgtgaccggcgctggtggcttcatcgcctcttggatggtcaaactcctcttggagaaaggctacactgtccgaggaaccctcagaaacccagatgatcccaagaacgggcacttaaaagagtttgaaggagcttcccagagactaa

SEQ ID NO: 164079 - DNA, 265 bp, Glycine max
cctcgagccgattcggctcagaaacactctgaaattctcagttctgtcgtggcaagcgtatgtggatgatcacctactctgtgaaatcgaaggtaaccacctcactcacgccgctatcatcggccaagacggaagcgtttgggctcagagcaccaacttccctcagttcaaacctgaggaaataactgccatcaataatgactttaatgagcctggatcacttgctccaactggattgtatatcggtggcaccaaatacatggtc

SEQ ID NO: 164080 - DNA, 265 bp, Glycine max
aaaccgtgtcaattgagctcaagaatggcactattgttcatggcaccattacaggtgttgatatcagtatgaacacacatttgaaaacagttaaactaactctgaaagggaaaaatccagtcactctagatcatctcagtgtgaggggtaacaacatccgttactatattcttcctgacagcttgaatcttgagaccttgctggtggaagagacacccaagatcaaacccaagaagccaactgctggcaaacctttgggacgtgg

SEQ ID NO: 164081 - DNA, 261 bp, Glycine max
gctgttcagcagtggagtcaggctgattgctggatgcagttgtatgaccgatggtcctctgttgatgatattggttctttggctgttgtacaccagatgttagcaaatgacccggggaaaagtcttttacattttcggcaatctctccttctgctacggttgaattgtccaaagtctgcaatgcgtagtttgcggctggctagaaattattctacttctgatcatgaaaggcttgtctatgaaggatggatactgtatgac

SEQ ID NO: 164082 - DNA, 247 bp, Glycine max
atggaattctgcccaggtggtgacctccatactcttaggcagaagcaaccagggaagcattttcctgagcaggcagtaaaattttatgtggcagaggtcctactggctttggagtatcttcacatgcttgggattgtctaccgtgaccttaagccagaaaatgttcttgttagggatgatggacatattatgctctctgactttgacctctccctccgatgtgctgttagtccgaccctcgttaaaa

SEQ ID NO: 164083 - DNA, 265 bp, Glycine max
ctccctcagaagcgaagaagaagccacagagaaccagtctcctactctctctcacccacaagaaaaatggcatctcacatcgttggatacccccgcatgggtcccaagagagagctcaagttcgctctcgagtctttctgggatggcaagagcagcgccgaggatttgcagaaggtggctgctgatctcaggtcatccatctggaagcagatggctggtgctgggatcaagtacatccccagcaacactttctcgttctatgacc

SEQ ID NO: 164084 - DNA, 264 bp, Glycine max
gccattcaatccaattcttggtgagacttatgaaatggttaaccatggtggcattacatttatatcagagcaggtcagtcatcaccctccaatgagtgctgggcatgctgaaactgaacatttcacttatgatgttacatcaaaattgaaaaccaaatttctcggcaactcagttgatgtatatcctgttggaagaacgcgtgttaccctcaaaagagatggtgtggtccttgatttggtgcctcctcctacaaaagttagcaa

SEQ ID NO: 164085 - DNA, 264 bp, Glycine max
cctcgagccgattcggctcagaattcacttccggttgtctatacgggttcctttacaaagctgaaacaatttcttggactaatggaagaagctactagatcttctttgaaacagaattctatgccgcttcctccatggagatctctagcatatctgcaagccaagtggcagtcaccgtatgaaagatacacacattcagaaggcaatattgttagcagcagtgattgcttcgatcacaagcaatgttgtggacatttgaagagg

SEQ ID NO: 164086 - DNA, 264 bp, Glycine max
cacacactgtctctgatcctgcattattgttgacaacatggccacggagcttctccaaattgatccccctcagctcacttttacctttgaattgaagaaacagagttcctgcttggttcatctcatcaacaacaactcttctcaccatgtcgccttcaaggtcaaaaccacgtcgcccaagaaatactgcgtcagaccaactgtcggcatcgtcaagccacacggaacatgtgatttcaccgttactatgcaggctcagcgcac

SEQ ID NO: 164087 - DNA, 262 bp, Glycine max
ccaaacccgtgttctgatgcatggagtttggaatttctgaagcgtaccggatttcattgtgatatcatttgtgtcactggatggactgctaccccaatgcaggatgttcaggttacaattgattggtttatttcctctcaggaatgtgttcccaggacctattgtgttttaaatccacaaaatccttttgtgttaaataggtggatggggaaattgactttcccccagggcacttcccgaagtgttaaaagaatgcctcttt

SEQ ID NO: 164088 - DNA, 258 bp, Glycine max
gtcttcaacttcacccattcatacgtggtgttgttactgctgctcttttctcttttcttttctctttagttctctcttcccctttctttttctttttcttcttcttctgagcttgtttaagcttttcttccattaacatattatcacaatgtgtggtattcttgctgttcttggttgttctgatgactctcgagccaaaagggtccgcgtgcttgagctctctcgcagattgaagcaccgtggccctgactggagtgg

SEQ ID NO: 164089 - DNA, 225 bp, Glycine max
attgagcaggaatacaccttgttgcagaaagatatccaatggcctcttgggtggcctgttggtggtttccctggaccacagggtccatactactgtggtgttggcgctgacaaggcttttggccgtgacattgttgatccacattacaaagcctgtctttatgctggcatcaacatcagtggaattaatggagaagtgatgcccggtcagtgggaattccaagtt

SEQ ID NO: 164090 - DNA, 228 bp, Glycine max
gacaaatggcaacaagcgaagaagtggttgccgcggcgcggaggagcgcgctggaggcagggctgaagcacaaactggagagaaaatggacgttttggtgcgacaaccaatccaaacccaaacagggcgctgcttggggtactctcttcgcaaggtctacaccttcgacaccgttgaagagttctgtttgtatgatcaggtattcaagccagcaagttgcaaatcatg

SEQ ID NO: 164091 - DNA, 131 bp, Glycine max
ctcggcgttcagcaagacctacgccaccaatgaggagcacgatcatcgcttcggcgtcttcaagtccaacctccgcagagccacgctgcacgccaagctcgacccctccgccgtccacggcgtcaccaaat

SEQ ID NO: 164092 - DNA, 137 bp, Glycine max
ccaggcagtatataagacatggacagttgatattctcagaagattttggcactgaaggacgtggcgggtactttgaccattatggtatcatgagagacattatgcagaatcatttacttcaaatactagcactcttt

SEQ ID NO: 164093 - DNA, 280 bp, Glycine max
tctatctcttgtttcaatttcaacaacggttactcctttttcgttttgagtttcaatcaagccatcatcatgtctaccgcatcgcaacccaaggccaagaaaacggcgtcgtccaagaagcccctctcccaccctcccttcgccgtgatgatagcagaggcgattgcgagtctgaaagagagaaccggttcgagccaatacgcgataaccaaatacatcgaagggaagcacaaggagttgcctgcaacctacaagaagcttgtcctcgttcatctcaaga

SEQ ID NO: 164094 - DNA, 254 bp, Glycine max
  unsure (1)..(254): unsure at all n locations
tntttcttccgccactgcngcagagcgtagaaggaaatcaaacagcagagagagggtaaagcatacgtgggttaaatccatgcgcatgagtcggaagaatttgtgttagcggtgaggagatatattngagaattaatatttgatagtgtatatatggggaggggaagagtggagttgaagaggatcgagaacaagntcaataggcaagtgacgttctcaaagagaaggtctggtttgctgaagaaagcgcgcga

SEQ ID NO: 164095 - DNA, 281 bp, Glycine max
gcgacactaagatcggagaaagaatggcgaaaacgacgtcgttgctgctctttacactgctcctcttcggaaccctagctctcatccaggcgaagaaatcgaaggaggatttgaaggaggtgacccacaaggtttactttgatgttgagattaatggaaaagaagcaggtcgtattgtaatgggtctttatgggaaggctgttccaaaaactgcagaaaacttccgagcactttgcacaggggaaaagggaactggtaaaagtggaaagcctctcattaca

SEQ ID NO: 164096 - DNA, 276 bp, Glycine max
ctcagtgaaagagaatccgaggcgaagagaagagaaaaattaagatggaggggaaggagcaggatgtgtcgctgggagcgaacaagttcccggagagacagccgattgggacggcggcgcagagccaagacgacggcaaggactaccaggagccggcgccggcgccactggttgacccgacggagtttacgtcatggtccttttacagagcagggatagcagagtttgtggccacttttctgtttctatacatcactgtcttaaccgtcatgggag

SEQ ID NO: 164097 - DNA, 278 bp, Glycine max
tagaactgaaggggcctaagcagtatgattgcagagcctacaggagtttgtttcagctggttcaagaatgtgcgttgacactgcaagctattatgtcattccatcaatgtggagggaacgtaggcgatatagtccacatcccaattccccagtgggtgcttgacattggagaatcaaatcatgatatcttctacaccaaccgctcaggaacccggaacaaggaatatctaactgttggtgtggacaacgagcctatattccatggaagaacagccatt

SEQ ID NO: 164098 - DNA, 216 bp, Glycine max
aaaggctcatgatgggaatggtggagtgtattcagctctgaaatctaccaaattattggagcatatggcctcaaaaggaattaagtatattgattgctatggagttgacaatgcactggttcgagttgctgatccaacttttttaggttacttcattgataaaggtgttgctgctgctgcaaaagttgtccgtaaggcgtatccacaagaaaaggt

SEQ ID NO: 164099 - DNA, 276 bp, Glycine max
cgttgatccatctcttgtttcttgctttctttcttcaccatgtcacttgctgggaaaatcaccactgaaatcggggttcatgcaaccgctacaaagtggttcaacctcttcgcaacacaactccatcatgttcaaaacctaactgatagagtgcatggaaccaagctgcatcaaggtgaagactggcatcacaacgagacagtcaagcactggacttataccatagatggtaaggttacaacatgtctggagagtattgaatccattgatgaacag

SEQ ID NO: 164100 - DNA, 278 bp, Glycine max
tatgctgcaagcagaatccacaatgcattgttacgaatggacaacgattatttgagatcggctcttgactatctagaactgcaacccgatctaaaagcgctggttcgtggggctcatactttcaagtgtccaaaccttagtatcactagctggactaggcttccaatccatgatgctgactttggttggggaaggccaatattcatgggacctggtggaattgcatacgaggggctatctttcataattccaagctcaaccaatgatgggagcctatc

SEQ ID NO: 164101 - DNA, 237 bp, Glycine max
caggagaagctgttggtctacaagcacatgtcgaatgggacgctgtattcgttgttgcataggaacggtggtgatgcgttggattggttgatgaggtttaggattgggttgggtgcggcgagggggcttgcgtggctgcaccatggctgccaccctccgatcatacagcagaacatttgctccagtgtgattcttgttgacgaggagttcgatgcccggttgatggactttgggctc

SEQ ID NO: 164102 - DNA, 260 bp, Glycine max
tcgagctccaatttatgggaggtcaagctgcaggatatgcagcagcagatgctgttcaaacacttccactagtgagtaccttttggggcattgttttgtttggagagtaccgcaaatcatcaagaagaacatatgtgctacttgggagcatgttgcttatgtttgttgcggctgttgctgtattaatggcatcatcagggcatcgaaaatgatcataatactgagcaagaggaaacgatagcaaagactgaaaggtgttg

SEQ ID NO: 164103 - DNA, 147 bp, Glycine max
gtgattgtttgttgttgtaactcgttcttcttcttttgttgttctgtgtttgtgtttgttttttctctcacctgaaaatgtcttgctgcggtggtaactgtggttgcggaagctcctgcaagtgcggcaacggctgcggaggctgca

SEQ ID NO: 164104 - DNA, 273 bp, Glycine max
gctgaattcattcatagcagcaaacccatctccaacaacatgagtaccacgacacgcaacctcaactttgttctgtttcctctgatgtcccaggcccacatgatccccatgatggacatagcaaaaattctggcacagaacggtgttactgtcacagtggtcacaacccaccaaaacgcatcacgcttcacatcaactttttctaattcccaaatccgattactcgaagttcaattcccataccaagaagcagggttgccagaagggtgtgag

SEQ ID NO: 164105 - DNA, 274 bp, Glycine max
cggtgagatttgcgaatctgagaaatggcggattcttctcgggaaggagaacgtttacatggcgaaattggcggacaggccgagcgttacgaggagatggttgagttcatggagaaggttgcaaagactgtggaggttgaggagttgacggaggaggagaggaatctcctctctgtggcttacaagaacgtgattggtgcgaggagggcttcgtggaggatcatatcctccattgagcagaaggaggagagcaggggcaatgaggaccacgtgg

SEQ ID NO: 164106 - DNA, 279 bp, Glycine max
atttgattgattgtattacagtgtcattttccttcataaccgatttccatttcatgattgtgcgcaacagttcgcagactcacaatggccgcaatatccaactccttatcactgaagcacagtttcactctgagtcgagcttctccttcttcctcttccatcaaattcaaattcagaagatgttacgccgcgttcgccaatgagaatcgcgagtacgtgatcgttggcggcggaaatgccgcgggatatgctgcgcgcactttcgttgagcatggaatg

SEQ ID NO: 164107 - DNA, 280 bp, Glycine max
ctggaatacaagaacatcagcttcactgtctgggatgttggaggtcaggacaagatccgtcctttgtggagacattacttccaaaatacacaaggactcatttttgtggttgatagcaatgacagggaccgagttgttgaagctagagatgagttgcatagaatgttgaatgaggatgagttgagagcaatgacagggaccgagttgttgaagctagagatgagttgcatagaatgttgaatgaggatgagttgagagatgccgtgcttctagtttttgc

SEQ ID NO: 164108 - DNA, 141 bp, Glycine max
cgaatttgctccatctattcccgagaagaacatttcttgtttgactagattggatcacaacagggcattgggccaaatctctgaaagactgaccgttcaggtttctgatgtaaagaatgtcattatctggggcaatcactc

SEQ ID NO: 164109 - DNA, 275 bp, Glycine max
cgagcgtaaggaggctgccgagagcactctctctgcatacaaagccgcacaggacattgcgaatgccgaactgcctcctactcatccaattaggcttggccttgctcttaacttttctgtattttactacgaaatccttaattctccggatcgtgcctgcaaccttgcaaaacaggcttttgatgaagctattgctgaattggatacactgggagaggagtcatacaaggatagcactttgatcatgcaactccttcgtgataacctcacacttt

SEQ ID NO: 164110 - DNA, 265 bp, Glycine max
aagcaatgcagacgaggttcacttccgcggagtccggaagcgcacctggggccgctatgccgccgagatccgcgacccttgagagaagacccgcgtctagctcggcaccttcgacaccgccgaggatgccgcccgcgcatacgacgtcgccgcacgaaacttccgaggtcccaaagccagaaccaacttccccttcctcgccggcaacaacaccaacgtcagcctcaacaagaagaacaacagcgttaacgttaaatctgacagt

SEQ ID NO: 164111 - DNA, 276 bp, Glycine max
agaatttgctccatctattcccgagaagaagatttcttgtttgactagataggatcacaacagggcattgggccaaatctctgaaagactgaccgttcaggtttctgatgtatagaatgtcattatctggggcaatcactcatcaacccagtatcctgatgttaatcatgcaactgttgcaacctcagctggggagaagcccgtccgtgagcttatagctgatgatgcctggttgaatggggaattcattactactgttcaacaacgtggcgctgc

SEQ ID NO: 164112 - DNA, 278 bp, Glycine max
cacaacccatggccaccacctccgcattcctcctcctttacctcctcctgctgctccacctcgccaccgccgcgcacggcatcggcatcaactacggcacgctcggcgacaaccttccaccgccggcggcggtgccgaacttcctgaagacgaagacgaccatcgaccgcgtgaagatctacgacgtgaacccggacatcctgcgggccttcgccggcagcggcatctccgtgacggtgaccgccccaaggggacatcgccgacttaaccaaaatcgc

SEQ ID NO: 164113 - DNA, 266 bp, Glycine max
tcgcattggaagtcctaaactccctggagtcccttacacttctcacaccgagacaaggctgtaaggtttctctgtaccaagatgctcatgtcccagacaactttgtccctagaataccacttgctggaggccacacttaccaacctcatagatgttgggaacatgtttttgatgcaatcaataacgcacaacacttgatatacattgcaggatggtctgtttacactgagattacgttggtaagagttctaggaggccaaagcgta

SEQ ID NO: 164114 - DNA, 274 bp, Glycine max
cggggtgggactcaacttgcatcccaatctgcttgcttgaatttacttggtgtgaagggtgcaagcaaggagtcaccaggatcaaactcaagacttttggccaccattgttgctggatctgttttagcaggagagctgtctctgatgtctgccattgcagcagggcagctagtgaacagccacatgaaatacaacagatcaagcaaagatgtaaccaaaatatcatcatcttgaggtcagggacatggttgcagtcattaattctggactctag

SEQ ID NO: 164115 - DNA, 274 bp, Glycine max
gtgaagtcataagtcatctctcctctcttgtaaacatggcagccgaaacggaaccaaagaagatcataattgataccgaccctggcatcgatgatgctatggcaatattccttgctctacaatcacccgaggttgaagttattggactcacaaccatctttggaaatgtgtacaccactctggcaaccagaaatgccttgcatttgttggaggttgctgggagaacggatataccggtggcagaaggatctcatgtaacttcaactaatggaac

SEQ ID NO: 164116 - DNA, 280 bp, Glycine max
ctctcccttccttccatcccaaccacaaggctgctgagaagacatacaaaatggtgaagatttgctgcattggagctggctatgttggtggaccaaccatggctgtaattgccttgaagtgtcctgagatcgaggtggtcgtggtggacattgctgcaccgcgaatcaacgcgtggaacagcgaccacctcccgatatatgagcctggccttgatgatgtggtgaagcagtgcagggggaagaatctcttcttcagcactgatgtagagaagcatgttgc

SEQ ID NO: 164117 - DNA, 266 bp, Glycine max
agagaaagtagcagatcctccatggcctccaccaaggaacgtgaaaacttcgtctacgtcgccaagctcgccgaacaagccgaacgctatgaagaaatggtggaagcaatgaagaatgtggcgaactaaacgtggaattgacggtagaggagcggaaccttctgtcggttgggtacaagaacgtggtgggtgctcgtagggcttcgtggaggattctttcctcgattgaacagaaagaagaagctaaagggaacgatgtgagcgtg

SEQ ID NO: 164118 - DNA, 265 bp, Glycine max
ggagaaggaggttttggtcctgtgtacaagggatgtttctcagatggaacactaatagctgtcaaacaactttcttctaaatcaaggcaagggaatcgtgagtttttaaatgagataggcatgatttctgctctgcagcatcctcatcttgttaaactctatggatgttgtgtggagggagatcaactattgttggtatatgaatatatggaaaacaatagtcttgctcgcgctctatttggcgccgaagaacaccaaataaaat

SEQ ID NO: 164119 - DNA, 270 bp, Glycine max
caagaatctgagatcggaaaattcacctctccaacccccaatcccatcgttgcaaatgatccgattcattctgttgcagaacaggcagggcaagacccgtcttgccaaatactacgttcctctcgaggattccgagaagcacaaggtggaatacgaggttcaccgcctcgtcgtaaacagagaccctaaatacacaaatttcgtcgagtttcgtacgcacaagataatatacaggcgatatgctgggttgtttttctcaatctgtgttga

SEQ ID NO: 164120 - DNA, 264 bp, Glycine max
ctcgagcgctttgttcactcttcttctcttgcggctagggtctttagcgcagttctactagatttaaggaagatgggtaaggctaaggttcacatcagtattgtggtcattggccatgtcgactctgggaaatccactaccactggtcacctgatttacaagcttggaggcattgacaagcgtgttattgagaggtttgagaaggaagctgctgagatgaacaagaggtctttcaagtatgcctgggtgctggacaaacttaag

SEQ ID NO: 164121 - DNA, 274 bp, Glycine max
cggacattcattcatctatggctacccttattgctcccagcaaccactctccccaagaagatgctgaagctctcagaaaggcttttgaaggatggggaactgatgagaacactgtcatagtaattttgggtcatagaactgtgtatcagaggcagcaaatcagaagagtttatgaggaaatttaccaggaggatcttgtgaagcgcctagagtctgagatcaaaggagactttgagaaagccgtgtaccgatggatactggacactgcagatcg

SEQ ID NO: 164122 - DNA, 275 bp, Glycine max
cgagcagcgcggaaaaataacaccaactagctccgtgagcaaagccaaattcgagttggagaatttaggtgaatgggttgcatgctcagttggtgctaattttactccccatatcatcactgttaattctggggaggatgttactatgaaggtaatatcattttctcagcaagggccgcgagctatatgcattctttcagctaatggggtcatatcaagtgtcacacttcgtcagcccgattcttctgggggcacactgacatatgagggacggt

SEQ ID NO: 164123 - DNA, 267 bp, Glycine max
tatactctctctagagtaattgcggaatcagctagaattttctaataatggccaaagacgttgagcaggttacagagcaaggtgaatactccgcgaaggattaccatgacccacctccggcgccgttgatcgacccagatgagctcactaagtggtccttgtacagagccgccatagctgagttcatagcaacactccttttcctttacatcaccgtgttgaccattattggctacaagagacagagtgacaccaaaatccccggta

SEQ ID NO: 164124 - DNA, 269 bp, Glycine max
aatagtttggttttgtagtaagtgaggtgaggtgccaaaatggtgaagataactcttggtactttcgatgactcttttggtgttgcctctcttaaggcttatttggcagagttccatgcaactctgattttcgtgttcgctggtgttggttcagccatcgcttacaacgagcttacaaaagatgcagccttggatccaacggggctggtggcagtagctgtggcccatgcatttgcactgtttgtaggtgtctccgtcgcagccaacat

SEQ ID NO: 164125 - DNA, 264 bp, Glycine max
cagaaagatgtctttcattggcactcaacacaagtgcgaggcttgtgacaaaacagtgtaccccgttgatcagctttctgctgatggcactgcttatcacaaaccatgcttcaagtgctctcattgcaaaggtaccttgaagctcagcaactattcctccatggaaggtgttctagactgtcagcctcattatgcgcaactcttcaaggagacaggatctttcaagcagaacttccagtcacctgctaagcacgctgtcaaaac

SEQ ID NO: 164126 - DNA, 264 bp, Glycine max
cggaattcattgcacagtgtgatgttcagtatcagcatcatggctccaattgcagtgggagatgtcattccagacggcattttggcttacttggatgtagataacaaagcccaaactatctctattcagtctctcgccgtcgggaagaacagtcatcatctttggggttcccggtgccttcactcctacatgcagcttgaagcacgtgcctggcttcattgagagagcagaagagctgaaaggtaagggtgtggacgagataat

SEQ ID NO: 164127 - DNA, 266 bp, Glycine max
ggccaggcaagccccactcaaccaccacacctctcctcgttcacgctacccctttctgctcttcctctacctttcaagttttaaaagtataaagatggcagagacattcctatttacctcagagtcggtgaacgagggacaccctgacaagctctgcgaccaaatctccgatgctgtcctcgacgcttgcctcgagcaggacccagacagcaaagttgcctgcgaaacatgcaccagcaccaacttggtcatggtcttcggagaaa

SEQ ID NO: 164128 - DNA, 263 bp, Glycine max
cggctcgagagccaattcatcattttctctcttctctgcttcttcttgttcaaatcttaggagctgaggagaatcaatcgagagaaatatgtctggtatcgctcgtggacgccttgctgaggaacgaaagtcatggcgcaaaaaccatccacacggtttcgttgccaagcccgagactctacctgatggcaccgtaaatttgatggtctggcattgcactattcctggcaagaccgggactgattgggagggtggatatttcc

SEQ ID NO: 164129 - DNA, 266 bp, Glycine max
ctcattaattgcaagaatggcacttcgttgcttggtgatgtccctttctgttctcttcactcttggtcttccgagagaaagccatgccagagacgaagatttttggcatgctgtttggccaaacactcccattccaagttcattgcgagatcttctaaagcctggccctgcaagtgttgaaatcgatgctcaccctatgcaaattgaagaaacacagtacccgaaaaccttcttctatacagaagaccttcatccaggcaaaacaa

SEQ ID NO: 164130 - DNA, 270 bp, Glycine max
gtgtcacaactcagacaggaaagctttgaggtttcttccgcattttagagtggtgagaggatggtgggtgttatttcgttggtaacagggatggctggtcctagtgggtttggatcagcttccactgcagaacaggttactgatggaattgatgccagcaacctcactgcaattatcacaggaggagcaagtggtataggcttggagacagcaagagtgttggctcttcgaaaggtccatgtgatcattgcagttcggcacatggtgtct

SEQ ID NO: 164131 - DNA, 262 bp, Glycine max
gggggtgggactcaacttgcatcccaatctgcttgcttgaatttacttggtgtgaagggtgcaagcaaggagtcaccaggatcaaactcaagacttttggccaccattgttgctggatctgttttagcaggagagctgtctctgatgtctgccattgcagcagggcagctagtgaacagccacatgaaatacaacagatcaagcaaagatgtaaccaaaatatcatcatcttgaggtcagggacatggttgcagtcattaat

SEQ ID NO: 164132 - DNA, 257 bp, Glycine max
gttgaagccatggtattggtggtcatggcctgttctgccattaggcctccagtggcatgaacaacgccgtcaaactttagggtatggtgctgacttggctgtgatacttatccaatctgcaatatatgtgggagtaatagcaatgacgcgtttggcacggccaagcttctcaaagctatgttataggcgctctgataagagcatcacccttgttcataacagcctcaaattagtagctttgtggtgcatccttgctg

SEQ ID NO: 164133 - DNA, 262 bp, Glycine max
ggcagaaccaaatagctcattagtgagtttttgagttcgtgtgtcctttctttgtgtgtcgcaaggttacaagatggaggatcaaaatgcatcatctaatggattgggcaaggtgttccacaaggttaagccctaccttgctatgatgtcccttcagtttggctactccggaatgtacatcatcaccatggtttctttcaagcatggcatgagccattgggtactctccgtgtaccgtcatatagttgccactctcatcatg

SEQ ID NO: 164134 - DNA, 257 bp, Glycine max
ttaccttcttcaccttccttcctctctatctctagagaatggaaccggaatccggaacttcgacttctcggaatccttctcagttgtcttgggtgaatctgtctaggaatttattattagcgtatcaaagctttggtgtggtgtatcgagatgtgagcacttcttctctctatgtcttcaaaagcatctttaaaggggagttcgagaatcaacatggaggggaaactatattcggcacgttttcgctgattttttgg

SEQ ID NO: 164135 - DNA, 278 bp, Glycine max
cggcattcggctcgactcgagcgaatcggctcagtgagattgctggtgtggtggtaccctttgaccccaagcacaattaagggtgattggactcgtgctggtgctcacacaaactacagcaccaagtccatgagagaagatggtggctatgaagtgatcaaagcagcaattgacaagttggggaagaagcacaaggagcacattgctgcttatggagaaggcaacgaacgtcgtttgacaggacgccacgaaaccgctgacatcaacaccttcttatg

SEQ ID NO: 164136 - DNA, 267 bp, Glycine max
ggtagccagagtggctctgcagagagacgatgttgaactcgttgccgttaacgaccctttcatcaccaccgattacacgacatacatgtttcaataccacagtgttcatggacactggaagcatcacgatgtcaccgttaaggacgagcagacccttctcttcggtgacaagccagtcactatttttggacacagaaaccccgaagagatcccatgggggtcaactggagctgacatcattgttgagtccaccggagttttcaccga

SEQ ID NO: 164137 - DNA, 257 bp, Glycine max
gtctgtccgagagctgagtggacagatatgccagatttgtggggatgagatagagattactgtggatggggagccatttgttgcctgccatgagtgtgctttcccggtttgccggccttgctatgagtatgaaaggcgtgaagggatccaggcttgtcctcagtgcaataccagatacaaccgtatcaacggcagtcccagggttgaaggcgatgaagaggaagatgacactgatgacttggacaatgagtttgatt

SEQ ID NO: 164138 - DNA, 123 bp, Glycine max
cttaattgcaagaatggcacttcgttgcttggtgatgtccctttctgttctcttcactcttggtcttgcgagagaaagccatgccagagacgaagatttttggcatgctgtttggccaaacac

SEQ ID NO: 164139 - DNA, 266 bp, Glycine max
atcaatctctccctttcacctttctccatagcctaccacttttcttctttctctgctttcatctctctactctcacttctcttcacacactgagacacagagagagagagagaacaaaaaaagaaacggagtgatgggtgtgagactcagtgttttctttttataatgaacaaagtactacacatcctcttcttcactgaagaagatggcaattcagcaccacaatgaacaactagagcataatgacaatgtctcatctgtccttg

SEQ ID NO: 164140 - DNA, 270 bp, Glycine max
agtagactcgaggatactggtgaatgcgtagaaaaggaaaatatagaaattagcgtgaaaaatgttgggtgtgttcagcagctccatagtgtcgccgccggaggagctcgttgccgccggcagccgtacaccgtcgccgaagatgacggcggcggcgctgcggaagtggttcgaggagaagaacccctccgcagtgacggtggaggtcggagagcatgtccagctcgcttatacccaccagaacgagtcgccgtttcagcccagatcctt

SEQ ID NO: 164141 - DNA, 256 bp, Glycine max
tacgccatcaaatttattctcaacttagatggacctgatcctggggccgatgatttgaaggtgattaatggtctcattgacatgtatgctaaatgccaaagcacagaagtggctcgaaaaatgtttgattcagcatcgccaaaagacagggacgtggttacctggactgtgatgattggtgggtatgcccaacatggtgatgccaataatgctcttcaacttttctccggaatgttcaaaatggacaagtctataa

SEQ ID NO: 164142 - DNA, 258 bp, Glycine max
ctcgagccggtgattggaagttgttcgaatccagaatccgaaaacagggcaccaccgtgtcaacaagtagaagcagaagctgtttttgttcttcgccgctgacactaatcgtttcttcaatgccttacgagaaggaattcgccgctgcaaaaaaagcagccactctcgctgctcgtctctgcaagacagtacagaaggctcttctgcaatccgatgtgcactcaaagtcagacaaaagtcctgtcacagtggctgatt

SEQ ID NO: 164143 - DNA, 161 bp, Glycine max
gtgacaagacagttggcggtggtgatgatgctttcaatactttcttcagcgagactggcgctggaaagcacgtgccacgtgcagtgtttgtagatcttgagcccactgttattgatgaggtgagaaccggaacttaccgccagcttttccacacaacatac

SEQ ID NO: 164144 - DNA, 256 bp, Glycine max
gcgcgagaagcatcccaaaaccctagctcgcgttctgctttcgtcttttacatcaggatggagtctcaggtgaagcacgcacttgttgtcaaccttatgggtcgtactggatccagaggacaagtaacccaggttagagtgaaatttttggatgatcagaaccgtcacatcatgaggaatgtgaaaggacctgtgcgagaaggagacattctcaccctactcgagtctgaaagggaagcaagaagattgcgctaga

SEQ ID NO: 164145 - DNA, 258 bp, Glycine max
cgttgcttggtgatgtccctttctgttctcttcactcttggtcttgcgagagaaagccatgccagagacgaagatttttggcatgctgtttggccaaacactcccattccaagttcattgcgagatcttctaaagcctggccctgcaagtgttgaaatcgatgatcaccctatgcaaattgaagaaacacagtacccgaaaaccttcttctataaagaagaccttcatccaggcaaaacaatgaaagtacaattcagc

SEQ ID NO: 164146 - DNA, 258 bp, Glycine max
tgtagcttcaagttgatggtggtttcaatcagaatctgaattcaaagactctgtctgctcccaatctcagtgcaatggactaccctgcacttacttcaccagatggccagactgcttcagtagaatattcggttgataatgtgcaacaaagtggcaatccttaccgatcatatgacagtgatgtgctgcttttcaaatctgtctcttcagtttcatctaggggtggtgctattgactttgcttcagctgttaggaagt

SEQ ID NO: 164147 - DNA, 261 bp, Glycine max
cacatcatggttcaagcggtttataggacgtaagcagaagccagaagtgacctggccatttccttttgcagagggtagaatgtttgtccttactttacgtgctggtgttgatggataccatattactgttggggggcgccatatgacttcatttccatatcgaacaggctttacacttgaagatgctacaggattggtagtcaaaggggaccttgatgttcattcagtttttgctacttctctccctacttcacatccaag

SEQ ID NO: 164148 - DNA, 268 bp, Glycine max
ctctctctgtctctatatctgtatttctgaattttgggaatagacaaaccctaagcaaagcaaagcggtaaggatggggaacacggagaagctgatgaaccagatcatggaattgaaattcacttcgaaatcgctgcagcgtcaatcgcgtaagtgcgagaaggaggagaaatcggagaagctgaaggtgaagaaggcgatcgagaaaggcaacatggacggcgctcgaatctacgcggagaacgcgatccgtaagcgcacggagcag

SEQ ID NO: 164149 - DNA, 247 bp, Glycine max
cctgccagtagtcatatgcttgtctcaaagattaagccatgcatgtgtaagtatgaactaattcagactgtgaaactgcgaatggctcattaaatcagttatagtttgtttgatggtatctactactcggataaccgtagtaattctagagctaatacgtgcaacaaaccccgacttctggacaggatgcatttattagataaaaggtcaacacaggctctgcctgttgctttgatgattcatgata

SEQ ID NO: 164150 - DNA, 253 bp, Glycine max
ggctcccaagggtttaatctttttggctgtgttatgcttctcagcactgtcactgagtcgttgtcttgcggaggataatggacttgttatgaacttctacaaggaatcatgccctcaggctgaagacatcatcaaagaacaagtcaagcttctctacaagcgccacaagaacactgctttctcctggctcagaaacatcttccatgactgtgctgttcagagttgtgatgcttcactgttgctggactccaca

SEQ ID NO: 164151 - DNA, 242 bp, Glycine max
tcagtttccacactgcataccttaggtcttccgaattcgaagttaatttgcaagatggctaaggataaggctcagatcaacattgtggttgttggtcatgtggaccctgaggaggcaaccaccattaacgagctgaagaagcctgttgtggagaaagaagctccatggcatgccatatgagggcatgcacgtacggcctcggaggggaaccagacaattatgttaacaaaatcatctggaac

SEQ ID NO: 164152 - DNA, 241 bp, Glycine max
cttgaatcaagaatgaatgaagttctcttttgaatttcttggaattgaagatattcgttatgtggttggatttggtgacttatttgcaccatcatggccatgaagacaaattaccttggtaccgtggaaaggaatggagctacctcaggggtggtctaactactcttgatcgtgattatggatggatcaataacattgcccatgacattggcactcatgtcattcatcacctatttcctca

SEQ ID NO: 164153 - DNA, 247 bp, Glycine max
ttctacttcaacatcttaaggtaaagaaagcgaatcgattccgattcctctcaatggctgcggaacccaaggaatcgccttccaacaaccccggtctccatacaactcctgacgaagccaccaagggttacatcatgcaacaaactatgtttagaatcaaagaccccaaagtgagcctcgatttttattctcgagtcttgggcatgtctttgcttaagagattggattttccggagatgaagttcag

SEQ ID NO: 164154 - DNA, 245 bp, Glycine max
ctcacattattattcacatctccatctagatctctctctctctctctcccaagaaattcatcaacagacttgtgattaatttgcaattgttcaagtgatctatcaagaaattgacaattcaatgggaaagtacgaaaaagagcttaatctcgaggctacagagttgagattggggttgcctggaagcgatgagcctgggaaacgttctattgttagaagcaataagagatcttcaacagaagcaa

SEQ ID NO: 164155 - DNA, 268 bp, Glycine max
acgtaagctcgggcaaaggatggcctcaaaccatcaaccttggcgttacgccagggagaaacagaggacaataccaagggaattagaacaagctctggcgtgtttgttagtgcttctgaggataaaccaaggactttagatgtcattgaggagaaaattgctagagcaacaatgattcccagaagtcacggagaggcatttaatatcctacgctatgaggtcaatcaaagatataattctcattatgatgcattcaatcctgctgaat

SEQ ID NO: 164156 - DNA, 247 bp, Glycine max
cggctcgtcaaaaaatggcagatattcctcgggtgaagcttggcagccaaggcctggaggtttccaagttaggatttggttgtatgggcctaagtggagtgtacaacgatcctgttcccgaagaggttggcatctctttgatcaaacacgcattcaccaaaggggtcactttctttgattctgcagatttttatggagcatctgccaatgaagttttggtcggaaaggctctcagggactttcctcg

SEQ ID NO: 164157 - DNA, 245 bp, Glycine max
ctcaacactcactctttctaagtcttttctatctctttctctctctctgtctgccatggttctctccaaaaccacctccgaatccgacgtctctgtccactcaaccttcgcttctcgatatgtcagaacttcgcttcccaggtttaagatgccggaggagtcgataccaaaggaggcagcgtatcaaataataaacgatgagttgatgttggatgggaacccaaggttgaacttggcatcatttg

SEQ ID NO: 164158 - DNA, 250 bp, Glycine max
catggcttcacagaacattggtgctgcaaacagtgatgatgccttctcaaggtccaagataccaaggatgattaccaaaattcacggcagaggtaacggcatcaaaactaatgttgtcaacatggttgatattgccaaggcattggcaaggcctgcgtcttacacgaccaagtattttggttgtgaacttggggcccagtcaaaatttgatgagaagaccggcacttctcacgtcaatggcgcacatgat

SEQ ID NO: 164159 - DNA, 253 bp, Glycine max
gcgactcacactggtcttcgcttctcattcatcatttctcacctaaccttctcttcctctcagtctcagatccaaaacctccgccagccatggcagcgttccagaagatcaaggtcgccaaccccatcgtcgagatggacggagatgaaatgactagggttatctggaagtcaatcaaggacaagctcattttgcccttcttggagttggacatcaagtattatgacttaggccttccttaccgtgatgagac

SEQ ID NO: 164160 - DNA, 252 bp, Glycine max
ctcattctcattcgttcactgtcactttacccaatcctaacactttcttctctctgttttccttcttcctcgcatcaatggagttggacggcgttctcctcggcatgtgcaaccctctcctcgacatctctgccgtcgtcgacgacgctttctgcaaaacatagggttcaacgttgacgatgcgattctcggcgaggattaacactaacctatgtatgaagaattggctaacaatcctaatgtggagtacat

SEQ ID NO: 164161 - DNA, 253 bp, Glycine max
ccagttagaaacaaggagaaagaaagaagatggcaggaaagaaaatcccagatgtgttgctgaattcaggacacaaaatgccagttataggcatgggaacttcagtggagaatcgtccatcaaatgagacccttgcttctatctatgttgaagccattgaggtgggttaccgtcattttgacactgctgcagtgtatggaacagaggaagccataggcctagccgtggccaaagccatagacaaaggccttat

SEQ ID NO: 164162 - DNA, 244 bp, Glycine max
aacacctcttctggtaataatttgaaaagggtttttggaaatcccgaacaggttgttattccaatgagcagcagtgccactggaagtggtcgggatggtgacgatcctagtgtaaatcagggtggtggtgggcatattgactattccactacaaatcggaaagaaatggattctttgtgtctcaataatgttgatttagcatatgaatatactgcacccaacacttctgcccaggtgggtggtg

SEQ ID NO: 164163 - DNA, 250 bp, Glycine max
tagaggttacaaggaatcgaagagttgtggcaacaatgtcgggacgatgaacatggaaggagaaagagttggatctctcttctgccgaagttgtcaccaaatacaaaaccgctgctgagatcgttaacaaggccttgaagctagttatttcagaatgtaaaccaaaggcgaagattgtggatatgtgtgagacaggggattcatacattagagagcaaactggaaatgtgtacaagaatgtgaagaggaa

SEQ ID NO: 164164 - DNA, 246 bp, Glycine max
cttttgggttcccggagactcctgaagatgctgccagagctggtcttattagtgggaaggataatatcattgatcgtagcattcaagatgcttatattaatgctattcgacgtgcaaagaacttcatctatattgaaaatcagtatttccttggaagctcttttgcctggagtgctgatgatattaagcctgaagacattggtgctttgcatctaatcccaaaggaacttccactcaagattgtta

SEQ ID NO: 164165 - DNA, 252 bp, Glycine max
atcaactctttcaaaagggagaagaaaaggaaaggaaacaaaacgcacaaaggattattatagcaatggcagaacaaaaccaaaaccagacaactgaagctggaaggcaccaagaggttggccacaagagccttctccagagtgatgctctttaccagtatattctggagaccagtgtctacccaagagaacctgaatccatgaaagaactgagagagttgacagcaaaacacccatggaacatcatgacaa

SEQ ID NO: 164166 - DNA, 254 bp, Glycine max
caacgagctagttccgcacaagataaaacatcaaaaaagactgagttagacgtgactgttgcagagcaagaaccccgtactaaagcacctgggatttgtgaggattgctgctattcaaacttttgtgattgtgtcaaatctgtatgagtacgcaaagcagaattctgggcctttgagatccgctgttggaacggttgagaacactgtaaccaccgttcttggtcctgtctgcaacaaattcaaggacttccctg

SEQ ID NO: 164167 - DNA, 249 bp, Glycine max
gtaccgtccatgatgttgttcttgtgagtggttctactaggattcccaaggttcaacagttgttgcaggacttcttcaacggaaaggaactttgcaagagtattaacccagatgaagctgttgcttatggtgctgcagtgcaggctgcgattctcagtggcgagggtaatgagaaagtgcaggatcttcttttgttggatgttactcctctatccactggtttggagactgcaggaggagtcatgactg

SEQ ID NO: 164168 - DNA, 249 bp, Glycine max
cacctttcttatattcaggaaagtaagatcatctgcatcgccgacgcttccaacaataacaatggccgataatgcaacaacgcaaggcagcaacaccctattttctccttacaagatggccaaattcaacctctctcatagggtggtgttggctcctatgacaagatgcagagcgttgaactggattccacaggcagcgcttgccgaatactacgctcaaagatcaacaccaggtggatttctcatcag

SEQ ID NO: 164169 - DNA, 251 bp, Glycine max
ctcaaactcactctttctaagtcttttctatctctttctctctctctgtctgccatggttctctccaaaaccacctccgaatccgacgtctctgtccactcaaccttcgcttctcgatatgtcagaacttcgcttcccaggtttaagatgccggaggagtcgataccaaaggaggcagcgtatcaaataataaacgatgagttgatgttggatgggaacccaaggttgaacttggcatcatttgtgacaac

SEQ ID NO: 164170 - DNA, 254 bp, Glycine max
cctctctagtactgcgaggtgtgacttgtcgtgagttccttcaaaccgcattggtatctggccatcaggactcatggttagcgcagtgcatatcgcgtttgctcatatggcagcaggtgtagtaatcatccttgccattggcactgcgtatccaccacaccgagccgagcagagcatgtatcctgagtactagtgcagtatcatcattagtgatcacatgaccgtgctcgatgtgtcatttgatcgcatgtgtg

SEQ ID NO: 164171 - DNA, 255 bp, Glycine max
ggaaaaagagctccctcgtgaagttgtgactgaaatcaaattgctccgactcccatctcagccagaatccacacctaatgcaatcgaagtggagtccttgaatgaaaagagtataaggagaatccacaaggcattggactctgatgatgttgagctactgaagcttcttctaaatgagtctagtgtcactctagatgatgcacatgccctgcactatgcttgtgcctatagcgattctaaggttattcaagaagt

SEQ ID NO: 164172 - DNA, 253 bp, Glycine max
gcagagagcgagagagagagagagagagagagagagaatgggagggtgggctatcgcggtgcatggtggcgctggtgtcgaccctaatctcccactcgagcgccaagaagaagcgaaacaacttctcacgcgctgtctcaatcttggaatctctgctctaaattctaatcttcccgacatagatgtcgtcgaacttgtggtgagggaattggaaacggatccgctgttcaattcgggccgtggatctgccctg

SEQ ID NO: 164173 - DNA, 262 bp, Glycine max
cccttaccagcggatcgtcgtgctgagtgcgaacgaaggcattatggggttgacgaatttcgtgctgacagtggcgggtgtaagcgccgtcgttcttctccttaggagtgacgcgaagcaatctgcctccatcttccggcgcaacgtcaagcacattcgcaactggctcgaagaagaaagcgccgcttcatccaagacaatggagaagtccactcccaaagaacttgaatcaaaggttcctccgaaagacattcctaaggag

SEQ ID NO: 164174 - DNA, 258 bp, Glycine max
tgggatcaacaggtgagactcagattactccaacccatgtatctgatgaagaggcaaaccttttcgccatgcaactagtcagtgcctcagtactccctatggttctcaaatcagctcttgagcttgatctgttggaaatcatagccaaggctggccctggtgttcacctttccccctccgacattgcttctcggctcccaacacacaaccctgatgcaaccgttatgttggaccgtatattgcgcctcttggcttgct

SEQ ID NO: 164175 - DNA, 256 bp, Glycine max
cgcaactgctgcctcactctctcactctctcaggagtatataatctgagcgatgtcagatctcgaggctcccttgcgccctaagaggaagaaggtttcggtggactattttgttcagtttcgatggatccttgttatttttgtggtccttcccatctccttcaccatttatttccttacataccttggggctgtaagatccgagtggaagtcctataagacgcgtcagaaggaacatgatgagaatgtgaagaagg

SEQ ID NO: 164176 - DNA, 254 bp, Glycine max
acttattccattcgacacttggttcaagacttttggcagcctcaacatagagagtgagtgccccaagtttgttgcttgggccaagaggtgcctgcagaaagacagtgttgccaagtctcttcctgatcaacacaaggtctatgagttcattatggacataagaaagaagttcgacattgagtaggttcatgttggcttttaatagccatagtgacgtattgatcattcttggcctttcaactaaatagtatttg

SEQ ID NO: 164177 - DNA, 247 bp, Glycine max
ggcttgactagagaaagagagagagagagcttcgaatcgaaactcagaagtagaaaaaacacaaatcacaatcgctatggctaggtacgaccgagcaatcaccgtgttctcccctgacggccatctcttccaggtcgagtacgccctcgaagccgtccgcaagggcaacgccgccgtcggcgtccgcggcaccgacaatgttgtcctcggcgtcgagaagaaatccaccgccaaactccaagactcc

SEQ ID NO: 164178 - DNA, 246 bp, Glycine max
gtttttctttgttccggtagccagccagccagccatggtgctcttcaatgtttcacgcgttgagaccaccccctccgatgcacacaagcctggaacctctcgtctccgcaagaaggtgaaagtattcgtgcaacctccttacctccataactttgtccagcccacattcaatgccttaactgtggaaaaagttagaggtgcaacgctagttgtatctggtgatggccgttatttctcaaaggaagc

SEQ ID NO: 164179 - DNA, 250 bp, Glycine max
gtttgacaatgagacatcagtgcctccttctggtctccctggtgttggtctcctacgctgcccggtcggaatcagcgctgggcggctggagccccatcaaggacgtaaacgacagccacgtggcggagatcgccaactacgcgctgagcgagtacgacaagcgttctggggccaagctcacccttgtcaaggccgtcaagggcgagactcaggtcgtttccggcaccaactaccgtctcgtcctcaaagc

SEQ ID NO: 164180 - DNA, 250 bp, Glycine max
tctttccctagtcaaggagattcatctctgcagcaggttgttttagaaaagaaaaaatgctgaagatttgctgcattggggctggatatgtggggggtccaacaatggcagtcattgcactgaaatgcccctcaattgaagtggctgttgttgacatctctaaatccaggattgcagcatggaacagtgaccagctccctatctatgagccaggccttgatgatgtggtgaagcaatgtcgtggcaagaa

SEQ ID NO: 164181 - DNA, 249 bp, Glycine max
gaaaagaaagaaagatgagtccaacatgggtttttgtgttaggtattattgcagcaatgttggtggttgtgaatggacaatcatcagtgaagccattggtgaagacagtgaaggggaagaaggtgtgtgacaaagggtgggagtgcaagggttggtctgcttattgctgcaatgagactatctccgattactttcagacataccagtttgagaacctcttcgcgaagccaattcgccggtggcacatgc

SEQ ID NO: 164182 - DNA, 254 bp, Glycine max
cagatagaagctttgggttgagaaatttcaggtacattgagaccatcaaagaagctttggaaagggaatgcccaggagttgtttcctgtgctgatatcctcgttctctctgccagagatggcattgtttcgctaggaggtccccatatccctcttaaaacaggaagaagggatggtagaaggagcagagccgatgtggtagagcagttcctcccagaccacaatgaatccatttctgcagttcttgacaagttt

SEQ ID NO: 164183 - DNA, 252 bp, Glycine max
cggctcgagagaagatgaagttcaatccacgtgtgtcgagcagccgccgcaagagccgaaaggctcatttcacggcgccatcgagcgtgcggcgggtgcttatgagcgcccctctgtcggcggactgcggtctaagtacaacgtgaggtcgatcccagtacggaaggaggacgaggtgcaggtgatgcgacgaacatacaagggtcgcgaggggaaggtgactcaggtctaccgtcgaaagtgggtgattca

SEQ ID NO: 164184 - DNA, 253 bp, Glycine max
tgcgttgtcggaaaatcaccctcacctgatcactgtggaagtctctaggtgatggccggttcagaacctgttagggcagagggagagactatggctgtggatgctgccccaaggaagccccggattctacttgctgcgagtgggagtgttgctgctgtcaaacctgcaaatctttgtcactgtttctctgaatgggcagatgtaagagcagtttccacaagtgcatctttgcatttcattgatagagcagcaa

SEQ ID NO: 164185 - DNA, 243 bp, Glycine max
ggaattgttgtaactttttgattcctaaattctctaaaattcgaaattctaatttcgttaggggaaagagattgtttgtgtgtgagtgagtatggctggaaaaggcgagggtcctgctatcggaatcgatttgggaacgacgtactcttgcgacggcgtgtggcaacacgatcgtgttgaaatcatagccaacgatcagggtaacagaacttcgccatcctacgtggctttcatcgacacaga

SEQ ID NO: 164186 - DNA, 253 bp, Glycine max
caaaacttgctatagcagtaagctataactcatttgaggctctgtgagaattgagaaatggctaaagatgttgaggttcaagcccaaggaggagagtactctgccaaagactaccatgaccctcctccagcacctttgttcgacccagaggagctcacacagtggtccttctatagagccctcatcgctgagttcatagcaacccttctcttcctttatgtcactgtgctcaccattattggctacaaaaggc

SEQ ID NO: 164187 - DNA, 253 bp, Glycine max
gcacgggaagctgctttcagaaatattaagacaattgcagaatgcttggctgatgaacttattaatgcagcaaaagggtcatccaacagctatgctatcaagaaaaaggatgaaattgagagagttgcaaaggccaatcgttgagcagttgtggaagcaatatttgcgatcgggaagattttgtttcggtcaatgtttgtcatttaatgatatttgatcttttgcttgcattagttactttttagctttttgc

SEQ ID NO: 164188 - DNA, 257 bp, Glycine max
aagagtgtgaactgcaaagggcttctccagcctagtttgttctcagatcttcttcttccatggaccagtacgagaaggtggagaagataggcgagggaacatacggcgtcgtttacaaggctcgcgaccgcgccaccaatgagacaatcgctctgaagaagattcgcctcgagcaggaggacgaaggcgttcccagcaccgccattcgcgagatttctcttctcaaagagatgcagcataggaacattgttaggttg

SEQ ID NO: 164189 - DNA, 247 bp, Glycine max
attcatagcatatttctaaccacactcaaaacccttcccttcctgacttggatttcattacattgctaaactatattatttttattggtgaattgctacactatattctaaggacaattaaacatagactatatggggttgatggatgtggaccaaactcaattgttgtctaagatggtcatcggagatggacatggtgaagcatcaccatactttgatggatggaaggcttatgatgaaaacccct

SEQ ID NO: 164190 - DNA, 238 bp, Glycine max
tttcgacatacccccggacatacgatttacttcatgcatggactgtcctctctgacatagaacagaaaggttgcagtccagaggatctattaattgagatggatcgcatgcttcgacctactggtttcgtgatcatccgagataaacagccagtgattgattttataaagaagtacctaagtgctttgcactgggaagcaattgattccagttctgactctgtccaagatggtgacga

SEQ ID NO: 164191 - DNA, 244 bp, Glycine max
ctaatatctggggttagctactgtcattcaatggaaatttgtcatagagatctaaaattggaaaacactctcttggacggaaatccatctccccggcttaaaatttgtgactttggttactccaagtctgctttactgcactctcaacctaaatcaacagttggaactcctgcatacattgctccagaggttctgtcacgaaaggagtatgatggaaagatttcagatgtttggtcctgtggtg

SEQ ID NO: 164192 - DNA, 243 bp, Glycine max
tttcgaaggtaaaggtaaaatcgatgatggtttgatgcctattctgcataaatctgcaccacaggtagcattattctctgctcgagggccaaatataaaggactccagcttccaagaggcagatcttctcaaaccagatatattagctcctggttcattgatttgggctgcttggtgtccaaatggaactgatgagccaaattatgttggtgaagcgtttgccatgatatctggaaccagcat

SEQ ID NO: 164193 - DNA, 247 bp, Glycine max
accgggaacaagacgatgcagatgatggagattgcggcgttcctcggacacgtcggcagcaagacctcttgtggttatggagtggctaccggaggacctttggcctggggtctttgttacaaccatgaaatgagtcctatgcagtcatactgtgatgactacttcaaactcacatacccctgtacacctggtgctgagtactatggtcgtggagctattcccattttctggaactacaactatggtg

SEQ ID NO: 164194 - DNA, 251 bp, Glycine max
gcagagagagagagagagagagagagagagagagagaatgggagggtgggctatcgcggtgcatggtggcgctggtgtcgaccctaatctcccactcgagcgccaagaagaagcgaaacaacttctcacgcgctgtctcaatcttggaatctctgctctaaattctaatcttcccgccatagatgtcgtcgaacttgtggtgagggaattggaaacggatccgctgttcaattcgggccgtggatctgccc

SEQ ID NO: 164195 - DNA, 252 bp, Glycine max
gtagaacccttccacggtggtgactgcgcgatgggtgcctacaagtatgtttcagagctatggcgcaagaagcagtctgatgtcatgcgcttcttgcagcgggtgaggtgctgggagtataggcagcaaccttccattgttcgcttgacaaggtcgacccgccctgacaaggctcgtcgcttgggcttcaaggctaagcagggctatgtgatataccgtgttcgtgttaggaggggtggccgaaagaggcca

SEQ ID NO: 164196 - DNA, 156 bp, Glycine max
gaagatcacagctggcaagttttcgctcagcatgcattccaagatgattatcctaagttgaatgagcagctgaaggagattggtataaagatagttgagaagtgccaagggttgcctctagccttagaaacagttggatgccttccacacaacata

SEQ ID NO: 164197 - DNA, 254 bp, Glycine max
ccctcgagccgctcgagccgctcgagccgtgctactctatgatgtcacagatgaagcatcaactaacaatatcaggaattcgattcgcaatattgagcaacatgcttcagacaatgttaacaaaatactggtggggaacaaagctgatatggatgacagcaaaagggccgtgcctacgtccaagggccaagcactggctgatgagtatgggatcaaattctttgaaactagtgcaaagacaaatctaaacgtgg

SEQ ID NO: 164198 - DNA, 241 bp, Glycine max
cttcaatattctggccagtcagtgttcccctctcaatatatttcgaaacggtggacaaaagatgcaaaggtcaggaatataataggagaagaatcagaacacgtgctgactagggtgcaacggtacaatgatttatgtcagcgagcactaaaacttattgaagagggatcattgtctcaagagagttatggtattgcattccatgcgctacatgaagcacacaaaagttgtgtgagtgtta

SEQ ID NO: 164199 - DNA, 245 bp, Glycine max
cggaaaacgttgttgagttcacagacttacccgtcaagaggccaagagaagaagaagaaggaaccaatggcgtctccaacgacgccgtttcagcgctccccaatgaccctcaataccctggcatctctgcggttattcccggttggttctccgaaatcagcccaatgtggcccggggaggcacattccttgaagatggaaaagattttgtttcaagggaagtctgactatcagaatgtcatggtc

SEQ ID NO: 164200 - DNA, 244 bp, Glycine max
gttgccggtcagatcattccgtggaacttccctcttgtcatgtttgcctggaaggttgggccagcattggcctgtggcaacaccattgttctcaaaacagctgagcagactccattatctgctttgtatgcatcaaagttgcttcatgaggctggactgcctcctggtgttctgaatataatatctggctttggtccaactgccggtgctgctattgctagtcacatggacatagataagcttg

SEQ ID NO: 164201 - DNA, 247 bp, Glycine max
ctcggatttcttgcgcggtttatcatgggggatagtcagtattcgttttctctcaccacatttagcccttctggaaagcttgttcagattgagcatgctttgacggctgtcgggtctggacaaacgtctttgggaattaaagctgcaaatggagttgtcattgctactgagaagaaattgccatctatattggttgatgaagcatcagtccagaaaattcagtcattaacaccaaatataggtgtcg

SEQ ID NO: 164202 - DNA, 251 bp, Glycine max
taggtggttttcatcgtcttccttctcttatatttctcttttttttttgtcttcgccgaacgccgaaacactggccggaaaaggagagggtcctgctatcggaatcgatctcggaactacctattcttgtgtcggtgtgtggcaacatgaccgagttgaaatcatcgccaacgaccaagggaacagaacgacgccgtcttacgtcggcttcactgataccgagcgtctcatcggtgatgcggctaagaacc

SEQ ID NO: 164203 - DNA, 255 bp, Glycine max
ctcttcctcaccgattgccagaatggaatttcgatgctcagtcactctcttttaccattctcttctctcttgctcttgcaggagagagccatgtccatgcatcgctacctgaggaagattattgggaagctgtttggccaaacactcccattcccactgcactgcgagagcttctaaagcctctccctgcaggtgttgaaatcgatgaactccctaagcaaattgatgatacacagtacccaaaaacattcttct

SEQ ID NO: 164204 - DNA, 250 bp, Glycine max
gcactcttcatcaagctccgctccaacacaggggaaaatgagggagatccttcacgtgcagggagggcaatgcgggaaccagatcggttccaagttctgggaagtggtgtgcgacgagcacggcatagatccgacggggaagtacgtcggaaactcagatctgcaactcgagcgcgtgaacgtctactacaatgaagcctcgtgcgggcgcttcgtgccacgcgcggtgccgatggacctggagcccgga

SEQ ID NO: 164205 - DNA, 241 bp, Glycine max
cggctcgagaccactctctctgctcttcttctacctttcaagtttttaaagtattaagatggcagagacattcctatttacctcagagtcagtgaacgagggacaccctgacaagctctgcgaccaaatctccgatgctgtcctcgacgcttgccttgaacaggacccagacagcaaggttgcctgcgaaacatgcaccaagaccaacttggtcatggtcttcggagagatcaccaccaag

SEQ ID NO: 164206 - DNA, 243 bp, Glycine max
actttctcgctccccaaacgcccctctctctcctccaatggccgaccagctcaccgacgaccagatcgccgagttcaaggaggccttcagcctcttcgacaaggacggcgatggttgcattactaccaaggaacttgggactgttatgaggtcacttggtcaaaacccaactgaggcagaactgcaggatatgataaacgaggttgatgctgatggcaacggaaccatcgatttcccagagtt

SEQ ID NO: 164207 - DNA, 243 bp, Glycine max
tgaagttctctcctccacactatatattgctacatattgagtgagtctatcccttaaaggctctctcttgcagtcgcacaggaaaaccctagctagtagtctcagttcgtttgagagagaaaaaatggcagagggtctcgttctccgcggaaccatgcgcgcccacaccgacgtcgtgacggcgattgccactcccatcgacaactccgacatgatcgtgacggcgtcgcgcgacaaatccat

SEQ ID NO: 164208 - DNA, 247 bp, Glycine max
acgagaactatctctatacctgctttgctcacaccggcgaggttacatcggttaaagtaattcgaaacaagcaaactagtcaatctgaaggttatgggtttattgagtttaatagtcgtgctggagctgagagaattcttcaaacatataatggggcaataatgccaaatggggggcagagtttcaggttgaattgggcaacttttagtgctggtgagaggttccgccacgacgattctccagatta

SEQ ID NO: 164209 - DNA, 247 bp, Glycine max
cttttgaagattgaccaagatgggagcccttcgatgggataatgttgtgaatagacatcagggatggagactcttcacttgcatttggttacatgctggggttattcatttgctagctaatatgttgagtctggtcttcattggcattcgccttgaacagcaattcggatttattaagattggaatcatatacttggtgtccgggtttggtggaagtgtactgtcgtctctatttatcagagaccac

SEQ ID NO: 164210 - DNA, 255 bp, Glycine max
aacaaagggcaccaccgtgtcaacaagtagaagcagaagctgtttttgctcttcgccgctgacactaatcgtttcttcaatgccttacgagcagcaattcgccgctgcaaaaaaagcagccactctcgctgctcgtctctgcaagacagtacagaaggctcttctgcaatccgatgtgcactcaaagtcagacaaaagtcctgtcacagtggctgattatggttcacaagcattggtcagctttatacttgagag

SEQ ID NO: 164211 - DNA, 242 bp, Glycine max
ctcatttctcagcaaattgaatcgagcgaattcacaaaccctagttttcgacgatgggtcagatcctactccgagaagtacttcgatgacacttatgaatatagacatgtggttcttcctcctgaagtcgcaaaactgcttcccaagaatcgtcttctctccgaaaatgagtggcgagctattggggttcagcagagccgtggctgggttcactatgcaattcatcgccctgagccacacat

SEQ ID NO: 164212 - DNA, 238 bp, Glycine max
cttagccgaggtcacgaggagcactagctagtttcacaatttccaaatggctaggggattgaagaagcatctcaagaggctcaatgctcctaagcattggatgcttgacaaactgggtggtgcatttgcgcccaaaccctcatctggaccacacaaatctagggagtgccttcccctcatactcatcctacgaaaccggctaaagtatgctctgacttaccgtgaagtcatcgctatt

SEQ ID NO: 164213 - DNA, 240 bp, Glycine max
aaaaaaccctctctttctctctcttccaaaacctaattttcattttttctcttcaaacaaattttcaaaatgcgtgagatccttcacatccagggtggccaatgcggcaaccagatcggcgccaagttctgggaggtggtttgcgcggacacgggatcgaccccactggaaggtacggtggggactcagagcttcagctcgagaggctcaatgtctactacaacgaagccagctgcggcc

SEQ ID NO: 164214 - DNA, 243 bp, Glycine max
ctcgagccgttctctctgtgtatttccctacctctcccttcaagatgcagatcttcgtcacagaccctcaccggcaagaccatcacccttgaggtggaaagctctgacaccatcgacaacgtcaaggccaagatccaggacaaggaaggaatccccccggaccagcaacgtctcattttcgccggaaagcaacttgaggacggccgtacccttgctgactacaacattcagaaggagagtact

SEQ ID NO: 164215 - DNA, 242 bp, Glycine max
gttacttaacaacaaggcattggagttctacaaatgggacggtgaccttccccagttgttgcagaatgtgagggacaagttgaataaggttgctgaaccttggactcgggaagaaaaggaccactgtctggaagaaacagaaaaatcattcaagctctctggagagattctccgtctgattttatcatgataatagatgccctgttgtctgtgtaattatgggtattaagtgcatggcagaa

SEQ ID NO: 164216 - DNA, 243 bp, Glycine max
tggtaaattaacatgggaaacatgccaaatgtggttgtgttgtgtttctgtctctggaccctgttgtttcctcttgtgttctgtgcacccaacgatgggttgcgtaggattggacttaaaaaggtgaagttggacaccgatgacgttgtggggtttaaggaatttcggtcttcaattagaaagcatcaccttcagaacatccttggaggcgctgaggacaccgatgttgttgcgctgaagaat

SEQ ID NO: 164217 - DNA, 250 bp, Glycine max
gtcgctccgcaccagtttcaccgcacgaatatcttgttgtttggagcgatccgagaaaaactctgtaaacatgttggtttaccaggacctccttacaggtgatgagcttctctctgactccttccgttacaaggaaattgagaatggaatgctgtgggaagttgaggggaagtgggttgttaaaggagcagttgatgtagacattggtgcaaacccttctgctgagggtggaggagaagatgagggagtt

SEQ ID NO: 164218 - DNA, 252 bp, Glycine max
gattgctagaatggaatttcgatgctcagtcatctcttttaccattctcttctctcttgctcttgcaggagagagccatgtccatgcatcgctacctgaggaagattattgggaagctgtttggccaaacactcccattcccactgcactgcgagagctcctaaagcctctccctgcacgtgttgaaatcgatgaactccctaagcaaattgatgatacacagtacccaaaaacattcttctataaagaaga

SEQ ID NO: 164219 - DNA, 252 bp, Glycine max
gtttgtttgatggtatctactactcggataaccgtagtaattctagagctaatacgtgcaacaaaccccgacttctggaagggatgcatttattagataaaaggtcaacacaggctctgcctgttgctttgatgattcatgataactcgtcggatcgcacggcctttgtgccggcgacgcatcattcaaatttctgccctatcaactttcgatggtaggatagtggcctaccatggtggtgacgggtgacgg

SEQ ID NO: 164220 - DNA, 258 bp, Glycine max
gtcgatcttcttgccaaactagggtcccaatatccttcaattgcagaagaaataaaaagtattgcaagtgcagatcctgcccatcgaaagctttttgtccgtggcttggcctggaataccacttcagaaactttgcgtgctgcatttcaagagcatggagaaattgaggaaggagctgtgatctatgataaagtgacaggaaaatcccgtggctatggatttataactttcaaaaatatggaatcaactcagcaagca

SEQ ID NO: 164221 - DNA, 245 bp, Glycine max
tctctctcccttccttccatcccaaccacaatgacgctgagaagacataaaaaatggtgaagatttgctgcattggagctggctatgttggtggcccaaccatggctgtaattgccttgaagtgtcctgatatcgaggtggtcgtggtggacattgctgcaccgcgaatcaacgcgtggaacagtgacgagctcccgatatatgagcctggccttgatgatgtggtgcagcagtgcagggggaag

SEQ ID NO: 164222 - DNA, 249 bp, Glycine max
agacagaagaaaaagaagcgagactaaagtcagcattcgaaaaagatgagtagcatcggtacaggttacgatctatcggtcaccactttctcccctgatggccgcgttttccagatcgagtatgccgctaaagccgtcgacaacagcgggactgttattgggatcaagtgcaaagatggggttgtgttgggcgttgagaagcttattccgtcgaaaatgatgcttccgggttccaatagaagaatacac

SEQ ID NO: 164223 - DNA, 248 bp, Glycine max
caaaactgaccctgattgcgttggttgttgcggccctgtgcgccgttgatctaacccagagagcatcatcatcatcatcatcccctcacgcgccaggccctccgtggactgctccaacctggttctcaccatggccgattgcttgtacttcgtcaccaacggcagcaccgtcacaaagccagatggcacatgctgctctggtttgaagtctgttctcaaaaccgctccggcgtgtctctgcgaggctt

SEQ ID NO: 164224 - DNA, 230 bp, Glycine max
cagaaaaaaagacaataaacaaataagacgtatcattttatgtatagtagtggggacttatcgggacaaacaatacctccgcttggtttcagacttggtacaactcaaagtcatgattctatttggtttgctcaaccaacaaattattccgagaatatacaagaagataaaaacatacgagattgtatcacacatcatataccacccactataagactatcctctggcgt

SEQ ID NO: 164225 - DNA, 243 bp, Glycine max
tctccaagttggaaatcatgctgcagggaaagtggatgccaaactcatgctgtaacctgtggagctggtactggagtgtttctgttgattaagagaacaacaatcctactacagagatctgcacgtcaggccccctggccctctccttacttagatgcttttggtgaggaggattttgaaatgcatcgaggcaagccactttatctgaatgaggaacgctatgcagctttgacttatatggtc

SEQ ID NO: 164226 - DNA, 236 bp, Glycine max
ctctctcttgcaaaacctaattttcatttcttccctcacatttcaaaatgcgtgagatccttcacatccagggtggccaatgcggcaaccagatcggcgccaagttctgggaggtggtttgcgcggagcacgggatcgaccctaccggaaggtacggtggggactcggagttgcagctcgagaggatcaatgtctactacaacgaggccagttgcggtcggttcgtgccgcgcgcg

SEQ ID NO: 164227 - DNA, 241 bp, Glycine max
cttttgctgagcttcttgagaaacttggtaaatcaaatgaccatgttgattgtgtgatttataattcattgttaccttgggcactagatgttgccaagagatttgggattgctggagctgcatatcttactcaaaatatggctgtgaatagcatatattaccatgttcaattggggaagttgcaagctccactcatagaacaagagatttcccttcctgccttacccaaacttcatcttca

SEQ ID NO: 164228 - DNA, 237 bp, Glycine max
tgttcttgttgagacctactttgctgacatccctgctgaggcatacaagaccctcacatctctgaatggcgtcactgcatatggatttgatttggtccgtggaaccaacactcttgatttgatcaagggtggatttcccagcggaaaatacctctttgctggagtggttgatggaaggaacatctgggccaatgaccttgctgcttctctcactaccttgcagggtcttgagggcat

SEQ ID NO: 164229 - DNA, 253 bp, Glycine max
caaatcccacacaacgagggctctctgcatcacgaggttgagctcgctgtggtcatcgccaagaaagcacgtgacgtctccgaatcctctgcgatggattatgtcgccggttatgcactggctctggatatgactgctagggaccttcaagctgctgctaagtctgcaggtcttccatggagtttggcaaaaggccaggacactttcaccccaattagttctattttgccaaagactgcagtgccaaatcctg

SEQ ID NO: 164230 - DNA, 249 bp, Glycine max
ggcagaatgacatctactacattactggtgaaagcaagaaagctgttgagaattcccctttccttgaaaagcttaagaagaaggggttcgaggttctctacatggttgatgctattgacgagtatgctgttggtcagcttaaggaatttgagggaaagaagttggtctctgctactaaggaaggcctgaaacttgacgagagcgaagacgaaaagaaaaagaaggaagaattgaaggagaaatttgagg

SEQ ID NO: 164231 - DNA, 248 bp, Glycine max
ttctccttctctctctctttttcgcctcagtccattttcatctatcaatggctccagtagcagcagcatcttcagattcaatcaagccgagagatgtttgcatcgttggtgttgcacgtacaccaatgggtggatttcttggtactctgtcatctctatctgccaccaagctaggctctatagctattgaagctgctcttaaaagggccaatgttgatccatcccttgtggaagaagtattttttggg

SEQ ID NO: 164232 - DNA, 247 bp, Glycine max
ctcgagccgttctatctctgcaattcaaacacaaaaaccatggcttccactaatgctcttcctcccaccggcaacggcctcatcgtgagcttcggcgagatgctcatcgacttcgttcccaccgtctccggcgtgtccctcgcggaggctccgggattcctcaaggcccccggcggcgcccccgccaacgttgccatcgccgtcgcgagactcggcggcaaagcggcgttcgtcgggaagctcggcg

SEQ ID NO: 164233 - DNA, 240 bp, Glycine max
aaacaatttgctcacaaaggaggaaaaatggcacctttcgtttccctctctttgttgcttctctttctcaaccaccccctcctttccctctcaaccaaccctgaagggaacgctctgcatgctttgagaagcaggctttctgatcccaacaatatgttgcagagttgggacccaacactggttaatccctgtacttggtttcatgttacctgtgactccaacaatcatgtgattcgctta

SEQ ID NO: 164234 - DNA, 250 bp, Glycine max
gtggtgccttatcgctgtggttatcatcttcttcttcctctttcttagatctcatctttctctacgccgcacgccgataccatggccggaaaaggagagggtcctgctatcggaatcgatctcggaaccacctactcttgcgtcggtgtgtggcaacatgaccgcgttgaaatcatcgccaacgaccaggggaacagaagcacgccgtcttacgtcggattcactgacaccgagcgtctcatcggtgatg

SEQ ID NO: 164235 - DNA, 249 bp, Glycine max
ctcttccgttgacatacgtggctcacgttctggcagttgttgccagcgtcttggtcgtggtctgggtcgtcaatttcaggggtggcttggcttgggattctgataacaagtccctcatcttcaacattcatccagttcttattgttattggcttactagttcatgggggtgaagctattataagttacaaagcttttcccctaaagaaggaagtgaagaaattgatacaccttgttttccatgccatcg

SEQ ID NO: 164236 - DNA, 247 bp, Glycine max
ttcgtggcaagatggtgttcttggcacaaactgtcctattcctgcaaagtggaactggacttaccagtttcaggtgaaggatcaaattggaagctttttctacttcccttcccttcatcttcagagagctgctggtggatttgggggtttcattataaacaacagagccatcattcctattccttttgataccccacatggggacattgttgtttttattggagattggtacacccgcaatcatacg

SEQ ID NO: 164237 - DNA, 247 bp, Glycine max
cgctgacgaggatgtcaggatgatatcagctgaagcaccagtcatttatgcaagggcatgtgaaatgtgcatattagagttaaccctgcgctcttggaatcacactgaagagaacaaaaggcgaacacttgcagaaaaatgatattgctgctgctatcacaaggactgacatctgtgatttcttggttgacattgtgcctcgtgaggacttgaaagatgaagtgcttgcatcaatcccaagaggaac

SEQ ID NO: 164238 - DNA, 247 bp, Glycine max
gggcggtatactttctgcgcttcttggcggcgacgcggcggcggcggcgtcttcgccggagagttctacttctagagtctcctccttccactcgtcgccgcgctggcagctctacttcaacgagatcaaagataccgataagctcgttgtgatagatttctcggcgtcgtggtgcggtccttgcaaattcatagagccagcgattcacgccatggccgacaagttcaacgacgttgacttcgtcaag

SEQ ID NO: 164239 - DNA, 241 bp, Glycine max
gttaaaactaatgctttgcttcaggcccatttctctagacaattcgtaggtgggaaccttgcattggaccagaaggaggtgcttctttctgcaaatagactgcttcaggcaatggtagatgtgatatccagcaatggttggctgggcctggcccttcttgctatggaagttagtcaaatggtgacacagggaatgtgggaacgtgactccatgctgcttcaactacctcatttcacaaagg

SEQ ID NO: 164240 - DNA, 238 bp, Glycine max
cactcttcctgcagaacccagatctgtagacaatatgggaagcactggtttgctacatttgatatgccttgtcattgctttagtaagtgtgtcgcttgtgcaagcagaagatgcgtataagtatttcacatggacggtgacttatgggactctttatcccttggctagtccccagcaggttattcttatcaatggtcagtttcctgggcctagacttgacttggtaactaatgaaaat

SEQ ID NO: 164241 - DNA, 237 bp, Glycine max
aagctagctaggttgaaaatagtttggttttgtagtaagtgaggtgaggtgccaaaatggtgaagataactcttggtactttcgatgactcttttggtgttgcctctcttaaggcttatttggcagagttccatgcaactctgattttcgtgttcgctggtgttggttcagccatcgcttacaacgagcttacaaaagatgcagccttggatccaacggggctggtggcagtagctg

SEQ ID NO: 164242 - DNA, 240 bp, Glycine max
gtgaaagagaatccgaggcgaagagaagagaaaaattaagatggaggcgaaggagcaggatgtgtcgctgggagcgaacaagttcccggagagacagccgattgggacggcggcgcagagccaagacgacggcaaggactaccaggagccggcgccggcgccactggttgacccgacggagtttacgtcatggtccttttacagagcagggatagcagagtttgtggccacttttctgtt

SEQ ID NO: 164243 - DNA, 246 bp, Glycine max
cttgttcctctcgcccagaatccgagatcaaccccgacgaaggcaaggggtttttctcggcttcttcagatttctgaaatggcgcctgtttcagctttagccaagtacaagctcgtcttcctgggtgaccaatccgtgggacaaaccagcatcatcactcgcttcatgtatgataaattcgataacacctatcaggccacaattggtattgattttctatcaaaaactatgtatcttgaagatcga

SEQ ID NO: 164244 - DNA, 239 bp, Glycine max
cgacgtctcggagtaccctgaggttcagaggattaccaataagttgcttgagacattggaggagtttgtgagggatagggccaagaggccaaagagtccggagaggaaacgaggaggttccgccggtggagaaggtagaggaggagccggccccggatatgaatgaaatcaaggcactgccaccaccagagaaggctatcccacctcctccgcctgagccagagcctaagccgcagcca

SEQ ID NO: 164245 - DNA, 237 bp, Glycine max
gtgaaagagaatccgaggcgaagagaagagaaaaattcagatggaggggaaggagcaggatgtgtcgctgggagcgaacaagttcccggagagacagccgattgggacggcggcgcagagccaagacgacggcaaggactaccaggagccggcgccggcgccactggttgacccgacggagtttacgtcatggtccttttacagagcagggatagcagagtttgtggccacttttct

SEQ ID NO: 164246 - DNA, 250 bp, Glycine max
attatgatgggattaatgcttaggtggcaaaagagagagccctaccagttggaccagaggaaggtggttttggaatgtcatatgatcttctgtatggacgagctggattcttatggggtgcattgttcgtgaacaagcacctaggagaagatgcagtgcccaaagacattttgatgcttattattgatgcggtgttggctggtggtagagcaggagcatctgatattaaagactgcccattgatgtatag

SEQ ID NO: 164247 - DNA, 246 bp, Glycine max
gagccgaatcggctcgagccaaaaacattcttctataaagaacaccttcatccaggcaacacaatgaaagtacaattcaccaagcgtccctatgcacaaccttatggtgtatatacatggttaacggatattaaagacacctctaaagaaggatatagttttgaagagatatgcatcaagaaagaagcgtttgagggagaagagaagttttgtgcaaaatccttgggaacagtaattggttttgcc

SEQ ID NO: 164248 - DNA, 248 bp, Glycine max
ctcactcactcgcaagcaaaaagaaagaatcccaggcgaggagaaagatggaggggaaggagcaggatgtgtcgttgggagcgaacaagttccccgagagacagccaattgggacggcggcgcagagccaagacgacggcaaggactaccaggagccggcgccggcgccgctggttgacccgacggagtttacgtcatggtcgttttacagagcagggatagcagagtttgtggccacttttctgttt

SEQ ID NO: 164249 - DNA, 246 bp, Glycine max
cgactccctcgtgcgtgcgactctgctgatattccaaggcgacgcaccgacaccggacccatctccggcgacatctcatcgatctccggcgattctccggtccccactttcttccctcgaaatgaatcccgagtatgattatctgttcaagctccttcttattggagactctggtgttggtagatcatgccttcttctgaggtttgctgctgattcgtacatcgggagctacataagcaccattgg

SEQ ID NO: 164250 - DNA, 240 bp, Glycine max
ctcaattcaaagctttcatggatgcaactggaggcctgtggcgcacacaggcactagctggaaagcctgcaggaatcttttacagcactggttctcaaggaggtggacaagagactactccgttgacatctattactcagcttgttcaccatgggatgatttttgtgcccattggttacacatttggtgctgggatgtttgagatggagaatgtgaagggtggatccccttatggtgcag

SEQ ID NO: 164251 - DNA, 239 bp, Glycine max
ctagcacacaaaacttgctatagcagtaagctataactcatttgaggctctgtgagaattgagaaatggctaaagatgttgaggttcaagagcaaggaggagagtactctgccaaagactaccatgaccctcctccagcacctttgttcgacccagaggagctcacacagtggtccttctatagagccctcatcgctgagttcatagcaacccttctcttcctttatgtcactgtgctc

SEQ ID NO: 164252 - DNA, 248 bp, Glycine max
ctggatgagtggaaaagactctactcaaacactaaaaccaacttcagggaggttgctatcaaaggattttgggacatgtatgatcccgagggatactctctctggttttgtgattacaaatacaatcaggagaatactgtttcttttgtgacattgaacaaggttggtggatttcttcagcggatggatttggctcgcaagtatgcatttggaaagatgcttgtgattggatcagatccaccatttaa

SEQ ID NO: 164253 - DNA, 246 bp, Glycine max
ggaatttcgatgctcagtcatctcttttaccattctcttctctcttgctcttgcaggagagagccatgtccatgcatcgctacctgaggaagattattgggaagctgtttggccaaacactcccattcccactgcactgcgagagcttctaaagcctcaccctgcaggtgttgaaatcgatgaactccctaagcaaattgatgatacacagtacccaaaaacattcttctataaagaagaccttca

SEQ ID NO: 164254 - DNA, 243 bp, Glycine max
ctcaattcaaagctttcatggatgcaactggaggcctgtggcgcacacaggcactagctggaaagcctgcaggaatcttttacagcactggttctcaaggaggtggacaagagactactccgttgacatctattactcagcttgttcaccatgggatgatttttgtgcccattggttacacatttggtgctgggatgtttgagatggagaatgtgaagggtggatccccttatggtgcaggta

SEQ ID NO: 164255 - DNA, 246 bp, Glycine max
ggcagaatgacatctactacattactggtgaaagcaagaaagctgttgagaattcccctttccttgaaaagcttaagaagaaggggttcgaggttctctacatggttgatgctattgacgagtatgctgttggtcagcttaaggaatttgagggaaagaagttggtctctgctactaaggaaggcctgaaacttgacgagagcgaagacgaaaagaaaaagaaggaagaattgaaggagaaatttg

SEQ ID NO: 164256 - DNA, 239 bp, Glycine max
gagagagagagagagagagaaatggcttgcaggcaattgtgggcttcaagagctgcctcttacctgaggatctctgtgtttcacagaggcttttctaatgttgttaaagatttgaagtatgctgattctcatgagtgggtgaaagttgatgaaaattctgcaaccgtcggcataactgatcatgcccaagatcatttaggtgatgttgtatatgttgaattgccagaagtgggagcagc

SEQ ID NO: 164257 - DNA, 235 bp, Glycine max
attcattttaatcctaattctgcacttcttgatcattcgatttttctcctcaagatgcagatattcgtaaaaactttgaccggcaagaccatcacccttgaggtggaatcctccgacaccattgacaacgtaaaagctaagattcaagacaaggaagggatcccacctgaccagcagagacttatctttgcgggtaaacaacttgaggatggtcgcacccttgccgattacaaca

SEQ ID NO: 164258 - DNA, 239 bp, Glycine max
tggcaatgagggtttcatgcttctgtaccagcaacggagaagtgtttcctgggtatgatactctcctgcaaattggctgtaggcttggtgaatgcaggattattttatgtgaagcaggtgccaagcacaagttgcaaaaattgcagcttaatttcccgagtgatgatgtcgcctttgcgctgagagattgcaaagatctaccttggttgtcaaagtatctaatgtagggatgagaatta

SEQ ID NO: 164259 - DNA, 289 bp, Glycine max
tcttgatccatcaacggatttgaaaaaaaaggaaaaggaactccaagccaaggaggctgaattgagaaaaagggaacaggaagtcagacggaaagaagaagctgctgcacgagctggaattgttcttgaggagaagaattggccgccatttttcccaattatccatcatgatattgctaatgaaataccaattcatcttcaaagattgcagtatgttgcatttacttcattgttaggaccggcattgtgcctcacatggaatattgtagctgtcacttcagcttggatt

SEQ ID NO: 164260 - DNA, 277 bp, Glycine max
cccgcagtcatgggcaaggtcaagatcggaatcaacggatttggaagaattggccgtttggtggccagggtggctctgcagagagacgatgttgaactcgttgccgttaacgatcctttcattaccaccgattacatgacatacatgtttaaatacgacagtgttcacgggcactggaagcatcacgatgtcaccgttaaggatgagaagacccttctcttcggtgacaagccagtcactgtttttggacacaggaaccctgaagagatcccatggc

SEQ ID NO: 164261 - DNA, 283 bp, Glycine max
aaacattgtttgttgtaggaagaggaatcttgagaaatggcaggggacagcaagagcaagattctgttcatcggagggactggttacatcggaaaattcatcgtggaagccagcgccaaagctggccacccaactttccttttggtgagggagtccactctctccaaccccgcaaaatcacccctcatcgacaatttcaaaggcctcggtgtcaatcttgtcttaggagatctatacgatcaccaaagtttggtgagtgctataaagcaggtcgatgtggtaa

SEQ ID NO: 164262 - DNA, 285 bp, Glycine max
ctctcccttccttctatcccaaccacaaggctgctgagaagacataataaatggtgaagatttgctgcattggagctggctatgtcggtggcccaaccatggctgtaattgccttgaagtgtcctgagatcgaggtggtcgtggtggacattgctgcaccgcgaatcatcgcgtggaacagcgaccaccttcccgatatatgagcctggccttgatgatgtggtgaagcagtgcagggggatgaatctcttcttcagcactgatgtagagctgcatgttgccgat

SEQ ID NO: 164263 - DNA, 286 bp, Glycine max
tttgaagccagaagtatttgattttattgataaacataacctacacgatgctattcgtggaaaggttgtccaactaatgaggctagattgcaagcgcgctgttcctttgttaatccagaatagggacttaataagtccacctgaagttgtgaatcaacttctaaatgcagatgataagagtgattgtagatattttgtacatttatatctccactcattatttgaagtaaatcctcatgctgggacagacttccatgatatgcaggtagaactctatgcggactat

SEQ ID NO: 164264 - DNA, 292 bp, Glycine max
atttgatggcgatttccacaatcctacatttcctgctggaacaagagttcccagacaaccttggcatgatttgcactgtagaatagatggacctgctgcatatgatgttcttattaattttgagcagcgatggagaaaagcaactaagtggaaagagtttgcaatccttttcaaaaaaacctctcaatggcatgatgatgctttaataagaatagaacgcatctcatggatattaagtccttctggtgctgctaccttaaaggataaatcggattattatactgttccagag

SEQ ID NO: 164265 - DNA, 290 bp, Glycine max
ctccactctcccaccccacttacatacacactctcccactcctccgagccggtcgagttgaatcggtgagtcagtgaccgagttgaaccatgtcggacgaagagcaccatttcgaatccaaggccgatgccggagcctccaagacctatcctcagcaggccggaaccatccgcaaaaacggctacatcgtcatcaagggtcgtccctgcaaggttgttgaagtttctacttccaagactggtaagcacggccatgctaagtgtcactttgttgggattgatattttcact

SEQ ID NO: 164266 - DNA, 284 bp, Glycine max
cctctttcttcctcttcctcagtagtgcgattttcgattctcttctctgcaactatgcctaaccctaaggtcttcttcgacatgaccatcggcggtcaacctgccggccgcatcgtgatggagctctacgccgacgtgactccgagcaccgccgagaacttccgcgcgctctgcaccggcgagaagggcgccgggcggagcggcaagcccctccactacaaaggctcgtccttccaccgcgtgatcccgaacttcatgtgccagggcggcgacttcaccgccgg

SEQ ID NO: 164267 - DNA, 284 bp, Glycine max
aaaagtttaaggagttaggtcaagcatatgaagttttaagtgatcctgagaagaaagaactgtatgaccagtatggtgaagatgcccttaaagaagggatggggggaggaggctcgtttcataatccatttgatatatgtgaatcattgtttggaggagcaagctttggtggtggtggtagttcccgaggtagaagacagaagcatggtgaagatgtggtgcattctttaaaggtttccttggaggacgtttataatggcacaacaaagaaactatctctttct

SEQ ID NO: 164268 - DNA, 286 bp, Glycine max
gagagtatgcagccactgcttgaattcctcaggcttcacagttataagggaaagaccatgatgttgaatgacaaagttcaaagcctggattctctccagcatgttttgagaaaagcagaagagtatctgacttcagttgctcctgaaacaccctactcagaattcgagaacaaattccgggaaattggtttggagagggggtggggtgacatcgccgagcgtgtcctcgagatgatccagcttctcttggaccttcttgaggcacccgacccttgctacctcgaga

SEQ ID NO: 164269 - DNA, 290 bp, Glycine max
gggagtgagtcattcttcctgtagaacccagatctgtagacaatatgggaagcactggtttgctacatttgatatgccttgtcattgcgttagtaagtgtgtcgcttgtgctagcagaagatgcgtataagtatttcacatggacggtgacttatgggactctttatcccttggctagtccccagcaggttattcttatcaatggtcagtttcctgggcctagacttgacttggtaactaatgacaatgtaattctcaaccttatcaacaagctggacgaaccattttta

SEQ ID NO: 164270 - DNA, 288 bp, Glycine max
caaaagcatcatcaccaaatcccaaacgcatatcataacaacgggatcggaggctaatctattaggcgctgttctctcgtcttctacaaaattttctgttcgatctcaaccaaggttgttccttccaccgccatgagtttcatcttcggaaagcgaaaaacacccgcagagcttctgcgggaaaataagaggatgctggacaaatcaatcagagaaattgagcgcgagcggcaaggcttgcaaacgcaagagaagaaattgattgcggagataaagaaaagtgccaaa

SEQ ID NO: 164271 - DNA, 283 bp, Glycine max
gggagccagaaaactgctgcttctcgacccacttttgaagttcacaacttaaaccctagttctctctctctttctttctcctgcatcttcaaccatgtcagcgatgctgcaacctcagatcattctgctcaaggaaggcacggacacttcgcaagggaagccacagctggtgagcaacatcaatgcctgcaccgccgtcgccgacgtcgtccgcaccaccctcggccctcgcggcatggacaagctcatccacgacgacacaggaacgtccacatctccaacg

SEQ ID NO: 164272 - DNA, 274 bp, Glycine max
aggactttaggttgggatttgggaattagggttgttcgcgtggcgaagatgattgaggtggttttgaacgatcgactggggaagaaggtgcgcgtgaagtgcaacgacgatgataccatcggcgacctgaagaagcttgtggcggctcagactggcacaagagccgacaagatccgcatccagaagtggtacaccatctacaaggatcacatcactctcaaggattacgagatccatgacggcatgggtctcgaactctactacaactaaacac

SEQ ID NO: 164273 - DNA, 276 bp, Glycine max
  unsure (1)..(276): unsure at all n locations
tgtgtgtgtgagaagagatgggaagagctccttgttgtgacaaggccaatgtaaagaaagggccatggagtcctgaagaagatganaagctaagagagtanatagagaaacatggaactggagggaactggattgctctcccacaaaaagctggtttgaaaagatgtgggaagagttgtagactcagatggcttaattatctcagaccaaacctaagcatggggagttttctgaaggtgaagatagantaatctgcactctcttgctagcatggaa

SEQ ID NO: 164274 - DNA, 286 bp, Glycine max
ctccaacctctgttcatcgtctaccgcgctttcttttcaaccagaactatgattaagctttttaaagtaaaggaaaagcagagagaacttgcagaaaatgcaagtggcggaccacctgttaagaagcaaagtgctggagagttgcgtcttcacaaagatataagtgagctgaatctaccaaaatcatgtaccatgcaattccccaatggcaaagatgatctgatgaactttgaagtttcaattcgacctgatgatggatattacttaggtggcacatttttgtttt

SEQ ID NO: 164275 - DNA, 290 bp, Glycine max
gaaaccatgaatgtgcttctataaaccggatatatggatttcctgatgagtgcaagagaaggttcaatgtaaggttatggaagacatttacagactgcttcaattgcctgcctgtggcagcccgtgttgatgaaaagattttgtgtatgcatggaggactttctcccgacttaaataatttggatcagattagaaatttacagcggcccacagatgttcctgatacaggtttgctttgtgatctcctttggtctgacccgagcagagatgttcaaggatggggaatgaat

SEQ ID NO: 164276 - DNA, 283 bp, Glycine max
ctcaccctcaccctgttcactcccccacaccagcacctcttcacacaccagcaaatgctcctcacccacaccaccaccaccaccaccaccagcctccagcaccagcaccagcaccagcacctgttccttcaccttctcaccacaattaccctcctacccctgcccctgctaagcctcctactcaccaccatcatcatcaccctcctgctcctgttaatccacctcctgttccggttcatcctccagttaaacctcctgttccggttcacctccagttaaacct

SEQ ID NO: 164277 - DNA, 281 bp, Glycine max
ctagaacgaaaaaaaaaaagaagagcaattttccctcaccaaagacgaagaagcaaacaatggccgatcaacttaccgatgaacagatctccgagttcaaggaagccttcagcttgttcgacaaggacggcgatggttgcatcacaaccaaggagcttggaactgttatgcgttcattggggcaaaacccaactgaggcagagctccaggacatgatcaatgaagtggatgctgatgggaatggtaccattgacttccctgagttcctaaatctcatggcc

SEQ ID NO: 164278 - DNA, 281 bp, Glycine max
gtaggtagcagttgcacacggcgcaaaggggaacaagaagaagaagatggtgtccttgaagcttcagaagcggctcgccgctagcgtcctaaagtgtggcagaggcaaggtctggctcgatccaaatgaagtcaatgaaatctccatggccaattctcgacaaaacataagacagttggttaaggatgggtttattatcaggaagccaactaagattcactctcgctctcgtgctcgtcgaatgaaggaggccaagaggaagggacgtcactctggctatg

SEQ ID NO: 164279 - DNA, 280 bp, Glycine max
caagtttcttcctttctctgctctttgtcttctctgacacatttggggccttgttgagtgtgtttttgcaagagggtatggcgaaggacgttcctgttgctgagcgtggctccttctctgggaaggactaccaggaccctccaccagcaccactcattgatgctgaggagctcacaaagtggtccttttacagggctcttattgctgagttcattgccactttgctcttcctctacattactgtgctcacagttatagggtacaagcaccagacggatca

SEQ ID NO: 164280 - DNA, 279 bp, Glycine max
gagagaggatgggtgcagaagcaaatggcggcgagaagcaattgaaatttctgatctacggtcgcagcggttggattggtggtctactgggtaagctctgcgaagagcgcgggatccaatatgagtacggcaccggcagattggagaaccggtcgtcgttggaggcggacatagcggctgtgaagcccagccacgtgttcaacgccgcgggtgtcacgggtagacccaatgtggactggtgcgaatctcacaaagttgaaaccatccgaaccaacgtcg

SEQ ID NO: 164281 - DNA, 266 bp, Glycine max
aaagagctgatttatgaaccgtgttgttagcatcaatgttcaacacagtttcaaacgaaaagcttggtatgctaggatatgccttacaacaaagacactaagtgcacacaagggagactcctaccattaacataagccagggcgtcctacgtgataaggccaacctgacgctatacgacgcgcaagtcaccgaggcacaaatccagacggatctatccatgaccaagtgtgactgggatcatcctatccacttgcagcccacaagt

SEQ ID NO: 164282 - DNA, 282 bp, Glycine max
tacaaaggaaaatatggtcagatccacctgattgcatctcttgctgctggattaagtcgctatcatgatgagtttgctgtagctatcgttgatgaggttctggaagagattagagttgggcttgagttaaatgactatgggatgcagcaaagacgcattgcttacatgcgattcttaggggagctatacaacttcgaacatgtagactcatctgttatttttgagacactatatctcattctcatccatgagcatgggacatcagagcaagatgtactggat

SEQ ID NO: 164283 - DNA, 272 bp, Glycine max
gtttgttgttgtaactcgttcttcttcttttgttgttctgtgtttgtgtttgttttttctctcacctgaaaatgtcttgctgcggtggtaactgtggttgcggaagctcctgcaagtgcggcaacggctgcggaggctgcaagatgtacccagacttgagctacactgagtcaaccaccaccgagaccttggtcatgggagtggcacctgttaaggctcaatttgagggtgctgacatgggtgtgcccgctgagaacgatggctgcaaatgt

SEQ ID NO: 164284 - DNA, 286 bp, Glycine max
attttcttctttctctctcccttagtcaaagggactcattgttcttctcccaggttatttagaaaagcaaaatggtgaagatttgctgcattggtgctggatatgtgggggcgcctactatggcagtcattacacttaagtgcccatccattgaagttgctgttgttgatatctctaaatcccgcattgcagcctggaacagtgaccagcttcctatctatgatactggccttgatggtgttgtgaagcaatgccgtggcaagaacctcttcttcagcactgatgt

SEQ ID NO: 164285 - DNA, 276 bp, Glycine max
ggctcgagagacatcacagtctttgggttccgggagggagtatggtcgcaaggctgaaacttaaaggaattgagggtaaagttgaagatgtggatgaagataaggagaaggaggagaagacaaagaagaccattaaggaggtatctcatgagtggtcattggtgaacaagcagaagcctatttggatgaggaaacctgagagatcaaaaagaagatatgctgctttctacaagagcttaccatgatgggaaacatttgctgtagcctttctgtgag

SEQ ID NO: 164286 - DNA, 291 bp, Glycine max
gttcaatgattccgaccttgggaagattcccttttgctgccggaatggcactattttgcctccatcgatggatcctagcatgtctgcttcgagattccaaatgcaggtcttcaagatgccaccagcgcttaaccgatcccagcttttgcccccgcagaactggaacataagtggcacactcaaccctgactataaatgtggccctcctgtaagagtgagtcctactgaaaatcctgacccatccggcttaccatcaaacaaaactgtgatggccagttggcagattgtgtg

SEQ ID NO: 164287 - DNA, 282 bp, Glycine max
ataatagttacactaacacacagtagtgaacaacaactccaacaacaacaatcaacaacaacaacaacgttgtagtgtgttgttttgttttttagtgcagtttatttttttggcatcaaagtggttgaatccatggattctgattatggtattcccagggaactctcagatcttcaaaagattcggtctttgtaccagccagagctccctccttgtctccagggaaccactgtgatggttgaatttggtgacgcaaccaccactgctgaccccactgatgca

SEQ ID NO: 164288 - DNA, 282 bp, Glycine max
gaaagtttagctttccttggggagattggacaacaaacatctttaaggcatgcagttcaactgttatcacctgccagcattgttgcaaaaatgaatggccgagacaacatctgcaaggcggatcttgaggaagtttgtacgctatatttggatgccaaatcatcggccaggttacttcaagagcagcaggagaaatacatttcataatattgttttccaactgttgcgatgactgttggttgggtttgaattacaaccagtttttgctttcgcttctatact

SEQ ID NO: 164289 - DNA, 280 bp, Glycine max
ctccatcatggctcacctgctccccttcctcgtcctcactctcctcgccgccaccgcctccgcccacaacatcaccgacattctcgccgccaaccccgactacagcgacttcaacgacttcctctcccaaaccggcctcgccggcgacatcaacacccgccagaccatcaccgtcctcgtcctcaacaacgccgccttctccgccgtcgccgcgaaacaccccctctccgtcgtcaagaacctcctcagcctccatatcctcctcgactacttcgacaac

SEQ ID NO: 164290 - DNA, 276 bp, Glycine max
ggtgcctacatgtccacagagagtaaattggctgagtcatttgggtatgcatccccaattcacaataccattcaagaaacacacaattgcttcaatggctgctcatcatttcttcttgagaagattgctaatggacccggttcaatttcagttgttcttgcaactcacaatattgaatcagggaaattggctgcagcaaaagcatatgaattgggggttggaaaggtaaaccacaagctagaatttgcacaactgtatggaatgtcagaggcactt

SEQ ID NO: 164291 - DNA, 279 bp, Glycine max
gagatcggaacgtggaactgcggtaaccggaatatctcacttctcagatcagatcaatccgacgtcgtatgcagttataatggctccattcagcggcgatgagacggcaccgtttttcggcttccttggagccgcagctgccctcgtcttctcctgtatgggagctgcctatggcacagcgacgagtggcgtgggcgtagcttcgatgagtgtgatgagaccggagctggtgatgaagtctattgtccctgttgtgcaggctggagttttgggtattta

SEQ ID NO: 164292 - DNA, 281 bp, Glycine max
tgtttgcatatttgcatatggccaaacaggatcaggaaaaacttacactatgactggacccaaagagatcacagagaaaagccaaggtgtaaattacagggctctaagtgatttgtttcttatagcagatcaaaggagggacactgtccactatgacgtttctgttcaaatgattgagatttacaatgagcaagtcagggatctgctggtcactgatggaacaaacaaaagattagaaattcgacgtagttcacaaaaaggactcagcgtgccagatgcaa

SEQ ID NO: 164293 - DNA, 273 bp, Glycine max
cggctcgagtgaagagcctcctcttctctctcttcctcttcctcttcttagcctcctccgtcgtcgccaccgtccccgcccacaacatcacccgcatcctggccgcacaccccggcttctccaacttcaaccactacctctccgtcactcacctggccgaagagatcaaccgccgccagaccatcaccgtcctggccctcgacaatgccgccatgtcctccctcctcgataagcacctctccctccccaccatcaaaaacgtcctctccctcc

SEQ ID NO: 164294 - DNA, 279 bp, Glycine max
acgatattctgtgttgcgattatgctagttttgatggtttgattaccaagcaagttatgagcaagatggcagaaatgataaacagtctttgtggtggtgatgaaaaattgatgcgtgaaaggacacacctgctgttggcttgttgttcaaggatggcaatgtgtaagaaagatgtttggagagttgaatgtggaatcccttctggatttccgctcacagttatttgcaatagcatttttaatgagatgctcattagatatagctatgacaaattactgc

SEQ ID NO: 164295 - DNA, 281 bp, Glycine max
ggcattgtctggcaacaaggatgtggccttcttctctgctaatgctgcagctcaggcttcaaggaagtcctctccaagagtgaccaacgaggctgttcagaaggctgctgctgcattgaagggttcagatcatcgccgtgcaacaaatgtcagtgccagactggatgctcaacaaaagaagctcaaccttccaatccttccaaccaccactattggatccttccctcagactctagaactgaggagggtacgccgtgagttcaaggctaacaagatctccg

SEQ ID NO: 164296 - DNA, 281 bp, Glycine max
agggttggttggtcccattccataggaagagatcaaagagaagagaaaagatgtttgagccgcagcagctatacactcgagcgaagaccgaggaattcgacctcgaatcaggggaaaccctctacccagggctgagcgtcggcgagaaccagctccgatggggcttcatccgcaaggtctacggcatcctctccgcccagatcgtcctcaccaccctcgtctctgtcaccaccgttttctatactccaatcaatgacctcctcaagggcaattccaccctc

SEQ ID NO: 164297 - DNA, 278 bp, Glycine max
gcacagagaatttcatctgtgaatgctatgtcagcactttgtgaggccactggggcaaatgtcacacaagtgtcctatgctgacggcactgacacaaggattggaccaaagttcctgaattctagtgttggttttggtggctcctgcttccagaaggacatcttgaaccttgtctacatctgtgagtgtaatggcctgccagaggtggctgagtactggaaacaagtgatcaagatcaatgattatcagaagagccggttcgtgaaccgtgttgtttc

SEQ ID NO: 164298 - DNA, 279 bp, Glycine max
cggctcgaggaaatattatgggatgacagagccaggcaaacatttgggagtggcagggcttggtgggttaggtcatgttgcaatcaaacttgctaaggcgtttgggctgaaagttactgtcatcagtagctctcctaacaagcaagctgaggccattgaccgactcggggctgattctttccttgtttcatcagaccctgcaaaaatgaaggtggctttgggaaccatggactatatcatagacacaatttctgctgttcattccctgattccactgct

SEQ ID NO: 164299 - DNA, 282 bp, Glycine max
  unsure (1)..(282): unsure at all n locations
ctctgctaggagttttggagccgctgtgatgtacaaccaaaagaaggcttgggatgaccaatggatcttttgggttggaccgtttattggagcagccattgcagccttctancaccaattcatcttgagagcaagtgctgctaaggctgttggatcattcaggagcaaccccactatttgagtcaatttccatgtcatggggggatagtggaaatggaaaaaaattaatgggaagtgtttgtgctttgatcctctgtagattgaaggttctttaagacaatg

SEQ ID NO: 164300 - DNA, 282 bp, Glycine max
aagaatcccaggcgaggagaaagatggaggggaaggagcaggatgtgtcgttgggagcgaacaagttccccgagagacagccaattgggacggcggcgcagagccaagacgacggcaaggactaccaggagccggcgccggcgccgctggttgacccgacggagtttacgtcatggtcgttttacagagcagggatagcagagtttgtggccacttttctgtttctctacatcactgtcttaaccgttatgggagtcgccggggctaagtctaagtgtagta

SEQ ID NO: 164301 - DNA, 270 bp, Glycine max
ctgtaactctttattttattttctttctttctttctccgatcgcatagctcgctcgcaaccaccatgccttcccgaagaagaactctcttgaaggtcatcattctcggtgacagtggggtggggaagacatctttgatgaaccaatatgtgaataagaagtttagtaatcagtacaaggcaaccattggagcggattttttaaccaaagaagtgcaattcgaagataggcttttcaccttacagatttgggatacagctggccaagaaag

SEQ ID NO: 164302 - DNA, 270 bp, Glycine max
acttgatccatcaacggatttgaaaaaaaaggaaaaggaactccaagccaaggaggctgaattgagaaaaagggaacaggaagtcagacggaaagaagaagctgctgcacgagctggaattgttcttgaagagaagaattggccgccatttttcccaattatccatcatgatattgctaatgaaataccaattcatcttcaaagattgcagtatgttgcatttacttcattgttaggattggcattgtgcctcacatggaatattgtagc

SEQ ID NO: 164303 - DNA, 271 bp, Glycine max
gacaaaacccattttggtggccttaaggatgaggacaggatatttactaacttatatgggctgcatgatccttttctcaaaggtgccatgaaacgaggggattggcatcgaacgaaagatttggtacttaagggtactgattggattgtgagtgaaatgaagaagtctggcctccgtgggcgtggcggtgctggtttcccttcgggcctcaaatggtcattcatgccaaaagtatccgatggccgcccttcatatcttgttgttaatgctg

SEQ ID NO: 164304 - DNA, 268 bp, Glycine max
ccgcttctcgctgatgacagaagcgacgtgattctgttgaagtttcttcgtgctcgggacttcaaggtgaaggaggcaattccattcagacgtttttgtcgaggtgacggagaggacagcccaggctaagaatagacactctaatggccaaggacggtggcctgtcaagtcagcaaaattcattcttgatttgctcaaaaatgctgagagcaatgctgaagtgaaaggtttggatgttgatgcactgtacatttcgcatatccaagtc

SEQ ID NO: 164305 - DNA, 266 bp, Glycine max
ctcgagcgaattcggctcgagcggctcgagaaacttggaacgcaaggctttgaggtgctattaactacattacttggccttattttgataattgatacaattaatctcattctaggtttcaaaattgggattcggatgtatgggccttactggagcgtacaatgaccctctccaagaacaggatggcatatctgttatcaagtatgcgttcagtaagggaatcacattttttgatactgcggatgtttatggagccaatgctaatg

SEQ ID NO: 164306 - DNA, 265 bp, Glycine max
aaaaaaaaaaaaatacattcatgttgatagagagcaacataggaagtgaagtgtaggtaagtgagagccatgaggggttatgagccccgttcaggctcttcatgtgcagcttgcaggctattgaagcgatgatgcataccaaattgtatttttgcaccttactttaggtccgatgattgcaagaagtttgcaaaggtgaacaaggtgtttggagccggcaatgtgagcaagattctgattgaagtgccagacgagcaggtagagg

SEQ ID NO: 164307 - DNA, 268 bp, Glycine max
gaggattcagaccaatgtttatggcaatggtagcaccaacattggcagagaggaaagatatggtctctggtttgaccctgcagatgatttccatcagtacactattgtctggacagactctcagatcatattttatgtggacaatgttcctattagagaagtgacgcgaacagaatctatgggaggagatttcccttctaagccaatgactttgtatgcaacaatatgggatgcatctgattgggctaccaatggaggcaaatacagg

SEQ ID NO: 164308 - DNA, 273 bp, Glycine max
ctcgtttcagagtgggcgatcatctagtgtggaaatatgagagtgggaaggactcagtgttggaagtaacaagggaagattatgctaattgcagcacatccaaccccatcgaagagtacaatgatggaaacactaaggtgaagcttgaacatcctggtccattttacttcatcagtggatcaaaggggcactgtgagaaggggcaaaagttgattgtggtggtaatgtctccaaggcacacattcactgccattatttctccagcaccaacac

SEQ ID NO: 164309 - DNA, 265 bp, Glycine max
gccatttgggagttaggttctgcacgctctgcttccagcgagtgttctttcttcgtttcaacaccttaatttgcacacgctgcttcttcagcttgagaaatggcacaagaaacctttctattcacatctgaatctgtaaacgagggtcaccccgacaagctgtgcgaccagatctctgatgcagtgctcgatgcgtgccttgaacaggaccctgacagcaaggttgcctgtgagacatgcaccaagaccaacatggtcatggtct

SEQ ID NO: 164310 - DNA, 259 bp, Glycine max
tggtgaatgcgtagaaaaggaaaataaagaaattagcgtgaaaaatgttgggtgtgttcagcagctccatagtgtcgccgccggaggagctcgttgccgccggcagccgtacaccgtcgccgaagatgacggcggcggcgctgcggaagtggttcgaggagaagaacccctccgcagtgtcggtggaggtcggagagcatgtccagctcgcttatacccaccagaacgagtcgccgtttcagcccagatcctttgctgt

SEQ ID NO: 164311 - DNA, 265 bp, Glycine max
aaagcattgaattcaaaaactaagttcatttcttgtgctttgctttattcctcaaaaccaaacatgtcgaacacatgcggcaactgtgactgcgctgacaagactaactgcaccaagggaaacagctatggtgttatagtagagactgagaagagctacatcgagactgttgacatggatgttccagcagctgagcatgatgggaagtgcaagtgtggcactaactgcacttgcacggactgcacttgtggccattaaggaatat

SEQ ID NO: 164312 - DNA, 262 bp, Glycine max
tcctgccagtagtcatatgcttgtctcaaagattaagccatgcatgtgtaagtatgaactaattcagactgtgaaactgcgaatggctcattaaatcagttatagtttgtttgatggtatcttctactcggataaccgtagtaattctagagctaatacgtgcaacaaaccccgacttctggaagggatgcatttattagataaaaggtcaacacaggctctgcctgttgctttgatgattcatgataactcgtcggatcgc

SEQ ID NO: 164313 - DNA, 265 bp, Glycine max
cactacttgagagtttgaaaatggtacttgtgctatggtcagtatggactaagaacatggactgcctaaccctcttcactcttctactcttgttattcattcatagagcactctcttctacccaatatcatgatgggaacatcttactcactcatcgtaagatcttccccaaacaggaagctatcacctcgtacgctgtcatctttgatgctggtagcgatggtagccgtgtgcatgtcttccatttcgaccggaacttggatct

SEQ ID NO: 164314 - DNA, 265 bp, Glycine max
atttcctgaggcttggcattcagattctgcttcagttaagggagatggggtttataacataaggtcaaaggtttatgttaacccaaaattgtggtatttgagggttaatgtgattgaggctcaagatgtggagccaaatgacaaaagccagccaccccaagtttttgtgaagggtcaagttggacaacaagtgctcaagactaagttgtgtccaacaaaaacaccaaacccaatgtggaatgaggatttggtgtttgtggcagca

SEQ ID NO: 164315 - DNA, 269 bp, Glycine max
gggtgcagaagcaaatggctgcgagaagcaattgaaatttctgatctacggtcgcagcggttggattggtggtctactgggtaagctctgcgaagagcgcgggatccaatatgagtacggcaccggcagattggagaaccggtcgtcgttggaggcggacatagcggctgtgaagcccagccacgtgttcaacgccgcgggtgtcacgggtagacccaatgtggactggtgcgaatctcacaaagttgaaaccatccgaaccaacgtcg

SEQ ID NO: 164316 - DNA, 265 bp, Glycine max
cgatttttaaggaggttgtgtgaattgctggtgagtgatttaaatggctcctactaaggtggacaatgccaaaagggctgatcccaaagctcaggccttgaagacagctaaggctgtcaaatcaagtggtcaagtgtttaggaagaaagctaaaaagatcaggacatcggttacatttcacaggccaaggaccttgaagaaggaaaggaaccctaagtaccctcgcattagtgctccacccagaaacaagttggaccattatcag

SEQ ID NO: 164317 - DNA, 266 bp, Glycine max
tttcattcttcagtcttctcttcgcttcaatggctactctcgttctcaggaattgctcttccacttctcggcgcctcttccctttaacctctcaaatccactcttccttctctcgttcccctctctcccctctcgttttcaccaacgactccgcatcttcttcttcttcttccactcccaacccctggtggagatccatggccactttcaccagaacgaaacctcacgttaatgtcggaactattggacacgtggatcatgggaag

SEQ ID NO: 164318 - DNA, 264 bp, Glycine max
gcaaataccacaaagacttatgctacaagaaccatatttttcttgaaagatgatggaactttgacaccattggccattgagttaagtaagccacatcctcagggtgaagaatatggtcctgttagcgaagtctacgtgcctgccagcgaaggagtggaagcttatatttggttactggcaaaggcttatgttgttgtgaatgatgcatgctaccatcaaatcattagccattggctaagcactcatgcaattgttgagccattt

SEQ ID NO: 164319 - DNA, 268 bp, Glycine max
gataacttaattagtgttcatgaatatgtcaagccttactttagtggttctaaattgaaaagctttctagctggtcataatatcaccattactgatggtattgacaaaactagtgcaactttgcaatttagaaagttagcagattgcgattttctcaagagaaactttaagcagatgtctaatgttttgtgggtggctcctgaggacaaggcgagtttatggtcacaacttcattatgtttcgtgcaataatctggaaatgcaagaag

SEQ ID NO: 164320 - DNA, 264 bp, Glycine max
caaacacaaacacatggcttcctccttcttctttctaacattgcttctcctctccattatctccgccgccaccccctgcccgccgtcagaacgggcagcactactggccttcaaagctgccctgaccgaaccctacttgggcatcttcaacacatggtcgggcaacgactgttgccggagctggtacggcgttgcctgcgaccccaccaccggccacgtcaccgacgtcaacctccgcggcgagtcccaagacccaatgttcca

SEQ ID NO: 164321 - DNA, 263 bp, Glycine max
ggtgatattgacaaaactagtgcaactttgcaatttagaaagttagcagattgtgattttctcaagagaaactttaagcagatgtctaatgttttatgggtggctcctgaggacaaggcgagtttatggtcacaacttcattatgtttcgtgcaataatctggaaatgcaagaagcttatcttgtcaatctcgtaaatgtgttacgagaattgtatttgcacagtccagaggaagctcgccaattgagaaggaaagctctctc

SEQ ID NO: 164322 - DNA, 263 bp, Glycine max
aaatcacatagctagttgtttaaagtgagagaaaaagaaagaagaaaatggcaaactttccagttgttgacatggggaaacttaacaccgaagagagagcagcagccatggagattataaaagatgcctgtgagaactggggtttctttgagttggtgaaccatgggatatccattgagttgatggacactgtggagaggctcacaaaagagcactacaagaagactatggagcaaaggttcaaagaaatggtggccagcaaa

SEQ ID NO: 164323 - DNA, 264 bp, Glycine max
ggaaggctagatatatagagaaaaaggacgtaattctattacgaaattattgtttatttaataaatttcctaatgtgaaaacaaatattatattttaaacatttttgaaaagtgaaacatctcaatatcaaaaaataaaagaaatcaatagagattccgatagtagtggtgagcgaaattggatgaagaaataaaaataaataaaaataaacagtgtggaataattgaccaaaggaggtgaaagtcctgttagactttatatgt

SEQ ID NO: 164324 - DNA, 264 bp, Glycine max
cgattccttcgtgcgtgcgattcttctgatattccaaggcgacgcaccgacaccggacccatctccggcgacatctcaccgatctccggcgaatccccggtccccactttcttccctcgaaatgaatcccgagtatgattatctgttcaagctccttcttattggagactctggtgttggtaaatcatgccttcttctgagatttgctgatgattcgtacatcgagagctacataagcaccattggagttgattttaaaatacg

SEQ ID NO: 164325 - DNA, 264 bp, Glycine max
gcgatgttccgtggaaagatgagcacaaaggaggttgatgaacagatgatcaatgttcagaacaagaactcatcgtacttcgtggaatggatccccaacaatgtgaaatccactgtctgtgacatccctccaactgggttgaaaatggcatcaaccttcattggcaattctacctctattcaagaaatgttcaggagggtgagcgagcaattcacggctatgttccgcagaaaggccttcttgcattggtatactggagaaggt

SEQ ID NO: 164326 - DNA, 261 bp, Glycine max
accgaccattggtgtggaggttcatccgttggattttttcacgaactgtggaaagattcgcttctattgttgggatactgctgggcaagagaagtttggtggcctcagagatggatattatatccatgggcaatgtgcgattatcatgtttgatgttactgcccgtctaacatacaaaaatgtccctacctggcaccgtgatctttgccgggtctgtgaaaacatcccaattgttctttgcggtaacaaggttgatgtcaa

SEQ ID NO: 164327 - DNA, 262 bp, Glycine max
gagtttccacactgcataccttaggtcttccgaattcgaagttaatttgcaagatggctaaggaaaaggctcagatcaacattgtggtggttggtcatgtggaccctgaggaggcaaccaccattaacgagctgaagaagcctgttgtggagaaagaagctccagggcatgccatatgagggcatgcacgtacggcctcggaggggaaccagaaaattatgttaacaaaataatctggaaccctaatgtatcagtgtcatca

SEQ ID NO: 164328 - DNA, 267 bp, Glycine max
atcgcagagaagaacagagagagatccatccatcaattccaatggccgatcagctcaccgacgaacagatctccgagttcaaggaagccttcagcctcttcgacaaggacggggatggatgtattaccaccaaggaacttgggaccgtgatgcggacacttggccagaacccaactgaggcagagctgcaggacatgataaatgaggttgatgctgatgggaatggtaccattgatttcccagaattcctgaatctcatggctcgca

SEQ ID NO: 164329 - DNA, 261 bp, Glycine max
acaggactcgtggagtggtacggtaagaacgcgaactcgagggagttggtgaaccttgtggttgttgccggagacaggaggaaggagtcgaaggacttggaagagaaggccgagatgaagaagatgtacggcctgatcgagacctacaagttgaacgggcaattcagatggatttcatctcagatgaaccgtgtgaggaacggagagctgtaccgtgtgatctgcgacaccaagggagctttcgtgcagccggctatatac

SEQ ID NO: 164330 - DNA, 264 bp, Glycine max
cgacactaggaaaacactcccgcgatgacgacgcgacaaaacaataccatttgcaagaagaacaaccaccctcaaggcagagaaacggttctgttttggtccccaaaacactgagaattgatgacccaagtgaggctgcaaagagttctatatgggcaactttgggcatcaagaatgagtgtgtcactggtggaggcatgttcaagggattccaatcaaagaaagaagagaaagaccatgttgttgaagcctctcctgtgttga

SEQ ID NO: 164331 - DNA, 262 bp, Glycine max
ccaatcctgacacggggaggtagtgacaataaataacaataccgggctcattgagtctggtaattggaatgagtacaatctaaatcccttaacgaggatccattggagggcaagtctggtgccagcagccgcggtaattccagctccaatagcgtatatttaagttgttgcagttaaaaagctcgtagttggaccttgggttgggtcgatcggtccgcctccggtgtgcaccggtcggctcgtcccttctgccggcgatgcg

SEQ ID NO: 164332 - DNA, 259 bp, Glycine max
ctcgagccggttttttgggaatgcggcgagggcgtttgatttggaagatttgctcagggcttcggcggaggttttggggaaagggactttcgggacggcgtacaaggcggtgttggaggcggggccggtggtggccgtgaagaggttgaaggatgtgacaatttccgagaaggaatttaaggagaagattgaggcggtgggagcgatggatcacgagagtttggtgcctctcagggcttactatttcagcagggatgag

SEQ ID NO: 164333 - DNA, 263 bp, Glycine max
ctcgcgtctcagcctcagtttcggatctctcccttctctcaccaatttccaggatttgaaaaatggcagattccaaaccaggattgacgaagccagtgttcaccaaggtcgatcagcttcgtccagggaccagcgggcacactttaactgtgaaggtggtcgatgctaagatggtgatgcagaaaggtcgttctgatggtcctcaatcccgccaaatgcgaattgctgaatgtttggttggtgatgacactggaatgatcata

SEQ ID NO: 164334 - DNA, 267 bp, Glycine max
gttggaaagaaaccctagcaagcggaacaatggcagacgttgaggtcgatgtggcggctgcagcagcagcagggcagccgaagaagagaacgttcaagaagttcagtttcaggggcgtggatctcgatgcgcttctggacatgtccaccgatgaactcgtgaagatgttcagtgctcgcgcacgtagaaggttccagagaggcctcaccagaaagcccatggccttgatcaagaagcttcgcaaagcgaaaagagaagctccaccag

SEQ ID NO: 164335 - DNA, 259 bp, Glycine max
  unsure (1)..(259): unsure at all n locations
agacaancaaaccaagtactaagctcttggttggttcccccttgtgcttatttgttgttgttgagaaagcacaaagaaaagaagaagaggttttgatcgcgatgcgatgagcacacaggggcaagtgattattgatgaggcggttctggatgacataatccggcgcttaacggaggtccgactggcccgacccggcaagcaggttcagctctccgagtctgagatcaagcaactctgcgtcgcttccagagacatcttc

SEQ ID NO: 164336 - DNA, 261 bp, Glycine max
tacttgagatataataatcctacgtatgccagcactagagaacacgcgaaacacgtgattcacccacgccggagaaaatgagcaccggcgctggaaaggtggtgtgtgtcaccggcgcttccggttacatcgcttcctggatagtcaaattccttctccatcgcggctacaccgttaaggccaccgttcgcgacacgaatgatccgaaaaagataaaccacttggttagcctcgatggtgctaaggagaggctgcacctct

SEQ ID NO: 164337 - DNA, 261 bp, Glycine max
ataacattcaccggttagataccctctctctctctctctggaaagcatttgcattcacattgaatatggctgaggctacacaatctaatgctgagttgttggagagcgcctaagaaagataagcgccgcttcctgcatgttgtgtatcgtgttggtgatcttgatcgcaccattaagttttatactgaatgttatgagatgaagcttttgaggaaaagagatattccagaggagaaatatgccaatgcttttcttggattt

SEQ ID NO: 164338 - DNA, 255 bp, Glycine max
caagaatccacacaaactcagggtagggcagagagagagagagacagacagagagagagagagaatgggagggtgagctatcgcggtgcatggtggcgctggtgtcgaccctaatctcgcactcgagcgccaagaagaagcgacacaaattctcacgcgctgtctcaatcttggaatctctgctctaaattctaatcttcccgacatatatgtcgtcgaacttgtggtgagggaattggaaacggatccgctgtt

SEQ ID NO: 164339 - DNA, 261 bp, Glycine max
agtaaacagacctgttagaaggcgacatggtaaattattggaagagggtgctagtggctttctccaaaaaaagctttgtgatgaaacccaggagccaataaagactgaaactaagggggattgggatttgttcaataaaatagtttctgatgggagtggcattgatgcttcatttggcagtaagcattgggtgtctgtttatttggccagcactccacagcaagctgccttgatgggactcaaatttcctggagttgatga

SEQ ID NO: 164340 - DNA, 270 bp, Glycine max
ctggatgagtggaaaagactctactcaaacactaaaaccaacttcagggaggttgctatcaaaggattttgggacatgtatgatcccgagggatactctctctggttttgtgattacaaatacaatcaggagaatactgtttcttttgtgacattgaacaaggttggtggatttcttcagcggatggatttggctcgcaagtatgcatttggaaagatgcttgtgattggatcagatccaccatttaaggtgaaggggctgtggcttttc

SEQ ID NO: 164341 - DNA, 255 bp, Glycine max
gagcgaatcggctcgagcggctcgagctagaatggaataccgatgctcagtcatcccttttaccattctcttctctcttgctcacgcaggagagagccatgtccatgcatcgctacctgaggaagattattgggaagctgtttggccaaacactcccattcccactgcactgcgagaccttctaaagcctctccctgcaggtgttgaaatcgatgaactccctaagcaaattgatgatacacagtacccaaaaac

SEQ ID NO: 164342 - DNA, 261 bp, Glycine max
ctattattcacatctccatctagatctctctctctctctctcccaagaaattcatcaacagacttgtgattaatttgcaattgttcaagtgatctatcaagaaattgataattcaatgggaaagtacgaaaaagagcttaatctcgaggctacagagttgagattggggttgcctggaagcgatgagcctgggaaacgttctattgttagaagcaataagagatcttcaacagaagcaagcgaggaagagtgcataagcaa

SEQ ID NO: 164343 - DNA, 264 bp, Glycine max
ctttctccgatggctaatccctcactcttgttcttcagtctcatcctattatccgccaccgtagccgccgccgaacggatcgacgatgaagacgaccttctgatccgtcaagtggtgccggatgcggaggaccaccacctgctcaacgcggagcaccacttctccgccttcaagacaaagttcggcaagacctacgccacgcaggaggagcacgaccaccgcttccgtatcttcaagaacaacttgctccgcgccaagtcacac

SEQ ID NO: 164344 - DNA, 260 bp, Glycine max
  unsure (1)..(260): unsure at all n locations
cgctgtctctcccatcctttcgcattctcaatacccttttcatctgtgacaggaaagccaacatcgttgaccacgcccaacaccctacaatcatggaccaccccccttcttctctccatcttctcccttgtcctttatctggtattatatcttatgatggagcctaccgccacccagctatgtaccatagaccctcttttgggaattacccgaatactgcactgcatcttcctgtgatgcccacatgcanagctaccatg

SEQ ID NO: 164345 - DNA, 263 bp, Glycine max
ctagaatggaatttcgatgctcagtcatctcttttaccattctcttctctcttgctcttgcaggagagagccatgtccatgcatcgctacctgaggaagattattgggaagctgtttggccaaacactcccattcccactgcactgcgagagcttctaaagcctctccctgcaggtgttgaaatcgatgaactccctaagcaaattgatgatacacagtacccaaaaacattcttctataaagaagaccttcatccaggcaaa

SEQ ID NO: 164346 - DNA, 270 bp, Glycine max
tgccctgataatgagtggttgtgtgttgggcttgtgcgtgggcataggaggttgtgtatgtgtggtggagaacgagaatggaagaatcatcattgatattagtcacaggtaccatcctgatatgcctgcctgggaatccaaggatagccttgggcagtttttgtggcttacaagaagcatggccaatggttctctggctaacttctcccaattcaagctccccgctcacagcggcacccatgtcgatgctcccggacatgttttcgatca

SEQ ID NO: 164347 - DNA, 262 bp, Glycine max
caattgggtgacgtttgacggattactacaaagacactattgcaattggaccttttgcagccactgcccatggaatactggtttccaattcagcaggaaatggtgggcctagtcaagcaactttgtctaatgtggcaccatggctaaccactgtgggtgccggaactatagaccgtgatttccctgcctatatcacccttggaaatggaaagatatacactggggtgtcgctttacaatggcaaactcccactcaactctcc

SEQ ID NO: 164348 - DNA, 266 bp, Glycine max
aaagaaagcagctaaaccagagcctaaacaagaagcagaaccagaggaggaggcacccaagcccaagcccaagaatcctcttgatcttcttcctccaagcaagatgatcttggatgactggaaaagactctactcaaacaccaagaccaacttccgcgaggttgcaatcaaaggattttgggacatgtacgatccagagggatattctctgtggttctgtgattacaaatacaatgatgagaacacagtttcctttgttacgttaa

SEQ ID NO: 164349 - DNA, 263 bp, Glycine max
ccaaaaaagcaaaacagagagaacaactgttactcacacacgccatgggtaaatgaatggtttttgagcaacagcagttaaaagagaaaagggattcagcgaagatgacatcggttggtgtggcaccaacttcgggtttgagagaagccagtgggcatggagcagcagctgcggatagattgccagaggagatgaacgatatgaaaattagggatgatagagaaatggaagccacagttgttgatggcaacggaacggagaca

SEQ ID NO: 164350 - DNA, 261 bp, Glycine max
cacgtatcaacttcaataatcgcatcgcagaagcagtttccggtgcatctcatcgtctccgaaaatgaacgacgcagatgtctcgaagcaaatccagcagatggtgcggttcatccgccaggaagctgaggaaaaggccaacgagatctctgtctccgccgaagaggaattcaatatcgagaagctgcagttggtcgaagccgacaagaagaagatcaggcaagaatacgaacgcaaagagcgccaagttgaaattcgcaa

SEQ ID NO: 164351 - DNA, 259 bp, Glycine max
ctagactcttctttttctctaagtctaaggggtgccctgagatcactttgagcaatggtgaaggctgtggcagttcttggcagcagcgagggtgtcactggaactattttcttcactcaggagggaaatggtccaaccaccgtaactggatctcttgctggtcttaagcctggtctccatggcttccatgtccatgccttgggggacactaccaatggttgcctgtcaactggagcgcatttcaatcctaataacaacg

SEQ ID NO: 164352 - DNA, 259 bp, Glycine max
accgattgctagaatggaatttcgatgctcagtcatctcttttaccattctcttctctcttgctcttgcaggagagagccatgtccatgcatcgctacctgaggaagattattgggaagctgtttggccaaacactcccattcccactgcactgcgagagcttctaaagcctctccctgcaggcgttgaaatcgatgaactccctaagcaaattgatgatacacagtacccaaaaacattcttctataaagaagacctt

SEQ ID NO: 164353 - DNA, 264 bp, Glycine max
ctcctcattccttcatttttaaacctagctccatctccctccactcaccataacatgccatcagaagcaaatgctgccaacaccaacttctgtgtaaatgttagcaacaatggctacattagtgctaatgaccccttgaactggggtgcggcggcggaggctatggctgggagccacctcgacgaggtcaagcgcatgctagaggagtaccggaggcccgtcgtcaagctcggtggagagaccctgaccatctcgcaggtcgcg

SEQ ID NO: 164354 - DNA, 269 bp, Glycine max
cacgtatcaacttcaataatcgcatcgcagaagcagtttccggtgcatctcatcgtctccgaaaatgaacgacgcagatgtctcgaagcaaatccagcagatggtgcggttcatccgccaggaagctgaggaaaaggccaacgagatctctgtctccgccgaagaggaattcaatatcgagaagctgcagttggtcgaagccgacaagaagaagatcaggcaagaatacgaacgcaaagagcgccaagttgaaattcgcaagaagattg

SEQ ID NO: 164355 - DNA, 268 bp, Glycine max
ccgagaacaacaagcgccttatccatttctctacttgcgaagtgtacggaaagacgattggagcctttctccctaaagatagtcctcttcgtaaggatccggcatactatgttcttaaagaagacgagtctccttgcatttttggttctattgaaaaacagaggtggtcttatgcctgtgcgaaacagttgattgagaggctgatttatgctgagggtgctgaaaatggcttggagttcacaattgtgaggccttttaactggattgg

SEQ ID NO: 164356 - DNA, 260 bp, Glycine max
cactacttgagagtttgaaaatggtacttgtgctatggtcaagagggactaagaacatggacttcctatccctcttcactcttctactcttgttattcattcatacagcactctcttctacccaatatcatgatgggaacatcttactcactcatcgtaagatcttccccaaacaggaagctatcacctcgtacgctgtcatctttgatgctggtagcactggtagccgtgtgcatgtcttccatttcgaccagaacttg

SEQ ID NO: 164357 - DNA, 269 bp, Glycine max
tgatctcagaattctctaaaagagatctttttctgctctttgaagaaagaagggtctttgctctgattttggagatgtctctgctctcagatctcatcaaccttaacctctccgataccaccgagaaggtgatcgcagagtacatatggatcggtggatcaggaatggacctgaggagcaaagcaaggactctcccaggaccagttagcgacccttcagagcttcccaagtggaactatgatggttccagcacaggtcaagctcctggt

SEQ ID NO: 164358 - DNA, 256 bp, Glycine max
ctcaagctgaaacccttgcagcatttgatgaagcaattgctgatggagttgatataatttccatttcaaccggacttactagtatagtgtacattccgtatttccaaagcgcatttgatataggaagtttccatgcaatgaagagaggtatattaacgtcaaaatcagccgataattcgggtccagggttatcctctatcacaacttattcgccatggatactctctgtggcagctagcactattggcagaaagtt

SEQ ID NO: 164359 - DNA, 255 bp, Glycine max
gtaaccatgtctcagactgttgtcctcaaagttggtatgtcatgtgaaggatgtgttggagcagtgaagagagttctaggaaaattggatggtgtggaatcatatgacattgatttgaaggaacaaaaggtggtagtgaaaggaaatgtccagccagacacagttctgcagaccgtttccaaaactgggaagaagactaccttctgggaaggtgaagcagcagcatctgaaactagcacagcaactgcctaaaac

SEQ ID NO: 164360 - DNA, 264 bp, Glycine max
aggatgtgtcgttgggagcgaacaagttccccgagagacagccaattgggacggcggcgcagagccaagacgacggcaaggactaccaggagccggcgccggcgccgctggttgacccgacggagtttacgtcatggtcgttttacagagcagggatagcagagtttgtggccacttttctgtttctctacatcactgtcttaaccgttatgggagtcgccggggctaagtctaagtgtagtaccgttgggattcaaggaatcg

SEQ ID NO: 164361 - DNA, 265 bp, Glycine max
cgaaatttaaccatgcttctccgaaccgccgcctccgccgcttctgcttcgtccctctccctcttcagccctacctccgaacctctccgttcggttcccgctcgtggattggtggttcgcgccgcgaaaggatccacgaaccaccgcgccctaaccggcgtgatctttgaaccgttcgaagaggtgaagaaggagctcgatctcgttcccaccgttccacaagcttctctcgcccgccaaaaatacgttgacgaatccgaagccg

SEQ ID NO: 164362 - DNA, 272 bp, Glycine max
atggtcctgagaaagtgaaagtcaatctatcacaaaagaagaacaagaaagtagccagagagagggatctcttcaagaagaactacttacatgcatgtgagagccttctgtccctaatggttgacaagaggcgacaccggaaaacagcaattctctccctgaagaaatctggtcccgagcttcctgagctcctcacacaattttctgccagcattgccggtactggccttgctgtcctgctatctgtgatctgtaagctagcttgtggaagg

SEQ ID NO: 164363 - DNA, 262 bp, Glycine max
ccaagataagcaaagcgtgaaaaatcgcaaaataccaaatcacaataacaagcacaattacagtgactacgcttggttcctcttcttcgatcttcggtttgattctgcgtttgttcacatcatggccaccgcttcagtggcatttaagtccagggaggaccaccgcaagcagattgagttggaggaggcgcgtaaagcggggcttgcgccactgaactcgatgaagatggaaaggaaatcaatcctcacattccccagtata

SEQ ID NO: 164364 - DNA, 256 bp, Glycine max
gcggaatttgctttctgttgggtacaagaatgtgattggtgctcgcagacgtcctggaggatcctgtcttccattgagcagaaggaagaaacaaaagggaacgagttgaatgcgaacggattaaggagtacagacagaaggttgaattggagctatcgaacatctgtaatgatgttatgagagtgattgatgagcaccttatcccttcggctgcagctggtgaatccactgtgttttactataagatgaaaggaga

SEQ ID NO: 164365 - DNA, 256 bp, Glycine max
ctcgagccgataaaattgtataaaactaattatttatcttattattataataatgattaacgtttatttatttattattattattactgtaatggttaaggtgataattcgaattaaattgtgtaaaattaattatattattatttttatgataacgattaaggttattatattttaaaataaaaattaattttaattttatgtgtaaaaatattaaatattttttaaaattattatttattaaaagttaaacatt

SEQ ID NO: 164366 - DNA, 255 bp, Glycine max
tcgctctcttcaccctcttcttcttcttcttcttcttcactttgtaactttcgaatcttcttccttccaccgcaatggccaccgccacgcttagccccgccgacgccgacaagctctccaacctcaaatcctccgtcgctgcattgagccaaatcagtgagaatgagaagaatggattcacaagcctcgttgctcgttacctcagtggcgaacacagcatgttgagtggagtaagatcgagacgctacggatgaa

SEQ ID NO: 164367 - DNA, 255 bp, Glycine max
gtcatatgcttgtctcaaagattaagccatgcatgtgtaagtatgaactaattcagactgtgaaactgcgaatggctcattaaatcagttatagtttgtttgatggtatctactactcggataaccgtagtaattctagagctaatacgtgcaacaaaccccgacttctggaagggatgcatttattagataaaaggtcaacacaggctctgcctgttgctttgatgattcatgataactcgtcggatcgcacgg

SEQ ID NO: 164368 - DNA, 260 bp, Glycine max
tggatcaacaactgagagggaggtgagagttgggagattgcagcgccaaaaggttcgtgtctctcgaaatcgtgtcttggattctgctgcaaaagttatggggatgtattctagccaaaaagctgtacttgaagtagaatattttggtgaagttgggactggcctgggtcccacccttgagttttatacaattctaagtcatgatttgcaacaagttggattgcaaatgtggagatcttattcttcagaaaaacatcaaa

SEQ ID NO: 164369 - DNA, 262 bp, Glycine max
cgctattctactcgcaagcaaatcagaacaagagaagagaatggcaggagcagaggggctaaacagagaacagtacgtgtaccttgcgaagctgtcggagcaggcggagcggtacgaagagatggtggagttcatgcagaaggtggtggtggggtggacgccggcgtcggagctcacggtggaggagcgcaacctcctctcggtggcctacaagaacgtgatcgggtctctgcgtgccgcgtggcgcatcgtgtcctccatc

SEQ ID NO: 164370 - DNA, 262 bp, Glycine max
cgctattctactcgcaagcaaatcagaacaagagacaagaatggcaggagcagaggggctaaacagagaacagtacgtgtaccttgcgaagctgtcggagcaggcggagcggtacgaagagatggtggagttcatgcagaaggtggtggtggggtggacgccggcgtcggagctcacggtggaggagcgcaacctcctctcggtggcctacaagaacgtgatcgggtctctgcgtgccgctggcgcatcgtgtcctccatcg

SEQ ID NO: 164371 - DNA, 267 bp, Glycine max
cttccactctttcacactcacctatggccccaatctcaaaactcacccctttcctattcttaacaacccttttagtttccctccaagttaatgccagagacagccaattcttcagcaaagtcacccctctcaacaacaacatcaaagagactgagactcccaaaaatgaaggccaagtaaacaagccagaacaacaaccaacattcattcctgaaactgaaaacagttatggcctatatggtcatgagactggtctgcaccctccca

SEQ ID NO: 164372 - DNA, 263 bp, Glycine max
agacagcaaaggaagagtgtgtgttacaggaggtacaggttttattggttcatggataatcaagaggctccttgaagatggttactctgttaacaccactgtgagacccgatccagaacacaggaaagatgttagctttcttactagcttacctagagcatcccaaaggctacaaattctcagtgctgatctcagcaatccagaaagttttattgcttccattgaagggtgtatgggagtttccatgttgctacaccagtcga

SEQ ID NO: 164373 - DNA, 260 bp, Glycine max
gaaattttgataaaccgcgatcacaggttgccgcaccttaaaaccggaaacaaaagcaatcgttacttgatttcaagaatctctcaatttcttcctacttctttgtgcacgatttcttaagggaaagaaaatcactctctgtgctggtcacagacttcgtgaatcattttcttttccattcttagtttatttgctgaacactctcctatttgatataggacttcgtgtcagatttaaacttcttctgtttctttctcagt

SEQ ID NO: 164374 - DNA, 251 bp, Glycine max
cattcttctatccaattctcttcctcaaaccccatcttttctctctctcacacaccctttctctccctagactctctctcttgtggtttctgcaatggcaacccttgcagacattggggtctcagctgccatcaacattctctcagcctttgccttcttgctggcttttgctcttctgagaatccaacccatcaatgatagaatctactttccaaagtggtatatcagtggagatagaagcagtccaagga

SEQ ID NO: 164375 - DNA, 257 bp, Glycine max
ggacagttggagtttaaggctatcctctttgttcctaagagggcaccttttgacctctttgacacaaggaagaagcctaacaatattaagctttatgtccgccgtgtctttatcatggacaactgtgaggagttgattcctgagtatttgggctttgtcaagggtattgtggattccgaagatctaccactcaacatttcaagagaaatgttgcaacagaacaagatcttgaaggtcatcagaaagaacttggttaa

SEQ ID NO: 164376 - DNA, 261 bp, Glycine max
ctcgagccgctcaccagtacccatgagcccattggagagtctagcttcttctgctgttagaccagccaactcggctagagcagctcttatcttggttttaactagaggagggagtactgcaaaattggtggctaaatacaggccaggcatgccaattctttctgtggttgttcccgagcttaagaccgatacctttgactgggcatgcagtgatgaggcccctgcaagacatagccttatattccgcgggttggttcccgt

SEQ ID NO: 164377 - DNA, 256 bp, Glycine max
gaaaaagaggcgcaagatgagtggtagggtttctgggaaggtgaagtggttcaatgatcagaaggggtttggattcataagccctgacgatggcagcgacgatctcttcgttcaccaatctcagatcaaatctgacggtttccgaagcctcgccgaaggagagtccgttgagttcgccattgaatctgaatctgacggacgcgcgaaggctgttgatgtcactggccccgacggcgccaggtccagggaaccagac

SEQ ID NO: 164378 - DNA, 257 bp, Glycine max
gctactacaccaaagtactccaaggccaggtatgatgaaattgtgaaggacgtttcttcctatttgaagacagtaggatacaaccctgacaagattccttatgttcctatatctggttttgacggagacaacatgattgacaggtccacaaaccttgactggtacaagggtcctactctgctagatgcgcttgaccagatctctgagcccaagaggccttctgacaagcccctcaggctaccccttcaggatgtgta

SEQ ID NO: 164379 - DNA, 261 bp, Glycine max
ctttaccagttgccacactacaccgacctatcgctcaaaacccgcttgcgttgctgtttgcgaagaaatggcgactaagaggagcgtgggaacgttgaaggagggtgatttgaaagggaagagggtgttcgtgagggtcgatctgaacgtgcctttggatgacaaccttaacatcaccgatgacactagagtccgtgctgctgttcccaccatcaagtacttaactggtcatggagccaagtgatcctttctagccacttg

SEQ ID NO: 164380 - DNA, 236 bp, Glycine max
tctctctcttgtcaagactccgtatgctcaagaacaggtcaatataggttccggtccacctgattccaaagttagatggttccgttcatctagcaatgaaccacggtttattaacacggttacatttgacagtaaggatgattctcctacgctggtgatggttcatggatatgcagcatcgcagggtttcttctttcgcaattttcatgcccttacctcccgtttcagcgtgattg

SEQ ID NO: 164381 - DNA, 261 bp, Glycine max
attttgtgactgaaaaaaggttttagatcgtaaaaactaatcactacgaaaacaagagatatcgaagatggctctgcccaaagctaaggagatcgtgtcgtccaattccgtcgtcgttttcagcaaaacctattgccctttctgcgtcgatgtgaagaagctcttcggtgacctcggtgccaattacaaggccatcgaactcgacactgaatccgatggaaaagagctccaagcagcattagttgagtggacggaccagcg

SEQ ID NO: 164382 - DNA, 260 bp, Glycine max
tcttaatttctctctgccttgctcatttacacacctctccaacctttcactttcagctttatttgaatccctctctctcctttccaaatggccagcgttgaggttgcacatcaaacaccaacaacagttccagaaaatgaaacaaccgaggtaatcaagacccaggaaacaaccccggaaccagtaccagccactgaggctcctgcaacagaacaagcagcagctgaggttcctgcccaagaagaacaacaagcaactga

SEQ ID NO: 164383 - DNA, 260 bp, Glycine max
gttttatccctccattgctttgccctgccgccgataacaattttctgtatcgtgtattttttttttccttgttcacagctctgcgagatcttcattcgccgattttaaaagatgagtaagcttcagagtgatgctttgcgtgaagccatttcaggaatcatggccgattccaaggagaagaatcgcaaatttgtggagaccatcgaactccaaatcggattgaaaaactacgatccacagaaggacaagcgtttcagtgg

SEQ ID NO: 164384 - DNA, 258 bp, Glycine max
ccagactgagaggaagagagagggagattctttgtttgctaccttctctcggaaaaatggttacgttcaggtttcaccagtaccaggtggttgggagggctcttcccacggaagcagatcagcaccccaagatctaccgaatgaagctctgggccacaaacgaggttcgcgccaagtccaagttctggtattttctgaggaaactgaaaaaggtgaagaagagcaatggccaagtgcttggcatcaacgagatttttg

SEQ ID NO: 164385 - DNA, 258 bp, Glycine max
ctcgagccggcactgtggcagaagtcctaggagtgtaaaacagagacgcaaaatgaagacgctcttgtcgtctgagaccatgaatattcccgacggcgtgagcatcaaggttcacgctaaggttatcgaggttgagggccctcgtggaaaactcgtgcgagacttccaccatctgaacttggacttccaacttattaccgacgatggcggtaaaaggaagctcaagattgattcttggtttggttctcgtaaaacctc

SEQ ID NO: 164386 - DNA, 256 bp, Glycine max
cagtgccagacacgatagggtacgagctgaaaaacctgaagaagctatcagtgaactccaacaagctggtgttccttcctcggtcgacctctcacctgactgcactgaggattctggacgcgcgtttgaactgcctaaggtctctcccagaagacctggagaatctgataaacctggaaaccctaaacgtgagccagaacttccagtacctggactccctcccctactcggtgggattcctcttgtccctcgtgga

SEQ ID NO: 164387 - DNA, 258 bp, Glycine max
cataaattaagaaatcaaagagacagaaagttgagagagaagtgttcacgtctttgagaaatgggtgcttcggcatcggtcacagaaaaatccatccatgaattcatggtcaaggatgctaagggcagagacgtgaacctcagcacctacaaagggaaggttcttcttgtagttaacgtcgcttcaaaatgtggatttacaaattccaattacacccagttaactgagctttacagcaaatataaacacagaggtctt

SEQ ID NO: 164388 - DNA, 261 bp, Glycine max
ttcctctgtctcctcctcaatcttcattgtcctgttctttcccttggtgacaaaccaagactaacacacacagaacatagcttgtgttggtgaggtgagaagataaagaaagaatggcatttgcaggaacaacacagaagtgtatggcctgtgacaaaaccgtttatctggttgataagttgaccgcggataaccgagttttccacaaagcttgcttcagatgccatcactgcaaaggaaccctcaagctgagcaatacaa

SEQ ID NO: 164389 - DNA, 264 bp, Glycine max
accaaactctaagcaattattgtatacattctcttctctctcccttttctcatcacacactaacttgctttcgaggttttcttcttctttctcgaattttcacataccgaacttctcgtctttcacatctccaggtttgaaatgaatcctgagaagtttactcacaagactaatgaagctcttgcgtcggcccacgagctcgcgatgagttcaggccacgcgcaattgactcccatccacttggcgcacgcgctgatttccgat

SEQ ID NO: 164390 - DNA, 230 bp, Glycine max
atcgaacctagtaaaacaaagaaatggcttctcatcatctccaatatcttgtgcttgccatagccacacttctcacaatctcttcacatgcacaactcactcctgatttttacaacaatgtttgccctcaggaattgcctatgcattaagtcagttgttaaacgagcaatatttcgtgaacggcgcattggagcatctttagttcggttgcacttccatgactggtttgt

SEQ ID NO: 164391 - DNA, 257 bp, Glycine max
gagcacatctgcaggcaagccctttgtggaagtcttgaaggaggctggtgttctgcctggcatcaaggttgacaagggcacagttgagcttgctggcactaatggagaaaccaccactcagggtctagatggccttggtcagcgttgcgccaagtactatgaagccggtgcacgttttgccaagtggcgtgctgtgctgaagattggtcccaacgagccatctgagctggctatccatgagaatgcctatggcttgg

SEQ ID NO: 164392 - DNA, 248 bp, Glycine max
gtcggacgcgtctgatcctttggttctcacaccatttatcaaaactccagttcatctggccatgggaagagtgggcttatgtcctagacctcccaaggtgggcccctcaacgtgtctttgttcaagaggttttggagagggaagttcgcttgtcatattgggacaaagttaagcagagtattgaaaatgcacctggtttagaagaattgcttcctccaaagggtgggccgaactttagttttggtgca

SEQ ID NO: 164393 - DNA, 257 bp, Glycine max
ataaaaccccttcagggtctctccactatgacgggcagggaaatttttcataagatgaaggaaaaagttttgggctcatctgatcctgattctggtaaaggaaagagcaagatgaagaagaacataactcatggctttcacttggtaaaggggagatcaggtcatgccatggaagactatcttgttgctcaattcaagcaagttgaagacaatgaattgggtttatttgcaatatttgatggccactcaggtcacag

SEQ ID NO: 164394 - DNA, 256 bp, Glycine max
ctttttctatttggctgaaaacaatgtcctttttgagggaattacgctcaaacctagcatggttacacctggggctgaacacaaggaaaaggcttctccagaaaccattgccaaatatactctaaccatgcttagaagaagagttcctcctgctgtccctgtcaatcatgtttttgtctggtggacaatctgaagtggaagcaacactaaatcttaatgcaatgaaccaaagtcccaacccatggcatgtttcttt

SEQ ID NO: 164395 - DNA, 249 bp, Glycine max
gtcgtgtcgcagcaaaaccaagccacccactaacttgtttggtccaagacatggctctgatcctgcatgctaccaaaacaaacaagaatgccttcaagactctgattgcggcagagtacagtggcgtccaagtggaattggcccctaatttcgagatgggtgtctctaacaaaactcctgaattcctcaagatgaatcctattggaaaggttcctgttatggaaacgcccgatggtccagccttggaga

SEQ ID NO: 164396 - DNA, 259 bp, Glycine max
gcgagattccgatggcgactctggattccgacgtgcctatggttcccgccggcgagccctcgagcagcgccggtccttcttccaagaagcccaagcgcttcgagatcaagaagtggaacgccgtcgctctctgggcttgggacatcgttgtcgataactgtgctatctgccggaaccacatcatggatctctgcatcgagtgccaagccaaccaggctagcgccactagcgaggaatgcactgtggcatggggagtctg

SEQ ID NO: 164397 - DNA, 266 bp, Glycine max
caagaatgagggagatattgcacgtgcaaggtgggcaatgccggaaccaaatcggttccaagttctgggaagtgatatgcgacgaacacggcatcgaccccaccggaaagtacaccggcgacgaggcctccgatctccaactggagaggatcaacgtctactacaatgacgcctccggcggaaggtacgttccccgggccgtcctcatggatctggagcccggcaccatggacagcatcagatccggcccatacggcaagatcttc

SEQ ID NO: 164398 - DNA, 257 bp, Glycine max
cacggcctttgtgccggcgacgcatcattcaaatttctgccctatcaactttcgatggtaggatagtggcctaccatggtggtgacgggtgacggagaattagggttcgattccggagagggagcctgagaaacggctaccacatccaaggaaggcagcaggcgcgcaaattacccaatcctgacacggggaggtagtgacaataaataacaataccgggctcattgagtctggtaattggaatgagtacaatctaa

SEQ ID NO: 164399 - DNA, 253 bp, Glycine max
gattaaacggtgcgttttagtaagaggaaggtcctcttcaatcctgtctttttcatcgtggatctgcgctagggctccgtaatcagacacctttttcctcttacttcatttaacctcacaacaatcaagttttgaatggcaactgtgagaagtctgaagatcaagacaagtacctgcaaacgtatagtcaaggagctgcattcttatgagaaggaagttgagagagaagctgccaaaacagctgatatgacgg

SEQ ID NO: 164400 - DNA, 253 bp, Glycine max
gaatggagagctctaccgcgtgatctgcgacaccaggggtgctttcgtgcagcctgctgtatacgaggcttttggtttgacagtggttgacgccatgacttgcggcttgccaacattcgccacatgcaatggtggtcctgctgagatcattgtgcacggcaagtctggcttccacattgacccttaccatggtgaccgtgctgctgatctccttgttgacttctttgagaagtgcaagcttgacccaactcac

SEQ ID NO: 164401 - DNA, 257 bp, Glycine max
cccatcttccactctttcacactcacctatggccccaatctcaaaactcattcctttcctattcttaacaacccttttagtttccctccaagttaatgccagacacagccaattcttcagcatagtcacccctctcaacaacaacatcaaagagactgagactcccaaaaatgaaggccaagtaaacaagccagaacaacaaccaacattcattcctgaaactgaaaacagttatggcctatatggtcatgagactg

SEQ ID NO: 164402 - DNA, 255 bp, Glycine max
agaaaatcctcacccattttcttcgtagccaaacactctgaaattctcagttatgtcgtggcaagcgtatgtggatgatcacctactgtgtgaaatcgaaggtaaccacctcactcacgccgctatcatcggccaagacggaagcgtttgggctcagagcaccaacttccctcagttcaaacctgaggaaataactgccatcaataatgactttaatgagcctggatcacttgctccaactggattgtatatcgg

SEQ ID NO: 164403 - DNA, 240 bp, Glycine max
tcggttcaaacactctcatggcatcagacaacaagattaggatcggcatcaacggatttggaaggattggccgtttggtggccagggttgctcttcagaggaatgacgttgaacttgttgctgtcaacgatcctttcatcaccactgattacatgacatacatgttcaagtacgacaccgttcatgggcagtggaagcattttgatgtgaacctgaaggactctaagacccttctcttcg

SEQ ID NO: 164404 - DNA, 255 bp, Glycine max
cgcagagcaagtgatcgaagcgaaaagagagtaatcagcagagaaattcatcgtcgtagttatgggtaaagttcacggatcacttgcacgtgccggtaaggttagaggccaaaccccaaaagtggccaagcaggataagaagaagaagccacgtggccgcgctcacaagaggatgcagtataatcgccgattcgtcaccgccgtggtgggattcggcaagaagaggggacctaactcgtctgagaagtgaggctg

SEQ ID NO: 164405 - DNA, 258 bp, Glycine max
tggagagcttgtgtttttctgatcccttatcttaattaatttaatcaccaatgggtcgtgctatcgctaacgccaagactttctccgctctcgtgctagacggattctccaacactctcaccagacgtggctactctcaaagcgcaacaaggggaggagttgcctccatagcacccaaatcaggggaagacaaaggtgtctcatcatacaaggtttcctgggtgccagatcccgtcaccggttactacaaaccggaaa

SEQ ID NO: 164406 - DNA, 259 bp, Glycine max
  unsure (1)..(259): unsure at all n locations
ctcctcaatcctcattgtcctgttcttcccctaggtgacacacacacgcagagatcatagncttgtgttggtgaggttanaagataaagaaagaatggcatttgcaggaacaacccagaagtgtatggcctgcnacaaaacggtttatctggttgataagttgaccgcggataaccgagtgttccacaaagcttgcttcagatgccatcactgcaaaggaaccctcaagctgagcaatacaactcttttgagggagttc

SEQ ID NO: 164407 - DNA, 265 bp, Glycine max
gtatacaagggatggttctgtttggaagagtgatgaaacttctgcccagtcatccagccatgtggtagatttgcttttcttatcacagaggtgtctagtatccaaagcagccaaacaattgatggagctagttcatcagacgctacagctgatcaatgcaaatgacaatttgcccaggatgtttgcctgtcatctacaagagttgcttttgaattttatcacacagctagagatgctgtactactttatgaagtagttgtccctg

SEQ ID NO: 164408 - DNA, 250 bp, Glycine max
atctaccatgctttctgctattaattattcccttcttgcaaccattttcttagtgctaaccttaatttttccttcagaaggccaattgagttcaaccttctattctagcacatgctccaatgtgtcttctatagtgaggagtgctgttcagcaggctcttcaatctgattcacgaattggtgcaagcctctctcgcctccactttcatgattgctttgtcaatgggtgtgatgcgtccattttgttagac

SEQ ID NO: 164409 - DNA, 256 bp, Glycine max
ctcgcaagcaaaaagaaagaatcccaggcgaggagaaagatggaggggaaggagcaggatgtgtcgttgggagcgaacaagttccccgagagacagccaattgggacggcggcgcagagccaagacgacggcaaggactaccaggagccggcgccggcgccgctggttgacccgacggagtttacgtcatggtcgttttacagagcagggatagcagagtttgtggccacttttctgtttctctacatcactgtct

SEQ ID NO: 164410 - DNA, 204 bp, Glycine max
aagcacttgtggtgaactttgcattccagcttcatcacatgcccgacgagagtgtttcaacagcaaacgaacgggaccaacttcttcgcttggtgaagagcttgaatccaaagcttgtgacagtggtggaccaagatgtgaacacaaacaccacccccttcttacctagatttgttgaggcctacaattattaccctgccgtgt

SEQ ID NO: 164411 - DNA, 254 bp, Glycine max
ctgctctgcaatacttggaatcgctgcgcaacgcgcatcctgagctctccgattggtacaattcgctggcggatctataccagaacaagctctggcaccagcttaccctcaagcttgagcagttcgtggctctcgccgtcttccaggccggtgatgcattaatacaattatatcacaatttcatcacagactttgagcccaaaatcaaccttctcaagcttgcgcatttcgctgttatagtttctcggcagtat

SEQ ID NO: 164412 - DNA, 264 bp, Glycine max
cctcgagccgaatcggctcgagcgcgctcgagctcgagccgaagtcggactcgagctacgtctcgtatcgtcgttatagggctagaacacgaactttaaccgcggtgcactgatgtcatacggtcttgcttgatgattcgtcaacttgcagaaatcgaggcaatggctgcatctaagaaactgataacaagagaagagtgggagaagaagcttagtgatgtgaagattagaaaagaagacatgaataaattggtaatgaatttc

SEQ ID NO: 164413 - DNA, 252 bp, Glycine max
agaaataagggaaaaatggtgtcgctgaaactgcagaagcgcctctccgcaagcgtgctcaagtgcggcagaggaaaggtttggcttgaccccaatgaagtcaacgaaatctccatggccaattctcggcaaaacatcaggaagttggttaaggatcggtttatcatcaggaagccaaccaagattcactcccgctcacgtgctcgtaggatgaaggaggcaaagaggaagggccgccactccggttatggt

SEQ ID NO: 164414 - DNA, 259 bp, Glycine max
gtatggtttgccaagacttaagctgatgtgtgagtctgtactttgcaaagacatctctatagattctgttgcctatattctggctcttgctgatcgttatcgtgcaacagaattgaagtctgtctgtctacaattttctgctgaaaaccttgtcgctgtgatgcaatctgatggttttgagtatcttaaggaaaattgtcccttgctgcaatcagaactgctaaagactgtggctggatgcgaggaggaatttagtgga

SEQ ID NO: 164415 - DNA, 260 bp, Glycine max
ccaggaccaaacagcatccgccgcaggacggtaaccctccaacaacaacacttccgctgcgaaaaatgtctctggtggcgaacgaggatttccagcacattctgcgtgtgctgaacaccaacgtggatgggaagcagaagataatgttcgcaatgacctccatcaagggtattggaaggagattcgccaacatcgcttgcaagaaggctgatgttgacatgaacaaaagggctggtgagttgactgctgctgagttggat

SEQ ID NO: 164416 - DNA, 274 bp, Glycine max
caacattctcttcttctcactcaaactttccctctctgcgccgttcctctcaaatggatgcaccaatggagttttggggtgttgaggttaaggttgggcagactgtgacggttgacccaatggatcctgtggattcatacatacacatttctcaggttgcgctcggagaggcgaaaaaggacaaacctaatgaacctgtggttctgtacttgaaagttggtgaacagaagattgttttgggaaccctttctagggatggcatccctcacctatc

SEQ ID NO: 164417 - DNA, 270 bp, Glycine max
gtggtgcggatcttgtgggatgttttaatggatgctgttcagtggtctggaaaaaatcagcaacagaatgccaatgcagcccttcgtcaggtaaaaacttgggcagaattgttgaatacattctgcaccactgggaaacttgagctggaactgatgtacaaagtacagatgcaatgctatgaggatgctaaactgatgaagctgttccctgagattgttagatctctttatgaccaggatgtgctggctgaagataccattcttcattgg

SEQ ID NO: 164418 - DNA, 242 bp, Glycine max
caacccagtttcactttctcattattttctctcctattgataaagaaacagagagagagagacaaaaatgcctgcggtaggaggtattagcaacggagggggcaaggagtaccctggaagcctcactccttttgtgacggtaacatgtatagttgcagccatggtggggttatcctccggtaaggatatcggatttccaggtggggtgacatccatggatccgtttcgctcaagtttttccc

SEQ ID NO: 164419 - DNA, 265 bp, Glycine max
ctttcaagcgcaggaatggaggtcgcaacaaacacggccgcagccacgtcaagttcattcgatgctccaactgcggcaaatgctgccctaaggacaaggctatcaagaggtttctggtgaggaacattgttgaacaggctgcagtcagagatgtgcaggaggcttgtgtctacgaacaatacacgcttccgaagctgtatgtgaagatgcagtattgtgtttcctgtgctatccactctcatgttgtgagggttcgatcccgcac

SEQ ID NO: 164420 - DNA, 262 bp, Glycine max
ctctaggcgaatcggctcacgttcttcttcttttgttgtactgtgtttgtgtttgccttttctctcacctgaaactgtcttgctgcggtggtaactgtggttgcggaagctcctgcaagtgcggcaacggctgcggaggctgcaagatgtacccagacttgagctacactgcgtcaaccaccaccgagaccttggtcatgggagtggcacctgttaaggctcaatttgagggtgctgaaatgggtgtgcccgctgagaacga

SEQ ID NO: 164421 - DNA, 270 bp, Glycine max
caatgacaagcctcaaggattatgtgaccaggatgaaggaaggtcagagtgacatctactacatcacaggtgaaagcaagaaggctgttgagaactctccattcttagagaagttgaagaagaagggatacgaggttctttatatggttgatgccattgatgaatatgctgttggtcagctcaaggacatttgagggcaagaagcttgtctctgccaccaaggaagggctcaagcttgacgagagtgaagatgagaagaagaagcaagaa

SEQ ID NO: 164422 - DNA, 210 bp, Glycine max
ccgagaccaagttggatgatgagatcaagtcatggctagcttttgctgcccaaaaaattgttgaagttaacgcattggctaaagcattgtctggccacaaggatgaggccttcttctctggtaatgctgctgctctggcttcaaggaagtcttctcccaagagtgaccaacgagggctgtccaaaagctgctgctgcaattgaagggttc

SEQ ID NO: 164423 - DNA, 271 bp, Glycine max
cagatgtgccgcctgccttgacaatttattccgtatctttacctaaggggcttgggaagggcgatattctgacgctggatgtcttggctgtctttacccactcattgcaaccatttccagagaaaatcaatcacgctgacatccagcttctactatttcaagaaagtgcacgctatctctccccatatgcagtcaaggtccaatcactcactgttaaattgcctgatgcaagactagagtcctatacaacactaggaaatgcacaacttca

SEQ ID NO: 164424 - DNA, 274 bp, Glycine max
  unsure (1)..(274): unsure at all n locations
cggctcgagctttcatcgcttcggatcttcaatctcatctccgatctcaaaatgcccgncgtttatggagctcgcttgaccaccttcgaagactccgagacggcgagtgaatacggttacgttcgcaaggtttcaggccccgtcgtcgttgccgatggcatggctggtgctgctatgtatgaactcgtgcgtgttggtcatgataatctcattggtgaaattcatcgtctcgaaggggattctgctaccatccaagtttatgcggaaactgctg

SEQ ID NO: 164425 - DNA, 265 bp, Glycine max
ctcctcagagccaaagctgttctcttttttcatctgggtctacagaaccactggtgaccaaaattgtgaaaaggggttccttgattttcaccaattcatggcatttcagcactacatttcccgggatttgaaaaccatcccaaatgctgtgactgaggcagaaaaccccaatggttgttttgattgtaacatctgcttagactttgcacatgagccagtggtgacactttgtggtcacctctactgctggccatgcatctacaag

SEQ ID NO: 164426 - DNA, 267 bp, Glycine max
gagccaaggtaggttaaacaatcttcttcatcgtcgtcgccgcaatgggacgtgtgatccgtgcgcagcgtaagggagcaggctcggtcttcaagtcccacacgcaccaccgcaagggccctgcccgcttccggagcctggatttcggagagcgcaacggctacctgaagggtgtcgtcactgacgtcatccacgatcctggccgtggcgcgcctctcgctaaggtcgccttccgccacccgttccgctacaagaagcagaacgagc

SEQ ID NO: 164427 - DNA, 267 bp, Glycine max
ctctgatccatctgaagctgatcgactaagacatcttgcctcacctgctggaaaggatgaatattcagaatgggtgattacctctcagagaagtctccttgaggtcatggctgaatttccatcagccaaacctccaattggtgtcttttttgcagcagttgctcctcgcctgcagcctagattttattcaatctcctcatctccaagaatggtgccaaacagaattcatgttacctgtgcattagtacatgataaaatgcccactgg

SEQ ID NO: 164428 - DNA, 269 bp, Glycine max
ctcggaggaagaatcaggatcggctcctctacaccaattccaggcgtggctccctggactcgcggggccacccttgggaatctgtgcctttcaagcacccaagcacgtttgacacattggccatggaccctcacaagaagaagcagatcacggaggatcttcaggacttcgccaatgggcaatctttttaccataaaaccggtagggcttggaagagaggctaccttctctatggccctccaggtactggtaaatcaagcatgattgcc

SEQ ID NO: 164429 - DNA, 270 bp, Glycine max
attaattgcaagaatggcacttcgttgcttggtgatgtccctttctgttctcttcactcttggtcttgcgagagaaagccatgccagagacgaagatttttggcatgctgtttggccaaacactcccattccaagttcattgcgagatcttctaaagcctggccctgcaagtgttgcaatcgatgatcaccctatgcaaattgaagaaacacagtacccgaaaaccttcttctacaaagaagaccttcatccaggcaaaacaatgaaagt

SEQ ID NO: 164430 - DNA, 267 bp, Glycine max
cgaaaacgcagcaaggggtttgactggggaagtttattgaatgacaaaagtttgttggccatattttgatccggagtatgagaacttcagcaacagaatcaaccctccaagggtctctgtggacaacgatagttgccatgactgtacactgatcaagtttgatagtattaacaaacctggaattctgctggaagtggtgcaaatcctgacagaccttgacttcataattaccaaagcttacatatcgtctgatggtggatggtttat

SEQ ID NO: 164431 - DNA, 261 bp, Glycine max
gtgctcatgattgttcctgcggcggagcctgtctcaacaggctgccagtggatccgctgccttttgccaacctatgttgaaggcctaatcttgacatgtgatgatagtcaaaatgctgatgtcattcctgtttagtgttgttttcttttgcttggaaatcagtgtctcacgcatctgaacatgacaaaaaactgatggggaaatcctacaatatggcatcaagagtattttccacttgctggtttgtgtaaaatggcttgg

SEQ ID NO: 164432 - DNA, 263 bp, Glycine max
cttggaactcgaggcaccaattaagatatgtggagatatccacggtcaatattccgaccttctgcgactttttgagtatggtggattgcctcctcgttataactacttatttttaggggactatgttgatcgtgggaagcaaagtttggagacaatatgtctccttctgtcttataaaataaaatatcccaacaactttttccttctgaggggaaaccatgaatgtgcttctataaaccgcatttacggattttatgatgagt

SEQ ID NO: 164433 - DNA, 264 bp, Glycine max
ccactgtctctaatgccaagaaaaaggagaaacttgttttccatgtagtgaccaattcactcaactttcctgcaatctggatgtggttcttattaaaccctcctggcaaagccacagtccacatacaaagcatagagaactttgaatggttgcccatgtacaatacattcaacaaacataattctagtgatccaagatatacttctgagttgaactacctgcgtttctacctgccagatatcttccctactctaaataagattc

SEQ ID NO: 164434 - DNA, 264 bp, Glycine max
cggagataaagttgcctatgcacttcaacaaggtctaacagttattgcatgcattggggagactctcgaacagcgtgaagctggtacaacaacggctgttgtttctgagcaaacaaaagcaattgcagctaaaatatcaaattgggacaatgttgttttggcctacgagccagtttgggccattggcacaggaaaggttgctactcctgctcaggctcaagaggtccatgctgatctgaggaaatgggttcatgacaatgtgag

SEQ ID NO: 164435 - DNA, 268 bp, Glycine max
gttgtcataacttcaacaacttctttcttctcgatctcacgatggctcatttggccctgtctcagatggctgtgactgttcctgttggcaacgatttgtctctcagaagatctgcagttaaggcccctaacttgaacttttgggataaatcatgggcaccagtatttactttggacttgaagccaaacaacccaagtttaagaagtcgtcatgtggtatgcatgtccgtgcaacaagcaagtgtatccaaagttaatgtctcaccttt

SEQ ID NO: 164436 - DNA, 266 bp, Glycine max
ctgcggcaatagagagtagagagtaaacagaaaatctgaggcgcgagtcgctggtgaaggcagcgactgcgaggcaagggaagcatctttagctccaaatccaatggcggatacctcaagccgatcaagagaccccgacaagctccttctccgccctggcaatctcgtcggtcctaggttcgaacctggccctgagttgcgagatgaccttcaggccttcgccaattcttgttcagacttgaagatgttggcaaacccaaagccga

SEQ ID NO: 164437 - DNA, 262 bp, Glycine max
ctcgaatccacacagttctactctacgctctaaaccctctctctctctctctctcgatctatcatggctttgcccaatcagcaaaccgtggattaccctagtttcaaactcgtcatcgtcggtgacggcggtacaggaaagacaacgttcgtgaaaaggcatcttaccggtgaattcgagaaaaaatacgaaccgaccattggagtggaggttcacccattggatttcttcacaaactgcggaaagattcgcttctactgtt

SEQ ID NO: 164438 - DNA, 260 bp, Glycine max
ctattataaccaaacactcttcttcatattcttcttcttcttcttgttcttgttctatctgtgacgagcatcatggcctcgagagcagtgctattgttggctatgtgtgtgcttccggccatggttgtggccattcgcccagcaaagaaccctttttgcgtgaagggtcgcgtctactgtgacccttgccgtgctggttttgagacctcagcaaccacctacattgccggtgctgagattatgttgcaatgcaagagcag

SEQ ID NO: 164439 - DNA, 261 bp, Glycine max
caattttgctaatcaaggcctctcagttacagatttggtggctctttcaggggcacatacaattggcctggctgaatgcaaaaatttccgagcacacatctacaatgattccaacgttgatccctcttaccgaaagttcctgcagagcaagtgccccagaagtggaaatgataaaacactcgaaccccttgaccaccaaactccaatccattttgataatctatactttcagaatttggtgagtaagaaggcccttctcca

SEQ ID NO: 164440 - DNA, 262 bp, Glycine max
tcctcccggtacctgtattgtatcagaaggcacgtgatatcatgatgctgtaaagagagagagatatgagataattccacaattcttctttatcttggtttctagccgttgaagaaaaaaacggagaaagcatgggcgtggacttctacaagattctccaggtagatagaagcgccaaagatgaggatctcaagaaagcatatcgaaggtcagccatgaagtggcaccctgataagaaccctaacaacaagagagaggctga

SEQ ID NO: 164441 - DNA, 258 bp, Glycine max
tccatccctgtcaaacaaaccatggcttccgaaacaaaccagtccaagaatgtgtgtgtaattggagctggaccctcggggctattggcagcgagggagctgagaaaagaaggtcacaaggtggttgtgttggagcagaaccatgatattggaggtcaatggctatatgacccaaatgtacaagaggaggatcccttaggaagagacccttggctaaaactgcatagcagcatctatgagtctttaaggttcatgtct

SEQ ID NO: 164442 - DNA, 265 bp, Glycine max
actgcatatgcaggtctatttgaagtaggatctcttcagaaaggagaaaatgtttttgtttcggctgcctctggcgcagttggtcaacttgttgggcaatttgctaaactgaatggttgttatgtagttggaagtgctggatctaaagagaaggtggatctgctgacaaataaatttggatttgatggaggttttaactacaaggcagagcctgaccttgatgcagctttgaaaaggcactttccagaaggcattgatgtttact

SEQ ID NO: 164443 - DNA, 265 bp, Glycine max
ctgattactctctcaggtgcacacacccttggattctcccactgcagcaagttcgccagtagaatatacagcaccccagtggacccaacactgaacaagcaatacgtagcccaattgcaacaaatgtgcccaagaaacgtggatcctaggattgccatcaacatggacccaacaactcctcgtaaattcgacaatgtttattaccaaaaccttcaacaaggaaagggcctcttcacctcggaccaaatcctcttcacggacccaa

SEQ ID NO: 164444 - DNA, 259 bp, Glycine max
aatttagaaagttagcagattgtgattttctcaagagaaactttaagcagatgtctaatgttttgtgggtggctcctgaggacaaggcgagtttatggtcacaacttcattatgtttcgtgtaataatctggaaatgcaagaagcttatcttgtcaatctcgtaaatgtgttacgagaattgtatttgcacagtccagaggaagctcgccaactgagaaggaaagctctctctcgtattgaatggctgcaaaaagctga

SEQ ID NO: 164445 - DNA, 260 bp, Glycine max
ggaaaacgcgtcttcataaacgccgcccaaaacttctcatacccttttattcattccattcgtttctagggttttcttttctttgccgagaaaatgagagagtgcatttcgatccacattggccaggccggtatccaggttggaaacgcctgctgggaactctattgccttgaacacggcattcagcccgatggacagatgccgagtgacaagaccgttggcggaggagacgacgccttcaacacatttttcagcgagac

SEQ ID NO: 164446 - DNA, 258 bp, Glycine max
agatgagcatgttttaatgccacttgtattcggaatgtcacaaattggaacagtagaagaaggaaagtttgtgtattacaaattttccgtagacaatgtaacttgggagaaactttcttctgggaattcttgtgttgagttaaaattagaatcagagacagatgggggggacactgatcttttcatctccagacatcctcccatatttcctacacgacaccagcatgagtggtcttctcatgatattggctcaaagac

SEQ ID NO: 164447 - DNA, 266 bp, Glycine max
cggcggtggcaccggttccggtctcggatctctcttgttagagcgtctctccgtcgattacggcaaaaagtccaaattagggttcaccatttacccttcccctcaggtttcaaccgcagtcgtggagccctacaacagcgtcctctccacccactcccttctggaacacaccgacgtggctgttctcttggacaacgaagccatctacgacatctgtaggagatctctcgacatcgagaggcccacctacaccaacctcaacaggc

SEQ ID NO: 164448 - DNA, 261 bp, Glycine max
gccaaacttgtttttgttgattatcaattacttgatattgctaaaggagcacttcaaatcctgtcaaaaatcaccaccaagcttccccatttggtcttaattttggagtctggacatccatcacctccccatgctaaaggaaccttgacatacgaggatcttatagctaaagggagccttcaatttgaggtgaggaggccaaaggatgagtgggatccaatctcccttaattacacttctggaactacatcaaaccccaag

SEQ ID NO: 164449 - DNA, 258 bp, Glycine max
gttcttctagttaaatcattacttttgataaatataaaaactctctttttttttcgtaattatgcagattgcttctgattggttatatgtttatccaagaggaattcgtgaccttttattatataccaaagaaaagtacaataatcctttgatttacatcactgaaaatggtaaataacacttctctaaatacttgatttcctttattgcactgacatatactattctacatgaattttaattttcctaaccaaatga

SEQ ID NO: 164450 - DNA, 259 bp, Glycine max
cgcacctgcacatataagtcacgaaccatctaacccttcaaaggtcatgttctcacatctttgagtgcacccactttttcaagctcaccgaccaaatccttaagcgatggaaccttagtagccaaggtcctgtataatctagaatatcgtgcccgagtgccatcagcagtccttgctagagcaagcaagcttagagcctcgggtagttcattaaatactcgtctcatttcctccaagctcatatttcccaaaacggagg

SEQ ID NO: 164451 - DNA, 257 bp, Glycine max
cagtcatctcttttaccattctcttctctcttgctcttgcaggagagagccatgtccatgcatcgctacctgaggaagattattgggaagccgtttggccaaacactcccattcccactgcactgcgagcgcttctaaagcctctccctgcaggtgttgaaatcgatgaactccctaagcaaattgatgatacacagtacccaaaaacattcttctataaagaagaccttcatccaggcaaaacaatgaaagtacaa

SEQ ID NO: 164452 - DNA, 254 bp, Glycine max
cgaatatcttgttgtttggagcgatccgagaaaaactctgtaaacatgttggtttaccaggacctccttacaggtgatgagcttctctctgactccttccgttacaaggaaattgagaatggaatgctgtgggaagttgaggggaagtgggttgttaaaggagcagttgatgtagacattggtgcaaacccttctgctgagggtggaggagaagatgagggagttgatgatgcagctgttaaggttgttgacat

SEQ ID NO: 164453 - DNA, 257 bp, Glycine max
cgatgagtatggtgcaaggaccgctctaaatcttggtggtactgtgcttggatactatccagtcagggttcttccttcaaaaactgccattcttccagtgaatcctacattcctccctaggtcagatgatgagcgtgaaatgtgtgcccggactgtctattgtacaaatattgataaacattcttcacttcagcttgagaaccctttttatcaatatttgtacaatagacagtccgggcacacattgataaacaggt

SEQ ID NO: 164454 - DNA, 258 bp, Glycine max
gcaaggcccaagggttttacctatccgcaacccaaaggcccggtttggagttagagatagtcatggggatggctttgaccttcttagaaggcgaattcaacggtagcagtttaagtgtattggggagaaacaaaatcttcaatgaggtaagggagttgccaattattggtggcacgggtgagtttcgcttcgcacgtggctatatccttgctaggactgtcaaggtcgattaccataaaggggatgctaccgtcgaat

SEQ ID NO: 164455 - DNA, 262 bp, Glycine max
cgccttcatagcagagtcagagacagagacgcagccatggggcggagacctgcgaggtgttataggcaaattaagaacaagccataccccaagtcacgtttctgccgtggtgttcctgatcccaagatcaggatttatgatgttggtatgaagaagaagggtgttgatgagtttcctttctgtgtccatctggttagttgggagaaggaaaatgtttcaagtgaggccctggaagctgctcgcattgcttgcaacaagtaca

SEQ ID NO: 164456 - DNA, 268 bp, Glycine max
ggaatttcgatgctcagtcatctcttttaccattctcttctctcttgctcttgcaggagagagccatgtccatgcatcgctacctgaggcagattattgggaagctgtttggccaaacactcccattcccactgcactgcgagagcttctaaagcctctccctgcaagtgttgaaatcgatgaactccctaagcaaattgatgatacacagtacccaaaaacattcttctataaagaagaccttcatccaggcaaaactatgaaagta

SEQ ID NO: 164457 - DNA, 281 bp, Glycine max
cgaaaaagtagcgaagatggagagggagaagaagagacgtttggtattggttcatggagcctgccatggggcgtggtgttggtacaaggtggctgctttgttgaaatccaatggacaccaagtcacagctctagacatggctgcatcaggcatccatccaaagcaggtacacgacctcaattcaatttcagaatattttgagccattaatgtactttctagggtctttgccaacagaggagcgtgtaatccttgtgggtcacagctttggtggggcatgca

SEQ ID NO: 164458 - DNA, 274 bp, Glycine max
gattgatgcaggcatgtcaaccagcaagtggtgaccagagtggtcttctacgagctgatatgttacaaggcaacaacataccaaggatgccaaagctcgtgatcgatggtccttatggagctccagcacaagactacaaaaactacgaagtaatccttctcgtgggactaggaattggtgccacccctttgattagtattctcaaagatgtgctaaacaacatgaaacaacagaaagacatagaagaagggatggtagaaagtggagtcaagaa

SEQ ID NO: 164459 - DNA, 273 bp, Glycine max
gatcaagtgtagtatctgttcttatcagtttaatatctgatatgtgggtcaggggaggattcttcacagtagcttgctgctggaatcatcatttagtgtcgctcaagtgttgcactacaccttcggcctgccacaccccaccatttcagttctaaccttagtaagaatctattaacagcaaggaaaccatgagtagcgccgcctttaaggtcggtgtgttggggagtggaatttcaggagccgtgtgtgctctcaatcttgccagaactgggg

SEQ ID NO: 164460 - DNA, 272 bp, Glycine max
cagtcagagtatattcctcgggaaccaagagagccttctggttctggagccgatcaagaaactacaaataaagatgttaataagatgctaagacgcctagctcagaatcgagaggctgcccggaaaagtaggctgcggaaaaaggcttatgttaaacaattagaatcaagccgtttgaagctcatgcaattggagctggaaattgggaaagcaagaaagcagggtctgtatatgggcactgcattagatgccggctatataggatcaacatc

SEQ ID NO: 164461 - DNA, 268 bp, Glycine max
agaaatatctatgttctgggcctaaccttgttccttgcgatatcaataccacaatattttgtcatgaacaccgcaccagatggtcatggtccagttagaacagatggtggatggtttaatgacattttgaacaccatattctcttctgccccaactgtggctataattgttgggactcttattgacaacacacttgccggcaaacaaacagctgtggacagaggacttccatggtggggtcctttccagaataggaagggagatgtta

SEQ ID NO: 164462 - DNA, 270 bp, Glycine max
cggctcgagtttcttttcttaatttctctctattagtctgcatgctctgcaaactgagcatggatcctctcgcattttccttcttcttcatccttatcacattcttttcttcatcatctgaagcgggatccgttggaataaactatggacgggttgcgaacgacctacctacaccagcgaaagttgtggagcttctgaaggcacaaggtctgaaccgtgtgaagctctacgacaccgacgccaccgtcttaaccgcgtttgcaaactcgg

SEQ ID NO: 164463 - DNA, 267 bp, Glycine max
ctcagccaaaccctaactctgtttaccagacagaacatttatcttatttcaaatttgttggtacagtggtcggtaaagcattatttgatggtcaactcttggatgttcaacttactcggtcattctacaagcacattcttggagtcaaagttacatatcatgatattgaagccattgatcctgattatttcaaaaatttgacatggatgcttgagaatgatatcagtgatgttctggatcttacttttagcattgacgcagatgagg

SEQ ID NO: 164464 - DNA, 267 bp, Glycine max
gtttaatcttgtggttcgtcagaagtttttaaattttgtgaggttcattatgaagaaaagggacaagcttagttgtcaagttggaatcaacccatactccatggaatggactggtttggccaatagattactgagtaagggcaacgatattctgtgttgcgattatgctagttttgatggtttgattaccaagcaagttatgagcaagatggcagaaatgataaacagtctttgcggtggtgatgagaaattgatgcgtgaaagaac

SEQ ID NO: 164465 - DNA, 271 bp, Glycine max
gaaccgagcactcccacattcttcgagttccctttagaactgagaagggaattgttcgtcagtggatctccaagattcgaagtctggccatacttggaaacttacactgaggatgttgctcatgagcttgccaaagagttgcaaggcaagccagatctgattgtcggaaactacagtgatggaaacattgttgcctctttgttggcacataaattaggagtcactcagtgtaccattgctcatgcacttgagaagaccaaataccccgaat

SEQ ID NO: 164466 - DNA, 261 bp, Glycine max
ttggaatccaaaaatgagagaaatcatcagcattcacataggtcaggccgggatccaggttggcaactcctgctgggaactctactgcctggaacatggcatccagcccgatggcatgatgccaagtgactcctccttcggtgtagcccacgacgccttcaacaccttcttcagcgaaaccggatccggcaagcacgtccctcgcgccgtcttcgtcgatctcgagcccaccgtcatcggacgagtccgttgtggcactta

SEQ ID NO: 164467 - DNA, 269 bp, Glycine max
gttcatatgtacgtatgtttcagcttctcagtggatgggaccccaataagagaattcaagaacatggaatcaaaaggagttgcattcccaaaggaacagccaatgaggatatactctagtctatggaatgctgatgactgggcaacaagaggtggacttgtgaagacagattggacacaagctccattcacagcatcacatagaaatttcaatgccaatgcctgcgtccattctggatcatcatcatcatcatcatcttgcactgccaa

SEQ ID NO: 164468 - DNA, 268 bp, Glycine max
gccaggaccaaacagcatccgcggcagcgacggtaaccctccaacaacaacacttccgctgcgaaaaatgtctctggtggcgaacgaggatttccagcacattctgcgtgtgctgaacaccaacgtggatgggaagcagaagataatgttcgcaatgacctccatcaagggtattggaaggagattcgccaacatcgcttgcaagaaggctgatgttgacatgaacaaaagggctggtgagttgactgctgctgagttggatagtgtg

SEQ ID NO: 164469 - DNA, 260 bp, Glycine max
ctctctgcttgttcgcattgtggccttgtgactaagggacttcaatactttaacttgatgaccagtgtgtataacattgttcctgattcacgtcagtatacctgccttgttgaccttcttggacgacgaggtcttataaatgaggcttttgaattcttgaggttaatgccaatggaagctgaatcaaatacattaggagcatttattggatcctgcaatctacatgacaatataggaatggctaaatgggctgcagaaaa

SEQ ID NO: 164470 - DNA, 265 bp, Glycine max
gttatcttcatgtgaaacagaggctgaaagctgcccaagtcattcgatcattgcttaggcctaatagctatgcaattgctgttgagcatgatcttagtgtcttggactacttatcggactttatttgctgtctatatggtaaacctggtgcatatggagtggtgacacttcctttctcagtcagagaaggaattaacattttcttggctggctttgttccaacagaaaatcttaggttccgtgatgactcactcaccttcaaggt

SEQ ID NO: 164471 - DNA, 264 bp, Glycine max
catagagacgattcggctctagtccaagcagtagcatttgctgtctactggaattagaagcaaagctattgtttctataacgagcatcaaagaagttattactggtgggcatgctgataatagtattaggctaatatcctcagatggagctaaaacattagcaacagcttatgggcactgtgctcctgtaacttgtcttggtctttcacctgatagtaattacctagttacaggatcccgagacacaacagtattactctggag

SEQ ID NO: 164472 - DNA, 268 bp, Glycine max
cattaattgcaagaatggcacttcgttgcttggtgatgtccctttctgttctcttcactcttggtcttgcgagagaaagccatgccagagacgaagatttttggcatgctgtttggccaaacactcccattccaagttcattgcgagatcttctaaagcctggccctgcaagtgttgaaatcgatgatcaccctatgcaaattgaagaaacacagtacccgaaaaccttcttctataaagaacaccttcatccaggcaaaacaatgaa

SEQ ID NO: 164473 - DNA, 257 bp, Glycine max
aaaaaaagacaacccagagagcgcgtctcaataaacgctcttctctgaaaacccccatttcttttcttctttcttcttctctttcgcttcttcgatcttcgatcttcgtcgctgaaaatgagagagtgcatttcaatccacatcggccaggccgggattcaggttggaaacgcctgctgggagctttactgcctcgaacacggcattcagcctgatgggcagatgccaagtgacaagaccgttggtggaggtgatga

SEQ ID NO: 164474 - DNA, 272 bp, Glycine max
ttcgatcttcgcaatagtgccttgcacggttcaattccagcagatatatgtgactcaggcaatttagctgtcctccaacttgatggaaattcatttgaagggaatattccgtccgagattggaaattgtagctctctttacttgctgagtttgtctcacaataatttgactggctcaattccaaagtccatgtcaaagctaaacaagctcaaaatcctcaagctggaattcaatgaactaagtggagagataccaatggagcttggaatgct

SEQ ID NO: 164475 - DNA, 268 bp, Glycine max
cctcgagccgaatcggctcgagacagcattgaattcaaaaacttaccttcattccttgtgttacgctttcttcctcaaaaccacacatgtcgaacacatgcggcaactgcgactgcgctgacaagactagctgcaccaagggaaacagctatggtgttattgtagagactgagaagagttacatcgagactgttgtcatggatgttccagcagctgagcatgatgggaagtgcaagtgtggcactaactgcacttgcacggactgcac

SEQ ID NO: 164476 - DNA, 265 bp, Glycine max
ggagattctttgtttgctaccttctctcggaaaaatggttacgttcaggtttcaccagtaccaggtggttgggagggctcttcccacggaagcagatcagcaccccaagatctaccgaatgaagctctgggccaccaacgaggttcgcgccaagtccaagttctggtattttctgaggaaactgaaaaaggtgaagaagagcaatggccaagtgcttgccatcaacgagatttttgagaagaacccaaccaaaattaagaactat

SEQ ID NO: 164477 - DNA, 266 bp, Glycine max
gatactttcagtgaccatctatgacaagctccttgtgccagtgctaagaaaactaacaggaaatgacagaggaatcagcatcctccaaaggattggtattggaatggtcttctcagtcatcacaatgatagtggcagctttggtggaaaaaaagaggcttgaggcagttgaaatgaatggcccattaaagggttctttgtccatgagtgccctttggtggccccacaatttatgatcattggatttggtgatgggtttgctcttgt

SEQ ID NO: 164478 - DNA, 266 bp, Glycine max
atagagtgaaagaatgggtgagaaaagcaagattttgatcataggaggcaccggctacatcggcaaacatatagtggaagcaagcgcaaaggctggaaatcccacttttgctttggtgagggaatccacactctctgacccctccaaggcacaactcatccacaattttgaggctttgggcgttaatttggtccgcggggatctgtacgatcatgagaagttggtgaaagctatcaagcaagtagatgtcgtcatatccacgctgg

SEQ ID NO: 164479 - DNA, 265 bp, Glycine max
gtggaattcatgatggggtacaggaacgacactttcgcggaggataatgcggttcgtgaagctgcgtcggggctagagagcgtcgagaaactcatcaagttgctgtcgcatactcaacaacaataccagacaacctcaaagtcttccatggaaaacatcgaccccgactacacagctgtcgctgacgtcgcggtttctaagttcaagaaggtcatttcgcttctgggccgcaccagaaccggtcacgcgcgttttagaagagccc

SEQ ID NO: 164480 - DNA, 265 bp, Glycine max
gcgacgacgacaaagccaaagccaaggccaaggccaaggtcaaggtcacttccgccgccgagcaggaccaccgcaaaacagttctccgcgaactcaactccctgatctccggctcctcctcctcctccgccgcctccgacgacgtcgacgaggaggtcaccgacaccgagtggttcttcctggtctccatgacgcagtccttcgtcaacggcggaggacttcccggacaggccttcttcaactccgctccggtgtgggtcaccgg

SEQ ID NO: 164481 - DNA, 272 bp, Glycine max
tgaggtttgatgataagccagattatgcgtacctcaaaaggatatttcgtgacctgtttattcgtgaaggattccagtttgattatgtctttgactggaccattttgaagtatcagcaatcacagctagccactcctccaacacgggccattggtcctagtgctggaaccagttctggaatgccccccgctgttactaatgctgataggcatacaggaggggaagaaggtagacctcctgctttggtttcagtggattcctcgaggcgcaga

SEQ ID NO: 164482 - DNA, 270 bp, Glycine max
ctctgtctctatatctgtatttctgaattttgggaatagaaaaaccctaagcaaagcaaagcggtaaggatggggaacacggagaagctgatgaaccagatcatggaattgaaattcacttcgaaatcgctgcagcgtcaatcgcgtaagtgcgagaaggaggagaaatcggagaagctgaaggtgaagaaggcgatcgagaaaggcaacatggacggcgctcgaatctacgcggagaacgcgatccgtaagcgcacggagcagatgaac

SEQ ID NO: 164483 - DNA, 265 bp, Glycine max
ctctaattacatttctaatctcattctccttctgttcaaacactctcatggcatcagataagaagattaggatcggcatcaacggatttggaaggattggccgtttggtggccagggttgcccttcaaaggaatgatgttgaacttgttgctgtcaacgatcctttcatcaccactgattacatgacatacatgttcaagtacgacaccgttcatggccagtggaagcattttgatgtgaaggtgaaggactctaagacccttct

SEQ ID NO: 164484 - DNA, 266 bp, Glycine max
cgagctgatggatccagggcaacaggtgcatttatactgacagcaagtcacaatcctggtggccctcatgaggattttggaattaaatataatatggaaaacggtggacctgcaccagagggaattactgacaagatatatgaaaacacaacaacaattaatgagtacttgattgcatcagatctgccagatctggatatcaccacaacaggtgttacaagctttacaggccctgaaggaccatttgatgttgaggtttttgattc

SEQ ID NO: 164485 - DNA, 266 bp, Glycine max
taacctacctctttttcttctctctcaacaacttcaccttcttcctcctcgatcatgtctcacttcaagggcaagtaccatgatgagcttatcgccaatgctgcgtacattggcactcctggaaagggtattcttgctgctgatgagtcaacagggacaattggcaagcgtttggccagcatcagtgtagagaacattgaatccaacaggcgagctcttagggagctgcttttcactgctcctggtgttcttcaatatctcagtgg

SEQ ID NO: 164486 - DNA, 246 bp, Glycine max
  unsure (1)..(246): unsure at all n locations
tttcgcaatccgttccaaaccacancaagcttcaacaaagatngatgtagaaaagttgaagaacgatggccagtnctgttcgaactggtgggaagggtactatgagaaggaagaagaaagctgtccacaagactactactacagatgacaaaaggcttcaaagcaccctgaagaggataggagtgaatgctatccctgcaattgaagaagtcaacatctttaaggatgantagttatccagttttt

SEQ ID NO: 164487 - DNA, 264 bp, Glycine max
cacaaatgggtatttggagactagcattgattggatacccggcatcaaggaaattcgactgaaggatatccctaccttcattagaaccacagatccagatgatatcatgcttaatttcgcacgtggcgagtgcataagagcacagaaagcttctgcaataattttgaacacatttgatgccttagagcacgatatcttggaagctttctcaaccattttgccacctgtgtattccatcggccctttaaattttctcttgaatga

SEQ ID NO: 164488 - DNA, 264 bp, Glycine max
gagcagttaaataatgtagactgcattgtgtatggcatgggctccctttttacttcaatctgcccctcactggtgttactgggaattggggagattatttcttcaaagtcctgcctcaaggtacttgtgctaaatggaacacgggaccgggaaactaatgggttttcagcttcttgttttgtaactgccattacggatgctctaaatcgaacatatggagagcctaacaatcgcttacagaatcccccaagtcactatataaat

SEQ ID NO: 164489 - DNA, 267 bp, Glycine max
ctgatgtgcagaggaaaagagtgactttgttgatggccgcatcactgtttcagggtgcctctattggacccttgatagatttggctattcaaatcgatccaagccttatctttagtgcatttgtgggaacatccttggcctttgcatgcttctcaggagcagctttggttgctaggcgtagggagtacctgtaccttggtggcttggtttcttctggattgtccatccttctctggttgcactttgcttcttccatctttggaggtt

SEQ ID NO: 164490 - DNA, 262 bp, Glycine max
gaaaagtcaaagacaatgtcagggatcattcacaagattgaggagacccttcatgtgggaggccacaagaaggaggaggagcacaagggtgagcagcaccatggtggagaatacaaaggggagcatcatggtgaacacagtactgaatacaaaggagagcatcatgttggtgagcacaagccggagcaccatggaggagaagagcacaaagaggggttcctagacaagatcaaggacaagatccacggcgaggagggtggca

SEQ ID NO: 164491 - DNA, 263 bp, Glycine max
ctcgatcttgaacctctctcagaatggaggtagtatctgatgaagacgccttcttgtttggcatggaactagcgggtgcctctgctgtctctatggttctcaagtcagctttggagcttggcatcttagaaactatagccaaggctggtcctggagcttacctttccccttctcacatagctacaacatacttacatactccctccatcaactgcctcatggtaaggctgaaaggcactatggtcttcacccaaaagccaaat

SEQ ID NO: 164492 - DNA, 261 bp, Glycine max
gaactttttacgagaaggcctagaaccctcggagactatgataacacacgtcatagaaatggagatggactacatcaacacttcccacccaaattttattggtggaagtaaggcaatagaagctgcagtgcaacaaaccaggtcttctagagttggtttaccagtttctagggtgaaggatgcactggaatctgataagggaccagctactgagagaagtgggaagtctcgatctattcttgcaagacatgcaaatggagt

SEQ ID NO: 164493 - DNA, 241 bp, Glycine max
gccaaggcgttgcaggaagggagaaaaacacagcaacaacaacatgatcagcagcaacaacaacaacagcaacatcaaccttcggtggacgagaaatacacgcagtggaagtcccttgttcctgtcctctacgactggctcgccaaccacaacctcgtctggccctctctctcttgccggtggggccctcagcttgaacaagccacttacaagaatcgtcaaagactctccttttctgagc

SEQ ID NO: 164494 - DNA, 268 bp, Glycine max
attctccatacctcaacgaagaggttaaagagacggcaacactttgctgtccgccttgaccgagcagagcttcgtcttggccctcgattttgccctaaagtactctcagtcacaacagacaccgtcgtcgtcgtcgtcgtcatcaatggcaccgaagcagaccaaggctgagaagaagatcgcttacgatgcgaactgtgcgacctaatggaggagtacggccagatcctcgttgtgaactccgataacgtgggatcgaaccagctcc

SEQ ID NO: 164495 - DNA, 274 bp, Glycine max
ttagcaccaaaaatgtcgaagttaatcttcgtgttccttgcactaattcctcttctctgcacctccttctcgccagagaaaccctcagatcggcgcgtcctcgttttgctcgatgacttcgccatcaaatcctctcactctctcttcttcaactccctcaaatctcgcggcttcgatctccaattccacctcgccgacgaccccaaaattgcgctccagagatacggccagtacctctacgacgccctaattctcttttcccccaccattgaac

SEQ ID NO: 164496 - DNA, 259 bp, Glycine max
cctcgagccgattcggctcgagggcacttttgtctgaccctgtgttccgccctcttgttgagaactatgcatcggacgaagatgacttcttcgctgattacgctgaggctcaccaaaagctttctgagcttgggtttgctgaagcctaagcaacgttttggggattgttggagaggcacggtgcccataatatttctctcataaattctatggtcatggtttctaatgcgccactgtgggttcctcaaatttttagata

SEQ ID NO: 164497 - DNA, 186 bp, Glycine max
gccagtactcatatgcttgtctcagagcttaggtcatgaatgtgcaagtatggactaattccgactgtcaaactgccaatggctcattaaatcagttatagtttgcttgatggtatctactactcggataaccgtagtaattctagagctaatacgtgcaaccaatcccgacttctggaacggatg

SEQ ID NO: 164498 - DNA, 276 bp, Glycine max
cgatttgtcattcccttttctccataaacgaggtgcttcagatttgctcataatcggagggaatccaatcgaatcgaaaggaaatgaaagtgcagaatggatgacatgccgttgccggcgctctttgagcaagcccgcaagatccacgccgcagccatcggttccggcgccgaccaggaggttgtgaagaaggggtgcgaggctctgcatagatgcgaggacatggtcaataatctaggtatgttctctcccaacgagaccaaagcagatatcagc

SEQ ID NO: 164499 - DNA, 150 bp, Glycine max
aacacgcccttggcgacggtggatcccgagatccatgacctcatcgagaaggagaagcaccgccaatgccgcggcatcgagctcatcgcctccgagaacttcacctccttcgcagtcatcgaggccctcggcagccgcctcaccaacaaa

SEQ ID NO: 164500 - DNA, 277 bp, Glycine max
tccgacccgagaccgtacatcaacaaacgcgagtcgacccgacgcgtcgagtctctcgccacggcccaaatccagatcatagccatgttatgcgaagacgaagaagaaaaccccgagacacgtggcaaggcacccgtgactgacattaacggctttaccggtcaaagcagaagctacagcgaggaaagcctgctcccgcgcctcgccacgtggcagaaatccaaggacgtggcgcagaggattctcaattcggtggactacgagatggggaggtgca

SEQ ID NO: 164501 - DNA, 277 bp, Glycine max
cacgtttggctcttgcttcaattggtaaactcatgtttgctcaattctctgagcttgtcaatgattattacaacaatggtttgccttcaaatctcactgccagcagaaaccccagcttggattatggattcaagggagctgaaattgccatggcatcttattgttctgaacttcaatatttggcgaatccggtgacaagccacgtgcaaagcgcggagcaacacaaccaagatgtgaactctctggggctgatttcatcaaggaagactcatgaggc

SEQ ID NO: 164502 - DNA, 279 bp, Glycine max
gttgtgacaatgtacaactttcaacaatatcgccacattcaggcccccggatggtcattagggtggacatgggctaaaaaggaagtgatttggagcatgatgggagcgcaaaccacagagcaaggggactgttcaaagttcaaagcaggcattccacattgttgtaagaaggaccctacagttgtggatttgctgccaggaactccttacaaccagcagattgcaaattgttgcaaagggggtgtcctaaattcatggggtcaggacgccagcactgca

SEQ ID NO: 164503 - DNA, 282 bp, Glycine max
caatttcagtggcaatggcaacagtgacccaactctcaacactaccctctcacaagcactacgagcaatatgtcccaatggtggacctggaaccaatctcaccaatttggacttaactactcctgatagatttgactccaactactactcaaatcttcaacttcaaaatggcttgcttcggagtgatcaagtgttattttctacaagtggtgcagagaccattgccattgtcaatagtttcggtagtaatcaaactcttttctatgaacattttaaggtgtc

SEQ ID NO: 164504 - DNA, 232 bp, Glycine max
caaaccctagcggcactacacactagttctatcgctatctccccaagatgtcgagcgccgatcccgagcacagagaagaggaggaggcacccgccgttggcgacgacgaggacaccggagctcacgtcgctccaatcgtcaagctcgaggaggttgctgtcaccaccggcgaggaggacgaagatgcaatcctggatctcaaatcgaagctttaccggttcgacaaggacgg

SEQ ID NO: 164505 - DNA, 276 bp, Glycine max
aatttcaaatggaaattgctctctcataacagaattcaagaggaggaagaacaagtatataaaaactatatctacatagttatatctctctcttgagatttcaaacgtagagatatggaatggaggaagtgctacttgaatgtgatattggtgcccttgggatttctaacaagcattgggtaccatttctggctatggcacaaggttcgaactcagccacacacaaccatcattggcatcaatgctagtggccgtagaaattgggttaatggcatg

SEQ ID NO: 164506 - DNA, 276 bp, Glycine max
cgctccgcaccagtttcaccgcacgaatatcttgttgtttggagcgatccgagaaaaactctgtaaacatgttggtttaccaggacctccttacaggtgatgagcttctctctgactccttccgttacaaggaaattgagaatggaatgctgtgggaagttgaggggaagtgggttgttaaaggagcagttgatgtagacattggtgcaaacccttctgctgagggtggaggagaagatgagggagttgatgatgcagctgttaaggtagttgaca

SEQ ID NO: 164507 - DNA, 278 bp, Glycine max
cacaaaccctaacaccaaaaccagaagcgaaatcgcaatcgcaatccagcgaatatgaaggtcgtagctgcctacttgctcgcagtgttgggagggaatccttccccttctgccgatgacatcaaacacatcctcggcgcagttggagctgaggctgagaatgagttgattgagttgctcttgactgaagtcaagggaaaagacttcaatgagctaattgctagtggaagtgaaaagatgtctgcagtgtctggtggcggtgcagcggttgccgttgc

SEQ ID NO: 164508 - DNA, 280 bp, Glycine max
gaagcagaaggagcaaaagcaatggcgccgaagaagccgagaaccacgacaaggaaccctgatttggttagggggattggcaagtattcgaggtcgcagatgtaccacaagacgggcatctgggccatcaaggccaaaaacggtggcgttttgccccgccacgatcccaagcccaagcccgaggccccggcccagaagccgcccaagttctaccccgcggacgatgttaagaagcccctcgtcaacaagcacaagcccaaacccgcgatactcagggcta

SEQ ID NO: 164509 - DNA, 279 bp, Glycine max
ctagactcttctttttctctaagtctaaggggtgccctgagatcactttgagcaatggtgaaggctgtggcagttcttggcagcagcgagggtgtcactggaactattttcttcactcaggagggaaatggtccaaccaccgtaactggatctcttgctggtcttaagcctggtctccatggcttccatgtccatgccttgggggacactaccaatggttgcctgtcaactggagcgcatttcaatcctaataacaacgagcacggtgcccctgaggac

SEQ ID NO: 164510 - DNA, 224 bp, Glycine max
acactttcacactctttctctctctctctctctctctcagaattttctcctctctccgattccttttattaattggagttttctcgctcctttttctttccctgaaaacatttcatcttcgtattgatgtcggaaaagggtcggccacttcccaaatttggtgaatgggatgtcaatgatccagcctcagctgaggggttcacagtgatttttaataaggccag

SEQ ID NO: 164511 - DNA, 279 bp, Glycine max
aaacaaccttctttctttttctgtgagcctttctttcaggttcttaacttgatcagtgtgcagtgtccaaatcataagggtagttgcaaattgcaatggctaagcatgatgttgagggtggttccttctctgcaaaggactaccatgatcctcctccagcaccgttgattgatgctgaggaactcacacagtggtccttctacagggctttgattgctgagttcattgccacaatgctcttcctttacatcacagtgctcactgtgattggttacaaga

SEQ ID NO: 164512 - DNA, 273 bp, Glycine max
cccagttcaaaggtaaggtaggttaacactcttcttcatcgtcgtcgcaatgggacgtgtgatccgtgcgcacgtaagggagcaggctcggtcttcaagtcccacacgcaccaccgcaagggccctgctcgcttccggagcctggacttcggggagcgcaacggctacctcaagggcgtggtcaccgacgtcatccatgaccctggccgcggcgcgccgctcgccaaggtcgccttccgccaccctttcagatacaagaagcagaacgagctc

SEQ ID NO: 164513 - DNA, 278 bp, Glycine max
agagtgtgaactgcaaagggcttctccagcctagtttgttctcagatcttcttcttccatggaccagtacgagaaggtggagaagataggcgagggaacatacggcgtcgtttacaaggctcgcgaccgcgccaccaatgagacaatcgctctgaagaagattcgcctcgagcaggaggacgaaggcgttcccagcaccgccattcgcgagatttctcttctcaaagagatgcagcataggaacattgttaggttgcaggatgtagtgcacagtgaga

SEQ ID NO: 164514 - DNA, 278 bp, Glycine max
cagagactccataacccgaaaatgcctttcaagaggtacgttgagattggaagggttgctcagatcaactatggcaaagagtatgggaggctcgtggttattgtcgatgtcattgaccagaatagggctcttgttgatgctcctgacatggtgaggtcccaagtgaacttcaagaggctatcactcactgacatcaagatcgatattaagaggatccccaagaagaaggatctcattcaagccatggaggctgctgatgttaagaacagatgggagaa

SEQ ID NO: 164515 - DNA, 286 bp, Glycine max
ggaacgctagctatatgcttaacacatgcaagtcgaacgttgttttcggggagctgggcagaaggaaaagaggctcctagcgtgaaggttgcttgtctcgcccaggaagggggagaaaaatgtgggggtggttgagagcaaattggtgtgcacccttgaggagctttacaaagggtgcaagaagaagttgaagatctcaaggactgttcctcatgaattcgggaaaatgaagactgtggaagaggtcttgaaaattgacatcaaaccatggttggaaagaggcaca

SEQ ID NO: 164516 - DNA, 275 bp, Glycine max
  unsure (1)..(275): unsure at all n locations
gaaaaactgttcccgacaaatgggaatttgccaatgagtatttcaagccnaggacagacggatcttcttcgccgagatcaggcggcggaaggtggtgtctccggtgaccggaaaatctaccggcggtggcgttaacatctcggcgtcccactccggcggcgacgacatggggtcgacatcgacgggatcgatggaggcggcaacggcggcgggcgctgatatatcgggcgagaacgagaaattgaagaaggacaacgagaaattgagcggcgatt

SEQ ID NO: 164517 - DNA, 274 bp, Glycine max
gtgagatctctctattcctggaacgtgcctttgttcgattggaagcatggttccattggttcaaacttgaaatgaagacactgtcatctggactggatgattatccacgagcttcacacccaagtgaagatgaacaccacttggatcttagatgttggatgttacttgcagcagactgtatgcattccattcaagagttgttggatatggaaagcaagcctggcatggattatggttctactgctaagttgctattggattttgagttactgaa

SEQ ID NO: 164518 - DNA, 136 bp, Glycine max
gaagatcgtgaagaagagggtgaagaagttcaagaggcctcagagtgacaggaaaatttctgtcaagacaaactggcgcagaccaaagggtatcgattcccgtgttaggagaaagttcaagggatgcactttgatg

SEQ ID NO: 164519 - DNA, 254 bp, Glycine max
  unsure (1)..(254): unsure at all n locations
tttcgcaatccgttccaaaccacaanagcttcaacaaagaacgatgtagaaaagttgangannatggccagttctgttcgaactggtgggaagggtactatgagaaggaagaagaaagctgtccacaagactactactacagatgacaaaaggcttcaaagcaccctgaagaggataggagtgaatgctatccctgcaattgaagaagtcaacatctttaaggatgaaatagttatccagtttttnaaccccaa

SEQ ID NO: 164520 - DNA, 267 bp, Glycine max
tcaagatgcagatcttcgtcaagaccctcaccggcaagaccatcacccttgaggtggaaagctctgacaccatcgacaacgtcaaggccaagatccaggacaaggaaggaatccccccggaccagcaacgtctcattttcgccggaaagcaacttgaggacggccgtacccttgctgactacaacattcagaaggagagtactcttcacctcgtcctccgtctccgtggtggcatgcagatcttcgttaagacactcaccggcaaga

SEQ ID NO: 164521 - DNA, 279 bp, Glycine max
  unsure (1)..(279): unsure at all n locations
tacatacattcccctaaccaagttttaagtttttntcaacagaatggaagcaaccaacagaagctcttcctccacttcctcttcctctgattgctgctcttccgagtccaaccccaacaagcccgacagaatcaaaggcccatggagcgccgaagaggatcggatcctgaccggactcgtcgaacgatacggcccacgaaattggtccctcatcagccgctacattaagggaaggtccggcaatcatgccggctccgatggtgcatcagttngccccgc

SEQ ID NO: 164522 - DNA, 283 bp, Glycine max
atttttcccggtaaagttcaaaaaccctaactccgattcactctctccgactcttacattcggattcgtaaccgaaaatcggatggagagaagtgttgattacagttcagaggaggaatgcacggaggattatcggcgtggaggataccacgcggttcgagtcggcgacgctttcaacaatggccgttacatcgtgcagtccaaactcggttggggccattttccaccgtctggcatcgttgggacactctcaattcgcattatgtagcccttagaattcaga

SEQ ID NO: 164523 - DNA, 272 bp, Glycine max
tgaagagacaaagatctttattgattgtcgccgaggatgtggaaagtgatgcccttgcaactcttattctaaataaacttcgtgctggaatcaaggtatgtgccatcaaagctcctggttttggtgaaaaccgtaaatctggtctccaggatcttgctgttcttacaggaggtcaacttatcaccgaagagcttggtttgaatcttgaaaaagtagacctggacttatttggctcttgcaagaagataacaatttctaaagatgacactgtc

SEQ ID NO: 164524 - DNA, 274 bp, Glycine max
caagacctcaagcgagactacgtcgtttcggaggagatcggccggggaagattcggcaccgttttccgctgctcctccgcagactccggtcactcctacgccgtcaaatccatcgacaaggtggcaataaccgccgccggagactccctcgacgcgcaatgcctattgacggagcccaagatcgttcagcttctctcccctcaccctcacatcgtaaacctccacgatctctacgaagacgaaaccaaccttcacatggttctcgacctctgtt

SEQ ID NO: 164525 - DNA, 275 bp, Glycine max
cacacacacacacacaaaggtcttatagttatatataccaaaccaaatcaaaagctcaacactgacccttgtatcttcttaggccagtccaatctaagagaaaaacatggatctagaactccctgctcatgctgcaactgtgaatgaatctcaacaacaaaagtttgctctacctgtggattctgaaaacaaggcaactgtgttcagattattttcctttgccaaaccccacatgagagcctttcacctatcatgggtctctttcttcgcatgct

SEQ ID NO: 164526 - DNA, 273 bp, Glycine max
atcttcttcccaaccactacgccacaactactcactcactgcagatctcaattgcatcgctgtccatggctaccatcgttagcatcaaggcccgccagatcttcgacagtcgtggcaatccaactgtcgaggtggatttgacttgctccgatggtacttttgccagagctgctgttccaagtggtgcatccactgggatttatgaggcccttgaattgagagatggaggatctgactaccttggaaagggtgtatcaaaggctgttgacaatg

SEQ ID NO: 164527 - DNA, 245 bp, Glycine max
ctgagacaagaagtcccttcgcttctccttcttctccaaaggcaaaggtctttgagatggaagtcttaaacccaattgaaggcaagacctacaagctcccagttggatacagatttgatccaagtgatgaaattcttgctggttactaccttaggaagaggatcatggcccaaccactccctaatgacctcattcaagactgtgatgtttaccaaacagtgccttgggagctgccaggaggtggt

SEQ ID NO: 164528 - DNA, 119 bp, Glycine max
ccgattgctagaatggaatttcgatgctcagtcatctcttttaccattctcttctctcttgctcttgcaggagagagccatgtccatgcatcgctacctgaggaagattattgggaagc

SEQ ID NO: 164529 - DNA, 275 bp, Glycine max
gaaaaaggagagcgggccagaatggcttcttttgttggagccatggctattgctgacttggtgaagacaaccttggggccaaagggaatggataaaattttgcagtcaacaggtagaggacgtgaagttactgtcactaatgatggtgctacaatcttgaagtccctccatattgataacccagctgctaaagtccttgttgacatatcaaaagtacaagatgatgaggttggggatggactacctcagtggttgaattggctgtgacttttagg

SEQ ID NO: 164530 - DNA, 226 bp, Glycine max
ctcggttctgccttcacaagaaaattatcgcgatcccctttttctcctaagacaagtcatggctaagggtcccgggctctactctgacatcggcaagaaagccagggatctgctgttcaaggactaccacagtgaccaggagttcacgatcaccacctagtcacccactggagttgctataacagcatcaggaaccaggacaagtgaactggttgtggctgaagtc

SEQ ID NO: 164531 - DNA, 270 bp, Glycine max
aatcccaataacagtaaccgtttttccttcttcactccctcactctcttccaccacgctcatggcccctgctcacaaggtcctggttcccatcgccgacggcaccgagcccatggaggctgtcatcaccatcgacgtcctccgacgctccggcgccgacgtcaccgtcgcctccgcctccgacaacctcgccgtccaagctctccatggcgtcaagatcatcgccgacgctcctgtccgagacgtcgctgccacctcctttgacctcgtc

SEQ ID NO: 164532 - DNA, 281 bp, Glycine max
tgccagtagtcatatgcttgtctcaaagattaagccatgcatgtgtaagtatgaactaattcagactgtgaaactgcgaatggctcattaaatcagttatagtttgtttgatggtatctactactcggataaccgtagtaattctagagctaatacgtgcaacaaaccccgacttctggaagggatgcatttattagataaaaggtcaacacaggctctgcctgttgctttgatgattcatgataactcgtcggatcgcacggcctttgtgccggcgacgc

SEQ ID NO: 164533 - DNA, 282 bp, Glycine max
cagagatgagcttgaacaattgctggatgatgatgatgatatggctgacctgtacctgtcaagaaagtccggttcagcatcaccagttagtggatcaggtgctgcaaattggtttgctgcctcccccaccataggatcaaagatatctagagcaagtagagcaagtttagcaacagttcgtttagatgaaaatgatgtggaagagcttgaaatgttacttgaggcttatttcagtgaaatcgaccacacattgaacaaattaaccacactgcgagagtacat

SEQ ID NO: 164534 - DNA, 283 bp, Glycine max
atcgatcatcacttcacttcactaatacatcatggcagacgagacccagaacaagtatgagagctctgaggttgaggtccaggatcgtggtgtttttgactttctcggtaagaaaaaggatgaagaagacaagcctcatcctcaggaggaggtcatcgccaccgagtttcaaaaagtcactgtctcagaccaaggagagaacaagcacagcctcttagaaaagcttcaccgatctgacagcagctctagctcttcaagtgaggaggaatgagaagatggagag

SEQ ID NO: 164535 - DNA, 258 bp, Glycine max
gttggagtcagcgaagaatatgtattctagagattcgtggggtggaccgttggagataaaagtgacggactcggcgacggtggacgagcggatcggaacctgcaggacgttgacagggcagcgctgtcgcgtcccttggatgagacgcagcagagctggctccttggccccggcgagcagaagaagaagaagtacgtcgatctcggctgcatcatcgtcagccgcaagatcttcaagtggagattcggcacaatcctc

SEQ ID NO: 164536 - DNA, 278 bp, Glycine max
gcagactagtatccgatcctctgtcctctcgaagctttcatcgttcaacatattctcaccatctcagtcatgggcctgctatcttgttttaggtctaccgtcctgagaaaatgttccaaaggaagctctggcatgtcaagattcctgtatacgaacaattttcaacgaaacttgatttcgtctggtggcaatgaatcgtattatgggtattttaacaggagatcatacacttcactttatatgggaactggaactgtgggtgggattacaagtgctag

SEQ ID NO: 164537 - DNA, 275 bp, Glycine max
  unsure (1)..(275): unsure at all n locations
tcgtggtgaacaagtgaggcgcanattgcagatttgagggaggcacgctatagattagaagggaaagactgctacctgtttaagataagtgaagaagtggtggtagatgccactgataaagggaatatagctcggctgattaatcattcttgtatgccaaattgctatgccaggatcatgagtgttggtgacgacgagagccggattgtactcattgctaagactaacgtggttgccggtgatgagttaacgtatgactacttgtttgatcctga

SEQ ID NO: 164538 - DNA, 276 bp, Glycine max
caaaaagaaagaatcccaggcgaggagaaagatggaggggaaggagcaggatgtgtcgttgggagcgaacaagttccccgagagacagccaattgggacggcggcgcagagccaagacgacggcaaggactaccaggagccggcgccggcgccgctggttgacccgacggagtttacgtcatggtcgttttacagagcagggatagcagagtttgtggccacttttctgtttctctacatcactgtcttaaccgttatgggagtcgccggggctaa

SEQ ID NO: 164539 - DNA, 282 bp, Glycine max
cacccacagtttcgtggagatcactcaaaacgacacagagaaagcatcgaaggtgctgctgtcggttctctcgcttgcgctccagttccgatcaccaccacagggttggagctggggcaatttccaccagagctaaactcaccggcggtgtttcggtgtgtgaaagtgagtgcaatggacgcaccggacgagcgttacgcgtatcaaaccgcagtgaacataggagggcacgtcttcaagggaattctctacgaccaaggaatggacggtccttatgcgggt

SEQ ID NO: 164540 - DNA, 276 bp, Glycine max
gtcgaaatagggaaaggaagcaaggtgaaatatgaacttgacaaaagaactggacttattatggttgatcgtatactttactcatcagttgtttatcctcacaactatgggttcattccacgtactatttgtgacgacggtgatcccatggatgtcttggttattatgcaggagccagttcttccgggttgctttcttcgggccaaagctattggtctcatgcctatgattgatcagggtgagacagatgacaagataattgctgtctgtgctgat

SEQ ID NO: 164541 - DNA, 275 bp, Glycine max
tcttcttctacatccactgcacaattgccacatgaatcattagttagggtttattctccaagaaaagcaatgagtgcgtccaggttcatcaagtgtgtcactgtgggtgacggtgccgttggcaagacttgcatgctcatctcctacaccagcaacacttttcctacggactacgtgccaactgtctttgacaatttcagtgcaaatgtagttgtggatggaagcactgtgaatcttgggttgtgggatactgctggccaagaagattacaatag

SEQ ID NO: 164542 - DNA, 278 bp, Glycine max
accctcgagccacactgagaggaagagggagtgagagtgatcttcgactgctaccttctctcagaaatgggtacgttcaggtttcaccagtaccaggtggtctggaaggctctcccaacggaagcagatcagcatccgaagatctaccgtatgaagctctgggccaccaacgaggttcgcgccaagtctaagttctggtatttcttgaggaagctgaagaaggtaaagacgagcaatggtcaagttcttgctatcaacgagatttttgagaagaaccc

SEQ ID NO: 164543 - DNA, 286 bp, Glycine max
gatgagatcatattcaatactagtctttcttagtttctttctcttacctcaccaaaaaaacaagaagatgaatggtcagactcggaggatttctatttagtaaaaatctttcttagtttctttcatatgcactccatagttgaaggtggaagctaaggtattattatggcttatcaagtgttggtgatttgtgtggtctccagcatagtgtttgcatacatagtatggagaaaagacaggtagaaaaagcttccaccgagtccaaagggacttcccatcattgggc

SEQ ID NO: 164544 - DNA, 280 bp, Glycine max
cgacgaagcatatggttgcctggttggttaaacgctgttaatgagaatagtacttctctattcttaacaatagggcctggagacttcttggttcatcatgctattgctcttggtttacatacaactacattgatcttagtaaagggtgctttggatgcgcgtggttctaagttaatgccagataaaaaagattttggttatagttttccttgcgatggcccgggacgaggcggtacttgcgatatttcggcttgggacgcatttcatttggcagttttct

SEQ ID NO: 164545 - DNA, 278 bp, Glycine max
gcagactagtatccgatcctctgtcctctcgaagctttcatcgttcaacatattctcattgctccagtcatgcggctgctatcttgctttaggtctaccgtcctgagaaaatgttccaaaggaagctctggcatgtcaagattcctgtatacgaacaattttcaacgaaacttgatttcgtctggtggcaatgaatcgtattatgggtattttaacaggagatcatacacttcactttatatgggaactggaactgtgggtgggattacaagtgctag

SEQ ID NO: 164546 - DNA, 275 bp, Glycine max
gaaaaccttcgggttctcatttacaagcagtgtctaccagttgtctcgtgctcagacatccttgttatcgcagcacgtgaagctgttcgccaattaggaggccctgattttgacgtgccactgggaagaaaagacggtctaggaccaaacgccaccgcgccggacaacctaccggcaccattcttccgaaccgacgatcttctgagaggattcggaaatagaggtttcgatgccaccgatgtggtcgctctctccggcgcacacacctacggtcg

SEQ ID NO: 164547 - DNA, 278 bp, Glycine max
ggtcatcgttgggatctccatacgccggatctgctaaaatacgcttgatccatatgggcctcctcgaccacttgtgggacgacaccgtcgccggcccaaggccggaaaacggtctcggcaagctccgaaaacaccacaccttcactttccgacctagctccggcaaggaaacggagggcgggagcgtgagatcgtacggagacgaatcgtcggaggaagccacgagagtgacgcgtagtatcatgatcgtgaaaccgcccgggtaccagagtggatcg

SEQ ID NO: 164548 - DNA, 293 bp, Glycine max
tcggctcgagcacccacagtttcgcggagatcactcaaaacgacacagagaaagcatcgaaggtgctgctgctcgttctctcgcttgcgctccagttccgatcaccaccacagggttggagctggggcaatttccaccagagctaaactcaccggcggtgtttcggtgtgtgaaagtgagtgcaatggacgcaccggacgagcgttacgcgtatcaaaccgcagtggacctatgagggcacgtcttcaagggaattccctacgagcaaggcatcgacggtccgtatgccggtg

SEQ ID NO: 164549 - DNA, 270 bp, Glycine max
ggaaaatcaatgcttccgtagctagaaggaatttggggtacttgtcctgtgcgacaccgaaccccattgacgattgttggaggtgtgacccgaactgggagaagaaccgccagaggctagcggattgtgcgattggtttcgggaaaaacgccatcggaggaaagaacggaaaaatctacgtggtgaccgattccggcgacgacgatccggtgacaccgaagccgggaaccctccggtacgcagttattcaagacgagcctctctggatca

SEQ ID NO: 164550 - DNA, 270 bp, Glycine max
gcaggacccagacagcaaagttgcctgcgaaacatgcaccaaaaccaacttggtcatggtcttcggagaaatcacgaccaaggccaacgttgactacgagaagatagtgcgtgacacctgcaggaacatcggcttcgtctcatatgatgtgggactggatgccgatcactgcaaggtcctcgtcaacattgagcagcagagccctgatattgctcagggtgtacacggccaccttaccaaaaaacctgaagaaattggtgctggtgacca

SEQ ID NO: 164551 - DNA, 273 bp, Glycine max
accgagcagccacacctcccgcagcagccatggttctcaaaactgaactatgccgattcagtggtgccaagatctacccaggaaagggcatcagatttgttcgtggtgattcttaggtttttctgtttgctaactcaaaatgtaagatgtatttccacaatcgcctgaagccttcaaagctcacctggactgcaatgtacagaaagcaacacaaaaaggacattgctcaagaagctgtgaggaagaggagacgtgctgccaaaaagccttact

SEQ ID NO: 164552 - DNA, 280 bp, Glycine max
aagctgccgatactctactggtactgttatgtatattcaaggagagagatctgataaggcttctttggctggccgagatgacaaagcatccactatgtatggtcaggtgtctcatgctgctgagcccaacagtactccagagtcatcacctgtagccacaaatgatgatggtttagagggtgctgggtttgtgtcaaacaggaataatgaagaggttgatgatgacgatcccttctcaaagcgaagacaaatggaacttggagatgttgacatcactcca

SEQ ID NO: 164553 - DNA, 276 bp, Glycine max
ccgccattgaattcttcttccatttctcttttttctgcatacccatttcgtttttcttcccaaatggccctttcttgctccaaagttttaagcttttatctctcgcccgttgtgggtggtggtgatgttccgaaaaagctcactttttcttcttttttgggtctttctaagggtgttggtggaagcaggagctcgagggtgtgtgctgcttcaaatgcacccgcaccactcgctggggtcatatttgaaccatttcaagagctcaagaaggattat

SEQ ID NO: 164554 - DNA, 269 bp, Glycine max
gctgattggttccaaaacaatcgtgatctcatgccaataaagtcccagtttgatcatcttattcgggaaggctcgttagaatggaggaacttgtgtgaaaatcagacctatagggagcgattccctgacaaacattttgatcttgaaacagtcatccaagccagaatacgccccctttctgaggttcctggcaagtccttcattggatttttccacccagaaggaatggatgaacggagattcgattttcagcatggggccatgtcttt

SEQ ID NO: 164555 - DNA, 274 bp, Glycine max
ggcttccttaagctccttagtgctgctccttgcagctctaattctatcccctcaagttcttgcaaactatgagacccccccagtgtacaagcctcccactgagaaaccaccagtttataagcccccagttgagaagcctcctgtttacaagcctccagttgaaaagcccccagtttataagcctccagtagagaagccaccagtgtacaagcccccagttgagaaacctccagtttacaagcccccagttgagaagcctccagtgtacaagccc

SEQ ID NO: 164556 - DNA, 271 bp, Glycine max
tgaattcttcactttgatcatcatcttcttcaattccagcaaggatgtcacagcaaggcgaatcatcggacccgaaatcggggaagaaggacttctcgaccgcgattctggaacgtaaaaagtcgccgaaccggcttgttgtggatgaggctgtcaacgacgacaactccgtagtgacactgcacccccaaaccatggaaaagcttcagcttttccgaggggacactatccttatcaagggtaagacacgaaaggatactatttgcatagc

SEQ ID NO: 164557 - DNA, 138 bp, Glycine max
gaaggaacctcctctggttacagcaaacactgttctttcaatcttggccatggattacccggttgataaaatatcatgctacatcttctgatgatggagcctcaatgtgtacatttgagtccttatcagaaactgcag

SEQ ID NO: 164558 - DNA, 266 bp, Glycine max
cgacgaagcatatggttgcctggttggttaaacgctgttaatgagaatagtaattctctattcttaacaatagggcctggagacttcttggttcatcatgctattgctcttggtttacatacaactacattgatcttagtaaagggtgctttggatgcgcgtggttctaagttaatgccagataaaaaagattttggttatagttttccttgcgatggcccgggacgaggcggtacttgcgatatttcggcttgggacgcatttta

SEQ ID NO: 164559 - DNA, 288 bp, Glycine max
ggagcatgctaaggaaagaggtgcaaccatatatgctgaattccttggtggaagtttcacctgtgatgcatatcatgtgactgagccgcgtcctgatggggctggtgttatactgtgcattgaaaaggcattagctcagtctggagtatcaaaagaggatgtgaattacatgaatgcacatgccacatccacaccagctggagatcttaaggagtaccaagctctaatgcattgttttggtcaaaaccccgagttaagagtgaattctacaaaatctatgattggtca

SEQ ID NO: 164560 - DNA, 280 bp, Glycine max
gtcactgtggttgaaaatcgaatcctttctctctctctctctctaggcaataaagtgaatcgcatcagagaaattcaattcaatggatgcaaatcgcgagcaaattgtggacgttgggtcggtggtggaagccgtttctgctgacgacggtgacgctcctctctacagcctcgaaagtctctgcatgcgttgcggtgaaaacgggacttcaagatttttattgactttaattcctaactttagaaagattttgttgtcagcttttgaatgtcgacactgt

SEQ ID NO: 164561 - DNA, 286 bp, Glycine max
tccagtctgagattgcagttctatcgaaagtccgacaccggcatctggtgtctcttttgggttattctacagagggtaatgaaagaattctagtgtacgagtatatgccacaaggggctctcagtaagcatcttttccattggaagagccatgatctggagcccctctcttggaagaggagactcaatattgccttggatgttgccagagggatggagtatctccatactctggctcaccaaagcttcattcacagagatcttaagccgtcaaatatcttgcttgc

SEQ ID NO: 164562 - DNA, 286 bp, Glycine max
agagaagctaagaagcgcagcgtagcaaaagctcgtggaattgctagcaatggcgaggatcaaggtttacgagctgaggtagaagacgaaggctgatctgctgaatcaactgaaggacctgaaggcggagcatgccttgcttcgtgttgctaaggtcaccggtggtgcccctaacaagctttccaagataaaggtggtgaggttgaacattgcccaggttctgacggtgatttctcagaagcagaaggctgcgttgagggatgcctacaagaataagaagtacttg

SEQ ID NO: 164563 - DNA, 275 bp, Glycine max
caagaaacttaatcgatcatcacttcacttcactaatgcattctgtcagacgagacccagaacaagtatgagagctctgaggttgaggtccaggatcgtggtgtttttgactttctcggtaagaaaaaggatgaagaagacaagcctcatcctcaggaggaggtcatcgccaccgagtttcagaaagtcgctgtctcagaccaaggagagaacaagcacagcctcttagagaagcttcaccgatctgagagcagctctagctcttcaagtgagga

SEQ ID NO: 164564 - DNA, 294 bp, Glycine max
gcaattacggggttattggatggcagtggagagcttactcttgtttatgaggataatgcaggagacaggatgcttgttggggatgtgccatggcacatgtttgtatcaacagtgaagaggctacgagtgttgaagagttctgagctttctgcttttacccttggcagtaagcaggacaagataccacttgactcagcaatgaaatgagcagcggtttgaggtttttgttcacctgctgaaactcgtagactcatctaatttgaagttctggttctattgtctgatgaaaagatc

SEQ ID NO: 164565 - DNA, 291 bp, Glycine max
gagagatccatcgatcaattaatttctcatggccgatcagctcaccgacgaacagatctctgagtccaaggaagcctttagcctcttcgacaaggacggcgatggttgtattaccaccaaggaacttgggactgtgatgcggtcgcttgggcagaacccaactgaggctgagctgcaggacatgataaatgaggttgatgctgatgagaatggtaccattgatttcccagaattcctcaatctcatggcgcgcaagatgaaagacactgattcagaggaagagctgaagga

SEQ ID NO: 164566 - DNA, 286 bp, Glycine max
aaaagctcatgacattgagtctaggaacaaatccagttgttatcagcagtcacccagaaaccgcaagacaaattctttgtgggtcgaacttcgctgaccgacccgttaaagaatcggcccgaatgctcatgtttgagcgtgccattggatttgctccatatgggacttattggcgccacctacgtaaagtggcaatcacccacatgttctctccgaggaggatttctgacttggagagtctccgacaacatgtggttggcgaaatggtgatgaggatatggaagga

SEQ ID NO: 164567 - DNA, 290 bp, Glycine max
ctctaacctcgcagttccttgatctctcctctcaagatgcagacactcgtgaaaactttgaccggcaagaccatcacccttgaggtggaatcctccgacaccattgacaacgtaaaagctaagattcaagacaaggaagggatcccacctgaccagcagagacttatctttgcgggtaaacaacttgaggatggtcgcacccttgccgattacaacatccaaaaggaatcaaccctccatctcgtgcttcgcctcaggggtggcatgcaaatctttgtcaagactttgac

SEQ ID NO: 164568 - DNA, 288 bp, Glycine max
gcaattacggggttattggatggaagtggagagtttactcttgtttatgaggataatgaaggagacaggatgcttgttggggatgtgccatggcacatgtttgtatcaacagtgaagaggctacgagtgttgaagagttctgagctttctgcttttacccttggcagtaagcaggacaagataccacttgactcagcaatgaaatgaacagcggtttgaggtttttgttcacctgctgaaactcgaagactcatctaatttgaagttttggttcttttgtctgatgaa

SEQ ID NO: 164569 - DNA, 289 bp, Glycine max
ttgacatctctggatcagtacatatctagaatgaaagctgggcagaaggatatcttttacataactggaaccagcaaagaacaactggaaaactctccattccttgagcggcttaagaagaaaaattttgaggttattttcttcacggatccagttgatgaatacttgatgcaacacctgatggattatgaagacaagaagttccaaaatgtgtccaaggagggtttgaaactcgggaaagattcaaaagacaaggaactgaaggaatccttcaaggaccttaccaagt

SEQ ID NO: 164570 - DNA, 291 bp, Glycine max
aacttggactattcattcatataattaattttctctcttcttcttctttctccttttccttattcacattagatcagactatggatcgcccaacactatcatcattattttcattcctactaacacttcatctatcattatcaggggtaatttcaacaacattcactctagttaacaaatgtgactacaccgtgtggccgggaattctttccaatgcgggtgttcctcctctttcaaccaccggcttggttctccaaaccggcgcctccaccacaatcgccgcacccgcgt

SEQ ID NO: 164571 - DNA, 295 bp, Glycine max
  unsure (1)..(295): unsure at all n locations
cgatgggggagaacgagaaaggagagcgatggagcggacgantgacaaatctgacggagatggcctccaatctcgactctctccagaagcttctcctcaccaaagccgtcttcgtcgacgacgacaccttctccaaagcctccctcgccgccgaccaggcccgcaccatcaagctcctccagcaactagtccagaccttggagagagaggtcgacgccgccatcaccaccgccgcccgcgctcgctccgagaagcgccaggccgaggctgctcagaaatccgccgaatcgcgcgc

SEQ ID NO: 164572 - DNA, 284 bp, Glycine max
cacaaacccgtccctcacactctccaaaccctagcggcactacacactagttctatcgctatctcaccaagatgtcgagcgccgatcccgagcacagagaagaggaggaggcacctgccgttggcgacgacgaggacatcggagctcacgtcgcttcaatcgtcaagctcgaggaggttgctgtcaccaccggcgaggatgacgaagatgcaatcctgcatctcaaatcgaagctttaccggttcgacaaggacgggaaccagtggaaggagcgtggcgccggc

SEQ ID NO: 164573 - DNA, 246 bp, Glycine max
caaactccaaggctgttggaccctctggtgagattctgaatgtcaaacacgcctttggattggccaacatcggtgctgagttcggtgagttgcaacctaaggaaggccttgcccttgtgaatggcactgctgctggttctggcttggcctcaattgttctatttgaagccaacatcaatgctgtcatgtctgaagttatttcagcaatttttgctggagttatgcaaggacaagctcaattcactg

SEQ ID NO: 164574 - DNA, 286 bp, Glycine max
gaaagcttccaggcggagaacaaatagctgttaagaggctttcaagacggtctggccaaggcttagaggagttcaagaatgaaatgatgctgatagccaaactacaacacagacatttagttagattaatgggttgctctattcaaggggaagagaagttgctggtatatgaatacatgccaaacaaaagcttggattgctttttatttgatccagtcaaacaaacacaactaccttggacaagacgttttgaaatcattgaaagcattgcgagagcattacttta

SEQ ID NO: 164575 - DNA, 283 bp, Glycine max
gcaggacccagacagcaaagttgcctgcgaaacatgcaccaaaaccaacttggtcatggtcttcggagaaatcacgaccaaggccaacgttgactacgagaagatagtgcgtgacacctgcaggaacatcggcttcgtctcaaatgatgtgggactggatgccgacaactgcaaggtcctcgtcaacattgagcagcagagccctgatattgctcagggtgtacacggccaccttaccaaaaaacctgaagaaattggtgctggtgaccagggtcacatgttt

SEQ ID NO: 164576 - DNA, 291 bp, Glycine max
cgattctttcgttaatttaataagatgtttgggagggcaccgaagaagagcgataatacgaggtactacgaaatcctcggcgtctccaagaacgcttcgcaggatgatctgaagaaggcttacaagaaagccgccattaagaatcaccccgacaagggcggtgatcccgagaagtttaaagagctggcgcaagcttatgaggttctgagtgaccctgagaagcgtgagatatatgatcagtatggtgaagatgcgcttaaggaaggaatgggtggtggcggtggccatgat

SEQ ID NO: 164577 - DNA, 288 bp, Glycine max
gaaaatctcaaagcttcggaaatgcaaattacttcactgaaatttgaggccaataaatcatctgaaagaattcagcaattacatgatcagcttgagttggctcgtaaagacatttctacttggaaaaccaaattcaatagtgagaaaagagagagcaccaaactccatgaaagacttgcgaggttaaggactagtctatcagatcgtgaccatgagatcagggatttgaaaacagaagtatctgatgccgagcagaaaatcttcccagagaaagctcagttgaaatct

SEQ ID NO: 164578 - DNA, 282 bp, Glycine max
gcacgaatatcttgttgtttggagcgatccgagaaaaactctgtaaacatgttggtttaccaggacctccttacaggtgatgagcttctctctgactccttccgttacaaggaaattgagaatggaatgctgtgggaagttgaggggaagtgggttgttaaaggagcagttgatgtagacattggtgcaaacccttctgctgagggtggaggagaagatgagggagttgatgatgcagctgttaaggttgttgacattgttgacacattcagacttcaggag

SEQ ID NO: 164579 - DNA, 128 bp, Glycine max
acatctctggatgagtacatatctagaatgaaagctgggcagaaggatatcgtttacataactggaaccagcaaagatcaactggaacactctccattccttgagcggcttaagaagaaaaattttga

SEQ ID NO: 164580 - DNA, 211 bp, Glycine max
actatggatccgccaacactatcatcattattttcattcctactaacacttcatctatcattatcaggggtaatttcaacaacattcactctagttaacaaatgtgactacaccgtgtggccgggaattctttccaatgcgggtgttcctcctctttcaaccaccggcttggttctccaaaccggcgcctcaccacaatcgccgcacccgg

SEQ ID NO: 164581 - DNA, 281 bp, Glycine max
ctccgcccccgtggactgcgtcgtcgtcggcggaggcgtcactcgcctctgcatcgcccaggccctcgccaccaaacacgccaatcccaacgtcgacgtcacggaggcccgagaccgcgtcggcggcaacatcaccacgatggagagggacggatacctctgggaagaaggccccaacagcttccagccttctgatccaatgctcaccatggtggtggacagtggtttaaaggatgagcttgttttgggggatcctgatgcacctcggtttgtgttgtgga

SEQ ID NO: 164582 - DNA, 283 bp, Glycine max
ctttctcttcacacccccacatggatgcatacagaaagtgtgaaaatgaaagtcatggagtgggaagatgcatctgcagcttgcagatccacaaagaagtataaatgtttgattattatttagaggactctatctagttaaaattaaatagttattgtgcttttgttttattagacagttgtaaggcactgtgttctacatgtgtttgcagttgtctgcatgcattgtaattttcaaagtccgctttatcaagctgagtcagtcaaataaattattccctctc

SEQ ID NO: 164583 - DNA, 283 bp, Glycine max
ccagctcctcagtctcatcatcaacaccttctactccaacaaggagattttccttcgtgaactcatcagcaacgcctccgatgctttggacaagattcgatttgagagtttgacagataagagcaagctcgatgctcagccagagttgttcattcatattattccagacaagactaactcctcactgaccattgttgacagtggtattggcatgaccaaagctgatttggtgaacaacttgggtacaattgctagatctggtaccaaggaattcatggaagcc

SEQ ID NO: 164584 - DNA, 284 bp, Glycine max
  unsure (1)..(284): unsure at all n locations
aagaaacttaatcgatcatcacttcacttcactaatacattctctcagacgagacncagaacaagtatgagagctctgaggttgaggtccaggatcgtggtgtttttgactttctcggtaagaaaaaggatgaagaagacaagcctcatcctcaggaggaggtcatcgccaccgagtttcaaaaagtcactgtctcagaccaaggagagaacaagcacagcctcttagaaaagcttcaccgatctgacagcagctctagctcttcaagtgaggagcaaggagaa

SEQ ID NO: 164585 - DNA, 289 bp, Glycine max
gtcggagacaggaggaaggagtcgaaggacttggaagagaaggccgagatgaagaagatgtacggcctgatcgctccctacaagttgaacgggcaattcagatggatttcatctcagatgaaccgtgtgaggaacggagagctgtaccgtgtgatctgcgacaccaagggagctttcgtgcagccggctatatacgaggcttttggtttgacagtggttgaggccatgacttgtgggttgccaacattcgccacatgcaatggtggtcctgctgagatcattgtgcatg

SEQ ID NO: 164586 - DNA, 271 bp, Glycine max
tgttgatccatctcttgtttcttgctttctttcttcaccatgtcacttgctgggaaaatcaccactgaaatcggggttcatgcaaccgcacccaagtggttcaacctcttcgcaacacaactccatcatgttcaaaacctaactgatagagtgcatggaaccaagctgcatcaaggtgaagactggcatcacaacgagacagtcaagcactggccttataccatagatggtaaggctcgcacatgtctggagagtattgaatccattgatg

SEQ ID NO: 164587 - DNA, 269 bp, Glycine max
ctaatttgtgcctccgtcacttttctcagctgctgttcctgcgcgtgaacaagcctcaggtaagccaaagccatggttaagcataacaatgttatccccaacggacacttccgtaagcactggcagaactatgtgaagacctggttcaatcagccagcacggcagacaagcctacggttggctcgtcagaagaaagctgtgcagattttccccagacctacagctggacctcttagacccattgtacatggtcacactttgaaatacaa

SEQ ID NO: 164588 - DNA, 269 bp, Glycine max
gctttttgcagtcctcctttacctgcaaaaacagcaaatggctctgcttaacctcatacttgtctggttatttatcttgagtctgtgtctttactcgcgtcctacttcggcccagttaagtagacaccactatgcaaaaacttgccccaatgtagaaaccattgtcagagaagcagtcaaaaagcagtttcatcaaacatttgttacggtccctgccaccattcgtctcttcttccatgattgcttcgtgcagggctgtgatgcctcgg

SEQ ID NO: 164589 - DNA, 269 bp, Glycine max
caagattctaagagagattttgctgctctttgaagaagggtgtttgcttgattttggtgatgtcgctgctctcagatctcatccaccttaacctctcagacactactgagaaggtgatcgcagagtacatatggatcggtggatcaggaatggacctgaggagcaaagcaaggactctcccaggaccagttagcgacccttcaaagcttcccaagtggaactatgatggttccagcacaggccaagctcctggagaagacagtgaagtg

SEQ ID NO: 164590 - DNA, 272 bp, Glycine max
gtttcagtgagtgatcggtgttcacttgatccttcataagtcgtcatcatcatcatcatcatcactcgttgattgaagaagatgccgatcagaaacatcgccatcggaaggcctgaagaggccactcaccccgacacgttgaaggcggggttggctgagttcatctccaccttgatcttcgtgttcgccggttcaggttccggcatcgcctacaacaagctcaccgacaacggcgccgccactcccgccggcctcatctccgcttccatcgc

SEQ ID NO: 164591 - DNA, 272 bp, Glycine max
ctttatttgaccatgaggaagttggatctaactctgcccaaggagctggctctcctgttatgctaaatgctgtgactagggttaccaattccttcagctccaatcccaaccttctggagaaagcagcacaattaagctaccttgtatctgccgacatggcacatgcactacacccaaattacatggacaagcatgaagcaaaccatcagcccaaactacatggaggacttgtcattaaaaccaatgcaagccaacgctatgcaaccaatgtt

SEQ ID NO: 164592 - DNA, 275 bp, Glycine max
cgattctgttgtagcacatttcgaatatcacaagcacccaatcacatccattgagtggagtccacatgaagcctcttcattggcagtttcttcatctgataatcagcttacaatatgggacctttctttagaaaaggacgaggaagaggaggctgaatttaaagctaaaactaaagaacaagttaatgctcctgaagatctgcctccccaactattatttattcatcagggacagaaagacctgaaggaactacattggcacacacagattcctg

SEQ ID NO: 164593 - DNA, 274 bp, Glycine max
tcgagcttcgtttgcgtttttatcacagaggaattaacatatatatagcgcgcatggcagccacactctacgaccttagctcttcctctgggttgaacaaacttgatgagtaccttctcccacgcagttacatcaccgggtaccaagctacaaaggatgatcttactgtttatgcagctttgccaactgctccatcagatgaatatggaaatgtttccaggtggtacaagcacattgatgctttgttgatcatctctggtgttactggcgaggg

SEQ ID NO: 164594 - DNA, 254 bp, Glycine max
caagattctaagagagattttgctgctctttgaagaagggtgtttgcttgattttggtgatgtcgctgctctcagatctcatcaaccttaacctctcagacactactgagaaggtgatcgcagagtacatatggatcggtggatcaggaatggacctgaggagcaaagcaaggactctcccaggaccagttagcgacccttcaaagcttcccaagtggaactatgatggttccagcacaggccaagctcctgga

SEQ ID NO: 164595 - DNA, 270 bp, Glycine max
gtttcagtgagtgatcggtgttcacttgatccttcataagtcgtcatcatcatcatcatcatcaccgttgattgaagaagatgccgatcagaaacatcgccatcggaaggcctgaagaggctactcaccccgacacgttgaaggcggggttggctgagttcatctccaccttgatcttcgtgttcgccggttcaggttccggcatcgcctacaacaagctcaccgataacggcgccgccactcccgccggcctcatctccgcttccatcg

SEQ ID NO: 164596 - DNA, 268 bp, Glycine max
ctttatttgaccatgaggaagttggatctaactctgcccaaggagctggctctcctgttatgctaaatgctgtgactagggttaccaattccttcagctccaatcccaaccttctggagaaagcagcacaattaagctaccttgtatctgccgacatggcacatgcactacacccaaattacatcgacaagcatgaagcaaaccatcagcccaaactacatggaggacttgtcattaaaaccaatgcaagccaacgctatgcaaccaa

SEQ ID NO: 164597 - DNA, 268 bp, Glycine max
cgattctgttgtagcacatttcgaatatcacaagcacccaatcacatccattgagtggagtccacatgaagcctcttcattggcagtttcttcatctgataatcagcttacaatatgggacctttctttagaaaaggacgaggaagaggaggctgaatttaaagctaaaactaaagaacaagttaatgctcctgaagatctgcctccccaactattatttattcatcagggacagaaagacctgaaggaactacattggcacacacag

SEQ ID NO: 164598 - DNA, 268 bp, Glycine max
tcgagcttcgtttgcgtttttatcacagaggaattaacatatatatagcacgcatggcagtcacactctacgaccttagctcttcctctgggttgaacaaacttgatgagtaccttctcccacgcagttacatcaccgggtaccaagctacaaaggatgatcttactgtttatgcagctttgccaactgctccatcagatgaatatggaaatgtttccaggtggtacaagcacattgatgctttgttgataatctctggtgttactgg

SEQ ID NO: 164599 - DNA, 271 bp, Glycine max
aaagaagagtgatgtatacagcttcggggttgttctgcttgaaattatctccggcaaacgtgcacttgacagcaacaggccaagtggggagcacaatttaattgaatgggccaaaccttacctcagcaacaagcgcaggatcttccaagtcatggatgcgcgcattgaaggccaatacacgttgcgcgaatcaatgaaagtagccaaccttgccattcaatgtctgtctgtggaaccaagatttagaccaaaaatggatgaagtggtgaga

SEQ ID NO: 164600 - DNA, 270 bp, Glycine max
cacaatggcttggtcctctaattgaagtgattagattctctaccaagtcaattgagagggagattaactcagtcaatgacaaccctttgattgatgtgtcaaggaacaaggcacttcatggtggtaacttccaaggaactcctattggagtctccatggataatacacgtttggctcttgcttcaattggtaaactcatgtttgctcaattctctgagcttgtcaatgattattacaacaatggtttgccttcaaatctcactgccagca

SEQ ID NO: 164601 - DNA, 276 bp, Glycine max
cggctcgaggccatttccttggaagcaaggccattttatgggtacccaatttatctgtggacactgcctatcagaccaacattgttgcttaattagtccatgcatcttgagcaccatgagaatgagattgtgtataaaataaattatcatgtgctgtgtgttgtgcaagtactaccttctctagctagattgctagagctagaatttcaacctacctatgtgtactgataagatctgcttccctacttaaagagagcatcaccctgtgatcagtgt

SEQ ID NO: 164602 - DNA, 270 bp, Glycine max
gggattcaaggtccagtatatgttggtactggaactgtgttcaacaggcaggcattgtatggctatgatccaccagtatctgagaaaaggccaaagatgacatgcgactgttggccatcatggtgttgctgctgctgtggtggttcaaggaagtccaagtcaaaaaagaaatcaggaaaaggtctcttcagtgtgttctccaagaacaagaacaagaagcaaatgatggggaaagactatgttagaaaagggtcagggtccatgtttgat

SEQ ID NO: 164603 - DNA, 268 bp, Glycine max
aattcgtgattttttccgaaaaccctcgtcttcgaaatcagcaacaaaaacgcgaagtgtactaagcgaagcattgcagcgtgagaatggggaagaaggcaaaagggtcaaggaagggtaagaaggcatggagagctaacatcagcaccgaagagatcgaagatttcttcgagaaatcaacgaaggacgctctttctggtggctctctacaagccgtttcttccgattctctcttctatgaagacaagtccaaagatcttgctgtgaa

SEQ ID NO: 164604 - DNA, 278 bp, Glycine max
ctgccagtagtcatatgcttgtctcaaagattaagccatgcatgtgtaagtatgaactaattcagactgtgaaactgcgaatggctcattaaatcagttatagtttgtttgatggtatcttctactcggataaccgtagtaattctagagctaatacgtgcaacaaaccccgacttctggaagggatgcatttattagataaaaggtcaacacaggctctgcctgttgctttgatgattcatgataactcgtcggatcgcacggcctttgtgccggcg

SEQ ID NO: 164605 - DNA, 267 bp, Glycine max
ctggtctttgcttctcgttactcatttctcacctaactttctatacttctcagtctcagatcagaaccttagccatggcagcgttccagaagatcaaggtcgccaaccccatcgtcgagatggacggagatgaaatgactagggttatctggcagtcaatcaaggacaagctcattttgcccttcttggagttggacatcaagtattatgacttaggccttccttaccgtgatgagaccgatgataaagttacaattgaacatgcgg

SEQ ID NO: 164606 - DNA, 267 bp, Glycine max
cacagaggcgctatcccttccgttattgtgattggtgctggaatatctggacttgttgcagcacgaagtctccacgatgcatcttttacggtgactgtactggagtcacgagataggcttggtggtcgcattcatactgacttctcatttggttgtccagttgccatgggagcctcatggctacatggagtttgtactgcgaatccattggctccattgattcgtggcctggggctttcattatatcgtaccagtggtgataactct

SEQ ID NO: 164607 - DNA, 270 bp, Glycine max
  unsure (1)..(270): unsure at all n locations
ctttctttacctattctctcccgtctcaaacattttctcctccatctctcgtcagattcaagatataactcattgagcaaagtagcttataaaatttgctcaacatttattagctcatcaaacagaactacttaattagctagctagcagtatgggaagagcaccttgttgtgacaagaatggtctcaagaaagggccatggacaaccgaggaggaccagaaactcattgatnacattcagaaaaatggatatggcaattggaggacact

SEQ ID NO: 164608 - DNA, 267 bp, Glycine max
caatggtgttggtgtaagccatcctctgtaggtacttaagttttccagctgtgtgtctcctgactggaaagttcatcatccccacactaaacaaccttgctagcatttggtttatggctctatttatctccatcattttaactagcgtgctggagctccgatggagtggcgttaccatcgaagccctttggcgtaacgagcaattttgggtcattggaggtgtttctgctcaccttttcgccgtgttccaaggcctcctcaaagttc

SEQ ID NO: 164609 - DNA, 267 bp, Glycine max
gaaaactgaaacagagccaaatgaaaccgagtcagattggcgcgagttgactcgcgagtgcctcatcaacatcctctctcgactcagcgtcgaggatcgatggcgcggcaccatgctcgtttgcaagtcatggttcagcgtcttcaaggaaccctctcttcacttcgtcttcaacctcgaccctcaattcgactcgcccaccgaatcaactcgctggtggacccccgagttcgaggccaagatcgataacatgcttcgatctgtcgt

SEQ ID NO: 164610 - DNA, 268 bp, Glycine max
tttcttcttttcctttgtcaattgagaattgttcctctcttccattcgtgtacccgcaaaagaatcatgacgagttcctctgctgccgctcgcaagaatctgagtaagattgcctgcaataggctccagaaagagctcgtggagtggcaggtcaatcccccaactggtttcaagcacaaagtcaccgacaatctccagaggtgggtggttgaagtcactggagctcctgggacgccttacgctaacgagacctaccagcttcaggtcg

SEQ ID NO: 164611 - DNA, 269 bp, Glycine max
ggtgacaaaactactcacagagaaagacactcggagaccttgcaagacttcatcaatggctgtcaaagtttatattgtgtactactccatgtatgggcatgttgagaaactagcagaagaaataaagaaaggggcttcctctgtggaaggtgttgaggccaaattatggcaggtacctgagacgctgcaggatgaggtgctcggtaagatgagtgcaccacccaagagcgatgtaccagtcattaccccgaatgaactatccgaggctg

SEQ ID NO: 164612 - DNA, 272 bp, Glycine max
gtttcagtgagtgatcggtgttcacttgtctccttcataagtcgtcatcatcatcatcatcatcaccgttgattgaagaagatgccgatcagaaacatcgccatcggaaggcctgaagaggctactcaccccgacacgttgaaggcggggttggctgagttcatctccaccttgatcttcgtgttcgccggttcaggttccggcatcgcctacaacaagctcaccgacaacggcgccgccactcccgccggcctcatctccgcttccatcgc

SEQ ID NO: 164613 - DNA, 269 bp, Glycine max
ctcctcttcgccgccgtcgccaccgccgcgatggcggtggcgcgtccgacgccgacgacatcctgatccgtcaggtggtgccagatgttggcgaacgaaagaggaggacaacctgactgaacgccgagcaccacttcgcgagcttcaaggccaagttcgccaagacctacgccaccaaggaggagcacgatcatcgcttcggcgtcttcaagtccaacctccgcagagccaggctgcacgccaagctcgacgcctccgccgtccacggg

SEQ ID NO: 164614 - DNA, 271 bp, Glycine max
ctcgagccggctcacagagcaagaacactgttccaatacggaatctaaggcaaagcaaaccacacatcttgaatcatgggttcaacaggtgagactcagattaccccaacccacgtatctgatgaagaagcaaaccttttcgccatgcaactagccagtgcttctgtccttccactgatcctcaaatcagcacttgagcttgatctgttggaaatcatagccaaggctggccctggtgttcatctttcccccactgacatttcttctcagc

SEQ ID NO: 164615 - DNA, 272 bp, Glycine max
caagattctaagagagattttgctgctctttgacgaagggtgtttgcttgattttggtgatgtcgctgctctcagatctcatcaaccttaacctctcagacactactgagacggtgatcgcagagtacatatggatcggtggatcaggaatggacctgaggagcaaagcaaggactctcccaggaccagtcagcgacccttcatgcgttcccaagtggaactatgatggttccagcacaggccaagctcgtggagaagatagtgaagtgatt

SEQ ID NO: 164616 - DNA, 275 bp, Glycine max
ctcgagccgattcggctcgaggcaaaaaccatggattatttggcacgagccaaaagagaaaccgctgctcccctgattgaacctgcgtatcaacagcgtctagtggaagagagacttcttcatgagcgtgagcagcagcaagaggttgaactgagcaaacagaggcatgagggagatctcaaggagaaggagaggcttgttcgaatgatgggcaataaggaagtatatcaagcaagggtggttagtcaccgccaagcagagtttaacagattgag

SEQ ID NO: 164617 - DNA, 207 bp, Glycine max
ctctctccgagcttcactctcttcgcctctgccaaagggagtaaaatggggttctcctcctttctgggtcgtgttctctttgcctcccttttcatcctcactgcatggcagatgtttaatgaatttgatgccaatggtggacccatctcgaaagagttgattcccaaactcactgtggtgaagaaaaatttgtcctctaaattgggg

SEQ ID NO: 164618 - DNA, 297 bp, Glycine max
ctcgagccgcgagtagcaacaatgtcgaagcgaggtcgcggaggatcggcgggaaacaagttccgcatgtcgctgggtctgccggtggcggcgacggtgaactgcgccgacaacaccggcgcgaagaacctctacatcatatcagtgaaggggatcaagggtaggctgaaccggttgccgtcagcttgcgtcggagacatggttatggccaccgtcaagaagggaaagcccgatctccgtaagaaggtgctccccgccgtcatcgtccgccagcgcaagccttggcgccgaaaggac

SEQ ID NO: 164619 - DNA, 291 bp, Glycine max
ttaataacaagctagctattagttcgcctttgtagtaagtgaggtgccaatatggtgaagatagctcttggtactttggatgactcttttagcgctgcctctcttaaggcttatttcgcagagttccacgcaactctgatttccgtgttcgctggtgttggatcagccatcgcttacaacgagcttacaacagatgcagccttggatccaacggggctggtggcagtagctgtggcacatgcatttgcactgtttgtaggtgtctccgtcgccgccaacatctcaggtggc

SEQ ID NO: 164620 - DNA, 292 bp, Glycine max
cacagatctgaaacaaacaaaagaggatattataatcagccttagtcgtcaaatatggcatcaaagttgtttagagcaagccgatcatctatatcatcgtcatctgatgcacctgatgaccagaagccacctttacctccaagtgtacaatttggccggaggacttcctcgggtcgctatgtcagttactccagagatgatcttgatagtgagctagggagtaccgacttcatgaattacacagtgcatataccacctacgcctgataaccaacctatggatccatcaatct

SEQ ID NO: 164621 - DNA, 289 bp, Glycine max
tagctcgagccgacgagcttagctgtaatggcaacaagtttcagtcacgtgttttccatccaagatgttgttcgctgttggtcgttggttgttaccagtcattggagctctggaacatgactgagaacaagacgatgacactatctgctcatgaaggtcttattgcggcattggcggtttctactgtaaatggtttggttggttcagccagtcatgacaagtttgtcaagctctggaagtgagtttgttgtgtcattagtacaggttgttttttagtctgttgatattg

SEQ ID NO: 164622 - DNA, 283 bp, Glycine max
tgagtttccacattgcataccttaagtcttccgaattcgaagttaattttgatgatgggttatgaaaagggtcagatcaacattgtggtggttggtcatgtgtaccctgaggaggcaaccaccattaacgagctgaagaagcctgttgtggagaaagaagctccagggcatgccatatgagggcatgcacgcacggcctcggaggggaaccagaaaattatgttaacaaaataatctggaaccctaatgtatcagtgtcatcatcagtgtgtagtttaagcta

SEQ ID NO: 164623 - DNA, 279 bp, Glycine max
tccaagggtatggcgtgaacaccgcggccttgagcacggcgctgttcaacaacgggttgagctgcggcgcgtgcttcgagataaagtgcaccccaagatccgaggtggtgcaacccgggaagcccttccatcgtcatcaccgccacggatttttggcctcccaactttggccttcccagcgacaacggcggctggtgcaaccctcctcggctccagttcgacgtcgccatgcccatgttcctcaagatcgctcagtatggagccggcatcgtgcccgtc

SEQ ID NO: 164624 - DNA, 281 bp, Glycine max
caaagtttcttcctttctctgctctttgtcttctcttacacatttggggccttgttgagtgtgtttttgcatcacggtatggcgaaggacgttgaggttgctgagcgtggctccttctctgggaaggactaccaggaccctccaccagcaccactcattcatgctgacgagctcacaatctggtccttttacagggctcttattgctgagttcattgccactttgctcttcctctacattactgtgctcacagttatagggtacaagcaccagacggatca

SEQ ID NO: 164625 - DNA, 280 bp, Glycine max
cgtcgttgacgatggcgtttcgggtgcgaaccctgacctccgctctctctttcttctctctctcttgtccatcgcttccgccaatgtcttcttccaagagcgtttcgatgacgggtgggaaaatcgatgggttaaatcagattggaaaaaagatgagaacgtggctggggactggaaccacacctctggtcaatggaatggagacgctaatgacaaaggtattcaaaccagtgaggattacagattctatgctatttcagctgagtaccctgaattcagc

SEQ ID NO: 164626 - DNA, 291 bp, Glycine max
accagcagcagagcttgtatacgtcgccgcttcagcgtacaacatgatcattccctagaagaaccgtaaagagatctgcaaatacctcttccaagagggagtttgctttgcgaagaaggacttcaatctggcgaacacccggagattgatgtgccgaatctgcaggtgataaagctgatgcagagcttcaaatccagagagtacgtgagggaaacatttgcgtggatgcactattactggttcctcaccaacgatggaattgagttccttaggacttacctcaaccttcca

SEQ ID NO: 164627 - DNA, 278 bp, Glycine max
cgtgccctaccttcttgttcctgctcctcctgtgacattgcagcaaggcacacacctcaggctgtaaccatttcacgagtgatcggattcgctcgccatcatggggaagaagaagaagagagtttcctcgaaggtgtggtgttattaccgcgatcgcgaattcgacgacgagaagatcttggtgcagcatcagaaagccaagcactttaagtgccatgtctgccacaagaagtctctgccgctggcggcatggccatccacgtctccaggtccacaag

SEQ ID NO: 164628 - DNA, 279 bp, Glycine max
ctcataatatcaccattactgatggtattgacaaaactagtgcatctttgcactttagaaagttagcagattgccattttctcaagagacactttaagcagatgtctaatgttttgtgggtggctcctgaggacaaggcgagtctatggtcacaacttcattatgtttcgtgtaataatctggaaatgcaagacgcttatcttgtcaatctcgtaaatgtgttacgagacttgtatttgcacagtccagaggaagctcgccaattgagaaggaaagctc

SEQ ID NO: 164629 - DNA, 286 bp, Glycine max
caaaaagaaagaatcccaggcgaggagaaccatggaggggaaggagcaggatgtgtcgttgggagcgaacaagttccccgagagacagccaattgggacggcggcgcagagccaagacgacggcaaggactaccaggagccggcgccgcccccgctggttgacccgacggagtttacgtcatggtcgttttacagagcagggatagcagagtttgtggccacttttctgtttctctacatcactgtcttaaccgttatgggagtcgccggggctaagtctaagtgt

SEQ ID NO: 164630 - DNA, 281 bp, Glycine max
cgcttgtctcgtctgttgttgtcaatgtaactcaacgacgctccttggtgaggccactcaacgccgaaccccaacggaacgattctattgttcctcttgcagcaactatcgttgctcctgaggttgagaaggaagacgaagattttgagcaaatagcgaaagaccttgaaaatgcatctcctcttgaaattatggatagggccctcgagaaatttgtcaacgacatcgctattgcatttagtggtgctgaagatgttgctttgattgagtatgcacatttg

SEQ ID NO: 164631 - DNA, 291 bp, Glycine max
gcgtagaaaaggaaaataaagaaattagcgtgaaaaatgttgggtgtgttcagcagctccatagtgtcgccgccggaggagctcgttgccgccggcagccgtacaccgtcgccgaagatgacggcggcggcgctgcggaagtggttcgaggagaagaacccctccgcagtgtcggtggaggtcggagagcatgtccagctcgcttatgaccaccagaacgagtcgccgtttcagcccagatcctttgctgtgaaggatgaggtactctgcttgtttgagggagcccttgac

SEQ ID NO: 164632 - DNA, 281 bp, Glycine max
aatttggcctagacccagcaaggattgggcatgcattagaaccaggaagggtaacatttgaagacaaaatggctgtaaggaaagcaatagaggaagctaatatccctttcacttacatctccgcaaacctctttgctggatactttgctggcagcctctctcagatggggtcttttgtgccaccaagggacaaggtgcatctctttggagatggcacactcaaagctatttttctggatgaagatgatgttgcaacatatacaatcaaggcaatagatgat

SEQ ID NO: 164633 - DNA, 278 bp, Glycine max
tgcttatactggagaggttagtgctgaaatgcttgttaatttgggaattccttgggttattattggtcactctgaacggaggcagcttttgaatgaatcaaatgagtttgtgggagataaagttgcctatgcacttcaacaaggtctgaaagttatagcatgcattggggaaactcttgaacagcgtgaagctggtacaacaacggctgttgttgctgagcaaacaaaagcaattgcagctaaaatatcaaattgggacaatgtcgttttggcctatg

SEQ ID NO: 164634 - DNA, 283 bp, Glycine max
aaaaaatcgtagttggaggcgccgcactccactccactccagtcaatcacccacacacgatgcggaggaagcgaaacgtagcaccgaaatcttctgtatcccccgagcccccgctgatccaacaccaaccaaaacccgaaaatgccgctcaggaatacgaagaagaggtcgaagaggaagttgaggaagaagaggtagaggaagatgtcgaagaggaagaagaagaagaggaggacgaagaggacgaggaagaagaagaagaagaccaaaaagaccagtacca

SEQ ID NO: 164635 - DNA, 292 bp, Glycine max
caaatttctagggtttggtacagcgagataaaggaacataagacgtctcagaacgggaagctgatgccacatctagaccagcatagcaccaagcttctcaatctcactgttcttcaacgaatcgacccctttgtcgaggaaattctcatcaccgctgcgcatgtcaccttctacgagttccacatcgtcctcagccaatggagccgcaaggacgttgaaggatctctcttcgttgtcaagaggaacacgcaaccgcgatttcagtttattgtgatgaaccgtcgcagatact

SEQ ID NO: 164636 - DNA, 277 bp, Glycine max
taataattcctgtaatgtgcaccagtaaagactacagtatgattattgttacattatgctatatgattgtacttgtatatacatattttgtcccgcctttgtaaatacaattgggacactactaggattgggaagaagggtctttacatttttagtttggcaaatagatattgcaactacctttgtataaatctatttctgaagatgcaattacaactttcaagggatgatagcattttgtggcataaggattaaggaggcatacaggaccaattgc

SEQ ID NO: 164637 - DNA, 295 bp, Glycine max
gtcggaattcccctccagccgctcgagccgctcgagcggctcgagctacactatacttgtcaaccctttgagagttagaatggctgctgctattggaatccccacaatagtgtgtcccaagtcgtctggcgaacagaggatgccagtggttggaatgggatctgcccgtgacttcacatgcaagacaggcacgaaggagtctatcattgaggccgtgaaacagggttacaggcacttcgacactgctgctgcttatggctctgaacaggctctcggtgaagctctcaaggaagct

SEQ ID NO: 164638 - DNA, 277 bp, Glycine max
gccgacgacaccgccggaaggcaattccttttgcgtttcttgaggatattcatcagaagttcgtgcggacttacggacgcgccgttcactccgctcagccttacgggatgaacgaggagttctctagggttttgagtcagcaaatggagtattactccagtgatcctaacgccgataggatcaatcgtctcaaaggtgaaatgtctcaggtacggaatgtcatgatagaaaatattgacaaagttttagatagaggtgatcggttggaattgctggt

SEQ ID NO: 164639 - DNA, 278 bp, Glycine max
gaagttttggcgctgaaagaaaaatggcggaagagtacgaggaaggtggtgacgttgaagaagagttctccgtttggaagaagaacactcctctattgtacgatttcttcatttctcaccctcttcaatggccttctctcaccgttcactggcttccctcctctccccaagctcactcccatccttccttcaatctccacaaacttcttctcgtccatcacacttccgaatccgaatcaaacttcctcatgctcgctgacgcatccctccccgtagac

SEQ ID NO: 164640 - DNA, 277 bp, Glycine max
gtttctttctctctcatgttgtagtatctcactagtgtttttcattcctaacccaaccacacaaacatcaccatcgaacaatgccgacggggttaccggcggcgaattccttagtggcgccggacgaagaggggtgggtgtgggggcagatcaaggcggaggcgcgccgcgacgccgagtcggagcctgctttggcgagctagctctagtcgacgatcctctcgcagtcgtcgctcgagcgtactctgtcttttcacctcggaaataagtctgttcc

SEQ ID NO: 164641 - DNA, 281 bp, Glycine max
caactcacgtgatcaccctggcatgattcacgttttccttggacacagtggtgcccatgacatagagggaaatgaacttcccaggttggtgtatgtttctagagagaaaaggccaggctaccaacaccacaaaaaggctggtgctgaaaatgcactggtgagggtgtctgcagttctcacaaatgctcccttcattctcaatcttgactgtgatcattatgtgaacaatagcaaggctgtacgggaagcaatgtgttttctgatggatccagtagttggca

SEQ ID NO: 164642 - DNA, 278 bp, Glycine max
tgaccaaatagctttctttaagagcttttccgcttcgatgcttaaaatgggaaacattggtgtgctaactgggaagaaaggagaaatcagaaaacaatgtaactttgttaacaagaaatctgctgaacttgatataggtattgtggcatccgaatcagaggagggtgtggttagctcaatataaatgaattaggaagagttttatatacactgggaaattatgtgaatgaagatcactaataaagaagctataggcacattattcgtatcaagtgccc

SEQ ID NO: 164643 - DNA, 274 bp, Glycine max
ctaacactcattaattgcaagaatggcacttcgttgcttggtgatgtccctttctgttctcttcactcttggtcttgcgagagaaagccatgccagacacgaagatttttggcatgctgtttggccaaacactcccattccaagttcattgcgagatcttctaaagcctggccctgcaagtgttgaaatcgatgatcaccctatgcaaattgaagaaacacagtacccgaaaaccttcttctataaagaagaccttcatccacgcaaaacaatg

SEQ ID NO: 164644 - DNA, 275 bp, Glycine max
gttgcgtcaattgatgttagcattgggaacatttacatgtcactttgtcgatttgatgaggcgattttctcttaccagaaggcactaactgtgtttaagtctgccaagggtgagaaccacccttctgttgcatctgtttttgtgcggctggctgatttgtaccacaggactgggaagcctcgtgagtcaaagtcttactgcgagaatgctcttaggatttactcaaagcctgttccggggaccactgcggaggagattgccggtggattgacgga

SEQ ID NO: 164645 - DNA, 277 bp, Glycine max
cccgagccgaatcgcctcgagccgctcgagccgctcgagcggctgcaccgaagctctagcttgacgcagcgaatcacaatggcgtcaggcttgaagaagcatttgaagaggcttaatgccccaaagcattggatgcttgacaaactgggtggtgcatttgctcctaagccctcatctggaccacacaaatccagggaatgcctgccactcatactcattttgcgaaaccggtgaagtatgctctgacataccgtgaagtcattgctattctgatgca

SEQ ID NO: 164646 - DNA, 274 bp, Glycine max
gccgagcttaggagaatagaagaggagcaggaggcatcaccattgccacaatggttaaaggtcgccaaggagaacgtgtaagactctacgtcaggggttcaattcttggatacaagaggtccaagtcaaatcaatacccaagcacctccctaatccagattgagaatgtaaactctaaggacgaagttgcgtggtactgtgggaagcgcatggcttacatctacaaagcgaaggtaaagaagaacggaagccactatcgctgcatttggggtaa

SEQ ID NO: 164647 - DNA, 272 bp, Glycine max
ggctgttgcctgtcttctgtttggagggtcaagaaagaatttgcctgatggagtccggttaagaggtgatatcaatgtattgcttctgggtgatccatctacagcaaagtcacagtttctgaagtttgttgaaaagactgcccctattgctgtttatacttctggaaaaggctcatcagcagctggcctaaccgcttctgtaatccaagatagcggcactcgtgagttttatcttgaaggaggggctatggtcttggccgatggaggtgttg

SEQ ID NO: 164648 - DNA, 274 bp, Glycine max
cttccactgagaaaaaaaagccaacaaaatatgaccgagtttcaaaaagtcactgtctcagaccaaggagagaacaagcacagcctcttagaaaagcttcaccgatctgacagcagctctagctcttcaagtgaggaggaaggagaagatggagagaaaaggaagaagaagaagaaggaaaagaaagggctgaaagagaagatcgaggagaaaatagagggtgatcatcatcatcacaaggatgaggacacaagtgtccctgttgagaaagttg

SEQ ID NO: 164649 - DNA, 265 bp, Glycine max
gcaagagtatccgaatagtcaatgatgttgcatagcagattgtgatggcaactttatatggtgatagtcttaggcttcatcaggtattggctgactttttacttatttccatcaatttcactccaactggaggtcaggttgttgtagcaggcactctaaccaatgaacagttaggcaaatccgtccatctcgttaagttagagctcagcataacacatggtgggagtggggtaccagaagcattactgaaccagatgtttggcaa

SEQ ID NO: 164650 - DNA, 272 bp, Glycine max
gggagaaagggtgtgagaatggagagcaaagaggaagatgtaagggttggagcaactaagttctcagaaaggcaaccaattggtacagcagctcagggtgacaaggactacaaagaaccacccccagcacctttgtttgagcctggtgagctaaagtcatggtccttctacagagctggaattgctgagtttgtggccactttcttgttcctctacattaccatcttaactgtcatgggtgtcaacaggtcaccctccaagtgtgcctctgt

SEQ ID NO: 164651 - DNA, 241 bp, Glycine max
ccatgaagttggtgacactagtggatcggccctcggagttaattacaacacctgggcctctgggaaaactttcacagttggtgacactttggtgttcaagtatgactccactcatcaagttgagccggttgatgagagtggatacaacagctgcagctcaagcaacagcatcaagaactaccaagatggaaactccaagattgacttgacttcaccaggcaaaaggtacttcttgtgcccc

SEQ ID NO: 164652 - DNA, 267 bp, Glycine max
tcgtacttctatggaaactacaaaccccgcactgaccttccttctgttgtggagaagtacatcaatggggaattggaactggagaaattcatcactcacacagttccattctctgagattaacaaggcttttgattatatgctgaaaggggagtccatcagatgcatcattcgtatgggggagtaaatctatcaaaccaatgatgacatggtccctgtgagggactgagttctctttctagttgtgaaagtgaaaagaagaaaataa

SEQ ID NO: 164653 - DNA, 269 bp, Glycine max
gcctgggtgactctgcccccgccaacgaacccatcaaaaccttattcacttcttcccaattccgagacaccacatggtccttcccttctgccccttccgcccctgtcacttgcaactatggttctgtaatgccttcatggtttgacattcttgagattcccgtggcagctgattctccaaatgacgagagtagtttacttaaagctgttcgaaatgtgcatgctactatagacaaggaaatagctgctggcatcaaccctaacaacata

SEQ ID NO: 164654 - DNA, 263 bp, Glycine max
cacctggttaaggatagagtatagcatggcacagtctagttgcaaaactttggtgcagtggttggtagcagcattgctcattgccttgttgggtggtgcacaagctgttgcaatatgtaacatagactcaagtcaattaaacttgtgtcgtgctgcagttactggtcaaaaccctccaccaccggatgagacatgttgtgcagttgttcgccaagccaatttgcgttgcctctgcagttaccagtctaccctaccttcatttg

SEQ ID NO: 164655 - DNA, 268 bp, Glycine max
cacggttcaacttcagcagccgcgcctctaacttgtagcagcgatacctcttctcttatcactaaaaaatgaccaagagaaccaagaaggccggtattgttggaaaatacggcacccgatatggtgctagtttaaggaagcaaatcaagaagatggaagttagtcagcacagtaaattcttttgtgagttctgtggaaagtacgctgttaagaggaaggccgtgggtatttggggctgcaaagattgtggaaaagtgaaggctggagg

SEQ ID NO: 164656 - DNA, 234 bp, Glycine max
gggaaagactttgatgttgaatgacagccttcaaaacccagatgcactccaacatgttctgaggcaagctgaggagtatctgggcacagtgcctcctgaaactccctactcagaatttgagcacaagttccaggagattggtttggagagagggtgcggtgacaacgcagagcgtgttcttgagtcaattcaacttctcttggatcttcttgaggcccctgacccttgcaccct

SEQ ID NO: 164657 - DNA, 269 bp, Glycine max
ctcaatccctgtgagtgctttctttctgtaactaacttgttccctcggtaaccctaatcatcaactcaagcagtgaatgaatctgtggacggacgagaactcctcggtgatggaagccttcatgtcgtcctccgatctctcctcaatctggccctcgccggccccgccgcaatccacggcggtcttcaatcaggacaccctccagcatcgcctgcaggccttgatcgaaggcgccctagagacctggacctacgccatcttctggcagt

SEQ ID NO: 164658 - DNA, 266 bp, Glycine max
caaactcacggtagggcagagagagagagagagagagagagagagagagcgaatgagagtgtgtcctatcgcggttcatggtggcgctggtgtcgaccctaatctcccactcgagcgccaagaagaagcgaaacaacttctcacgcgctgtctcaatcttggaatctctgctctaaattctaatcttcccgccatacatgtcgtcgaacttgtggtgagggaattggaaacggatccgctgttcaattcgggccgtggatctgccc

SEQ ID NO: 164659 - DNA, 268 bp, Glycine max
cagaaagacggtttccctagtatagttaacagcatggagagggaggaagatgttaaggttcccgcacagaacttctcggagaggcaagcactgggtacaggagctaagagtgacaaggactacaaggaggcaccaccagcacccttgtttgagccaggggagttaaagtcatggtctttttacagagctgggatcgcagagtttgtggccacattcttgttcctctacatcactgtcttgactgtcatgggtgccaacagggcaccca

SEQ ID NO: 164660 - DNA, 265 bp, Glycine max
ccagcattgaattcaaaaactaagttcatttcttgtgctttgctttattcctcaaaaccaaacatgtcgaacacatgcggcaactgtgactgcgctgacaagactaactgcaccaagggaaacagctatggtgttatagtagagactgagaagagctacatcgagactgttgacatggatgttccagcagctgagcatgatgggaagtgcaagtctggcactaactgcacttgcacggactgcacttgtggccattaaggcatat

SEQ ID NO: 164661 - DNA, 268 bp, Glycine max
tccattctcacttctcaaattgaatcgaacgaattcacaaaccctacttttcgaggatgggtcagatccagtactccgagaagtacttcgatgacacttacgaatatagacatgtggttcttcctcctgaagtcgcaaaactgcttcccaagaatcgtcttctctccgaaaatgagtggcgggcaattggggttcagcagagccgtggctgggttcattatgcaattcatcgccctgagccacacataatgctcttcaggaggccttt

SEQ ID NO: 164662 - DNA, 268 bp, Glycine max
  unsure (1)..(268): unsure at all n locations
ttgcgagttaggttctgcacgctctgcttccagcgagtgttctttcttcgtttcaacaccttaatttgcacacgctgcttctaccgcntgagaaatggcacaagaaacctttctattcacatctgaatctgtaaacgagggtcaccccgacaagctgtgcgaccagatctctgatgcagtgctcgatgcgtgccttgaacaggaccctgacagcaaggttgcctgtgagacatgcaccaagaccaacatggtcatggtctttggagag

SEQ ID NO: 164663 - DNA, 282 bp, Glycine max
ccttgttcttgctttgaagctcttgtgtaaagttttcctccagttaatccaagacctatcacaattgccaggcttcaacaaattatggttggctgtactaagtcggttagaaatttatatgaaggtgaaagttaggggaaggagaagtgagaagcttcaggagcttgtgcctgagcttcttaagaacactttgcttgttatgaaagcaggccgtgtactagtccagagcaatactgtagatggaagtagtttatgggaactgacttggctgcatataaataa

SEQ ID NO: 164664 - DNA, 279 bp, Glycine max
atggtttccttcaagcatggaatgagtcattggatactctcagtgtatcgtcatgtagttgccgctattataatagtcccttttgcacttgtccttgaaagaaaaataagaccaaagatgactcttcccatcttcctgaggatagtggcacttggtttccttgagccagtgctagatcagaacttgtacaacatggggatgaaaatgacctcaacaacgtttgcatccgccactgttaatgtcctcccggccattacttttgtaatggcactcgttttc

SEQ ID NO: 164665 - DNA, 277 bp, Glycine max
  unsure (1)..(277): unsure at all n locations
ctgaaaccaaaactgaaaataaaaaacaataccataacatggcttcttccaccatcacctcctctaccctaanatcanccccttcatctctcttcaacaaatcatcatccccttccttccatgccacccctactctccgccccctcgcgccacgcgcctccatgtccgcctcagcgccgccctacgacttcggatcgttccggttcgatccgattagagagtcgattgtgtcgcgcgagatgacccgcaggtacatgatcgacatggtcacccacgc

SEQ ID NO: 164666 - DNA, 272 bp, Glycine max
ctttcactcttcttcgtctcaaatctcttcgttccttcgattcgttccatttcttccaaaatgcccaaagacccagttcgcgttctcgtcactggagctgcagggcaaattgggtatgctcttgtccctatgattgctagcgggagtgatgttgggtcctgaccagcccgtgatcctccacatgcttgacattcctccggcagcagagtccctgaatggggttaaaatggaattggtggatgctgcattccctcttcttaaaggtgttgttg

SEQ ID NO: 164667 - DNA, 273 bp, Glycine max
acttcctcaccgattgctagactggaatttcgatgctcagtcatctcttttaccattctcttctctcttgctcttgcaggagagagccatgtccatgcatcgctacctgcggaagattattgggaagctgtttggccaaacactcccattcccactgcactgcgagagcctctaaagcctctccctgcaggtgtacaaatcgatgaactccctaagcaaattgatgatacacagtacccaaaaacattcttctataaagaagaccttcatcca

SEQ ID NO: 164668 - DNA, 279 bp, Glycine max
  unsure (1)..(279): unsure at all n locations
tgacaatctgcggcagcagancattacaacaaatgcttcgaatattaacgaccaggcaatcagctcgagctcttctcgccatcagtgattatttctcacggctgcgagctctgagttctttgtggcttgctaggccaagggagtgaagcatttcacagctccattagtggacttctttcatacctgacccccttaaagactgatcgttgaatcttgtgctctgaatgagttcaatggaagctggtgtcttttgacaatgaattcctctagaagcctagt

SEQ ID NO: 164669 - DNA, 275 bp, Glycine max
ctcgagccgttccggcgtgtggtccaccatcaagcctttcctcaatggtggagcctccgcgcatgctcgccacctgcgtcattcaacccatcgatatgatcaaggtgaggattcaacttgggcaaggatcagctgcgcaggtcacttccaccatgcttaagactaccggtttcgctgccttctataagggtctatctgctggattactcaggcaggctacatacaccactgcccgtcttgggtcatttaaaatcttgacggccaaagctattgag

SEQ ID NO: 164670 - DNA, 275 bp, Glycine max
ttaatttccaatggccgatcagctcaccgacgaacagatctctgagttcaaggaagcctttagcctcttcgacaaggacggcgatggttgtattaccaccaaggaacttgggactgtgatgcggtcgcttgggcagaacccaactgaggctgagctgcaggacatgataaatgaggttgatgctgatgggaatggtaccattgatttcccagaattcctcaatctcatggcgcgcaagatgaaagacactgattcagaggaagagctgaaggagg

SEQ ID NO: 164671 - DNA, 198 bp, Glycine max
ggaagaagtcagtgaatattaccaaaacagaggttgcttcaatgagctcatatctctcatggagagtggtttagggttagaacgggcacatatgggcatctttactgagttaggagttctgtacgctagataccgccctgagaagcttatggagcatatcaaactattctcaacccgcctcaatattccacacaacat

SEQ ID NO: 164672 - DNA, 275 bp, Glycine max
aaaatggtaaccattgtgggttcttacaatgtcactcctaatcaaccaactccaaaggatccttcatggctatccgatagtgaccaaatcggtgtcctaggtcatgtagccattgtctacatatacgaagcaactcccaacagcaacaccattgagagattgaggaactctcttagcaagcttttggtgtactactatcctttcgctggcagattcagcttgacaaaaagtggtcgcatagaagtggattgtaacgcaaagggagtgacattgat

SEQ ID NO: 164673 - DNA, 276 bp, Glycine max
caggacgaccctttggtatttggatcttcaagaaagagagacccttgggatttcgtcaccatgagtctcttcggtcttggaaacagaaaccaaaaaacatttcgtccaaaaaagagcgctccatctggaagtaagggtgctcaacttcaaaaacacatagacgccacgttgggtagtgggaacttgagggaggctgttaaactgccccctggtgaagatattaatgagtggctagctgtaaacactgtggacttctttaatcaagtgaatatcctg

SEQ ID NO: 164674 - DNA, 172 bp, Glycine max
ggatgctgtcatacagagtgatgggcagaatgttgtccctgaagtttggaaagttcttgacaagatccaggagttctctgaccagattcgcaatggttcttgggttggtgctacaggaaaggctttgaaggacgttgttgcaattggtattgggggaagcttcttaggtcca

SEQ ID NO: 164675 - DNA, 272 bp, Glycine max
agatgaccaaggatttggcacttattcttcatggatccaagctgtcaagggagcattatttgaacacagaggaattcatcgatgccgtggcagccgagcttagtgcgaggctttctgcatagacttgattcaagacaagcggaaaaaagacgttagcaacaaggagcgtgcgtgcgtctgctactctcttctattcagaagaactaagaaagggaaaaaaagcattggtccttagccccgtttccttcatttgtttgttggttgggaatgca

SEQ ID NO: 164676 - DNA, 274 bp, Glycine max
tggaggaagatgattcagcttctgttcacggtgatattttcggaggcttcgatgatagcgtttctgctgttcaagacccctttgaggaagctcgtgataatgggcttggatcggttgaagcgaggtcgtggacccttgatggtgaagaccgttgcagggaccgttctcgtggtgttgttgtcgagtgtgtatagcatgttgaagattcagaagcgtgggatccaagacggtgctgttgttaaccccaccgatcaggttcttatggccaagcacc

SEQ ID NO: 164677 - DNA, 272 bp, Glycine max
gggcacgtggaatcccgtgtgaatcagcaaggaccaccttgcaaggctaaatactcctgggtgaccgatagtgaagtagtaccgtgaggaagggtgaaaagaacccccatcggggagtgaaatagaacatgaaaccgtaagctcccaagcagtgggaggaggctcgggactctgaccgcgtgcctgttgaagaatgagccggcgactcataggcagtggcttggtgcatggaaaccaccggtcccgtagcgaaagcgagtcttcacagggca

SEQ ID NO: 164678 - DNA, 272 bp, Glycine max
ctcagttactctctctctctctggagcgtcgtcgtttcgttagggcacaaaaccccttttcggatcggtggagcaaggcctcgccggcgagattcccgaggctgttcaatcagcgatcgagcaccggcgaaaagcggcgaagatgaaggttttcgtgaagcctctcaagggcacgcacttcgaaattgaagtgaacccttcggacacgctttctgaagtgaagaaaaatatagaaactgttcagggtgcagatgtctatcctgctgcacagc

SEQ ID NO: 164679 - DNA, 272 bp, Glycine max
agaagatggtgtccttgaagcttcagaagcacctcgccgctagcgtcctaaagtgcggcaagggcaaggtctggcttgatccaaatgaagtcaatgaaatctccatggccaattctcgacaaaacataaggaagttggttaaggatgggtttattatcaggaagccgactaagattcactctcgctcccgtgctcgtcgaatgaaggaggccaagagaaaggggcgtcactctggttatggtaagcgtaagggtacaagggaggcaaggctt

SEQ ID NO: 164680 - DNA, 127 bp, Glycine max
cttcttctcttgcggctagggttttagcgcacttcctctagatttaaggaagatgggtaaggaaaaggctcacatcagtattgtcgtcattggccatgtcgactcttggaaatccactaccactggt

SEQ ID NO: 164681 - DNA, 268 bp, Glycine max
cttgacgagagtgaagatgagaagaagaagcaagaagagttgaacgagaagtttgacaacctctgcaaggtgatcaaggatgttttgggtgacaaggttgagaaggttgtggtctctgaccgcgttgtagattcaccatgctgtcttgtgactggcgaatacggttggaccgcaaacatggaaaggataatgaaggcccaagctctaagggacaacagcatggcagggtacatgtcaagcaagaagaccatggagatcaaccctgaga

SEQ ID NO: 164682 - DNA, 152 bp, Glycine max
  unsure (1)..(152): unsure at all n locations
gctggaagcaaggacactgttggacagtacgaatctcacacagcatacaatcacccnggactctancgcgttgtgcatggtagggatgtctttgagcgagaattcaacattggctcccctggagctgatcaaaccatttacttgcccccaca

SEQ ID NO: 164683 - DNA, 265 bp, Glycine max
ggcggggctacccgctgagtttaagcatatcaataagcggaggaaaagaaactaacaaggattcccttagtaacggcgagcgaaccgggaaaagcccaccatgaaaatcggtcgccctcggcgtccgaattgtagtctggagaagcgtcctcagtggcggaccgggcccaagtcccctggaagggggcgccagagagggtgagagccccgtcgtgcccggaccctgtcgcaccacgaggcgctgtcggcgagtcgggttgtttgg

SEQ ID NO: 164684 - DNA, 272 bp, Glycine max
gtctccccagcttcaagtcctactacttctctgggtcgctcaagctcgggcccgtgggccagcccaagagcattcgcaccaccccgcttcttcgcagccctcaccgtccttctctttactacgtgaacttcaccggaatcagcgtgggacgtgtcctggtaccctttcccagcgagtatcttgggtttaacccgaatacaggatccggaaccataatctattcgggcacggtgataacccggtttgtggagccgcttacaacgcggtgaggg

SEQ ID NO: 164685 - DNA, 276 bp, Glycine max
aacaccctcagaaccctgtcatgagtccaccaagtggagttgccgtgaataacttcagagacccttcaactgcttggcagggaaaggatggaaaatggagggtagtaattggtgctcaaaatggtgatgaagggaagacaattctctaccaaagtgaggactttgttaattggaaagtggatcctaatcccttctacgcatcagataataccggagtttgtgagtgtccagacttcttccctgttaacatcagtggcagcaaaaatggggtggata

SEQ ID NO: 164686 - DNA, 276 bp, Glycine max
ctcgagccgctcgagccgtgctttgatgtggggatagcagaacagcatgctgttacattagctgcaggactggcttgtgaaggtcttaaacctttctgtgcaatttactcatcattcatgcagagggcttatgaccaggtggtgcatgatgtggatttgcagaagctgcctgtaagatttgcacatggacagggctggattagttggagcagatggtcccacacattgtggttcttttgatgtcacatttatggcatgcctgcctaacatggtggt

SEQ ID NO: 164687 - DNA, 276 bp, Glycine max
ctggatcccaatctgctaaggtttcccctcaggtggttgccgagcacactgtcagagcccttcagagaaccgtgcctgctgcagttcctgctgtcgttttcttgtctggtggccagagtgaggaggaggcatccgtcaacctcaacgccattaaccaggtcaatgggaagaagccatggtcactctctttctcctttggaagggcacttcaacagagcacccttaaggcatggggcggaacagaagagaatgtgaagaaggctcaggaagcccttt

SEQ ID NO: 164688 - DNA, 258 bp, Glycine max
caagaatatggacaagaatgacaggagaccagttgtaccccgtgtttgcataattggtgggacagcagctcctggttatgaaattgctaagaagattatcaaactttctcatgctgtggcagaaaaaatccctactgacactgatattggagatcttctgaaattggtttttatccctgattataatgtctctgttgctgaattggtaataccaggggctgacctttctacacatttaagcactgcaggacatgaagc

SEQ ID NO: 164689 - DNA, 273 bp, Glycine max
cgacgttgtttctcgtcgttcagccatgtcgtacgactacctcttcaagtacatcatcatctgtgacacacgcgtagggatatcgtgcctgctcctgcagttcaccgataagaggttccaaccggttcatgatctcaccattggtgtcgagtttggtgctcgcatggtcaccatcgattctcgacccattaagcttcagatatgggatacagctgggcaagagtcttttagatccatcactaggtcttactacagaggagccgcaggagcact

SEQ ID NO: 164690 - DNA, 269 bp, Glycine max
ctcgagcctcgaaaccctcttcatcttgttctatctgtgacgagcattatggcctcaagagctgtgttattgttggctatgtgtgtgcttccggcgatggttgtggccattcgcccagtaaagaaccctttttgcgtgaagggtcgtgtctactgtgacccttgccgtgctggttttgagacctcagctaccacctacattgctggtgctgagattatgttgcaatgcaagagcagggttagcaacgaggttgtgtacacgaagaaggg

SEQ ID NO: 164691 - DNA, 275 bp, Glycine max
gttaaaagcagagcatcactgaactaacaaagcaaccctatgtcgaaggtggtttgtgtcaccggagccagcggcgccatcggatcatgggtggtcctcctcctcctccagcgtggttacaccgtccatgccaccgtccaagctatcaaggatgaaaatgagacgaaacatttggaggaaatggaaggagcaaagagtcatctccatttttttgaactggatcttcttgacatcgactccattgccgctgccataaagggttgttccggcgtaat

SEQ ID NO: 164692 - DNA, 276 bp, Glycine max
tgcgtataaaaggaaaataaagaaattagcgtcaaaatgttgggtgtgttcagcagctccatagtgtcgccgccggacgagctcgtggccgccggcagccgtactccgtcgccgaagatgacggcggcggcgctgcggaagcggttcgaggagaagaacccctccgccgtgtcggtggaggtcggagagcatgtccagctcgcttatacccaccacaacgagtcgccgtttcagcccagatcctttgctgtcaacgatgaggtgttctgcttgttt

SEQ ID NO: 164693 - DNA, 268 bp, Glycine max
ctcgatttgtatatttggcttctgggaatgcagagaaggcaaggcagattctagttgaggggcttgagaatgttttgttgtcaaagccactacttgaggctttattccattttgaggctattcaacctttgccaaagcgtgttggtgtcgactttttggagtcatgggttgtcaaattcataatgcctaactcagagagtgctggtgtagcaagtccaacagagcgtgaggacctttctagtatttttctggagtttttaaatctctt

SEQ ID NO: 164694 - DNA, 259 bp, Glycine max
gtgcacagcttgaacacaccgcgtttcggagagagacgtcgcaattgggaggaggcctgcaaggtgttatcggcagataaaaaacaagccataccccaaatcacgcttttgccgtggtgttcctgatcctaagatcagaatttatgatgtttgtatgaagaagaaaggtgttgatgagtttcccttctgtgttcatctggttagctgggaaaaagaaaatgtttcaagtgaagcattggaagctgctagaattgcatgc

SEQ ID NO: 164695 - DNA, 274 bp, Glycine max
tttggatttgggggagcatttggttgattagggtttcttcggctgcgtgctgatgctcttgttttctcacagtcacacaacagcaatggcagcaatcacagagggagtgaacaacatcaacatctctgattcttacaagaagaatcgcattcaggtctccaacaccaaaaagcctctcttcttctacgtcaatctcgccaagaggtatatgcaacagcataatgaggttgagctctcagcactaggaatggctattgctacagtggttactgtt

SEQ ID NO: 164696 - DNA, 272 bp, Glycine max
tagcggctcgagtgtagatgttaaagcaattgctcgtggtaccccagggtttcatggcgcagatcttgcgaatttggtactcgttgctgccattaaagctgcagttgaaggtgcagagaaagtaacagctgcacaattggagtttgcaaaagacagaatagttatgggtactgagcggaaaacaatgtttatatctgaagagtcaaagaagcttactgcttatcatgagagcggtcatgcaattgttgcccttaacactgatggtgcgtatc

SEQ ID NO: 164697 - DNA, 264 bp, Glycine max
gcagcagaggggctaaacagagagcagtacgtgtacttggcgacctgtcggagcaggcggacggtacgaggagatggtggagttcatgcagaaggtggtggtggggtcgacgccggcgtcggagctcacggtggaggagcgcaacctcctctcggtggcctacaagaacgtcatcggctcgctgcgtgccgcgtggcgcatcgtctcctccatcgagcagaaggaggagggccgcaagaacgacgaccacgtctccctcgtcaa

SEQ ID NO: 164698 - DNA, 269 bp, Glycine max
ttgtgtatgattggaaatctttaaattcacttgatgctgtggtaaacccgaatttaaagatttccaatcatacacaatattgcaacaacaaaaagaatttaaattcgggttttccaccccatcaattcaatttaaagatatgtcctcttccattcaaaaaaaaaaaagaaaaaaaaaaaaaaaaaaagaaaaaaaaaaaacaaaaaaaacaaaaaaaaaactccaaaaaaaaaaggaaaataaaaaaagaggggggcgccgcttttttt

SEQ ID NO: 164699 - DNA, 271 bp, Glycine max
gagaaagcgagggaacggagggaaaaggataaagagagggagaagagggagaaggagaaagagcaggagaaggagagggaaagagaaagaagggatagggaaaaggataaagagagagagaggtctcggaggagtaggagtcgttccgagagagaaagagaaagagaacgggatttcgacaccagagatagcaggagatttagggacaaaaaagaggcagcggagcccgaggcagatccagaaagggatcagagaactgtttttgcttacc

SEQ ID NO: 164700 - DNA, 268 bp, Glycine max
atgccccttactgcggaaagggcatgcctgtgtatctttgggggttatatagggtctttggctgagcagcaatttgttgttgttgtaatcaatttttgaagaaaagatggggaagacagcagcttccaatcctgctttgcaagtgtctgtttcatttggtagatttgagaatgattccttgtcttgggagaactggtctgctttctccccaaataagtacttggacgaagttgagaagtgtgccactcctggatcagttgctcagaag

SEQ ID NO: 164701 - DNA, 269 bp, Glycine max
cgttacagccgcaccttgattcagagcagagcgacttgaagagctatggctgtcggaaagaataagaggatttccaggggaaagaagggtggcaagacgaaagccgctgatccctttgccaagaaggactggtacgatatcaaggccccttccgtctttcaggtcacgaatgttggcaaaaccctcgtctctcgtacccagggaaccaagattgcttctgaaggactcaaacatagagtgtttgaggtctcattggctgatctccaagg

SEQ ID NO: 164702 - DNA, 269 bp, Glycine max
ctccgccacttctgaatctattgaatcaacaatcatgtcggacgacgagcaccatttcgagtccaaggccgacgccggagcctccaaaacctaccctcagcaagccggtaccatccgcaagaacggctacatcgtcatcaaaggccgcccctgcaaggttgtggaagtttcgacttccaaaactggaaagcacggtcacgctaagtgtcactttgttggaattgatattttcactgccaagaaacttgaggatattgtgccctcttctc

SEQ ID NO: 164703 - DNA, 266 bp, Glycine max
cgggcctacgcaggacacaagaaatatataaccccaaacaaaagacagatgctcccctattttctggattcttccctccccgaagaagagttcaataggattatcaaggaattgcatcaggattcattaggtcagccagaattcaggactagcaagtctgggagggatgtcacaaagtatcctgttcctgagtgcatgtgcaatgatgactctcatcatcacacttcctaattttgtgcatttgataccaaagcttttgttccaaa

SEQ ID NO: 164704 - DNA, 265 bp, Glycine max
cttttcttttctttctttctccgatcgcatcgctcgcaaccacaatcatgccttcccgaagaagaactctcttgaaggtcatcattctcggtgacagcggggtggggaagacgtctttgatcaaccagtatgtgaataagaagtttagtaatcagtacaaggcaaccattggagcggattttttaaccaaagaagtgcaatttgaagataggcttttcaccttacagatttgggatacagctggccaagaaagattccaaagcct

SEQ ID NO: 164705 - DNA, 265 bp, Glycine max
ctcgagccgttttctttattattatttttattccacactctacatcacatctaagcagatgctgaaaagttttaccagcagtgcgatcctgagaattagaatttgtgtctatatgggtttccaaatgaaacatgggaagtgaatttgcctgttgaggaagtgcctcctgaacttcctgagccagcattaggtataaactttgccagggacggcatgcaagagaaggactggctatcactggttgcagttcacagtgactcatggc

SEQ ID NO: 164706 - DNA, 270 bp, Glycine max
acggtgtccaaggcctatgtgctacaaggcttatggaagtggaaaggaagatagtcctatgtgtgatgtgccaggatttgaaaacagcaagatgaaattgctgagacatgtttcatttgtggattgtccgggacatgatattcttatggctacaatgcttaatggagcagcaatcatggatggagctttgctactcattgctgccaatgaaagctgcccacaaccacaaacctctgagcatttagctgctgtggaaattatgcgtctaca

SEQ ID NO: 164707 - DNA, 263 bp, Glycine max
  unsure (1)..(263): unsure at all n locations
gaaaaacttagagtggtagttgtaggaaagcnagancagtgaagtgttctcctaattacagtgagtgaggttctgaattctttaacttgagatgatggcatcatttgcagggactactcagaagtgcaaagcatgtgagangactgtgtatttggtggatcagctcactgctgacaacaagatctatcacaaatcatgtttcagctgctaccactgcnaggtacccttaagttgagtaatatgttcctttgagggtgtgttat

SEQ ID NO: 164708 - DNA, 268 bp, Glycine max
ttcactgtactttatccttttgtgtggggaattatggtaattgattttgagggtttgactactcatggattatgatggtatgagaaaaccttccaaaaacttatttcactctcgcttcttcctttttgggttctattgctgggattgggagttcttgaccgctctcctcctttttagttcttccccttaatcttctttcttcacaatttttatttcctccttattagacgtattagatcagattgaacaaaagggttttctttctttc

SEQ ID NO: 164709 - DNA, 266 bp, Glycine max
aaacatctatcttcctgtctaagttctttgaataaaagtctgaatgtgtcatctctatgctacaatgtttatgattcagatcaggttgattctatttgtttgatggccatcttgcacgtcctgatcttattgtgttcaagtgacggacaaatccaaacaggaaagagagatttgaaatgtaaatgccaagtaaatgtgaaaagtacagtccatttttagtgatctctttaatttatttgttcatagattaatatggtcgtgtatga

SEQ ID NO: 164710 - DNA, 281 bp, Glycine max
tgcctctcacccgcagggtttagagaaaatttaacaattagggttgcttctcctttgccgacccatggctcccaaagctgatagttcaaagaaggctgatccaaaggcacaggccttgaaaactgccaaggcagttaagtcccgtgctaactttaagaagaagaccaagaagatccgaacatctgttaccttccatcgaccaaggactttgaaaaaggataggaaccccaaatatccacgcattagtgctccacccaggaacaagcttgatcactatcaga

SEQ ID NO: 164711 - DNA, 277 bp, Glycine max
caaaggtgaaacagttcaaggatgcaatagagaataattactggtttgaattcttcatggatgatctacctttgtggggatatgttggtgagttacatcctgataagaacagtgataatggcaagcatgtcatttacacacacaaaaacattattgttaaatacaacaatgatcagattattcatgttaatctcactcaggatatcccaaagcctttggaagtaggaaaacatttggacatgacatattctgtcaaatgggattctaccaatgtcac

SEQ ID NO: 164712 - DNA, 279 bp, Glycine max
gcaggttctttgtggacgaggtgccaatcagggtgttcaagaacagcaaggacttgggagtgaaattcccattcgaccagccaatgaagatctacaacagtttgtggaacgctgatgactgggcaacgaggggtggtttggagaaaacggattggtcgaaagcacccttcatagcagcgtacaaggggtttcacatcgacgggtgcgaggcttcggtgaacgccaagttctgcgacacgcagggcaagaggtggtgggaccagcctgagttccgtgacc

SEQ ID NO: 164713 - DNA, 274 bp, Glycine max
gggagttgatgatgcagctgttaaggttgttgacattgttgacacattcagacttcaggagcaacccgcattcgataagaagcagtttgctaccttcatgaagaggtttatcaagaatttgactcccaagctcgatgcagagcaacaggagttgtttaagaagcacatcgagggagcaactaaatacctgctctctaagattaaagatttccaattttttgttggtgagagcatgggtgatgatgcttgcttggtctttgcctactacaaggac

SEQ ID NO: 164714 - DNA, 268 bp, Glycine max
cgtgaatcttagtgcatcaagatctctgtctctctgcaatcgaaaatgagcaagggaccgggtctcttcaccgatatcggcaaaaaatccaaagatcttttgactaaggactacagctccgatcagaaactcaccgtttcctcctacagcgtctccggagtgaccctcacttcaacatctgtgacgaaaggaggactctcaacaggggatgtggcagcactgtacaagtataagaacactgttattgatgttaaacttgacaccgcat

SEQ ID NO: 164715 - DNA, 267 bp, Glycine max
tcgatgttcagagtgccgacacaatcgaagccaagtgtacggtccacagcttcaagagctacacgaagctcgatgctgtcggaaacgacgatttcttctgtcgttttgagtacaattcctccaccggcgccttcaatcctgatagagttgccgtgtattgtacatgtgagatgccttacaaccctgatgacctaatggtgcaatgcgagggctgcactgactggttccatcctgcttgtatagacatgactgtggaagaagccaaaa

SEQ ID NO: 164716 - DNA, 279 bp, Glycine max
gctgctcatcctccgtaacctccgagctctgcaccgaagaacgaagccatggggaagacacatggaatgggatctgctcgcaagctcaagtcccaccgcaggaggcaaaggtgggctgacaagtcatacaagaaatcacatcttggaaatgaatggaagaaaccttttgctggttcatcccatgccaagggaattgtccttgaaaagataggtattgaggctaagcagcccaactctgccattcgtaagtgtgccagggttcaacttatcaagaatggg

SEQ ID NO: 164717 - DNA, 277 bp, Glycine max
agaacctgcgatttcaacacaattaggttttcccttcaatggccgctaattcccacagagtgggttcttcctacggcggcgctgccccttaccgatcaagagatgggcttagcacccgtcccgttggtgcctcggcggtcatccaattgcgaattgatcccctggacttggacgatgagatcaccggtcttcatcgccaagttagaaggttgaaacatgttgctgaggagataggaacagaagtgaagtatcagaaaacttttcttgaagaactgca

SEQ ID NO: 164718 - DNA, 272 bp, Glycine max
caaagaatgaaggagacatttataaaaagctctttcccttcccccaaatccctcacactcattccatttctacctatctctctcgctcgcaaacgcaaataataaaaaacacggttttagccatggcatcgaagcagatcttgaaggaactcaaggatctccaaaaggatcctcctacctcatgcagcgccggtcctgttgctgaagacatgtttcactggcaagcaacaattatgggtcctccagacagtccttatgctggaggtgttttc

SEQ ID NO: 164719 - DNA, 237 bp, Glycine max
gaagcaccctggccctgactggagtgggctccatcaacatggtgactcctttttggcacatcaacggttagccatagttgatcctgcttctggggatcaacctctctttaacgaggacaaatccgtcattgttacggtaaatggagagatttacaaccatgaagagctcaggaaacagctgcctaatcacaacttccgaactggaagtgattgtgatgttattccacacaacatacg

SEQ ID NO: 164720 - DNA, 266 bp, Glycine max
gcgggcgcagggaagctcgtatggggcagtttcttggtaaaaagtatatatatcttgggctattcgacagtgaattagaggctgcaagagcgtatgataaggcagctataaaatgcaatggaagggaagcagttacaaacttcgagcccagcttgtatgaaggggaggtaatttcccagtctgataatgaagataccaagcaaagtcttgatctgaacttgggcatagctccccctctttactctgatgggcaaatcaagaacaca

SEQ ID NO: 164721 - DNA, 266 bp, Glycine max
cgagagtccgacaccatcgacaacgtcaaggctaagctccaggacaaggagggtatccccccagaccagcagaggctgatcttcgccggcaagcagcacgaggacggacgtaccctcgctgactacaacatccagaaggagtcagctctgcacttggtgttgcgtcttcgtggggggttttaagctggagctgatttctgtgtgatgttcgatgttggattttcccaaacattttaagaagaaatctcatgtgtaatgggtctgta

SEQ ID NO: 164722 - DNA, 264 bp, Glycine max
ctgcactcttcatcaagctccgctccgacacaggggcaaatcagggagatccttcacgtgcagggagggcaatgcgggaaccagatcggttccaagttctgggaagtggtgtgcgacgagcacggcatagatccgacggggaagtacgtcggaaactcagatctgcaactcgagcgcgtgaacgtctactacaatgaagcctcgtgcgggcgcttcgtgccacgcgcggtgctgatggacctggagcccggaactatggacagc

SEQ ID NO: 164723 - DNA, 261 bp, Glycine max
gcagaagacatcggcgcgtttcatttgatcagatcataacaatggtgtccgaaggcactctcctgggcatgggtaaccctctcctcgacatctccgccgtcgtcgatgaagacttcttaaaaaaatatgatatcacctcgaacaatgcgattcttgcggaggacaagcacaagcctatgtatcaagaattggctgagaaatataatgtggagtacattgctggaggtgccactcagaattcaatcaaggttgctcaatgga

SEQ ID NO: 164724 - DNA, 258 bp, Glycine max
atatcttgctgtcagaaactgcctgcctaatgtcaactctgatatgcttttgccagcatggaatcctccatctgaatggggaaaaaaagtgatgcttcgagtggatgcacgacagggagctccaaaggatggaaattctccccttgaactttttgaggtagagatttatcctcttaagattcatttaacagagatgtcctacagaatgatgtgggaatatttcttcccagaagaagaacaagattcccaacgtcgcca

SEQ ID NO: 164725 - DNA, 261 bp, Glycine max
cattcgacaggtagagtttcttcaatggctcctaaagttgataagaagaacgacccaaaggcacaggccttgaagactgctaaggcagttaagtctggtgctacctttaagaagaaggcacagaagatccgaacttctgtcactttccacagaccgaggacatcgaagaaggataggaaccccaagtaccctcgcattagcgcgcctccaagaaataagcttgatcattatcagatcctgaaataccctctgaccactgaa

SEQ ID NO: 164726 - DNA, 265 bp, Glycine max
acgaaggtctccttcagctaccttctgacaaggctcttttgtctgaccctgtattccgccctctcgttgataaatatgcagcggacgaagatgccttctttgctgattacgctgaggctcaccaaaagtcttccgagcttgggtttgctgatgcctaagcaacgtttaggggattgttgaagaggcatggtgcccataatatttctctaaaaaattgtatggtcatggtttttaatgccaatgtgggttccccagattttagata

SEQ ID NO: 164727 - DNA, 253 bp, Glycine max
aaaaattatgttgaatccaagtacccttttcttgaaatagtctcggtgtacaatcatctagtctatatccttttactgcacctttcagaatgtaaatgtaatgcatggaacttggtaacgtagtaatctgttaggcggcgttttagtcgtcgaaaaaaaaaaaaaaaaaaaaaaaaaaaaaaaaaaaaaaaaaaaaaaaaaaaaaaaaaaaaaaaaaaaaaaaaaaaaaaaaaaaaaaaaggggggggccccc

SEQ ID NO: 164728 - DNA, 268 bp, Glycine max
taatccacacagttctactctacgctctaaaccctctctctctctctctctcgatctatcatggctttgcccaatcagcaaaccgtggattaccctagtttcaaactcgtcatcgtcggtgacggcggtacaggaaagacaacgttcgtgaaaaggcatcttaccggtgaattcgagaaaaaatacgaaccgaccattggagtggaggttcacccattggatttcttcacaaactgcggaaagattcgcttctactgttgggatactg

SEQ ID NO: 164729 - DNA, 259 bp, Glycine max
caacaatgtgaaatccactgtctgtgatatccctccaactggtttgaaaatggcatcaaccttcattggcaactctacctctattcaagaaatgttcaggagggtgagtgagcaattcacagctatgttccgcagaaaggccttcttgcattggtacactggagaaggtatggatgaaatggagtttactgaagctgagagcaacatgaatgaccttgtgtccgagtacaagaattcccaggatgcacctgctgttgtt

SEQ ID NO: 164730 - DNA, 258 bp, Glycine max
gggtctcttgggcaggcaaaatcgtaccccaaccattgttattgtttggtccgttcttcttgcttcaatattctccttgctgtgggtgaggattgatcccttcacctctgactccaacaaattaaccaatggtcaatgtggcatcaactgttagttctcttgtatgattcattttgtgttgttattcccttttgcttggagatacacaaggttgctgtcgtgtatatagcaagaattttcagcctatcaaagttgtct

SEQ ID NO: 164731 - DNA, 257 bp, Glycine max
tccttttttgcgttcattctgttttcatagtgacgaacttctgaagaaatggcaaatcatcctttgacacactctcactctttccgcgagaggtttgatgaaactctcactggtcacaggaacgaaattttggcccttctgtcaaggcttgaagccaagggcaagggaatcctgcaacatcaccaagtggttgcagagtttgaagaaatccctgaggagagcagaaagaaactccaagatggtgtctttggagaagt

SEQ ID NO: 164732 - DNA, 260 bp, Glycine max
cgctggccttcctcaggctcaatcagattcgaagatgttgttcttcgctacagagctgaacttcctcctgtgttgcatggcttgtctttcaccattttcccaagcgataaggttggcattgttgggaggacaggtgcaggaaaatccagcatgcttaatgctttgtttcgaattgtagaattggaacgtggaagaatattaattgatgattatgatgttgcaaagtttgggcttgctgatttgcgtaaagttcttggcat

SEQ ID NO: 164733 - DNA, 263 bp, Glycine max
gaaaaaagcgatcatagtttcacttcggccttatccagtttagggtttcggttctctaccctatctttcacgtatcgaaaccttaaatttacgatcaggtctgagcaatctggttggtagaacctttggtcttagtgagtcaagttttatgtctgaattagacgatcaaattcctactgccttcgatccttttgctgatgcaaatgctgatgactcgggtgctgggtcaaaggagtatgtgcatattcgtgtacagcagcgaa

SEQ ID NO: 164734 - DNA, 266 bp, Glycine max
cgaaatactaacagtgaaccactctcttgggacacccgaatcaaaatagctattggtgctgcacggggcttggctttcttacacacctcagaaaagcaaatcatatacagagatttcaaagcctccaatatactacttgatgaggtctgttattttccttacttcctctctgttatatttgatgagtttatgaatttggaccccccatttgtgtttaattataaaccaaacttttgctagattttttttttatcgacaaagagttt

SEQ ID NO: 164735 - DNA, 260 bp, Glycine max
aaaaatataccttttcagtttccactcattgatctaaagccttactcttgcaatcaatacaattaagtattattcaaagtcccaaccatgtcaccaacaaacacttttgcaattttggtcttcttctgctgtgccatttcctttaccttcgcttctgaccctgacacacttcaagacctttgtgtggcacttccctcttcaggtgtgaaggtgaatggatttgcttgcaaggctgagtcaaatgtaacagaagctgattt

SEQ ID NO: 164736 - DNA, 258 bp, Glycine max
cctctagccgctttgtccgtctctcgtcagtcgcttgtaccgccttatgcttgcgttttttgcacagacgcattgtcacatatatagcaagcatagcagtcacactctacgaccttagctctgcctctgggttgaagaagcttgatgagtaccttctcccacgcagctacatcaccgggtaccaagctacaaaggatgatcttactgtttatgcagccttgccaagtgctccatcagattgatatggaaatgtttcca

SEQ ID NO: 164737 - DNA, 261 bp, Glycine max
attttctttgggaagaccttgagtctgatcgactcaacctcaaccttctcctggttcctgcattgcgttgctctctcactaccttctaattcccaaatttctagggtttggtacagagagaaaaaggaacataagatgtctcagaacgggaagctgatgccaaatctagaccagcatagcaccaagcttctcaatctcactgttcttcaacgaatcgacccttttgtcgaggaaattctcatcaccgctgcgcatgtcacc

SEQ ID NO: 164738 - DNA, 256 bp, Glycine max
actcaaattagcatggctgtcacggttgcattcttgaatttgatcatcatgttttcagtagtctctacaagcaagtcactgagcttaaactactattcaaaaacatgccctgatgtggaatgcattgttgccaaggcagtgaaggatgccactgctagggacaaaactgttccagctgcacttctgcgaatgcacttccatgactgtttcgttcgggggtgtgatgcctctgtgctgctaaattcaaaaggaagca

SEQ ID NO: 164739 - DNA, 255 bp, Glycine max
gagtgagtgagcaattcactgctatgttcaggaggaaggccttcttgcattggtataccggggaaggcatggacgagatggagttcactgaggctgagagcaacatgaacgatcttgtgtcagagtatcaacagtaccaggatgccactgctgatgaggatgagtatgaggaggaagaggaggaggaggagtatggccaacatgatatgtgattttgaacttggtaatgtattgcggtggcttgaagatgtataa

SEQ ID NO: 164740 - DNA, 259 bp, Glycine max
cgcaggctataagagaattgatggcaagatgttctatcaggatggtgtctgcccatgcaagtcagcaaatttataccagggcaacaaacacctaggtggtgaactgatcttagtttacggagtattggtaggaatagtgaagtattgttcttttgaagtttgagatgcatctcatatagcttctatcagatctagattgttgctgaatccgaggctgagattgtatttttggtttccttcaatgttttatctttttgga

SEQ ID NO: 164741 - DNA, 256 bp, Glycine max
ccactctctttctctagtcctgttatttctcagcgcgtaaagcatggctttgttggtggagaaaaccacgagtggtcgcgagtacaaggtcaaggacctttcccaggccgacttcggccgcctcgagatcgagctggccgaggttgagatgcccggcctcatggcctgtcggaccgagttcggcccctcccagcccttcaagggggcccgcatcaccggctccctccacatgaccatccagaccgccgttctcatt

SEQ ID NO: 164742 - DNA, 258 bp, Glycine max
agggagtggggtccactcacacaggaagccaccgcgatttcgatctcaacctcccggcttttccggacttctcagcaaggttcttcgtcgatgacgaggttaccagtcctcatccatccaagaagtcccgtttcaatttgaccatacccaagattgaaatccctcaatactgatccatagatccaaaaaaattattcagtgtttttttatatatttttttaagttatttgggataatttgttcttgtacatatatagt

SEQ ID NO: 164743 - DNA, 259 bp, Glycine max
gaaaaaccaaaacccttggcgagtgaagccctagactcactagactacacacttcgcaatggcggttgttgctcaaacccctgacatcgccggcgagcggcagtccggccaagacgttcgcacccaaaacgttgtggcatgccaagccgttgccaacatcgtcaaaagctctttaggccccgttggcctcgacaagatgctcgtcgacgacattggcgacgtcaccatcaccaacgacggcgccacgattctcaagatg

SEQ ID NO: 164744 - DNA, 264 bp, Glycine max
caagatcgtaagagctggggactgtgtgctgatgcgcccctctgataccagcaagccaccgtacgtggcgcgcgtggagaagatcgaacaggataataggaacaacgtgaaggtgcgtgtgaggtggtattataggcctgaagagtctattggaggacgcaggcagttccatggagcaaaggagctgtttttgtctgaccattatgatgttcagagtgctcacacaattgaagggaagtgtgttgtgcactcttttaagaacta

SEQ ID NO: 164745 - DNA, 260 bp, Glycine max
ctctccttctcgctctttcagctttgacttttgttggaaactaaggcctaatcaaaatggtgaagttcacagctgaagagctacgtcgtattatggactataagcataatatccgtaatatgtctgtcattgctcatgttgatcacggaaaatcaaccctcactgattctcttgtggctgctgctggtattattgctcaagaagttgccggtgatgtccgtatgactgatacccgtgcagatgaagctgagcgtggtatt

SEQ ID NO: 164746 - DNA, 255 bp, Glycine max
gttttctacaaagaacaatctgcttcagctgccattatgactgttaattctggcattagaaaaattcttccagattctgagatttgtgactttgactttgagccatgtggttattcaatgaactctgttgaaggtgctgctgtttctaccattcatgttaccccagaagatggtttcagttatgcaagctttgagactgttgggtatgacttcaaagtggtgaatctgaacgaaatggttaagagggtattggca

SEQ ID NO: 164747 - DNA, 259 bp, Glycine max
gccgtcccaggctgatgaagaggcacatcaattgtcgtatctgcaaaagcacttggctaacattgtgtctcttctagcagagcctgtggagggagaaggcgaagagtccctggttttaaccatggatagatttgagcatcttgggttcctaattcagtttggtgataagggatcagaaggaaattcttttagtcaatgttctcctttttttgcaaactcagaccctgacatgcctgctgttcccgttcctgccgcacaa

SEQ ID NO: 164748 - DNA, 262 bp, Glycine max
cacaaccttatggtgtatatacatggttaacggatattaaagacacctctaaagaaggatatagttttgaagagatatgcatcaagaaagaagcgtttgagggagaagagaagttttgtgcaaaatccttgggaacagtaattggttttgccatttcaaagctgggaaagaacattcaagtactttcaagttcctttgtcaataagcaagagcaatacactgtggaaggagtgcagaatcttggagacaaagcagtgatgtg

SEQ ID NO: 164749 - DNA, 260 bp, Glycine max
atcggaagaaaccctagccactctcccggcgtcacgatgcagatcttcgtgaaaaccctaacgggtaaaacgatcacgttggaggtggagtcttcggacaccatcgacaacgtgaaggccaagatccaggacaaggaaggcatccctccggaccagcagcgcctcatcttcgccgggaagcagctggaggacggccgcaccctcgccgactacaacatccagaaggagtccacgcttcacctcgtcctccgcctccgtgg

SEQ ID NO: 164750 - DNA, 261 bp, Glycine max
caaagagttgtatctccctggattgagagattatgtcaagagctttcatcctttaggccctgtttggagttcaacaggaaaaataattgctccatcaaaagcttctgctcctgctgcccctccccctccacctgcttctctctttagttctgaatcatctcaggcttcatcttctaagcctaaagaggggatgtctgctgtttttcaacaaatcagttcaggaaacgtcacttcaggtttgaaaaaggttacgaatgatat

SEQ ID NO: 164751 - DNA, 256 bp, Glycine max
gaaaccctaaaccccgttttcggtgagatcgagatcgatcgaacatggatgaggagtacgatgtgatcgtgttgggcacgggtctcaaggagtgcattctcagcggtcttctctccgtcgatggcctcaaggttctgcatatggataggaacgactattacggaggagaatccacttcgctcaatcttattcagctttggaagagattcaggggagatgacaagcctcctccacatttgggcgctacagggactac

SEQ ID NO: 164752 - DNA, 257 bp, Glycine max
ctgagcgttttctttattattattgttattccaccctcttcttctcttgcctgcagatcttgaaaagttttaccagcagtgcgatcctgagaaggagaatttgtgtctatatgggtttccaaatgaaacatgggaagtgaatttgcctgttgaggaagtgcctcctgaacttcctgagccagcattaggtataaactttgccagggacggcatgcaagagaaggactggctatcactggttgcagttcacagtgact

SEQ ID NO: 164753 - DNA, 257 bp, Glycine max
taaccttagtcatcctcttctttcatctttctccctaacggtatcgagggaaaaatatggcggaagaacacagatgccaggcaccgcgcttctgcgccaacaattgcggtttctttggcagccctgccacgcagaatatgtgctccaagtgctaccgcgatttccagctcaaggagcagcaatcttccaacgccaagatggttctcaatcagtcgctggttccttcaccgccaccggcggtgatttctcagccgtcg

SEQ ID NO: 164754 - DNA, 254 bp, Glycine max
ctaaaccccaccatctctttctccttcttcttcttctctgcgccactcttgagttttcttcatcttcaccctccgatcacctctacaatgttggagaacttgtcccattgtttgtcaacaaagtgggacccttcaacaaccccagtgagacatatgagtactatgatttgcctttctgcaccccagacccaattgtcagaaagaaagagtcccttggggaagttctcaatggtgaccgtttgagcaatgctttg

SEQ ID NO: 164755 - DNA, 257 bp, Glycine max
ctgaatttggagttgtaaggggaattgactttaaaaatgtatacacggttataaactttgaaatgcctcagagtgttgcaggatatgtacatcgaattggacgtacaggaagagcatacaattctggtgcttctgtctctctggtttccacggatgaaatggatactttagaagaaataagatcttttgttggggatgatgaaaacaaaggcacaaattccattgctgagtttcccctcctcaccaagaatgcagtt

SEQ ID NO: 164756 - DNA, 257 bp, Glycine max
cggggagcccccatattgcaagggccatggagggggaaaacgctgtacataccagggtggtggagtatgcactaaaagtgtgcatggaggtaccaacttctgtgtggcacatgggggtggaaagaggtgtgctgtaccaggctgcacaaagagtgctagaggaaggactgatcattgtgtccgccatgggggaggcaagagatgtaagttcgaaggctgtggaaagagtgcacaaggcagcactgacttttgcaaag

SEQ ID NO: 164757 - DNA, 261 bp, Glycine max
gtttcgctatctctcccattctctcgcatctcaatacccttttgatttgtgaaaggaaagcaaacatgcttgatcaggtccaacaccctacaatcatggacaaggttgctggccagctccatctccgttctggtgtttctggtattaggagttatgaaggagcctactgccaccccacaatgtaccaaagaccctcttttgggaattactcgaatgctgcattgcagtatcctgtgatgccctcatgcaaagctactatgg

SEQ ID NO: 164758 - DNA, 259 bp, Glycine max
gttaagcctcctattttttcatgttttggagacatagccttggcaattggagaaaactttgagaagtacttgttatatgcaatgcctatgcttcagagtgctgcagaactctctgctcatacatctggtgctgatgatgatatgacagaatacacaaattctttgagaaatggaattctagaggcatactcagggatcttccaaggatttaaaggttccccaaagacccagcttctgatgtcttatgctcctcatgtgc

SEQ ID NO: 164759 - DNA, 256 bp, Glycine max
gtatgattacatgccaaatgggaacctggaggaccatctctttttatcaacggactctcagaaagcaaaagggtcattgacttggcctcagaggaaaagcataatcttggatgtggcaaaggggttggcctatttgcactatggagttaaacctgctatttttcacagagatatcaaggccaccaatatactacttgatgcagatatgagggcaagagttgctgattttggacttgccaaacaaagtagggagggc

SEQ ID NO: 164760 - DNA, 255 bp, Glycine max
gatgagtcaattagcaagttggtgcagcaactctataagctagtagagctacatgaggttcgtgatatcacccacttgccatttgctgagcgagaattgatgctaataaagattgctgtaaatgctgctgcacggcgtgatgtccttgatattgctagcattttccgggctaaagctgtcgatgtatctgatcacacaataactctggagcttactggagatttggacaagatggttgcattgcagagattgtta

SEQ ID NO: 164761 - DNA, 255 bp, Glycine max
ctcctatgatgaatttattggatggttttgcccccagcccgccaacagaaaacaatggatcggtttatccatcagtaactgcatttgagagcagctccttgaggttgacattcaatttctcaaaacaaccaggaaacccacaaacaacagttatccaggctacttttatgaatttgtcctccaattcatatacagattttgtttttcaagcagcagttcctaagtttcttcaattgcacttagatccagctagca

SEQ ID NO: 164762 - DNA, 255 bp, Glycine max
gttttacattgggctcagacaaaagagggcaactggacaggaatattctgaactcttgcaagagttcatgactgctgtcaagcaaaactatggagaaaaagttcttattcagtttgaagattttgcaaaccacaatgcttttgaattgcttgcaaaatatggcacaactcatcttgttttcaacgatgatattcaggggactgcatctgtcgttcttgctggggtcgtggcagccttgaagctcattggcggtaa

SEQ ID NO: 164763 - DNA, 257 bp, Glycine max
cggctagccagctagcgcttcttctctcgcattccgtggagatctagtgctgccaaacctcgctgaaaattagggtttcgtttcggaggtagacgaagatgttcggaagggcaccgaagaaaagcgacagcaccaggtactacgaaatcctcggcgtttcgaagaacgcttcgccggatgatttaaagaaggcttacaagaaagccgccattaagaaccaccctgacaaaggcggtgatcctgagaagttcaaagag

SEQ ID NO: 164764 - DNA, 260 bp, Glycine max
gcttctttctctttaatttggtttaagctttgtatgttaatttagttttccaaatttaacacattgttaaggctaattatggctgatattgagggttctccaggaagctccatgcatggagtaactggaagggaacaaaccttcatagcctcagtggcttcccctatggtccctacagacaccacagcaaatttcgctttgccagtagattctgagcacaaggcaaaaattttcaagcttttttccttagccaaccctca

SEQ ID NO: 164765 - DNA, 256 bp, Glycine max
ggtttctctgtctgcttcttcactttctctcgtttcaatcgaaaccaaaacaaaaacatgggcagaaaattcttcgtcggtggcaactggaaatgcaatgggaccactgaggaggtaaagaagattgttactactttgaatgaggctaaagtccctggagaagatgtcgtagaagttgttgtgagccctccttttgtgttccttcctgttgtaaaaagtttgctgcgccctgatttccatgtttcggcacaaaact

SEQ ID NO: 164766 - DNA, 254 bp, Glycine max
gccgatttgaaaagatgagtaagcttcagagtgatgctttgcgtgaagccatctcaggaatcatggccgattccaaggagaagaatcgcaaatttgtggagaccatcgaactccaaatcggtttgaagaactacgatccacagaaggacaagcgtttcagtggctccgtcaagttgccccacatccctcgccccaagatgaaaatttgcatgcttggtgatgctcagcatgttgaagaggcagagaagatagga

SEQ ID NO: 164767 - DNA, 254 bp, Glycine max
gaaggctataagagaattgatggcaagaggttctatcaggatggtgtctgcccatgcaagtcagcaaatttataccagggcaacaaacacctaggtggtgaactgatcttagtttacggagtattggtaggaatagtgaagtattgttcttttgaagtttgagatgcatctcatatagcttctatcagatctagattgttgctgaatccgaggctgagattgtatttttggtttccttcaatgttttatctttt

SEQ ID NO: 164768 - DNA, 257 bp, Glycine max
ggagtagcgtagaggaagagtgcgaaagaaagatcgttctcgatgacagaggggaacggtgacaaaactctgcgaaagatcgcagacgcattcaatgaccttgcaaacgttttcaccgattctcagagcgcagaagcagaggtcaaggttgctcccttctctcatgcctgctctctcgtctcccctctcttcggttgcttgggcgtcgccttcaagttcgccgaaatggattacgtcgccaaggttcatgatctggc

SEQ ID NO: 164769 - DNA, 258 bp, Glycine max
cacatagtcacattcacattgaagttaaacttgcattgaaaatggagggaagagatgaggatgtaagagtaggagccaataggtatggagagaggcaaccaataggaacagctgcacagacacaagatgccaaagactacagagaggcaccaccagctccattgtttgagcctagagagttaacatcatggtctttctacagagcaggcatagcagaatttgtggccactttcttgtttctttatgtcactgttttga

SEQ ID NO: 164770 - DNA, 267 bp, Glycine max
ctctcatagctgtagcggcgacactaagatcggagaaagaatggcgaaaacgacgtcgttgctgctctttacactgctcctcttcggaaccctagctctcatccaggcgaagaaatcgaaggaggatttgaaggaggtgacccacaaggtttactttgatgttgagattaatggaaaagaagcaggtcgtattgtaatgggtctttatgggaaggctgttccaaaaactgcagaaaacttccgagcactttgcacaggggaaaaggg

SEQ ID NO: 164771 - DNA, 266 bp, Glycine max
gtttccttcccttccctaacgatctgaggaagacaccaagcttctctccacgcccttcttgggtaatctgaagtgcagcgatggcggatggattgcactcgcggcatccatcagtagttcagaagttatctggacagtcttatttgttgtctaggcttgcccctactcactcaagaaactattccacaactggtagttacttcaatggaggcttgcagtcttcgggtttggttccagtcatggcacatgcaccggctgagaaagga

SEQ ID NO: 164772 - DNA, 265 bp, Glycine max
cttcagtaatccttggtgacaagggtgacagcattaaagcatcatacctccatcatctggatctattgaagaagagtgccgcagttgcagagatcacgagaaagttctcaacaaatgagaacacttttacagtaggagggtcttttgctgttgaccctctgacacaggtcaaagcaaggctcaacaatcatggaaagctcggggccctcctgcagcacgagatcataccaaagtcagtgtttactgtttctggtgagattgacac

SEQ ID NO: 164773 - DNA, 264 bp, Glycine max
ggaaacgcgtcttcataaacgccgcccaaaacttctcatacccttttattcattccattcgtttctagggttttcttttctttgccgagaaaatgagagagtgcatttcgatccacattggccaggccggtatccaggttggaaacgcctgctgggaactctattgccttgaacacggcattcagcccgatggacagatgccgagtgacaagaccgttggcggaggagacgacgccttcaacacatttttcagcgagaccggcg

SEQ ID NO: 164774 - DNA, 264 bp, Glycine max
ggtcagaggaaattattatatcagcatccacaagcttggagctggttcacgctggcgtcgtacaactggtcaggaaatttattctccattcttagtggctttcacacatgagaactcggaaaactggaagtcctctcatttgacaaaaggaactatcatggatccaaattacagcttgcctcccaatattgctctgataactcttgaggagttggatggtggaattgtgcttctccgtttggcacatctatacgagccaagtga

SEQ ID NO: 164775 - DNA, 267 bp, Glycine max
tggaaaaagttctaattcagtttgaagactttgcaaaccacaatgcttttaatctgcttgagaaatatagatctacacatctggtctttaatgatgatattcagggaacagcatccgtggttcttgctggacttgttgcagctctgaagttggttgggggtaacttagctgatcacagattcttattccttggtgctggagaggctggcactggcatagcagaactcatagcacttgaaacatcaaaacagacaaatgctccactgg

SEQ ID NO: 164776 - DNA, 267 bp, Glycine max
tttctctagtcctgttatttctcagcgcgtaaagcatggctttgttggtggagaaaaccacgagtggtcgcgagtacaaggtcaaggacctttcccaggccgacttcggccgcctcgagatcgagctggccgaggttgagatgcccggcctcatggcctgtcggaccgagttcggcccctcccagcccttcaagggggcccgcatcaccggctccctccacatgaccatccagaccgccgttctcattgagactctcaccgcccttg

SEQ ID NO: 164777 - DNA, 271 bp, Glycine max
ccaccccattcatctccatggctttaatttctttgtagttggtaggggacagagaaatttcaaccccacaaaagaccccaagaaatttaaccttgtagatcctgtggagagaaatacagttggagtcccagctggagggtggactgctatcagattcaggactgataatccaggtgtttggtttatgcattgtcatttggaaattcatacaacatggggactgaagatggcttttgttgtggataatggtaaaggaccaaatgaatctcta

SEQ ID NO: 164778 - DNA, 272 bp, Glycine max
gaacgaacttcttctaaggagaatggcccagctagtgcctctgatcaggatgttgctatggctgatgcatgcactgcctcagttaacaaggtctcgacaagtactagaagtgcaagtttcattgaagggatctccaaatcgtcatatgtgaagcatgcatctgacattaaaggttcctctgttaaggttctaaattgccatgagtctgctatatacatcttagcacctttgagatatgcaactgtctatggatgttcagatgcaacaatagt

SEQ ID NO: 164779 - DNA, 271 bp, Glycine max
atgaaccaatattggagaaagcaattgggactgaaattcaatggcacccaggaaaatgtctgacacagaagattcttaagaaaaaacctaagaagggttcgaagaatgctaaaccaattaccaaaactgaaaattgtgaaagcttcttcaatttcttcaaccccccgcaagttcctgaagatgatgaagacatcgatgaagatgtggctgaggaacttcagaatcagatggaacaagactatgacatagggtccacaataagagacaagat

SEQ ID NO: 164780 - DNA, 265 bp, Glycine max
ctgcatttcactttctcattttcccatggctactcaccttcttcatatcgaacccgccgagctccggttcgtctttgaattgaagaaacaaagttcatgtttggttcaacttgccaacaacactgatcactttcttgcctttaaggtaaaaacaacttcacccaaaaaatattgcgtcaggcccaacataggcatcatcaagcccaatgataaatgtgattttactgttactatgcaagctcagcgcatggcaccgcctgatatg

SEQ ID NO: 164781 - DNA, 263 bp, Glycine max
ctttctctttgttcttctaccttattttctttccctagtcaacgagattcatctctgcagcaggttgttttagcaaagaaaaactgctgaagatttgctgcattggggctggatatgtggggggtccaacaatggcagtcattgcactgaaatgcccctcaattgaagtggctgttgttgacatctctaaatccaggattgcagcatggaacagtgaccagctccctatctatgagccaggccttgatgatgtggtgaagcaa

SEQ ID NO: 164782 - DNA, 263 bp, Glycine max
cttgttttctgcatgatgcccggaactcagtggcatcagaggattccagagtcgtggaatgcctttgtttatacaattgaaggggaaggagtattcgggtgtccaagttcatccccaacagtggcacaccatgtccttgttttgagtcaaggtgatggccttagcgtatggaataactcttccaagcctttgaggtttgttctgattggaggccaaccactgaacgagccagttgttcagtatgggccttttgtgatgaacac

SEQ ID NO: 164783 - DNA, 260 bp, Glycine max
cctcgagccgctcgagccgattcggctcgaggagatatgatactcaggaacatcctctattttcaactactggacacagtgcataaagatgatttccatcagccaaatttccctggtgcttccatcaagaaaggtggtccaagagagccatggcatgacattcattgcaagttagaagggtctgttgcttgggatgttttgtacaattttcaacaaaggtgggagaagcaggttggaaatcagctcctattctcttcaag

SEQ ID NO: 164784 - DNA, 264 bp, Glycine max
caagccttcgcaaagaagtagaagaactgcacattccattgcagcagatccaaaccttcgctttcaccatggccgaatttctggatctcgaatcccaagacggcgttcgaatgccgtggaacgtgatccccggtacgaagcaggccgcccaaaacgccgtcgtccccatctccgccgtctacactccgataaagcacttcccctcgatgccggtcctcaactactcccctctccggtgccgcacgtgccgctacgtcctcaacc

SEQ ID NO: 164785 - DNA, 241 bp, Glycine max
gaagaagaaaggagaattagggtttgtggagatgctagggcaaggcgttgatgaagtgaacattgaagagttggcctcgaatctttccctctagaaagatcaactgaaccaggttaggcaactcttgaacgatgagccttcaaattctgaatatgctgacatggagatggaactttctgaagtcattgctttgactgaggaactccttgcaactgcaaagcagaatgaactccctgctcct

SEQ ID NO: 164786 - DNA, 266 bp, Glycine max
ccctcttagtcccaattttctagggttttattcattttccgatggcttctgcagatgttgagtaccgttgctttgtcggtgggctcgcttgggccactgacgaccatgccctcgagagagccttctctcagtacggcgaaatcgttgaaacgaagattatcaacgatcgtgagactggcagatccaggggttttggatttgtgaccttcgcctcggagcagtccatgaaagatgcgatcggagcgatgaatggacagaacttggac

SEQ ID NO: 164787 - DNA, 267 bp, Glycine max
aggtggagcttgtggatatggtaacgctgttgggcaacctccattttcttctttaatatccgcgggaagccctcttatatatgactctggcaaaggatgtggttcttgttatgaggtgaaatgcacagggaattctgcatgctcaggcaaccccgtgaaagtagtcatcactgatgagtgtgctgggtgtggctcagatgctcaatatcattttgatctgagtggcaatgcttttggagcaatggcaatttcgggccaagatgagaa

SEQ ID NO: 164788 - DNA, 270 bp, Glycine max
  unsure (1)..(270): unsure at all n locations
cttcccctatggctcgtcactccttgctcttagccctcctccacttcgccgccgtccccaccgccgcgatggcggtggccgcgtccgacgccgacgacatcctgatccgtcaggtggtgccagatgttggcgaagcgangaggaggacaacctgctgaacgccgagcaccacttcgcgagctccaaggccaagttcgccaagacctacgccaccaaggaggagcacgatcatcgcttcggcgtcttcaagtccaacctccgcagagccag

SEQ ID NO: 164789 - DNA, 269 bp, Glycine max
atagaatgggatctggaagtggaaaacacactggagagttcttcaggagaagggatgcatggaggaagcatccgatgctcaccaatcagctccgccacgccacccctggccttggcatcgccgtcgtcgccttcggtatctacctcgtcggcgaacaagtctacaataggctctatgctcccgatcctcattcgatttctcacgtgaaagccggggatcaccactaaacgtttggacggacgcactccattccatcatcacttaataag

SEQ ID NO: 164790 - DNA, 266 bp, Glycine max
cttaactctgatctgcgaaacttgcagtgaaccttattcccatccctcgcctccacttcttcatggttggatttgctcctttgacatctcgtggctctcagcaatacagggccttgagtgttccagagctgacacagcaaatgtgggattcaaagaacatgatgtgtgctgctgaccctcgacatggccgctacctcactgcctcagccatgtttagaggcaagatgagcaccaaggaagtcgacgaacagatgatcaatgtgcag

SEQ ID NO: 164791 - DNA, 263 bp, Glycine max
cctcgagcgaatcggctcacggctcgagttttgtcatactacaaaccatgtattatacccattagagggtggagttgcatctgggtttaaaaaacctgaagaagagaagtttgaaacatgtttgtatgtatgcagagggaaaagagttgttagattgagacaggtcccttttgcaaggtcttcattgaaccatgaagatgtattcatactagagactcagaataagatttatcaattcaatggtgcaaattccaatattcagg

SEQ ID NO: 164792 - DNA, 263 bp, Glycine max
ggcagattgtgaaggagaaagaagaatttgttcgcaatcaagactttgaaaaggctggagagctaagagacagagaaatggatcttaaggcccagatatctgcacttatagataaaggcaaggagatgagtaaggcagatagcgaggcaggagatgaaggtcccatggtgactgaagttgacatacaacatattgtctcctcctggattggtattcctgtggagaaagtctcaactgatgaatctgatcgtctcctcaagatg

SEQ ID NO: 164793 - DNA, 260 bp, Glycine max
aataattgcagatgagatgcgagcagtcgaggccctcgcaggactgttgcaagaggggactccaagaggaaagaaggatgctgtgacagctttgttcaatctttccacacacactgagaattgtgttagaatgatcgaggccggggcagtgacagctcttgttagtgctttggggaatgaaggagtttcagaagaagcagctggtgcactggccttgatcgtccggcagccaattggggccaaagcagtggtgaatgagg

SEQ ID NO: 164794 - DNA, 263 bp, Glycine max
cgagactcatttggttttgttgcttgccttgatcttcactgtagttgccggcgttggagcccaaggcccatccacctctcccgcgcctcccacaccccagtcttcatcacctcccatccagtcttctccgccacctgttccttcctcacctcctccggctcagtctccaccaccagcttccactcccccaccagccccactcagctctcctccccctgcctcacctcctccttcatctccaccacccgcatctcctccccctg

SEQ ID NO: 164795 - DNA, 266 bp, Glycine max
gataactcgtcggatcgcacggcctttgtgccggcgacgcatcattcaaatttctgccctatcaactttcgatggtaggatagtggcctaccatggtggtgacgggtgacggagaattagggttcgattccggagagggagcctgagaaacggctaccacatccaaggaaggcagcaggcgcgcaaattacccaatcctgacacggggaggtagtgacaataaataacaataccgggctcattgagtctggtaattggaatgagta

SEQ ID NO: 164796 - DNA, 270 bp, Glycine max
ctcaaatttctcagtctccggaactcgtttctaccttcacttcgcacatctcgaaccctctctttccggcaactaggttaaagttcatcaatggcaggtcgtggcaaaaccctaggatccagcgccgccaagaaggccacctcaaggagcagcaaagccggcctccaattccccgtcggccgtatcgcccgtttcctcaaggccggaaaatacgccgagcgcgtcggcgccggtgctcccgtttacctcgccgctgtcctcgaatatctc

SEQ ID NO: 164797 - DNA, 268 bp, Glycine max
ctgaaacatttgttgtagcaaaatgccccacaaaggtggttggtgttcctgtcactctgaatggagatcttaaaaaccagtttgtagaaactaatgttggttttgatacaatttgtaaggttaattctcagctcatcagcaatgtctgcactgatgctctctctgcagagaagtattattatttcatccgtcttatgggacgcaaggcatcacacgttgctttggaatgcaccctccagtcccatccaaatatggtaattcttggtga

SEQ ID NO: 164798 - DNA, 262 bp, Glycine max
ctccgccacttctgaatctattgaatcaacaatcatgtcggacgaagagcaccatttcgagtccaaggccgacgccggagcctccaaaacctaccctcagcaagccggtaccatccgcaagaacggctacatcgtcatcaaaggccgcccctgcaaggttgtggaagtttcgacttccaaaactggaaagcacggtcacgctaagtgtcactttgttggaattgatattttcactgccaagaaacttgaggatattgtgccc

SEQ ID NO: 164799 - DNA, 260 bp, Glycine max
gcggacggatattccccgcaagtagtctttgaaagaagacatatgattcgtggctttcttttctatccggaggggcatgcgctgagtgaaaacgcttacgcgggttatctgaccaaaattgccaattttggtacaaggcaaagcgttccctatcagcgggtgatccgagccgtccataactctcatctctttttagattagatattctctttgactttcaatagccggcaaaatgactacaggatcatcggtctactcta

SEQ ID NO: 164800 - DNA, 263 bp, Glycine max
gctaggtcctattgttagtgaaggacagtataaaaaagtgttgaattgtatctcaactgctaagagtgagggtgcaacaattttgattggagggtctcgcccagagcatttgaaaaaggggtactttgttgaaccaaccatcataactgatgtgactacctcgatgcaaatttggagagaagaagtttttggacctgtgctatgtgtgaaaacattcagtaccgaagaagaagctattgaactagcatatgacacacactacg

SEQ ID NO: 164801 - DNA, 268 bp, Glycine max
cgcaacaaaaagaaagaatcccaggcgaggagaaagatggaggggaaggagcaggatgtgtcgttgggagcgaacaagttccccgagagacagccaattgggacggcggcgcagagccaagacgacggcaaggactaccaggagccggcgccggcgccgctggttgacccgacggagtttacgtcatggtcgttttacagagcagggatagcagagtttgtggccacttttctgtttctctacatcactgtcttaaccgttatgggag

SEQ ID NO: 164802 - DNA, 261 bp, Glycine max
atggcttgcaggcaattgtgggcttcaagagctgcctcttacctgaggatctctgtgtttcacagaggcttttctaatgttattaaagatttcaagtatgttgattctcatgagtgggtgacagttgatggaaattacgcaaccatcggcataactgatcatgcccaagatcatttgggtgatgttgtatatgttgaattgccagaagtgggagcagctgtgacacaaggaggtagttttggtgcagttgacagtgtgaag

SEQ ID NO: 164803 - DNA, 263 bp, Glycine max
cgctctctgtttcgccatctctctctctcaacactctcttcatcgccaaagcgcttccactatctcgcccctcctttctctctctccctctccccaaatccctactctctctctccacgcgccgccgcaccttcatcgtccgcgccgaatcccaaaacggcgccgaccccgttcccgcccactacgacttcgacctcttcaccatcggcgcaggcagcggcggggtccgagccgctcgcttcgccgccaactacggcgcttct

SEQ ID NO: 164804 - DNA, 261 bp, Glycine max
gtgtagactgtcgagcagtgaataccagttgctcctatagccggcgctcaacaacatggcggacaaggcagtcaccatccgaaccagaaagttcatgacaaacaggcttctctccagaaagcaattcatcgttgatgtccttcatccagggagggctaatgtttccaaggctgaactgaaggagaaattgggcagaatgtatgacgtgacagacactaacactgtatttgtcttcaagtttcgaactcattttggtggtgg

SEQ ID NO: 164805 - DNA, 260 bp, Glycine max
acttaatcgatcatcacttcacttcactaatacatcatggcagacgagacccagaacaagtatgagagctctgaggttgaggtccaggatcgtggtgtttttgactttctcggtaagataaaggatgaagaagacaagcctcatcctcaggaggaggtcatcgccaccgagtttcaaaaagtcactgtctcagaccaaggagagaacaagcacagcctcttagaaaagcttcaccgatctgacagcagctctagctcttc

SEQ ID NO: 164806 - DNA, 262 bp, Glycine max
ggttcatcgtcccactttcttctccttttagggtttcctttttgtttctcctttccagatctgcatcttccattttttaggattaagcggtgagattcgtgaatctgagaaatgtcggattcttctcgggaggagaatgtttacatggcgaaattggcggagaggccgagcgttacgaggagatggttgagttcatggagaaggtagcaaagactgtggaggttgaggagttgacggtggaggagagaaatcttctctctgt

SEQ ID NO: 164807 - DNA, 260 bp, Glycine max
cttgcgaaaccgagagagcgaaggggcaaacacaattttttttaccttcttttttattttttgtagagagagagagagagaaaatgttggggatcttcagcagttcagtggtgtcgccgccggaggagctggtggccgctggcagcagaacgccgtcgccgaagacgacggcggggaagctgctgaaccggttcgtggagagcaaggcgtcggcggtgtcgctgcaggtgggggcacagtgcagttggcttacacacacc

SEQ ID NO: 164808 - DNA, 260 bp, Glycine max
caaaggtgaaacagttcaaggatgcaatagagaataattactggtttgaattcttcatggatgatctacctttgtggggatatgttggtgagttacatcctgataagaacagtgataatggcaagcatgtcatttacacacacaaaaacattattgttaaatacaacaatgatcagattattcatgttaatctcactcaggatatcccaaagcctttggaagtaggaaaacatttggacatgacatattctgtcaaatgg

SEQ ID NO: 164809 - DNA, 260 bp, Glycine max
gccagtcatggtgctcttcaatgtttcacgcgtagagaccactcccttcgatggccagaagcctgaaccctctggtctccgcaacaaggtgaaagtgttcgtgcaacctcattacctccataactttgttcagtcaacattcaatgcattaactgtggaaaaagttagaggtgcaacgctagttgtatctggtgatggtcgttatttttcaaaggtagctattcagattataactaaaatgtcagcagcaaatggagtaa

SEQ ID NO: 164810 - DNA, 260 bp, Glycine max
ggaaaaatggtttcgctgaaactgcagaagcggctcgccgcgagcgtgctcaagtgtggcagaggaaaggtttggcttgaccccaatgaagtcaacgaaatctccatggccaattctcgccaaaacataaggaagctggttaaggatgggtttatcatcaggaagcccaccaagattcactctcgctcacgtgctcgtcgaatgaaggaagccaagaggaaaggacgtcactctggatacggtaagcgtaagggtacaag

SEQ ID NO: 164811 - DNA, 260 bp, Glycine max
acacattctccgtcgccacgacaacaatggctccaaagaaaggtgcgaaaggtggagttgtagcagcaaagaagaaggttcaggagaaggtaacgaaccctttgttcgagaagcgtccgaagcagttcgggatcggaggcgcgctgccgccgaagcgggacctgacgcgcttcgtgaagtggccgaagaacgtccacatccaacgcaagaagcgcatcctcaagcagaggctcaaggtccctccggctctcaaccagttc

SEQ ID NO: 164812 - DNA, 259 bp, Glycine max
gtaatatattatgcaaaaaataattaaggtcttttcctttaaatgggctggttcaatgaaccgagaccactgcaggttcatggggatgggaggattaagaggctatgttttttaatcttccgatgttactgttgttttttttttaatttcaataaggatattatatatgtagtactatgcaagtagcttagagttgggtagaagggcatgttcatggtgttaattatgttatgtatgcgtgtgagtgctgttatgatgg

SEQ ID NO: 164813 - DNA, 264 bp, Glycine max
gaagtggccaatgaagttaattcatgggctgaaaaggagacaaatggacttgttaaagaccttcttcctcctggatcagttgacagttcaaccagactcatctttgcaaatgcactgtacttcaaaggagcatggaatgaaaagtttgattcttcgataacaaaagactatgattttcaccttcttgatggccgttcaatcagggttcccttcatgacgagcaggaagaatcagtttattagggctattgatggtttcaaagtc

SEQ ID NO: 164814 - DNA, 258 bp, Glycine max
gatattctatctcactttcctattacagtatctttacctcaatggcaccaagttctgcagtgccagatgaacaggttgttgttggagaggagattgagcatgtaagagtggtcactttgaacaggccaaggcaattcaatgccatctcaccagaactggtttctcagctagcaacatatttggaaaagtgggagaaggatgagaaagcagaactagttattataaagggagctggtcgggctttttgtgctggaggag

SEQ ID NO: 164815 - DNA, 263 bp, Glycine max
ccagcggtttgttgttgtaactcgttcttcttcttttgttgttctgtgtttgcgtttgttttttctctcacctgaaaatgtcttgctgcggtggtaactgtggttgcggaagctcctgcaagtgcggcaacggctgcggaggctgcaagatgtacccagacttgagctacactgagtcaaccaccaccgagaccttggtcatgggagtggcacctgttaaggctcaatttgagggtgctgaaatgggtgtgcccgctgagaac

SEQ ID NO: 164816 - DNA, 271 bp, Glycine max
caacagatagtgtgggagagagaagagcggaagagaaaatgacgaccaggttcaagaagaacaggaagaagagaggtcacgtcagcgccggacacggccgtatcggaaagcaccgcaagcatcccggaggtcgcggtaacgccggtggcatgcatcaccaccgtatcctcttcgacaagtaccatcctggtttcttcgggaaggtaggcatgcgctacttccacaaacttcgcaacaaattctacaatccgatcatcaacatcgacaagct

SEQ ID NO: 164817 - DNA, 268 bp, Glycine max
cctcattctccctttcctctccgaaccctcgatcactctcacgcgctcctatattcgctcctccaccgtcgctctctcgaacaaccacaacaccatcttcatcacatggcaaacgcagcatctggtatggcagtccatgatgactgcaagttgaggtttttggagctgaaggcaaaaaggacacaccgtttcatagtttttaagattgaggagcagcagaagcaggtcattgtggagaagcttggtgagcctgcccagggctatgaag

SEQ ID NO: 164818 - DNA, 270 bp, Glycine max
cgaaaaccttctaccatggtgcaaaagatgcaaaacatcaagaggttaagaggacaccgcaatgctgtctattgtgctatatttgatcggtcaggaagatatgtggttaccggatcagatgaccgacttgtaaaaatttggtcaatggaaactgcatattgtttggccagttgccgtggacatgatggtgacatcactgacttggctgtgagttcaaacaatgctttagttgcatcctcatcaaatgactgtgtcattcgagtttggcgc

SEQ ID NO: 164819 - DNA, 270 bp, Glycine max
cagagtccgacaccatcgacaacgtcaaggctaagatccaggacaaggagggtatccccccagaccagcagaggctgatcttcgccggcaagcagctcgaggacggacgtaccctcgctgactacaacatccagaaggagtcaactctgcacttggtgttgcgtcttcgtggggggttttaagctggagctgatttctgtgtgatgatcgatgttggattttcccaaacattttaagaagaaatgtgatgtgtaatgggtctgtaatgac

SEQ ID NO: 164820 - DNA, 272 bp, Glycine max
tcaggtatgtctgctagtcttgcttattttgacacttacagaagggaaaggttgccagctaatttggtgcaagctcaacgagactactttggtgctcatacatatgaaagggttgacatagaggggtcttaccatactgagtggttcaagcttgccaaacagtcaagaaattagattactgtatttgagccaatcaggattttcctaataaatgtaatattttctgctcagactgtatgctgagttgagtttgcatatccacaatgtggtga

SEQ ID NO: 164821 - DNA, 269 bp, Glycine max
caaagggtgtgagaatggagagcaaagaggaagatgtaagggttggagcaactaagttctcagaaaggcaaccaattggtacagcagctcagggtgacaaggactacaaagaaccacccccagcacctttgtttgagcctggtgagctaaagtcatggtccttctacagagctggaattgctgagtttgtggccactttcttgttcctctacattaccatcttaactgtcatgggtgtcaacaggtcaccctccaagtgtgcctctgtt

SEQ ID NO: 164822 - DNA, 269 bp, Glycine max
ccaattcccaattcccaattcccaattcgaaacccttattcctttcaaagaaccaaattgagtgatcgtgatggcaccaaaggcagagaagaagccagcggagaagaagcccgcggaggagaagaagtccacggtgggagacaaggctccggcggagaagaagccaaaggccggaaagaagcttccgaaggagggaggcgccggcggagaagggaagaagaagaagagaaacaagaagagcgtggagacatacaagatctacatcttca

SEQ ID NO: 164823 - DNA, 271 bp, Glycine max
attttgggtactcagaactttgtgcaagtttacaaccttatcaggaagaaccttaaattgaaaagaaataagaggagacaagaagaaaagctcatggccgttatcaatccgatgcgaaatgccaaacggaagttaagaattactgccaagaatcgtgctaacaaaaagagaaagattacgacaataaaaatggggaggtggatgcgttgattgaaaggaggtgtgaggagaaatgtccatatctctgtacctctagtttggcactgtgagt

SEQ ID NO: 164824 - DNA, 269 bp, Glycine max
cgcagattgtgaaggagaaagaagaatttgttcgcaatcaagactttgaaaaggctggagagctaagagacagagaaatggatcttaaggcccagatatctgcacttatagaaaaaggcaaggagatgagtaaggcagaaagcgaggcaggagatgaaggtcccatggtgactgaagttgacatacaacatattgtctcctcctggactggtattcctgtggagaaagtctcaactgatgaatctgatcgtctcctcaagatggaagag

SEQ ID NO: 164825 - DNA, 267 bp, Glycine max
gctttgccttgcatatgatgagcctctatcacacttgatatatcgctggtgctgatttcattctagttccttcaatctttgagccatgtggactcactcaactcacagcaatgagatatggttcaatacctgttgttcggaaaactggaggactttacgatacagtattcgacgttgaccatgataaggatagagcccaagcgcaaggtcttgagccaaatggatttagttttgatggagctgatactggaggtgttgattatgctc

SEQ ID NO: 164826 - DNA, 267 bp, Glycine max
gctttgttcactcttcttctcttgcggctagggttttagcgcacttcttctagatttaaggaagatgggtaaggaaaaggttcacatcagtattgtggtcattggccatgtcgactctgggaaatccactaccactggtcacctgatttacaagcttggaggcattgacaagcgtgttattgagaggtttgagaaggaagctgctgagatgaacaaacggtctttcaagtatgcctgggtgctggacaaacttaaggctgagcgtga

SEQ ID NO: 164827 - DNA, 269 bp, Glycine max
gacgtattctctttctctcttcaatggccggaatccgcttgcagccggaggactctgacgtctcccaacaatcccgcgcggtggctctctccgccaccgatctggtctccgacgacgaccgctccgtcgccgccgactcttggtccatcaagagcgagtacggaagcactctggacgacgaccagcgccatgctgacgccgccgaagctctctccaacgccaacctccgacctccctccgattacagttctgacaaggatgaacctgat

SEQ ID NO: 164828 - DNA, 268 bp, Glycine max
gattctctgtgttgtgttgtgtacttgtgttaattgtgttgttgttgtaggaaatttaagtgaagagagaatgatgatgaagtctgctatgtgtgcattggtgcttgtggcactggttgtggttgaagtggggcccatggctgaggctgcggtgacttgcaacccaacacagttgactccttgtcttccggcaattaattcaggttctgcaccttcgagtgcttgttgccagaagctgaaggagcaaaagccatgcttctgtggctac

SEQ ID NO: 164829 - DNA, 269 bp, Glycine max
gctcagaactgttcggtttttctggaaatttttcttctctcagccatctctctctctctctctgcgtccatggagttttggggtgttgaggtgaaaagtggagaatctctcaaggttgatccgggagatgacaagattatccacctttcaaatgcatgcctgggggatgtcactaaggataaagaaggtctaccagtagccctgtatgtcaagtttggtaaccaaaagcttgtacttggaacgctttcttctgaagcttttcctcagat

SEQ ID NO: 164830 - DNA, 270 bp, Glycine max
ggggaacaccaacattagagactctccacatcactctgggttttggactcaatcggacggtgatggtgtgtccatctttaattcgaagcatatttgggttgatcattgctctttgtctaattgtcgtgatggtctcattgatgccattcatggatccacggccatcaccatctccaacaattacatgacccatcatgacaaggttatgcttttgggacacagtgattcgtacacccaagacaaggacatgcaggtcactatagcattcaa

SEQ ID NO: 164831 - DNA, 270 bp, Glycine max
gtcaacattctcttctttgcccttgcctctgcctgcgggacatgccctagccctaagccaaggcataataagcacaagcctgttaagccaagtccttcaggtggctcaggtggttcgggtggttcaggaggctctggtggttcaggtggctctggtggttcaggtggttctggtggttcaggtggctcgggtggttcaggtggctcaagtacctcttgccctcgtgacgcactcaaactaggagtgtgtgccaatgtgctaaacgggttg

SEQ ID NO: 164832 - DNA, 270 bp, Glycine max
gcatttgcactatctcctggggtggaagcagggaacgctctagtgtttgagattgtgatgacttttgggttggtttacacggtgtacgcaactgcagtggatccaaagaagggtgatcttgggataattgctccaattgcaattggtttcatcgttggtgcgaacatcttggcggggggtgcatttgatggtgcatccatgaaccctgcagtgtcgtttgggcctgctgttgtcagttggacctggtctaaccactgggtttattgggtc

SEQ ID NO: 164833 - DNA, 268 bp, Glycine max
agcgagtacatccattccatgttcttaggatcaacaaaatgctttcatgtgctggagctgataggcttcagactggaatgagaggtgcatttggaaagccacagggaacatgtgctagagtcgccattggtcaggttcttctttctgtccgctgcaaggacagcaacagtcatcatgcacaggaggctcttcgtcgtgctaagtttaagttccctggtcgtcagaagatcatagttagccggaaatggggtttcaccaagtttagccg

SEQ ID NO: 164834 - DNA, 269 bp, Glycine max
agcaactctgaacaagtccattggaaatggcgtcgagttcctcaaccgccacctttcggccaagctcttccatgacaaggagagcatgcagccactgcttgagttcctcaggcttcacagttataagggaaagaccatgatgttgaatgacaaagttcaaagcctggattctctccaacatgttttgagaaaagcagaagagtatctgatttcagttgctcctgaaacaccctactcggaattcgaaaacagattccgggagattggtc

SEQ ID NO: 164835 - DNA, 267 bp, Glycine max
agctctaatcactctagctgttgcaaatttctactatttttcaatggcttctgcagatgttgagttccgttgctttgttggtgggcttgcttgggtcaccggcaacgatgccctcgagaaagccttttcaatctacggcgacatcgttgaatcgaaggttatcaacgaccgtgagactggaaggtccagaggattcggatttgtgaccttcgcctcagagcagtcaatgaaagatgcgatcgcaggaatgaacggccaggaccttga

SEQ ID NO: 164836 - DNA, 270 bp, Glycine max
gagggaaaaatggtttcgctgaaactgcagaagcggctcgccgcgagcgtgctcaagtgtggcagaggaaaggtttggcttgaccccaatgaagtcaacgaaatctccatggccaattctcgccaaaacataaggaagctggttaaggatgggtttatcatcaggaagcccaccaagattcactctcgctcacgtgctcgtcgaatgaaggaagccaagaggaaaggacgtcactctggatacggtaagcgtaagggtacaagggaggca

SEQ ID NO: 164837 - DNA, 270 bp, Glycine max
gagtcaagatgcacaaagttctcatgttacagcttttaattcaggtgatggatcctcaaagtcggacaacgaacgggatgttcatatttcaatgcggttaatggaggactttcttgatcttgctaaagaaaatacagaaaaggatttggaaacttgtggtatacttggtgcctatcttgagaagggaaccctctatttgactaccctgatcataccaaagcaggaatcagcttccaattcttgtcaagctacaaatgaggaggaagtttt

SEQ ID NO: 164838 - DNA, 270 bp, Glycine max
gagcgagtacatccattccatgttcttaggatcaacaaaatgctttcatgtgctggagctgataggcttcagactggaatgagaggtgcatttggaaagccacagggaacatgtgctagagtcgccattggtcaggttcttctttctgtccgctgcaaggacagcaacagtcatcatgcacaggaggctcttcgtcgtgctaagtttaagttccctggtcgtcagaagatcatagttagccggaaatggggtttcaccaagtttagccgt

SEQ ID NO: 164839 - DNA, 269 bp, Glycine max
aggcaggttactattcacttcctaattccaaagctgcaaggatgttctactttttctttgaatcacggagcaacaaggatgatccagttgtcatatggttgactggaggaccagggtgtggaggtgaattggccttgttttatgaaaatggcccttttcatattgccaacaacttgtcccttgtatggaatgatttcggttgggaccaggcatcaaatattttatttgttgaccaacctaccgggacaggttttagttactcttctgat

SEQ ID NO: 164840 - DNA, 264 bp, Glycine max
tgattgctgatgtttcgaagtctgacaagatcgttgtagagaaatccacagtcccggttaaaacagctgaggcaatagagaagattctgacccacaatagcaagggaatcagattccagattttatcaaaccctgaattccttgctgagggaactgcaatcaaagatctctttaacccagaccgtgttcttattggaggcaaggaaaccccagaaggccataaagctattcaagcattgaaggatgtgtatgctcaatgggtcc

SEQ ID NO: 164841 - DNA, 265 bp, Glycine max
cgagctcggagccgctattatccccagacgccaccgccgcagcaccagaagaagaagaagagtgatggctgagtacgacctaactccgcggatggcgccgaatctcgacaggcaccttgtgttccctctcctggagttcctgcaggagcggcagctctacgacgacgaccacatcctgaaggcgaagatcgaccttctcaacaacaccaacatggttgactacgctatggacatccacaagagcctctaccacaccgaggacgtc

SEQ ID NO: 164842 - DNA, 266 bp, Glycine max
cgagcgggtgaagcttggaagccaaggcctgaaggtttccaagttaggatttggttgtatgggcctaagtggagtgtacaacgatcctgttcccgaagaggttggcatctctttgatcaaacacgcattcaccaaaggggtcactttctttgattctgcagatttttatggagcacgtgccaatgaagttttggtcggaaaggctctcagggactttcctcgagatcaatttcagattgccacaaagtttgggattgtcaaaatgg

SEQ ID NO: 164843 - DNA, 266 bp, Glycine max
gttttcttcttgtgaaaggatgggaatcgctgcagagcatggttattttgtgaggacaaatcgaaatgcagaatgggatacttgtattccagtacctgattttgagtggaaacagattgctgagccggttatgcagttatatatggaaacaactgatggttcaaacatagaggccaaagaaagtgctctagtttggaattacgagtatgcagaccgagactttggttcatgccaagctaaggagctttttgatcatctggaaagtg

SEQ ID NO: 164844 - DNA, 270 bp, Glycine max
cgaggggtcgtgttctctctctgcttcagcttcggcttcggcttcggcttcgagaagggtcgattgggtccccaagctgtttcttctctgtttctgacaaactttataacccttatcaaacatgagtggtcgcttttctcgcacaatttatgttggcaacctgccctctgatataagagagtcagaaattgaagatctattctacaagtatggccgtataatggatattgaattgaaggttcctccccgccctccatgttattgctttgt

SEQ ID NO: 164845 - DNA, 241 bp, Glycine max
gttggataaagaaatggaggaaccggctttttctttctcatttggagtttgtcgcacttgagttttataaataatgtccgtgattttagttttgtgattaagctttcgataagaggagagaaagagaaggaaaaaaaaagttgcttttttttttgttgttgcatgatttggatcttgattggaaaagcttcgaattggggtagttttacccagcaattcaattttaagccgtgccttcttc

SEQ ID NO: 164846 - DNA, 259 bp, Glycine max
  unsure (1)..(259): unsure at all n locations
gctcagtctcgccgtagccgtcgccgtcgcgggctcctccttcgatgatgccaaccctatccgtatagcgtcggacttggagtcgcaggtgctggacgtgatcggacagagccgccacgctctctccttcgcccgcttcgctcgccgccacggcaagcgctaccgttccgtcgacgagatccgcaaccgcttccggatcttctctgataatcttanactcatcagatccaccaacaggaggtctctcacctacacgctc

SEQ ID NO: 164847 - DNA, 264 bp, Glycine max
ctcgagccgattaattgcaagaatggcacttcgttgcttggtgatgtccctttctgtactcttcactcttggtcttgcgagagaaagccatgccagagacgaagatttttggcatgctgtttggccaaacactcccattccaagttcattgcgagatcttctaaagcctggccctgcaagtgttgaaatcgatgatcaccctatgcaaattgaagaaacacagtacccgaaaaccttcttctataaagaagaccttcatccagg

SEQ ID NO: 164848 - DNA, 261 bp, Glycine max
gcaagatgtcccacttcaaggtgtagctggtggaatgatgtcagtcccttatgacatgggtggtctgccaatccgcgatgctgtgggacagccaatgcccattcaagctttggccacgggccttgcaaatgctccccctgaacagcagaggactatgctcggtgaagctttatacccgcttgtggatcagctggaacacgatgctgcagcaaaggttactggcatgcttctggagatggaccagcctgaagttttacatct

SEQ ID NO: 164849 - DNA, 263 bp, Glycine max
gtgaatgcgtagaaaaggaaaataaagaaattagcgtgaaaaatgttgggtgtgttcagcagctccatagtgtcgccgccggaggagctcgttgccgccggcagccgtacaccgtcgccgaagatgacggcggcggcgctgcggaagtggttcgaggagaagaacccctccgcagtgtcggtggaggtcggagagcatgtccagctcgcttatacccaccagaacgagtcgccgtttcagcccagatcctttgctgtgacgga

SEQ ID NO: 164850 - DNA, 262 bp, Glycine max
gcaatgcgtcctttgacagcagctgtggttgctgcaggtggaaatgcaagctacgtacttgatggggtgccccgaatgagagagaggccaattggggatttggtagctggtcttaagcaacttggtgcagatgttgattgctttcttggcacaaactgtccacctgttcgtgtaaatgggaagggaggacttcctggcggaaaggtgaaactgtctggatcagttagcagtcaatacttgactgctttgcttatggcagctc

SEQ ID NO: 164851 - DNA, 272 bp, Glycine max
  unsure (1)..(272): unsure at all n locations
cctcgagccgattcggctcgaggcgactgaactaatcattaatacgcactcgctgtttcagcttcatcacccttcttttacatcatttatatctcttgagaaatggcacaagaaacctttctatcacatctgaatctgtaaaccacggtcancccgacaagctgtgcgatcagatctctgatgcagtacttgatgcgtgccttgatcaggaccctgacagcaaggttgcctgtgagacatgcaccaagaccaacatggtcatggtcttcgga

SEQ ID NO: 164852 - DNA, 270 bp, Glycine max
ctcagaattctctaaaagagatctttttctgctctttgaagaaagaagggtctttgcttgattttggagatgtctctgctctcagatctcatcaaccttaacctctccgataccaccgagaagtgctcgcagagtacatatggatcggtggatcaggaatggacctgaggagcaaagcaaggactctcccaggaccagttagcgacccttcagagcttcccaagtggaactatgatggttccagcacaggtcaagctcctggtgaagaca

SEQ ID NO: 164853 - DNA, 266 bp, Glycine max
atcagggagatactctgatggccgtctcaccatcgatttccttatggatgctatggacttgccattcctaaatgcctatcttgattcgttaggtttgccaaattttaggaagggatgcaacttgccgcagcagctgcaactatacttccagccactgcatcatccctctgccccttctcctttggggttcaggtgtctcagttcctccgattcaaagctcgggcccttgaattgatcgctaaaggcaggaaatttgataagtacgt

SEQ ID NO: 164854 - DNA, 268 bp, Glycine max
tcgaatcgagcgaatcggctcgagtctttttgatccatttttcaatcgttgtgatcttcctacttcctcgtacacaggtgaatgactgaaaggtagcaatggcgaccaggaacttggaaaagaggcatccattgatgcacagattaggcaattggctcatgccaaagtgagtgaggatgacaaactgattgagtatgatgctcttctgctggatcggttccttgatatccttcaagatttacatggggaggatctgaaggaaacagtt

SEQ ID NO: 164855 - DNA, 269 bp, Glycine max
ctggtcttactgtgtggtgactgtgctctgctctcatctcattcatattcatttcaatggcaactcaaggtcaagtcattacctgcaaagctgcggtggcctgggaacccaacaagcccttaccgtccaagacgttcaggttgctccgcctcaggccggcgaggtccgtgtccaaatcctcttcaccgctctctgccacaccgatgcttacacttggggcggcaaggatcccgaaggtctcttcccctgtattctcggccacgaagctg

SEQ ID NO: 164856 - DNA, 270 bp, Glycine max
gtgtaccgtgcaatacaaaggacttgcagcccatgaccgaggatgcagcacgcacaatgcttcaacagattgcccagtggcatttggttaatgaggatggtgtgttgaaattgaggagatcatgaaagtaaagacttttaccaaaggattggaatttttcaggataatagctggtcttgctgaagctgaaggtcatcatcctgatcttcaccttgttggctggaataatgttactatagagatttggacgcattctgtgggtgggctgac

SEQ ID NO: 164857 - DNA, 266 bp, Glycine max
catcatcaaagtttcttcctttctctggactttgccttctctgacacatttggtgccttgtagagcgtgttttggcaggcaggtggtatggcgaaggacgttgaggttgctgagcgtggctcctctctgggaaggactaccaggaccctccaccagcaccactcattgatgctgaggagctcacaaagtggtccttttacagggctctcattgctgaattcattgccactttgctcttcctctacattactgtgctcacagtcata

SEQ ID NO: 164858 - DNA, 272 bp, Glycine max
ctctttctctctccaaaattaaaacggggagcgaggatccaacggtcccaattgggtgtgatggttgttatattcatttgaattaatttggttcattttgtgtgtttctcagagaatcgctctcttccatcctttcctctcctctctccgcatttcccaagagcagatattagaagatgccagacgctgaggatattcaaccccttgtttgcgacaatggaacaggaatggttaaggcaggatttgcaggagatgatgccccacgtgctgtg

SEQ ID NO: 164859 - DNA, 270 bp, Glycine max
ctcgagccggttagagcgtctctccgtcgattacggcaaaaagtccaaattagggttcaacatttacccttcccctcaggtttcaaccgcagtcgtggagccctacaacagcgtcctctccaccactcccttctggaacacaccgacgtggctgttctcttggacaacgaagccatctacgacatctgtaggagatctctcgacatcgagaggcccacctacaccaacctcaacaggctcatttcccagatcatttcgtcgctaaccact

SEQ ID NO: 164860 - DNA, 269 bp, Glycine max
attgctgctggatcacgagatggcgttcagccacaagtttggctgcaggacgaaagagagcttaaaagacaaagacggaaacagtctaatcgggagtctgcacgcagatccaggttacggagcaggccgaatgtgatgaactagctcagcgtgctgaagctttgaaagaagaaaatgccagtctccgatcagaagtgagccggatcaggagtgagtatgagcagctacgttctgagaatgctgccctcaaggatagacttggggagata

SEQ ID NO: 164861 - DNA, 264 bp, Glycine max
ctcgagccgctcgagccgcgcaacaaaaagaaagaatcccaggcgaggagaaagatggacgggaaggaccaggatgtgtcgttgggagcgaacaagttccccgagagacagccaattggacggcggcgcagagccaagacgacggcaaggactaccaggagccggcgccggcgccgctggttgacccgacggagtttacgtcatggtcgttttacagagcagggatagcagagtttgtggccacttttctgtttctctacatca

SEQ ID NO: 164862 - DNA, 262 bp, Glycine max
ggaacttgatagtatggatgaggaatcaaggttgcttacgctaattgaaggtgttcttgcagcaaatatttttgattggggatctcgtgcatgtgtggatctctatcataaaggaactttatcgaaatttatagaatgagtcgcaataaaatgcgtagaccttggcgggtggatgattttgatgagtttaaagagagaatgaaaatgccctgtcataagagggctttactttttgtagataactcaggtgctgacattgttc

SEQ ID NO: 164863 - DNA, 267 bp, Glycine max
gaagaaagatggaagatccagaggttattattgggagcttgaatccaaatgataccaggggaaagaccgttacttgcaaagctgccgtggcatatggtcctggagagccctttgtggtgaacgtgttcttgttcatcctcctcagaaaatggaggttcgaatcaagatcctcttcacttcaatctgccacaccgatctcagtgcttggcaaggcgagaatgaggctcaacgtgcatatcctcggattttcggccatgaagcttccgg

SEQ ID NO: 164864 - DNA, 267 bp, Glycine max
ctcagatgagacagagatcgtaactaagagctgtgggaaatcttacgcaccattccccaaaggatttttcttttcaacatccggaggtttgagcagttttgagcatccactgaatgaggtgagcctgtaccaagggttgacagttccggacaggtgtgtggtgcaactttcaaggtggatgctgaggctaagaaggaagcaactggcatgccaagggttgggagtgctgctaactggtcaaataatatctgattgcgactctattct

SEQ ID NO: 164865 - DNA, 269 bp, Glycine max
gggaagtcggcaaaatggatccgtaacctcgggacaaggattggctctgagggctgggcacgggggtcccagtcccgaacccgtcggctgtcggtggactgctcgagctgcttccgcggcggagcgggtcgtcgcgtgccggtcgggggacggattgggaacgggcccttcggggcctcttccccgggcgtcgaacagtcaactcagaactggtacggacaaggggaatccgactgtttaattaaaacaaagcattgcgatggtccctg

SEQ ID NO: 164866 - DNA, 267 bp, Glycine max
ctcgagccgcaacattctcacaagtcacagccaaacaccatttcattaattcttgcagaatattgcttagttttgttttatctgaatttggaaacagcttttgaatggctttttcaagagtgcactgctaatatgcacggtcgggtattttgtgattgcctctgccggcaatttccaccaagattttgatatcacatggggagatggtcgggctaagatactcaacaatggagagcttctcactctgtcacttgacaaagcctctgg

SEQ ID NO: 164867 - DNA, 269 bp, Glycine max
ctctctctttctttttctttgatcaattcaatctccttgacacgatatccaaattaaaccaagacccagaaagtgatcaagaagataaagaaccacaaagaaagaagatacatacactcaataagtacatacatacacaccatgaagctcgtttggtctcccgaatcagccttacaagcttacatagatacggttaaatcatgtgagaaattcaaggaaaccggggtaccagagttgctatcagccatggctgcaggatggaacacgaa

SEQ ID NO: 164868 - DNA, 260 bp, Glycine max
cgagagtccgacaccatcgacaacgtcaaggctaagatccaggacaaggagggtatccccccagaccagcagaggctgatcttcgccggcaagcagctcgaggacggacgtaccctcgtgactacaacatccagaaggagtcaactctgcacttggtgttgcgtcttcgtggggggttttaagctggagctgatttctgtgtgatgttcgatgttggattttcccaaacattttaagaagaaatgtgatgtgtaatgggt

SEQ ID NO: 164869 - DNA, 264 bp, Glycine max
ctcaacttctgctcttccaactcctacaacgcttttctctgcactcatgggcaaggtcaagatcggaatcaacggatttggaagaattggccgtttggttgccagagtcgctctgcaagagacgatgttgaactcgttgccgttaacgaccctttcattaccaccgattacatgacatacatgtttaaatacgacagtgttcacggacactggaagcatcacgatgtcaccgttaaggacgagaagacccttctcttcggtgac

SEQ ID NO: 164870 - DNA, 264 bp, Glycine max
cctcgagccgaatcggctcgaggcaaaatcttccctgagaagaaactggataccactgatcaccataccagttataacctacggctttgctggaatgccaccagcaactccagccaatatgcaagctggctagtgactggaatgatcttcaattactttgtgttccgctacaacaaacgctggtggcagaagtacaattatgtactatcagcagcactggatgcaggcacagcttttatgggtgttttaatattctttgccctg

SEQ ID NO: 164871 - DNA, 267 bp, Glycine max
ttcattccttaatttaaaacctccactcattccataaatctctgtttactctcctcgattttaccgcaacatgacacaagaaggaaatggcaacaccaacttctgtatgagtgttaacacaacggctacattagcgctaatgacccgttgaactggggcgcggcggcggaggcgatggccgggagccacctcgacgaggtcaagcgcatggtggaggagtaccggaggccggtcgtgaagctcggcggcgagaccctgacgatctcg

SEQ ID NO: 164872 - DNA, 267 bp, Glycine max
ggcaccatggcgacactggattccgacgtgaccatggttccggccggcgaactctccaccagcgccggtccttcttcgtccaccaagaagccgaagcgattcgagatcaagaagtggaagccgtttctctctgggcttgggatattgttgtggataattgcgctacttgccgcaaccatatcatggatctctgtattgagtgccaggccaaccaggctagcgccactagcgaggaatgcactgtagcttggggagtttgtaaccatg

SEQ ID NO: 164873 - DNA, 265 bp, Glycine max
ttttgttgcacctttcagaggtggaaggcccattcgggtggttacatttccgaataccattgtgcagattgaaccagacatgaattcaaggtttcagcttttgagtaccactaccaatgtgattttgttcaaggaaaagatctcgcaatggttaaagttaatgtagcatgtgctgctgttggcttgacatcaagttacactccaactccattgttggaatctggtttgcaaaaagacagagggttaattgtggagtactttggaa

SEQ ID NO: 164874 - DNA, 263 bp, Glycine max
cagttcctagttgagtctttatcggattccaccatttacatggcgtattacactgttgcacaccatttgcagagtggtgacatgtatggatccggcgagtctgccatcaaacctcataactgactgatgatgtctgggattatattttctgtggtggaccatatccgaagtcaaccgatatatcatcatcccttttagaaagaatgaagcaggagtttgaatattggtatccctttgatcttcgagtttctggtaaggatctc

SEQ ID NO: 164875 - DNA, 262 bp, Glycine max
cttctaagatgcttggcactgccaacaacaacgattccaccttcaaaagggtgctgaaggagtgtgcagaaaagtacaagtatgccagtgatgccctccaagcttctgctcaggattggttaatgaggcatatgactatgcttccatgcacatcattgcagcctatgattactccaatgtttgtcacaacttgttcaaactctactcgggtttggtttatccttctgagcttgctcctagagaggatggtttgaagtgttta

SEQ ID NO: 164876 - DNA, 262 bp, Glycine max
ccaattcccaattcccaattcccaattcgaaacccttattcctttcaaagaaccaaattgagtgatcgtgatggcaccaaaggcagagaagaagccagcggagaagaagcccgcggagagaagaagtccacggtgggagacaaggctccggcggagaagaagccaaaggccggaaagaagcttccgaaggagggaggcgccggcggagaagggaagaagaagaagagaaacaagaagagcgtggagacatacaagatctaca

SEQ ID NO: 164877 - DNA, 266 bp, Glycine max
gcagtggttacaggataaggttcattcaattttcctttcccttttgaaggatgaatttcctgacgtacgcctaaacattatcagcaagcttgatcaagtgaatcaggttataggaatcgtctgttatctcagtctttgttaccagccattgttgagcttgctgaggataggcattggagggtccggcttgcaattatagaatatatacccttattggcaagtcaattgggggttaggttttttgatgacaaacttggtgctctttg

SEQ ID NO: 164878 - DNA, 265 bp, Glycine max
caaaggattctacccgccgctcgatgggaattgcgcttcaaggcgtctcgtagggctaatccgcctcacgagggtcaccaacggcacgtgcctttggggggccgaggccccctactgctgtcggcaaacggacggcgggcgcacgcgtcgcttctagcccggattctgacttagaggcgttcagtcataatccaacgcacggtagcttcgcgccactggcttttcaaccaagcgcgatgaccaattgtgcgaatcaacggttcct

SEQ ID NO: 164879 - DNA, 265 bp, Glycine max
cagaagggttcctcactctcttcatctgattgaacaaaatgtacacctcgaggaagaaaattcacaaggataaggatgccgagcccactgaatttgaggagacagttggacagtacttttcgacttggagaacaccaatcaggatctgaaaagtgacttgaaagatctctacataaaccaagctattcaaatggatgtggctggtaatcgcaaggctgtagtcatctatgtgcctttcagattgaggaaggcattccgcaagatt

SEQ ID NO: 164880 - DNA, 267 bp, Glycine max
ggcttctatacaatggccatatgagcaacttaaaacagctttctctgtttctacttttcatcaataccttttcctctttcttcttgttattgttgtgttaaagctaacaagaagacccaaatcaaacccagtttcaatctgcctccctccccaagaaagctaccaatcattggcaatcttcatcaactaagcaaattgccataccattctcttagaaccctctcacaaaagcatggttctctgatgttgttgcagttcgggcagact

SEQ ID NO: 164881 - DNA, 255 bp, Glycine max
tctttcttcttctctctcgacccatacctaactctcgactctgtttccctctcgtatccgtcatgataggaggatagtccaagaccgaatctaagagagccgatccaaacttgctgtgaataagaagggagccgccaccaaggctaggaaacccgccggcaaggggaaggcagcgaaagaccctaacaagccaaagaggcctccaagtgctttcttcgttttcatggaggagttcaggaaggtattcaacaaaga

SEQ ID NO: 164882 - DNA, 257 bp, Glycine max
gtgtaccgtgcaatacaaaggacttgcagcccatgaccgaggatgcagcacgcacaatgcttcaacagattgcccagtggaatttggttaatgaggatggtgtgttgaaattgagagatcatggaaagtaaagacttttaccaaaggattggaatttttcaggataatagctggtcttgctgaagctgaaggtcatcatcctgatcttcaccttgttggctggaataatgttactatagagatttggacgcattctg

SEQ ID NO: 164883 - DNA, 260 bp, Glycine max
tcagtgtacaaggcaaacatagagggtaaggttttggcagtaaaaagattcaagaaagatgtcacggaagagctgaaaattctgcagaaggtgaatcatgggaatctggtgaaactaatgggtgtctcatcagacaatgatggaaactgttttgtggtttatgaatacgctgaaaatgggtctcttgatgagtggctattctccaagtcttgttcagacacatcaaactcaagggcatcccttacatggtgtcagaggat

SEQ ID NO: 164884 - DNA, 258 bp, Glycine max
  unsure (1)..(258): unsure at all n locations
ggcttaaccaggtgcttcgttgggcacttggctccattgagatcttcttcagtcgtcattgccctttatggtatggctataaggaagggaagctgaagtggcttgagcgatttgctacgcaaacacaactgtctaccccttcacctccatacctctagtcgcctactgtgttcttccagctgtctgtttactcactgataaattcatcatgccaccgataagcacttntgctggtttgtacttacgtgctctattctc

SEQ ID NO: 164885 - DNA, 259 bp, Glycine max
ctcgttcttcttcttttgttgttctgtgtttgtgtttgttttttctctcacctgaaaatgtcttgctgcggtggtaactgtggttgcggaagctcctgcaagtgcggcaacggctcggaggctgcaagatgtacccagacttgagctacactgagtcaaccaccaccgagaccttggtcatgggagtggcacctgttaaggctcaatttgagggtgctgaaatgggtgtgcccgctgagaacgatggctgcaaatgtgg

SEQ ID NO: 164886 - DNA, 258 bp, Glycine max
tacaaattctctgtgttgtgttgtgtacttgtgttaattgtgttgttgttgtaggaaatttaagtgaagagagaatgatgatgaagtctgctatgtgtgcattggtgcttgtgcactggttgtggttgaagtggggcccatggctgaggctgcggtgacttgcaacccaacacagttgactccttgtcttccggcaattaattcaggttctgcaccttcgagtgcttgttgccagaagctgaaggagcaaaagccatg

SEQ ID NO: 164887 - DNA, 256 bp, Glycine max
ggaaaaatggtttcgctgaaactgcagaagcggctcgccgcgagcgtgctcaagtgtggcagaggaaaggtttggcttgaccccaatgaagtcaacgaaatctccatggccaatctcgccaaaacataaggaagctggttaaggatgggtttatcatcaggaagcccaccaagattcactctcgctcacgtgctcgtcgaatgaaggaagccaagaggaaaggacgtcactctggatacggtaagcgtaagggtac

SEQ ID NO: 164888 - DNA, 265 bp, Glycine max
gctcgagccgctcgagccgcgcaagaaaaagaaagaatcccaggcgaggagaaagatggaggggaaggagacacgatgtgtcgttgggagcgaacaagttccccgagagacagccaattgggacggcggcgcagagccaagacgacggcaaggactaccaggagccggcgccggcgccgctggttgacccgacggagtttacgtcatggtcgttttacagagcagggatagcagagtttgtggccacttttctgtttctctacat

SEQ ID NO: 164889 - DNA, 113 bp, Glycine max
gaagtcggctcgagaccgattgctagaatggaatttcgatgctcagtcatctctattacgattctcatctctcttgcacttgcaggagagaggcatgtccatgcatcgctacc

SEQ ID NO: 164890 - DNA, 291 bp, Glycine max
caacaaccttctttctttttctgtgagcctttctttcaggttcttaacttgatcagtgtgcagtgtccaaatcataagggtagttgcaaattgcaatggctaagcatgatgttgagggtggttccttctctgcaaaggactaccatgatcctcctccagcaccgttgattgatgctgaggaactcacacagtggtccttctacagggctttgattgctgagttcattgccacaatgctctttctttacatcacagtgctcactgtgattggttacaagagccagagtgatg

SEQ ID NO: 164891 - DNA, 289 bp, Glycine max
ggtagcagcagctgagcttgtttccgtcgccgcttcacccaccgtagcaaccatgatcattcccgagaagaaccgtaaagagatctgcaaatacctcttccaagagggagtttgctttgcgaagaaggacttcaatctggcaaagcacccagagattgatgtgccgaatctgcaggtgataaagctgatgcagagcttcaaatccagagagtatgtgagggagacatttgcgtggatgcactattactggttcctcaccaacgatggaattgagttcctcaggacatac

SEQ ID NO: 164892 - DNA, 284 bp, Glycine max
tcgcatcggatcttcactctcttctccgatctcaaaatgcccgccgtttatggacctcgcttgaccaccttcgaagacttcgagaaggagactgcatacggttacgttcgcaaggtatcaggaccagtcgtcgttgcagatggcatggctggggctgctatgtatgacctcgtccgtgttggtcatgataatctcattggtgaaattattcgtctcgaagggacttctgccaccatccaagtttatgaggaaactgctggcttgatggttaatgatccggtgtt

SEQ ID NO: 164893 - DNA, 290 bp, Glycine max
  unsure (1)..(290): unsure at all n locations
acttattccattcgacacttggttcaagacttttggcagcctcaacatagagagtgagtgccccaagtttgttgcttgggccaagaggtgcctgcagaaagacagtgttgccaagtctcttcctgatcaacacaaggtctatgagttcattatggacataagaaagaagttcgacattgagtaggttcatgttggatcttaatagccatagtgacgtattgatcattcttggcctntcaactaaatagtatctgtgtagtatattaaaggcacttggatgtaccaaactt

SEQ ID NO: 164894 - DNA, 295 bp, Glycine max
gaaagggttttaccttcaatcatacatgaaactttgaaagccgtggttgcccagtacaatgccagccagcttattactcagcgagcggctgttagtcgggaaatccggaagattctaactgaaagggctgctaacttcaatattgcccttgatgatgtgtcaattactagtctgacttttggcaaggagtttactgctgcaattgaagctaagcaggtagctgcacaagaagctgagagggctaaatttgttgtggaaaaagctgagcaagacaagagaagtgctgtaattagag

SEQ ID NO: 164895 - DNA, 291 bp, Glycine max
gtctctccgcagcagccttcttcgccgtttcagctcaagagccaccagcaggtaagatatggttaagcataacaacgttatccccaatgggcacttcaggaaacactggcaaaactatgtgaagacttggtttaatcaaccagtacggaagaccagaaggcgtttagctcggcagaagaaggctgtcaagattttcccaaggcctactgctggacctctcaggccaattgttcatggccagactctgaaatacaacatgaaagtcagatctgggagaggattttctctcga

SEQ ID NO: 164896 - DNA, 285 bp, Glycine max
cgtcccatagcagcgatgggaatcgatcttaaggctgggggtaagagcaaaaagaccaaaagaacagcaccaaaatccaatgacatctacctcaaattacttgtcaagctttatcggttccttgttcgaaggactggcagcaatttcaatgctgttatactcaagcgcttgttcatgagcaaggttaacaagcctccaatttctttgtcaaggttaattaagtatacaaaggggaaggaggataaaattgctgtaatagtggggactgtaactgatgatatcaga

SEQ ID NO: 164897 - DNA, 286 bp, Glycine max
ctatcttctctcggagccgctattatccccagacgccaccgccgcagcaccagaagaagaagaagagtgatggctgagtacgacctaactccgcggatggcgccgaatctcgacaggcaccttgtgttccctctcctggagttcctgcaggagcggcagctctacgacgacgaccacatcctgaaggcgaagatcgaccttctcaagaacaccaacatggttgactacgctatggacatccacaagagcctctaccacaccgaggacgtcccgaacgatatggtcg

SEQ ID NO: 164898 - DNA, 276 bp, Glycine max
caccaatcatctttagttcttcagtaatttattgtgggattctattctaagattttgctcatgtctagctgtttgtgtggaagcagctgcaactgtggctgcaactgcggttgcaactagtactcttttgacttgagtttcgttgagaagacaaccacagagactctagttttgggtgtcgggcctgtgaaggcccaattggagggtgctgaaatgggcgttgcatctgagaacggtggctgcaactgtggatcaagctgcacctgtgacccatgc

SEQ ID NO: 164899 - DNA, 284 bp, Glycine max
cctcgagccgaatcggctcgagtgatattgacataacattaagatgtactattatgggttggacctttggaatcagctttctgctcctccaagtgctcgaagaggtgttctagagctgggatgaaggacaggtgcatgaagttctgcgggatttgctgcagcaagtgcaactgtgtgccatctgggacttatgggaacaagcatgagtgcccttgctacagagacatgaagaactccaagggcaaggccaaatgcccttgattacttttttttttcaccatcca

SEQ ID NO: 164900 - DNA, 284 bp, Glycine max
cggaaccaaattctacttcctttcagctgcacaagagtctccaatcccaactctctctctctctctctccacttgccaacgcaaaaggctaaagagaagaaaaggcaaagcaagggaccaagcaaaacacacacagagaaacatgtcttccccaagcaagcgccgagagatggacttgatgaaactgatgatgagtgattacaaggttcacccgattaatgatggaatgcaagaattttatgtgcaatttcatggacccaatgacagtccttatcatggtggtg

SEQ ID NO: 164901 - DNA, 250 bp, Glycine max
caaaactgtatatgcttcttcaaggaggaacggggattccccacctcaagtggtttggagttgagggagactacaatgtcatggttatcgaccttcttggaccaagtctggacgatttattcaattattgtaatcggcagttcacattgaagacagtgttaatgcttgcggatcaattgattaacagagttgaatatatgcattcaagagggttccttcaccgtgacatacagccggacaattttctaat

SEQ ID NO: 164902 - DNA, 288 bp, Glycine max
cgtatgcaggagaagaaccatggaagctatgacttcatctttgttgatgcggataaggacaactacctcaactaccacaagagcgttgatagagcttgtaaaagttgggggcgtgatcgggtatgataacaccctatggaacggatctgtggtggcactccctgatgctcctcttaggaagtatgttaggtactacagggacttcgtgctggagctcaacaaagccctcgctgtggaccccaggatcgagatttgcatgctcccggttggtgatggaatcactatctg

SEQ ID NO: 164903 - DNA, 288 bp, Glycine max
  unsure (1)..(288): unsure at all n locations
cacaatcttagaaataaacctacatatccaaccctcatataaatacgcccttancctacaaccatatattctacacatagctagacatggtgaaaccagccatggctagtgttgattcttcttccttttcttcttgtaacaatgattcattttcctctaactacagcattcatacttgcaagatgtacaaaggggtaaggaagagaaaatggggcaaatgggtgtccgacattcggcttcccaacagccgtgagcgcatatggttggggtcctatgacacccaagtga

SEQ ID NO: 164904 - DNA, 284 bp, Glycine max
gaagctgattggaccggacggtgaagagactgaatttgaagcccctgatgacacttacattctggattcggctgacaatgctggagtggagctaccttactcatgcagagctggtgcctgctctacttgtgctggccaagttgtatcaggctctgtggatcaggcagatcaatcctttcttgatgaccatcaaattgaaaagggttaccttctgacatgtgtctcatacccgaaatcagattgtgtgattcacacccacaaggaggaagatctcgtctaggtgg

SEQ ID NO: 164905 - DNA, 128 bp, Glycine max
cgttcatggggatgcgaggcttaagacgctttgtcttttaatcttccgatgtcactcttgtctgtcagtttgtctttttatggtttatttcaattcgtactgtgcaagtaggttagagttgggtagaa

SEQ ID NO: 164906 - DNA, 278 bp, Glycine max
ctatcccatggtcccaggacatgaagtggttggtgcggtactggaggtggggtcagacgttagcaggttcagagtgggagagttggtgggagtaggactcctcgtaggttgctgcaaaaactgccagccatgccaacaagacattgagaattactgcagcaagcagatctggtcttacaatgatgtatatgtcggtggaacacccacgcagggtggctttgctgaaaccatggtcgttgagcacaagtctgtggtgaaaattcgcagagggtttggcg

SEQ ID NO: 164907 - DNA, 222 bp, Glycine max
cagtaatcctgcaattttagggaaatgattaggaggcaacaagtagatcatctgatagacgaaggtatgttactccaaacatgcttagttttggagggccatttctgttgacaccttgtggtcttgcattcagtatgatttggttgtaagctgtagcatcataccttggaagtgcattttctccagcaacttggatgtcctctctccaacctccactcaata

SEQ ID NO: 164908 - DNA, 277 bp, Glycine max
gaagagatctgcctcctttttatcaaatctatctcttcttcaagaatagttgaaaatggggctgtctttcaccaagttgttcagccgactgtttgccaagaaagagatgcgtatactgatggtgggtctcgatgctgcgggtaagaccaccattctgtacaagctcaagcttggagagattgtcaccaccattcccaccattgggtttaatgtggaaactgtggaatataagaacatcagcttcactgtctgggatgttggaggtcaggacaagatc

SEQ ID NO: 164909 - DNA, 277 bp, Glycine max
gtttctcttccgccctggaagacaaagaagagtcaccgctacgacgccgttcgtgcttttttgaggtgccacagtcatgtttgggcgtggcggaccaaggaggagtgacaactccaaatattatgatattctcggggtttccaaaaatgccagtgaagatgaaatcaagaaggcctatagaaaggctgctatgaagaaccatccagataagggaggagatcctgaaaagttcaaggagttaggtcaagcatatgaagttttaagtgatcctgagaag

SEQ ID NO: 164910 - DNA, 116 bp, Glycine max
taggtttttagggtttacaccgagcagccacacctcccgcagcagccatggttctcaaaactgaactatgccgattcagtggtgccaagatctacccaggaaagggcatcacattt

SEQ ID NO: 164911 - DNA, 270 bp, Glycine max
cagcttgaacccaccgcgtttcggagagagagacgtcgcaatggggaggaggcctgcaaggtgttaccggcagataaaaaacaagccataccccaaatcacgtttctgccgtggtgttcctgatcctaagatcagaatttatgatgttggtatgaagaagaaaggtgttgatgagtttcccttctgcgttcatctggttagctgggaaacagaaaatgtttcaagtgaagcattggaagctgctagaattgcatgcaacaaatatatggc

SEQ ID NO: 164912 - DNA, 275 bp, Glycine max
  unsure (1)..(275): unsure at all n locations
ctgaaccaaatcatcacacacacacactaagacgcaacaattcttctacaatggatctcccccttctggaacagaccctcataggtctcttcctcgctgcggtggtcgccatcgccgtctccancctccgcggccggaaattcaagctcccaccgggcccactccccgtcccaatcttcggcaactggctccaagtcggcgacgacctcaaccaccgcaagctcaccgatttggccaaaaaattcggtgacatcttcctcctccgcatggggcag

SEQ ID NO: 164913 - DNA, 274 bp, Glycine max
ccataagaaaaaggagatcttcggttttgattggccaattatggaagtggtgtggcattcttgtgaagagtctgcgcattctgtctatatggatatttgttatcccagtgcttattgggcttctctttgagcttttggtcattgtgccaatgagagttccagtggatgaaagtccagtattcctcctttatcaagactgggcattaggccttatatttctcaagatatggactagattggttatgttggaccacatgatgccgatggtggatga

SEQ ID NO: 164914 - DNA, 275 bp, Glycine max
ccaaagcattgaattcaaaaacttaagttcattccttgtgttttgctttcttcctcaaaaccaaacatgtcgaacacatgcggcaactgcgactgcgctgacaagactagctgcaccaagggaaacagctatggtgttattgtagagactgagaagagttacatcgagactgttgtcatggatgttccagcagctgagcatgatgggaagtgcaagtgtggcactaactgcacttgcacggactgcacctgtggccattaaggaatatgtatgac

SEQ ID NO: 164915 - DNA, 274 bp, Glycine max
gtcagagaaaccctaggtaagaagaaaagatgccggctggtcatggtttgagatcccgcaccagacattccttctctcgtcctttcaggaagaagggaaccatcgccctcaccacatacctgagaacctaccacgtcggcgactatgttgacgtcaaggttaacggtgccgttcacaagggaatgccccacaaattctaccatggccgcaccggacgcgtctggaatgtcaccaaacgtgctgttggcgtcgaagtcaacaagcaggttggcaa

SEQ ID NO: 164916 - DNA, 276 bp, Glycine max
cataaattaagaaatcaaagagacagaaagttgagagagaagtgttcacgtctttgagaaatgggtgcttcggcatcggtcacagaaaaatccatccatgaattcatggtcaaggatgctaagggcagagacgtgaacctcagcacctacaaagggaaggttcttcttgtagttaacgtcgcttcaaaatgtggatttacaaattccaattacacccagttaactgagctttacagcaaatataaacacagaggtcttgagatactggcatttcca

SEQ ID NO: 164917 - DNA, 275 bp, Glycine max
cttaataaagccatgactggtttggaaacagagaaggtgccttttggtttctttgctcggaatggcaagtatgtggaatgcctgctttctgtgagtcagacattggacgtagagggcctagttactggggtcttctgcttcttacagctagctagcccagagctccaacaagcattacatattcagcgcctatccgagcaaactgccttgaagagattaaatgcattaagttacatgaaaaggcaaatcaggaatcctttgtgtggaattatatt

SEQ ID NO: 164918 - DNA, 283 bp, Glycine max
agcgattgctagaatggaatttcgatgctcagtcatctcttttaacattctcttctctcttgctcttgcaggagatagccatgtccatgcatctcatacatatagaagattattgggaagctgtttggccaaacactcccattcccactgcactgcgagagcttctaaagcctctccctgcaggtgttgaaatcgatgaactccctaagcatgttgatgatacacagtacccaaaaacattcttctataaagaagaccttcatccaggcaaaacaatgaaagt

SEQ ID NO: 164919 - DNA, 279 bp, Glycine max
gaaaatattaagatcctaaaaatttgtttattggtgtgagcagtgtttaagttgtgtttggcagcgcggaggggcaagctagggagtaagagatggatttggactagtggatctccaaggtgaaggatggccagcaccttctcgaagaggagcttcaacttctttgcgaatatgttaaagagatccttattgaggagtcaaatgtgcagcctgtcaacagtccagtgacggtttgtggtgatattcatggtcagtttcatgatctaatgaaacttttcc

SEQ ID NO: 164920 - DNA, 278 bp, Glycine max
attaaaagatggtttttcttgtgacactgaggtgatctatgtgggatccctcaaggttgtattagatgctcatgagcaggaagaagttgctcagaaattactggaggactttaattgcatatctacctttctaccccattatgtccagaagaagttttattatggcttttgcaaacagcagctttggcctctctttcattacatgctacctatgttccctgatcatggtgatcggtttgatcgctcgttgtggcaggcttatgtttctgcaaacaaaa

SEQ ID NO: 164921 - DNA, 277 bp, Glycine max
aaacaaccttctttctttttctgtgagcctttctttcaggttcttaacttgatcagtgtgcagtgtccaaatcataagggtagttgcaaattgcaatggctaagcatgatgttgagggtggttccttcgctgcaaaggactaccatgatcctcctccagcaccgttgattgatgctgaggaactcacacagtggtccttctacagggctttgattgctgagttcattgccacaatgctcttcctttacatcacagtgctcactgtgattggttacaa

SEQ ID NO: 164922 - DNA, 272 bp, Glycine max
ggtagcagcagctgagcttgtttccgtcgccgcttcacccaccgtagcaaccatgatcattcccgagaagaaccgtaaagagatctgcaaatacctcttccaagagggagtttgctttgcgaagaaggacttcaatctggcaaagcacccagagattgatgtgccgaatctgcaggtgataaagctgatgcagagcttcaaatccagagagtatgtgagggagacatttgcgtggatgcactattactggttcctcaccaacgatggaattg

SEQ ID NO: 164923 - DNA, 269 bp, Glycine max
tcgcatcggatcttcactctcttctccgatctcaaaatgcccgccgtttatggaggtctgttgaccaccttcgaatcctccgagaaggagagtgaatacggttacgttcgcaaggtatcaggaccagtcgtcgttgcagatggcatggctggggctgctatgtatgaactcgtgcgtgttggtcatgataatctcattggtgaaattattcgtctcgaagggaatttcgctaccatccaagtttatgaggaaactgctggcttgatggt

SEQ ID NO: 164924 - DNA, 270 bp, Glycine max
acttattccattcgacacttggttcaagacttttggcagcctcaacatagagagtgagtgccccaagtttgttgcttgggccaagaggtgcctgcagaaagacagtgttgccaagtctcttcctgatcaacacaaggtctatgagttcattatggacataagaaagaagttcgacattgagtaggttcatgttggattttaatagccatagtgacgtattgatcattcttggcctttcaactaaatagtatttgtgtagtaaattaaagg

SEQ ID NO: 164925 - DNA, 276 bp, Glycine max
gaaagggttttaccttcaatcatacatgaaactttgaaagccgtggttgcccagtacaatgccagccagcttattactcagcgagaggctgttagtcgggaaatccggaagattctaactgaaagggctgctaacttcaatattgcccttgatgatgtgtcaattactagtctgacttttggcaaggagtttactgctgcaattgaagctaagcaggtagctgcacaagaagctgagagggctaaatttgttgtggaaaaagctgagcaagacaag

SEQ ID NO: 164926 - DNA, 278 bp, Glycine max
gtctctccgcagcagccttcttcgccgtttcagctcaagagccaccagcaggtaagatatggttaagcataacaacgttatccccaatgggcacttcaggaaacactggcaaaactatgtgaagacttggtttaatcatcccagcacggaagaccagaaggcgtttagctcggcagaagaaggctgtcaagattttcccaaggcctactgctggacctctcaggccaattgttcatggccagactctgaaatacaacatgaaagtcagatctgggaga

SEQ ID NO: 164927 - DNA, 270 bp, Glycine max
agtcccatagcagcgatgggaatcgatcttaaggctgggggtaagagcaaaaagaccaaaagaacagcaccaaaatccaatgacatctacctcaaattacttgtcaagctttatcggttccttgttcgaaggactggcagcaatttcaatgctgttatactcaagcgcttgttcatgagcaaggttaacaagcctccaatttctttgtcaaggttaattaagtatacaaaggggaaggaggataaaattgctgtaatagtggggactgta

SEQ ID NO: 164928 - DNA, 270 bp, Glycine max
ctatcttctctcggagccgctattatccccagacgccaccgccgcagcaccagaagaagaagaagagtgatggctgagtacgacctaactccgcggatggcgccgaatctcgacaggcaccttgtgttccctctcctggagttcctgcaggagcggcagctctacgacgacgaccacatcctgaaggcgaagatcgaccttctcaacaacaccaacatggttgactacgctatggacatccacaagagcctctaccacaccgaggacgtc

SEQ ID NO: 164929 - DNA, 272 bp, Glycine max
cctcgagcgaatcggctcgagcgttgtcttctcacttcgtcaacgaccaaccaaacccctccccaattctcaagccaaccatgtcgtccttcaagagcaagtaccaagatgaactcattgccaatgctgcttacattggcaccccagggaagggtatccttgctgctgatgagtcaactggtacaattggcaagcgattggccagcattaatgtcgagaatgttgaagcaaataggcgtgctcttcgtgaactcctattcaccacacctggt

SEQ ID NO: 164930 - DNA, 277 bp, Glycine max
aaccaatcatctttagttcgtcagtaatttattgtgggattctattctaagattttgagaatgtctaactgtgggtgtggaagcagctgcaactgtcgcagcaactgcggttgcaacaagtactcttttgacttgagttacgttgagaagacaaccacagagactctagttttgggtgtcgggcctgtgaaggcccaattggagggtgctgaaatgggtgttgcatctgagaacggtggctgcaactgtggatcaagctgcacctgtgacccatgca

SEQ ID NO: 164931 - DNA, 274 bp, Glycine max
ctcgagccgaatcggctcgagtgatattgacataacattaagacgtaatattatgggtacgaaatttggaatcagctatctgttcctccaagtgctcgaagaggtgttctagagctgggatgaaggacaggtgcatgaagttctgcgggatttgctgcagcaagtgcaactgtgtgccatctgggacttatgggaacaagcatgagtgcccttgctacagagacatgaagaactccaagggcaaggccaaatgcccttgattattttttttttt

SEQ ID NO: 164932 - DNA, 268 bp, Glycine max
ctgaaccaaattctacttcctttcagctgcacaagagtctccaatcccaactctctctctctctctctccacttgccaaaggaaaaggctaaagagaagaaaaggcaaagcaagggaccaagcaaaacacacacagagaaacatgtcttccccaagcaagcgccgagagatggacttgatgaaactgatgatgagtgattacacagtggagatgattaatgatggaatgcaagaattttatgtgcaatttcatggacccaatgacagt

SEQ ID NO: 164933 - DNA, 260 bp, Glycine max
gttcttcgtcgcaaatccgaagtaggatctctcttgttttttctctaggtttttcgcgatggcgtcgaagcgaattttgaaggagcttaaggatttgcataaggatcctccaacatcttgcagtgccggtcctgttcatgaagttatgtttcattggcaagctacaattctgggtcctccagacagtccctatgctggaggtgttttcctagtgactattcatttccctccagattatccctttaagccacccaaggttg

SEQ ID NO: 164934 - DNA, 269 bp, Glycine max
caaaactgtatatgcttcttcaaggaggaacggggattccccacctcaagtggtttggagttgagggagactacaatgtcatggttatcgaccttcttggaccaagtctggaagatttattcaattattgtaatcggaagttcacattgaagacagtgttaatgcttgcggatcaattgattaacagagttgaatatatgcattcaagaggtttccttcaccgtgacataaagccggacaattttctaatgggtctaggacgaaaggca

SEQ ID NO: 164935 - DNA, 274 bp, Glycine max
gatatgcaggagaagaaccatggaagctatgacttcatctttgttgatgcggacaaggacaactacctcaactaccacaagaggttgatagagcttgtaaaagttgggggcgtgatcgggtacgacaacaccctatggaacggatctgtggtggcaccccctgatgctcctcttaggaagtatgttaggtactacagggacttcgtgctggagctcaacaaagccctcgctgtggaccccaggatcgatatttgcatgctcccggttggtgatg

SEQ ID NO: 164936 - DNA, 275 bp, Glycine max
  unsure (1)..(275): unsure at all n locations
aacaatcttagaaataaacctacatatccaaccctcatataaatacgcctttancctacaaccatatattgtacacatagctagacatggtgaaaccagccatggctagtgttgattcttcttccttttcttcttgtgaaaatgattcattttcctctaactacagcattgatacttgcaagatgtacaaaggggtaaggaagagaaaatggggcaaatgggtgtccgaaattcggcttcccaacagccgtgagcgcatatggttggggtcctat

SEQ ID NO: 164937 - DNA, 214 bp, Glycine max
gaagctgattggaccggacggtgaagagaatgaatttgaagcccctgatgacacttacattctggattcggctgaaaatgctggagtggagctaccttactcatgcagagctggtgcctgctctacttgtgctggccaagttgtttcaggctctgtggatcaggcagatcaatcctttcttgatgaccatcaaattgaaaagggttaccttctg

SEQ ID NO: 164938 - DNA, 126 bp, Glycine max
ggttcatggggatgcgaggcttatgacgctttgtctcttaatcttccgatgtcactcttgtttgtcagtttgtctccctatttttcatttcattaagtactgtgcaagtaggttagagttgggtag

SEQ ID NO: 164939 - DNA, 265 bp, Glycine max
atagattaagaaatcaaagagacagaaatttgagagagtaatgttcacgtctttgagtaatgggtgcttcggcatcggtgcacgtaaagatccgtccatgaattcatggtcaaggatgctaagggcagagacgtgaacctcagcacctacaaagggaaggttcttcttgtagttaacgtcgctacaaaatgtggatttacaaattccaattacacccagttaactgagctttacagcaaatataaagccagaggtcttgagatac

SEQ ID NO: 164940 - DNA, 273 bp, Glycine max
ctatcccatggtcccaggacatgaagtggttggtgaggtactggaggtggggtcagacgttagcaggttcagagtgggagagttggtgggagttggactcctcgtaggttgctgcaaaaactgccagccatgccaacaagacattgagcattactgcagcaagaagatctggtcttacaatgatgtttatgtcgatggagaacccacgcagggtggctttgctgaaaccatggtcgttgagcacaagtctgtggtgaagattccagagggttt

SEQ ID NO: 164941 - DNA, 267 bp, Glycine max
cagtaatcctgcaattttagggaaatgagtaggaggcaacaagtagattatctgatagacgaaggtatgttactccaaacatgcttagttttggagggccatttgtgttgacaccttgtggtcttgcattcagtatgatttggttgtaagctgtagcatcataccttggaagtgcattttctccagcaacttggatgtcctctctccaacctccactcaatactgaatctaatattcatgtttggcaatttaaccgctataatacag

SEQ ID NO: 164942 - DNA, 266 bp, Glycine max
gaagagatctgcctcctttttatcaaatctatctcttcttcaagaatagttgaaaatggggctgtctttcaccaagtagttcagccgactgtttgccaagaaagagatgcgtatactgatggtgggtctcgatgctgcgggtaagaccaccattctgtacaagctcaagcttggagagattgtcaccaccattcccaccattgggtttaatgtggaaactgtggaatataagaacatcagcttcactgtctgggatgttggaggtc

SEQ ID NO: 164943 - DNA, 267 bp, Glycine max
gtttctcttcctccctgggagaaaaagaagagtcaccgctacgacgccgttcgtgcttttttgaggtgccacagtcatgtttgggcgtggtggaccaaggaggagtgacaactccaaatattatgatattctcggggtttccaaaaatgccagtgaagatgaaatcaagaaggcctatagaaaggctgctatgaagaaccatccagataagggaggagatcctgaaaagttcaaggagttaggtcaagcatatgaagttttaagtga

SEQ ID NO: 164944 - DNA, 268 bp, Glycine max
taggtttttagggtttacaccgagcagccacacctcccgcagcagccatggttctcaaaactgaactatgccgattcagtggtgccaagatctacccaggaaagggcatcacatttgttcgttgtgattcttaggttttcctgtttgcaaactcaaaatgtaagaggtatttccacaatcgcctgaagccttcaaagctcacctggactgcaatgtacagaaagcaacacgaaaaggacattgctcaagaagctgtgaggaagaggag

SEQ ID NO: 164945 - DNA, 270 bp, Glycine max
cagcttgaacccaccgcgtttcggagagagagacgtcgcaatggggaggaggcctgcaaggtgttaccggcagataaaaaacaagccataccccaaatcacgtttctgccgtggtgttcctgatcctaagatcagaatttatgatgttggtatgaagaagaaaggtgttgatgagtttcccttctgcgttcatctggttagctgggaaaaagaaaatgtttcaagtgaagcattggaagctgctagaattgcatgcaacaaatatatggc

SEQ ID NO: 164946 - DNA, 270 bp, Glycine max
ctgaaccaaatcatcacacacacatactaagaagcaacaattcttctacaatggatctcctcgctctggaaaagagcctcataggtctcttcctcgctgcggtggtcgccatcgccgtctccaccctccgcggccggaaattcaagctcccaccgggcccactccccgtcccaatcttcggcaactggctccaagtcggcgacgacctcaaccaccgcaacctcaccgattcggccaaaaaattcggtgacatcttcctcctccgcatgg

SEQ ID NO: 164947 - DNA, 266 bp, Glycine max
aaataagaaaaaggagatcttcggttttgtttggccaattatggaagtagtgtggcattcttgtgaagaattctgcacttacgtctatatggatatttgttatcccaatgcttattgggcttctctttgagcttttggtcattgtgccaatgagagttccagtggatgacagtccagtattcctcctttatcaagactgggcattaggccttatatttctcaagatatggactagattggttatgttggaccacatgatgccgctg

SEQ ID NO: 164948 - DNA, 267 bp, Glycine max
acaaagcattgaattcaaaaacttaagttcattccttgtgttttgctttcttcctcaaaaccaaacatgtcgaacacatgcggcaactgcgactgcgctgacaagactagctgcaccaagggaaacagctatggtgttattgtagagactgagaagagttacatcgagactgttgtcatggatgttccagcagctgagcatgatgggaagtgcaagtgtggcactaactgcacttgcacggactgcacctgtggccattaaggaata

SEQ ID NO: 164949 - DNA, 265 bp, Glycine max
gtcagagaaaccctaggtaagaagaaaagatgccggctggtcatggtttgagatcccgcaccagagattacctctctcgtcctttcaggaagaagggaaccatcgccctcaccacatacctgagaacctaccacgtcggcgactatgttgacgtcaaggttaacggtgccgttcacaagggaatgccccacaaattctaccatggccgcaccggacgcgtctggaatgtcaccaaacgtgctgttggcgtcgaagtcaacaagca

SEQ ID NO: 164950 - DNA, 262 bp, Glycine max
cataaattaagaaatcaaagagacagaaagttgagagagaagtgttcacgtctttgagaaatgggtgcttcggcatcggtcacagaaaaatccatccatgaattcatggtcaaggatgctaagggcagagacgtgaacctcagcacctacaaagggaaggttcttcttgtagttaacgtcgcttcaaaatgtggatttacaaattccaattacacccagttaactgagctttacagcaaatataaagacagaggtcttgaga

SEQ ID NO: 164951 - DNA, 266 bp, Glycine max
cttaataaagccatgactggtttggaaacagagaaggttcgctacggtttctttgctcggaatggcaagtatgtggaatgcctgctttctgtgagtaagaaattggacgtagagggcctagttactggggtcttctgcttcttacagctagctagcccagagctccaacaagcattacatattcagcgcctatccgagcaaactgccttgaagagattaaatgcattaagttacatgaaaaggcaaatcaggaatcctttgtgtgg

SEQ ID NO: 164952 - DNA, 275 bp, Glycine max
gcccagggcaagctcattgggctggtccccaccatgggcttcctccacgcgggccacctctcgctcgtggcccaggcccgccaactctccgacgtcgtcgccgtctccatctacgtcaacccgggccaattcgcccccacggaggacctctccacctacccctccgacttcgacggcgacgtaaagaaactcgcgtccgttcccggcggcgtcgacgtcgttttccatccccgtaacttgtacgattacgggaagaacggtggtggtgacgtggc

SEQ ID NO: 164953 - DNA, 270 bp, Glycine max
ggaacacctattggagtgtccatggataacacccgtttggctcttgcatcaattggcaagctcatgtttgctcaattctctgagcttgtcaatgactattacaacaatgggttgccctcaaatctcactgccagcagaaaccccagcttggattatggattcaagggagctgaaattgcaatggcctcttattgctctgaactccaatacttggcgaacccggtgacgagccacgtgcaaagcgccgagcaacacaaccaagatgtgaac

SEQ ID NO: 164954 - DNA, 275 bp, Glycine max
ctcgagccgcaactctttcaaaagggagaagaaaaggaaaggaaacaaaacgcacaaaggatcattatagcaatggcagaacaaaaccaaaaccagacaactgaagctggaaggcaccaagaggttggccacaagagccttctccagagtgatgctctttaccagtatattctggagaccagtgtctacccaagagaacctgaatccatgaaagaactgagagagttgacagcaaaacacccatggaacatcatgacaacctctgcagacgaagg

SEQ ID NO: 164955 - DNA, 272 bp, Glycine max
cctgccagtagtcatatgcttgtctcaaagattaagccatgcatgtgtaagtatgaactaattcagactgtgaaactgcgaatggctcattaaatcagttatagtttgtttgatggtatcttctactcggataaccgtagtaattctagagctaatacgtgcaacaaaccccgacttctggaagggatgcatttattagataaaaggtcaacacaggctctgcctgttgctttgatgattcatgataactcgtcggatcgcacggcctttgt

SEQ ID NO: 164956 - DNA, 273 bp, Glycine max
agaccatcgacggaagaggtgccagcgtgcacgttgctgggggtccatgcataacgatacagtacgtgaccaacgtcatcatccatgggattcacatacacgattgcaagcagggagggaacgctatggtgcgggactccccacggcactacggctggagaaccgtatcggacggtgacggcgtgtccatcttcggagggagccacgtgtgggttgaccattgctcgctgtctaactgcaacgacgggttgatcgacgccatccatggctcca

SEQ ID NO: 164957 - DNA, 275 bp, Glycine max
cgagacagaaaaaggggttagggtttgttcttgtgatcgaagctaagcgaagcaaaatgggtggatcagtgagggacgtgaagtcgaagggcgaggtcgacgaggtggtggcgagtggctctccggttatcctccacttctgggcgtcgtggtgcgaacttccaagcacatggaccaactcttctctcacctttccactgatttccccaacccccgcttcttaagggtcgaggccgaagagcaacccgagatttctgaggcttactccgtctccg

SEQ ID NO: 164958 - DNA, 273 bp, Glycine max
atcctggtctggaaggaccccaaagagggtaactggtggatgcagtttgggaatgaccatgttatgggatactggccggctcctctattctcgtacctctctgacagcgcgtcaatgattgagtgggggggagaggttgtgaactctgagtccgacggccaacacacctcgactcaaatggggagtggccatttccctgaggagggttttggcaaggctagttacttcaagaacattcagattgttgatggtgacaacaagcttagagctcca

SEQ ID NO: 164959 - DNA, 270 bp, Glycine max
caatttccggatctgatatcttcatcgacatcgaaaccgaagagagagaaaacgtgaaaccgagagtacacagagagagagatgagggaaccatcgtcggtgggattcgaaggcaacggcgtcgtttcttcgccgccgcaagctctcatcgagagactgaaagactacggccaagaagacgttttcgccctctggtacgagctctcccccgaggaacgcgcgtttctcgtcaaggacattgagagtttagatctttcgagaattgaccgg

SEQ ID NO: 164960 - DNA, 269 bp, Glycine max
ctcgagccgtgtctccacagcaccttaatggcaatacttttgctgataaattaaggttttccaattcaacctacagggaggagccatcttcaggaagcattttgaactcatcagcaaagccttgggataggcaaattgggaataccgatttgcacgttaccagtggtcaagaggaacttgtttatgatgaaaactctggacatggattcttaaatgatgtttttgcagggaattctcttgtgaatgatacagatttgaaccctttggag

SEQ ID NO: 164961 - DNA, 271 bp, Glycine max
caggtgtttggttcatgcattgccaccttgaagtgcatactagttggggcttgaaaatggcatggatagtccaagatggtaaacggcgcaatcagaagctgccacctccaccttctgatcttccaaaatgttgaaaaaatcgacaaccttaatgtttcgcttttctttgtctatttttggggttagatttggaggtatttgctcctgccttttgttttcaattttgtccacatcttccaattttgggatttctatcctttgacgccaaaaa

SEQ ID NO: 164962 - DNA, 272 bp, Glycine max
ctgttcatcctttgcttcccaaagaaagagaaaataaaaagcaatgggtagccttgaagcggaaagaacaacagtaggattggcagcaagagacccttcagggattctctccccatacacctacaatctaagaaacacaggccctgatgatgtttacataaaagttcactactgtggaatttgccattctgatctccaccagattaaaaatgatcttggcatgtccaactatcccatggtcccaggacatgaagtggttggtgaggtactgg

SEQ ID NO: 164963 - DNA, 270 bp, Glycine max
aaacgccacaatggccgtcacgaaaagcctctccatcttcctcttcatcgccataagctgcgtggccgtagctcaggcagcgaacttcaacatcacaaacaattgcacctacacggtgtgggccgccgccgtgcccggcggcggctcaaggcttaaccctggcgaatcgtggaacatcagcgtgacgaacggcacgacaggaggacgcatctggggtcgaacaaactgcaccttcgaatcccagcagacgcgggaagtgcctcaccggcg

SEQ ID NO: 164964 - DNA, 268 bp, Glycine max
agcgaattgattcattgagattcacgtccgccctttcagtcgcacttgcagttgtttttctagtcattgccgtgggaattgctgttgtcaagatatttagtggaggcattgtgatgcccagactcttccctgtcacgactgatgtggcatcattcttcagactattcactgtagttcctgtgtttgtgactgcgtatatctgccactacaatgttcacagcatagacaatgaacttgaggactcctcacagatgcaaggggttgtaca

SEQ ID NO: 164965 - DNA, 268 bp, Glycine max
tgaatttctcaagatcaatcctattggcaaggttcctgtgttggaaacacctgatggtccagtattcgagagcaatgccattgctcgctatgttacccagctgaaaggtgataacactttgtatggatcttctttgattgaacatgcccacattgaacaatggattgatttttcatcattggagattgatgctaatattaccaagtggtatgccccaagagttggacgaggaccatatcttcctccagctgaggaggctgcaatttct

SEQ ID NO: 164966 - DNA, 269 bp, Glycine max
ttttctcattcctgcctctcttctcaacatggccgccaacagatggttgaaccctgaggtatacccactcttcgcttcagttggtgtggctgttggaatctgcggtatgcaacttgttaggaatataaccaccaatcctgaagtcagggtgaccaaacagaacagaactgcaggaattcttgagaattttgcagagggagagaaatattcacaacatagcctgaggaagtatgttcgcggcaagcagcctcagattatgccatccgtca

SEQ ID NO: 164967 - DNA, 265 bp, Glycine max
ggggccaaccgtagtggattccagtgagattccagaagtgtgtaggaaagaggtgatggagtgcggtaaggaggtggtgcgtgtggcacgtgtgttgtatgctttactcagtgaggggctgggattgggtgcggagaggctcacggagatgggtctggtggaaggaagagttatggtggggcactattaccccttttgccctcagcctgatctgacggtggggcttaactcgcatgcggatccaggggctcttacggtgttgctg

SEQ ID NO: 164968 - DNA, 265 bp, Glycine max
cttttctgatcccgggtaatttgatcacggattaaaggagaagcttccacccacggattccacgctgagaccagatcagcggcatctagagaatggggaatacgagaaggctaatatggaaaaacaaaggttggaaaagaggcaaagaatgtcaaggaaaatgcaagacaatggatggcagcctaggtggttccacagacagagtgaatctggaacgttccgatatactggcgggtattgggaagcgagagctcaaggaagatgg

SEQ ID NO: 164969 - DNA, 267 bp, Glycine max
ccgatgcagtaggaactacttgtggccaacgtcttgagaaggtgttcggaactgagcactcccacattcttcgagttcgctttagaactgagaagggaattgttcgcaagtggatctcaagattcgaagtctggccctacttggaaacttacactgaggatgttgcccacgagcttgccaaagagttgcaaggcaagccagatctgattgttggaaactacagtgatggaaacattgtcgcttctttgttggcacataaattaggtg

SEQ ID NO: 164970 - DNA, 267 bp, Glycine max
ccacattatctgtatcgaatgacaatcttacaatcaatttctctactagctcctgttctgggctcagagatttcttcttcaaaactgctccctctggtcattaatgcatcaaaagatagggtacccaatatcaaattcaatgtagctaaagtgttgcagtctctcatcccaattgttgatcagtctgttgttgagagtaccattcgtccctgtttggttgagctcagtgaggattcagatgttgatgttaggtttttcgcctcacaa

SEQ ID NO: 164971 - DNA, 265 bp, Glycine max
aaaaagttagggtttgtaactttgtcttttgcttgcgaatctgaatcgaataataatcaatcaatcatcatgtcgtcggcgaagaagatcacactgaagagttcggacggcgaggctttcgaggtggacgaggcggtggcgctggagtctcagacgataaagcacatgatcgaggacgactgcgccgacagcggcatccctctgccgaacgtgacgagcaagatcctggcgaaggtgatcgagtactgcaagaagcacgtcgagg

SEQ ID NO: 164972 - DNA, 263 bp, Glycine max
gtttgggcaagaaagaagtgctttatttacttaattaatttgttttcaaggtgttgctgatcgatcttgggaatgaaatgaatcaggaaatgaatggggttgaggctgagagggtgaaagtgaatgcgcatgacaaaatagattacgtgtttaaggtggtggtgataggggactcagcagtgggtaagactcaaatactctcaaggtttgcaaagaatgaattctgctttaactcaaagtctaccattggagttgagttccag

SEQ ID NO: 164973 - DNA, 272 bp, Glycine max
ctctagtctcgtttcaaatattaattttaggttcttcgttacgcgttgaattgcgttgtgcgtgagaaagtgcgcgtggtgaaaaagcatggcttctcagctcctgagacgaaccttcggaagtcgtttccttgcaaaccctagggccttctcctccgctgcttccactccgatccgcgcacacctcttccacggcgacggcatcggccccgagatcgccgattccgtcaaacagatattccaagcagctgatgtcccaatagaatgggaag

SEQ ID NO: 164974 - DNA, 214 bp, Glycine max
gtccaactcatgtgtgatgtacggctgtgattgtgtaatttaatttgcaaaatcagaaataacaccagagtcatatatatgcatctctttattttctctggcccccaccaaaaaaaaaaaaaaaaaaaaaaaaaaaaaaaaaaaaaaaaaaaaaaaaaaaaaaataaaaaaaaaaaaaaaaaaaaagggggggggctcgaatttgaaccccccc

SEQ ID NO: 164975 - DNA, 265 bp, Glycine max
gcaggaacccttcaagaccatatttgagaggcagtatcgaccccacttggccatggcaattgctatcccattttttcagcagatgacagggattaacatcgttgcattctattcacctaacctctttcagtctgtgggtttgggacacgatgccgctttactttctgccgttatacttggagcagtcaaccttgtttctctcctcgtctctaccgctattgttgatcgctttggtcgaaggtttttgttcataaccggtggcata

SEQ ID NO: 164976 - DNA, 262 bp, Glycine max
ctcaacgcacgcaggaggaggagattgatcgagagaagagaagatgactacacgcttcaagaagaacaggaagaagagaggccacgtgagtgccggccatggccgcatcgggaagcatcggaagcaccctggaggacgcggtaatgccggaggcatgcaccaccaccggatcctctttgacaagtaccaccctgggttcttcggcaaggtcggaatgcgctattttcacaagctccgcaacaaattctactctccgatcctc

SEQ ID NO: 164977 - DNA, 266 bp, Glycine max
ggtgagcacaagccggagcaccatggaggagaagagcacaaagaggggttcctagacaagatcaaggacaagatccacggcgaggagggtggcaccgctgagggcgagaagaagaagaagaagaaggagaagaagaagcatgaacatggccatgacagcagcagcagcagtgacagtgattagattatctcccactgctgcatcacctatatatcttataaggtgtatgggaccatagtagcgagggctgtgtctttctctttttt

SEQ ID NO: 164978 - DNA, 266 bp, Glycine max
gcgatctgcttcgtgttgtagctagctcctcgaaaatgctggcacgcctcgccgcgagtcgcttcaacgagatccgtcagattttccgtacgccttctagggctttctcgaccgctccgaactaccaccttgacacaccggacaacaaccctaaacttccatgggaattcaccgaggccaatcaagcaaaggttaaggagattttgtctcactatccatccaactataagcactctgctacaattcctcttttggatcttgcccag

SEQ ID NO: 164979 - DNA, 270 bp, Glycine max
gttggctggcattgttgcgattcatttccatttcccacaacaatggaagcatcgccgccgccgtcaccgtcgccgtcaccacggaccaccatcctggccaagtaccagctcacgcgtttcctcggccgcggcaacttcgctaaggtctaccaggcgcgctccctcctcgacggcgccacggtagccgtgaaggccatcgacaagtccaagacggtggacgccgccatggagccccgcatcgtgcgtgagatcgacgccatgcgccgcctc

SEQ ID NO: 164980 - DNA, 269 bp, Glycine max
cactcactcactcacaggtaagcaatggcgggaaaaggagggaaggggcttcttgcagcgaaaaccaccgcggcgaataaggacaaagacaaggacaagaagagacctatttctcgctcttcccgtgctggaatccagtttcctgtgggacgtatccataggcagctgaaacaaagggtccaagccaatggacgtgttggggcaacacctgcagtgtgacttagcctcaattctagagtatctgactgctgaagttcttgaacttgctg

SEQ ID NO: 164981 - DNA, 262 bp, Glycine max
caatttcacaggaaaaagttgaagtacactcgcccatacctgattgaattaatgttctcagacaacattcaaatctcaaatctaactctacttaattccccatcatggaatgttcatccagtttacagcagcaatattattgtgcaaggcatcaccatttatgctcctgtcacatctccaaacactgatggcatcaacccagattcttgcacaaatgtaagaattgaggattgctatatagtttctggggatgactgtgtgg

SEQ ID NO: 164982 - DNA, 264 bp, Glycine max
gggatttataatagaacaatacattaatcccattgtacaaaattcacagcatcctctcaagggaaaccttctttacgccatcgagagagttctgaagctttctgttccaaatttatatgtgtggctctgcatgttctattgctttttccacctttggttaaatatattggcagagcttcttcgatttggtgatcgtgaattctaccaggattggtggaatgccaaaactgttgaagattattggaggatgtggaatatgcctgt

SEQ ID NO: 164983 - DNA, 260 bp, Glycine max
cttgtttcttgctttctttcttcaccatgtcacttgctgggaaaatcaccactgaaatcggggttcatgcaaccgctacaaagtggttcaacctcttcgcaacacaactccatcatgttcaaaacctaactgatagagtgcatggaaccaagctgcatcaaggtgaagactggcatcacaacgagacagtcaagcactggacttataccatagatggtaaggttacaacatgtctggagagtattgaatccactgatgaa

SEQ ID NO: 164984 - DNA, 260 bp, Glycine max
tatcattcttgtttgcttcccaagtctctcgaagcatctttctttctcttcctgcagaagctatccgtgttacttgttcccaagtctccaacaagcaaagtacatggttgatttggaaatccaggtccccagcgcattcgacccgtttgccgaggcgagagaatcagatgcccccggggcaaaggagtatgtgcacatacgaattcagcagaggaatggaaagaagagtctgacaacagtgcaagggctgaagaaggagt

SEQ ID NO: 164985 - DNA, 260 bp, Glycine max
tttttgttagttttgagaaggctcattgaacaagcaaaattaagcacaaaagcccaaccctctctctcgctgctggtctcccccatttggcattcgcagatcgaatacgagtaatttcactgaatcttattgaagatgtttctcacaagaactgagtatgaccgacgagtcaacacctttactactgatggtcgtttatttcaggttgaatatgcaatcgaggccatcaagctgggatcaactgcgattggattgaggac

SEQ ID NO: 164986 - DNA, 249 bp, Glycine max
aacaacagcacaatgcgggttactgtctgttcaagctaccatctctctctcactttcttactgcctccttgccagaagttaaaatgacccaagaatctttcctagtcacatctgaatcagcgaacgaggtgcaccctgacaagctccgtgaccagatctccgatgctgtgcccgatgcatgcttggagcaggaccctgacagcaagtttgcctgtgaaactgatcacagaccacatggtgatggtttgc

SEQ ID NO: 164987 - DNA, 262 bp, Glycine max
attgcatccagactgtatttttactattcgtatagctatgagcttacaggagatcttgctgaaattcggggcaacctccttgcattgcaccgatttgcgactctccgccatgatgagctgggacaggaaacacttcttaatttgttacttcgaaactaccttcactacaacctatatgatcaggctgagaagttgaggtccaaggctcctcgatttgaagcacattcaaaccagcagttttgtcgttatctcttctaccttg

SEQ ID NO: 164988 - DNA, 260 bp, Glycine max
gttcttgatacctttgaaggaagctggatatccagagctcaggcctttgctctgtattggtggagtggatatgagatcgcagcttgatattgtgaagaagggtgttcatattgttgttgccactcctgggaggttgaaagatatgttggccaagaagaaaatgaatcttgataattgcaggtatttaacattagatgaggctgatcgattggtagatttgggatttgaagatgacattagagaagtttttgatcacttca

SEQ ID NO: 164989 - DNA, 260 bp, Glycine max
caagaggagggtacaaagcgggtgctctaaaagaaggcctaaaacgtaactatgtgaaacactgtgagtacgtggcaattttcgatgcagatctcaggccagagccagattttctcagacgttccattcctttcttggtgggcaaccccgacattgctcttgttcaagctcgttggagatttgtgaattctgacgagtgcttattgacaagaatgcaagagatgtccctggattaccatttcacagtagagcaagaagtt

SEQ ID NO: 164990 - DNA, 257 bp, Glycine max
aaaatggatgttatctgaatatggaggtggtcagtctgttcctgttggtgtgagtgcttactatatcactgcaccatccagcttagctgatatggcagccaatcctttccatgctctgttctatcttgtgtttatgctttcagcctgtgccttgttctctaaaacatggattgaagtctctggttcatctgctaaagatgttgccaagcagcttaaggaacaacaaatggtaatgcctggacaccgtgagtcaaact

SEQ ID NO: 164991 - DNA, 257 bp, Glycine max
aacactctcaacaaatgaatattctcggacaatcattcaacgaatcaaacaacggaagctactcttgttcgtcgccggagactggtagctcctctaacattccaaacacttttcactccgacgaggaagtgcacacactagcttcggcgcgtcctaagaaacgtgcggggcgtcgaatttttaaggaaacaagacacccggtgtaccgaggagtacgaaggaggaacaacaacaagtgggtctgcgaggttcgtgtt

SEQ ID NO: 164992 - DNA, 198 bp, Glycine max
tgaatgcgtataaaaggaaaataaagaaattagcgtcaaaatgttgggtgtgttcagcagctccatagtgtcgtcgccggacgagctcgtggccgccggcaaccgtactccgtcgccgaagatgacggcggcggcgctgcggaagcggttcgaggagaagaacccctccgccgtgtcggtggaggtcggagagcccgt

SEQ ID NO: 164993 - DNA, 261 bp, Glycine max
cttcttatgcaactatagtgaggctaagagattggtccataattactcaaaatgttggctatattccacaaagcttttgctcatccacctgaagagctcaacagccctgcatcttacaaaggttccaagaagcctaaggttcccgaggaaactctcaaagatttcctttcccaccatcctcacaacacttgctctctgagctttggtgatgctgctgttctagcttatgtccgtcctgatcaatctttctctcgtcatcaa

SEQ ID NO: 164994 - DNA, 259 bp, Glycine max
attttcagcacaacaatggcgggtagggtttcgacgtgcttcttcttcgtgtttgctctttctctccttcttccttttcagatctccgctgaggaatcatcggagaaagagttcgtactcacattggatcactctaactttcacgacactgtcagcaatcacgatttcatcgttgtcgagttctacgctccatggtgtgtctcatgtaactagcttgctcccgagtatgagaaagctgcttctatcttgagtagtcatg

SEQ ID NO: 164995 - DNA, 263 bp, Glycine max
taggcaccatcaagattcaagcacatagttatcatcaattccccagctagttttggctacgcctgcatcttcttctgctttaagctatggcctctaacttcagcttgagaactttgatgatatttgcccttgcattttctctcgtcctgcaaggcactcttggagggatagaatgtgagagtctgagccatgacacatgctcattcgccgtgacatctgctggcaaacgatgtgtgcttgagaagcaggtgaagaggactggt

SEQ ID NO: 164996 - DNA, 259 bp, Glycine max
cggctcgagaaatccttgagttggactcaacacataggagctgcaattggagtggcaaaaggaatccagtttttgcatacagggattgtccctggtgtatattccaatgatctgaagatagaagatgttttattggatcagaatcttgttgcaaaaatcagcagttaccacctgcctttgttatctaacatgggaaaggttcggtgtggaaattcttccagtggattaagaaattctagcaatagtaaaagtgtaaagc

SEQ ID NO: 164997 - DNA, 255 bp, Glycine max
aaaaagccagagaaaacaaaacccccagaatatctctcgctctgaaaccggcatggatttgcagcagagcgagttcgatcgcctcttgttcttcgagcgcgctcgcagcgccgcagaagctgaatacgagaagaaccctctcgatgccgataacttaacaagatggggtggagctctattagagttgtctcagtttcagagttttcctgaatcgaagaaaatgacccaagaggctgtttcgaagctagaggaggc

SEQ ID NO: 164998 - DNA, 256 bp, Glycine max
cctgccagtagtcatatgcttgtctcaaagattaagccatgcatgtgtaagtatgaactaattcagactgtgaaactgcgaatggctcattaaatcagttatagtttgtttgatggtatcttctactcggataaccgtagtaattctagagctaatacgtgcaacaaaccccgacttctggaagggatgcatttattagataaaaggtcaacacaggctctgcctgttgctttgatgattcatgataactcgtcgg

SEQ ID NO: 164999 - DNA, 249 bp, Glycine max
ggttgctccatcacctaatcacttccccacttcccctgtaagtcacgtttagttcgcacaaggttttaaaaaatggctgatgctgaggacattcaacctcttgttgttgataatggaactggaatggtcaaggcgggttttgcaggtgatgacgctcctagggccgtgttccccagtattattgggcgaccacgccataccggtgtaatggttgggatgggtcagaaggatgcttacgtgggtgatgaa

SEQ ID NO: 165000 - DNA, 255 bp, Glycine max
atcagatccaccgccatggatttcatgaaggtcttcgatcaaaccgttcgagaaatacagagagaggtgaatctgaaggtgctcaagattccggaaatcgaacagaaggtgctggatgctactgataatgaaccttggggtcctcatggtactgtgctggcagagatttcacaggctaccaaaaaatttactgaatgtcaaatagtcatgaatgtcctttggacaagactgggtgaaactggaaaagattggcgc

SEQ ID NO: 165001 - DNA, 252 bp, Glycine max
gtgcgctgcggttagaagagattcaatctgaatctgaatggaagctatcagaaagcaagcctccaaacttccagaacaggtcgctcgtcaacaacaggctgtgcttaaacagtttggggcttggggatatggaggttcagataatatggttactgatgaggtagagcttcagcaacatcagaaacttgagaagctttacatatcaacacgtgctggaaagcattatcaaagggatattgtccgtcgtgtgga

SEQ ID NO: 165002 - DNA, 180 bp, Glycine max
ctcattaattgcaagaatggcacttcgttgcttggtgatgtccctttctgttctcttcactcttggtcttgcgagagaaagccatgccagagacgaagatttttggcatgctgtttggccaaacactcccattccaagttcattgcgagttcttctaaagcctggccctgcaagtgttga

SEQ ID NO: 165003 - DNA, 238 bp, Glycine max
agcacacgtcaagaatcccaggcgaggagacagatggagcggaaggagcaggatgtgtcgttgggagcgaacaagttccccgagatacagccaattgggacggcggcgcagagtccagacgacggcaaggactaccaggagccggcgacggctgcgctggttgacccgacggagtttacgtcatggtcgttttacagcgcagggatagcagcagtttgtggccacttttctgtttctc

SEQ ID NO: 165004 - DNA, 249 bp, Glycine max
cccttccttttttgcgttcattctgttttcatagtgacgaacttctgaagaaatggcaaatcatcctttgacacactctcactctttccgcgagaggtttgatgaaactctcactggtcacaggaacgaaattttggcccttctgtcaaggcttgaagccaagggcaagggaatcctgcaacatcaccaagtggttgcagagtttgaagaaatccctgaggagagcagaaagaaactccaagatggtgt

SEQ ID NO: 165005 - DNA, 250 bp, Glycine max
gagaaggttcaggatcttctccttcttgatgtcacccctctctctcttgggttggaaactgctggtggggtgatgacagtcttgatccccaggaacactactatcccaacaaagaaagaacaggttttctcaacctattctgacaaccagcctggtgtgttgatccaggtttatgaaggtgagagaacaaggactagagataacaacttgttgggcaaatttgaactttctggcattcctccagctccca

SEQ ID NO: 165006 - DNA, 251 bp, Glycine max
acccgatgtttttgtgtcgggttcttattttatggtacttgatttgtcgttcaataacttttcgggtcggatacctggttcgttatccgcatccaagttcatggggcatttggatctgagctacaaccacttatgtggaaccatcccaattcggtctccgtttgaacaccttgatgcggcgtcgtttagtaacaatgattgtttgtgtggaaaccccttgaaggcttgttgatgggtgaccgaataatacg

SEQ ID NO: 165007 - DNA, 199 bp, Glycine max
gcacatttggtcagcaaaggtgtttcaaccttctcctcagtcatcaaggtgtttgtggtcttagtgatcacagcaaattcggtggccgaaaccgtgagccttgcaccggagattatccgtggtggcgaactgttggttcagtgatctcaatccttgatcactcaaccagaattgaccctgatgatcctgatgctgatcc

SEQ ID NO: 165008 - DNA, 235 bp, Glycine max
ctcgagcctgatttatacaccaacagaaggtgtaatgatgacaggaagatatgcttcaaaggaagaggccaagaagaaggggaataagatcaatagtgtaggatggtggtttaaaccatggttctatcagcatgcacagacggcactgaagaaaggagagtttgtagaatacattcctaccagagaatattatcacaggcacacaagatgcttgtactgggagggaaagcttatc

SEQ ID NO: 165009 - DNA, 226 bp, Glycine max
attccgttttgcgtttctctgcctaaaaggattgaaagatgggtcaagcactaggttgctatcaagttgatcagtcaaatgtggctatcaaggagcattttggaaaatttgatgatgtcctagaacctggatgtcattgcctgccttggtgtcttgggtaccagattgctggtagtttgtcactgcgtgtgcagcaacttgatgttcgatgtgagacgaaaaccaa

SEQ ID NO: 165010 - DNA, 233 bp, Glycine max
gccagtcactgtttttggacacaggaaccctgaagagatcccatgggggtcaactggagctgatatcattgttgagtccaccggagttttcaccgataaggacaaggccgccgcacatttgaagggtggtgcgaagaaggttattatttctgcccccagtaaggatgcccccatttttgttgttggtgttaacgagcacgagtacaagccagagcttgatattatttccaatg

SEQ ID NO: 165011 - DNA, 229 bp, Glycine max
taattgcaagaaaggcacttcgtccattggtgatgtccctttctgttctcttcactcttggtcttgcgagagaaagccatgccagagacgaagatttttggcatgctgtttggccaaacactcccattccaagttcattgcgagatcttctaaagcctggccctgcaagtgttgaaatcgatgatcaccctatgcaaattgaagaaacacagtacccgaaaaccttctt

SEQ ID NO: 165012 - DNA, 231 bp, Glycine max
ctttttctctctgcaactctcccttttcttccttcgtagatcgaaagggaatcttcttccatggcctccaagcggattctgaaggagcttaaggacctccagaaagaccctccaacctcttgcagcgccggtcctgtagcggaagatatgtttcattggcaagcgactataatgggtccccctgatagcccttatgctgggggtgtttttctagttactattcattttcct

SEQ ID NO: 165013 - DNA, 232 bp, Glycine max
aaacaatttgctcacaaaggaggaaaaatggcacctttcgtttccctctctttgttgcttctctttctcaaccaccccctcctttccctctcaaccaaccctgaagggaacgctctgcatgctctgagaagcaggctttctgatcccaacaatatgttgcagagttgggacccaacactggttaatccctgtacttggtttcatgttacctgtgactccaacaatcatgtga

SEQ ID NO: 165014 - DNA, 231 bp, Glycine max
tccggcgcactcaaggtgccggctttggccctttcatttatctccccaaaatggagcattacagggaagctaagatatggaacagcgtgtttgagaaggctgaggatgtagtaggcatcaaaagaggaagcataagggcaacggttctgatagaaacacttcctgcagtgtttcaaatgaatgaaattttgtatgagctgaaacagcactcggtgggtctaaactgtgggc

SEQ ID NO: 165015 - DNA, 237 bp, Glycine max
  unsure (1)..(237): unsure at all n locations
gttctagtctcaacttctgctcttccaactcctacaacgctcctctccgnactcatgggcaaggtcaagatcggaatcaacggatttggaagaattggccgtttggttgccagcaccgctctgcaaagagacgatgttgaactcgttgccgttaacgaccctttcattaccaccgattacatgacatacatgtttaaatacgacagtgttcacggacactggaagcatcacgatgtc

SEQ ID NO: 165016 - DNA, 235 bp, Glycine max
agaaaaagcaatccactcagagagctagcacgaattcaacaatgcctcgctatgatgataaatacggcaatacccgcctctatgtgggacacttgtcttcgaggactcgttcccgtgctctggagcgtgcactttagcagatatggaagagttcgaggtgtggatatgaagaatgatttcgcttttgttgattttagtgatcctcgagatgctgatgatgcaagaccatacctgg

SEQ ID NO: 165017 - DNA, 230 bp, Glycine max
actcgagccgctcgagccgctcgagccgtggacattttgaactagatattaagatgtacccacaaggaagactgtcacaccatttccgtgagatgcgtgctggtgactacctttccgtgaaaggacctaagggacgtttcaagtaccaacctggcgaggttagggcttttgggatgcttgctggagggtctggaatcaccccaatgttccaagttgccagagctatatta

SEQ ID NO: 165018 - DNA, 145 bp, Glycine max
tggcatgggtcacctaatcccaatgatcgagttcgcaaagcgagtggtgtgctagcataacctggcggtgagcttcgtgatccccactgacggcccaccttcaaaagcacaaaaggcagttctggaggcccttccggactcaatt

SEQ ID NO: 165019 - DNA, 235 bp, Glycine max
gaacaagttccgcctcggtcggaaaatcggtagcggatctttcggggagatctatctcggaactaatattcagacaaatgaagaggttgcggttaagcttgaaagtgtcaaaaccaagcatcctcaattgttgtacgaatcaaagctgtataaaatactgcaacgaggaaatgggattccaaatgtgtaatggtatggtgttgaaggagagtacaatgtgctcgtgatggattta

SEQ ID NO: 165020 - DNA, 237 bp, Glycine max
agagtgtatgatggaggctgccatgtcctagggatcattccaaaagctctcatgcctctcgagatatctggtgaaacagtaggtgaagtgaggattgtttcagatatgcacgagcgtaaggctgcaatggcacaagaagctgatgcatttgttgctctccctggaggatatggaaccatggaagagctgttggagatgataacttgggcccaacttggaatccataaaaaaccggtt

SEQ ID NO: 165021 - DNA, 236 bp, Glycine max
gaaaagttaccacagggataactggcttgtggcagccaagcgttcatagcgacgttgctttttgatccttcgatgtcggctcttcctatcattgtgaagcagaattcaccaagtgttggattgttcacccaccaatagggaacgtgagctggggttagaccgtcgtgagacaggttagttttaccctactgatgacagtgtcgcaatagtaattcaacctagtacgagaggaaccg

SEQ ID NO: 165022 - DNA, 234 bp, Glycine max
aagcacttctcttatttcctatcacaccctattacagattcacaagcgcagacacttcaaatggctctggaagctcttcaatcacccagaagtgccactccatcgtttagtccctttgaagaaaccaacctcagttacttggaaacaccgtggaccaaaggaaagcgttctaagcgtagcgcatggagcagcaactgcaacactcttcatgcaccgaggaagagtacctcgctc

SEQ ID NO: 165023 - DNA, 236 bp, Glycine max
cagccaaaccctaactctgtttaccaaacagaacacctatcttatttcaaatttgttggtagagtggttggaaaagcattatttgatggtcagctcttggatgtccattttactaggtcattctacaagcacatcctaccggccacagttacatatcatgatattgaagccattgatcctgactatttcagaaatttgaaatggatgcttgagaatgatatcagtgatgttctgga

SEQ ID NO: 165024 - DNA, 229 bp, Glycine max
aaaatagtttggttttgtagtaagtgaggtgaggtgccaaaatggtgaagataactcttggtactttcgatgactcttttggtgttgcctctcttaaggcttatttggcagagttccatgcaactctgattacagtgttcgctggtgttggttcagccatcgcttacaacgagcttacaaaagatgcagccttggatccaacggggctggtggcagtagctgtggccca

SEQ ID NO: 165025 - DNA, 323 bp, Glycine max
ttcggctcgagaatggcgcacgcaccgccctggccttcgtgaccctacgcgccgacggggagcgatagttcatgttctacagaaaccccagcgtcgacatgctcctcaagcccgaagaactcaatctcgaactcatcagatctgcaaaagttttcaattacggatcaatcagtttgatcgtggagccatgcagatcagcacacttgaaggcaatggaagtagccaaggaatctgggtgcttgctctcctatgaccccaaccttcgtctacctttgtggccttcggctgaggaagctcgtaagcaaatactgagcatttgggag

SEQ ID NO: 165026 - DNA, 314 bp, Glycine max
  unsure (1)..(314): unsure at all n locations
ggctcagataaacgaaacaggcgttgggttgagaatggaggggggcgcgtaagagaatctgtagcccgaataggtttaaggaggagggatcagagaggtgttgacacttccattttacgaaaactcaattaatgtgaaatcaggtcaacacctgatttcagttcttttgtattcaacagagggaacgaccgagcaaagcaaatggggtgctcattctccggtctgaatgccttatacgactccgttaacggcggaggcgatgtttggatcaacgaganacgtttccgcatcgttcgccagctcggagaaggtgg

SEQ ID NO: 165027 - DNA, 315 bp, Glycine max
cggctcgagctcgagccgaatcggctcgaggacaaatctctgatttagctgagaagctagaacacgcagaccatcagttggcacactcacgctttgagccactaatagcacccacgcctagaaagaaagaggaggaatctccacttgctaagattactcgtgacagcgcaaaaataactgtggagcaagtgcatggtctaatgtcgcaggtcatcaaggacattctgtttaactccgttcatcaagcaaacagaactcgcacagaaccatctggtcccgaaccaatgattgaacgttgattctggctcagctaga

SEQ ID NO: 165028 - DNA, 303 bp, Glycine max
gtttggagctgatgacagatccggtgactttatcaaccggcattacctacgaccgtgtgagcatcgagaagtggatcgagggagaaaacagaacctgccccgtccccaaccaggtgctgacaaccttcgacctcatccccaaccatgccattcgcatgatgattcaggattggcgcgtccaaaacagttcttatgggattgacagactccccactcctcgtattcccatctcgattcacgaggtctccgacacttgtacgatgatcttgttggcttgctagcgtggggacaatgagaggtgtc

SEQ ID NO: 165029 - DNA, 312 bp, Glycine max
ccttgcgtttccctttcattttccctcactttctcgctcgccaaacgcccctctctctcctccaatggccgaccagctcaccgacgaccagatcgccgagttcaaggaggccttcagcctcttcgacaaggacggcgatggttgtattactactaaggaacttgggactgtgatgcggtcactagggcaaaacccaactgaggcagaactgcaggatatgattaatgaggttgatgctgatggcaatggaaccatcgacttcccagagttcctcaacctgatggctcgcaagatgaaagacaccgactccga

SEQ ID NO: 165030 - DNA, 313 bp, Glycine max
  unsure (1)..(313): unsure at all n locations
agtgaattgctttccactgatgggcaacccttntcacctcttatgatgaagtgtatgaccagtttgatgcaatgtgattgcaagacaatcttctgcgaggcatatatgcttatggttttgagaggccttctgctatacagcaaaggggaattgttcacttctgcaaaggactggatgtgattcaacaggctcagtctggaacaggaaagacagcaacattttgttctggaattttgcagcagcttgattatggattggttcagtgccaggctttggttttggcaccaacaagggagctagcacagcagatcga

SEQ ID NO: 165031 - DNA, 309 bp, Glycine max
  unsure (1)..(309): unsure at all n locations
ccatggcttccgaaacaaaccagtccaagaatgtgtgtgtaattggagctggaccctcggggctattggcagcgagggagctgagaaaagaaggtcacaaggtggttgtgttggagcagaaccatgatattggaggtcaatggctatatgacccaaatgtacaagaggaggatcccttaggaagagacccttggctaaaggtgcatagcagcatctatgagtctttaaggttcatgtctcncagagagatcatggggtcaactgatttcccctttttagtcaagaaaggtagagacacaaggaggtttc

SEQ ID NO: 165032 - DNA, 310 bp, Glycine max
aacttgatctacaaaggttgcgccgaccagaaactccaagcccaatactcccagaacctcaaaccgctgttggactccctagtctcggcgtcggcacagaagggtttcgccgcgactacccaaaacgcgctcaccggcgcgtaccaatgcaggggagacctctccaactccgactgctacacctgcgtgagcaagattccggggatggtgaagcgcctctgcggcggagatgacgtggcggcggcgcgggtccagctgagcgggtgctacctgcggtacgaggtggtcgggttcaaggtggtctccgcga

SEQ ID NO: 165033 - DNA, 264 bp, Glycine max
tgaagagttctgcacttctgtctatatggatatttgttatcccagtgcttattgggcttctctttgagcttttggtcattgtgccaatgagagttccagtggatgacagtccagtattcctcctttatcaagactgggcattaggccttatatttctcaagatatggactagattggttatgttggaccacatgatgccgctggtggatgaaagttggcgagtcaaatttgagcgagtgagagaggatggtttctccaggctgc

SEQ ID NO: 165034 - DNA, 320 bp, Glycine max
tccatctataccatcatatatggctagtagttgtttctccatgacaacaccaatcttcaaaattcgcttcttcttattcttatgctttattgggataagttcatctcaattgtcctctgacttttactccacaacttgtcctaagccgctttcaaccattaagagtgcagtggattctgctgtgagcaatgaggctcgcatgggggcttccctcctacgtcttcatttccatgattgttttgttcaaggatgtgatgcatcagtgctattgaatgatacatcaagtttcacaggtgaacagacgccagctggcaacgtta

SEQ ID NO: 165035 - DNA, 309 bp, Glycine max
ccaatatattccattctctctgtgtatttccctacctctcccttcaagatgcagattgtcgtcaagaccctcaccggcaagaccatcacccttgaggtggaaagctctgacaccatcgacaacgtcaaggccaagatccacgacaaggaaggaatccccccggaccagcaacgtctcattttcgccggaaagcaacttgaggacggccgtacccttgctgactacaacattcagaaggagagtactcttcacctcgtcctccgtctccgtggtggcatgcagatcttcgttaagacactcagcggcaag

SEQ ID NO: 165036 - DNA, 311 bp, Glycine max
tattcctctctcattctcactataaacacaaaacccttcccatcctaattaaggtgaaaatgaaggcatcacccattgcttggttcactttggtggttgtgtttcttgtggctgaagttcaagtttcaatggcagtgacatgcagcccagtgcagctgagtgcatgtgtaagtgcaataacctcttcaacccctccatcaaacctatgctgctccaagatcaaagaacagaaaccatgcctctgccaatacctcaagaaccccaatctcaagaagtttgttgactctcctaatgcaaggagagttgctagc

SEQ ID NO: 165037 - DNA, 314 bp, Glycine max
gcacctggttaaggatagagtatagcatggcacagtctagttgcaaaactttggtgcagtggttggtagcagcattgctcattgccttgttgggtggtgcacaagctgttgcaatatgtcacatagactcaagtcaattaaacttgtgtcgtgctgcagttactggtcaaaaccctccaccaccggatgagaaatgttgtgcagttgttcgccaagccaatttgcgttgcctctgcagttacaagtctaccctaccttcattttgcctaaaccccaaaaatgctttggccttgcctggtaaatgtggtctgcaa

SEQ ID NO: 165038 - DNA, 305 bp, Glycine max
  unsure (1)..(305): unsure at all n locations
ctctccttctcttagcggganggctttagcgcagttacttctagatttaaggaagatgggtaaggcaaaggttcacatcagtattgtggtcattggccatgtcgactctgggaagtccactaccactggtcacctgatttacaagcttggaggcattgacaagcgtgttattgagaggtttgagaaggaagctgctgagatgaacaagaggtctttcaagtatgcctgggtgctggacaaacttaaggctgagcgtgaaagaggaatcaccattgatattgctttgtggaagtttgaaccaacaa

SEQ ID NO: 165039 - DNA, 310 bp, Glycine max
tgagaatggtggagaaggcgaagggtaggaaggaggaggtggttaccacagagtacaccattaacctccacaagcgcctccatggctgcacatttaagaagaaagctcctaaagctattaaggagataaggaaatttgcccaaaaggccatggggaccaatgatgtgagggtggatgtgaagtacaacaagtttgtctggagccagggaatcaggagtgttccaaggaggattagggtaagaattgctcgcaagaggaatgacgatgaagatgccaaggaagagctatactctcttgtcaccgttgttga

SEQ ID NO: 165040 - DNA, 305 bp, Glycine max
ctgtcgtgggctccatcaaaacttttctagggcgcccatggaagaagtactccagaactgttgtgatgcagtcgacattggacagccacattgacccaacaggatgggctgaatgggatgcccaaagttaagactttttgcaaacgttgtattatggagagtacatgaataatggccccggtgccggtaccagcaagagagtgaattggcctggttaccatatcatcaaaactgcagctgaggcgagcaagttcacggtagcacaactcatccaaggcaatgtttggttgaagaccatggggtca

SEQ ID NO: 165041 - DNA, 305 bp, Glycine max
gttggccgggaagcagctgaatatttgagtgaactcactttaaacagtggaaaagagttcagggccaaggttgaggagaaagatacttcgggaggcaaagtgaaagggcagggaactggggcaatccttgctgtaactcttgttgctgtggatgctgaaatcagcgttaatgctgccatgctacaggaagggcttgctaggacagaaaaaagaaacaggtgggacagataagacagacagacagctctcgataatttggagaatttccaggatgaagcaaagaccagcaggcgtggaatgtggca

SEQ ID NO: 165042 - DNA, 303 bp, Glycine max
agataaggcaatgaatctgatgcaggcggttcgctacgacgcctacgggggaggtcctgccggcctcaagcacgttgaagttggcgttcccagtccaaaggcaaatgaggttttaatcaaactggaagcagttagcattaaccccattgattggaagattcagaagggtcttctccgtcctttatttctccccagaacctttccccacataccttgcaccgatgtggctggagaaatagttgagatcggaactcaagtcaaagatttcaaagttggcgacctagtccttgctaaactcactca

SEQ ID NO: 165043 - DNA, 246 bp, Glycine max
gtgcgattctcctgatatccaaggtgaagcaccgacaccggacctatctccggcgaatccccagtccccactttcttccttcgaaatgaatcccgagtatgattatctgttcaagctccttcttattggagactctggtgttggtaaatcatgccttcttctgagattttctgatgattcgtacatcgaaagctacataagcaccattggagttgattttaaaatacgtaccgttgagcaagatgg

SEQ ID NO: 165044 - DNA, 308 bp, Glycine max
  unsure (1)..(308): unsure at all n locations
gttaaatgcttacgcttattatggatacaccaaaggagatggtcttttcncaattgaatatgctctattcagacccctttctccagtgacgcaaattgttgacccaaacacactattccactacaacagcaacactagaagctatggtggatgctacctattatgccatagaagccttcaatttcaataatatacctattgttgtcacagaaactggttggccagtgnatggtggagcaaatgaaccagatcctactacatagaattctgagacctacaataataatttaattaagagagtaataaat

SEQ ID NO: 165045 - DNA, 309 bp, Glycine max
gaactaattcggagaccttgctagacttcatcaatggctgtcaaagtttatattgtgtactactccatgtatgggcatgttgagaaactagcagaagaaataaagaaaggggcttcctctgtggaaggtgttgaggccaagttatggcaggtacctgagacactgctggatgaggtgcttggtaagatgagtgcaccacccaagagtgacgtaccagtcattacccccaatgaactatccgaggctgatggctttgtattcggcttcccaacaaggtttggaatgatggctgctcagtttaaagccttt

SEQ ID NO: 165046 - DNA, 297 bp, Glycine max
gtgtggacttgcaggttgcatcacaaccaaggagcttggaactgttatgcgttcattggggcaaaacccaactgaggcagagctccaggacatgatcaatgaagtggatgctgatgggaatggtaccattgacttccctgagttcctaaatctcatggccaggaagatgaaggacactgattctgaggaggagctgaaagaggcattccgggttttcgacaaggaccagaatgggttcatctctgctgctgagctccgccatgtgatgaccacctcggggagaactcacgatgaaga

SEQ ID NO: 165047 - DNA, 306 bp, Glycine max
ctttcttcttctacatccactgcacaattgccacatgaatcattagttagggtttattctccaagaaaagcaatgagtgcgtccaggttcatcaagtgtgtcactgtgggtgacggtgccgttggcaagacttgcatgctcatctcctacaccagcaacacttttcctacggactacgtgcccactgtctttgacaatttcagtgcaaatgtagttgtggatggaagcactgtgaatcttgggttgtgggatactgctggccaagaagattacaatagattaagaccttaagctatcgtggagcag

SEQ ID NO: 165048 - DNA, 193 bp, Glycine max
tctcgagccgaatcggctcgagcggatcgagatcgagccggaatcggtcgagacttgtgggcccatcattgacaacattgctattaagaagctactcactcctgataaacccaaagacaacgcagtgatcaatggggattttgaagagggtccatggatgttcaggaacacttcactgggtgtgttgcttccc

SEQ ID NO: 165049 - DNA, 285 bp, Glycine max
tgagactgtggaataccagaacattaggctcactctctgccatgttggtggccaggacaagattcgtcccttgttgaggcactacttccaaaatacacacggtctcatttttgttgttgacagcaatgacagggacagagttgttgaggccagagatgagttgcacaggatgttgaatgaggatgaactgagagatgcagtattgcttgtatttgctaacaaacaagatcttcccaacctactgaatgctgctgaaactactgacaagctgggactccactctct

SEQ ID NO: 165050 - DNA, 282 bp, Glycine max
cttaaatgtatctgcaacacatttaagcactacccatctaccgcggtaaagcttatagagaccctactttctgtagagccagcactcttcagagcagctgctgcagaccctctgaatagtgagttctttacgtcagagcctctgccttgtgatccatcacgtttaccaaaatatgctcccagcaaggagattgatgctaaattacgggatgaagccagaaggcaaagagctgttggaggtagggaacaaaaagatgcctcaggagttggacaggaaaaaggg

SEQ ID NO: 165051 - DNA, 282 bp, Glycine max
gcaaaacctgagagagaaaatggagaagatgaaaatagaagaggttcaatcaaccacgaagaaacagcgtgttgctacacacactcacatttatggcctaggtctcgagtcgagtggaaaagcattgagttttgctgctgggttcgttttacaagttgaggcaagagaagcatcaggtcttgtggtggacatgatacggcagaagtagatggccggccgggcacttcttctcgccggaccgcccgggaccggcaagacggcattggcacttggaataagcca

SEQ ID NO: 165052 - DNA, 284 bp, Glycine max
gagactgtggaatccaagaacattagtttcactgtctgggatgttggtggccaggacaagattcgtcccttgtggaggcactacttccaaaatacacagggtctcatttttgttgttgacagcaatgacagggacagagttgttgaggccagagatgagttgcacaggatgttgaatgaggatgaactgagagatgcagtattgcttgtatttgctaacaaacaagatcttcccaatgtgatgaatgctgctgaaattactgacaagctgggactccactctct

SEQ ID NO: 165053 - DNA, 274 bp, Glycine max
attccgttttgcgtttctctgcctaaaaggattgaaagatgggtcaagcactaggttgctatcaagttgatcagtcaaatgtggctatcaaggagcattttggaaaatttgatgatgtcctagaacctggatgtcattgcctgccttggtgtcttgggtaccagattgctggtagtttgtcactgcgtgtgcagcaacttgatgttcgatgtgagacgaaaaccaaggacaatgtctttgtcactgtggttgcatctgtgcaataccgagctgt

SEQ ID NO: 165054 - DNA, 279 bp, Glycine max
tattttgactgaggacttcttgcttaaggtttcttatttactctcctatgttgcttttagagaatctagagtaagcattgttcatctttaatgcaggtagatgcagtggtctacttggtagatgcatatgacaaggaacgatttgcagagtctaaaaaagagttagatgctctgctctctgatgagtctttgactactgtccctttccttatccttggaaacaagatagatattccatatgctgcctcagaagaagagttgcgttaccatttgggcctg

SEQ ID NO: 165055 - DNA, 191 bp, Glycine max
attttatgttctttctgtctttctcacgatcgtatagctcgctcgcaaccaccatgccttcccgaagaagaactctcttgaaggtcatcattctcggtgacagtggggtggggaagacatctttgatgaaccaatatgtgaataagaagtttagtaatcagtacaaggcaaccattggagcggatttttta

SEQ ID NO: 165056 - DNA, 277 bp, Glycine max
gtacgacccatgggaccttccaggaatggctttgtacggagagaaagagtggtattttttcacgccgagggaccgcaagtacccgaacggttcgcggccgaaccggtccgcagggaccggatactggaaggcaaccggagcggataaaccggttggcaaaccgaaacctgttgggatcaagaaagcattggttttttacgccggaaaagcgcccaagggagtgaaaactaactggatcatgcacgagtatcgtctcgccgacgtggatcgttcggtt

SEQ ID NO: 165057 - DNA, 268 bp, Glycine max
tctttataccccccctctcttttttgcgttcattctgttttcctgttgaagtctttccctagccaatggccaccgatcgtttgacccgggttcacagtctccgtgagaggcttgatgaaaccctcactgccaacaggaatgaaattttggcacttctgtcaaggatcgaagccaagggcaagggcatcctgcaacaccaccaggtcattgctgagtttgaggaaatccctgaggagaacagacagaagctcactgatggtgcctttgg

SEQ ID NO: 165058 - DNA, 279 bp, Glycine max
tctcgagccgattcggctcgagattgtttgttgttgtaactcgttcactcttcttttgttgttctgtgtttgtgtttgttttacctctcacctgaaaatgtcttgctgcggtggtaactgtggttgcggaagctcctgcaagtgcggcaacggctgcggaggctgcaagatgtacccagacttgagctacactgagtcaaccaccaccgagaccttggtcatgggagtggcacctgttaaggctcaatttgagggtgctgaaatgggtgtgcccgctga

SEQ ID NO: 165059 - DNA, 281 bp, Glycine max
cacgcgacgaggtcggaatcggctcagtcgagcgattcggctcgacgggagtgtggccatggggagtgttgttttccctaggttgcgtctttggttagctcattattgccattgagaccaggaagaggaggaagaagaaggaggctgctcttgaagcctatggtgatggtaattcccattcgggtccggccaatgtgagctggaagcacaccagtactcgggaagctcttagcataaaccttgcaacatttgagaagccgctccggaagcttacttttgcg

SEQ ID NO: 165060 - DNA, 250 bp, Glycine max
gctcttcactaatggagacttcgttggttctctgtcaggaaagacatttgagacaatagatccaagaacaggagatgttatagcgacgataagcgacggcgataaagatgacattgacattgctgttaaagcagcacgtcatgcatttgacaacggtccatggcctcgacttcccggctctgagagagcaagaatattgctgatatgggcagaaatacttgaggaaaacgcgcagaagttgcagcactag

SEQ ID NO: 165061 - DNA, 248 bp, Glycine max
ctaacctaaaccctactcattctccatacctcaatgaagaggttaaagagtcggcaacactttgctgtccgtcttgaccgagcagagcttcgtcttggccctcgattttgccctaaagtactcccagtcacaacagacaccgtcgtcgttgtcgtcatcatcaatggcaccgaagcagaccaaggctgagaagaagatcgcttacgatgcgaagtgtgcgacctaatggaggagtacggccagatcct

SEQ ID NO: 165062 - DNA, 232 bp, Glycine max
catttccttgatatcttagttatctaattacctcaattaatccctaaatgcaaccactggctgaggagaagcaccaccaccactttcaccaccacaagggcgatgatgtgcctggcgaggttgattataagacggaggagaagcaccacaagcatcttgagcaccttggggaacttggtgctgcagctgccggtgcttatgccctgcatgagaagcatgaggcccagaaaga

SEQ ID NO: 165063 - DNA, 95 bp, Glycine max
ttcggtgctacctcccaccggagaaccaaacagggcggtgccttgcagaaggagctaattaggtttttgaatgctggaatatttggcaatggtac

SEQ ID NO: 165064 - DNA, 249 bp, Glycine max
ttgattatcagaagagccggttcgtgaaccgtgttgtttcgtcgatgttcaacacagttgcaaccaaaaagatagccattctggggtttgcattcaagaaggacactggggacacaagggagacaccagcaattgatgtgtgcaagggactactcggtgacaaggcacgcctaagcatatatgatccacaagtcactgaggaccaaattcagagggatttatggatgaacaagtttgattgggaccacc

SEQ ID NO: 165065 - DNA, 251 bp, Glycine max
gcgtcgagtcgaccttgcagccgattcggctcaggtcggatgaagataagcagaaatatgcacgttagctacttagatcttatattgaagacaataagaagtccaagtggtgtcctgctccaggttgtgaatatgcagttacttttgatgctggtagtactggaaattatgatgtctcttgcctctgttcatatggcttttgttggaattgcactgaggaggctcatcgcccagtggactgtggcactgtg

SEQ ID NO: 165066 - DNA, 235 bp, Glycine max
caagttgcctgcgatacatgcaccaataccaacttggtcatggtcttcggagaaatcacgaccaaggccaacgttgactacgagaagatagtgcgtgacacctgcaggaacatcggcttcgtctcaaatgatgtgggactggatgccgacaactgcaaggtcctcgtcaacattgagcagcagagccctgatattgctcagggtgtacacggccaccttaccaaaaaacctgaag

SEQ ID NO: 165067 - DNA, 248 bp, Glycine max
tggaaatcctaaagcaattttcaacaaggaagaggacattggaacctacaccatcagggctgtggatgaccctaggacattgaacaagattctctacctcaggccccctaagaacatttactcgttacacgagcttgtggccttgtgggagaacaagattggccagaccctcgaaaaaatttatgtaccagaggagaaggttctcaaggacatcgaagaggcacctcttccaatcaatgtggtattag

SEQ ID NO: 165068 - DNA, 260 bp, Glycine max
tccaaagtttgtatagtgtaggatttgttggtattcgtgataaaaacacctcatcctattcattttgccatgacgggcgaactccagataaaggttttgaaagtaatgagaaattattaattcatccatgttactggcttggtttgaatctaaatcgtaatgcacttgctccagaggaagcagaggagataaatgacgaatatgatattaatattatttcagataattcagccattcgaaataaaacaataggtcaaata

SEQ ID NO: 165069 - DNA, 249 bp, Glycine max
ggagaagtaatcgagcttcagcaatggtgtacgtcaaggctcagaaatcaaaagcctacttcaagagatatcaagtcaagttcaagagaagaagagagggaaaaaccgattaccgtgccaggattcggttgattaatcaggacaagaacaaatataacactccgaaataccgatttgtggttcgctttagcaacaaggacattgttgcacaaataatatctgctagcattgccggcgatttagttcttg

SEQ ID NO: 165070 - DNA, 245 bp, Glycine max
gtgattgtttgttgttgtaactcgttcttcttcctttgttgttctgtgtttgtgtttgtttacacactcacctgaaaatgtcttgctgcggtggtaactgtggttgcggaagctcctgcaagtgcggccacggctgcggaggctgcaagatgtacccagacttgagctacactgagtcaaccaccaccgagaccttggtcatgggagtggcacctgttaaggctcaatttgagggtgctgaaatg

SEQ ID NO: 165071 - DNA, 246 bp, Glycine max
ggatgctgttgcaagtatgattgagaaagctattattgcaaatccaacatatgcagagggatacaacaacctaggagttctttatagggatgctggtgatatagctcgagcaattaatgcttatgagcaacaccataagattgatcctgattctagaaatgctggccagaatcgcttgcttgcaatgaattacatagaggaaggacatgatgacacacttttgtgaggttcacagtaaactgtatc

SEQ ID NO: 165072 - DNA, 250 bp, Glycine max
caggaattgggaacattcgacaggtagagtttcttcaatggctcctaaagttgataagaagaacgacccaaaggtacaggccttgaagactgctaaggcagttaagtctggtgctacctttaagaagaaggcaaagaagatccgaacttctgtcactttccacagaccgaggacctcgaagaaggataggaaccccaagtaccctcgcattagcgcgcctccaagaaataagcttgatcattatcagatc

SEQ ID NO: 165073 - DNA, 248 bp, Glycine max
gaaagcttccaggcggcgaacaaatagctgttaagaggcgttcaagacggtctggccaaggcttagaggcgttccagaatgaaatgatgctgatagccaaactacaacacagaaatttagttagattaatgggatgctctattcaaggggaagagaagttgctggtatatgaatacatgccacacaacagcttggattgcgttttcatttgatccagtcgcacaaacacaactagcttggacaagacg

SEQ ID NO: 165074 - DNA, 244 bp, Glycine max
ttatcattggccaacaactgggaggcatatggaggcaaagcacaatatgtgaaatggggcaatgctgctggccttaacttgacctctgatgatgacttcttctcacatccaactcttagaagctactacaaggcccatgttaagactgtgctcaatagagttaactcatccacaaacatcacttataaggacgatccaacaattttcgcttgggagttgatgaatgagcctcgttgcacctcag

SEQ ID NO: 165075 - DNA, 249 bp, Glycine max
ctcttcctcagtagtgcggtttgcgattctcttctctgcaactatgcctagccctaaggtcttcttcgacatgaccatcggcggtcaacctgccggccgcatcgtgatggagctctacgccgacgtgactccgagcaccgccgagaacttccgcgcgctctgcaccggcgagaagggcgccgggcggagcggcaagcccctccactacaaaggctcgttcttccaccgcgtgatcccgaacttcatgtg

SEQ ID NO: 165076 - DNA, 258 bp, Glycine max
ggatctgactaccttggaaagggtgtatcaaaggctgttgacaatgtgaacaccgtcattggccctgctttgattggcaaggacccaactgagcagactgctattgacaacttaatggttcaacagcttgatcgaactgttaacgaatggggttggtgcaagcagaagctaggagcaaatgccatattggcagtgtctcttgcagtctgcaaagctggtgctagcgtcctgaaaattcctctttacaagcatattgct

SEQ ID NO: 165077 - DNA, 253 bp, Glycine max
attcctctctcattctcactataaacacaaaacccttcccatcctaattaaggtgaaaatgaaggcatcacccattgcttggttcactttggtggttgtgtttcttgtggctgaagttcaagtttcaatggcagtgacatgcagcccagtgcagctgagtgcatgtgtaagtgcaataacctcttcaacccatccatcaaacctatgctgctccaagatcaaagaacagaaaccatgcctctgccaatacctc

SEQ ID NO: 165078 - DNA, 252 bp, Glycine max
ggcttgttgttcaaggatggcaatttgtaagaaagatgtttggagagttgaatgtggaatcccttctggatttccgctcacagttatttgcaatagcatttttaatgagatgctcattagatatagctatgaaaaattactgcgccaggctaaagctccaagtatgtttttacaatccttcaaaaattttgtttctttgtgtgtgtatggtgatgataacttaattagtgttcatgaatatgtcaagcctta

SEQ ID NO: 165079 - DNA, 245 bp, Glycine max
catcactctcgtccgttaccgccgctgccctagaccaccgcaagcgacgtcgcacaccgccttcatccgttagggcaaaaatgagtcgaggaagtggaggtggatacgatcgtcacatcactattttctcccctgaaggacgtctctttcaagtggagtatgctttcaaggctgtgaaggctgcaggaatcacctcgattggtgtacgaggaaaggattcaatttgtgtcgttactcagaagaag

SEQ ID NO: 165080 - DNA, 248 bp, Glycine max
gagagagcagaggaaaaggggaagaaaaatgttgagtgcgacggcgatcggcgcgttattgggtttgggaacccagatgtactccaatgctctccgcaaactcccctacatgcgccatccgtgggagcacgtggtcggaatggggttgggcgcggtgtttcgtgaaccagcttctgaaatgggaggcccaagtggagcaagacctcgacaagatgctcgaaaaggccaaggccgccaacgaaagacgt

SEQ ID NO: 165081 - DNA, 260 bp, Glycine max
aaatggcggtgcctctgctctcaaagaagatcgtgaagaagagggtaaagaagttcaagaggcctcagagtgacaggaaaatttccgtcaagactaactggcgcagaccaaagggtatcgattctcgtgataggtgaaagttcaagggatgcactttgatgccaaacattggttatggttcagacaagaagacccgccactatctccctaatggtttcaagtaatatgttgttcacaatgtgaaggatttggaactgctc

SEQ ID NO: 165082 - DNA, 260 bp, Glycine max
gctcctggacatcgtgactttatcaagaacatgattactggtacctcccaggccgactgtgctgtccttattattgactccaccactggtggttttgaagctggtatttctaaggatggacagacccgtgagcatgctcttcttgctttcaccctaggtgtgaagcagatgatctgttgctgtaacaagatggatgccactacccccaagtactctaaggctaggtatgatgaaatcgtgaaggaagtctcttcttactt

SEQ ID NO: 165083 - DNA, 259 bp, Glycine max
agattaatggggaggttgtttgtggtgaatctggaagggaagatctatagctgcaaacactgccatacccatcttgcgctttacgatgacatctactccaggacattccattgcagacatgggaaagcttatctcttcaataaggttgtgaatgtttctattggcgaaatggaggacagaccgatgatgactgggttacataccgtggctgacattttctgtgtgggttgtggatcaatcgtgggttggaaatatgaga

SEQ ID NO: 165084 - DNA, 242 bp, Glycine max
tggcccttgtgcatctcttgagaagaaaggcccattatgctcagatgtcgttataggtcaagggggtacaggtgcatggaacatgtgtggccttgacaaatccacatcgttgtgtctactgttcgacgttgtgaggaaggacactcctgatgcaacgatggagtccacgagcaatcacttttacttcacatttttgacgtattctcaggatgacagtgggcaaatgacgatcagggttacga

SEQ ID NO: 165085 - DNA, 199 bp, Glycine max
ccctgtagcaatcatgtcgcatcgaagtcgctgaggatctgcgggaaacaagttccgcatgtcgcttggtctaccggtggcgaccacctttagctgcgccgacaataccctcgcgtcgagcctctccatcgtctcactgcaggggatcaagggtaggctgaaccggttgccgtcagcttgcgtcggagacatcgttatg

SEQ ID NO: 165086 - DNA, 259 bp, Glycine max
gtgaggtgaggtgccaaaatggtgaagataactcttggtactttcgatgactcttttggtgttgcctctcttaaggcttatttggcagagttccatgcaactctgattttcgtgttcgctggtgttggttcagccatcgcttacaacgagcttacaaaagatgcagccttggatccaacggggctggtggcagtagctgtggcccatgcatttgcactgtttgtaggtgtctccgtcgcagccaacatctcgggtggcc

SEQ ID NO: 165087 - DNA, 256 bp, Glycine max
gctcacgtgacttcatggaagaatgaacaggccgaggaattgctttttctcagtagtaaggctatatttaagcctccaaagccaattcgtggagggatcccaatatgttttcctcaattttcaaacctcggtcctctcgactcgcatggatttgctagaaatcggttctggaccattgatgattctcctcctccttttctgacaaatactccgagtaaagcctttgttgatttgattcttaaaccctcagaagacg

SEQ ID NO: 165088 - DNA, 256 bp, Glycine max
tgggaacaatgtggatttgggcactgcatgtggcaaatattacagagtgtgctgccttagcattattgatcctgatgattcggatatcatcaagacactgcctggcgaacagtaaagtattcttgaagttccttgcttgttattttctggttttagttgttgattcaaactttgaaagaatatcttgttgagttgtagacattggtgtaaggtgcaaggtttttgggtattccagctgagcatctagtaattttga

SEQ ID NO: 165089 - DNA, 254 bp, Glycine max
ggataagcttgtttcctgggatgcagtgagctctagacttgaacaagctaaggctttaattaccagtgcatgatgctgaattaaatgcagaataagtgatttatcctgatagtgatgatgaattggatggcgtcatgcggaatagtgaattatttctatctagaaagtgtaagcaggcacatcttttgtactttaaataggtgttgtggtatcagggctaaatctcagattattatgttctatggttagaaatc

SEQ ID NO: 165090 - DNA, 244 bp, Glycine max
caaaaagacacttgaatgttgtctttattggtcatgttgatgctggtaagtctacaactggaggccagatacttttccttagtggtcaagttgatgagcggactatccaaaaatacgagaaagaggctaaggacaagagtcgagaaagctggtatatggcttatataatggacacgaatgaggaggagatggtaaagggacagacagttgaagttggcagagcacattctgagactgtaacaac

SEQ ID NO: 165091 - DNA, 249 bp, Glycine max
aaagtagcagatcctccatggcctccaccaaggaacgtgaaaacttcgtctacgtcgccaagctcgccgaacaagccgaacgctatgaagaaatggtggaagcaatgaagaatgtggcgaactaaacgtggaattgacggtagaggagcggaaccttctgtcggttgggtacaagaacgtggtgggtgctcgtagggcttcgtggaggattctttcctcgattgaacagaaagaagaagctaaagggaa

SEQ ID NO: 165092 - DNA, 260 bp, Glycine max
caaagatccctaataacaaggttggtcttgtaattggtaaaggaggagaaacaataaagaacatgcaagcttcaactggagcaagaattcaggtgattcctcttcatcttccaccaggtgacacatcaactgaaagaacattaaaaattgaagggacccctgaacaaattgagtctgcaaaacaaatggttaaccaagtcataagtggcgagaatcgtcatagaaatccagcaatgtctggtggttattctcagcaaggt

SEQ ID NO: 165093 - DNA, 261 bp, Glycine max
cattctcataatcaaataccatttcattcattcttacatattgcttaattttatctgaattttgaaacaccttctgaatggctttttcaagagttgcattgttaatatgcacggtaattgggtattttgtgattgcctctgcgggcaatttttaccaagattttgatatcacttggggagatgggcgtgctaagatactcaacaatggcgagcttctcactctgtctcttgacaaagcctctggctcgggtttccaatcca

SEQ ID NO: 165094 - DNA, 262 bp, Glycine max
agggaagagatccagcagcaatggtgtacgtcaaggctcagaaatcaaaagcctacttcaagagatatcaagtcaagttcaagagaagaagagagggaaaaaccgattaccgtgccaggattcggttgattaatcaggacaagaacaaatataacactccgaaataccgatttgtggttcgctttagcaacaaggacattgttgcacaaataatatctgctagcattgccggcgatttagttcttgctacagcatattcaca

SEQ ID NO: 165095 - DNA, 248 bp, Glycine max
ctcgagccgttatgccaaccattgccttacttcaagcacattatttcaacataaaaggggtgttcaccactgatttccctgccaatccaccccatttgttcaactactcaggtcctggaccagccaatttgaacaccgatactggcacaaaggtttatcgggtaccattcaatgccacagttcaggttgtgctgcaagatactggaatcattgcacctgagaaccacccagttcatcttcatgggttc

SEQ ID NO: 165096 - DNA, 246 bp, Glycine max
atccactcacctgcctcttcctcacccctttctccatctaacgagtaacgaaaaatggcgcgtaagaagatcagagagtatgactcaaagaggttgttgaaggagcactttaagagactttctggcaaggagttgccgatcaagtctgcacaaattactgcatcaactgatttcactgagctacaagagaaggatccctggctttcatcatctaaattggttgtgaaacctgacatgttatttgga

SEQ ID NO: 165097 - DNA, 250 bp, Glycine max
acttcgctgaaactctctagcttccctctttttccgaatctgaatacgaatggcttcagatactgagacgttcgcttttcaaggacgcgatcatccagctcctcagtctaattatcgacaccttctacagcaacaaggaggtctttcttcgtgagctcatcagcaatgcctctgtcgcattggacaagattcgatttgagagtcgtacaggcatgcgcaagcttgatgctcaggcagagttgctcattca

SEQ ID NO: 165098 - DNA, 256 bp, Glycine max
aacccttctaaaaacctgcggcaaaaagaaccaacaatgtcgccgagcttcgtcttcgaccctcctagcgacgaagaaatcgaacactccgaacacgaagaagaagaagaagaagaatcagtaggagaaccagagtcaggatcagaatcagagtcagaaggagaaggaggagaagtagaagaagggcataaagaagcgcgggttccgaagaagaagaagaagataacacagtctccatgggacttcgccaaataca

SEQ ID NO: 165099 - DNA, 255 bp, Glycine max
caaacagaaatagttacactcagagtagtgaacaacaacagcaacaacaacaacaacgttgcagtgtgttgtattgtttcttagtgcacttttttttggcatcaaagaggttaaatccatggattctgattatggtattcccagggaactctcagatcttcaaaagattcggtcgttgtaccagccagagcttcctccttgtctccagggaaccactgtgagggttgaatttggtgatgcaaccaccactgctga

SEQ ID NO: 165100 - DNA, 259 bp, Glycine max
gtggtgccttatcgctgtggttatcatcttcttcttcctctttcttagatctcttctttctctacgccgcacgccgaaaccatggccggaaaaggagagggtcctgctatcgaaatcgatctcggaaccacctactcttgcgtcggtgtgtggcaacatgaccgcgttgaaatcatcgccaacgaccaggggaacagaaccacgccgtcttacgtcggattcactgacaccgagcgtctcatcggtgatgcggccaaga

SEQ ID NO: 165101 - DNA, 259 bp, Glycine max
cttcaccccttccttttttgcgttcattctgttttcatagtgacgaacttctgaagaaatggcaaatcatcctttgacacactctcactctttccgcgagaggtttgatgaaactctcactggtcacaggaacgaaattttggcccttctgtcaaggcttgaagccaagggcaagggaatcctgcaacatcaccaagtggttgcagagtttgaagaaatccctgaggagagcagaaagaaactccaagatggtgtcttt

SEQ ID NO: 165102 - DNA, 251 bp, Glycine max
ctgcactcgatcaaacacaaaatggaaaagaatgtggggattctcgccattgacatctacttcactcccgcttgcgttcagcaggaagcattggagactcatgatggtgccagtaaagggaagtataccattggacttggccaagactgcatgtcattctgtaccgatgtagaagatgtcatctcaatgagtttgacagtggttacttctcttcttgagaagtatgggattgatcctaaacaaatcggtcg

SEQ ID NO: 165103 - DNA, 247 bp, Glycine max
  unsure (1)..(247): unsure at all n locations
ctcgagccgctaggaatctcatggagagttcgatcctggctcaggatgaacgctggcggcatgccntacacatgcaagtcggacgggaagtggtgtttccagtggcggacgggtgagtaacgcgtaagaacctacccttgggaggggaacaacagctggaaacggctgctaataccccgtaggctgaggagcaaaaggaggaatccgcccgatgaggggctcgcgtctgattagctagttggtgagg

SEQ ID NO: 165104 - DNA, 244 bp, Glycine max
aaggacttggaagagaaggccgagatgaagaagatgtatggcctcatcgagacctacaagttgaacggccaattcagatggatctcctctcagatgaaccgtgtgaggaacggagagctctaccgtgtcatctgtgacacaaggggtgcctttgtgcagcctgcagtttatgaggcctttgggttgactgtggttgaggccatgacttgtgggttaccaacatttgccacatgcaatggtggtc

SEQ ID NO: 165105 - DNA, 245 bp, Glycine max
aaaatcaaccatgggttcagcagctgagactcagattactccaacccatgtatctgatgaagaggcaaacctttttgccatgcaactagccagtgcctctgtactccctatggttctcaaatcagctcttgagcttgatctgttggaaatcatagccaaggctggccctggtgttcatctttcccccactgacatttcttctcagcttccaacacagaaccctgatgcacccgttatgttggacc

SEQ ID NO: 165106 - DNA, 247 bp, Glycine max
agaagacatctgatattgcagtacatggattgctcctgtgggcttcaaccgggtttttaatgcctcttggcatacttatcatcagaggatccattaaagcagaacctggatccagaaggagtatagttctcttctatctccatgttggttttcagatgctttcagtgcttcttgccacagttggagctgctatgtccctgaagaagtttgagaattcatttgataacagccatcaaaaactaggcct

SEQ ID NO: 165107 - DNA, 262 bp, Glycine max
caaagatccctaataacaaggttggtcttgtaattggtaaaggaggagaaacaataaagaacatgcaagcttcaactggagcaagaattcaggtgattcctcttcatcttccaccaggtgacacatcagctgaaagaacattaaaaattgaagggacccctgaacaaattgagtctgcaaaacaaatggttaaccaagtcataagtggcgagaatcgtcatagaaatccagcaatgtctggtggttattctcagcaaggtta

SEQ ID NO: 165108 - DNA, 258 bp, Glycine max
  unsure (1)..(258): unsure at all n locations
tctagggtttttatttctctcttctctctgcatcgcttcaggttcttctgaaaagatgtctcgcgtgtatgttggtaacttggattcacgagtcaccgagagagatctcgaagacgaattccgtgttttcggagttattcggagtgtttgggttgcacgtagaccacctggtnaatgcttttattgactttgatgatcgcagagatgcacaggatgctatccgtgaattggatggcaagaatggttggagggttgagc

SEQ ID NO: 165109 - DNA, 258 bp, Glycine max
gaagatgttgacaaagatcgatgatatgccattgatgcagcaattgtgcgcattatgaagagtaggaaaattttgggtcatcaacaactagttttggagtgtgttgagcagttgggccgcatgttcaagcctgatatcaaagcaatcaagaagaggatcgaagatctcatcactcgggactacctggaaagggacaaagataacccaaacaccttcaggtatctggcataaatggaagttactaatgtatagagtggc

SEQ ID NO: 165110 - DNA, 257 bp, Glycine max
cacacacatagtagctattatactctctagagtaattgcggaatctgctagaattttctaataatggcgaaatacgttgagcaggtcacagagcaaggtgaatactccgcgaaggactaccatgaccctcctccggcaccgttgatcgacccagatgagctcacaaagtggtccttgtacagagccgccatagctgagttcatagcaacactcctttttctttacatcaccgtgttgaccattattggctacaagag

SEQ ID NO: 165111 - DNA, 254 bp, Glycine max
tgggtatttatggttatccaatagagattcaagcacttttcttcatggcattgagatgtgctttgtcaatgctgaaacaggatgacgccgaagggaaggaatgtgttgagcgtattgtgaagcgtttgcatgcactaagttatcatatgcggagttacttttggctcgacttccaacaactaaatgacatttatcgatataagactgaggagtactcacatactgctgtaaataagtttaatgttattcctgat

SEQ ID NO: 165112 - DNA, 244 bp, Glycine max
gtagggtcatcggaagcacgggatctgatgaaaaagtgaggctaatcaaagaggaatttgggtatgatgatggattcaactacaaaaaggaagaggaccttgatgcagttctaagcaagttctttcctaatggtattgatgtttaccttgacaatgttggcgggaagatgcttgaatctgtactgaatcatgtcaacaagtttgccaggataccactttgcgggatgatatctcaatataacca

SEQ ID NO: 165113 - DNA, 247 bp, Glycine max
tgcttggaaagggtgggtttgggactgcgtacaaagcggtgctcgatgatggaaatgtggttgcggtgaagagactcaaggacgcgcagattacagggaagagggaatttgagcaacacatggaattgttgggaaggttgagacatcccaatgttgttagtttgagggcttactatttcgcgcgcgaggagaagttgttggtctatgattacatgcccaatgccaccttgttctggctccttcacgg

SEQ ID NO: 165114 - DNA, 263 bp, Glycine max
ggagtgactacactgttgcatacaagttttgggtcgaggttgcccttgatacaagggccttcttttgtttatctggccccggtgttggcgatcatcaactcccccgagtttcaaggattaaatgcaaataaattcaaacatataatgaaggagctagcagggggctataattattggatcggcttttcaaacttttattggatattctggacttatgtcactgttagtaaggttgatcaatcctgtggttgtatccccaacta

SEQ ID NO: 165115 - DNA, 257 bp, Glycine max
ctcgatccgcgaaacacaaaatgccaggactcacagcaccttccgattactcccaagaacccctccgccactcttctcttctcatcaacgccaaggaacctttcaatgcggagccaccgcgtgctgcgttggttacttcctacgtcaccccttccgatttcttctataagaggatccacggtccaatccccatcgttgagaacatcaacagatattccgtgaacgtgtccggcttgatggagcgtcccaaacagctc

SEQ ID NO: 165116 - DNA, 261 bp, Glycine max
agctattgaggctaatgatgggaagcccctgccactgtatcagaaagctctatgtgggctgactgctggtgctatcggagcaactgttggtagtccagcagatttggcactcattcggatgcaggctgatgcaacattacctgctgctcagcgccgaaattacactaatgccttccatgcactctatcgaattactgctgacgaaggggttttggcgctttggaaaggtgctgggcctactgttgttagagccatggcatt

SEQ ID NO: 165117 - DNA, 248 bp, Glycine max
aatttaatcaccattgtacaacccaattcccttcgtcgttttcgattaagagagcaatggcacgtaccaagcaaaccgctcgcaagtccaccggaggaaaggctccgaggaagcaattggcaaccaaagccgctcgcaagtcagctccggcgaccggcggagtgaagaagccccaccgcttcaggccaggaccggtggctctgagggagattcgaaagtaccagaagagcaccgcaacttctgatccg

SEQ ID NO: 165118 - DNA, 264 bp, Glycine max
cgcgtcgctgctccgtaccagtttcactgcataaatttgagagaaaactctgcaaacatgttggtttatcaggacctccttacaggtgatgagcttctctcggactccttccgttacaatgaaattgagaatggaatgctgtgggaagttgaggggaagtgggttgttaagggagcagttgatgttgacattggtgcaaacccttctgctgagggtggagaagatgagggagtcgatgacgcagctgttaaggttgttgacatt

SEQ ID NO: 165119 - DNA, 266 bp, Glycine max
gccaagtgaaccaagaacacagcgaacccaattggtatcaaccctgctcgtagtcttggtgctgctatcatcttcaacaaggaccttggttgggatgaacactggatcttctgggtgggaccattcatcggtgcagctcttgcagcactctaccaccaggtcgtaatcagggccattcccttcaagtccaagtgattcaatcaaacggttcatgcttaatcaagttgggaataacaacaacaacaagaatcaagccaatgtttgtg

SEQ ID NO: 165120 - DNA, 268 bp, Glycine max
attgtctgttgttgttaatcgttcttcttcttttgttgttctgtgtttgtgtttgtatcatctctcacctgaaaatgtcttgctgcggtggtaactgtggttgcggtagctcctgcaagtgcggcaacggctgcggaggctgcaagatgtacccagacttgagctacactgagtcaaccaccaccgagaccttggtcatgggagtggcacctgttaaggctcaatttgagggtgctgaaatgggtgtgcccgctgacaacgattgctg

SEQ ID NO: 165121 - DNA, 169 bp, Glycine max
gacaaacacatggctttgtacaatcagcaaaccgtcgattacaccagcttcaatcgcgtcatcgtcgatgactgtggcacaggatagactacctacgtgtaaaggcatctcactggtggattctcgtacaactgatggaccgtaccactggtgtggtggttcatccgtt

SEQ ID NO: 165122 - DNA, 265 bp, Glycine max
ttttgatgcaacgctgtcactgagaaaggatctctatctacgaaggagcggaataaaacccttctctctgtgattaagagaatggcttcagatcggaaacttcacacttttgaggaggtggcaaagcacaaccagaccaaggattgctggctcatcttttctggcaaggtgtatgatgtcacccctttcatggaggatcatcccggaagtgatgaggttttgttatctgcaacagggagagatgcaaccaatgactttgaagatg

SEQ ID NO: 165123 - DNA, 267 bp, Glycine max
gagctcccatactcaaactcactctttctaagttttttctatctctttctctctctctgtctgccatggttctctccaaaaccacctccgaatccgacgtctctgtccactcaaccttcgcttctcgatatgtcagaacttcgcttcccaggtttaagatgccggaggactcgataccaaaggaggcagcgtatcaaataataaacgatgagttgatgttagatgggaacccaaggttgatcttggcatcatttgtgacaacctgga

SEQ ID NO: 165124 - DNA, 260 bp, Glycine max
cattcagtgaatacactgttgttcatgccggatgtgttgccaaagtcaaccctgctgccccacttgacaaaatttgtgttctcagttgtggaatttgcacaggtcttggggctactatcaatgttgcaaaaccaaaacctggttcttctgttgccatttttggacttggagctgttggccttgctgctgctgaaggggcaaggatttctggtgcatcaagaattattggggttgatttagtttctagcagatttgaagaa

SEQ ID NO: 165125 - DNA, 260 bp, Glycine max
ttccaagctaaatgcttggagactggtgaaactgtggctatcaaaaaagttcttcaagacaagaggtataaaaaccgggaactgcaaacaatgcgccttcttgaccacccaaatgttgtctgtttgaagcattgtttcttttcaaccactgaaaaggatgaactataccttaatttggtacttgagtatgttcctgaaacagtcaatcgtgtgatcaaacattacaacaagttgaaccaacggatgcctctgatatatgt

SEQ ID NO: 165126 - DNA, 264 bp, Glycine max
gttgaacaagggtttctctgtctgcttcttcactttctctcgtttcaatcgaaaccaaaacaacaacatgggcagaaaattcttcgtcggtggcaactggaaatgcaatgggaccactgaggaggtaaagaagattgttactactttgaatgaggctaaagtccctggagaagatgtcgtagaagttgttgtgagccctccttttgtgttccttcctgttgtacaaagtttgctgcgccctgatttccatgtttcggcacaaaa

SEQ ID NO: 165127 - DNA, 271 bp, Glycine max
gtgaagtactaagcctctatattcacttgtgaatttgaaggacgatgagttccacagaggtcgcagccacaacgaagaagggtggaagagggcaacccaagaccacaaagtccgtttcccgttcctccaaagccggccttcagttccccgtcggccgcgtcgctcgctacctcaaggccggtcgctatgtccagcgcgttggttccggttcccctgtttacataactgcggttctcgaataccttgccgctgaggttttggagcttggcgg

SEQ ID NO: 165128 - DNA, 185 bp, Glycine max
gcaacctagcagcctccaaatccaatggcttcagagaagaaactttcgaacccaatgagggagataaaagtgcagaagctacgtcctcaatatctctgttggcgagagtggagatcgtctcaccagagccgccaaggtgttggaccaacttagtggccaaaccccagtgttttcaaaggcaaggt

SEQ ID NO: 165129 - DNA, 257 bp, Glycine max
aacgaaaccctcttcatcttgttctatctgtgacgagcatcatggcctcaagagcagtgttattgttggctatgtgtgtgcttccggcgatggttgtagccattcgcccagcaaagaaccctttttgcgtgaagggtcgtgtctactgtgacccttgccgtgctggttttgagacctcagctaccacctacattgctggtgctgagattatgttgcaatgctagagcagggttagcaacgaggttgtgtacacgaag

SEQ ID NO: 165130 - DNA, 262 bp, Glycine max
tctcgagccgaatcggctcgagaatggacctccgtgaatcgataaacaaccaaaccgacgtagctctgagcatcacaaagctcctgttgtcgaaaaacgctcgggacagtaacctcgtgtactcgccgctgtcgttgcacgttgttctgagcatcatcgcttctggctccaagggccccacactcgatcagcttctctccttcctccgatccaagtccaccgaccatctcaactccttcgcctctcagctcgtcgccgtcgt

SEQ ID NO: 165131 - DNA, 215 bp, Glycine max
ttgagaatgggtgcttcttcttctatgtcgacggtctgtgtgattttggcatcactggcctctgcagcactctatgccaacccacagagggcagtggatgtaccatttggccgatactatgtggccacatcggcctttgctcacatcggttatctcaatggtggtacctcacattcagcttccacctaacccttacacttgtaatggcctccagt

SEQ ID NO: 165132 - DNA, 225 bp, Glycine max
gagtaatggcaagggtgtttcaattgatggtgtccctctagcatttgaggctggtgacattgattttggtgaaccaggaactaatgggcagcatagcttttatcagctcatacatcaggggcgcgtaattccttgtgatttctattggagttgtgataagtcagcaacctgtctttctaaaaggtgcagtggtgagtaaccatggtgagctaatgtccaactatt

SEQ ID NO: 165133 - DNA, 255 bp, Glycine max
aataaattggaagaggttttaacacttagcaccttgggaagggagttccacaagtgctagcaactctccttgcattaggagagtcaacaaacttcttgagattggggttcttgaggtattggcagaggcatggtttctgttctttgatcttggagcagcataggtttgatggagggagttgaagaggttattgcacttacacatgcactcagctgcactgggctgcatgtcatgccattgcaattgagattcagc

SEQ ID NO: 165134 - DNA, 262 bp, Glycine max
gtgacaacgcatggcagctaacagcagccacactcgtcggtcttcaaagcatgccgggtctcgtgatcctctacgccagcatagtgacgaaaaaataagcaatgaactcagctttcatggctctctacgcctttgcggcggttctaatatgttgggtgcttgtgtgttaccgaatggcctttggagaagaacttttccccttctggggaaagggtgctccagcactaggccagaagttcctcacgaaaagagccatagtcat

SEQ ID NO: 165135 - DNA, 256 bp, Glycine max
gagaatatagtatggcacaatctagtggcaaaaaattggttgagtggctggttgcagcattattgttcattgccttgttgagtggtagtgcacatgctgttgcaatatgtaacattgactcaagtcaactgaacttgtgtcgtgctgcagttactggtcaaaaccctccaccacctgatgagaaatgctgtgcagttattcgccaggccaatttgcgttgcctctgcagttacaagtctatcctaccttcatttgg

SEQ ID NO: 165136 - DNA, 262 bp, Glycine max
tcttactctcactgaaaaaaaatagcttgttcacaccatcctatttcttcaactcatatcatagaaatatatataacatggcttctaccttctctcgaagcctagcacttgtaagcttttacattgtcgtttgtgctgccggtaacttgaaccaagactttcagcttacgtggggagatggtcgtgctacaatactcaacaacgaaaatcttctcactctctcccttgacgaggcctctggctctggcttccaatccaaaaa

SEQ ID NO: 165137 - DNA, 265 bp, Glycine max
atgaacggatgcatttattagataaaatgtcaacacaggctctgcctgttgctttgatgattcatgataactcgtcggatcgcacggcctttgtgccggcgacgcatcattcacatttctgccctatcaactttcgatggtaggatagtggcctaccatggtggtgacgggtgacggagaattagggttcgattccggccagggagcctgagaaacggctaccacatccaatgaaggcagcaggcgcgcaaattacccaatcctg

SEQ ID NO: 165138 - DNA, 189 bp, Glycine max
gtaaatgacgcagcagctaggtttgcttgtgaatgtgcctatccatcagatctaagtcttgttacgaaagctcgccacaatggtcagaactatgtgttttcccttctaaccgggtatcgtgaccctcctgctggtgtttcgattagacaaggagtgaagtataatcttattttcctggtggggctattg

SEQ ID NO: 165139 - DNA, 174 bp, Glycine max
agaaactcttcaagaaaaggcatgctggaaactagtaatgatcaagtgaaacagaagcctttgcattaggataaggtgaatactaataatgctgatcactccatggtttgggctaaagtttatcgcggctctttcagagttgatcaagatctcatggaagatcacttcgggtta

SEQ ID NO: 165140 - DNA, 225 bp, Glycine max
gctagatccagacccatcatggcttcagagaagcaagcggctacttgccgtcactccctctgatgatgatgctcctaccatatttgacaagatcatcaataaggagattccttctactgtggtttataaggatgacaaggtgcttgccctcagggacataactcctcaagctcctacacatattcttatcattcctaaattcacagacgggttaagtggtctatc

SEQ ID NO: 165141 - DNA, 266 bp, Glycine max
tcgaaccgcacttctgtaacgcaattatcatgggcaaggtcaagatcggaatcaacggatttggaagaattggccgtttggtagccagagtggctctgcagagagacgatgttgaactcgttgccgttaacgaccctttcatcaccaccgattacatgacatacatgtttaaatacgacagtgttcatggacactggacgcatcacgatgtcaccgttaaggacgagaagacccttctcttcggtgacgagccagtcactattttt

SEQ ID NO: 165142 - DNA, 250 bp, Glycine max
aggaattgctgtaacatcttgattcctaaattctctacaattcgaaattctgatttcgttaaacggatagatattgtttgtgtgccagtgattattgctggaaaacgcgaaggtcctgctatcggaatcgatttgggaacgatgtactcttacgttcgcctgttgcaacacgatcgcgtagatatcatcgccatcgatcatggtgacattactacaccatcctacgtggctttcaacgacgcagttctgt

SEQ ID NO: 165143 - DNA, 261 bp, Glycine max
attgagttcaaggctggctagggaaggcaatctcttccgattagagatagaaggttcatcatctcatctcaaaaaggcttttgtgattgataatcagttctcgatttgatttgatcggaacagaacagaggcatgggtcaagcttttcggaagctcttcgacaccttcttcggcaataccgagatgcgggttgtgatgcttggtctagatgctgctggcaaaacaactatactgtacaagctccacattggagaagtttta

SEQ ID NO: 165144 - DNA, 264 bp, Glycine max
gttgattcggatctagagtcttcagtttctcctcgttgttcttcgctttcctgttttcaatttcgattctatcgttaatttaataagatgtttgggagggcaccgtagaagagcgataatacgaggtactacgaaatcctcggcgtctccaagaacgcttcgcaggatgatctgaagaaggcttacaagaaagccgccattaagaatcaccccgacaagggcggtgatcccgagaagtttaaagagctggcgcaacttatgagg

SEQ ID NO: 165145 - DNA, 264 bp, Glycine max
gcgcaatatgtgaactggattggggctgtatcggttggaattttgcttacattcggctgaatcttcgtatatggttcaaagtgtggaggaaggtgcttctatgcctgtgcagggtcctgcttgtaatgctacggataaattggttgggtggcatactttcaattcgttgcagtatactgggaggagtacggcacatattgatgacatggcgtctgtgctgcccagaaagcttgactggtctgggtttgtgtcgaattccaggtt

SEQ ID NO: 165146 - DNA, 255 bp, Glycine max
tcggacttcggctcgatcatggtttcaacacgcagctcgatgtggtttgcgctaccaggcgtctcgtagggctatttcgcctcatgagggacaccaatggaacgttcctttggagggccgaagtccatactgctggatcgccaacggaagttgcgctcacgcgtcgcttctagcccggcttctgtcttgtaaacgttctgctataatactccgcacggtagcttcgcgcaattggctcttcaactaagcgcgatg

SEQ ID NO: 165147 - DNA, 263 bp, Glycine max
ctctgatctcactcatcattcaccaagctgcttctctgttctcttcttgcccttaccaagaagaagaagacgacgatgtcttctgcagaatcatcaacaggcttctccgtcaccatttgggtgaaaggcgctggtaggctcatcgactcttggatggtcaaactccacttggacaaaggctacactgtccgtggaaccctcagaaacccagatgatgccaagatctggcacttaaaaaattttgaaggagattcccagagact

SEQ ID NO: 165148 - DNA, 281 bp, Glycine max
tttgcttcttcgagtttcacagccaagtcgtaaaagggtttcaagggatggaaaacatgcagagcttctggcaattgggtgatgaactccgtgggcactcaaaagcatcggaggatcacaagtggttaatggttgcctcgaaactggccgaacagacaagattgaagggggagcgtgtgaacaaccttgatctttcaaagggacccattgaaacaaggtcaagggataaatttgggttccaggaagagaacaatttgattctcttaacttgagcatgttga

SEQ ID NO: 165149 - DNA, 285 bp, Glycine max
gacgtggtggtttacccaccactgcttggattagttctgcagttaacaatcgctcctcagatatcaacaaaaagattcgcacagcacttgggaaaggtaagaaaattgtttttcttactagggttgatccttttccagtagctttactggctgttctttttggcgttaagaatgaaattctgagttctaacgccaccaatcctatgctgacgcgacttcttgagaactgtaaaagtctcaaatatctggttgatgagtgtccttttgcatttgtgaactagtatg

SEQ ID NO: 165150 - DNA, 281 bp, Glycine max
tgtgtctccaccaaagtcatcaagcttctttgcagactttggaatggatagtggctttccaaagaaatctgggccaagctcctccaaagtgcaaattcaggaaactgatgaagcaagaaggaagttctcaaatgctaaatctatttcttcatcccaatattttggagatcagaacaaggctgcagatgtggattctcaagctacattgtctaagttttcgggttcaagtgccatctccagtgctgatctttttggtgactcaagagacaacaacattgatc

SEQ ID NO: 165151 - DNA, 277 bp, Glycine max
cggcgccgatggctacgcgcgcgccaggggagtcggcgcgtgcgtggtgactttcaccgtcggcgggcttagcgtgctcaacgccatcgctggagcgtacagcgagaatttgcagctgatttgcatcgtcggtgggcccaactccaacgactacggcaccagtcggatcctccaccacaccatcgggttacccgatttcagccaggagttgaggtgcttccagaccattacttgcttccaggctgtggtgaataacttggaagatgctcatgagttg

SEQ ID NO: 165152 - DNA, 277 bp, Glycine max
tgaaccctgaccacgtccctcacattctgaagaagggatggtagaaggagcagagctgatgtggttgagcagttcctcccagaccacaatgagtccatttctgcagttcttgacaagtttggtgccatgggaattgacacccctggcgtcgttgcactgcttggagcacacagtgttggtcgaacccattgtgtgaagttggtgcaccgtttgtacccagagattgatccagctctgaaccctgaccacgtccctcacattctgaagaagtgccctg

SEQ ID NO: 165153 - DNA, 272 bp, Glycine max
gaagaagataaagaaagagaaaaagtgtgtgtgtgagagagagagcaatggctggctcgtgggcacgccgttctctgattgttctggctatcatttccttcggatgtttatttgcaatttccattgctaaggaggaagccacaaaattggggacggtcatcgggattgatcttggaacgacctattcatgtgttggtgtttacaagaacggccatgttgaaatcatagccaatgatcaaggtaaccgtatcaccccatcgtgggttgctttc

SEQ ID NO: 165154 - DNA, 275 bp, Glycine max
tctctctctcctcttgaagccctcaaaggctcaaacacaaacactaacactaacactagcattcactcaagagatcaataatgggatctggggccggcaatttcctcaaggtgcttctcaaaaacttcgatgtgcttgctgggcctgtcattagtcttgtttatcctctatatgcttcaattagggcaattgagagcaagtctcctattgatgatcagcagtggctcacttactgggttctctactccttgatcaccctctttgaacttactttt

SEQ ID NO: 165155 - DNA, 275 bp, Glycine max
tgttccgatattatgcaggttgggcggataaaattcacggtctaacagttccagctgatggaccataccatgtccaaactttgcatgaaccaattggtgtagcagggcagattgttccttggaatttcccacttcttattttttcatggaaggttgcacctgcattagcttgtggtaatacagttgtaatgaaaactgcagagcagacacccctttcagccctttatgtgtcaaagctatttcttgaggcaggacttcctcctggagttctgaat

SEQ ID NO: 165156 - DNA, 279 bp, Glycine max
ctcgagccgattcgcatgtcgggttcaacacgagatcttgtgattcttgttgatgaaaacattagtgagtatcatagagggggcttgaaggctgctggatggaagatccatacaatccaaagaatcaggaatccaaaagcagaaccagaggcatataacgagtggaactacagcaaattccgtctctggcagctaacagattatgataaaatcattttcattgatgctgaccttcttatacttagaaacatcgatttcctttttgagatgccagaaata

SEQ ID NO: 165157 - DNA, 282 bp, Glycine max
gtcttcccttggtgttccagtttttatttgcagccgccatgtgcggaatcctcgcagtgttgggttgcgtcgacaactctcagaccaagcgcgctcgcatcatcgaattgtctcgcaggttgcggcatagaggtcctgattggagtggcatacattgctatgaggattgttaccttgctcatcaacgccttgctattgttgaccctacttcgggggatcaacctttgtacaacgaagacaaaactgttattgtcactgtaaatggggagatatacaatcaca

SEQ ID NO: 165158 - DNA, 220 bp, Glycine max
ctcgagccgaaaacagaatggcaagccagccagtgaacaatgcgaggcctccaacagttcaaattcgaggacagccagtgaaccagaaggctggttgctgctcgacttagagagagacgaagtatttggggtcttagaagttcatgtgtctcagtggaatctaaaactagtttttcaaattgctttcaaaccaggatagttcgtcatgattggtccccct

SEQ ID NO: 165159 - DNA, 274 bp, Glycine max
atttgattggtgtgcatccatgttaagctagtggcgatcggatccagctacagcctacaacctacagttttggtttggtttgcttgattgaagatcaaggaaggaagatgttgggtgttataaggcacaagagtattcgccccgtcttctccggaatcagacacttctcttctgcagctaaagagattactgtcagggatgctctcaactccgcactcgatcgaggtatatcagctgatcctaaagtcttcttgatgggtgaagccgttcggga

SEQ ID NO: 165160 - DNA, 276 bp, Glycine max
gcagacgccgtgactagacactcatctcactcgcgccatcgtagggtttctccttttgtttcgcaacatggttgccgctaagaaaactaagaagacccatgagagcatcaacaacaggctcgctcttgtcatgaagagtggcaaattcaccctcggttacaagaccgttctcaaatctcttaggaactccaaagggaaattgattatcattgctaacaactgcccccctttgagaaagtcagagattgaatactatgctatgttggcaaaggttgg

SEQ ID NO: 165161 - DNA, 271 bp, Glycine max
gcaaggagaggagaaagcattgaactttcacccagacgaatatcaattttccagtttgacatagagcgtagcttggatgacagacaaaatttgatttttagagtgacatgttccaaagggacatatattcggtcactctgcgctgattttgggaaggctcttggcagctgtgcccatttaactgctctccgaagagattcaattgggcaatattcagcagatgatgcatgggagtttcaagagctggaagaggctatcaccaaaaattatc

SEQ ID NO: 165162 - DNA, 230 bp, Glycine max
ccagaggaggttggtgctggtgaccagggtcacatgtttggctatgccactgatgaaacccctgagtacatgcccctcagccatgtccttgcaaccaaactcggtgctcgcctcaccgaggttaggaaaaatggtacctgtgcttggctgaggccagatggcaagacacaagtaactgttgagtactacaatgacaatggtgccatggttccagttcgtgtccacactgt

SEQ ID NO: 165163 - DNA, 274 bp, Glycine max
gatgcagttactgcagatgatcagggaaataaattggctttggcactctttgctggtgcacctgctaataatgtaaatggatcatgggaagccttcccatcaaatggacagccagaagtgacttcagcctggcaaaccccagctgcagagcccgggaaagctgattgggaattggcattggtagagactgctagcaatttgtcaaagcagaaggcaactttaggtggtgggtttgatcctctattgttgactggcatgtatgatcaaggaatgg

SEQ ID NO: 165164 - DNA, 274 bp, Glycine max
ttcttcttcctctttcttagatctcttctttctctacgccgcacgccgaaaccatggccggaaaaggagagggtcctgctatcggaatcgatctcggaaccacctactcttgcgtcggtgtgtggcaacatgaccgcgttgaaatcatcgccaacgaccaggggaacagaaccacgccgtcttacgtcggattcactgacaccgagcgtctcatcggtgatgcggccaagaatcaagtcgccatgaaccccatcaacaccgtcttcgatgccaa

SEQ ID NO: 165165 - DNA, 271 bp, Glycine max
ggggctccacacttagcaaagagggtgaaggagctactcttaggatcagggtttagccatgtggatgaagataagaaacgtgggcttgaccatggtgcatgggtgccactcttgttgatgtacccagaggcagacatcccagtgtgtcaactctctatttcatcaaacaaaggtggtacctatcactacaacatgggaaaggctttggctcctcttaaggatgagggtgttcttatcgttgggtctgggagtgccacccacaacctcagag

SEQ ID NO: 165166 - DNA, 268 bp, Glycine max
gttcagagctgagatacgggtacagttcaggcatgtgccaggtaatctgtacaatcggaatttcggtactgatcttgatcgggctacaaatgaacttgttataagagttcagcctgatgaggctatttatctgaagataaacaacaaagttccgggtctgggaatgaagttggatcgcagtaatctcaatcttcactacgctgcaaggtattttccttttactctaaaaatcaacttcatgggacccctgaaatacactcttcattgg

SEQ ID NO: 165167 - DNA, 273 bp, Glycine max
gtctccggtgagggaaaagtagtagaagagaagatgtcgaccgtaccaggacagctcatctgggagatcgtgaagaagaacaactcctttttggtgaaagagttcggaaggggcactcagagcgtgcagttcagcagagagcccaacaatctctacaacctcaacactttcaagtactccggtttggcgaaccagaaaactgtcactgttcaacctgctggtaaagaccagtccgtgttgctcgcaacaaccaagacaaagaagcaaaacaag

SEQ ID NO: 165168 - DNA, 280 bp, Glycine max
cctgacctcacaaggattgagtgttggatctagtcatctagatttaaaaaaaaaatgaagatcattgagaaaattcgcgcagttctgctgatccaaacagggtggtgttctcatttgagttcttcccccccaagactgaggatggtgtggacaatctgtttgagaggatggaccgcatggtggctcaaaacccctctttttgcgacatcacttggggcgctggagggacaacggctgatcttacattggagattgccaacaagatgcagaccattgtctg

SEQ ID NO: 165169 - DNA, 278 bp, Glycine max
attctccagagagaagaagaaacttaatcgatcatcacttcacttcactaatacatcatggcagacgagacccagaacaagtatgagagctctgaggttgaggtccaggatcgtggtgtttttgactttctcggtaagaaaaaggatgaagaagacaagcctcatcctcaggaggaggtcatcgccaccgagtttcaaaaagtcactgtctcagaccaaggagagaacaagcacagcctcttagaaaagcttcaccgatctgacagcagctctagctc

SEQ ID NO: 165170 - DNA, 274 bp, Glycine max
cccacacgcttcctactcctccctttcaccacttttctgctcccccttgagaaagaatttgaatcatcaaaattaaaaactcgcaccaacaatggccccaagagacagccgagccaccgcgttcgccggaccaggcccaggcccatcaccggcccacaaagagatccgctaccgaggcgtccggaaacgcccctggggccgctacgccgccgagatccgcgaccccggcaagaaaacgcgcgtctggctcggcaccttcgacacagccgaggaa

SEQ ID NO: 165171 - DNA, 272 bp, Glycine max
aagagtttgatcctggctcagaaggaacgctagctatatgcttaacacatgcaagtcgaacgttgttttcggggagctgggcagaaggaaaagaggctcctagcgtgaaggttgcttgtctcgcccaggaggtgggaacagttgaaaactctaaaagttgcatttcatcatgccactaaggaggaagtggttattcatactatccgactcccaaagcagagcactgttggggatgtccttgatgatcttaaaacaaaggtagagttatctga

SEQ ID NO: 165172 - DNA, 268 bp, Glycine max
gcgaagacgggggacgtgctgttcgtgcattacagcggacatggcacgcgcctccccgcggaaaccggagaggatgatgacactggctttgatgaatgcattgttccttctgatatgaacctcatcactgatgatgacttcagagaatttgtagatggggtccctagagaatgtaagctcacaatagtatcagattcttgccatagtggtggcctaattgatggagctaaggagcagataggaactagcacaaagggagaagggcaac

SEQ ID NO: 165173 - DNA, 271 bp, Glycine max
ataagctctctcttgttccttcatcatcacaagaaacaacaagggatttccatggaagtctcaaaagaagaagctcgagtggcacccgcaccggccctagtggcgatgctgccatcccctggcatgggccacctaatcccaatgatcgagttcgcaaagcgagtggtgtgctaccataacctggcggtgagcttcgtgatccccactgacggcccaccttcaaaagcccaaaaggcagttctggaggcccttccggactcaatttcccaca

SEQ ID NO: 165174 - DNA, 267 bp, Glycine max
gcaagcaaaaagaaagaatcccaggcgaggagaaagatggaggggaaggagcaggatgtgtcgttgggagcgaacaagttccccgagagacagccaattgggacggcggcgcagagccaagacgacggcaaggactaccaggagccggcgccggcgccgctggttgacccgacggagtttacgtcatggtcgttttacagagcagggatagcagagtttgtggccacttttctgtttctctacatcactgtcttaaccgttatggga

SEQ ID NO: 165175 - DNA, 271 bp, Glycine max
gtggaaccctacaacagcgtcctttcaacgcattctctcctcgaacacaccgatgttgctgtgcttctcgacaacgaggcaatctacgacatttgcaggagatctcttgacatcgaacgccctacctacaccaacctgaaccgtctcgtttcccaggtgatatcatccctcactgcctctttgaggtttgatggagcactgaatgttgatgtgactgagtttcaaaccaacttggttccttacccaaggatccatttcatgctttcctcgt

SEQ ID NO: 165176 - DNA, 268 bp, Glycine max
aaagaaagaaagagaagagaagaatcgaagacgaagatggaggacgcatcagcatcaaagttcattccacaccaaatcggaggggtccaaaacgacgcgcttcgattcggtctccatggagtcaagagcgacatcgttggttctcaccctcttcaatcttcactccaatctacaaggagaatggatgaagcgatgaagaggcaatgcaaagttaacctgtacggaactgcttttcccatgaaggaggagcttgacaggcaaatcctgt

SEQ ID NO: 165177 - DNA, 276 bp, Glycine max
aagaaacccaaaatctctctctctctctcgttcgctttccgtatccatatatatcccaaaccctaccgttaggttccccaattcttcaacaccccgtggaccggtgctctgcttcttagtagttcgtacggtttttccgtcgattgcctccgaaacgatgtcgtatcgcccaagcgggaactccaggaccgaggtccgccggaaccggtacaaggtggcggtggacgcggaggaaggtcggagacggcgagaggacacgatggtggagatccgcaa

SEQ ID NO: 165178 - DNA, 278 bp, Glycine max
acaagagaggccggttggcgatggaagaagaggacgatgaccaacccaaaaagaagattcgtataggtttgccagcatcccagtggataagtgtttacaatgctcggagaccaatgaaacaaagatatcactacaacgtatcagatacaaggctatcccagcacatcgagaaaggaaatgaggatggcttatatattagcggtgttgcttcatgtcagaacctatgggcgttaatcatggatgcagggacaggtttcactgcccaagtttacgagctc

SEQ ID NO: 165179 - DNA, 274 bp, Glycine max
tctcgagccgattcggctcgagcaataacaatattattctcctcaatcctacatttttaaacctagctccatctccctccactcaccataacatggcatcagaagcaaatgctgccaacaccaacttctgtgtaaatgttagcaacaatggctacattagtgctaatgaccccttgaactggggtgcggcggcggaggctatggctgggagccacctcgacgaggtcaagcgcatgctagaggagtaccggaggcccgtcgtcaagctcggtgg

SEQ ID NO: 165180 - DNA, 272 bp, Glycine max
atcgcgagcggccgcccgcgatctagctcgagccgaatcggctcgaggtctggtaattggaatgagtacaatctaaatccctactacgaggatccattggagggcaagtctggtgccagcagccgcggtaattccagctccaatagcgtatatttaagttgttgcagttaaaaagctcgtagttggaccttgggttgggtcgatcggtccgcctccggtgtgcaccggtcggctcgtcccttctgccggcgatgcgctcctgtccttaactg

SEQ ID NO: 165181 - DNA, 265 bp, Glycine max
ggttgttggatgagattgagggggaaggcttggagtgtgatcagtatacacatactattattgttgatggattgtgtaaggctggtaattttgatggggctcagaggcatttgaattatatgaattcgttgggttttggatccaatttggttgcgtttaattgttttctcgatggtttggggaaggccgggcatattgatcatgctttgagattgtttgaggtgatggaggtgaaggattcttttacttatactatagtggtgca

SEQ ID NO: 165182 - DNA, 271 bp, Glycine max
aaaagaaagaacaaaacaatagagtatagaaagaagaaaagaaaatgatgtccccatgcaatgtgatcctatccatttatttcttggtgtgtacaagaacaccactactgtccctagcccagaacacccctcaagactttcttgatgtgcacaatcaggctcgtgccgaggttggcgtgggtccactctcatggaaccacacccttcaagcctacgctcaaagttatgccaataagagaatcccagactgcaacctcgaacactccatggg

SEQ ID NO: 165183 - DNA, 265 bp, Glycine max
tctgtatctaaacattttttccacacaatttattatatctttcctcaataatcagaataaaaaatcttaatttgtgcgcctaattatcctgtcaaaccataataatgatggtattttaagttctactttgcttcaggcattcatagagaatggcataccagagaatcctcaaatggctgttgcactaatgcggaaggcaacaataaatgttggtgggcacgtgctaagtgcaacaaccatagagcatttcattttaagacttcct

SEQ ID NO: 165184 - DNA, 266 bp, Glycine max
agaacaaccaacaacaagttcacattgtaggaacctttgtcttgtcgtgtcgggtagtggctcatattgatattggtatggtctttctttgaaccccatttgcaaaaaggaagaagaagaacatgaagattcagtgtgatgtgtgtgagaaagcccctgcaaccgtgatttgttgcgcagatgaggcagctttgtgtgccaaatgtgacgttgaagttcatgctgcaaacaagcttgcaagcaagcaccagaggcttctccttcaa

SEQ ID NO: 165185 - DNA, 251 bp, Glycine max
tagttgctggcatctcctatgccatcaacagtggctaccaatcttggggacccctctttggtaagcttttctttgcattttgggtgatcatccatctataccctttcctcaaaggtctcatggggcgccaaaacagaacaccaaccattgtggtggtgtggtccgttctgcttgcatccattttctcactcttgtgggttagaattgatccattcaccacaagggtcactggtcctgatgttgaggaatgt

SEQ ID NO: 165186 - DNA, 266 bp, Glycine max
gaagaaggcaaagatagtggcagagctccaagctgtgaagcacaacagtggcaagtcctacaatcagttagcggaggagactggactcaccaacgtctatgttgctcagcttctcaggagacaggctcagctcaatccccaaactgcccctctacttcgggcagcgctgcccgacctgccccaagaccttgtttctgagatgatgagaccccctttgaggtcttatgaccctaatctcatccaagaccccactgtctataggttga

SEQ ID NO: 165187 - DNA, 271 bp, Glycine max
tctcgagccgaatcggctcgtggcccttccttagctgcaggctgcaacatggtcctcaaacctgctgaacaaacacccctctctgccttgttttatgctcatctagctaagttggctggaatcccagatggtgtgcttaatatagtacctggatttggcccaaccgctggtgcagcaataagctcacacatggacatagatgtggtcagttttactggttcaattgaagtagggcgtgaagtgatgcaggctgcagctaggagcaatttaa

SEQ ID NO: 165188 - DNA, 267 bp, Glycine max
ttggaattggctggaaacgctgcgagagacaacaagaagactcgaattgtgccgcgccacattcaattggcggtgaggaacgacgaggagttgagcaagctactcggtgacgtcaccatcgctaacggtggcgtcatgcctaacattcacaatcttctccttcccaagaaggctggtggatcatccaaggctgctgctgcagacgatgactcttaaataggggttttttttccgtgaaaagttatcgaatttattctctttggattc

SEQ ID NO: 165189 - DNA, 264 bp, Glycine max
agctcacagagcaagaacactgttccaatacggaatctaaggcaaagcaaaccaaacatcttgaatcatgggttcaacaggtgagactcagattaacccaacccacgtatctgatgaagaagcaaaccttttcgccatgcaactagccagtgcttctgtccttccaatgatcctcaaatcagcacttgagcttgatctgttggagatcatagccaaggctggccctggtgttcatctttcccccactgacatttcttctcagct

SEQ ID NO: 165190 - DNA, 264 bp, Glycine max
accaccgcaagggccctgcccgcttccggagcctggatttcggagagcgcaacggctacctgaagggtgtcgtcactgacgtcatccacgatcctggccgtggcgcgcctctcgctaaggtcgccttccgccacccgttccgctacaagaagcagaacgagctcttcatcgccgccgagggtctctacaccggccagttcatctactgcggcaagaaagccaccctcgttgtcggcaatgtgttgcctcttcgatccattcctg

SEQ ID NO: 165191 - DNA, 251 bp, Glycine max
ctaacaccaaacaactactcgttgattgaaagaaacagtgtgtgttgtgttgtgatgtgtcggtggcatttatgttggttcgagtgagcgaaggaagatgtactctagagattcatggggtggtccgttggagataaacgcgacggcctcggcaacggatgacgaacggactggaacctgcaggacgtggacagggcggcgctgtcgcgtcccttggacgagacgcagcagagctagctactaggcaccgg

SEQ ID NO: 165192 - DNA, 250 bp, Glycine max
ctttattctctccttcctcttccttcttcttgtttcatctgccactgcttgtgatcgctgcttgtatcaatccaaggcttcctatttctccaaagcttctgctctttcatctggggcatgtgggtatggctctttggcactagacataagtggtggacaccttgcagctggtgtggattctctcttcaaaaatggagcaggttgtggtgcctgctttcagataagatgcaagaacccacctctatgtagc

SEQ ID NO: 165193 - DNA, 270 bp, Glycine max
gtttggagcgatccgagaaaaactctgtaaacatgttggtttaccaggacctccttacaggtgatgagcttctctctgactccttccgttacaaggaaattgagaatggaatgctgtgggaagttgaggggaagtgggttgttaaaggagcagttgatgtagacattggtgcaaacccttctgctgagggtggaggagaagatgagggagttgatgatgcagctgttaaggttgttgacattgttgacacattcagacttcaggagcaac

SEQ ID NO: 165194 - DNA, 297 bp, Glycine max
agctcggaatgaggatcgaggggggtgacatgtgccgtttgtgttgttttcgggacgaagaagaagatggtgtcaggttctggaatctgcgcaaagcgggtggtggtggacgcgcgccaccacatgctgggtcgtctagcctccatcgtggcgaaggagcttctgaacggccagaaagtggtggtcgttcgctgtgaagagatttgcatctcgggcgggctggtgaggcagaagatgaaatacttgaggttccttcgcaaacgcatgaacaccaaaccctcccatggccccatccac

SEQ ID NO: 165195 - DNA, 282 bp, Glycine max
caacattttacactcttttcttcttctcgttgttgcttcggtgttgaatcatggatcagaaagtcgatttcagtgctccgcattccatgggaaccactatcatcggcgttacttacaacggcggtgtcgttctcggagccgactctcgaaccagcactggagtgtatgttgccaaccgagcatcggacaaaatcacacagctcactgataatgtttacgtgtgtcgctcaggatcggctgctgattctcagattgtctctgactatgtgcgctacttccttc

SEQ ID NO: 165196 - DNA, 285 bp, Glycine max
gcagcagagagtgcggtaggatcatccgagaacggaagcagcaatggggatagatctcaaggccggaggtaaaagcaaaaaaaccaaaagaacagcacacaagtccaatgatatctatcttaagcaattggtcaagctttatcgcttccttgttcggagaactggcagcaaattcaatgccgttatactcaagagattgttcatgagcaaggttaacaagcacccattgtctttgtcaaggttgattaagtataccaaggggaaggaagataagattgctgtggt

SEQ ID NO: 165197 - DNA, 293 bp, Glycine max
cgaataagatcgagatcgagcgtcttaagacatttgttaatattcttcatacaattcctttgattgttgtagagtcaaggagggaagtggatgatgtgaaggaactaattatcatagtcaaagagtatgttttgggatcgagatggagatgaagaggagggaagttaaggactatatagtacgacagcaggagcttgcagcatatttcactcactgcaaccttcagacacctcacttgaggctagctttgcagaatgcaatgactgtctgcttcagggcgaagaacattgcca

SEQ ID NO: 165198 - DNA, 285 bp, Glycine max
aactctgcattgcaacactcacacaccaatggcactcagacccatcgacaacgctcttccgacaacaaccccagagagacccaaaaaacaacctaaaatcgctgttgcaacccaaaaacaacaagatcgtgcttccgtcaacggcgaaaacgtagttccattgccatcatctgaggatgccactgttgactatgtctcctccgacaaccttaaacccatggcggaccccgaagttaagattcagagtttggtggaagatttggattcgaaaaattggatcaaggt

SEQ ID NO: 165199 - DNA, 279 bp, Glycine max
gcaagaatggcacttcgttgcttggtgatgtccctttctgttctcttcactcttggtattgcgagagaaagccatgccagagacgaagatttttggcatgctgtttggcaaaacactcccattccaagttcattgcgagatcttctagagcctggccctgtaagtgttgagatcgatgatcaccctatgcaaattgaagaaacacagtacccgaaaaccttcttctataaagaagaccttcatccaggcaaaacaatgaaagtacaattcagcaagcct

SEQ ID NO: 165200 - DNA, 284 bp, Glycine max
cgagattgcaaaatgaagttcaacattgcatatcccaccactgggtgccagaagaagctggaaatcggtgatgacctgaagcttcgggcattttgggacaagaggatctcccaggaggtccttggtgacgccctgggtgacgagtttaaaggatatgttttcaaaatcactggtgggtgtgacaaacaaggattcccagtgaagcagggagtgttgacgcctggtcgtgttcgactcttgctccatagagggactccttgtttccgtggatatggaaggcgcaa

SEQ ID NO: 165201 - DNA, 275 bp, Glycine max
agcaagtgttggaattgtggaggccttgaaagaccaaggcatatgcaggtggaatcatgccttaagatcagctcaacaccatctcaaaaaccatgttggctcattctctcaggctaacaagctttcttcttctgctatgatatccacaacactaaaacatgagaaggcaaatcaatcagaagagtctttgagaactgtcatgtacttaagctgctggggtcccaactagataccataagcccaacaacaaaatattcttttctcttttcaattct

SEQ ID NO: 165202 - DNA, 284 bp, Glycine max
  unsure (1)..(284): unsure at all n locations
aaataacactctctctctntcanttatttctgcngtaaataganaagggttatctcaaataatcgattctaaggctagctgaaagcaacnanaacancatggggagggcaccttgctgtgacaaatcaaacgtgaagaaaggcccttggtcgccagatgaagatgccaaactcaaatcctacatcgaacagcacggaaccggagggacctggantgnnttcgccacaaaagattggcctcaaacgatgtggcanganttgccgtcncaggtggatcaantaacc

SEQ ID NO: 165203 - DNA, 274 bp, Glycine max
gaggtgttcctcaatctgctactccagaaactcttcttaaggaggctattcatgttatcagctgtggttacgaggataaaactgattggggaagtgagataggatggatttatggttctgtcacagaagatattcttaccggatttaagatgcatgcacggggttggcggtctatatactgcatgcctaagcgcccagcgtttaaaggttctgctcccatcaatctttcggatcgtctaaaccaagtgcttcgatgggcattaggttccgtgga

SEQ ID NO: 165204 - DNA, 284 bp, Glycine max
gcctcctttcttatcttactctcttctttccctcgcgttcttcttcactctcaagtaccttttccaaagaagcagaaaagtacgaaacctgccacctggtccgactcctcttcctataatcggcaaccttaacctcgttgaacaacctatacaccgtttcttcctccgcatgtcccaaaaatatggaaacatcatatccctttggtttgggtcacgtcttgttgtggttgtttcatcacccacagcgtaccaagaatgtttcactaaacatgatgttaccttgg

SEQ ID NO: 165205 - DNA, 284 bp, Glycine max
ttcagaggaaaatggcgggtacggtttcgacttgtttcttcttcgtgtttcatctttctctccttcttccttttcagatctccgctgaggaatcctcggagaaggagttcgtactcacattggatcactctaactttcacgacactgtcagcaagcacgatttcatcgtcgtcgagttctacgccccatggtgtggtcactgtaagaagcttgctccggagtatgagaaagctgcttctatcttgagtagtcatgatcctcctattgttttggctaaagtagat

SEQ ID NO: 165206 - DNA, 284 bp, Glycine max
gcttaatcgaactattcagattctaaaaaatgagttggtggtgggctggagcaatcggtgctgccaagaagaaattcgaggaagaggaaccgccgcgaagcttccagagcgtgggcctggtgatcggcgtgacgggcatcgtgggcaacagcctcgccgagatcctccctctcgccgacacccccgccggtccatggaaggtctacggcgtcgcacgccgcccccgtccgccgtggaacgccgaccatcctgtcgagtacatccagtgcgacgtctccgatccc

SEQ ID NO: 165207 - DNA, 286 bp, Glycine max
attgaatctcagaattctctaaaagagatctttttctgctctttgaagaaagaagggtctttgcttgattttggagatgtctctgctctcagatctcatcaaccttaacctctccgataccaccgagaaggtgatcgcagagtacatatggatcggtggatcaggaatggacctgaggagcaaagcaaggactctcccaggaccagttagcgacccatcagagcttcccaagtggaactatgatggttccagcacaggtcaagctcctggtgaagacagtgaagtg

SEQ ID NO: 165208 - DNA, 262 bp, Glycine max
gaaaaagctagcagcgaagttaatgtgccttatgttggcttcccttggtattcccaaggaagacattcaaatgggagggccgaaaggagaattcaacggggcttgtgcggctttgcattggaattcttacccgagttgcccggatccggatcgggccatgggtctggccgcgcacacggactccactctcctcacaatcctgcaccaaaacaatgtcaatgggcttcaggttctcaaggaaggggaagggtgggtggcggtg

SEQ ID NO: 165209 - DNA, 275 bp, Glycine max
agccaagggcacctgagttttatctctcttggaaacttgattacttgaaagataagatgcacccaacatttgttaaggatcgcagggccatgaagagagagcatgaagaattcaaggtgaaaattaatgaattggctgcaaaggctaaaaaaaacaagaagaggagtgggtgatgcaagatggtaatccatggcctggaaagaacatggatgatcatccaggaatgattcaggtatgtctaggaagtgctggtgcactggacatagaaggcaagg

SEQ ID NO: 165210 - DNA, 280 bp, Glycine max
actcgagccgctcgagccgattcggctcgagattattttcattgtatgaaatgcaattgttgcctggggaactaatcagcatctcacaagtgcctggagaaaggtttagaaatgaactgcccaatttgctgcgacgacttgttcacatcaagtgcaacagtgagagctttaccttgtgggcattacatgcattcatcttgctttcaggcatacacttgtagccactacacatgtccaatctgcagcaaatcactgggagatatggcggtgtgcttgagag

SEQ ID NO: 165211 - DNA, 281 bp, Glycine max
caagtttcgactttatttgagtagttttgctctttccttccaaaatgagccggccaatggaggaagatactgcaggtaagaatgaggaagaggagttcaacaccggaccactatctgtactcatgatgagtgttaaaaataatactcaggtactgataaattgtcggaacaacaaaaagcttctgggtcgtgtaagggcttttgacaggcactgcaacatggttcttgaaaatgtcagggagatgtggactgaggtgccaaagactggtaaaggaaagaaa

SEQ ID NO: 165212 - DNA, 282 bp, Glycine max
agcacacaaaacttgctatagcagtaagctataactcatttgaggctctgtgagaattgagaaatggctaaagatgttgaggttcaagagcaaggaggagagtactctgccaaagactaccatgaccctcctccagcacctttgttcgacccagaggagctcacacagtggtccttctatagagccctcatcgctgagttcatagcaacccttctcttcctttatgtcactgtgctcaccattattggctacaaaaggcagactgatacaacggtaggtggc

SEQ ID NO: 165213 - DNA, 283 bp, Glycine max
gaaacatctatcttcctgtccaagttctttgaataaaagtctgaatgtgtcatctctgcactacaatatttgtgattctgaccaagttggttctatttgtttgatggccatcttgcacgtcctgatcttattgtgttcaagtgacagacaaatcagaacagggaagagagatttgaaatgtaaatgccaagtgaaagtgaaaagtacagtccagttttagtgatctctttaatttatttgttcatagattaatatgatggtgtatgattgcttttctatttat

SEQ ID NO: 165214 - DNA, 275 bp, Glycine max
tgttgatgtgcactctatatatgcagcttccttacccacatcacatccaagttttgctccacagatgcatcttgaattgcttcctcaatggaaagctccacctcttgtacacgtgaatgtggagcttttcattggaatactttctgctggcaaccattttgctgagcggatggcagtaaggaaatcatggatgcaacataaactaatcaaatcttcaaatgtcgtatctcggttctttgttgccttgcatggaaggaaagatttaaatatggaga

SEQ ID NO: 165215 - DNA, 278 bp, Glycine max
gttgggatctccatacgccggatctgctaaaatacgcttgatccatatgggcctcctcgaccacttgtgggacgacaccgtcgccggcccaaggccgaaaacggtctcggcaagctccgaaaacaccacaccttcactttccgacctagctccggcaaggaaacggagggcgggagcgtgagatcgtacggagacgaatcgtcggaggaagcgacgagagtgacgcgtagtatcatgatcgtgaaaccgcccgggtaccagagtggatcgcctccggt

SEQ ID NO: 165216 - DNA, 163 bp, Glycine max
gagaaactgaagaagtatgctactgtggttagtgttttggctcacactcagatcaggagaatgaaagggttgaagcagaagaaagcccatatcatggaaattcaggttaatggtggtagtattgcacaaaaggtggactttgcatacagtttctttgagaaac

SEQ ID NO: 165217 - DNA, 264 bp, Glycine max
cagattcatccagttcttattgttattggattactagttcatgggggtgaagctattataagttacaaagcttttcccctaaagaaggaagtgaagaaattgatacaccttgttttccatgccatcgcattaatacttggaatagttggaatttatactgccttcaagtttcacaatgaaagtgggattgccaatctctacagcttgcattcatggcttggaattggggttattgtcctttatggcattcagtggatatatggg

SEQ ID NO: 165218 - DNA, 257 bp, Glycine max
ggaaaaactcatccgccgatgagttcatgaagatccacgctgcgtactctactctctcggatcccgacaagcgcgccaactacgatcagaggctcttccggcgacaacggacgttgtcgacggcggcggtgttctccggttatacgcgtcggaactgggaaacggatcagtgttggtagtgagtcactgagtcgactcgctcgagtgaatgggaaaagacgcggttgttgaagcgcctttccttgcatatagtaaaa

SEQ ID NO: 165219 - DNA, 272 bp, Glycine max
cgcgtgacggtcgggggacggattgggaacgggcccttaggggcctcttccacgggcgtcgaacagtcaactcagaactggtacggacaaggggaatccgactgtttaattaaaacaaagcattgcgatggtccctgcggatgttgacgcaatgtgatttctgcccagtgctctgaatgtcaaagtgaagaaattcaaccaagcgcgggtaaacggcgggagtaactatgactctcataaggtagccaaatgcctcgtcatctaattagtga

SEQ ID NO: 165220 - DNA, 269 bp, Glycine max
cacaatgatctcaatcacttctactgaattgaactacttagtcttccgttacctccacgaatcaggttttactcattctgcatttgcattcgggtatgaagctgggattgataaaagcaaaaatgatgatagtgtggttccaccgggtgctcttgttactttcatacagaaaggaattcaatatcttgagctggaagcaaacttgagtggtagtgatgctgacatggatgaggatttttcatttctacaacctctggatcttatcacaa

SEQ ID NO: 165221 - DNA, 268 bp, Glycine max
ctggggaatttctcctcgtggtgctgggtatacttttggccaggatatatctgaacaattcaatcacacaaacagccttaagttgattgctagagctcatcagattgttatggatggatttaactgggctcatgaacaaaaggtggttaccatttttagtgcacctaactactgttaccgatgtgggaacatggcttccatattggaggttgatgattgcaagggccacacatttatccagtttgaacctgctcctaggagaggagaa

SEQ ID NO: 165222 - DNA, 263 bp, Glycine max
catctcttgcttcttgcttctattacttgcttctttactcacatgtcacttgctgggaaaatcaccactgaaattggggttcatgcaaccgctgcaaagtggttcaacctctttgcaacacaacttcatcatgttcagaaccttactgatagagtacatggaaccaagctgcatcaaggtgaagactggcatcacaacgagacagtcaaacactggacttataccatagatggtaaggctacaacatgtctggagagtattga

SEQ ID NO: 165223 - DNA, 267 bp, Glycine max
gaggaacaagaagcccctgggtcacgatcatttttcacagagattattgactcaatctcagacataaaatttgggaaggatggaagatatatacttagtcgtgattacatgaccttaaaggtttgagagctttactattccaaaatacatgcttctgtcaatgaagcatttctgagtattttggatggagttactctaaatttattgaattgaactccatgagacatgggtgtttggttttggtctcaatgataagattcatactta

SEQ ID NO: 165224 - DNA, 251 bp, Glycine max
atcaactctctagttgttgttgctgcatttttcattttctaggcttagtcaatagataaaaagagaaagacgaaaaggatattatggcaggaggaggagctccagctaaagcagatgagccacagccacatccaccaaaggatcagttaccaaatatttcatactgtattactagtcctcctccatggcctgaggccatacttcatggttttcaacattttcttgtgatgcttggcacaactgtgttgatt

SEQ ID NO: 165225 - DNA, 269 bp, Glycine max
atgggtgggtgcaatcctatggttcacgttgtgtgaagccaccaatcatctatggtgatgtgagccgcccaaagccaatgactgtcttctggtcatctctggctcagagctttaccaagcgcccaatgaagggaatgcataccggtcctgttaccattctcaactggtcctttgttagaaatgaccaacctagatctgagaccacctaccagattgctttggctatcaaggacgaagtggaggaccttgaaaaggctggcatcactgtt

SEQ ID NO: 165226 - DNA, 268 bp, Glycine max
tctctgcttaccaacaatttaatgaatatggagttgatgggggacctgctacaaaagcactcagacctaagtttgatgcctttacacatcgggtgcattctcaagtgggctttcaaattccagagattaatctgaaatttttaattgctggggctattgctctgaagggtcttggaggggttcttttcatatttggcagctcttttggagctttgcttctgctcctgcaccagctgattgctactccaatccattatgatttttacaa

SEQ ID NO: 165227 - DNA, 274 bp, Glycine max
gcgctggtgaccagggtcacatgtttggctatgccactgatgaaaccccagaattcatgccattgagtcatgttcttgcaaccaagctcggtgctcgtctcaccgaggttcgcaagaacggaacctgcccatggctgaggcctgatgggaagacccaagtgactgtggagtattacaatgataatggtgccagggttccagttcgtgttcacaccgtgctaatctccacccagcatgatgagactgtcaccaacgacgaaattgcggctgacct

SEQ ID NO: 165228 - DNA, 274 bp, Glycine max
agaagatggagatgtatcagatctggagcaggagaatagcgttgggagcgttcgcgtttgttctgcttttcctatcggcctcagcagacgacgtcgttgtgctctctgaagataacttcgagaaggaagttggtcaggacagaggagctctcgttgagttctatgctccttggtgtggacactgcaaaaagcttgctccagaatatgaaaagcttggtagcagcttcaagaaagccaaatctgttttaatcggcaaggttgactgtgatgagca

SEQ ID NO: 165229 - DNA, 292 bp, Glycine max
agcccccatacaatggcttcttcaatgatggggcttcttgggagtccacatatggggacttcttcctctcttggtattccaatcagctcatagctcatggagattgcctcctttcattggcatcttcaacttttggtgactctggggtgacaatctatggaaaactcccacttatgcactcttggtatgggactcgatcccatccttcagagctaactgcagggttctataacacagctaacaaggatggctatgaaccagttgcacagatgtttgctcggaactcgtgcaa

SEQ ID NO: 165230 - DNA, 289 bp, Glycine max
aacattttctacccatttcttggcatcatctgctagagataaatgccatctatcttttgtttgtctgcacttgctttttgaataagagctgcattgggttctgtgggaaaatggagaggtacaagttaattaaggaagttggtgatggaacatttgggagtgtttggagagccattaataagcaaagtggtgaagttgttgcaatcaagaaaatgaaaaagaaatattactcttgggaggagtgtgtaaacctgagagaagtcaagtcattacggaaaatgaatcatgc

SEQ ID NO: 165231 - DNA, 291 bp, Glycine max
ttaagacactgcgaagatctgaagtgaaggttcttctaagaatgcttccagactatcatcaccatgtgaagacatatgataatacacttatcacaaaattttttggtctgcacaggattataccttcgagtggtcaaaagtttcgctttgtcgtgatgggaaatatgttctgcacagaattaaggatccataggagatatgatttgaaaggttcatctcttggacgttcttcggacaagatagaaattgatgaaaacaccactcttaaagatttggatctgaactactgct

SEQ ID NO: 165232 - DNA, 292 bp, Glycine max
aaaacttgcatatgttgccctagtttatgagcaagaacttgagactgcaaaaagcagttcatcagttgagaaaagctatgagcttcctgatggacaggttatcacaattggggcagagagattccgttgcccagaagttcttttccagccatctatgattggaatggaagctgctggaattcatgagaccacctacaattctatcatgaagtgtgatgtggatatcagacaggatctatatggcaacattgttcttagtggtggctcaactatgtttcctggtattgcagac

SEQ ID NO: 165233 - DNA, 296 bp, Glycine max
gttcaagtgattactaggaaagtttgtgagccactagaggaagattccttcagaccaattcttcaccactacgacggccctaagttccgtcttgagctgagtgtgcctgaggcactgtctcttctggatatttttgcaaaccagaacagtttcgatgacattttcaaagtcattccagcatagaagggtagaaattatacaagaagagaagttacgagcacaatggataatgaatgaatactgtggactcataatattagagtgtcagacgataattaagacaatgaaaatatggt

SEQ ID NO: 165234 - DNA, 262 bp, Glycine max
  unsure (1)..(262): unsure at all n locations
ctagctagggtttcgcaagtgcgatcgaagaagaacaacgacgatggcgatggctgcagctctgcgtcgcgaaggaaggcgtttgacccaaccactcaacgccctccactcttctctcaattcctccctcatctctcaacaccaagcccctcatggcgcgcgctccatttccacacaacatacgaacttgccnangaagagtgngaggaanatccagaagataaggaaggccatgaagatggatgacgngtccaagctgcgg

SEQ ID NO: 165235 - DNA, 291 bp, Glycine max
ttgaactcttatccaataatttgtttttatcattacaaactgtctcagagtttgtttgtatttgttaatgtattgtagtgacgtgcatacaattcaatcccgtggataataattatttcattagtggatctatagatggaaaagtacgcatctaggcaattcctgattgccatgttattgattggattgatatcaaagatatagtaactgcggtatgctatcggcctgatggacagggagggatcattggctccttggctggcaattgccggttttataatgtatcagaga

SEQ ID NO: 165236 - DNA, 290 bp, Glycine max
tgggattacagttccaggaggttttagtgacagaggagtggaaggcaaaattcttgctgccaagtatgctcgagaaaataacattccatatctgggcatttgcttggggatgcaaattgctgtcattgagttttcaagatctgttctgggtcttcatgatgctaatagcacagaatttgatcccaaaaccgaaaacccttgtgtcatatttatgccagaaggttcaaagactcatatggggggaactatgcgtcttggttcaaggagaacttactttcatgttgctgact

SEQ ID NO: 165237 - DNA, 296 bp, Glycine max
gtggtttcagtgagtgatcggtgttcacttgatccttcataagtcgtcatcatcatcatcatcatcaccgttgattgaagaagatgccgatcagaaacatcgccatcggaaggcctgaagaggctactcaccccgacacgttgaaggcggggttggctgagttcatctccaccttgatcttcgtgttcgccggttcaggttccggcatcgcctacaacaagctcaccgacaacggcgccagcactcccgccggcctcatctccgcttccatcgcccatgctttcgccctcttcgtc

SEQ ID NO: 165238 - DNA, 295 bp, Glycine max
attagttcattcactttgcgcagttccctacctctcctttcaagacgcagatcctcgtcatgaccctcaccggaaagaccatcacccttgaggtggaaagctctgacaccatcgacaacgtcaaggccaagatccaggacaaggaatcgaattcccccggatcagcaacgtctcatcttcgccggaaagcagctcgaggacggccgtaccctcgccgactacaacatccagaaggagtcaacccttcaccttgtccttcgtctccgtggtggcatgcagatcttcgtcaagactc

SEQ ID NO: 165239 - DNA, 294 bp, Glycine max
cacgcacctacataactaaataatcttatgcataacaatttcacaagtgttattttgcgttaattttcttcagttatgagggtgaacacagagtttgagcgtgttcttaagtattttgatgaggatggggatggtaagatttccccatctgagctcaggaaccggctaggcatgatgggtggtgtgttattgttcaaagacgctgaaaagttgattgaggaattggattctgacggtgatgggtttttgagtttggaagattttgtgaagataatggaggcagcaggggaagaa

SEQ ID NO: 165240 - DNA, 291 bp, Glycine max
gtgaagatggttgctatgaggtttcatcagtaccaggtggtgggaagggctcttcctaccgaatccgatgagcatcctaagatctaccgcatgaaactctgggcaactaacgaggtccgtgccaaatccaagttctggtattttttgagaaaattgaagaaggttaagaaaagcaatgggcaagtgctagccataaatgagatttttgagaggaatcctaccaagattaagaattatggaatttggctgcggtatcagagtcgtactgggtatcacaatatgtacaaggaa

SEQ ID NO: 165241 - DNA, 294 bp, Glycine max
ctcgagccgttcgaaacgaagaaagaaagcgttgtgaagaatggcggaagagggacaagtgatcggtgtccacagcgtagaggagtggaaggaacatctcaagaagggagaagagtccaagaaattgattgtggtggattttactgcttcttggtgcggtccatgccgtttcatccccccaattcttgcagagtttgctaaaaagttgccgaatgtcaccttcctcaaggtggatgtggatgaattggagactgtttccaaggagtggggaattgaggctatgccaacttcctg

SEQ ID NO: 165242 - DNA, 291 bp, Glycine max
ctaacgtgcaagttccaaggcggagaaaacaataatggccaccaacgaggagaggcatatgccgaacaagaagagtgaggaagaactgaagcatctcgggtttgtgaagattgcggcaatgaaagccttagtgtgtgtgttgaatctctacggcttcgcaaagcaaaactcgggacttttgagatctgctgttggaaccgtggaagacactgtaaccaccgttctgggtcccgtctaccacaaattcaacgctgttcccaaccacatcctcctttttgtcgacaacaaggt

SEQ ID NO: 165243 - DNA, 241 bp, Glycine max
ctcattttcgcgttctgcgccgtcgccgccgccgtcgcgggctcctccttcgatgatgccaaccctatccgtttagcgtcggacttggagtcgcaggtgctggacgtgatcggacagagccgccacgctctctccttcgcccgcttcgctcgccgccacggcaagcgctaccgttccgtcgacgagatccgcaaccgcttccggatcttctctgataatcttaaactcatcagatccacac

SEQ ID NO: 165244 - DNA, 287 bp, Glycine max
  unsure (1)..(287): unsure at all n locations
attgaacctgactcaggacgcagatcgcatgaaccttaatctctacattaacacagcatacgacccttgcagagtacatatggatcggtggatcaggaatgganctgaggnactaagcaaggactctcccaggaccagttagcgacccttcagagcttcccaagtggaactatgatggttcccgcacaggtcaagctcctggtgaagacagtgaagtgattttatacccacaagccattttcagcggaccattcagaaggggtaacaatatcttggttatctgtgat

SEQ ID NO: 165245 - DNA, 291 bp, Glycine max
cccgaattgacccaacaaatgtgggatgctaagaacatgatgtgtgcagctgatccacgccatgcccgatacttgacagcttctgcgatgttccgtggtaagatgagcacaaaggaggttgacgaacagatgatcaatgttcagaacaagaactcatcatactttgtggaatggatccccaacaatgtgaaatccactgtctgtgatatccctccaactggtttgaaaatggcatcaaccttcattggcaactctacctctattcaagaaatgttcaggagggtgagtgag

SEQ ID NO: 165246 - DNA, 284 bp, Glycine max
gtgccccaaaaaccctgcaaactttaatgtggagaacgttcgtgttgcaaagctcttgggagggggcttgcataacagtactgtagttcgaggattggttctgaaaagtgatgctgtcgggactataaagcaagcagaaaaggcgaaggttgctgtgtttgctagtggtgttgatacatctgcaactgagactaaaggaactgtcctcatacatacagctacgcagctagaaaattattcaaaaactgaagaggctaaagtagaggagctcatcaaggcagtag

SEQ ID NO: 165247 - DNA, 285 bp, Glycine max
agaagatggagatgtatcagatctggagcaggagaatagcgttgggagcgttcgcgtttgtcctgcttttcctatcggcctcagcaaacgacgtcgttgtgctctctgaagataacttcgagaaggaagttggtcaggacagaggagctctcgttgagttctatgctccttggtgtggacactgcaaaaagcttgctccagaatatgaaaagcttggtagcagcttcaagaaagccaaatctgttttaatcggcaaggttgactgtgatgagcacaagagtttgt

SEQ ID NO: 165248 - DNA, 288 bp, Glycine max
gagatatcaatatattatgataatggagggatacaataagaaggttatgattgtggggatggtgttgggcatggccatgattgggatggccaatggccaatactcgttttgtcgcatgcccagcgatgggttggcggcatgcaagccgagtgtgagtggggactatcctgctgatccctccactgcttgttgctcagccattgccaaggctgatcttaaatgcttctgacgcttcaaggattcgggccttctctctatgtatggtgttgatcccaacaagtgcatgga

SEQ ID NO: 165249 - DNA, 287 bp, Glycine max
ccgaggctgagagaagagaaaaattaagatggaggggaaggagcaggatgtgtcgctgggagcgaacaagttcccggagagacagccgattgggacggcggcgcagagccaagacgacggcaaggactaccaggagccggcgccggcgccactggttgacccgacggagtttacgtcatggtccttttacagagcagggatagcagagtttgtggccacttttctgtttctatacatcactcgcttcaccgtcatgggagtcgccggggctaagtctaagtgcagta

SEQ ID NO: 165250 - DNA, 213 bp, Glycine max
  unsure (1)..(213): unsure at all n locations
ggaagacaccaggatnagnaggnacagcgtggcctggtcgaccttgaagagttcggacggcgaagccttcgaggtagaggacgcggtggcgctggagtcagagacgataaagcacatgatcgaggaagactgcgtcgatagcggcatccctctgccgaacgtgacgagcaagatcctggcgaaggttatcgagtactgcaagaagcacgtcga

SEQ ID NO: 165251 - DNA, 281 bp, Glycine max
gtgaataagagatatcaatatattatgataatggagggatacaataagaaggttatgattgtggggatggtgttgggcatggccatgattgggatggccaatggccaatactcgttttgtcgcatgcccagcgatgggttggcggcatgcaagccgagtgtgagtggggactatcctgctgatccctccactgcttgttgctcagccattgccaaggctgatcttaaatgcttctgccgcttcaagacttcgggccttctctctatgcatggtgttgatcc

SEQ ID NO: 165252 - DNA, 289 bp, Glycine max
gtgaagatggttgctatgaggtttcatcagtaccaggtggtgggaagggctcttcctaccgaatccgatgagcatcctaagatctaccgcatgaaactctgggcaactaacgaggtccgtgccaaatccaagttctggtattttttgagaaaattgaagaaggttaagaaaagcaatgggcaagtgctagccataaatgagatttttgagaggaatcctaccaagattaagaattatggaatttggctgcggtatccccgtcgtactgggtatcacaatatgtacaagg

SEQ ID NO: 165253 - DNA, 284 bp, Glycine max
cctcgagccgaatcggctcgagttttcaaattattctgtggcaaggacagaagaaaagatcatagaaagtggtgattcttcgaatattgaagagagaaatatggggttgagattgaaggagacattctacttgtcccatggagcaccaactcttgccgtagatgattcaatccctgcgtggaacttcttcaattcgtggaaggagcagtttccgacgagaccctctgccattcttattatctccgcccactgggacacccatgttcccaccgtcaacgtcgttc

SEQ ID NO: 165254 - DNA, 286 bp, Glycine max
atgggtcgtggagttagcagtggtggtggtcaaagttccttgggttatctttttggcagtggagaggcccctgccgcaaaaccggcaacaaacaatgccccagcccaacctgaagtgcaggctgtaaataatgcgcctccttcaaaagcatctcctcctactaaaacaatagaccctaacaaggctgccggtataaacagtcattctactgatggccagaacaccggcaacttcatcacggaccgaccctcaaccaaggtccatgctgcccctggtggtggttctt

SEQ ID NO: 165255 - DNA, 284 bp, Glycine max
gttgatggacttgaaatatgggatgctattaagacatgggttcatgaatatgtctccttgtattacccaacagatgcagcagttcaacaagatactgaactacaagcatggtggaaggaagctgtggagcagggtcatggtgacttaaaagaaaagccttggtggcctaaaatgcaccgaactgaagatctcattcaatcatgctctattatcgtttggacagcttcggctctccatgctgctgttaattttggacaatatccttatgggggcttaatcctgaa

SEQ ID NO: 165256 - DNA, 282 bp, Glycine max
gatcgatcgaacctagtaaaacaaagaaatggcttctcatcatctccaatatcttgtgcttgccatagccacacttctcacaatctcttcacatgcacaactcactcctgatttttacaacaatgtttgccctcaggcactgcctatcattaagtcagttgttcaacgagcaatatttcgtgaacggcgcattggagcatctttacttcgtttgcacttccatgactgttttgtcactggctgtgatggatcaattctgctggatgacaccccaacttcact

SEQ ID NO: 165257 - DNA, 280 bp, Glycine max
gattgctagaatggactttcgatgctcagtcatctcttttaccattctcttctctcttgctcttgcaggagagagccatgtccatgcatcgctacctgaggaagattattgggaagctgtttggccaaacactcccattcccactgcactgcgagagcttctaaagcctctccctgcaggtgttgacatcgatgaactccctaagcaaattgatgatacacagtacccaaaaacattcttctataaagaagaccttcatccaggcaaaacaatgaaagta

SEQ ID NO: 165258 - DNA, 283 bp, Glycine max
gttctatctgtgacgagcatcatggcctcaagagcagtgttattgttggctatgtgtgtgcttccggcgatggttgtggccattcgcccagcaaagaaccctttttgcgtgaagggtcgtgtctactgtgacccttgccgtgctggttttgagacctcagctaccacctacattgctggtgctgagattatgttgcaatgcaagagcagggttagcaacgaggttgtgtacacgaagaaggggtacaccgactcaaccggagcatacacaatgtacgtggatg

SEQ ID NO: 165259 - DNA, 285 bp, Glycine max
ctgatagccacagtcttgcagaaagagctagacgcgaaaagatcagtgagaggatgaaaattcttcaggatatagtcccgggttgtaataaggttattgggaaagcattggtccttgatgagataattaattatatccaatcgcttcagcggcaagtagagtttttgtcaatgaagcttgaagcagtaaattcaagactggcccccagaattgaagtgtttcctcctaaagattttgatcagcaaacatttgatacaactggcatgccgtttgcttcccaagcta

SEQ ID NO: 165260 - DNA, 289 bp, Glycine max
cagaccagttatgaaagagcacatgaagtatatcatagaccatgctgaagagattgaaaagcacataaaagtgaaggctcaagtttcagaagttaaaagtattatgttagagaacattgataaggtatgttcatgttttagagtaagacatgggatatttttcagatcttcagtcatttccccaagggcaagccttcgcgcaatgggtaaagttctgcctttgtgatcagttggtcataggctgagggagagttttggagcaacaataaggttgtgcctttgtgaccgg

SEQ ID NO: 165261 - DNA, 273 bp, Glycine max
actcgagcgaatcggctcgagaaaggaagcaacaattgatcagccccttcaaatcctcacaacccttttgaaggatgaatttcccgacgtgcgcctaaacattatcagcaatcttgatcaagtgaatcaggttataggaattgatctgttatctcagtctttgttaccagccattgttgagcttgctgaggataggcattggagggtccggcttgcaattatagaatatatacccttattggcaagtcaattgggggttagttttttcgatga

SEQ ID NO: 165262 - DNA, 295 bp, Glycine max
  unsure (1)..(295): unsure at all n locations
ctctttctcgtcactagctctgtgcattcttctctcgctctctgccttccatcacactcggaatttgaaaatcccaagatagtagaagatggcagacactgaggatattcaacctcttgtttgtgacaatggaacaggaatggttaacgctggattcctcggagctgatgccccatgttttgtgnttcccagcattgtaggtggtgctcgtcacactggtgtgatggttggcatgggccaaaaagatgcatatgttggtgatgaggcacaatctaagaggggtattttgactctc

SEQ ID NO: 165263 - DNA, 299 bp, Glycine max
ctcgagcgaatcggctcgagttcagttgctgctgctagtgcacatcgcactgtcacgaccacgaaactctgaagactcaatggtggggaatagtgaagaagaccgagatggccttcaccaatcgccgttacgaatcccggaattgctctatgtttcggtgaagatggagaatcccaatctcactctctctggggaccttctccctcacatatctggctcttgcccttctggggatccttccaaagctctttctatggaacgggaatcagcgtcagtgtgggagttgagctttgttgttc

SEQ ID NO: 165264 - DNA, 301 bp, Glycine max
ggagagagagagggggggttcttctacacagatttgtttgatttcaattcaagaccaaagaagaatctctcacaaatggcgtcaagaattgttcaacaacaacaagccagaggtgaagcagtagtagggagaggaaaacaacagaagaagaacggtgttgctgatggaaggaaccgcaaagcattgggtgacattgggaatttggccaatgtaagaggcgttgttgatgccaaaccaaatcgccccatcacaaggagttttggtgcacaattacttgccaatgcacaagcagcagcagctg

SEQ ID NO: 165265 - DNA, 294 bp, Glycine max
attcattcaagattcagcaatagcgtttcggtagcagagaccgaaatacttcgagatggcccgtacaaagcaaactgctcgtaagtcaactggaggaaaagctcccaggaagcagcttgcaaccaaggctgcacgtaagtctgctcgaacaactggtggtgtgaagaagcctcatcgttatcgccctggaactgttgctcttcgtgagattaggaaataccagaagagcactgagctcctaatcaggaagcttcctttccagaggttggttcgtgaaattgcccaggatttcaa

SEQ ID NO: 165266 - DNA, 301 bp, Glycine max
cggctcgaggtggcttttctcctttgccggtgctccccgtcctggcaaccccaaatcaatcaggggtcagttaattgatcaatgcagacggtcaaatgtttgtaaactgttggaatgtgactttggcgatagcaaatgtcattctcccagcagcataatgcagatgtttcaaagctcgcttttctgcttgcaaccccagggtgattcatacacgcgaagatctgcttttgattcaatgctggctggttgtatacctgtcttcttccatccaggctcagcatatacacagtatacttggcat

SEQ ID NO: 165267 - DNA, 301 bp, Glycine max
cagatatattacgaactaatgattcggtattattcccataacaatgattatcttgaaatttgccgttgctacaaggcaatatatgagattccatctgtcaaagaagaccctgccaagtggattccaatcctaaggaaaatatgttggtacttggttctagcgccctatgatccaatgcagtcaagccttctcaattccaccttggaggataagaatatatctgagattccaaacttcaagttacttttgaaacagctggttaccatggaggttatccaatggaccactctatgggatacat

SEQ ID NO: 165268 - DNA, 296 bp, Glycine max
gtccaagcagcctccaattcgtgccactctcttcaaaatggccgttaccttctcaaatctccacacagaatcaaacacaaaaacactcgacgacttcctctctgggaaggtctacgtttctggggatcagttcacaaaggacgacatcaaagtgtatggtgctgttttggagaagccaggtgactcttttcccactgctgccaagtggtacgaggttgtctcatctcagcttgctgcaagcttccccggcaatgctcaacgggtgagattcagtggcaaagcttctgctccagcgg

SEQ ID NO: 165269 - DNA, 296 bp, Glycine max
ctcgagccgggaaaaggagaaaacatcttcaacttctccttccgtcgagctctgcaacggcttcaatggcctcgagaaggttctcctccgcgaatcgcgtggttcctccgccgaggtgtatctgtacggtggccacgtgacttcttggaagaacgaccatggcgaggaattgctttttctcagtaataaggctatatttaagcctccaaaggcaattcgtggagggattccactatgctttccactcaacatagattcataatacactggaccagcatggatttgctagaaatcga

SEQ ID NO: 165270 - DNA, 121 bp, Glycine max
gaatcacaatggcgagaggagtaaagaagcatctgaagaggcttaatgccccaaagcattggatgcttgacaaactgggtggtgcatttgctcctaagccctcatctggaccacacaacat

SEQ ID NO: 165271 - DNA, 293 bp, Glycine max
catgctctagtcacagacaccgacacagatctgtcttccgaagcaggaactaaatatggctgacttgttggaatggtcaaagcaagataagaaacgaatgcttcatgtcgtctaccgtgttggtgaccttgatcgcaccatcaaattttacacagaatgtttaggaatgaagcttttgaggcaaagagatatcccagaggagaaatatgctaatgcttttcttggatttggccctgaagaatcccattttgttgttgaattaacatataattatggggttacctcgtatgaca

SEQ ID NO: 165272 - DNA, 294 bp, Glycine max
  unsure (1)..(294): unsure at all n locations
cggctcgagaaaaaactctaatggttgcaacctagctgttgatatatggagccttggatgcacagttttggaaatggctacaactaaacctccttggagtcagtatgaaggggttgctgccatgtttaagattggtaatagcaaggaactcccaacaatcccagatcatctctccagtgaaggaaaggattttgttaggaaatgcctacaacgtaatccacacaatagacaaatccacaatganatattggaccacccttttgtaaaatgtgctgcacctttagaaagacctat

SEQ ID NO: 165273 - DNA, 299 bp, Glycine max
gaaattgccagatacttcatcttcttggtatgacaagagtttgaaccttgaggaatgtgagaacattgtgtttgaaaaactgctcttgtacagcatatgcaaatgtagatgtggatgggagagggtgtttgctttggtttgataacattgtggatttgacaagacacacagaccaaggacaagatatttacatacggcttgcagcttcagagttagatcatagagggaatgaccagagctttgataacaagaagcttgtagggatagtagtaggcattgttgcattcatcatggtactt

SEQ ID NO: 165274 - DNA, 283 bp, Glycine max
actagtccctcccttcttccttgtctctttctcttctcaacaacatgcagatcttcgtcaagactttgactggcaagaccatcaccctcgaggtcgagagtagcgacaccatcgacaacgtcaaggccaagatccaggacaaggaaggtatccctcctgaccagcagaggttgatttttgctggtaagcagctggaagatggtcgcactcttgctgattataacatacaaaaggaatcaacacttcacttggtcttgaggctcaggggaggaaccatgattaa

SEQ ID NO: 165275 - DNA, 285 bp, Glycine max
ctgaaacagaaacacccgtcagtgctgtttccatccggagatcaccacgagttccatcagatatgcctctttatgatatactgaatgagttccaaaagggcagtagccatatggctgctgttgttagggctagggggaaaggaaaaacaattcctgaaacaactgatgaagagacatatgaagaaaacaaaggggttggtggggattcacaattgactgctccattactacagaagcagaatgagaagtcggaaagttttattgttgacattgacaagttttcaa

SEQ ID NO: 165276 - DNA, 288 bp, Glycine max
ggttatatttgccattgagaacccccaggatatcattgttcaatctgcaaggccttatgggcaaagagcgcttctgaagtttgctcagtacactggtgctcatgctattgctggaaggcccactcctggtaccttcaccaatcagcttcaaacttccttcagcgagcctcgtctccttattcttaccgatccaagaacagatcaccagcctattacggaagctgctcttgggaatattcccaccattgctttctgtgacaccgattcacctatgaggtacgcggacat

SEQ ID NO: 165277 - DNA, 293 bp, Glycine max
ctcagtagtgcgattttcgattctcttctctgcaactatgcctaaccctaaggtcttcttcgacatgaccatcgccggtcaacctgccggccgcatcgtgatggagctctacgccgacgtgactccgagcaccgccgagaacttccgcgcgctctgcaccggcgagaagcgcgccgggcggagcggcaagcccctccactacaaaccctcgtccttccaccgcgtgatcccgaacttcatgtgccagggcggcgacttcaccgccggaaacggcaccggaggcgagtcgatct

SEQ ID NO: 165278 - DNA, 298 bp, Glycine max
  unsure (1)..(298): unsure at all n locations
gttgatccatctcttgtttcttgctttctttcttcaccatgtcacttgctgggaaaatcaccactgaaatcggggttcatgcaaccgctacaaagtggttcaacctcttcgcaacacaactccatcatgttcaaaacctaactgatagagtgcatggaaccaagctgcatcaaggtgaagactggcatcacaacgagacagtcaagcactggacttataccatagatggtaaggttacaacatgtctggagagtattgaatccattgatgaacagagncaaacaatcacctacaagct

SEQ ID NO: 165279 - DNA, 295 bp, Glycine max
atttgctacaccagcaacaagttccccactgtaagtccctcaaaaaaataataagaccccatccatcaaagatgcttcttttatccattaagctcccttgttttcattttttgaaatttggaggtatttcatctgaatggtacttttctgttcagactcacactgattacataccaacagtatttgacaatttcagtgccaatgtagctgtggatggaagcattgtcaatttggggctatgggacacagcaggccgagaagactatagcaggttgaggccactgagctatagagg

SEQ ID NO: 165280 - DNA, 297 bp, Glycine max
ataatttctattacatacaataagtagctaagatgagcaagttactactcattcgtgttgctgtgttcgtggcaacctttgtcaccatggtgatgatgatggtgcccaaaaacgtgagtgcccaaaacataggtgatgacatcgtcacacaagacttcttctacagcataatcagtcaggctgatgatggttgtgcagggaagaacttctactcacgagatgctttccttaatgctcacaattcctacaatgagtttggtcggcttggtaatcaggatgactccaagcgtgaggttg

SEQ ID NO: 165281 - DNA, 291 bp, Glycine max
tgtacgcaagggcattgtgcgtgtggctgatttgaagttttctctaccctaccgtgcaaagtcattttctctggttattgtgtcagatgcattggattacttatctccaagatacctgaataaaaccctgccagagttggtgagggtgtctgctgatggtgttgttatctttgcaggttatccaggtcaacagagaactagaggtgaagaagtggccaaatttggtcgtccagccaaattgcgcactcatcttggtggataaggtttttcgttcagtctagtttagatgaa

SEQ ID NO: 165282 - DNA, 278 bp, Glycine max
cgaagtttcacatcagccttatccagtttagggtttcggttccttaccctacctttgacgtatcgaaaccttaaatttgggattaggtctgagcaatctggttggtagaacctttggtcttagagagtcaagttttatgtctggattagacgatcaaattcctactgccttcgatccttttgctgatgcaaatgctgatgactcgggtgctgggtcaaaggagtatgtgcatattcgcgttcagcagcgaaatggtaggaaaagcctgacaaccgttc

SEQ ID NO: 165283 - DNA, 280 bp, Glycine max
ggtgcaaaatggctggcagagaacactgacatcaaacttgtaggagtcgattacttatctgttgctgcttatgatcactccattccatctcatcttgttttcctggaaagcaaggaaatcattcttgtggaaggcctaaagcttgatgatgtcccagcaggaatatattcactgaattgcttgcctcttaggttggttcactctgaggcatcaccaattcgatgcattctgatcaaatgatcaaatgatggggtcaaacctggttttcaattgcacggat

SEQ ID NO: 165284 - DNA, 290 bp, Glycine max
gacgtcgatgatgaaaatgaaattggtgaaaacattactgcttctcctttgtgtgaacctcttctgttatgcagtgattggtgctcctcaaacttgtcctgctaacaatgaggataaatgcggcgatccagatgaatggaaaggggagtgcttcgctgacattccctcaattaaatatgagggtccgtcaagtaagaatgtgctttcatttaaatggtataatgcagaggaggaaactcttgggaagaagatgaaggattggttaagattcagtgttgcattttggcata

SEQ ID NO: 165285 - DNA, 295 bp, Glycine max
  unsure (1)..(295): unsure at all n locations
gtggctgagacaaaggttaaaggactataatgcagccggtggtgagatccaatttcagacagaagttgaaagaataantttggctgtccaccggaatcttctgagaatagcgnggttttgcagtactcagcatgaaaggctccttgtttatccctacatgtctaatggcagtgtagcctttagattaaaagatcacattcacggtcggccagctttagattggacgaggcgaaagagaatagctttaggtacagcaagagggttggtttacttgcatgagcaatgtgaccctaaa

SEQ ID NO: 165286 - DNA, 292 bp, Glycine max
tcctctcaagatgcagatattcgtgaaaactttgaccggcaagaccatcacccttgaggtggaatcctccgacaccattgacaacgtaaaagctaagattcaagacaaggaagggatccccctgcccagcagagacttatctttgcgggtaaacaacttgaggatggtcgcacccttgccgattacaacatccaaaaggaatcaaccctccatctcgtgcttcgcctcaggggtggcatgcaaatctttgtcaagactttgaccgggaagaccatcacccttgaggtggaat

SEQ ID NO: 165287 - DNA, 286 bp, Glycine max
  unsure (1)..(286): unsure at all n locations
gcatttctcaagaaaatccattggctctacttgattgtggatgaagggcatcgattgaagaatcatgagtgtgctctagcaagaaccctggactctggctatcacattcaacgaagactgctgttgactggtaccccaattcagaacagtttgcaggaattatggtccctgctcaattttctccttccacacaacataaaaacgacaaagaatatcgaggnatggtttaatggtncctttggagagtgagtggatgtctctctanatgatgaagaanaattattga

SEQ ID NO: 165288 - DNA, 294 bp, Glycine max
ctcagtagtgcgattttcgattctcgtctctgcaactatgcctaaccctaaggtcttcttcgacatgaccatcggcggtcaacctgccggccgcatcgtgatggagctctacgccgacgtgactccgagcaccgccgagaacttccgcgcgctctgcaccggcgagaagggcgccgggcggagcggcaagcccctccactacaaaggctcgtccttccaccgcgtgatcccgaacttcatgtgccagggcggcgacttcaccgccggaaacggcaccggaggcgagtcgatcta

SEQ ID NO: 165289 - DNA, 290 bp, Glycine max
gccacaccagcatccatcaccaatgtcactgtggagttccttcaattccccgcggtcgtgacacctcctgcctctaccaaatcctatttccttggtggcgcaggggtgagagggttgaatattgaagaagaatttgtaaagttcacgggaataggtgtttatttggaagacaaggccgtgtcatcactcggtgccaaatggaagggcaaaagtgcagctgaattgctggactcacttgacttctacagagatatcatcaaaggtccgtttgagaagttaattcgagggtc

SEQ ID NO: 165290 - DNA, 296 bp, Glycine max
  unsure (1)..(296): unsure at all n locations
ggcgtcttcataaacgcctttcttctccgtttccgtttcctcgttcaaattcgtacattgatctgcgcaaatgagagagtgcatctcgatccacattggtcaggaaccgataaangtcggcactgcttgctgggagctctactgcctcgagcacggcatcgggcccgatgggcaaatgccaagtgacaagacagttggcggtggtgatgatgctttcaatactctcttcagcgagactggtgctggaaagcacgtgccacgtgcagtgtttgtagatcttgagcccactgttattg

SEQ ID NO: 165291 - DNA, 270 bp, Glycine max
ctcaaagcaacacaagaacactctcttgaacattcatggatccagtgagcgtgtggggtaacacgcccttggcgacggtggatcccgagatccatgacctcatcgagaaggagaagcaccgccaatgccgcggcatcgagctcatcgcctccgagaacttcacctccttcgcagtcatcgagcccctcggcagcgccctcaccaacaaatactccgagggcatgcccggcaaccgctactactgctgcaacgaattcatcgaccagatcg

SEQ ID NO: 165292 - DNA, 271 bp, Glycine max
tgaggatgaactgagagatgcagtattgctcgtatttgctaacaaacaagatcttcccaatgcaatgaatgctgctgaaattaccgacaagctgggtctccactctctcagacagcgccactggtacatccagagcacctgcgcaacctctggggagggtctgctatgagggtttggactggctttccaacaacatagccaacaaggcttgatgctttttgggagtcttcttgtggattggtgattctggatgcaggggtgaatattatct

SEQ ID NO: 165293 - DNA, 267 bp, Glycine max
ctccgctccaacacagggcccaaccagggaactccttcacgtgcagggagggcaatgcgggaaccagatcggttccaagttctgggaagtggtgtgcgacgagcacggcatagatccgacggggaagtacgtcggaaactcagatctgcaactcgagcgcgtgaacgtctactacaatgaagcctcgtgcgggcgcttcgtgccacgcgcggtgctgatggacctggagcccggaactatggacagcgtgcggaccgggccgtacgg

SEQ ID NO: 165294 - DNA, 271 bp, Glycine max
  unsure (1)..(271): unsure at all n locations
aaaactcagtttccaattcaccaaactcacaatggttgatctagattggcacacaaagatggttcactccaacatcatgcctnnactgtcccccaaactctctctcccggatcataacattccaatcccaactttgcaactcccccttcgccaaaacgacatcaccgcagcgtcgtctcctatctgcgctgcatacgacacatancttcgtctccctgagctcagagccctctgggcctccaaggacttccccaattgggccaacgagccc

SEQ ID NO: 165295 - DNA, 274 bp, Glycine max
  unsure (1)..(274): unsure at all n locations
caaatctccacctcctccatcaccagttcctaacccaccatactcctancagtctccacctccaccatcaccgattcctcaanccccatactattaccactctccacctccaccatcaccttctcctcctcccccatactattataaatcactccccccaccttcaccatcgcctcctcctccttactatcataaatctcccccaccaccttcaccagttcctccacccccatgttatctagactctccacctcaaccatcaccttctcctcct

SEQ ID NO: 165296 - DNA, 267 bp, Glycine max
gtgcagaagagcgtcgcagtcgcaaccctaatcagaagaagcgcagttcaagcgagtgacagtcaccagccatgggtcgtatgcacagccgcggtaagggtatatcctcttctgctttgccctacaaaaggacaccttcttgctggctcaagatctcttcgcaagatgtcgaagaaaatatctgcaagtttgcgaagaaaggtttgaccccgtctcagattggtgtcattctcagagattctcacggtattgctcaggtcaatagcg

SEQ ID NO: 165297 - DNA, 269 bp, Glycine max
ctcatatcctcaatcaccccccctcgcactcgctcttcccttcctctggtggcgacaatgtcgactcctgctaggaagaggctgatgacagacttcaagacgctgcaacacgacccgcctgctgggatcagtggtgccccccaggataacaacataatgctgtggaccgacactcatatttggtcctgatgatactccatgggatggaggcacgttcaagttgacactccaatttactgaggactatccaaataaaccaccgactgtac

SEQ ID NO: 165298 - DNA, 273 bp, Glycine max
caagattggggagaccttcatgtgggagaacacaaagctggagagtaccatggtgagcacaagccagagcacaaagaggggttcctagacaaagtcaaggacaagatccatggtgagggcggcgccgccgagggcgagaagaagaagaagaaggagaagaagaagaaggaggatggccatgagcatgaccatgacagcagcagcagcagtgacagtgattaaactgctgcatcacctatatatttaaaaggtttatgggaccatagtagcgag

SEQ ID NO: 165299 - DNA, 273 bp, Glycine max
cggtaacggacgcggcggtggaggtggaggtggaggtggaggtcgaggagaaggaggaggtgataatagcaagggcgaggaaggatctgacggtgacaagaggaaaatggctctgttaatgtctcagaaattcactctagcttatgctgcactcgtcggagtgggtggtgtaatgggttatctcaagagtggcagcaacaagtcacttttggctgggggtttgtctgcatcactgctgtattatgtttatactgagctacctggaagccctgt

SEQ ID NO: 165300 - DNA, 277 bp, Glycine max
tgctgtctgtgcaaatttgcgttgttcttcgcggcacacctcactcactgaacggtaagtatggtcgactaggctgttacaatccgaacccgaaagttcatgaccaacaggcttctttccaggaagcagtttgtcgttgatgtccttcatccagggagggcaaatgtttccaaggctgaacttaaggagaagctggctaggatgtatgaagtgaaagaccctaatactgtatttgtcttcaaattccgaacacattttggaggtggcaaatccactg

SEQ ID NO: 165301 - DNA, 264 bp, Glycine max
ccctcgagcgaatcggctcactgaattcaaatggagttgttaccgttgaattctttgacccatggtgtggacactgaccggctctgactcctatatgggagaaggcagctactgtcttgaagggtgttgttactgtggcagcaattgatgctgatgctcatccgtctttcggctcaggaatatggaattagaggatttccaactataaaagtgtttgcacctggaaagccacctgttgattaccaaggagcaagacatgtcaaa

SEQ ID NO: 165302 - DNA, 268 bp, Glycine max
cattgaattcaaaaacttaagttcattccttgtgttttgctttcttcctcaaaaccaaacatgtcgaacacatgcggcaactgcgactgcgctgacaagactagctgcaccaagggaaacagctatggtgttattgtagagactgagaagagttacatcgagactgttgtcatggatgttccagcagctgagcatgatgggaagtgcaagtgtggcactaactgcacttgcacggactgcacctgtggccattaaggaatatgtatga

SEQ ID NO: 165303 - DNA, 271 bp, Glycine max
ggaagctgttgctatacttcctcaactagtacttttacagagaactagaaatattgacaatttgactggacagtatgtctttctcctcggtgcatacagaggactatacattctcaactggatctatcgctactttactgagccccactttgtccattggataacatggatttctggccttgttcaaacactactctatgctgatttcttctattactatttccaaagctggaagaacaacaaaaagcttcatttgccagcatgagtttat

SEQ ID NO: 165304 - DNA, 251 bp, Glycine max
aggagacacaccttcagcagcagcagccatggttctcaaaaccgaactatgccgattcagcggtgccaagatctacccagggaaaggcatcagatttgttcgtggtgatcctcaggttttcctgtttgctaactcgaaatgtaagaggtatttccacaacaggttgaagcacacaaagctcagctggactgcaatgtacagaaagcaacacaagaaggacattgctcaagaagctgtgaagacaagaagac

SEQ ID NO: 165305 - DNA, 268 bp, Glycine max
gaggattctgaagcagaggttgaacgttcctccagctttgaaccagttcaccaaaactcttgacaaaaacctagcaacaagtctgttcaagttacttctgaaatacaggccagaggacaaagcagaaaagaaggagaggctcttgaaaagggctcaggcagaggctgaaggcaaaaccgttgaagctaagaagcccattgttgtgaagtatggtctcaaccatgttacctacctcattgagcagaacaaagcacagcttgttgtgatt

SEQ ID NO: 165306 - DNA, 269 bp, Glycine max
accgtatccacttctctaactaatgggcgtgttcagcgaagatccgaatcccaacccgaacccgatcgtgatccgagaggtttggacctccaatctcgaatccgaattcgaactcatccgcgaactcatcgatccctacccttttacctcaatggacacagaatttcccggtgttattttccgtccacatgtcgaccccaccaaacccttcaaccatcgcaatcgtccctctgatcactaccgcctcctcaagtccaacgttgacgctc

SEQ ID NO: 165307 - DNA, 266 bp, Glycine max
caaggaaggatgggagtgacaccgaaaattgctccttcgatgctctcttccgacttcgccaatttggcttccgaggctcagcgcatgctccacttcggcgccgattggctccacatggacatcatggatgggtcttttgtccccaatttaactattggcgctccagttattgaaagtttgagaaagcacacaaagggatatttggattgtcaccttatggttacaaatcctcttgattatgttgagcccttggcaaaagctggtgc

SEQ ID NO: 165308 - DNA, 243 bp, Glycine max
  unsure (1)..(243): unsure at all n locations
aaaacctagggttgagccttttgctcaggttttcagcgcttctttcttacaatggttctacagaacgatattgatttgctgaatcctccagctgagntggagaagagaaagcacaagctcaagcgtcttgtgcagtcaccaaactcttcttcatggatgttaagtgccagggctgcttcaacataacaactgtgtttagccactctcagactgttgtggtttgcggaaactgccagactgtgt

SEQ ID NO: 165309 - DNA, 253 bp, Glycine max
aagggcagcactaatttatatagtaagctagctaggttgaaaatagtttggttttgtagtaagtgaggtgaggtgccaaaatggtgaagataactcttggtactttcgatgactcttttggtgttgcctctcttaaggcttatttggcagagttccatgcaactctgattacattgatcgctgatgttggttcagccatcgcttacaacgagcttacaaaagatgcacacttggatccaacgtggctggtggc

SEQ ID NO: 165310 - DNA, 264 bp, Glycine max
ccagaatctatgaaattggtcgtcggaggccaactgatgatgattctgatcctgatgatgctgataatgaggaggaagacgaggacgtgatgacgacgatcctgatgttgatcctctgttaagccctggtcttggtggggatagtgggagtgatgctgatgacatgagcaatgatgatgatgatagtgtgagtgatctggatgaagatgaagatggagatttcattttggatgatgtagactttgatggaggacctggcatatt

SEQ ID NO: 165311 - DNA, 265 bp, Glycine max
agagaaatggcttgcaggcaattgtgggcttcaagagctgcctcttacctgaggatctctgtgtttcacagaggcttttctaatgttattaaagatttcaagtatgttgattctcatgagtgggtgaaagttgatggaaattacgcaaccatcggcataactgatcatgcccaagatcatttgggtgatgttgtatatgttgaattgccagaagtgggagcagctgtgacacaaggaggtagttttggtgcagttgaaagtgtga

SEQ ID NO: 165312 - DNA, 267 bp, Glycine max
gagagaatggctgcggaaaacgttgttgagttcacagacttacccgtcaagaggccaagagaagaagaagaaggaaccaatggcgtctccaacgacgccgtttcagcgctccccaatgaccctcaataccctggcatctctgcggttattcccggttggttctccgaaatcagcccaatgtggcccggggaggcacattccttgaagatggaaaagattttgtttcaagggaagtctgactatcagaatgtcatggtcttccagtca

SEQ ID NO: 165313 - DNA, 270 bp, Glycine max
ctcaatggaggcccaggagctgaagcgcgtgttccagatgttcgaccgcaacggcgacgggagaataacgaagaaggagctgaacgactcgctggagaacctgggcatcttcatctctgacaaggacctgagccaaatgatccagaggatcgacgtcaacggcgacggttgcgtggacatggacgagtttagggagctgtatcagaccataatggacgagcgcgacaatgaggaggacatgagggaggccttcaacgtcttcgaccagaa

SEQ ID NO: 165314 - DNA, 265 bp, Glycine max
  unsure (1)..(265): unsure at all n locations
gcgttgcacgcgacgcaacagatcgccgagtcgtggatccacgcgtcgcggaacgttctactcangatcgcagacgcggtgctctccagaaccttcgagaaggcggctgaggacagctacgccgtggaaaggatctggaagcttctcgcggaggtggaggacctccacctgatgatggatccggacgatttcttcagactgaagaatcagctctcggtgaaatcctccggcggcgaaacggcttcgttctgcttcaggtcgaagg

SEQ ID NO: 165315 - DNA, 265 bp, Glycine max
gggttcaacaggtgagactcagattactccaacccatgtatctgatgaacacgcaaaccttttcgccatgcaactagccagtgcctcagtactccctatggttctcacatcagctcttgagcttgatctgttggaaatcatacccaaggctggccctggtgttcacctttccccctccgacattgcttctcggctcccaacacacaaccctgatgcacccgttatgttggaccgtatattgcgcctcttggcttgctacaatatc

SEQ ID NO: 165316 - DNA, 261 bp, Glycine max
cgattgatacaaccaaacaacactccatctcctgtttctccaacaccaccagcagcttcttcaggtaacagtaatactggagctattgctggaggagttgctgctggtgctgctctgttgtttgcagcccctgcaattgcacttgcttattggcgaagaaggaaacctcaggatcatttctttgatgttcctgctgaggaggatcctgaagttcaccttggtcagcttaaaaggttttctttgcgtgactgcaagttgcaa

SEQ ID NO: 165317 - DNA, 266 bp, Glycine max
ctttactggaactacaactatggaaaagctggggaagccttgacggtggatctgttgaaccatccagaatacatagaacaaaatgccaccttagccttccaggctgcactctggcagtggatggacccaccagagaagcacctaccatcaccccacgatgtctttgttggcaactggaaacccacaaaaaatgacacattgtccaaaagggtgcctggatttggtgccacaataaacttgctctatggggaccaaacttgtggcca

SEQ ID NO: 165318 - DNA, 271 bp, Glycine max
gcgttgttgccgttgaggtcaccggtggacctgaagttcccttccatcctggaagagaggacaaacctgagccaccaccagagggtcgcttgcccgatgccactaagggttctgaccatttgagagatgtgtttggcaaagctatggggcttagtgaccgagatatcgttgctctgtctgggggtcacactattggagctgcgcacaaggagcgttctggattcgagggtccctggacctctaatcctcttattttaacccaatcatactt

SEQ ID NO: 165319 - DNA, 275 bp, Glycine max
attgatactgtgcgtagaagaatgatgatgacatctggagaagctgtaaaatacaagagctctttggaagcattcaagataatcgtcgccaaagagggtactaagtcactctttaaaggtgctggtgcaaacatattacgtgctgttgcaggtgctggagtgcttgctggttatgataagctacagctcatcttgttcggaaagaaatacggttctggcggtggaggttaatatacagataatgatgacgacaactatctgaggcaatgatgttg

SEQ ID NO: 165320 - DNA, 278 bp, Glycine max
ctgagccgagaaaaatacagttactctttcattctttaacgttcgcacactccgtcttcacaccaagatccgtgttcttcacccacgtctctctcccgcttcagatcgtaaacgtctcgctgttccaagatgggtgtggctcagaacattcccgatatggaggagggtaccttggagattggaatggaatacagaactgtatctggagttgctggaccattggtcattcttgacaaagttaagggacccaaatttcaagagattgttaatattcgttt

SEQ ID NO: 165321 - DNA, 280 bp, Glycine max
gctcgtcactccttgctcttagccctcctcctcttcgccgccgtcgccaccgccgcgatggcggtggccgcgtccgacgccgatgacatcctgatccgtcaggtggtgccagatgttggcgaagccgaagaggaggacaacctgctgaacgccgagcaccacttcgacgagcttcaaggccaagttcgccaagacctacgccaccaaggaggagcacgatcatcgcttcggcgtcttcaagtccaacctccgcagagccaggctgcacgccaagctcgac

SEQ ID NO: 165322 - DNA, 280 bp, Glycine max
caccaatgtttcaaccgaggcagataagctttcatcattcaacaacaatggaggaccagattctgaaggaggaactaacaatggaggaggagggtatggtctgagggagaatccaaagaagacttggcggttcaatgattcgagtgaggacaacaacaacaacaacacaactttgttggtgttggacaagttgtgcaaagagtgtggcaaagggtttcaatcttggaaagctctgtttggtcacatgaagtgccactctgagaaagtgtaccaaaacaac

SEQ ID NO: 165323 - DNA, 277 bp, Glycine max
cgagagcatggcttccttaagctccttagtgctgctccttgcagctctaattctatcccctcaagttcttgcaaactatgagactcccccagtgtacaagcctcccactgagaaaccaccagtttataagccaccagttgagaagcctcctgtttacaaacctccagttgagaagcctccagtttataagcctccagtagagaagccaccagtgtacaagcccccagttgaggaacctccagtttacaagcccccagttgagaatcctccagtgtac

SEQ ID NO: 165324 - DNA, 276 bp, Glycine max
tttctctcgttttttctcagaaccttctgaggttaaagcatcaaacaaagagagagcgagagatataatgatgaagccatcgatgctcagatctctccactccgccgccacccgcggcgcctctcatctcttccgctctgggtacgcctccgagccggtgccggagcgcaatgtagccgttctcggcgacgacgcggggatcgggcagcctctctcccttctcatgaagctcaatcccctcgtttcgagtctctccctttacgatatcgccggaac

SEQ ID NO: 165325 - DNA, 277 bp, Glycine max
gtacgacacattaagacagggcctaagagaaggtgttgtagagaggatacagcgagagcaaaatgtattctcattgggttcgattgatgcttctcattgcttgcattcttccagctttggttgaatgcagagtgaggcactacaaatttcatgtggtgtctaaacaaactaatagattgtgttcaagcaaatctattgtcaccattaatggcaagttcccgggacccactctttacgccagggaagacgatacagtgttggtcaaagtcatcaacca

SEQ ID NO: 165326 - DNA, 271 bp, Glycine max
ggaagcttctgtacaaacaagatgggaggcttgtggatactgacggaaagtccaaatggatatttgttcttagcaccacaaggtccttgtatctggggcccaacagaaaggtgcatttcaacactctagctttctcgctggggctgctacaacagctgcaggaagattagtggctcaacaaggtgtacttgaggctatttggccatatagtggtcactatcaccccacagaagagtcctctcaagaattcataagctttcttgacgagcac

SEQ ID NO: 165327 - DNA, 274 bp, Glycine max
aaatgatctttcaaattggtcaagattatccagttattagttgcttctctatggtactagttgttgcttcattgaatttgcttcattaataggatcacgattcgactttgatcgttatgcactagtaccacgatcgagtcctcggcaagcagacctaattttaactgcgggcacagtcactatgaaaatggctccttctttagttcgattatatgaacaaatgcccgaacctaaatatgttattgctatgggagcatgtacaattacagggggg

SEQ ID NO: 165328 - DNA, 278 bp, Glycine max
gaaaaactctgaccgagtccgagaggcatcatggcgacactggattccgacgtgaccgtgtttccggccggcgaacctccagcagcgccggtccttcttcgtccaccaagaagccgaagcgtttcgagatcaagaagtggaatgcggtttccctctgggcttgggatattgtcgtggataattgcgctatttgtcggaaccatatcatggctctctgtattgagtgccaggccaaccaggctagcgccactagcgaggaatgcactgtagcttgggcc

SEQ ID NO: 165329 - DNA, 278 bp, Glycine max
tgacgctgaactgcgcgctgcagtattgctcgtatttgctaacaaaccagatcttcccaatgcaatgaatgctgctgaaattaccgacaagctgggtctccactctctcatacagcgccactggtacatccagagcacctgcgcaacctctggggaaggtctttatgcaggtttggactggctttcctccaacatagccaacaaggcttgatgctttttgggagtcttcttgtggattggtgattctggatgcaggggtggatattatctagtttgtt

SEQ ID NO: 165330 - DNA, 275 bp, Glycine max
gcaacctaccagcctccaaatccaatggcttcagagactaaactttcgaacccaatgagggagataaaagtgcagaagctcgtcctcaatatctctgttggcgagagtggagatcgtctcaccagagccgccaaggtgttggaacaacttagtggccaaaccccagtgttttccaaagcaaggtacactgttcgttcctttgggattagaagacatgagaagattgcatgctatgtcactgtcagaggtgacaaggcaatgcaacttttggagag

SEQ ID NO: 165331 - DNA, 270 bp, Glycine max
  unsure (1)..(270): unsure at all n locations
gcaaaaacccagaatcccaggcgaggagaacgatggaggggaaggagcaggatgtgtcgttgggagcgaacaagttccccgagagacagccaattgggacggcggcgcagagccaagacgacggcaaggactaccaggagccggcgccggcgctcgtngctgacccgacggagtttacgtcatggtcgttttacagagcagggatagcagagtttgtggccacttttctgtttctctacatcaccgtcttacccgttatgggagtcgccg

SEQ ID NO: 165332 - DNA, 274 bp, Glycine max
tcttgatccatcaacggatttgaaaaaaaaggaaatggacctccaagccaaggaggctgaattgagaaaaagggaacaggaagtcagacggaaagaagaagctgctgcacgagctggaattgttcttgaggagaagaattggccgccatttttcccaattatccatcatgatattgctaatgaaataccaattcatcttcaaagattgcagtatgttgcatttacttcattgttaggattggcattgtgcctcacatggaatattgtagctgtc

SEQ ID NO: 165333 - DNA, 277 bp, Glycine max
caaagtttcttcctttctctgctctttgtcttctctgacacatttggggccttgttgagtgtgtttttgcaagagggtatggcgaaggacgttgaggttgctgagcgtggctccttctctgggaaggactaccaggaccctccaccagcaccactcattgatgctgaggagctcacaaagtggtccttttacagggctcttattgctgagttcattgccactttgctcttcctctacattactgtgctcacagttatagggtacaagcaccagacgg

SEQ ID NO: 165334 - DNA, 276 bp, Glycine max
gcaaaaagaaagaatcccaggcgaggagaaagatggaggggaaggagcaggatgtgtcgttgggagcgaacaagttccccgagagacagccaattgggacggcggcgcagagccaagacgacggcaaggactaccaggagccggcgccggcgccgctggttgacccgacggagtttacgtcatggtcgttttacagagcagggatagcagagtttgtggccacttttctgtttctctacatcactgtcttaaccgttatgggagtcgccggggcta

SEQ ID NO: 165335 - DNA, 138 bp, Glycine max
  unsure (1)..(138): unsure at all n locations
aagagganncagaatgatatcaaaccgcgaatctgcacgccgatctcgcatgaggnagcagaagcacttggacgatcttgtttcccaagtggctcagctcagaaaagagaaccaacaaatactcacaagcgtcaacat

SEQ ID NO: 165336 - DNA, 272 bp, Glycine max
gcactttctctctctaactcaatctctctctctctctctctctgaattttctcctctctccgattccttttattaattggagtttactcgctccttttcctttccctgaaaacatttcctcgtcgtattgatgtcggaaaagggccggccacttccaaaatttggtgaatgggatgtcaatgatccaacctcagctgaggggttcacagtgatttttaataaggccagggatgagaaaaagacaggtggtaacccagattcaccaggaaaga

SEQ ID NO: 165337 - DNA, 148 bp, Glycine max
cattctccaaggtttggacgaaatagagaggcgcattgagaatggagagttcaattggagagctgacagggaggatgttcacatgaacattgaggccgcgctcaccgacttgatcggtgagcctgccaagaagctccacacaacatac

SEQ ID NO: 165338 - DNA, 276 bp, Glycine max
ccctcgagccgcggctcgagctacccccaagtactctaaggctaggtctgatgaaatcgtgaacgacgtctcttcttactatgaagaaggttggttacaacccagacaagattccctttgttcccatctctggttttgagggtgacaacatgattgagaggtccaccaaccttgactggtacaagggaccaactctccttgaggctcttgaccaaatcaatgagcccaagaggccctccgacaagcctctaaggcttccattgcaggatgtctaca

SEQ ID NO: 165339 - DNA, 272 bp, Glycine max
ctcagtagtgcgattttcgattctcttctctgcaactatgcctaaccctaaggtcttcttcgacatgaccatcggcggtcaacctgccggccgcatcgtgatggagctctacgccgacgtgactccgagcaccgccgagaacttccgcgcgctctgcaccggcgagaagggcgccgggcggagcggcaagcccctccactacaaaggctcgtccttccaccgcgtgatcccgaacttcatgtgccagggcggcgacttcaccgccggaaacg

SEQ ID NO: 165340 - DNA, 271 bp, Glycine max
gtcgcagcgatcgaagtttcacatcagccttatccagtttagggtttcggttccttaccctacctttgacgtatcgaaaccttaaatttgggattaggtctgagcaatctggttggtagaacctttggtcttagagagtcaagttttatgtctggattagacgatcaaattcctactgccttcgatccttttgctgatgcaaatgctgatgactcgggtgctgggtcaaaggagtatgtgcatattcgcgttcagcagcgaaatggtagga

SEQ ID NO: 165341 - DNA, 276 bp, Glycine max
ctgacaactcagaagccaccgttccatataattctccaaaactagctggaacagttaactggggcacggcaactgtcgttggagtatttgcaggcatgttatatggcggtagcaaggaggcagctgcttctgttagcaaggatgcagaagttatgttgaaacttgggagcacagaagacaagcgtgagcaatatcgattgatgagagatgcaatggagaaacgattcattcgagttacacggggctcaatagttggaggggtacgcctaggaatat

SEQ ID NO: 165342 - DNA, 272 bp, Glycine max
  unsure (1)..(272): unsure at all n locations
gccactaatatgttgacttcccacaattgggtcattttggaaattgcttccactagatcttcatctccacacnaaaggtcaagcaagcatatcaagcccgtttcaaaaagtcccttgaagaagacgttgcctatcatactaaaggggacatccgcaagctattagttcctcttgtgagcatattccgttatgagggggatgaggtgaacatgacattggcaaaatctgaggctaaactgcttcacgagaagattgcagagaaggcctacaat

SEQ ID NO: 165343 - DNA, 273 bp, Glycine max
cagtttctctcctttcttctcagaaccttctgaggttacagcaacaaacaaagcgagagagagagacaaaatgatgaagccatcgatgctctcatctctccactccgccgccaccctcggcgcctcttctctcttccgccgtgggtacgcccccgactcggtgccggagcgcaaggtagccgttctcggcgccgccggcgggatcgggcagcctctctcccttctcatgaagctcaatcccctcgtttcgagcctccccctttacgctatcgc

SEQ ID NO: 165344 - DNA, 244 bp, Glycine max
aagcaatatgttcacttgttaaactctactctaacgggtactgagaggagcatttggtgcatactggagaacaaccagaaggcccctggggtagaactaccagaagtcctcagaccattcatggggggaaagactttcctggctttcaagaggcaaacatctaatgaagcccaagggaagaaatcgaaagcctaaatgcattttaagtcagtgatatttatggagagttgttcagagttgtgta

SEQ ID NO: 165345 - DNA, 274 bp, Glycine max
gcagcactcaatggtgttgagggtttggactatatggaaagaattcctcttgccacatctgacggttttccccatgtgctttcacgcaaaaatggtgataaaggcaaaaggagatttgtttctggggatggtgaagagatgacattgattccgggaaccagtgttgaagaggcttacaatcagctaatagttgaacttgagaaaagtgttcctacattggttggcattgcgtgtcccaaggatgagaaacttcctcgtcgcaaaatttttgaca

SEQ ID NO: 165346 - DNA, 272 bp, Glycine max
ggaagagactgagatgggttcaaaaaccaagacttttacctttgaagaggtggctaaacacaatcacaggaaggattgttggattatagtcaaagggaaggtgtatgatgtcaccccatttttggatgatcatccaggaggtgatgaagttttagtgactgcaacagagaaggatgccaccactgattttgaagatattggccacagtgattcagcaacacagatgatggaaaaatactttgttggggaggttgacaccaacactcttccag

SEQ ID NO: 165347 - DNA, 271 bp, Glycine max
cttcctcaccgattgctagactggaatttcgatgctcagtcatctcttttaccattctcttctctcttgctcttgcaggagagagccatgtccatgcatcgctacctgaggaagattattgggaagctgtttggccaaacactcccattcccactgcactgcgagagcttctaaagcctctccctgcaggtgttgaaaacgatgaactccctaagcaaattgatgatacacagtacccaaaaacattcttctataaagaagaccttcatcc

SEQ ID NO: 165348 - DNA, 270 bp, Glycine max
aagaaagagcaagtcgaaaagttcatctctccctctctctcacacatcccagccatgagcctcttcggtataggcagaaaccagagaacattccgcccgaaaaaaagtactccttctggaagtaagggagctcaacttagaaaacatattgatgccacgttgggtagtggaaatctgagggaagcagtaaagctacctcctggggaggatttaaatgagtggctagctgtcaacactgttgatttcttcaaccaggtgaatctgctttat

SEQ ID NO: 165349 - DNA, 270 bp, Glycine max
cttcagaagacatggcctcattgggtgggttacaaaatgtgagccgcatcaattttcttatcaaagagggtccaaaagtcaatgcaaagttcgagctgaagccgccaccatatccactgaatggtttggagccggtgatgagccagcagacacttgagtttcactgggggaagcaccacaagacttatgtggaaaatctgaaaaaacaagttgttgggacagagcttgatgggaagtcactagaagagattattgtcacatcatacaata

SEQ ID NO: 165350 - DNA, 276 bp, Glycine max
cagtttcaacctcatcgtcatcgaactacccacgttctgctccttcgcagatcatttcgcgtttagcttccacgaaagatggcagacaatgaggatggaggggataagacatctcgtgggaatgaatgggatgttgtatctctcacagcatcaacatatgctgctgctcctggtcctgatgaagttgaggtgaaggatgatgggaaagaagatgtatatgggcaggatgaaggagaaacgtcacatgctttattcatgtctagacactttgtcttt

SEQ ID NO: 165351 - DNA, 274 bp, Glycine max
cgctgccaccatcagagtctcttcctagggatgaaaccattggaggctatatctttgtttgcaacaatgataccatggctgagaatctcaagagacaactcttcggtctgcctccacgatacagagattctgttcgggccattactccggggttgccccttttcctttacaactattctactcaccaacttcatggaatctttgaggctgcaagttttggagggacaaatattgatccatcagcttgggaggataagaagtgccctggtgaatc

SEQ ID NO: 165352 - DNA, 275 bp, Glycine max
cgcttctcgaaccctactttcttccgcggtgattgcatttgaattcctgtaatggcgattgataatatttttaaaaatgaagctagtgaagaaaaaggagagcgtgccagaatggcttcttttgttggagccatggctattgctgacttagtgaagacaaccttggggccaaagggaatggataaaattttgcagtcaacaggtagaggacgtgaagttactgtcacgaatgatggcgctacaatcttgaagtccctccatattgataacccagc

SEQ ID NO: 165353 - DNA, 269 bp, Glycine max
gcgaagagaatggctcccaagggtttaatctttttggctgtgttatgcttctcagcactgtcactgagtcgttgtcttgcggaggataatggacttgttatgaacttctacaaggaatcatgccctcaggctgaagacatcatcaaagaacaagtcaagcttctctacaagcgccacaagaacactgctttctcctggctcagaaacatcttccatgactgtgctgttcagagttgtgatgcttcactgttgctggactccacaagaag

SEQ ID NO: 165354 - DNA, 268 bp, Glycine max
cgatcgcagagaagaacagagagagatccatccatcaattccaatggccgatcagctcaccgacgaacagatctccgagttcaaggaagccttcagcctcttcgacaaggacggggatggttgtattaccaccaaggaacttgggaccgtgatgcggtcacttggccagaacccaactgaggcagagctgcaggacatgataaatgaggttgatgctgatgggaatggtaccattgatttcccagaattcctgaatctcatggctcgc

SEQ ID NO: 165355 - DNA, 267 bp, Glycine max
tgcttttctgatgagaatcctgcagtatcttgagacacctcagtatttgaggaaggctctctttccaatgcataacagcctaagatttgtgggcctgttgccaccccttgatgctccacaccatttgcgcaaccatgaatggtttccatatcgagaaggtgtcacagtaaaagaaagagactcaaactctgggtgcaacgctagttgatgttgggttagtgaagaatgtaatagttgaccaaatatttgaaccaggaagaagagtta

SEQ ID NO: 165356 - DNA, 257 bp, Glycine max
tcgcactccgtcttcatcaatcagcatcaccaccgctccaacacaggggataattacggagatctatcacgttcagggaaggcaatgcgggaaccagatcggttcgaagttctgggaagtggtgtgcgacgagcacggcatagatccgacggggaagtacgtcggaaactcagatctacaactcgagcgcgtgaacgtgtactacaaagaagcttcctgcgggcggtttgtcccacgcgcatgctgatggactggag

SEQ ID NO: 165357 - DNA, 267 bp, Glycine max
gggatgtgatttcaagccaggatgcagttagttttgtgcggcgtggattaagaaggcatgacgatcctcaacaatgtgccagatagcttgttaaggaagcattgcgcctacacacatcagatgctcttactgtgattgttatctgcttgtcccctgtccaaagcattgtcgaatcatgtccaccccagaggcgaagattcagagcttgttctctgtctgaagacgccaggaaccagttaaggagcatgctagacgtgaactgcatgt

SEQ ID NO: 165358 - DNA, 268 bp, Glycine max
atcagaagcaaatgctgccaacaccaacttctgtgtaaatgttagcaacaatggctacattagtgctaatgaccccttgaactggggtgcggcggcggaggctatggctgggagccacctcgacgaggtcaagcgcatgctagaggagtaccggaggcccgtcgtcaagctcggtggagagatcctgaccatctcgcaggtcgcggcgatcgcggcccacgaccagggggtgaaggtggagctggcggagtcctccagggccggtgtt

SEQ ID NO: 165359 - DNA, 265 bp, Glycine max
aagcaccgctcttttctctccgaaatccccatctcccttcacttctgagctctggacgagatcccagatctcaccatctttcacgcactcttccatcagattcaccctttcgtttaacgcaaactcataacttgaaggttaatggctgctccaccggcaagggctcgtgccgattacgattatctcataaagcttctcttgatcggtgacagcggtgttgggaaaagttgcctccttctgcgtttctccgatggttctttcacca

SEQ ID NO: 165360 - DNA, 267 bp, Glycine max
atgaagtggttgactttctggaactgcatatctatcctcgtgttgtcttttgctttcttcttcttctattgtcacacatacacatctactccttccctcatggctgagcaatcttccaagtccatttacgatttcacagtcaaggacatcagtggaaatgatgtgagtctgaataattacagcgggaaggttctactgattgtgaatgtcgcctcacaatgtggtttgacacagacaaattacaaagaattgaatgtattgtacgag

SEQ ID NO: 165361 - DNA, 270 bp, Glycine max
ctcgagccattcaaaagggagaagaaaaggaaagaaaactctcaaaaaactattatagcaatggcagaacaaaaccaaaaccaaacaactgaagctgcaaggcaccaagaggttggtcacaagagccttctccagagtgatgctctttaccagtatattctggagacaagtgtctacccaagagaacctgaatccatgaaagaactgagagagttgacagcaaaacacccatggaacatcatgacaacctctgcagacgaagggcagttc

SEQ ID NO: 165362 - DNA, 266 bp, Glycine max
aggaaaggtttatcgagtggagttgaggaaaaatggagccatggtggctgtcaagcaactagggaaagtagatggtgtgaaaattttagctgcagagatggagattttggggaaaattaggcatagaaacatacttaaactctatgcttctttacttaaaggaggatccaaccttttagtgtttgagtacatgccaaatggtaatctttttcaagctcttcacagacagataaaagatgggaagccaaacttggattggaaccaga

SEQ ID NO: 165363 - DNA, 267 bp, Glycine max
aagacattgaaagtgcatattgggaacttgtagtgaaggatatccaagatgcttgcaaattatttgaaccaatctatgatcaaacagatggtggtgatggctatgtttctgttgaagtatctcccaggctcgctgatgacactgagggaaccatagaagctgcaaaatggcttcataaagtggttgatcgccccaatgtgtatattaagattcctgctacagaggcatgtgtgccttcaattaaggacgttattgctaatgggataa

SEQ ID NO: 165364 - DNA, 268 bp, Glycine max
ctcgagccgcatttatcaactcactcatcaatctcgtttgttaccactaactattacttcatcatgtcgtcgagcacagttggtcaagtcatcaaatgcaaagctgcggtttcatgggaggcagggaagccacttgtgattgaagaagtagaggtggcaccaccacaagctggtgaagtgcgtttgaagatcctctacacctctctttgccacactgatgtttacttctgggaagccaagggccaaactccattgtttcctcgtatat

SEQ ID NO: 165365 - DNA, 264 bp, Glycine max
cggcgtcttcataaacgccgcccaaaacttctcatacccttttattcattccattcgtttctagggttttcttttctttgccgagaaaatgagagagtgcatttcgatccacattggccaggccgctatccaggttggaaacgcctgctgggaactctattgccttgaacacggcattcagcccgatggacagatgccgagtgacaagaccgttggcggaggagacgacgccttcaacacatttttcagcgagaccggcgccgg

SEQ ID NO: 165366 - DNA, 264 bp, Glycine max
gcatcccctctcccatttttcatcatttccttcgatggagcgcatgagactcttattcatctttatttctattttgttcaatgctacaactctgagtggtgttgaacttcttgttcataactactacaaggagaagtgtcccttagccgaagacatcgttagacataacgtggaagtggcagttttaaaaaatcctcgtttggcagcctctctacttcgcttacacttccacgattgttttgtcccaggatgcgatgcatccgt

SEQ ID NO: 165367 - DNA, 268 bp, Glycine max
taggacctgaagctccaaagatcttcaactgtgtggttgaaattgggaaaggaagtaaggtgaaatatgaacttgacaaaagaactggtcttattatggttgatcgtatcctttcctcatcggttgtgtatcctcacaactatgggtttatcccacgtactatttgtgaggatggtgatcccatggatgtcttggttatcatgcaggagccagttcttccaggttgctttctacgggccaaagctattggactcatgcctatgattga

SEQ ID NO: 165368 - DNA, 265 bp, Glycine max
cctcgagccgaatcggctcgaggaacgagcgaccttcttcgtttctcgcaaagtttaagtcaccatgggtaaggaaaagactcacatcaacattgtcgtcattggacatgtcgactctgggaagtcaactaccactggtcatttgatctacaagcttggaggtattgacaagcgtgtgattgagaggttcgagaaggaggctgctgagatgaacaagaggtcattcaagtatgcctgggtgcttgacaagctcaaggctgagcgc

SEQ ID NO: 165369 - DNA, 265 bp, Glycine max
caacgcttgacttctctcgcagctcatcgagaatgtcgaaggaagtgagccagcagatgaaggactacgtagaccctccgccagcccccctcatcgacttggccgagattaagctctggtccttctacagagccctcatcgccgagtttatcgccacactcctcttcctctacgtcaccgtcgccaccgtcattggccagaaaaaacagaccggaccatgtgacggcgttggccttctcggcatcgcatgggccttcggtggcat

SEQ ID NO: 165370 - DNA, 247 bp, Glycine max
tgcgttgcaacgctgtttcctttctgtttcttttcttcttcttccttccgacgagatctacaacgttgttgttgtttagatcttgaatagtgttttggtgttcggtgagatggaagaaaggaagcaatcacgttatgtgaagttgactaaagatcagacacctctcgaagacattacccctggcgaactcaaccagccaattcaggttcctcagttggatgttcgcaagtgccctgaatgtagacag

SEQ ID NO: 165371 - DNA, 261 bp, Glycine max
gcgaatcataccactgccgccttcatcagggttgtgggatctgagtttgtgcagaagtatcttggtgagggtccacgaatggttcgtgatgtatttcgtctcgctaaagagaatgcgcctgcaattatatttattgatgaggttgatgcaatagccacggctagatttgatgcccaaactggagctgatagagaagtacagcgtatccttatggaacttttgaatcagatggatggttttgaccaaacagttaatgttaaa

SEQ ID NO: 165372 - DNA, 256 bp, Glycine max
ctcgagccggtcgcaggcgcagagtagagcagcacagaagagggaaaacggcaccgccgccgtagaagaaaacaaccatggtgcacgtctccttttacaggaactatgggaagacattcaagaagccgcgtcgtccgtacgagaaggagcgtctcgacgcggagttgaagctggttggtgagtacgggcttcggtgcaagagagagctgtggagggtgcagtacgcgctcagccgcatccgcaacaacgcgcggaa

SEQ ID NO: 165373 - DNA, 171 bp, Glycine max
aatgtctctggtggcgaacgaggatttccagcacattctgcgtgtgctgaacaccaacgtggatgggaagcagaagataatgttcgctatgacctccatcaagggtattggaaggagattcgccaacatcgcttgcaagaaggccgatgttgacatgaacaaaagggctgg

SEQ ID NO: 165374 - DNA, 264 bp, Glycine max
ccgctcgagccgctcgagcggctcgagcggctcgagctgattcaaatccccagcaaagaggaaatcaggcagacaaaccttaccagtgtcacgtgactgcaagatgtactggcaaagcaatggagactaccttgctgttaatgtagagaggtacacgaaaacgaaaaaaagcacatacacaggctttgagcttttccgtataaaggaacgggatataccaattgaagttttggagcttgagaataagaatgataagatcattgc

SEQ ID NO: 165375 - DNA, 261 bp, Glycine max
cgctgccaccatcagagtctcttcctagggatgaaaccattggaggctatatctttgtttgcaacaatgataccatggctgagaatctcaagagacaactcttcggtctgcctccacgatacagagattctgttcgggccattactccggggttgccccttttcctttacaactattctactcaccaacttcatggaatctttgaggctgcaagttttggagggacaaatattgatccatcagcttgggaggataagaagt

SEQ ID NO: 165376 - DNA, 258 bp, Glycine max
atggcacttcgttgcttggtgatgtccctttctgttctcttcactcttggtcttgcgagagaaagccatgccagagacgaagatttttggcatgctgtttggccaaacactcccattccaagttcattgcgagatcttctaaagcctggccctgcaagtgttgaaatcgatgatcaccctatgcaaattgaagaaacacagtacccgaaaaccttcttctataaagaagaccttcatccaggcaaaacaatgaaagta

SEQ ID NO: 165377 - DNA, 256 bp, Glycine max
gctattttgattttaatttggttggcaccatcaacctctacgagtttatggcaaagtataattgcaaaaatctggttttctcatcatctgcaaccgtttatggccaacctgaaaagataccgtgtgaggaggatttcaagttacaagctatgaatccctatggacggaccaagcttttcctggaagacattgcccgagatattcagaaagctgaaccagaatggaagatcatattactgagatacttcaatccagt

SEQ ID NO: 165378 - DNA, 264 bp, Glycine max
cctcgagccgaatcggctcgagaattaagttagtagcgagagaggacgaaatgaaggttgtttcacttcttcgtcgtgctattcgctttggcatcctccattgcctttgcttatgatccaagccccctgcaagacttttgtgtggctatcaatgataccaaaactggtgtgttcgtgaatggaaaattttgcaaggatccaaagcttgctaaggctgaagatttcttctttcctggattgggacccggaaacacttcaaacccc

SEQ ID NO: 165379 - DNA, 260 bp, Glycine max
caagaccagagagagagacgaagccgaacgaaacataaataaaaccttgctcttttttcacgccctagctcattttcttctccgttctcttctctctgttcctcactcactcgcatttattcaccatgactaagcaacaagctaattggtctccatacgataacaacggaggatcatgtgttgcaattgctggagcagattactgcgtcatcgccgcggatacgaggatgtccaccggttacaatatcctcactcgcgat

SEQ ID NO: 165380 - DNA, 257 bp, Glycine max
ctttcaatgtcattaatggtggatcacatgctggaaacaaacttgctatgcaggagtttatggttcttcccgtgggaagttcctctttcaaggaagccatgaagatgggtgtagaagtatatcacaatttgaagtctgtgattaagaagaaatatggtcaagatgcagtaaatgttggtgacgaaggtggctttgcccctaacatccaggaaaacaaggaaggtttggagattgctgaaaactgccattgccaaagc

SEQ ID NO: 165381 - DNA, 254 bp, Glycine max
gttggaggaactattctgcgtagtgatctattggcaaattttttgacagagggcaattttagagcaagtgttgatttgcagcgcactcatcgtattaaaggaatgattaaaatggtggccacagttggtattcctgagaatacaggcatagcattggcctgtgctatgaatagttcttttagggggcgtgccagttctgatatttacaccatctgctctcaagactgtgaattatggaatcctgcttgcacaaa

SEQ ID NO: 165382 - DNA, 254 bp, Glycine max
cgctgccaccatcagagtctcttcctagggatgaaaccattggaggctatatctttgtttgcaacaatgataccatggctgagaatctcaagagacaactcttcggtctgcctccacgatacagagattctgttcgggccattactccggggttgccccttttcctttacaactattctactcaccaacttcatggaatctttgaggctgcaagttttggagggacaaatattgatccatcagcttgggaggat

SEQ ID NO: 165383 - DNA, 249 bp, Glycine max
agaattctgaaattgccatttggcaaaaaaactctagacactgaatcatgtcgtagcagacaagaagaatctagtgtaaaattctgtgaatcgacagatgctaatgatgtctggtataagaaaatggaggtctgcgttactccaagtcctaaagtttctggtgattataagccatttccagagaggctatatgccatccctcctagaattgctagtggctctgttcctggagtttcagttgagacatat

SEQ ID NO: 165384 - DNA, 241 bp, Glycine max
aaggtcacgaggagcactagctagtttcacaatttccaaatggctaggggattgaagaagcatctcaagaggctcaatgctcctaagcattggatgcttgacaaactgggtggtgcatttgcgcccaaaccctcatctggaccacacaaatctagggacagccttcccctcatactcatcctacgaaaccggctaaagtatgctctgacttaccgtgaagtctcgctattctgatgcagag

SEQ ID NO: 165385 - DNA, 152 bp, Glycine max
aagaaaacttaaatcaaaatacttaatagcatggcgatacatttatacaaaacttctaccccaagcacacgcaatggagccgtagacagtcaagtaaaatccaatccacgaaatcatttgatctatggacagcatcgttgtggtaaaggccg

SEQ ID NO: 165386 - DNA, 139 bp, Glycine max
ctcacggttaatgaaatattagggctcaacacacttggcatttccttggcacgcatagattttgcaccaaagggtttgaaccctccacacactcaccctcgcgggacagagattcttgtagtcttggaaggtaccctct

SEQ ID NO: 165387 - DNA, 246 bp, Glycine max
taggcaaacaggcttgaccagaaaccaggtggcacattggttcatcaatgcaagggtgcgtctctggaagccaatggttgaggaaatgtacaaagaggagtttggagattccgagatgaactgcaacctttcatctgagaacaacacggtcaaaggtaaaagagatgatgttcaagagtctgataacattaacaataataataataaatgggaagagtcacaggacaatttagtaactgttgacag

SEQ ID NO: 165388 - DNA, 248 bp, Glycine max
cattgcttaaagtcttgggaaggccgtttgatcaccactttccttgaaatgaaaacgttcaccttcaacgttgctctgctttcaattttcggaaaagaagagattctgtacagagatgctctgaaacggtgctactacactctggagcaagggtataactcaatgccaattaacgttccgggaacactgttccacaaggcgatgaaggcaaggaaggagcttgcacaaatcgtggcccaaataatctg

SEQ ID NO: 165389 - DNA, 248 bp, Glycine max
gagaaacttcctcgtcgcaaaatttttgacaaacctaagacgcgctgctccactattctacctatggagtttaatcttgtggttcgtcagaagtttttaaattttgtgaggttcattatgaagaaaagggacaagcttagttgtcaagttggaatcaacccatactccatggaatggactggtttggccaatagattactgagtaagggcaacgatattctgtgttgcgattatgctagttttgatgg

SEQ ID NO: 165390 - DNA, 248 bp, Glycine max
cgcgtcgctccgcaccagtttcaccgcacgaatatcttactgtttggagcgatccgagaaaaactctgtaaacatgttggtttaccaggacctccttacaggtgatgagcttctctctgactccttccgttacaaggaaattgagaatggaatgctgtgggaagttgaggggaagtgggttgttaaaggagcagttgatgtagacattggtgcaaacccttctgctgagggtggaggagaagatgagg

SEQ ID NO: 165391 - DNA, 236 bp, Glycine max
ggagatatcacggaagcaattaaaaaggccaatggcgttcattttcctgaagagaggctctgtaagttgctggttcaactgctgatggcacttgattacttgcatgcaaatcatattcttcatcgtgatgtcaagtgttcaaatatattcttgactaaagatcaagatatacgtctaggtgactttggtcttgctaaaatgttgacatgcgatgatcttgcgtcttcagtagtggg

SEQ ID NO: 165392 - DNA, 245 bp, Glycine max
gcaagtgcggagcccatttcctcctgttgagtatgaggggaaagtgtttgtgcctggccaggccaataatgcatacatatttcctggatttggtcttggtttaataatgtctgggaccattcgagtgcatgatgacctgcttctggctgcctctgaggctttggctgcacaagtgagccaagagaactttgataagggactcatatacccaccattcaccaccataagacagatttcagcacaca

SEQ ID NO: 165393 - DNA, 244 bp, Glycine max
agagtttcatcttgtaatcaaaagagtttatcttatagtaagaaatcgatgtcttactccattttaaggaacaaaacaagagaacaatagcctgacaaagggtttagccataaaatcgaatccatcattgatttgagatattgataaggtgaatactcatttctcgtcaatgctaggcataatgcgggtatagggacctaaaaaagattatcttttcttcctatcttatgaactttaaggtgta

SEQ ID NO: 165394 - DNA, 243 bp, Glycine max
aagagaatggctcccaagggtttaatctttttggctgtgttatgcttctcagcactgtcactgagtcgttgtcttgcggaggataatggacttgttatgaacttctacaaggaatcatgccctcaggctgaagacatcatcaaagaacaagtcaagcttctctacaagcgccacaagaacactgctttctcctggctcagaaacatcttccatgactgtgctgttcagagttgtgatgcttca

SEQ ID NO: 165395 - DNA, 242 bp, Glycine max
gattcttcattgaatcctggaatgacacacaatattggtgaattgggtttccttgccccccattttctggagtttgcaggaagcccgatcggctcgaggtttgtgttgcgttttgtttgtttacaggcacgcgttgaatattcagatctttactaagatgcataggtcggattacgcagagaggcagctgcggatcatgcagcagattgatgaggatcacactctcactcaactcgccaatg

SEQ ID NO: 165396 - DNA, 246 bp, Glycine max
cctcgagccgaatcggctcgagcccgctcccgaacctgcctccgccgatcctcccccggagacgaaggaggagaccaaacctcgaagccaaggctaagaaaaccaaggagcccaaacctaaaaaggtttccagacctcgcaaccctcccactcatccttcctacgaagagatggttaaagatgcaattacctcgctgaaggagaaaaccggttcgagccaatacgcgattgcaaagttcatcgagg

SEQ ID NO: 165397 - DNA, 252 bp, Glycine max
cgagcaccctcaatatccgccattgaattcttcttccatttctcttttttctgcatacccatttcgtttttcttcccaaatggccctttcttgctccaaagttttaagcttttatctctcgcccgttgtgggtggtggtgatgttccgaaaaagctcactttttcttcttttttgggtctttctaagggtgttggtggaagcaggagctcgagggtgtctgctgcttcaaatgcacccgcaccactcgctgg

SEQ ID NO: 165398 - DNA, 239 bp, Glycine max
gacaaactctggcgcaggagcttcagcagtagcaccgccgctatcatcgcgactctcgaagggcacgcaatgggacgcgctgataatcggtgggggtgagaacggcctgacggcgggggcatatctcgcccggggaggcctctcggtggcggtgcttgaacggcgcgacgtgatcggcggcgcggcgtctacggacgcgctggttccagggttgaagtgttcccggggcagttcccttc

SEQ ID NO: 165399 - DNA, 243 bp, Glycine max
caggtcattgctcagcttgaattgtggaaagagaagggttctgggaagtatgagaagaaggtgtatgtgttgcccaagcaccttgacgagaaagtggcttctctccaccttggccagcttggagctaggctcaccaagctttccaaagaccaagctgattacatcagtgtgcctgttgagggtccatacaagcctgctcactacaggtactgatccatcctattgggggagaataaacctaaa

SEQ ID NO: 165400 - DNA, 242 bp, Glycine max
cgaagaaaccctagccactctcccggcgtcacgatgcagatcttcgtgaaaaccctaacgggtaaaacgatcacgttggaggtggagtcttcggacaccatcgacaacgtgaaggccaagatccaggacaaggaacgcatccctccggaccagcagcgcctcatcttcgccgggaagcagctggaggacggccgcaccctcgccgactacaacatccagaaggagtccacgcttcacctcgt

SEQ ID NO: 165401 - DNA, 196 bp, Glycine max
agaatttgtgaagtgagagtccaacctttcattttcaattttcaaagatgcctcgtggaacacttgaagttgttctgatcagcgccaaaggaatcgatgacaatgattttctctccagcatagatccttatgtgattctcacatacagggcacaggagaaaaagagcactgtgcaagaagatgctggatccaagcc

SEQ ID NO: 165402 - DNA, 240 bp, Glycine max
gtagtgttcgtctgcgaaattgaaggtgatgatggattgtggggtgaagagacgcccgagtgttcgagaggaagatgctcaagtgatcatagtcaacaccattgggggctggaaacgaagtgcgtcgttcatgcgtgtacatgtcctataagggtaaatccatattgttcgattgtggaatacacccaggtttttcaggcatgtccgccttgccctatttcgacgagattgacccttcca

SEQ ID NO: 165403 - DNA, 219 bp, Glycine max
ctgaaaactggcgcgtaagaagatcagagagtatgactcaaagaggttgttgaaggagcactttaagagactctctggcaaggagttgccgatcaagtctgcagaaattaccgcatcaactgatttcactgagctacaagagaaggaaccctggctttgcatcttctaaattggttgttaaacctgacatgttatttggcaagcgcggcaaaagtggtt

SEQ ID NO: 165404 - DNA, 236 bp, Glycine max
ctcatcttctacagcattcttctgcaattcaaatcaaattttcacaccatgggttcctccaccaacgctcttcctctcaccggcaaaggcgtcatcgtgagcttcggcgagatgctcatcgatttcctgcccaccgtctcaggagtgtcccttgccgaggctccgggctcactcaaagctcccggcggcgctcccgccaacgtcgccatcgtcgtcgcgacgctcggcggaaaagc

SEQ ID NO: 165405 - DNA, 242 bp, Glycine max
acactcacatgtgctactcgaacttcaacgacatcatccactccatcatcgacatggacgccgatgttatcaccattgagaactctcgctccgacgagaagcttctgtcagtcttccgcgaaggtgtgaagtatggtgctggaattggccctggtgtctatgacatccactccccaagaataccaccaactgaagaaattgctgacagaatcaacaagatgctggcagtgctcgagaagaac

SEQ ID NO: 165406 - DNA, 239 bp, Glycine max
ctcgagccgggttcacgtttcacaatcactttttgcacttctctcactcgctcactcttctccttcctcttcgtgtggttttctttctcgaactcgaacgaagatgcgtgagattcttcacatccagggaggacaatgcgggaaccagatcggagccaagttctgggaggtggtgtgcgcggacacgggatcgattcaacggggaggtaccaaggggacaacgagttgcaactcgagcg

SEQ ID NO: 165407 - DNA, 240 bp, Glycine max
gttggtctgctaccattgtttgatcctcccaggcatgatagtgctgaaaccattcgaagagctcttaaccttggtgtcaatgttaagatgattactggggatcagcttgccattggaaaggaaacaggccgaagcttcggaatgggaacaaacatgtacccttcatcggcattgcttggccaagacaaggatgcttctatttcagctcttccagttgatgagttgattgagaaggctgat

SEQ ID NO: 165408 - DNA, 231 bp, Glycine max
acgcatcattcaaatttctgccctatcaactttcgatggtaggatagtggcctaccatggtggtgacgggtgacggagaattagggttcgattccggagagggagcctgagaaacggctaccacatccaaggaaggcagcaggcgcgcaaatcacccaatcctgacacggggaggtagtgacaataaataacaataccgggctcattgagtctggtaattggaatgagtac

SEQ ID NO: 165409 - DNA, 215 bp, Glycine max
tattattattcaatagaaaagacagatgagtccaacatgggtttttgtgttaggtgttgcagcaatgttggtggttgtgagtggacaatcatcagtgaagcctttggtgtagacagtgaaggggaagaaggtgtgtgacaaagggtgggagtgcaaaggttggtctgcatattgctgcaatgagactatctccgactacttccagacataccagt

SEQ ID NO: 165410 - DNA, 242 bp, Glycine max
cagcggggctacccgctagagtttaagcatatcaataagcggaggaaaagaaactaacaaggattcccttagtaacggcgagcgaaccgggaaaagcccaccatgaaaatcggtcgccctcggcgtccgaattgtagtctggagaagcgtcctcagtggcggaccgggcccaagtcccctggaagggggcgccagagacggtgagagccccgtcgtgcccggaccctgtcgcaccacgaggc

SEQ ID NO: 165411 - DNA, 239 bp, Glycine max
actaactaaagccgagcagcgagagagagacaccctagcaaaaatgccggctggtcacggtttgagatcccgcaccagagattccttctctcgtcccttcaggaagaagggtaccatcgccctcaccacatacctcagaacctaccacgtcggcgattatgtcgacgtcaaggttaacggcgccgtccacaagggaacgcctcacaagttctaccatggccgcaccggtcgcgtctgga

SEQ ID NO: 165412 - DNA, 221 bp, Glycine max
gcaacctcagacgcgaatctcccattctgctctgcctgcatgaacagacacacatagtcacattccatttccatgtctgcgtcatgcccggtggtggactgtgtgttcgtgctgggctgcgcgcggtggctgtggaagcgctgcacctacgtgggcagctacgacagcgccacgtggccctccgccaccgccgacgagttcgacccggtcccacgcgtctg

SEQ ID NO: 165413 - DNA, 218 bp, Glycine max
cacagagcaagaacactgttccaatacggaatctaaggcaaagcaaaccaaacatcttgaatcatgggttcaacaggtgagactcagattaccccaacccacgtatctgatgaagaagcaaaccttttcgccatgcaactagccagtgcttctgtccttccaatgatcctcaaatcagcacttgagcttgatctgttggaaatcatagccaaggctgg

SEQ ID NO: 165414 - DNA, 287 bp, Glycine max
taccaataatcctggctgcttgtgacaaacttctcaactcaaatggtgaggctgtaccccttgatgaagaatcaactagccatcttaaggctacaataaatcagtttgcaagtgaggcacttagcacactatgccttgcctatgtggaattggaaaatgggttctctcctgaagaccctattcctgtttctggatatacatgcataggagttattggtatcaaagatcctgttcgtcctggtgttaaggaatctgtggcaatgtgtcgttcagctggaataacagtt

SEQ ID NO: 165415 - DNA, 286 bp, Glycine max
ctaccttttgatttgtgaaaggaaagcaaacatggttgatcaggtccaacaccctacaatcatggacaaggttgctggtcagctccatctccgttctggtctttcatctggtattagaagttatgatggagcctaccgccacccagctatgtaccaaagaccctcttttgggaattactcgaatgctgcattgcagtttcctgtgatgcccacatgcaaagctaccatggatttgtctgctactgcaacatctgcctcacccgtctttgttgctgctccagcagag

SEQ ID NO: 165416 - DNA, 279 bp, Glycine max
gggatgtaatttcaagccaggatgcagttagttttgtgcggcgtggattaagaaggcatgacgatcctcaacaatgtgccagagagcttgttaaggaagcattgcgcctacacacatcagataatcttactgtgattgttatctgcttgtcccctgtccaaagcattgtcgaatcatgtccaccccagaggcgaagattcagagcttgttctttgtctgaagaggccaggaacagattaaggagcttgctagagggaaactgaatgtaaatacggttct

SEQ ID NO: 165417 - DNA, 283 bp, Glycine max
gaacgtgattatgctaattctgtaccttgaggtagatatcgacggcgcggtatagatcgtcgtcggattttctcgcgcctttgggaatgaggatggcgatgccgttgaatttcgagatggagagttcggcgtacgcggcgatctcagcgaggtacgagtcgacggttttggccacgcgctgcatcgtggcggagaagtcctcgttgaagttgacgccggcgttgaacaccgtcgtgcccttctccctctccacaaaaccggagattcatctcctcacgctgtc

SEQ ID NO: 165418 - DNA, 281 bp, Glycine max
ctttgtcacaagatatcagattttgggcttgccaagttgccgaaaaaagacgacatggtgaccatgtctaggaggaggggcacaccagggtacatggcaccagaatggatcactgcagacccaattacctcaaaggctgatgtgtatagctttggcatggtgcttttggagcttgtgagtgggattaggaactttgagatccaaggttctgtggttaggagtgaggagtggtacttccctagcagggcctttgataagatgtttaaggagatgagagtgga

SEQ ID NO: 165419 - DNA, 274 bp, Glycine max
gcaaatcaaattcttcaccttcctctgcatctcccactaatgcatggttatcacaagagcttgattccactgctcagcagaggttgcgttgggtgcagaagaactacttgatttacaattactgcaccgataacaagagatttcctcgaggccttccactcgaatgcaaacactcctagagcctataggactcacatctcgcactacccataacaagtgttgcaatataatcttatgaaccattcttttaatttttgtattccttttttttttt

SEQ ID NO: 165420 - DNA, 282 bp, Glycine max
  unsure (1)..(282): unsure at all n locations
gagaaaatcaggtatgaaagttcacttctccgttcaactccttctttctctgtttctactgtctgcatttcacgttccacatatggtagtacataatgtggagnttagagctctgatggagttgaagtcctctctggatctagagggaaagatccttggctcgtggatcagtgatggtgatccatgcagtggcttcttcgaaggggtttcgtgcaacgagcatcgcaaagtggctaacatctctttgcagggaaagggtctttcgggttggttatctccagc

SEQ ID NO: 165421 - DNA, 281 bp, Glycine max
gcgcttcacgatgggtgcttacaagtatgtttcggagctatggcgcaagaagcagtctgatgttatgagattcttgcagcgggtgacgtcgctgggagtaccgccagcaaccttctattgtccgtttgacaaggtctactcgcccagacaaggctcgccgcttgggtttcaaggctaagcagggttatgtgatttaccgtgttcgtgtacgaaggggtggccggaagagaccagttccaaaaggtcttgtttatggtaagcccaccaaccaaggtgttact

SEQ ID NO: 165422 - DNA, 270 bp, Glycine max
ccgctcgagccgctcgagccgctcgagcggctcgagctgattcaaatccccagcaaagaggacctcaggcactaaaacctcttcagtgtcagtgactgcaagatgtactggcaaagcaatggagactaccttgctgttaatgtagagaggtacacgacaacgagataaagcacatacacaggctttgagctttaccgtataaaggcacgggctataccaattgaacttttggcgcttgagcataagaatgataagatcattgcatttgct

SEQ ID NO: 165423 - DNA, 284 bp, Glycine max
cctcgagccgattcggcccgagatcgaatataagccaaagcaggacttacagggaatacttcggattcaaaaatgcttccgcggtcatcgagctcttgtttatttctgacaacttaagaatggagtgacaacattgcaatcatttattcgtggagaaaatacaagaaggaaatatggtgttacagtgaagtcttcagtaacaatttattctagaatactggaggagatccatgcaatcatactatcacaatctgtaattcgtggttggctggttagaagggggg

SEQ ID NO: 165424 - DNA, 269 bp, Glycine max
ataaaaaaaaaaaacgtgtgtgtgtgtgtgttactgttagccgaggcagatcggaaccgggaagttgggcgctctttgctagatggaaggagttgggccccggctggggcggtcctcgacccggaacggaccggccacggtgttcactggaccggtgcggaagtggaagaagaaatggatccacgtgtccccctcttctgcttcctctaattccaacgccaataaccacgcttccaatgcctctcatcttctcctctacaagtggaccc

SEQ ID NO: 165425 - DNA, 280 bp, Glycine max
ctttattttaggtatttggggaatcctccttaatagacgagatattcttattatgttaatgtcaattgaattaatgttattagctgtgaatttgaactttttggtattttccgtttctttggatgatacgatgggtcaattatttgctttattggttttaacggtggcagctgcggaatccgctattgggttagccattttcgttatcactttccgagtccgagggactattgctgtagaatttattaatagcattcaaggttatacatgactcctagag

SEQ ID NO: 165426 - DNA, 270 bp, Glycine max
aaacaagtgtttcgaatagattatcctaagtctttgggaatagtgctgcaatggcttcaagtcaggaggaggtgatccttttgggagctactggaagcccatttgtgtgcagggttcatattgccctgaagttgaagggagttcaatacgcatatgtcgaagaaaatttgaggaagaagagtgaactgcttctcaaatccaacccagttcacaagaaggttccagtgtttattcagaatgagaagcccatagcagagtctcttgtgattg

SEQ ID NO: 165427 - DNA, 281 bp, Glycine max
gcaaaaagaaagaatcccaggcgaggagaaagatggaggggaacgagcaggatgtgtcgttgggagcgaacaagttccccgagagacagccaattgggacggcggcgcagagccaagacgacggcaaggactaccaggagccggcgccggcgccgctggttgacccgacggagtttacgtcatggtcgttttacagagcagggatagcagagtttgtggccacttttctgtttctctacatcactgtcttaaccgttatgggagtcgccggggctaagtct

SEQ ID NO: 165428 - DNA, 280 bp, Glycine max
gaggtaggaggcagacgcgcggagaagacgtggttcaccctctcaaggtctctttggaggacctttatcttggaacttccaagaagctctccctctccagaaatgtcatatgctccaagtgcagtggcaagggttctaagtctggtgcttcgatgaagtgtgctggttgtcaaggaactggtatgaaggtttctataagacatcttggcccatccatgattcagcagatgcagcatgcctgcaatgaatgtaagggtactggagaaactatcaatgacag

SEQ ID NO: 165429 - DNA, 281 bp, Glycine max
gttattagggtttttgagtgcggcggtccaaacactcttctctgcagcttttgcctacaactcccttcaccatggctgaacaaaccgagaaagcttttctgaagcaaccaaaagtgcctctcagcacaaagaagactgggaagggaaagagacctggaaaaggtgggaaccgcttttggaagtccattgggcttggatttaagactcccagggaagccatcgaaggaacctatattgacaagaagtgccccttcactggcaatgtttccatccgtggccgt

SEQ ID NO: 165430 - DNA, 218 bp, Glycine max
atcgaatctccgaagatggccgcgagcgatcgcacagtgttgcaattctcttcatcatcttcttcttcgcagagcttgtccgcgaaggtccaccctctggtcatctccaacatctgcgattgctacgttcgacgccctgaccatcctcatcgcgtcatcggaaccctactcggctccgtccttcccgatggaaccgtcgatatccgcaattcccatgc

SEQ ID NO: 165431 - DNA, 278 bp, Glycine max
gtgagagtcagttctctctgcttctctctcttagactcatcactctattgcgtgcatagcaatcgaacccgattatggttaagagtaacctccctcgaagaatcatcaaggaatcgtagcgtttgctcagtgagccagtacctggaattattgcgtccccttcggaagacaatatgcggtatttgaatgtgatgatccttggcccaactcagtcgtcttattaatggggagttttcacgttggaatgattcctgccagaagaatatccagtggctgct

SEQ ID NO: 165432 - DNA, 273 bp, Glycine max
tccggatcggatgatgttgactttttccgtgtttccttctcccaaggtttctgataccgttgtggagccttacaatgctactctttctgttcaccagcttgttgagaatgctgatgagtgtatggttttggacaatgaggctctctatgacatctgtttcaggactctcaagctcgctacgcccacgtttggtgaccttaaccacctgatatctgccaccatgagtggagttacttgttgtctacgtttccctgggcaactgaactctgatct

SEQ ID NO: 165433 - DNA, 88 bp, Glycine max
atcaaacaaaccaaggacgagaacacgatgttgcttgaacttgcacttggtttattggttttggctctgtttctgcacttgcgtccca

SEQ ID NO: 165434 - DNA, 269 bp, Glycine max
caaagatgccaaagctagtttttgctgcatgtatcgtctcacttgcatcaattggattggcagctctgcctgagacatatatcattggtgactccttgacagatgttggaaacaataattatctacgatattcattagccaagtctaactatccctggtatgggattgactacagtggtggacatgctactggaagattcaccaatggaaggactattggtgatttcatatctgcagagcttggaatcacatcaccaccagcttatctg

SEQ ID NO: 165435 - DNA, 276 bp, Glycine max
cgatgtgtcgttcggagcgaacaagttccccgagagacagccaattgggacggcggcgcagagccaagacgacggcaaggactaccaggagccggcggcggcgccgctggttgacccgacggagtttacgtcatggtcgttttacagagcagggatagcagagtttgtggccacttttctgtttctctacatcactgtcttctccaccttcaaccactacctctccgtcacccacctggccgaagagatcaaccgccggcagaccaatcacgtcct

SEQ ID NO: 165436 - DNA, 277 bp, Glycine max
tttaaagcacacacaaagggatcatatatcttggttgcaccttggtaaggtgagaaaatatggcatttgcaggaacaactcagaagtgcatggcttgtgacaaaacagtttatctggttgataagttgaccgcagataaccgagtgtaccataaggcttgcttcagatgccaccactgcaaaggaacactcaagctcagcaactataactcttttgaaggagttctttactgcaggccacactttgaccaactgttcaaaatcatggtagtctgaca

SEQ ID NO: 165437 - DNA, 275 bp, Glycine max
  unsure (1)..(275): unsure at all n locations
caatagctcctctaatccgttcgtttcggtttccggagacgtcgcttgtctcgtctgttgttgtcaatgtaactcaacgacgctccttcaccangcantcaacgncgaaccgcaacggaacgattctattgttcctcttgcagcaactatcgttgctcctgaggttgacaaggaagaggaagattttgagcaaatagcgaaacaccttgaaaatgcatctcctcttgacattatggatagggccctcgagaaatttgggaacgacatcgctattg

SEQ ID NO: 165438 - DNA, 260 bp, Glycine max
  unsure (1)..(260): unsure at all n locations
cgcgatcttgacctttattcctattgtgagttctgcttgctaccattccaattcaagtgtcatgtgggctatgtcccttctggccaaagagttgtgggtttaagcaaactctctcgagtggtttctctnattgctaaacgactccaggagcctcagcgtcttgcagatgaggtttgttcagcattgcatcaagaaatattgccagcaggtgtagctattgtacttcagtgtacacacatcccctttccacacatagaatc

SEQ ID NO: 165439 - DNA, 233 bp, Glycine max
ttttgcgttcattctgttttcctgttgaagtctttccctagccaatggccaccgatcgtttgacccgggttcacagtctccgtgagaggcttgatgaaaccctcactgccaacaggaatgaaattttggcccttctgtcaaggatcgaagccaagggcaagggcatcctgcaacaccaccaggtcattgctgagtttgaggaaatccctgaggagaacagacagaagctcact

SEQ ID NO: 165440 - DNA, 109 bp, Glycine max
ccgatcgcaaaatgcccgccgtttatggagctcgcttgaccaccttcgaagactccgagaaggagagtgaatacggttacgttcgcaaggcttcacgacccgtcgtcgt

SEQ ID NO: 165441 - DNA, 278 bp, Glycine max
gcagggagctctgccgcctccaacaaaacagagttcagaacacaaaccctcgaaccgaacgtttttgagggttgatagagcacgatggttcagtacaattttaagaagattaccgtggtgccaaatgggaaggatgtggtcgacattatcctctctcgcacccagcgtcagacaccaaccgttgtgcacaaaggatatgcgatttcacggctgcgccaattctacatgcgcaaagtgaagtatactcagcagaattttcacgacaagctctccaccat

SEQ ID NO: 165442 - DNA, 277 bp, Glycine max
gcaccttagtaccttgaatcattatcattcgggtaatggacacatcactagtgtttactgtgaggaggagtgaggcagagctgatagctccggcgaacccacccctcgtgaagtgaagctactctcagacatagatgaccaagatgggttacgtttccaaattccggtgatacagttctatcgccacgacccatcaatggcagggaaagaccctgtcgatgtgataagaaaggctgtggccaaaacgcttgtgtgttactatccttttgcacgtagg

SEQ ID NO: 165443 - DNA, 276 bp, Glycine max
ctgagtttccacactgcataccttacgtcttccgaattcgaagttcatttgcaagatggctaaggaaaaggctcagatcaacattgtggtggttggtcatgtggaccctgaggaggcaaccacgattaacgaggtgaagagccctgttgtggagaaagaagctccagggcatgccatatgagggcatgcacgtacggcctcggaggggaaccagaaaattatgttaacaaaataatctggaaccctaatgtatcagtgtcatcatcagtgtgtagt

SEQ ID NO: 165444 - DNA, 275 bp, Glycine max
cggtctcttgggcaggcaaaatcgtaccccaaccattgttattgtttggtccgttcttcttgcttcaatattctccttgctgtgggtcacgattgatcccttcacctctgactccaacaaattaaccaatggtcaatgtggcatcaactgttagttctcttgtatgattcattttgtgttgttattcccttttgcttggagatacacaaggttgctgtcgtgtatatagcaagaattttcagcctatcaaagttgtctggaggattgaacccctg

SEQ ID NO: 165445 - DNA, 272 bp, Glycine max
gtccggcagtatcccaacagtagaagtttggtggcctcagggatggatattatatccatgggcaatgcgccattatcatgtttgatgttactgcccgactaacttacaaaaatgtccctacctggcatcgggatctttgccgggtctgtgagaacatcccaattgttctttgcggtaacaaggttgatgtgaagaacaggcaagtgaaggcaaagcaggttactttccacaggaagaagaatttacagtactatgagatttcagctaaaagc

SEQ ID NO: 165446 - DNA, 266 bp, Glycine max
gtttgttgttgtaactcgttcttcttcttttgttgttctgtgtttgtgtttgttttttctctcacctgaaaatgtcttgctgcggtggtaactgtggttgcggaagctcctgcaagtgcggcaacggctgcggaggctgcaagatgtacccagacttgagctacactgagtcaaccaccaccgagaccttggtcatgggagtggcacctgttaaggctcaatttgagggtgctgaaatgggtgtgcccgctgagaacgatggctgc

SEQ ID NO: 165447 - DNA, 263 bp, Glycine max
atcatattcctctctcattctcactataaacacacaacccttcccatcctaattaaggtgaaaatgaaggcatcacccattgcttggttcactttggtggttgtgtttcttgtggctgaagttcaagtttcaatggcagtcacatgcagcccagtgcagctgagtgcatgtgtaagtgcaataacctcttcaacccctccatcaaacctatgctgctccaagatcaaagaacagataccatgcctctgccaatacctcaagaa

SEQ ID NO: 165448 - DNA, 269 bp, Glycine max
ctcatctgtatgcctatgcttgtttatcattttcttactttcctctcacgctctgccacaaaactccgtctccgcaataacggaataaaaaaacaagtttaattactattatggcgccgagggatcataagacaagcaacgctaaggctaacggtaacggtaacagcggggtgaaggaggtgcattttcgtggagtgagaaagaggccgtgggggagatacgccgcggagatcagagatcccggcaagaagagccgcgtctggctcgga

SEQ ID NO: 165449 - DNA, 148 bp, Glycine max
ctcgttcttcttcttttgttgttctgtgtttgtgtttgtattttctctcacctgaaaatgtcttgctgcggtggtaactgtggttgcggaagctcctgcaagtgcggcaacggctgcggaggctgcaagatgtacccagacttgagct

SEQ ID NO: 165450 - DNA, 277 bp, Glycine max
ctcgagccgtgcgactcttgtttctctctctttgtttcggtgaattgaagcagcggaggagataacgagtcgcatgaaggaagatgagaagaacgagcgcgtgattcggggtcttctcaagcttcaacataatcgcagatgcattaactgcaacagtctgggaccacaatatgtgtgcacaaacttctggacgtttgtctgcacaaactgcagtggaatacatcgggaattcactcatcgagtaaaatcagtttcaatggctaagtttacttcacaa

SEQ ID NO: 165451 - DNA, 284 bp, Glycine max
tcatagtcgtggccgtgtcgcagcaaaaccaaaccacatattaacttgtttgctctaagtcatggctctgatcttgcacgcaaccagagcaaccaagaatgctttcaagactctgattgcggcagagtacagtggcgtccaagtggaattggcccctaatttcgagatgggtgtctctaatagaatccctgaattccttaaaatgaatcccataggaaaggttcctgtcttggaaacgcccgatggtccagtctttgagagcaatgccattgctcgttacgttg

SEQ ID NO: 165452 - DNA, 275 bp, Glycine max
ctgggggaatggaagagaaatactccagcctggaaattgtggaggagagtccaaactcgggtgtgttctatcttatcttaaatcgtccgtcacgacggaacgctctctcgcgcgaattcttcagcgagttcccgaaagctctgcacgcactggatcacaacccggaggtgaaggtgatcgtgttgtccggcgccggggaccacttctgctccggcatcgacctctccctcctgggatcaaccgccgcgagttcgggttcctccggctccggcgaa

SEQ ID NO: 165453 - DNA, 282 bp, Glycine max
tctcaagattctaagagagattttgctgctctttgaagaagggtgtttgcttgatcttcgtgatgtcgctgctctcagatctcatcaaccttaacctctcagacactactgagaaggtgatcgcagagtacatatggatcggtggatcaggaatggacctgaggagcaaagcaaggactctcccaggaccagttagcgacccttcaaagcttcccaagtggaactatgatggttccagcacaggccaagctcctggagaagacagtgaagtgattatatacc

SEQ ID NO: 165454 - DNA, 282 bp, Glycine max
agcagctgagcttgtttccgtcgccgcttcacccaccgtagcaaccatgatcattcccgagaagaaccgtatagagatctgcaaatacctcttccaagagggagtttgctttgcgaagaaggacttcaatctggcaaagcacccacagattgatgtgccgaatctgcaggtgataaagctgatgctcagcttcaaatccagagagtatgtgagggagacatttgcgtggatgcactattactggttcctcaccaacgatggaattgagttcctcaggacata

SEQ ID NO: 165455 - DNA, 273 bp, Glycine max
ctttattttaggtatttggggaatcctccttaatagacgaaatattcttattatgtcaatgtcaattgaattaatgtcattagctgtgaatttgaactttttggtattttccgtttctttggatgatatgatgggtcaattatttgctttattggttttaacggtggcagctgcggaatccgctattgggttagccattttcgttatcactttccgagtccgagggactattgctgtagaatttattaatagcattcaaggttaaacatgact

SEQ ID NO: 165456 - DNA, 274 bp, Glycine max
  unsure (1)..(274): unsure at all n locations
ctcagttcacagagaaagatggctgcggaaaacgttgtagagttcacagacttacccgtcaatcganctagagaagaagaagaagaagaagaagaacaaaccaatggagtctccaacgacgccgtttcaacgctacccaatgaccctcaataccctggtatctctgctgttattcccggttggttctcagaaatcagcccaatgtggcctggtgaggcgcactccttgaaggtggaaaagattttgtttcaagggaagtctgactatcagaatg

SEQ ID NO: 165457 - DNA, 236 bp, Glycine max
cattacagggtgttcgattagagtcatgcacagaagacaggcaggggcttctagcagaagtggtgagaacattccgagagaatgggctcaatgtgaccagggctgagatatctaccatagggaatatggctaaaaatatattctcatgtaacggatgcgattggaaatccagctgattccaaaattatcgaatctgttaggcagaaaattgggttaagcaatttagaggtgaagga

SEQ ID NO: 165458 - DNA, 278 bp, Glycine max
actaccactaaagtttacattgtttactattctatgtacggacatgttgagaagctagctgaagagattacaaaaggagctgcttctgttgaaggagtagaagcaaagctatggcaggtacctgaaacactgcctcaagaggtccttgggaaaatgggagcacctccaaagagtgatgtaccacattattacacccaatgagctacctgaggctgatggcttattgcctggtttccccacaagatctggactgatggctgctcaattcaaagctttcc

SEQ ID NO: 165459 - DNA, 282 bp, Glycine max
cgcgttgctctgcttcaacattgcggaagcagaagaagcgccgcagctatggtgaagtactccagagaacccgacaatcccaccaagtcctgcaaggccagacgcgctgacctcagagttcattttaagaacactagggagactgcctttgccatcaagaagttgccccttgttaaagctaaacgatacttagaggatgttttggcccacaaacaggctattcctttccgacgcttttgtggtggtgttgggaggacggcccaggctaagaacagacactcc

SEQ ID NO: 165460 - DNA, 268 bp, Glycine max
ggctcgagcacaaaacttgctatagcagtaaactataactcatttgagactctgtgagaattgagaaatacctaaagatgttgaggttcaagagcaaggaggagagtactctgccaaagactaccatgaccctcctccagcacctttgttcgacccagaggagctcacactatggtccttctatagagccctcatcgctgagttcatagcaacccttctcttcctttatgtcactgtgctcaccattattggctacaaaaggcagact

SEQ ID NO: 165461 - DNA, 146 bp, Glycine max
ctaattctcatttcttccctcaaatttcatgatccgtgagatgcttcatatccacggtggccaatgcggcaaccagatcggcgccaagttctgggaggtggtttgcgcgtagatcgggatcgactctatcggaatgtacggtgggg

SEQ ID NO: 165462 - DNA, 274 bp, Glycine max
aaataattctggctgcttgtgacaaagttctcaactcaaatggtgaggttgtaccccttgatcaagaatcaactagccatcttaaggctacaataaatcagtttgcaagtcaggcacttagaacactatgccttgcctatgtggaattggaaaatgggttctctcctgaagaccctattcctgtttctggatatacatgcataggagttattggtatcaaagatcctgttcgtcctggtgttaaggaatctgtggcaatgtgtcgttcagctgg

SEQ ID NO: 165463 - DNA, 272 bp, Glycine max
ggagaaagaggtcttgtgtgatctgagaatatgccttgcttgttattgttggtatttctgattcaatcatgggcagtgaaggcacaacaagtctacgataggaacatattcatattagcggggcagagcaacatggctggtcggggcggcgtgctgaacaacaccggcacggggatcgccacgtgggacggcgtggttccaccccagtcccgtcccaacccctcagtcttgaagctggacgcgcacttaacgtgggtggaggcccgtgagcc

SEQ ID NO: 165464 - DNA, 280 bp, Glycine max
ataagatctcgcaatggttaaagttaatgtagcatgtgctgctgttggcttgacatcaagttacactccaactccattgttggaatctggtttgcaaaaagacagagggttaattgtggagtactttggaaggatgtcttacgttgctcataacgttaatcagccccaagagaaagatttgttggagggaaatttttcctttgatattaaatctcgctctagattggaaaaagtttcctctacaaaagcacaatttgttagtggaaaactttcaaatatg

SEQ ID NO: 165465 - DNA, 96 bp, Glycine max
accgattgctagaatggaatttcgatgctcagtcatctcttttaacattctcatctctcttgctcttgcaggagagagccatgtccatgcatcgct

SEQ ID NO: 165466 - DNA, 274 bp, Glycine max
cgtgctctggatcacatctctgagctctttgactgctcccataccagctccaagctcaagaagaagcgcaaacaattccagacggtggaggtgaaagtgaagatggactgcgaagggtgtgagagaaaggtgaagaaatcggtggagggaatgaaaggggtgacagaggtggaggtggatagaaaggccagcaaggtaactgtttccggctatgtggaaccctcaaaggtggtttctcgcatcgctcaccggactggtaagagagcggactatg

SEQ ID NO: 165467 - DNA, 274 bp, Glycine max
  unsure (1)..(274): unsure at all n locations
gtgcgtgggagggtccgaagaagcacaacgttggagaaagtgattctcgttctgtccttctactcacaagagcancaacaacaacatcagaatcagaaacagcaatggccaacactaacttggacgatgttccctctctggatctcatgactgagctccttcgtcgcttcaagtgctcttccaaacctgacaagcgtcttattctcattggcccacctggatctgggaaaggcacccagtcaccaatcataaaagatgagtactgcttatgcca

SEQ ID NO: 165468 - DNA, 148 bp, Glycine max
ccgattgctagaatggaatttcgatgctcagtcatctcttttaccattatcttctctcttgctcttgcaggagagagccatgtccatgcatcgctacctgaggaagattattgggaagctgtttggccaaacactcccattcccactg

SEQ ID NO: 165469 - DNA, 277 bp, Glycine max
aaagaatcccaggcgaggagaaagatggaggggaaggagcagtctgtgtcgttgggagcgaacaagttccccgagagacagccaattgggacggcggcgcagagccaagacgacggcaaggactaccaggagccggcgccggcgccgctggttgacccgacggagtttacgtcatggtcgttttacagagcagggatagcagagtttgtggccacttttctgtttctctacatcactgtcttaaccgttatgggagtcgccggggctaagtctaagt

SEQ ID NO: 165470 - DNA, 146 bp, Glycine max
atctgacataacttgtactttccctgtgaatggaaagtttacaagtgatcaatctcttatatatagtgctgtgctagatgctcataatgccgttatatctgcaatgaaacctggaataaactgggttgatatgcacatattagcag

SEQ ID NO: 165471 - DNA, 275 bp, Glycine max
  unsure (1)..(275): unsure at all n locations
gtgatttcagtgagtgatcggtgttcacttgatctcatcataatcgtcagcgtcaattgaataagatcncgatcagaaacatcgccgtcggaaggcctgaagaggcgactcaccccgacacgttgaaggcggctttggctgagttcatctcaaccttcatcttcgtgttcgccggctcaggctccggcatcggctacaacaagctcaccgacaacggcgctgccacccctgccggcctcatctccgcctccatcgcgcatgcattcgccctcttc

SEQ ID NO: 165472 - DNA, 260 bp, Glycine max
gaacgtgattatgctaattctgtaccttgaggtagatatcgacggcgcggtatagatcgtcgtcggattttctcgcgcctttgggaatgaggatggcgatgccgttgaatttcgagatggagagttcggcgtacgcggcgatctcagcgaggtacgagtcgacggttttgcgccacgcgctgcatcgtggcggagaagtcctcgttgaagttgacgccggcgttgaacaccgtcgtgcccttctcgctctgcacaaaacc

SEQ ID NO: 165473 - DNA, 274 bp, Glycine max
  unsure (1)..(274): unsure at all n locations
ctctttccaccaaaccattcacacccgncgctctctccggcttcgcttctctcaattccgatctcggacccctctcccccgcctacctccgactctcactccgtcctcgtcttcccaagagacttcacatacaggcggctgggagtacctatggaaatcactttcgtgttacaacatatggggaatcacatggaggaggtgttggttgtgttattgatggatgtcctcctcgccttcctctctctgaagctgatatgcaagtggatcttgacag

SEQ ID NO: 165474 - DNA, 146 bp, Glycine max
ctaattttcatttcttccctcaaatttcaaaatgcgtgagatccttcacatccagggtggccaatgcggcaaccagatcggcgccaagttctgggaggtggtttgcgcggagcacgggatcgaccctaccggaaggtacggtgggg

SEQ ID NO: 165475 - DNA, 274 bp, Glycine max
ttccattctctctgtgtatctccctacctctcccttcaagatgcagatcttcgtcaagaccctcaccggcaagaccatcacccttgaggtggaaagctctgacaccatcgacaacgtcaaggccaagatccaggacaaggaaggaatccccccggaccagcaacgtctcattttcgccggaaagcaacttgaggacggccgtacccttgctgactacaacattcacaaggagagtactcttcacctcgtcctccgtctccgtggtggcatgcag

SEQ ID NO: 165476 - DNA, 275 bp, Glycine max
  unsure (1)..(275): unsure at all n locations
gcaagaatggcacttcgttgcttggtgatgtccctttctgttatcttcactcttggtcttgcgagagaaagccatgccagagacgaagatttttggcatgctgtttggccaaacactcccattccaagttcattgcgagatcttctaaagcctggcgctgcaagtgttgaaatcgatgatcaccctatgcaaattgaagaaacacagtacccgaaaaccttcttctataaagaagacttcatccaggcanaacaatgaaagtacaattcagcaag

SEQ ID NO: 165477 - DNA, 280 bp, Glycine max
cggaggttcacattcacattacaagcaacaacttaacgcttaacaacagcactctccctaatccttctgtgtatgcaaaatgagaccatgcaaatgcaaatgcaatgttctctctgctctcattcttcttgtcacattcctttttattgcttcttccgtccactgtgaagacccatatcggtacctcacttggaaggtcacctatggtgacatctatcctcttggtgtcaagcaacaagggatcttaattaatgggcagtttccagggcctcaaatagat

SEQ ID NO: 165478 - DNA, 215 bp, Glycine max
cggctcgagcacactcccatcttctcatctcgtaaaccctaaaccccgttttcagtgacatcgagatcgatcgaacatggatgaggagtacgatgtgatcgtgttgggcacgggtctcaaggagtgcattctcagcggtcttctctccgtcgatggcctcaaggttctgcacatggacaggaccgactattacggaggagaatccacttcgctca

SEQ ID NO: 165479 - DNA, 283 bp, Glycine max
tcgtatctagaccataacaactctctatcactcaacactttcacaaacactttctgaaaaacaattcgtttcttttccctaccatggccagatcacaacagcgataccgaggcgtccgacaaaggcattggggctcttcggtctccgaaattcgacaccccatattgaaaactaggatatggctagggacttttgaaactgctgaggatgcagctagagcctatgatgaagcagcaaggctaatgtgtggcacaagggcaagaacaaacttcccttacaaccc

SEQ ID NO: 165480 - DNA, 269 bp, Glycine max
taggacctgaagctccaaagatcttcaactgtgtggttgaaattgggaaaggaagtaaggtgaaatatgaacttcacaaaagaactggtcttattatggttgatcgtatcctttactcatcggctgtgtatcctcacaactatgggtttatcccacgtactatttgtgaggatggtgatcccatggatgtcttggttatcatgcaggagccagttcttccaggttgctttctacgggccaaagctattggactcatgcctatgattgat

SEQ ID NO: 165481 - DNA, 288 bp, Glycine max
cggtattccgctcgtgctcgttgcgttgcagtgggtccatgtcctcagcgaaggatgggccacacccctgaaaggcttcatgagagaagccgagttcctccaaacgcttcatttcaactcgctccgactcgatgatgggtcccccgtgaacatgtcagtgcccatcgtgctggctattgatgatgcgcagaagcatcggatcggggataacaataaggttgctctttttgattccaagggagaccccgttgcaattctcaataatattgagatttataagcatcctac

SEQ ID NO: 165482 - DNA, 268 bp, Glycine max
ctctatattccattgccacccagttttgaatatatttttattccttctttgtttcttcactttcttccatacacataaccatgtcttctcagactgttgtcctcaaagttggtatgtcatgtcaagggtgtgctggagcagtgaacagggttttgggaaaaatggaaggtgttgagtcatttgacattgatctgaaggagcagaaggtgacagtgaaaggaaatgtggagccagatgaagttctgcaagccgtttccaaatctgggaa

SEQ ID NO: 165483 - DNA, 282 bp, Glycine max
acgtaatatcggacttcagctcgatctgatctgtttcgtgttgtagctatctgatcgtaaatgttcgcacgcctcgccgcgattcgcttctacgagatccgtcagatcttccgtcagccttctagggctttctcaaccgctactaactactaccttgacacaccggacaacaaccctaaacttccatgggaattcatcgatgccaatcaagcaaaggttaaggagattttgtctcactatccatccaactataagcatcctgctacaattcctcttgtagat

SEQ ID NO: 165484 - DNA, 173 bp, Glycine max
gttatattattcatataccactctccttatcttgtagtattagttaatttgcattcttttgtttctctatcgatcatgggtgtttttgcttacgatgaagaaaactcctccaccgtggctccggttactctctacaaagctctgacgaaagatgccgacaccatcatcccaaa

SEQ ID NO: 165485 - DNA, 266 bp, Glycine max
cgtcgagccgaatcggctcgagattggctacaagagacagagtgacaccaaaatccccggtaacaccgaatgtgacggcgttacgcattttgggcatcgcttgggacttcggtggcatgatcttcatccttgtttactggactgccggaatctctgggggacacatcaaccctgcggtgacattcgggttgttccttggacgcaaggtgtctttggtgagggcgttgttgtacatgatagcacagtgtgccggtgcaatctgcggt

SEQ ID NO: 165486 - DNA, 257 bp, Glycine max
gtttcagcaatgagagtcttgctgcacagtgaaacacaaaacctgacatggagattataacaagagtaatgggacctgcaatgggttatgtaaccaccccaataattatggttcagtgcgctctcgttcttcacggccaaagaaagaatctaccaaagggaggtgtttacactccagggattgtatttggtccaactgatctccaggaaagacttcaacaacatggaatatcttttgatgtcatctcgaaaagctct

SEQ ID NO: 165487 - DNA, 259 bp, Glycine max
gttatattattcatataccactctccttatcttgtagtaacagttaatttgcattcttttgtatctctatcgatcatgggtgtttttgcttacgatgaagaaaactcctccaccgtggctccggttactctctacaaagctctgacgaaagatgccgacaccatcatcccaaagattattggtgccatccaaagtattgaaattgttgaaggacatggaggacccggaaccgtcaagaagataaccgctaatgaaggtc

SEQ ID NO: 165488 - DNA, 259 bp, Glycine max
ctcattaattgcaagaatggcacttcgttgcgtggtgatgtccctttctgagatctgcagtcttggccgtgcgagagagagccatgccagagacgaagatttttggcatgcagtatggccaaacactcccattcgaaggtcattgcgagatcgtctaaagcctggccctggaagtgttgaaatcgatgatcacgctatgggaattgaagaaacacagtacccgagaaacttcttctatacagacgacttcatccaggca

SEQ ID NO: 165489 - DNA, 261 bp, Glycine max
agatagaggaattgagtgcagaatggctgccttttatgcaggtttcccagagactgtgcctcttcgaactgtcaatcggcagtgttcatctggacttcaggcggtttctgacgtagctgcctatataaaagccgggttctatgacattggtattggggctggactggagtctatgacagtagatcgtgtgaataggcttcccaacattaacccaaaggtagagacctttgcagaagcccgggattgtcttcttccaatggg

SEQ ID NO: 165490 - DNA, 260 bp, Glycine max
ctcgagccgatcaaaacaaccttctttctttcaggttcttgatcagtgtcaaaaccaaaagggtggttgcaaattgcaatggctaagcatgatgttgagggtggttccttcgctgcaaaggactaccatgatcctcctccagcaccattgattgccgctgaggaactcacacagtggtccttctacagggctttgattgctgagttcattgccacaatgctcttcctttacatcacagtgcccactgtgattggttacaa

SEQ ID NO: 165491 - DNA, 259 bp, Glycine max
cggaatctgctagaattttctaataatggcgaaagacgttgagcaggtcacagagcaaggtgaatactccgcgaaggactaccatgaccctcctccggcaccgttgatcgacccagatgagctcacaaagtggtccttgtacagagccggcatagatgagttcatagcaacactcctttttctttacatcaccgtgttgaccattattggctacaagagacagagtgacaccaaaatccccggtaacaccgaatgtgac

SEQ ID NO: 165492 - DNA, 259 bp, Glycine max
tttatgaataagctaaagaagatggctctgcgagtgattgctgaaagtctatctgaagaggagattgctggtttgagagaaatgtttcaggctatggatactgataacagtggtgcaatcactttcgatgaactcaaagctggtctaagaagatatgggtctacccttaaggatatagaaatacgtgatcttatggcagcggctgatgtggacaaaagtggaaccatagattatggggagtttattgctgctacatttc

SEQ ID NO: 165493 - DNA, 177 bp, Glycine max
cagcttttgaatgaatcaaatgagtttgtgggcgataaagttgcatatgcacttcaacaaggtctgaaagttatagcatgtattggggaaactcttgaacagcgtgaagctcgtagaagaacggctgttgttgctgagcaaacaaaagtaattgcaggtaaaatatcaaattgggac

SEQ ID NO: 165494 - DNA, 205 bp, Glycine max
aaatggtgtcgctgaaagtgcagaagcggctaaccgcatgactggtcatctactgcagagttaaagtgtagcgtgatgccaatgcagtctacgaaatctccatggcgaattctcggcaaaatatcaggaagttggttaacgattggtcgatcatcacgatgccaagcaagcatcactcacgatcgcgtgctcccaggatgaagga

SEQ ID NO: 165495 - DNA, 281 bp, Glycine max
  unsure (1)..(281): unsure at all n locations
tcggctcgagatcttgttctaatgagattcatgcacagggatgaagaggtcaatcccttnncttcaaggtatgatcctgtccgtcatgcggaaaaggtccccgttcctcctcgtatcctaggtgggaagcgtgaaaagtgcatgattgagaaggagaacaacttcaagcaacctggggagagataccgatcctggccctctgacaggcaagaaaggtttgtccgccgatgggttgatgctttgtctgactcacgtgtcacccatgaaatccgtagcatctg

SEQ ID NO: 165496 - DNA, 266 bp, Glycine max
gcatcggattctacccgccgctcgatgggaattgcgcttcaaggcgtctcgtagggctaatccgcctcacgagggtcaccaacggcacgtgcctttggggggccgaggccccctactgctggtcggcaaacggacggcgggcgcacgcgtcacttctagcccggattctgacttagaggcgttcagtcataatccaacgcacggtaccttcgcgccactggcctttcaaccaagcgcgatgaccaattgtgcgaatcaacggttcc

SEQ ID NO: 165497 - DNA, 260 bp, Glycine max
aattactttagtgttttctcttgtcacataaaagtcatctaagaagaattacaagatcatcatcacaataacaagatgagttcaggaattagagcatggagtgtggcagcaagtgttggaattgtggaggccttgaaagaccaaggcatatgcaggtggaatcatgccttaagatcagctcaacaccatctcaaaaaccatgttggctcattctctcaggctaacaagctttcttcttctgctatgatatccacaacact

SEQ ID NO: 165498 - DNA, 254 bp, Glycine max
cgccttctgccaagggagaagaatgcaatgtcagtgagctttctttctatgttgctaagggcagcaatatatcttgagacaacggttgcttgcagacttgatttggaaaagaggatggccctgcagttaggacaagctgttttagatgatcttctaattccttcttattctttcactggggacacattgtttgatgtagatacggtgcagcgaatcatgatgaatttcctacaatctgaaaaggaagatcgttc

SEQ ID NO: 165499 - DNA, 245 bp, Glycine max
ggcatgcctcctcctcaatttcatcaccgccaagagcattccaagccacgcaccggcaactggtgtgaacgattttcaagctgtagtgtttgagattgtaatcacatttgggttggtttacactgtgtatgcaactgcagcagtctccaaagaaggggtcattgggtatcattgcacccattgctattgggatcgatgtgggctacaacatcttagcagcaggcacattcagtggcggttcaatg

SEQ ID NO: 165500 - DNA, 252 bp, Glycine max
cacacctctccaacctttcactttcagctttatttgaatccctctctctcctttccaaatggccagcgttgaggttgcacatcaaacaccaacaacagttccagaaaatgaaacaacacaggtaatcaagacccaggaaacaaccccggaaccagtaccagccactgaggctcctgcaacagaacaagcagcagctgaggttcctgctcaagaagaacaacaagcaactgaggttcctgccccagaatcaac

SEQ ID NO: 165501 - DNA, 250 bp, Glycine max
ggagaagaggtcgagtttcacagcagcaatggtgtacgtcaaggctcagaaatcaaaagcctacttcaagagatatcaagtcaagttcaagagaagaagagagggaaaaaccgattaccgtgccaggattcggttgattaatcaggacaagaacaaatataacactccgaaataccgatttgttgttcgctttagcaacaaggacattgttgcacaaataatatctgctagcattgctggcgatatggtc

SEQ ID NO: 165502 - DNA, 251 bp, Glycine max
ctaagatctctcaatggttaaagctaatgtagcatgtgctgctgttggcttgacatcaagttacactccaactccattgtcggaatctggtttgcaaaaagacagagggttaattgtggagtactttggaaggatgtcttacgttgctcataacgttaatcagccccaagagaaagatttgttggagggaaatttttcctttgatatgaaatctcgctctagattggaaaaagtttcctctacaaaagcac

SEQ ID NO: 165503 - DNA, 248 bp, Glycine max
ggagcataatgcccgaaaccactggaaccaggctgtccagagcttgacaataaacgttcgcaagatattcgtggacactgaccctgaattctatgaagagtgcatgatcaaagttcgggaaaatgaagcgcaagacaaggatatgaagttccagcgcgaggccagatggaagcgtttggaagaaatgggaggcatgaaagctacaaccaacgaagcagttctagtttctcccagaactgcttctcata

SEQ ID NO: 165504 - DNA, 256 bp, Glycine max
gcctcactctctcactctctcagcaggactatataatctgagcgatgtcagatctcgaggctcccttgcgccctaagaggaagaaggtttgggtggactattttgttcagtttcgatggatccttgttatttttgtgcgtccttcccatctccttcaccatttatgtccttacataccttggggctgtaagatccgagtggaagtcctataagacgcgtcagaaggaacatgatgagaatgtgaagaaggttatca

SEQ ID NO: 165505 - DNA, 256 bp, Glycine max
ctttgagtcttggcctctccactgcctccagaagctaccaatccaggctcaagtcacacttcgagctattcatcgattttgatgaggtcaatggggacgaggagttgaggacggcttatccatgccctttttgcactgaggattttgatcttcttgagctatgttgccatattgacttggaccatcctgtagaagccaagtctgggatttgtcctgtttgtaccatgtggataggaacaaatatggttgatcatat

SEQ ID NO: 165506 - DNA, 246 bp, Glycine max
agcatgcctcctcctgaatttcatcaccgccaagagcattccaagccacgcaccggcaactggtgtgaacgcttttcaagctgtagtgtttgagattgtaatcacatctgggttggtttacactgtgtatgcaactgcagcagtcccacagaaggggtcattgggtatcattgcacccattgctattgggttcgttgtgggtgccatcatcttagcatcaggcccattcagtggcggttcaatgaa

SEQ ID NO: 165507 - DNA, 250 bp, Glycine max
agagtttctggggtcagcaaaatagtataaggaaaaaaaatggatttttggaaagtgggtttgcttagtcttctttgtgccgcttctgcttttgcaattggggctgtggagctgggtcgacatcaacctactgagagaatttcaggtagtgctggtgatgtgttagaagatgatccagtgggaaggttgaaggtttttgtttatgaacttccaagcaaatataataagacaattctgcaaaaggacccta

SEQ ID NO: 165508 - DNA, 253 bp, Glycine max
ctcgagcgcttaaaatgtcaaagccgcatgggtttagctacaaaagtggacaatacatctttgtgaactgtgctgctgtgtctccatttgaatggcatccattttccataacttccgcccctgatgatgattaccttagcgttcacatagaaatacttgctgattggactcgaagtctgaaatccagattcacacaggcgtgccagcaacccctcaatggacagagtggactcctaagagctgaatgcttgaa

SEQ ID NO: 165509 - DNA, 218 bp, Glycine max
tatgaacatgaagaatatggcttcctaaagctcctcattagtgctgctccttgcagctctaattctatcccctcaagttcttgctgactatgagcacgctcccaatttacgagccacctgtttacacaccgccagtttatacgcccccagttgaacatccaccagtgtataagcatccagtcaataagcctccagtttacatgcctcctgtttataag

SEQ ID NO: 165510 - DNA, 268 bp, Glycine max
gttggtctgctaccattgtttgatcctcccaggcatgatagtgctgaaaccattcgaagagctcttaaccttggtgtcaatgttaagatgattactggggatcagcttgccattggaaaggaaacaggccgaaggcttggaatgggaacaaacatgtacccttcatcggcattgcttggccaagacaaggatgcttctatttcagctcttccagttgatgagttgattgagaaggctgatggatttgcaggagtatttcctgaacaca

SEQ ID NO: 165511 - DNA, 265 bp, Glycine max
atcaactctttcaaaagggagaagaaaaggaaaggaaacaaaacgcacaaaggattattatagcaatggcagaacaaaaccaaaaccagacaactgaagctggaaggcaccaagaggttggccacaagagccttctccagagtgatgctctttaccagtatattctggagaccagtgtctacccaagagaacctgaatccatgaaagaactgagagagttgacagcaaaacacccatggaacatcatgacaacctctgcagacga

SEQ ID NO: 165512 - DNA, 251 bp, Glycine max
ggagcataatgcccgaaaccactggaaccaggctgtccagagcttgacaataaacgttcgcaagatattcgtggacactgaccctgaattctatgaagagtgcatgatcaaagttcgggaaaatgaagcgcaagagaaggatatgaagtcaaagcgcgaggccagatggaagcgtttggaagaaatgggaggcatgaaagctacaaccaacgaagcagttctagtttctcccagaactgcttctcataccc

SEQ ID NO: 165513 - DNA, 249 bp, Glycine max
tgacgatggagattcgggaaggtcgtggtgtaggacccctgaaagatcacatctatctccacttgaatcacttgcccccagatgtgctcaaagagagacttcctggcatctctgaaactgctgctatttttgctggtgtggatgttacaaaggaacccattcctgttttgccaactgtacattataacatgggcggtattccttcaaaccattatggagaggtggttaccattaaaggtgacaatccag

SEQ ID NO: 165514 - DNA, 251 bp, Glycine max
ctaacaaccacttatcccctttctccttctaacgagtgaggaaaaatggcgcgtaagaagatcagagagtatgactcaaagaggttgttgaaggagcactttaagagactctctggcaaggagttgccgatcaagtctgcacaaattaccgcatcaactgatttcactgagctacaagagaatgaaccctggctttcatcttctaaattggttgttaaacctgacatgttatttggaaagcgtggcaaaag

SEQ ID NO: 165515 - DNA, 255 bp, Glycine max
gagaatggctcccaagggtttaatctttttggctgtgttatgcttctcagcactgtcactgagtcgttgtcttgcggaggataatggacttgttatgaacttctacaaggaatcatgccctcaggctgaagacatcatcaaagaacaagtcaagcttctctacaagcgccacaagaacactgctttctcctggctcagaaacatcttccatgactgtgctgttcagagttgtgatgcttcactgttgctggactc

SEQ ID NO: 165516 - DNA, 254 bp, Glycine max
ctcttgtctcacgatctcaacggagcacctctcttcaggtcgccatctagactgcaatcatggctgatggaccacagcatccatcagttgttcagaagctagctggacagtcttacctggtgtccaggctaagccccaactttaactctgggaattatccctcgactggttcttacttcaatggaggactgcactcttcagggttggcagttgtgtcgcctggatctccagttactgtgcatgctccagcagag

SEQ ID NO: 165517 - DNA, 258 bp, Glycine max
gacctattcttcttcttacatactcgttttggatacctcaaataatcaccaatgttattcgcgattcacgcaaaccattgcatcctcattatatcttagggataactgttactcggctcgcaatcccattatatatttttggttgccctaacaacttcatgcgcatagagccagacaagagctggtgtgtgtgtttggctgtatttattggacttcaagctgcaattctcctacttcagcactatcttgggtcacgtt

SEQ ID NO: 165518 - DNA, 247 bp, Glycine max
aaattctcaaagacaccaatttcattgctcagagttcccaaattctccccaagagataaaatgtctctaatcccaaacttcttcggtggccggagaaacaatgtgttcgatcctttctcactggacgtgtgggatcccttcaaggattttcctttcccaaatacgctttcttcagcttccttccctgaattttctcgggaaaattcagcatttgtgagcacccgtgtggactggaaggagaccccag

SEQ ID NO: 165519 - DNA, 252 bp, Glycine max
  unsure (1)..(252): unsure at all n locations
cgtaagtnntaagcaatagaattcagagagagagagaaagagagtctcttgctctgtatctttgatttgatcattccaatcttcaatttttctatatatccatcaatccgcagagtgcaaagttctaatctttcgcctattgggttctactcctttctctcttcgtttccgatcgatccaattttcttcccatggctacgatcggacacaacaatctcaatgccaaattggttcttctcggggacatgggtg

SEQ ID NO: 165520 - DNA, 249 bp, Glycine max
ctcacgaccctccgccgccgcggttgcaagcagagcacaccatcgaaatgggcgaaggaaggcgttggttccggaatcggtggtgaagaaggagaagagggacgaggagtgggctttggagaagaagcaggaactcgatgccgcaaagaaaaagaggttcgaaacgcggaagtcgatttttaacagagccaaacagtactcaaaggaatacgacgagcagcaaaaggagttgattaggttgaagcgtga

SEQ ID NO: 165521 - DNA, 249 bp, Glycine max
ccaatcgcaaattttcttccccaaatcgtagatctacggtttaactggagtagtgtggtaagatgggaggtggatttagagtgcttcatttagttaggccgtttctatcgtttcttcctgaagttcaaactgctgacaggaaagtgccatttagagagaaggtcatatacactgtgatctctctttttcattttcctggtttgtagtcagctccctctatatgggatacactcaacaacaggtgctgat

SEQ ID NO: 165522 - DNA, 252 bp, Glycine max
acgatacgtaataagttctatcattgaggaagtttcctgtgcatcgtctccgaaaatgaacgacgcagatgtctcaaagcaaatccagcagatggtgcagttcatccgccaggaagctgaggaaaaggccaacgagatctctgtctccgccgaagaggaattcaatatcgagaagctgcagttggtcgaagccgacaagaagaagatcaggcaagaatacgaacgcaaagagcgccaagttgaaattcgcaa

SEQ ID NO: 165523 - DNA, 254 bp, Glycine max
ctcgagcggcaaattctcaaatccaaatccaattccaattccaattcccaatcttcttcaaccctaattcctcatcttgaaaatgatagaaatcttgcacatccagggagggcaatgcgggaaccagatcggagcgaagttctgggaggtgatatgcgacgagcacggcatcgaccacaccggaaagtacagtggcgactctgaactccaattggaacgcatcaatgtttattacaacgaagcgagtggcggaa

SEQ ID NO: 165524 - DNA, 268 bp, Glycine max
aagagattctctaccaatttcagaaccaacaatcagaaattgatagagtccttgctcatcatactgagaaagtgagaatggagttggaggaacaaagaatgaggcaatcaaggatgttggtgagcgcaatccaagaggcaatggtgaataagctgaagcgaaaaagacgaagagattcagcgtatggagaagctgaattgggcccttcaagaaagagtcaaaagcatgtgcatggagaaccaaatttggagggaattggcacaaacga

SEQ ID NO: 165525 - DNA, 263 bp, Glycine max
atcaactctttcaaaagggagaagaaaaggaaaggaaacaaaacgcacaaaggattattatagcaatggcagaacaaaaccaaaaccagacaactgaagctggaaggcaccaagaggttggccacaagagccttctccagagtgatgctctttaccagtatattctggagaccagtgtctacccaagagaacctgaatccatgaaagaactgagagagttgacagcaaaacacccatggaacatcatgacaacctctgcagac

SEQ ID NO: 165526 - DNA, 256 bp, Glycine max
gcccatacttgtgggagatagatggcacgcttgtcactgctcattttcgcgttctgcgccgtcgccgtcgccgtcgccgtcgcgggctcctccttcgatgatgccaaccctatccgtttagcgtcggacttggagtcgcaggtgctggacgtgatcggacagagccgccacgctctctccttcgcccgcttcgctcgccgccacggcaagcgctaccgttccgtcgacgagatccgcaaccgcttccggatcttct

SEQ ID NO: 165527 - DNA, 252 bp, Glycine max
cagagatcgggggtactacccctggaagcatgccgcctttttcaaaatccatattggaggaaggagctgccattaaggcatttaagcttgttgaaaaaggtatctttcaagaagaggggatcattaaacttctgcagttcccaagctctgatggtcgaggaaataagatagcaggaactcgcaggatccaagataacttgtcagatctgcgagcgcaagtagcagcaaatcaaagaggagcttctctagttc

SEQ ID NO: 165528 - DNA, 247 bp, Glycine max; identical to SEQ ID NO: 120398

SEQ ID NO: 165529 - DNA, 243 bp, Glycine max
gcagcattgggagatagaaagagagagagaaagagagagagagaaagacccttacccttctctatcgctcgctttcctttgacgcttctgacccttgctttgtctgcgtcttccttctttctttctttctttctctgtgtgtcgtaatggctctcccagactcttcttcccgtcgcaactccctgatcccctccttcatctactcctcttcctccaaaacgctccctctccaccacatgctca

SEQ ID NO: 165530 - DNA, 254 bp, Glycine max
cagaagacaagggcactggtaaatcagaaaagatcaccattacaaacgaaaagggacgtcttagccaggaagaaattgagagaatggttcgcgaagagaggagtttgcagaggaagacaagaaggtgaaggagaggatcgatgctcgcaacagtcttgaaacctatgtatacaacatgaagaaccagatcagtgacaaggacaagctcgctgacaagttggagtctgatgaaaaggagaaaattgagactgctg

SEQ ID NO: 165531 - DNA, 250 bp, Glycine max
ctcgagccgttcctcaagcatttgaaattggtattccagaccaaagagagagggctgacatattgaaggttatcttgaagggtgagagggttgaagaaaacattgactttgaccatatagcttacttatgtgaaggttacactggttcggatctatttgacctctgcaagaaagctgcctattttccaattagagaactgctggacgaagagaagaaagggagaagtttttctgctcccagaccattgtc

SEQ ID NO: 165532 - DNA, 249 bp, Glycine max
ctatttttcctctcaacatctcacttttgttgaggagttctgtcgtgcagaaaaattatgctcaatgccatgttcatcacaaaatgattcacaatctttgtttacaaattctcctccatgatcactcctaatagatgcaattttaagatttttcttattgtgaataactttagcaagtctcttgaatgcatgacatgcatcacttttgtgagttagaaataatgtccatgtatatctagagtaatcatc

SEQ ID NO: 165533 - DNA, 247 bp, Glycine max
cgcggtgtgagtgagacggagagtgctaagcaatcgtcttctcttctcggagcttggctttgcttatcgattctctctcctctcgtttctctaattccaaggtttgtaaaagatggcagatgccgaggatattcaaccccttgtttgcgacaatggaactggaatggtcaaggcaggatttgctggtgacgatgctcctagggctgtctttcccagtattgttggccgacctcgacatactggtgtt

SEQ ID NO: 165534 - DNA, 252 bp, Glycine max
gcaggttctttgtggacgaggtgccaatcagggtgttcaagaacagcaaggacttgggagtgaaattcccattcgaccagccaatgaagatctacaacagtttgtggaacgctgatgactgggcaacgaggggtggtttggagaaaacggattggtcgaaagcacccttcatagcagcgtacaaggggtttcacatcgacgggtgcgaggcttcggtgaacgccaagttctgcgacacgcagggcaagaggt

SEQ ID NO: 165535 - DNA, 254 bp, Glycine max
accgtagcagcagcggaagctctagcttgggcagcgaatcacaatggcgagaggattgaagaagcatttgaagaggcttaatgccccaaagcattggatgcttgacaaactgggtggtgcatttgctcctaagccctcatctggaccacacaaatccagggaatgcctgccactcatactcattttgcgaaaccggctgaagtatgctctgacataccgtgaagtcattgctattctgatgcagcgacatgtcc

SEQ ID NO: 165536 - DNA, 276 bp, Glycine max
ggctcgagtgccactcactgcacctactaacaagatcttcaatgacaacacttttgctaagatgaagaagggtgttcgcattgtcaacgttgcaagaggaggtgttcttgacgaagacgcattagtcagggccctcgacactggaatcgttgctcaggctgctcttgatgtcttcaccgaggagcccccatccaaagacagtcagtcagtgcaacacgagaatgtcagtgttagccctcatcttggagctagcaccaaagaggcacaggagggggt

SEQ ID NO: 165537 - DNA, 277 bp, Glycine max
ccgacaccgagtggttcttcctcgtctccatgacgcagtccttcgtcaacggcggacgagtgcccggacaggccttcttcaactcgacccccgtttgggtcaccgggagtcaccgtctctctgcctcgccctgcgagacggcgaggcagggatgtatgttcggcttgcaaaccttagtttgcataccgtccgcgaacggcgtcgttgaactgggttccaccgagttaattttccagaactcggatctgatgaacaaggtgaaggttctcttcaattt

SEQ ID NO: 165538 - DNA, 280 bp, Glycine max
tttctctctcttccaaaacctaattttcactttttctcttcaaacaaattttcaaaatgcgtgacatccttcacatccagggtggccaatgcggcaaccagatcggcgccaagttctgggaggtggtttgcgcggacacgggatcgaccccactggaaggtacggtggggactcagagcttcagctcgagaggatcaatgtctactacaacgaagccagctgcggccggttcgtgccgcgcgccgttctcatggacctcgaaccgggcaccatggacagc

SEQ ID NO: 165539 - DNA, 283 bp, Glycine max
ttcatttcttactctcactgaaaaacaatagcttgttcacaccatcctattttctcaactcatatatacacatatatatgacatggcttctaccttctctcgaagcctagcacttgtcatcttttacattgtcgtttgtgctgccggtaacttgaaccaagactttcagcttacgtggggagatggtcgtgctaaaatactcaacaacgaaaatcttctcactctctcccttgacaaggcctctggctctggcttccaatccaaaaacgaatccttatatggc

SEQ ID NO: 165540 - DNA, 279 bp, Glycine max
acaaggcactggacatggctgtagactctttgggattcagctacttgggaattctaatgcagaaggaagatctacaaacagtcactttgtcaggaagggtgggtgatgataggtcggttccatctttagatgctgagtctgatcaacattctgaaccatcaaatgccaaccgatctgatattccttcagttagttgcgatgctgaaaaatcatgcctgcagtctccccaggagtcacaaagcaagcaaatacggagctctacaaaggttcacatgccag

SEQ ID NO: 165541 - DNA, 222 bp, Glycine max
cgctcgagccgctcgagccgattccgctcgagcttaaactggcggacttcggttccggggaaaccattgggactgggaggagcatgaccggacgtgtgacgacgccgtattacgtggcgccggacgttctgttggggagggagtacgatgagaaggttggtgtgtggagctgtggggtgattttgtatatagtgttggcggggatccccctttttacgggga

SEQ ID NO: 165542 - DNA, 276 bp, Glycine max
ctttctcttcctcctcactcaaacttcccctctctacgccgttccccccaaatggatgcaccaatggagttttggggtgttgaggttaaggttggtcagaccgtgacagttgacccaatggatcctgtggattcatacatacacatatctcaggttgcgctcggagaggcgaaaaaggagcaacctaatgagtctgtggttttgtatttgaacgttggtgaacagaagattgtcttgggaacctttctagggatggcatcctcatctatcgttgga

SEQ ID NO: 165543 - DNA, 262 bp, Glycine max
ctcgagccgcaaagattgagccatgcatgtgtaagtatgaactaattcagactgtgaaactccgaatggctccataaatcagttgtagtttgtttgatggtatctagtagtcggataaccgtagtaattctcgagctagtacgtgcaacaaaccccgacttctggaagggatgcatttattagataacaggtcaacacaggctctgcctgttgctttgatgattcatgataagtcgtcggatcgcacggccattgtgccggc

SEQ ID NO: 165544 - DNA, 263 bp, Glycine max
cggctcgagcaaactcactcatcaattctcatctttcttctcactaactattaattcatcatgtcgagcacagctggccaagtcatcaaatgcaaagctgcggtttcatgggaggcagggaagccacttgtcattgacgaagtagaggttgcgccaccacaagctggtgaagtgcgtttgacgatcctctacacctctctttgccacactgatgtttacttctgggaagctaagggccaaactcccatgtttcctcgtatatt

SEQ ID NO: 165545 - DNA, 239 bp, Glycine max
gtacaatgggtgtgatgcgtccattttgttagaccaaggtggtaacatcacacaaagtgagaacaatgctgctcccaacgtccattccattcgaggctttgatgttgttgataacatcaagagctccctcgaaagttcatgccctggagttgtatcttgtgctgatattcttgctcttgcagcagaatcttctgtcgtgttgtcaggaggaccttcatggaacgtactacttggaagaa

SEQ ID NO: 165546 - DNA, 246 bp, Glycine max
ctccgacaccatcgacaacgtcaaggctaagattcaggacaaggcgggaatccccccagaccagcagaggctgatcttcgccgggaagcagctcgaggacggacgcacccttgctgactacaacatccagaaggagtcaatctcccattggtgttgcgtcttcgtggtggtatgcagattttcgtgaagactcttacgggtaagactattacctcgaggtggagagtctgacaccattgacatgtg

SEQ ID NO: 165547 - DNA, 278 bp, Glycine max
caacataaagacatctattgacaattcatgccctggtgttgtatcttgtgctgatattcttgcccttgctgctgaagtttcggtgtctttgggaggaggtccttcatggaacgtactactaggaagaagggacggtttgattgcaaaccaatctggtgcgaacacatccattcccaatccaacagaaagcctggccaatgtcactgccaaattcgctgccgttggcctaaacataactgatctcgttgcattatctggtgcacatagttttggtcgtg

SEQ ID NO: 165548 - DNA, 280 bp, Glycine max
gttagcagtcaatacttgactgctttgcttatggcagctcctttagctcttggtgatgtggaaattgagcattgttgataaactgatacctgttccatatgttgaacatgactctgaagttgatggagcgttttggagtttctgtggaacacagtggtaattgggataggttcttggtccatggaggtcaaaagtacaagtctcctggcaatgcttttgttgaaggtgatgcttcaagtgccagttctttactagctggtgcagcaattactggtgggat

SEQ ID NO: 165549 - DNA, 276 bp, Glycine max
ctgtacctgtgcttgtgggacctgtttcttacttgttgctgtcaccaccagctaagggtgttgagaagtcattttcccttctttccctaattgacaagatccttcctgtctacagggaagttgtggctgaactgaaggcagctggtgctacttggatccagtttgatgaacctacccttgtgaaggatctcaatgcccaccagttacaagcatttacccatgcctacgcagagttagagtcaagtttatctggtttgcatgttctgattgacacat

SEQ ID NO: 165550 - DNA, 275 bp, Glycine max
gtgcgcggcagcgacatccacaggggggctgatgaacaaactgaccggtcgcatcggtgactcgccgctgataggcgctgggacctacgcgtgcgacgtgtgcggtgtatcgtgcacgggcgagggcgaggccatcatacgtggcacgctggcgcgtgaggtggcagcggtgatggaatacaaagggttgaagcttcaagaagctgtggattttgttatcaagcaccgtctcgatgaagggatggctggtctcattgctgtgtcgaatgctgggg

SEQ ID NO: 165551 - DNA, 277 bp, Glycine max
cgcaaccaaaagaaagaatcccaggcgaggagacagatggaggggaaggagcaggatgtgtcgttgggagcgaacaagttccccgagagacagccaattgggacggcggcgcagagccaagacgacggcaaggagtaccaggagccggcgccggcgccgctggttgacccgacggagtttacgtcatggtcgttttacagagcagggatagcagagtttgtggccacttttctgtttctctagatcactgtcttaaccgttatgggagtcgccgggg

SEQ ID NO: 165552 - DNA, 287 bp, Glycine max
ggctcgaggcagacttcacaacagcacaaagcgggttactgtctgttcaagctaccatctctctctctctttcttagtgcctccttgccagacgttcaaatggcacaagacactttcctattcacatctgaatcagtgaacgaggggcaccctgacaagctctgtgaccagatctccgatgctgtgctcgatgcatgcttggagcaggaccctgacagcaaggttgcctgtgaaacctgcaccaagaccaacatggtgatggttttcggagagcatcacaaccaagg

SEQ ID NO: 165553 - DNA, 273 bp, Glycine max
cttttctcagctgctgttcctgcgcgtgaacaagcctcaggtaagccaaagccatggttaaccataacaatgttatccccaacggacacttccgtaagcactggcagcactatgtgaagacctggttcaatcagccagcacggaagacaagaagacggttggctcgtcagaagacagctgtgcagattttccccagacctacagctggacctcttagacccattgtacatggtcaaactttgaactacaacatgacagtgagagctggaaggg

SEQ ID NO: 165554 - DNA, 277 bp, Glycine max
  unsure (1)..(277): unsure at all n locations
cctggacctagtgactacccgtctgctggaaatgaacctggtgaaaatnatgagatnaaaggtggaaggcctggtccatacatgcaacctccnccctggacgagccacaaccagaaccagagggctccacttgacgtcaatgttgcttatgtggaagggcgggatgctgcggaaagaggagcctctaatcaacctctgacacaggacttcttcatgtcctcggggaagcggaaacgtgatgaattgcttctcaatataatgctggtggatatatacc

SEQ ID NO: 165555 - DNA, 277 bp, Glycine max
cctgccagtagtcatatgcttgtctcaaagattaagccatgcatgtgtaagtatgaagtaattcagactgtgaaactgcgaatggctcattagatcagttctagtttgtttgatggtatctactactcggataaccgtagtaattctagagctgatacgtgcaacaaaccccgacttctggaagggctgcatttattagataaaaggtcaacacaggctctgcctgttgctttgatgattcatgataactcgtcggatcgcacggcctttgtgccgg

SEQ ID NO: 165556 - DNA, 273 bp, Glycine max
gccgcagcttgaaacagagcagagcgaccttgaagagctatggctgtcggaaagaatcagaggatttccaagggaaagaagggtggcaagaagaaagccgctgatccctttgccaagaaagactggtacgatatcaaggccccttccctcttccaggtcaagaatattggcaaaaccctcgtctctcgtacccagggaaccaagattgcatccgaaggactcaaacatcgggtttttgaggtctcattggctgatctccaaggggatgaagac

SEQ ID NO: 165557 - DNA, 272 bp, Glycine max
gttaatgggtgggtgcaatcctatggttcccgttgcgtgaagccaccgatcatctatggtgatgtgagccgcccaaagccaatgaccgtcttctggtcatctctggctcagagctttaccaagcgcccaatgaagggaatgcttaccggtcctgttaccattctcaactggtcctttgttagaaatgaccaacctagatctgagaccacctaccagattgctttgtctatcaaggacgactggaagaccttgaaaaggctggcatcactgtt

SEQ ID NO: 165558 - DNA, 273 bp, Glycine max
cttgacgtctgcgagatcttgagtcgccgatttgaaaagatgagtcagcttcagagtgatgctttgcgtgaagccatctcaggaatcatggccgattccaaggagaagaatcgcaaatttgtggagaccatcgaactccaaatcggtttgaagaactacgatccacagaaggacaagcgtttcagtggctccgtcaagttgccccacatccctcgccccaagatgaaaatttgcatgcttggtgatgctcagcatgttgaagaggcagagaag

SEQ ID NO: 165559 - DNA, 270 bp, Glycine max
cgaggctgctaagaagtcactggaaaaagctgctgagcgtgtgagatgccttgaggatgatttagcaaagtctaggagtgagattattgtattacgatcagaacgtgacaagagtgcacttgaagcaaattttgctagagcgaaacttaatgacattatgacagaatttgaacatcagaaaactgaagcaaaaggcattttagaaagacatattgagttttctcagctggttgttgactaccaacgaaaattgcgtgacagcactgagtc

SEQ ID NO: 165560 - DNA, 277 bp, Glycine max
cttggcgttgtgattgcatggtacacttccaacataggggttcttcttctgaacaagtacttgctaagcaactacggctttacgttccccgtgttcctcaccacgtgtcacgcgctggtgtgctcgctcttcagctacgttattgtttccgttacggaagctgttccgctgcagcgcgtgccgtccaggagccagttttggaggatcgtggcgctcggcgtcgttttctgcttctccgtcgattgcgggaacgtgacgctcaagtacattccggtgt

SEQ ID NO: 165561 - DNA, 274 bp, Glycine max
cgagatttcaaatcttcaaacgttctattagatgcggatttccacccaaagctctcagatttcggtctagctagagaaggacctcagggtgatcagactcatgtatctactgcggtagttggaacacagggttatgctgcaccagagtacattgaaacgggccacctgaacgttcagagtgacatgtggagttttggtgtagtactatatgagatcctcacaggaaggaggtcattggaaagacaccgtcccacagcagaacaaaagcttctag

SEQ ID NO: 165562 - DNA, 273 bp, Glycine max
ctcgagccggtgggagatagatggcacgcttgtcactgctcattttcgcgttctgcgacgtccccgtcgccgtcgccgtcgcgggctcgtccttcgatgatgccaaccctatccgtttagcgtcggacttggagtcgcaggtgctggacgtgatcggacagagccgccacgctgtctccttcgcccgcttcgctcgccgccacggcaaccgctaccgttccgtcgacgagatccgcaaccgcttccggatcttctctgataatcttgaactca

SEQ ID NO: 165563 - DNA, 272 bp, Glycine max
cgcagagagaaattgagtttctgagataaccacttttctctttgattcatcaatggcaaccgcgaggaacgtgaaggatgtttcgcctcacgatttcgtgacggcttacgcctcccatctcaagcgttccggcaagatggagcttcctgagtggactgatattgtaaaaacagcaaaatttaaggacattggctccatatgatcctgactggtcattatgttcgggctgcctcaatggcaagacagacttatttgagaggcggtcttggtgt

SEQ ID NO: 165564 - DNA, 271 bp, Glycine max
cattagttcattctctttgcgcagttccctacctctcctttcaagatgcagatcttcgtcaagaccctcaccggacagaccatcacccttgaggtggaaagctctgacaccatcgacaacgtcaaggccaagatccaggacaaggaagcaattcccccggatcagcaacgtctcatcttcgccggaaagcagctcgaggacggccgtaccctcgccgactacaacatccagaaggagtcaacccttcaccttgtcgttcgtctccgtggtg

SEQ ID NO: 165565 - DNA, 270 bp, Glycine max
cggctcgagaaaaaagcatccaaaaatggttctcacatccactgccactcacccagatgaaaaagaccagagcctaaactctacttttgcttccagatatgtgcgtgatcctattccaaaattcaagatgccagagaaatcaataccaaaggatgcagcttttcagatgataaacgatgagttgatgttggatggtgcaccaaggctcaacttggcttcgtttgtgcccacttggatggagcctgagtgtgacaagctcataatggcttc

SEQ ID NO: 165566 - DNA, 272 bp, Glycine max
ctcgagccgctatgtttccgggaattgctgatcgtatgagcaaggcaattcgtgctcttgcacccagcagcatgaaaatcaaggtggttgcacctcctgagagaacgtacagtgtctggattggtggctctatcttggcatcacttagcaccttccaacagatgtggatctctaagggcgaatatgatgaatctgggccagctatcgttcatcggaagtgcttctaagttgggtcaagagctggatggtgatcaagttcttcgatgcaccag

SEQ ID NO: 165567 - DNA, 274 bp, Glycine max
ttaaatctctacttccaataccatcaaacattcattcccaggctgagatggcatcggcaccatcagctcacttcactattggaaccaccggtatcctaggccaaagaggaaactcgcttcctcaattaaagtcttctgggttgaaattcaactcccagaatcatttgaagagcttctgccgcctcaaggccatgtcatccgtgagatgtgagtcagaatcgactttcttggttaacaaaactggtgctgctctgcgggcgtcttttgcatccaa

SEQ ID NO: 165568 - DNA, 268 bp, Glycine max
caagaaagaatcccaggcgaggagaaagatggaggggaaggagcaggatctgtcgttgggagcgaacaagttccccgagagacagccaattgggacggcggcgcagagccaagacgacggcaaggactaccaggagccggcgccggcgccgctggttgacccgacggagtttacgtcatggtcgttttacagagcagggatagcagagtttgtggccacttttctgtttctctacatcactgtcttaaccgttatgggagtcgccggg

SEQ ID NO: 165569 - DNA, 272 bp, Glycine max
ctcttttctctcttctcacagccttcttcactcacaggaggtgaagatgtcgactccggctaggaagagactgatgagggattttcaaagattgcaacaagatcctcctgctggcatcagtggggctccccaacacaataatattatgctttggaatgctgttatctttggcccagatgacaccccttgggatggaggtacgtttaagttgacacttcagtttacagaggattatcctaataaaccacctactgtgcgctttgtttctcgaa

SEQ ID NO: 165570 - DNA, 241 bp, Glycine max
cagttttgcaattgtgctggcttctgcttctaatgccatcatccaatgcacctctacttctactccttcgtttgagtatgacgtgtttgtgagcttccgcggtgaagacacacgcaacagcttcaccgcttttctttttgaagctctgaaaaaacaaggcatcgaggccttcaaagatgatcaagatatcaggaaaggcgaatccatagcaccagagctaatacgagccattgaagggtct

SEQ ID NO: 165571 - DNA, 267 bp, Glycine max
accgctgcttccttcaatgcttctctccgggaggccatcggacacgtagtgtcggatgaggcaagggccatgtacaacggtggaacagcagggctcacgtattggagcccaaacgtcaacattttcagggacccaaggtggggccgtggacacgaaactcccggtgaggacccagtgttagccggtacatatgctgctagttacgtcaggggactacagggaacggacggtaaccggttgacggttgctgcttgttgcaaacacttc

SEQ ID NO: 165572 - DNA, 265 bp, Glycine max
ccactttctattttcccgcagtcatgggcaacgtcaagatcggaatcaacggatttggaagaattggccgtttggtggccagggtggctcttcagagagacgatgttgaactcgttgccgttaacgatcctttcattaccaccgattacatgacatacatgtttcaatacgacagtgttcacgggcactggaagcatcacgatgtcaccgttaaggatgagaagacccttctcttcggtgacaagccagtcactgtttttggaca

SEQ ID NO: 165573 - DNA, 270 bp, Glycine max
gaaatatagctctgaagagagtggtggagtccattgcaaatggcgattcacatgtggctttcagggacagcaaacttaccatgcttctgcaggattcatttgaagatgataagtcaaaaattctaatgatactgtgtgcaagtgctgatcctaaggagacacacaagacaatctctacacttgaatatggaccaaaagcaaaatgcatagtccgtggccctcatactccactcaaggacgatgaatcttcttcagctgtcattttgggat

SEQ ID NO: 165574 - DNA, 293 bp, Glycine max
agaacacaacaggttgatgctcatatttgtttgtggaagtggaatgcaagaattgtaatttcagacgttgatggaactattacaaagtctgatgttttggggcaattcatgcctttagttggcaaagattggacacaatctggagtggcaaggcttttctgtgctattaaggaaaatggataccaactactttttctgagtgcccgtgcaattgtccaggcatatctaaccagaggcttcttgcttaacctgaaacaggatggaaaaaccttaccagatggacgtgttgttat

SEQ ID NO: 165575 - DNA, 282 bp, Glycine max
aatgtgttcaaatttccaggtggagggaccatgttccctcaaggagcagatgcatatattgatgaacttgcatcagttgttccagttgcagatggttgtgtcagaacagcactggacactggttgtggggttgcaagctggggagcctacttgctgaagagaaatgtcctggctatgtcctttgctccgaaggacaaccatgaagcacaagttcagtttgctctagaacgaggggtacctgctgttgatggtgttcttggcgacatccgccttccataccca

SEQ ID NO: 165576 - DNA, 282 bp, Glycine max
cggttcaacaggtgagactcagattactccaacccatgtatctgatgaagaggcaaaccttttcgccatgcaactagccagtgcctcagtactccctatggttctcaaatcagctcttgagcttgatctgttggaaatcatagccaaggctggccctggtgttcacctttccccctccgacattgcttctcggctcccaacacacaaccctgatgcacccgttatgttggaccgtatattgcgcctcttggcttgctacaatatgctctctttttctcttcg

SEQ ID NO: 165577 - DNA, 282 bp, Glycine max
ggagattgtgaggaacaagaaagttaggttttggaagaaagtgtgtgttgtatacagctttttggtttgttcgcaaaatcatcgcccacatggtcaccttcttcttctactgtgttgtgattccccttacaatcttggtcccagaggttcatgttccaatctggggagctgtttgtgttccttctgtcatcaccattctcaattcagttggaacaccaaggtccattcaccttctgttctattggatcctctttgagaatgtgatgtctttgcaccgtacca

SEQ ID NO: 165578 - DNA, 281 bp, Glycine max
ctgtgattcccagaccttattttttctgtcatttgcttcaagtctcaggagattgattatggctcaacccacaacaagaataggccttgctggattggctgttatgggccaaaatctggcactcaatattgctgagaaaggctttcccatttctgtttacaaccgaaccacttccaaggttgatgagacagtagaacgagcaaaacaagaaggaaatcttccagtttatggctaccatgaccctgaagcttttgttcattccattcaaaagcctagggtga

SEQ ID NO: 165579 - DNA, 278 bp, Glycine max
tcaagatcggcccaaacgaaccatccgagctggctatccatgaaaatgcctgcggtcttgcccgatatgccgtcatatgccaggagaatggtctggtacctattgtagagccagagatcctggtggatggacctcatgacatcaacaagtgtgctgaggtgaccgagcgcgttcttgctgcatgctacaaggctctaaatgatcaccatgttctgcttgagggcactctgttgaagcccaacatggtcacccctggttcagagtctaagaaggtcacc

SEQ ID NO: 165580 - DNA, 281 bp, Glycine max
cagtcgaactcgagcgaatcggctcgagcggctcgagcttcaagggagtcacctaatgggtggacaactaaattcacatgatcattacagagactgcagactggatgttgataacatgtcctatgagcaattgctagagcttggtgagagaattggtcatgtgaacactggactcaaggaagatgagatgggacggaacataaggaagactaggattcaattttgggatgatacatcaaagcttcaagtagataaagagtgcagcatttgtcaggaggagt

SEQ ID NO: 165581 - DNA, 256 bp, Glycine max
gtggcacacaactcgcatgtcagtcagcatgtcttgatttactttgtgtcaagggtgccaacaaagaatctccgggtgcaaattctaggctactggccaccattgtagccggttcagtcctcgccggggagctgtcgctcatgtctgctgttgcagctggacaacttgttaagagccacatgaagtgcaacagatctagcagggatatgtctgcagttgtccaatgaagtggccacagtgcgcttggagttgtgtc

SEQ ID NO: 165582 - DNA, 280 bp, Glycine max
tgaaacccctaggaaaaaccccagtttctctctttcactagttccgttcaagttgtgaccaagcactcacagtacttttgcttgtctcgaagatgtctctacgagtgctgaaccctaacgccgaagtgctgaacaaatcggcggcacttcacatgaacatcagtgccgccaagggtttgcaagatgtcctcaaaaccaacctcggtcccaaaggaaccatcaaaatggtcgttggtggtgctggtgatatcgagcttgccagagatggcaacactctctt

SEQ ID NO: 165583 - DNA, 273 bp, Glycine max
gtgggatggggtggagatacaacgctggtttgttcctcatagtcactgtcgttattatttgggtcacctccgccgaagttacccaggatgtttttaccgattataagcagccatttgcagtaacatatcttggagcttctcttgtggtagtttacctcccaatagcattcatcaaggactggttctgtaacttgcttagatcccgctcctctgaaagtggtaaaaatgcagaatgcgtggatgagttttctgtcaggattagctctcctctca

SEQ ID NO: 165584 - DNA, 271 bp, Glycine max
ttttacttcccctatggctcgtcactccttgctcttagccctcctcctcttcgccgccgtaaccaccgccgcgatggggtggcgcgtccgacgccgacgacatcctgatccgtcaggtggtgccagatgttggcgaaccgaagaggaggacaacctgctgaacgccgagcaacacttcgcgagcaccaaggccaagttcgccaagacctacgccaccaaggaggagcacgatcatcgcatcggcgtcttcgagtccaactccgcagagcca

SEQ ID NO: 165585 - DNA, 276 bp, Glycine max
gaaaacagaagaaaacaaaatggaagacacagtttctgcgttgaggtctttgatggtttctcactctccgccgctggatgccttagaggtgccctctgaagattgtcacctgagcgagtgtgtgtctgcacgagacaagcgccgcgaattcgtttccggcttcactggaagtgccggcttggcacttgtgacaaagaaagaagcactgctgtggacggatggacggtattttttgcaggctgagaaagaagttagtgctgggtggaagctaatgcg

SEQ ID NO: 165586 - DNA, 276 bp, Glycine max
aacaatggcttgttcgtcttcagcgtcgggttcgggttcagcttcggcggtgacggagcgaagaggaataccaggggctcagttcgtggaggatgtccaaacttaccttactcaatcgggtctcgatgttggttcagccctcggttttctccaagaaagacttcagcaatacaaggtagtagaaatgaagcttcttggtcagcaaagagatcttcaggcaaagataccagatattgaaaagtgcctagatgttgttgctacattgaaagctaagaa

SEQ ID NO: 165587 - DNA, 278 bp, Glycine max
ctatccacatgaagcaccaaaggttaaatgcaagacaaaggtctatcatcacggtgttgacttggaaggaaatgtttgtctcaacatcttacgagaagattggaaacctgtccttggtgtgaacactgtcatctatggcttgtatcatctcttcacggaaccaaattacgaggatccactgaatcatgatgctgctgctgtgttgagagagaaccctaagatgtttgaatctaatgtgaggagggcaatggctggagggtatgtggggcaaacttttt

SEQ ID NO: 165588 - DNA, 273 bp, Glycine max
caacaacaacaacaacgttgtagtgtgttgttttgttttttagtgcagtttatttttttggcatcaaagtggttgaatccatggattgtggttatggtattcccagggaactctcagatcttcagaagattcggtctttgtaccagccagagctccctccttgtctccagggaaccactgtgagggttgaatttggtgacgcaaccaccactgctgaccccactgatgcagtcaccgtctgcagggcttttcgtggcgcttgtggacaccttt

SEQ ID NO: 165589 - DNA, 270 bp, Glycine max
gaaataaggggaaaaaatggtgtcgctgaaactgcacaagcggctggccgcaagcgtgctcaagtgtggcagaggaaaggtgtggcttgaccccaatgaagtcaacgaaatgtccatggccaattctcggcaaaacatcaggaagttggttaaggatgggtttatcatcaggaagccaaccaagattcactcacgctcgcgtgctcgtaggatgaaggaggcaaagaagaagggccggcactctggttatggtaagagaagggtacaagg

SEQ ID NO: 165590 - DNA, 282 bp, Glycine max
ccacaatccctctctctctccgacgtacgtttccatctttttagggtttcatttcatggactccgattcctggatttccacgcgcctctcttcctgttcacgccgccaccattgtcgatctgatctgtacgcggaggagagtgaagggaacgatgatttcagggcggagtttctatgccctttctgcgccgaggattacgacgtcgtttccctctgttgccacattgacgaccaccaccctatccaagccaaaaacggggtgtgtcgcatttgtgggaagaa

SEQ ID NO: 165591 - DNA, 158 bp, Glycine max
cttgtcttgcggctagggttttagcgcacgttcttgtagatttaacgaagatgggtaaggaaaaggttcacatcagtattgtggtcattggccatgtcgactctgggaaatccactaccactggtcacctggtttacaagcttggaggcattgacaag

SEQ ID NO: 165592 - DNA, 272 bp, Glycine max
ctcatccggttccttcagaaccgaactcctcgaaccggttgtcaagcccatgctcgacttcctccgccaaaccggttcctacctaatggagaatgcctatccgtacatcgcttacgctgcaaactctgatgaaatctctttagactacgcgctgttcaaggaaaaccctggcgtggttgattcgggtaatggtttgaaatacaccgacttgttcgacgctcagatcgacgccgtttttgctgccatgtcagcagtcaaatacgacgacgtta

SEQ ID NO: 165593 - DNA, 264 bp, Glycine max
caattttggttcatggtttttccagagtcgtctttgaagtcctgaaacttgctgcacaaaatgacaaactatttccggtcttctgcactgagggaagaccagaccgaacaggtttgcggttgtcgaatgagctggccaagcttgatgttcctgtgaaacttctaatagattctgctgttgcatatactatggatgacgtggacatggtttttgtgggtgcagatggagttgtcgaaagtgggggcataatcaacatgatgggga

SEQ ID NO: 165594 - DNA, 275 bp, Glycine max
ctcgagccgttcctcaagcatttgaaattggtattccagaccaaagagagagggctgacatattgaaggttatcttgaagggtgagagggttgaagaaaacattgactttgaccatgtagcttgcttgtgtgaaggttacactggttcggatctatttgacctctgcaagaaagctgcctattttccaattagagaactgctggacgaagagaagaaagggagaagtttttctgctcccagaccattgtcccagttagacttggagaaggtcttg

SEQ ID NO: 165595 - DNA, 276 bp, Glycine max
gattgctagaatggagtttcgatgctcagtcatctcttttaccattgtcttctctcttgctcttgcaggagagagccatgtccatgcatcgctacctgaggaagattattgggaagctgtttggccaaacactcccattcccactgcactgcgagagcttctaaagcctctccctgcaggacttgaaatcgatgaactccctaagcaaattgatgatacacagtacccaaaaacattcttctgtgaagaagaccttcatccaggcaaaacaatgaa

SEQ ID NO: 165596 - DNA, 273 bp, Glycine max
gccataagacgcctcacctatgatagctcagtggccatggttcccttcggaccttactgggagttcgtgaggaagctcatcatgaacgaccttctcaacgccaccactgtaaacaagttgaggcctttgaggacccaacagatccgcaagttccttagggttatggcccaaggcgcagaggcacagaagccccttgacttgaccgaggagcttctgaaatggaccaacagcaccatctccatgatgatgctcggcgaggctgaggagatcaga

SEQ ID NO: 165597 - DNA, 258 bp, Glycine max
gtttgttgatccatctcttgtttcttgctttctttcttcaccatgtcactagctgggaaaatcaccactgaaatcggggttcatgcaaccgctacaaagtggttcaacctcttcgcaacacaactccatcatgttcaaaacctaactgatagagtgcatggaaccaagctgcatcaaggtgaagactggcatcacaacgagacagtcaagcactggacttataccatagatggtaaggttacaacatgtctggagagt

SEQ ID NO: 165598 - DNA, 268 bp, Glycine max
gttttaattcttcttctcttactcctcccaccttcaagtctctaataattggttgtattatatccctaacaaatgggttcctccaagttattgggtattatggccatgcttttcatagtgcttctacccatggctgccaaaggggataatattactgatttctttgataaggtttgtgaagaagtggaatgtggtaagggaagctgcgtagtaaacacaagttacccattaaacttcgtttgtgaatgcgattctggctggaagcgaa

SEQ ID NO: 165599 - DNA, 269 bp, Glycine max
gacctcacaaggattgagtgttggatctagtcatctagatttaaaaaaaaaatgaagatcattgagaaaattcgcgcagttgctgctgatccaaacagggtggtgttctcatttgagttcttcccccccaagactgacgatggtgtggacaatctgtttgagaggatggaccgcatggtggctcacaacccctctttttgcgacatcacttggggcgctggagggacaacggctgatcttacattggaaattgccaacaagatgcagaa

SEQ ID NO: 165600 - DNA, 269 bp, Glycine max
ctagttcagcttgatggtgtaaataatagttccacaaatgaagatggtacccgcaaaatagtaatggttttggcagccactaactttccatgggacatagatgaggcactgaggagaagattggaaaagcgtatgtacattcctcttccaaattttgagagtcgaaaagagctgatccgtatcaatttgaggactgtagaggtgtcccctgatgtgaacatagatgaagtggctcgaaggacagaggggtatagtggagatgacttgac

SEQ ID NO: 165601 - DNA, 271 bp, Glycine max
ctcgagccgctcgagccgcatttacacaccacaccatggcctcaaccaacgctctctcttcaccctccattactacggtctcccaaccgacagtctctgacccgaagagcgaaccatagtggaagagtaaattaccggaaaccgaataaccgtttctccgtgaaagcctccgccaaagagattgcctttgaccagcattcccgctctggtatgcaggccggcattgacaagctcgccgacgctgttgggctcactcttgggcccagaggga

SEQ ID NO: 165602 - DNA, 264 bp, Glycine max
caagcgcccaatgaagggaatgcttaccggtcctgttaccattctcaactggtcctttgttagaaatgaccaacctagatctgagaccacctaccagattgctttgtctgtcaaggacgaagtggaagaccttgaaaaggctggcatcactgttgtccaagttgatgaagctgctttgagagagggtcttccactgaggaaatcagaacaagctcactagttggactgggctgtccatgccttcagaatcaccaatgttggtgt

SEQ ID NO: 165603 - DNA, 292 bp, Glycine max
atttcgattggcgagacaaaggagccgccactaacgtcaaggaccaaggggcgtgtggttcgtgttggtctttcagtacgacgggtgcgttggaaggagctcattatctggccactggtgagctcgtgagccttagcgagcaacagcttgtggattgcgatcacgtgtgtgatccagaagaatatggagcgtgtgactcaggctgtaatggtgggttgatgaacaacgcatttgagtacatacttcagtctgggggagtacagaaagaaaaggactatccatacaccgggag

SEQ ID NO: 165604 - DNA, 283 bp, Glycine max
atagcaaagaagggaagactaaaactaaaaccccactctctttttccgagtcttccagtgaaagaaaggcagcgatggaagaagacttcgacatccccggcggcgaggaaatggatctcggcgaagacgaggtcggcgaggagagggagatcggctctggcggcctcaagaagaagctcctcaaggaaggtcaaggctgggaaacccccgaagtcggtgacgaatccaagttcattacacggggactttgctcgacgggactaagttcgattcgagccgcgac

SEQ ID NO: 165605 - DNA, 287 bp, Glycine max
ccttcgttcactcttcttctcttgcggctagggttttagcgcagttcttctagatttaaggaagatgggtaaggaaaaggttcacatcagtattgtggttattggccatgttgactctgggaagtccactaccactggccacctgatctacaagcttggaggcattgacaagcgtgttattgagagatttgagaaggaagctgctgagatgaacaagaggtctttcaagtatgcctgggtgcttgataagcttaaggctgagcgtgaaagaggaatcacaattgata

SEQ ID NO: 165606 - DNA, 290 bp, Glycine max
ctgaagtctgcttctctgcttgtatgcaacggccacacacacccttagtcgcctgaaaacgattgttgttgcagggcaaacacaaagatccgggtcgacccgtcgcagatccgatccaaataagaaagatgaatattttcaggttagccggagacatgacccatttggccagcgtcctcgtcctcctcctcaagatccacaccatcaaatcctgcgccggtgtctcattgaaaactcaagaactctatgcactcgtttttgcttgtcgctacttagatatctttacttat

SEQ ID NO: 165607 - DNA, 290 bp, Glycine max
gtgaagagcgaagagaatggctcccaagggtttaatctttttggctgtgttatgcttctcagcactgtcactgagtcgttgtcttgcggaggataatggacttgttatgaacttctacaaggaatcatgccctcaggctgaagacatcatcaaagaacaagtcaagcttctctacaagcgccacaagaacactgctttctcctggctcagaaacatcttccatgactgtgctgttcagagttgtgatgcttcactgttgctggactccacaagaaggagcttgtctgaga

SEQ ID NO: 165608 - DNA, 287 bp, Glycine max
cttaagcttgctactgagtttccacactgcataccttaggtcttccgaattcgaagttaatttgcaagatggctaaggaaaaggctcagatcaacattgtggtggttggtcatgtggaccctgaggaggcaaccaccattaacgagctgaagaagcctgttgtggagaaagaagctccagggcatgccatatgagggcatgcacgtacggcctcggaggggaaccagaaaattatgttaacaaaataatctggaaccctaatgtatcagtgtcatcatcagtgtgta

SEQ ID NO: 165609 - DNA, 289 bp, Glycine max
cgccgcagaacacattcttccacttcgtctgctcctcgagcgcgtccctcctacgcgccgcgatctcccactccttcccttacctgaacttccagctatacaccttcgacgactcccaggtctcgggactcatctcaagctcaatccgctccgcactggattgccccttaaactacgcgcgctcctacttggccaacctcttgcccatctgcgtgaggcgcgtggtgtacttggactccgatctcatcctcgtcgacgacattgccaagctggcagcaacaccactggg

SEQ ID NO: 165610 - DNA, 284 bp, Glycine max
aaaggaatgtgaaaatccagccgggccacgaaacgacacctctctgcgcttaaaacgactgcggcccacgatcgcgttcttcagttgaggcatgttattcgctgctcactcctcctcctactcttgttcttcttcttcgtcgtcttggccttcgcatcttcacaatcacatccaatagagacacgttgactttagtggaagaagaagaagaagaagagaatggaacaatcggttttggatgatataatcaatcgcctgctcgaagttcgtacccgaccggggaa

SEQ ID NO: 165611 - DNA, 285 bp, Glycine max
cctctctctatttctcagtctctgtgtttgccgctgaggattccgaacgagtgaccttcttcgtttctcgcaaagtttaagtactcatgggtaaggaaaaggttcacatcaacattgtcgtcattggacatgtcgactctgggaagtcaactaccactggtcacttgatctacaagcttggaggtattgacaagcgtgtgattgagaggttcgagaaggaggctgccgagatgaacaagaggtcattcaagtatgcctgggtgctcgacaagctcaaagctgagc

SEQ ID NO: 165612 - DNA, 285 bp, Glycine max
gttagaacccccttcgcccttcggattccgccaccgccataacgtcatagctgccggcgaacgatttctgggtttgttactttcacctcaaagttcctatctttaccctcgacatggcgaaggtaacaagctcaaaactgaacattgcaataattcacccacatcttggcataggtggagctgaaagattgattgtggatgctgctgttgagcttgcatcccaaggccataaagttcatgtttttactgcacatcatgataaaaacagctgctttgaggaaactg

SEQ ID NO: 165613 - DNA, 283 bp, Glycine max
gtttgctagacaatctggtttataaacgacaccgttactcagttttacaccgagcacctgtccgcgcttcagtctggatgctgtaaacctgcagaagaatgcctatttacctatgagaattcaacgagctggacgaagcctggaaatgtgaccagttacaacaatcctgactgtgatgcttggaataacaatcaaacagttctgtgcttcaattgccaatcatgcaaggctggctttctgcaaaacttcaagactgaatggaagagggtggctgttgttaaca

SEQ ID NO: 165614 - DNA, 284 bp, Glycine max
ctggctctggtcttggttcccttttgctggaacgtctttcagtggactatggcaagaagtccaagcttggtttcactgtctatccttcaccccaagtttcaacctctgttgttgaggcttacaacagtgtcctctccactcattcccttctccagcacactgatgtggctgtcctgctcgacaacgaagccatttatgacatctgcagacgttcacttgacattgagaggccaacctacaccaaccttaatcgtttagtttctcaggtgatttcctcactgacc

SEQ ID NO: 165615 - DNA, 282 bp, Glycine max
cttcaaactagggttttacagaatataagctctctctatctttggactttcgtcattcaaatccaatccaatatcaaatatgagtcgtcatcccgaggttaagtgggctcagagacttgacaaggtctatatcacggtgcaattggctgattcaaaaaatgccaaggtggatcttacaccagatggtatttttaccttctctggtagtgctggtgctgaagaccatcagtatgagctaaaactggagctctttgacaaggttaatgtagaggagagcaaaat

SEQ ID NO: 165616 - DNA, 282 bp, Glycine max
caaactttcatctttctcattcacttaacccaagtgtaaaaatggcagcattgaatatgtccactgtgagacttccaagagcttccttgtctggaacgacaccagctaggagatcttgtgctctcatcaagaatccatcatctttgaggtctgtgaagaacgtgtctaaagtatttggattgaaatcatcttcctttagagtgtcagcgatggcggtatataaagtgaagctgattggaccagacggtgaagagaatgaatttgaagcccctgatgacactt

SEQ ID NO: 165617 - DNA, 286 bp, Glycine max
  unsure (1)..(286): unsure at all n locations
gacaagcaaacgaaaagtaaatcaatcaatcgttggaatctctcaacttatcgcttcttcctgatttgggggtttccgtttcaatggacgacggcgagctggatttctcgaaccatgaagtgttttcgagtccgaacatgggggagcttccgagcagcggttcaatggacagtttcttcgacgagcttctcaaggacacgcacgcgtgcacccacacccacacgtgcaaccctcccggccccgatttctcccacactcacactgngcggcacgtacacaccaaaat

SEQ ID NO: 165618 - DNA, 280 bp, Glycine max
attgaattgtggcaggtgaaatctggtactttgtttgacaatgtcttaattactgatgatcctgagtatgctaagcagctggttgaagaaacatggggcaagcacaaggatgctgagaaggcagcatttgaggaggccgagaagcagagggaagaggaggaatcaaaggatgacccagttgactctgatgctgatgaggaagaggaagatgctgatgaagctggcaatgactccgatgctgaatcaaagacggaagctggagaagacaccaaggaagagg

SEQ ID NO: 165619 - DNA, 280 bp, Glycine max
tagaaattcacagagctggagtacttgctcatcggattggtctcggctgttcctgctttcgttgttccattgctgctcgttggaaaggctgatagaagcatttcttggaaggatcgttattgggtcaaggccagtctctggataataatcttcagttatgttgggaattatttctggactcattacttttttacagttcttggtgcatcttatacctttccatcatggaaaatgaacaatgtcaccacacacaacattcctgctccactcatgtttgctt

SEQ ID NO: 165620 - DNA, 286 bp, Glycine max
ctcgagccgctcgagccgctttcttcttcaacataacatgcactgcacaattgcctcatgaatcatcattaaccagggtttatcctctaagaaaataaacatactatagcaatgagtgcgtccaggttcatcaagtgtgtcactgtgggtgacggtgccgttggcaagacttgcatgctcatctcctacaccagcaacacttttcctacggactacgtgccaactgtctttgacaatttcagtgcaaatgtcgttgtggatggaagcactgtgaatcttgggttgt

SEQ ID NO: 165621 - DNA, 280 bp, Glycine max
gtggtggagagcaaggtgggcgccatagggtgcatgctggtgtccctcttcttcctcgggacatggcctgctgtcatgactctgctagaaaggcgcggtcgtcttcctcaacacacctaccttgattacaccctcaccaacctcatggctgctgttatcattgctttcacctttggtcagattggcaacgctcaacccaacttcttgtctcagctttctcaggataactggccttctgttctgtttgccatggggggtggagtggtccttagtgttggaa

SEQ ID NO: 165622 - DNA, 283 bp, Glycine max
tgatgccggtattgtgttaaaatcagtcaaaggggttgtaagtggtctcaatattgttgacaacatgttctctggcttaaataaaggggttgatatagtcaagttggaccaatcaaatagtcattttaatcaaattgatcaagtttttgtggcaagaaatgttgtgaggggtatgaacttaaaggccacagctgcaaagatgtctttgcttggtaatggaacctcatggactgctgattttaacaaagttttgcttttccctaatcttatcaagcatgttgtg

SEQ ID NO: 165623 - DNA, 283 bp, Glycine max
gtgggaatcattgtcctgcatgcttcacgcgtcggtgccgaatgccaccaccagctttgtgaggagacaagcaatctccactgtgaccttcgaggactatggagtaaccatacaactataccgcacaccatatttggtggacatagatagagaagatgttggaagagtgctcacactaaactccatcaaagctggtgatgcttggacaggcatggacatgttgatcttcaactcatggcattggtggacccacaaaggagattctcaaggatgggattacata

SEQ ID NO: 165624 - DNA, 281 bp, Glycine max
cgaaacgcacatttcactattcattctcgtttccctctcgactgtgattgtttgttaactgaacttttcgagcaaaatgtctggacgtggaaaggggggcaagggtttgggaaagggaggagcgaaacgacaccgtaaggtcgttgcgcgataacattcagggaatcaccaagcctgcgattcggcgtttggctcgcaggggtggtgtgaagcgtatcagtggtctcatctacgaggagacacgtggcgtgctcaagatctttctggagaacgtgattcgt

SEQ ID NO: 165625 - DNA, 277 bp, Glycine max
gtcagtggtaaccatgacagttggttccttcttcatcaggacctccagggttctcaactcctccaactttctgcttctctgcactctcagagaaaaggagaagtgaatttttgggaggcagaatgtgtcaagattgattattcgaacaaaaaggttttctgtcggtccaatattgacaacttggtgggaagtaacgaattttccttggactatgacttcttggttgtagcagtaggagcacaagtaaacacttttaacacccctggtgtcaaggaga

SEQ ID NO: 165626 - DNA, 278 bp, Glycine max
ctctgttgggtcaaattcatgtaattagatttcaccattaggacatatctagatacaacaacaaaatcgtatcgatgaatctaccgtatatgtgaacatatacgagtatcattgatatgatttgatgtgatgatgtgtgaatatttgtatggggcaggctttgaagggaggggttagaaagaaggttgaattggctaccaagtttggaatcagctatcctgaagggaaatgggagatccgtggtgatccagcatacgtgagggatgcttgtgagggca

SEQ ID NO: 165627 - DNA, 279 bp, Glycine max
gcctaagagagtggaaggagttgtcgccatgaagcagcactttgtgcttgtacatggcataggtggaggaagttggtgctggtacaaaatccggtgccttatggagaattcaggctgcaaggtctcatgcatagacctcaaaagtgctggaattgatcaatctgatgctgattccgtgctatcttttgatgattacaataaaccacttatggatttcatgtctgatttgcctgagaacgaacaggttatattggtggggcacagcgctggagggttgag

SEQ ID NO: 165628 - DNA, 283 bp, Glycine max
aacaaaccctaaatctctctcgtcttcttcttcttcttcctccttcaaccatgcgccccatcctgcacgttcagggaggccaatgcggtaaccaaatcggttccaagttctgggaggtgatatgcgacgagcacggcaccgatcctaccggaaagtacaacgacgaaggcaacagcggcatccaactcgagaggatcaatgtctattacaatgaggcctctggcggaaggtacgttccgagagccgtgcttatggatctcgaacctggaaccatggacagcat

SEQ ID NO: 165629 - DNA, 281 bp, Glycine max
ctcttagtcccaattttctagggttttattcattttccgatggcttctgcagatgttgagtaccgttgctttgtcggtgggctcgcttgggccactgacgaccatgccctcgagagagccttctctcagtacggcgaaatcgttgaaccgaagattatcaacgatcgtgagactggcagatccaggggttttggatttgtgaccttcgcctcggagcagtccatgaaagatgcgatcggagcgatgaatggacagaacttggacggccgtaacatcactgt

SEQ ID NO: 165630 - DNA, 278 bp, Glycine max
ctcaaccttaacctctcctcactttcttttcaaccagaactatgattaagctttttaaagtaaaggaaaaacagagagaactggcagaaaatgcgagtggcggaccacccgttaagaagcaaagtgccggcgagttgcgtcttcacaaagatataagcgagctgaatctaccaaaatcatgtaccatgcaattccccaatggcaaagatgacctgatgaactttgaagtttcaattcgacctgatgatggatattacttaggtggcactttttgtttt

SEQ ID NO: 165631 - DNA, 290 bp, Glycine max
tcggacatcggctcgactgactaatgccacttccgcaaaggaaccgtgcagttcaataacatcaatagtagatgatacaggaacaaggcttgcatgtggcacactgacgtctctactattgatcgcattgaactaatgaaccttgggcaaaggaaccgtgcagttggagcaacagcccttaatgaccgcagtagccgatctcatagttgcttgactgttcatgttcagggtcgacatttgacatctggagctatccttcgtggttgcatgcatttggtcgacttggcagg

SEQ ID NO: 165632 - DNA, 282 bp, Glycine max
catccatcggcagttagagacagagagagagagaaacaaaaccctaattggtgagtggcgaaaatggcgcagcgcgcggcggcagcagcagcaacaggagcagcagtaatcgagcaagtgcagtgcttcgggcggaagaagacagcggtgccagtgacctactgcaagcgtggtcgaggcctcatcaagatcaatggctgcccgatcgagctggtggagccggagatcctccgtttcaaggccttcgaggcaatcctcctcctcggccgccaccgcttcgcc

SEQ ID NO: 165633 - DNA, 278 bp, Glycine max
aagggatcatggacaagggggtgttggatgatgtgataagaaggcttctggaagggaaaggagggaaacaggtgcaactctctgagtcggagatccgtcaactctgcgtcaacgccagacaaatcttcctctctcagccaattcttctcgacctccgtgctcccatccgcatctgcggtgatatacatggtcagtaccaggacttgctgaggctttttgaatatggtggctaccctcctgcggcaaactacttgtttctgggggattatgtggataga

SEQ ID NO: 165634 - DNA, 281 bp, Glycine max
cttctctctcaccctccaactatgagttactacaaccagcagcagccacccgtcggtgttcctcctccccaaggttacccaccgccggaatcttacggaaaggacgcgtaccctccgccagggtaccctccacagggaggataccctccgcaggcgtatccagcacaggggtaccctccaccctacgcgcctcctcagtacgctcagcctccgccgcaacaacaccagaattcatctggcccgggttgcttagaaggatgtttggctgctctctgctgctg

SEQ ID NO: 165635 - DNA, 278 bp, Glycine max
ctattactgggtatcatctcactttcataagacatgccaagaatttgctgagttctacaaaagtgcccttctctatttggcatacacatcagtggaatctctctcagattcattcaagctggatctggcatttgatttgtccctctctgcccttcttggggataacatctacaactttggagagctacttgcccatcctataattaagagccttctggggacaaaggtggaatggctttactatattctgcaggcattcaattctggtgatctggtac

SEQ ID NO: 165636 - DNA, 280 bp, Glycine max
ctcacattcaccacaacacaaacacatacacaaacaaagacaacaaccttgtttgtctgcaatcaaaacctttcaagctggcgttcgagaaccaagacacccctgtccgagaaatcaagcccaagaaccggagaatcatgggtgctggaggccctgatgacgaggacaataggtggccaccatggctgaaacctcttctcaaagagagcttctttgttcaatgcaagcttcacgctgattcgcacaagagcgagtgcaacatgtattgcttagattgtat

SEQ ID NO: 165637 - DNA, 275 bp, Glycine max
gcaccagctaccaaggctcaggttgtggggtggcctcctataagatcattccggaaaaattcattggcaactacttcaaagaacaatgaagtagttgatggaaaaaagggggttggtgcactgttcgtcaaggtcagtatggatggtgccccctatttaaggaaagtagacttgaagaattactctacatatccagaattatcttctgctctagaaacagagttcagctgttttactataagtaaatgtggatctcatggaattctgggcaggga

SEQ ID NO: 165638 - DNA, 279 bp, Glycine max
cccgctcgagctcgagccgtcaaatcctcaatcgctcgcgatttcctcttctggaattctcaaggctctcaataaatgacaaccactgcctgtttcatcattgttagcagaaatgacattcctatatatgaagctgaagttggagtagctgctaaaagggaggattctgctcagctgcatcaatttatccttcatgctgctctcgatattgttcaggaccttgcatggactactagcgctatgtacttgaaatcagtagacaggtttaatgaacttgtg

SEQ ID NO: 165639 - DNA, 275 bp, Glycine max
cgtcatctccgttgggacggtcacttttgttgctttgacagggctgcttgtgtttatgcttttctttctagctgcgaccgtaaatgccattgtcatatcgttactgatgtctttggcagctgcaggaggattcctggctcttttctttgcttttgttacagctatatacattggagcattatcaattgccatatttgctatttcagttaccacattttgggcaattgtggctattctgatgatcacaggctggattggattcatttacactgtgt

SEQ ID NO: 165640 - DNA, 278 bp, Glycine max
atagagtgagaagtgagaagagaaaaatggcaatctccatacccagtagacaacttttcatagatggagagtggaaagtccctcttctcaacaatcggtttccgatcatcaaccccgctactgaagacatcatagggcatattccagccgctactaaggaagatgttcaccttgcggtggatgctgctaaaagagccttttcccataacaaaggcaaagattggtcttcagctcctggctctgttcgtgctcgctatcttcgagccatcgcttcaaag

SEQ ID NO: 165641 - DNA, 274 bp, Glycine max
cccacgaaacaataccacagatactcccttctctggaacttgtatcagattgtgttctttgtggacgaggtgccaatcagggtgttcaagaacagcaaggacttgggagtgaaattcccattcgaccagccaatgaagatctacaacagtttgtggaacgctgatgactgggcaacgaggggtggtttggagaaaacggattggtcgaaagcacccttcatagcagcgtacaaggggtttcacatcgacgggtgcgaggcttcggtgaacgcca

SEQ ID NO: 165642 - DNA, 275 bp, Glycine max
ctctctctcaccaaattcttattagaacgaaaaaagaaaagaaaacaaaaaagagcgatttttccctcaccaaagaagaaccaaaacaatggcggatcaactcaccgatgaacagatctccgagttcaaggaagccttcagcttgttcgataaggacggcgatggttgcatcacaaccaaggagcttggaactgttatgcgttcattggggcacaacccaactgaggcagaactccaggacatgatcaatgaagtggatgctgatgggaatggta

SEQ ID NO: 165643 - DNA, 277 bp, Glycine max
cttgtgttaattgtgttgttgttgtaggaaatttaagtgaagagagaatgatgatgaagtctgctatgtgtgcattggtgcttgtggcactggttgtggttgaagtggggcccatggctgaggctgcggtgacttgcaacccaacacagttgactccttgtcttccggcaattaattcaggttctgcaccttcgagtgcttgttgccagaagctgaaggagcaaaagccatgcttctgtggctacctcaaaaaccctagcttgaagcagtatgttaa

SEQ ID NO: 165644 - DNA, 275 bp, Glycine max
gtttcaaagatgcctcgtggaacgcttgaagttgttctgatcagcgccaaaggaatcgatgacaatgattttctctccagcattgatccttatgtgattctcacatacagggcacaggagaaaaagagcactgtgcaagaagatgctggatccaagccacaatggaatgagagctttcttttcactgtctctgacagtgcatctgaacttaatctaaagataatggataaagacaactttagtcaagatgattgtcatggcgtggcaaccattca

SEQ ID NO: 165645 - DNA, 277 bp, Glycine max
ctcatttcaatttgcatttgcatttcatttggcgttttgtttctttctggaagcttcacttcggcatccatggcgtcgttcgaagaagctcctcccggaaactccaagaacggcgagaagatcttcaagaccaagtgcgctcagtgccacaccgtggacaaaggtgccggtcacaaacaaggacccaatctgaatggtttgtttggaaggcaatctggcacaactcctggatattcctattctactgctaacaaaaacatggctgtgatttgggagg

SEQ ID NO: 165646 - DNA, 279 bp, Glycine max
aaattttaattgacttttctcccctcataaaaaaaacctaccaatggctcccgcaaaggcagagaagaagcccgcggagaagaagccggcagagaaggccccagcggagaagaagccgaaggggtagaagaagatatcgaaggaaggaggaagcgagaagaagaagaagagaacaaagaagagcgttgagacctacaagatctacatcttcaaggtgttgaagcaagtgcaccccgacatcgggatctccagcaaggctatggggatcatgaacagttt

SEQ ID NO: 165647 - DNA, 275 bp, Glycine max
gggtgcagaagcaaatggcggcgagaagcaattgaaatttctgatctacggtcgcagcggttggattggtggtctactgggtaagctctgcgaagagcgcgggatccaatatgagtacggcaccggcagattggagaaccggtcgtcgttggaggcggacatagcggctgtgaagcccagccacgtgttcaacgccgcgggtgtcacgggtagacccaatgtggactggtgcgaatctcacaaagttgaaaccatccgaaccaacgtcgtcggca

SEQ ID NO: 165648 - DNA, 273 bp, Glycine max
aacattttacactcttttcttcttctcgttgttgcttcggtgttgaatcatggatcagaaagtcgatttcagtgctccgcattccatgggaaccactatcatcggcgttacttacaacggcggtgtcgttctcggagccgactctcgaaccagcactggagtgtatgttgccaaccgagcatcggacaaaatcacacagctcactgataatgtttacgtgtgtcgctctggatcggctgctgattctcagattgtctctgactatgtgcgcta

SEQ ID NO: 165649 - DNA, 273 bp, Glycine max
caacatttgaagaattgaacctgccattattgtaagtacagaattgggaaaggaaggaaggagatgaatctccctatcatagatctgtcctcacctgatcctctttccactgccatttccatccgtcaggcgtgcattgagtatggtttcttttaccttgtgaaccatggcgtggagaatgacttggtcaaagcctttgatgagagtaagaggttcttctcacttccaccaggagagacaatcaagttggcccgcaaggactttagaggttat

SEQ ID NO: 165650 - DNA, 275 bp, Glycine max
atttttaccttgaaatatgttgtcattgaacttgctaatgtatcttgttattgtttttacctttaggctgagtctgtgccccttgctgctgagtaaactgaggataaagagttggataaagaaatggaggaaccggctttttctttctcatttggagtttgtcgcacttgagttttataaataatgtccgtgattttagttttgtgattaagctttcgataagaggagagaaagagaaggaaaaaaaaagttgcttttgtttttgttgttgcatg

SEQ ID NO: 165651 - DNA, 275 bp, Glycine max
gtcggttccttttggttctcttggttctctatgtcacagtggagcagagtaagctagtccaccacgtagaagccgatggtgggtttgtaaaaacaagaggagtgcagcttatgctgaatgggagtccctactatgctaatggctttaatgcctattggcttatgtaccttgcctctgatccatcccagagaaacaaaatctcatcggtatttcaacaggcttcaaatcatggactcaacattgccagaacttgggccttcagtgatggtggatat

SEQ ID NO: 165652 - DNA, 273 bp, Glycine max
cagacggtggcttacggtcatcaattgcagagatctattaagattctggaatggcaccaatttacagtctttacatcatcaataaatctggtggattaatctattataaggattatgggtcagctggacgaatggataccaatgacagcttgcgggtggcaagtttatggcactcaatgcatgctatctctcagcagttatcacctgtttcaggttgtttaggaattgaacttctccaagcagatacatttgatcttcattgctttcaatcac

SEQ ID NO: 165653 - DNA, 276 bp, Glycine max
ctgacctcagcggcggcggcggcggcaacagaagaacaacaaccaccacacacaatgggtcgcgtgagaacaaaaacggtgaagaaatcctcccgccaggtgattgagcgttactactcgcgcatgaccctcgacttccacacaaacaaaaagcacctcgaagaagtggccatcatcccttccaagaggctgcggaacaagatcgcgggtttctccacgcatctcatgaagcgcatccagaagggtcccgttcgcggcatctccctcaagctccag

SEQ ID NO: 165654 - DNA, 274 bp, Glycine max
cctcgagccgattcggctcgaggttccccaagatgttctgtctgccaccatatcatatgcagactattcctgcaacagtcagacaatatatgctacattttgtgatgccaacattggtgtttttgatgctgatagcttgaggctcagatgtcgtattgctccatcaatatgcttgtcaccggcagctttaagtggaagtcaaggtgtgtatcctcttgtggttgctgctcatcctctagaacccaaccagtttgcggttgggttgacggatgga

SEQ ID NO: 165655 - DNA, 273 bp, Glycine max
gtgggggaatggaagagaaatactcaagcctggaaattgtggaggagagcccaaactcgggtgtgttctttcttatcttaaatcgtccgtcacgacggaacgctctctcgcgcgaattcttcagcgagttcccgaaagctctgcacgcactggatcacaacccggaggtgaaggtgatcgtgttgtccggcgccggggaccacttctgctccggcatcgacctctccctcctgggatcaaccgccgcgagttcgggttcctccggctccggcg

SEQ ID NO: 165656 - DNA, 273 bp, Glycine max
tcgactgccagccctccggcgtcaacgccggcatgctcgtcttcgtcagcggaaaccttcagctcgccggcgaacagcacactctcaagttcagccagatgttccatttgataccaacacctcagggaagctattatgtgttgaatgacatattccgtttaaactatgcatgaagatgtcatatgaccggaaaggccatagaagaagtttgcctatagcaagctgtttcagattgcacatttgaaattgaaattgggttctttttggttggtt

SEQ ID NO: 165657 - DNA, 270 bp, Glycine max
ggcttatggtggatacctaggcacccagagacgaggaagggcgtagtaagcgacgaaatgcttcggggagttgaaaataagcgtagatccggggattcccgatataggtcaacctttcgaactgctgctgaatccacgggcaggcaagagacaacctggtgaactgaaacatcttagtagccagaggaaaagaaagcaaaagcgattcccgtagtagcggcgagcgaaatgggagcagcctaaaccgtgaaaacggggttgtgggagagc

SEQ ID NO: 165658 - DNA, 272 bp, Glycine max
cgcactccgtcttcatcaatcagcatcaccaccgctccaacacaggggaaaattcaaggagatccttcacgttcagggagggcaatgcgggaaccagatcggttcgaagttctgggaagtggtgtgcgacgagcacggcatagatccgacggggaagtacgtcggaaactcagatctacaactcgagcgcgtgaacgtgtactacaacgaagcttcctgcgggcggtttgtcacacgcgcagtgctgatggacctggagcccggacacatgg

SEQ ID NO: 165659 - DNA, 244 bp, Glycine max
cttaagcgaaaagcaatagaattcaaagagagagtttcttgttctgtattttttgatttgatcatttcaatcttcaatttttttttatatatccaccaatccgcaaagtgcaaatttctaatctttcacgtattgggttcttctcttttccctcttcgtctccgatcgatccaattctcttcccatggctacgatcggacacaacaatctcaatgcctaattggttcttctcggggacatgggt

SEQ ID NO: 165660 - DNA, 243 bp, Glycine max
cgcggggctaccgtgagtttaagcatatcaataagcggaggaaaagaaactaacaaggattcccttactaacggcgagcgaaccgggaaaagcccaccatgaaaatcggtcgccctcggcgtccgaattgtagtctggagacgcgtcctcagtggcggaccgggcccaagtcccctggaagggggcgccagagagggtgagagccccgtcaggaccggaccctgtcgcaccacgaggcgctgt

SEQ ID NO: 165661 - DNA, 234 bp, Glycine max
cttcgcaacacaacaaaaactgacaacccagagagcgcgtcttaataaacgctcttctctgaaaacccccatttcttttcttctttcttcttctctttcgcttcttcgatcttcgatcttcgtcgctgaaaatgagacagtgcatttcaatccacatcggccaggccttgattcaggttggaaacgcctgctgggagctttactgcctcgaacacggcattcagcctgatgggc

SEQ ID NO: 165662 - DNA, 237 bp, Glycine max
aaagaactgtatgaccagtatggtgaagatgcccttaaagaagggatggggggaggaggctcgtttcataatccatttgatatatttgaatcattttttggaggagcaagctttggtggtggtggtagttcccgaggtagaagacagaagcatggtgaagatgtggtgcattctttaaaggtttccttggaggacgtttataatggcacaacaaagaaactatctctttctagaaac

SEQ ID NO: 165663 - DNA, 236 bp, Glycine max
gcaaaagagcgtcgtagtcgcaaccctaatcagaagaagcgcagttcaagcgagtgacagccaccagccatgggtcgtatgcacagccgcggtaagggtatatcctcttctgctttgccctacaaaaggacacctcctagctggctcaagatctcttcgcaagatgtcgaagaaaatatctgcaagtttgcgaagaaaggtttgaccccgtctcagattggtgtcattctcagaga

SEQ ID NO: 165664 - DNA, 263 bp, Glycine max
gcgtagtaggtcggaattcgcgtgactcgcgcgaatcggctcagtgttctcgcaaaccatcctgatacacatccggattgctagttcgttgcatgcaaccatagttttattaggattttttcttctttgttttcaattaggtttttttgttgctctccttcaaactccatctttccatatcctctctttgcgcttgtgttttgatctgcttcctactgcgatagtttctctactgttacatggccatggcggtttccgcaatt

SEQ ID NO: 165665 - DNA, 244 bp, Glycine max
ctttcccccctttctggtttcaacgctgcaactatccatggcaaaccactggctcagacccgaggtgtatccactgttcgctgcggttggtgccgctgttgggatctgtggattccaattggttcgtaatatctgcatcaaccctgaagtcagggtgaacaaggagggaagaaaggcaggagtgttggagaactttgctgagggagagaatcatgctgagcatttcctgaggaagtatgtgcgc

SEQ ID NO: 165666 - DNA, 238 bp, Glycine max
ggggattgagaatgcctcaaagcttttatcagagttcaatacaagcgttgtggagtacacgagttatgcagacacaacaacgattccgggtcactacgtgatttattgggaattgttgaccaaggactcgacgaactcacccagtcacgaggtgttgaatcggtgttgtttggagatggaggagtgcttgaactcggtgtatagacaatgtcgtgttgctgatcattccattggccca

SEQ ID NO: 165667 - DNA, 237 bp, Glycine max
gccctaactacgcacgcactcattcttgagaaagctcaatattcattcgtccatggcactctcttctcgtctcttttccaaatccaaattgatctatggctgtcaaatacttctgcaaaaggagcatgctattccagttcgtcactttgctaaagagtctgcccctcctgcccttaagggagatcagatgctgaagaacatttttgtggaggtgaagaacaaatttgagactgccat

SEQ ID NO: 165668 - DNA, 236 bp, Glycine max
ggattgcatattatgggattcaggggaacctcataacctacctcacgggcccactccatcagactactgccatcgccgccgagaatgttaatatctggtcaggaactgcttccttgcttcctctctttggggctttccttgctgattctcttctcggccgctaccgcactataatactcgcttccttcatctatattttgggactaggcttgttaacactatcagctatgcttccc

SEQ ID NO: 165669 - DNA, 237 bp, Glycine max
ccttagcccaaccggatcttcacgattaggagatggctaagtcgaagaaccacaccgctcacaaccagtcctacaaggcccacaagaatggcatcaaaaagccaaagaggcaccgccacacttccaccaaagggatggatccaaagtttctgaggaaccaaaggtacgcgaggcagcataacaagaagagcggtgaaacagccacggaagaagagtaaagtgtcactctcaaatggg

SEQ ID NO: 165670 - DNA, 241 bp, Glycine max
ctttcttctaaaccctatggccgacgaagccaaagccaaaggcaacgcagccttctcctccggggactatcctgccgccatccaccacttctccgatgccatcgccctggctccctccaaccatgtcctctattccaaccgatccgccgcatacgcctccctcaaaaactacgcagatgcattagcggatgccaaaaagacagttgaactcaagcccgactggtccaagggttacagccgt

SEQ ID NO: 165671 - DNA, 240 bp, Glycine max
gtgaaaagtgctgtctcatatgctttaaatagacaattgagtctagaggatctcactaagccagtggaggaagagaacattaaggttacaatggatgactttttgaatgcactccacgaagttacttccgcatttggagcttcaactgatgatcttgaaagatgcagactccatggcatggttgagtgtggtgatcgacataagcacatttatcaaagagcaatgctacttgtggagcaa

SEQ ID NO: 165672 - DNA, 238 bp, Glycine max
ggagaagaggacaattttgccatcgtgtttgcagctatgggagttaacatggagactgcacagtttttcaaacgtgactttgaggagaatggctcgatggagagagtgacccttttccttaatctggcaaatgatcctacaattgagcgtatcatcactcctcgtattgctcttactactgctgaatatttggcatatgaatgtggcaagcatgttcttgtgatactcacagatatga

SEQ ID NO: 165673 - DNA, 239 bp, Glycine max
gaatgtctctgccgaagataaaaccactggccagaaaaataagatcactatcaccaatgacaagggtagattgtcaaaggaagatattgagaagatggttcaagaggctgagaagtacaagtctgaggatgaagagcacaagaagaaggttgaggccaaaaacgctttggaaaactatgcatacaacatgaggaacaccgtgaaggatggcacgattggtgagacacttgacgcggctg

SEQ ID NO: 165674 - DNA, 235 bp, Glycine max
ttgtcaatctcgtaaatgtgttacgagaattgtatttgcacagtccagaggaagctcgccaattgagaaggaaagctctctctcgtattgcatggctgcaaaaagctgatgtgcctaccatagcacagattgaagagttccattcgatgcagaggatgatgaatgctcctgattcaaatgataatatcgatctactgttgagcattgatttgttgggtttacaaggagcaggtaa

SEQ ID NO: 165675 - DNA, 237 bp, Glycine max
gggttgtgaaagcagagaagtgagatacactaagttatcctcataaatacactctaattaggtggcaagataagtgtctaaccttagtaacattgccacatattgtgttcattttggaattgtgccactaaaattctattcaattcatctatggctgcctcttcttatgctatgcaatcaatcctggcaaaccctttgatccgcatttccagcgggtctagggtgaaccaatttggc

SEQ ID NO: 165676 - DNA, 236 bp, Glycine max
gagaaaatcaggtatgaaagttcacttctccgttcaactccttctttctctgtttctactgtctgcatttcacgttccacatatggttgaagatgatatggagcttagagctctgatggagttgaagtcctctctggatccagagggaaagatccttggctcgtggatcagtgatggtgatgcatgcagtggcttcttcgaaggggttgcgtgtaatgaggatcgcaaagtggcta

SEQ ID NO: 165677 - DNA, 238 bp, Glycine max
gggaaaaggtagagtttgtgtcacgggaggcactgggttccttggttcatggatcatcaagagactccttgaagatggatatgctgttaataccactattagatctgacccaggacgcaagagagatgttagcttcctcacaaacctacctgttgcatcagaaaagctaaaaattttcaatgctgatctcagcgacccagagagttttggtccagcagttgagggttgtgttggaatt

SEQ ID NO: 165678 - DNA, 242 bp, Glycine max
  unsure (1)..(242): unsure at all n locations
caaatattgataaaaaggtttctcaagctgaagtgaagaatttttttgaatcagcttgtggcgaggttatgcgccttaggcttttaggggaccaagtgcattcaactcgaattgcttttgtggaatttgcaatggctgaacgtgccattattgcactaaattgtagtgggatgctcttggggacccagcctataagggtgagtcctacatagnatccagtgaggccaagggtccctcgtccg

SEQ ID NO: 165679 - DNA, 238 bp, Glycine max
gagaaaccctagcaaaaatgccggctggtcacggtttgagatcccgcaccagagattccttctctcgtcccttcaggaagaagggtaccatcgccctcaccacatacctcagaacctaccacgtcggcgattatgtcgacgtcaaggttaacggcgccgtccacaagggaatgcctcacaagttctaccatggccgcaccggtcgcgtctggaatgtcaccaaacgtgctgttggggt

SEQ ID NO: 165680 - DNA, 236 bp, Glycine max
tgcaaatccagtaactagccatgtccaaagtgctgagcagcataaccaggatgtgaactctttgggtttaatttcatccagaaagacaaatgaagctatcgagatccttaagctcatgtcttccacattcttgattgcactttgccaagcgattgacttgaggcatttggaggagaatttgaaaaactcggtcaagaacactgtgagccaagtttccaaaaggattcttaccacag

SEQ ID NO: 165681 - DNA, 186 bp, Glycine max
cttctctttacacccccctctctattttgcgttcattctgtattccagttgaagtcttatcctctagccacatggccactcgatcgttatgacccgggcttcacagtactcacgtgagcaggcattgattgaaaacccttcacttgcacaatcatggcaacgatacatttatgagaccctatactg

SEQ ID NO: 165682 - DNA, 235 bp, Glycine max
gagagcacagcgtaacgactcagtcaaacactctgtaactctttattttattttctttctttctttctccgatcgcatagctcgctcgcaaccaccatgccttcccgaagaatcactctcttgaaggtcatcattctcggtgacagtggggtggggaagacatctttgatgaaccaatatgtgaataagaagtttagtaatcagtacaaggcaaccattggagcggattttttaa

SEQ ID NO: 165683 - DNA, 238 bp, Glycine max
ccgcaacaaaccaataatcttcaccatggcaaggcttgaccgtgtgaagaacatcacggggcttgtcgagtggtacgggaagcacgcacgcctccgcgagttggtgaacctggtggtggtggctggagacaggaggaaggagtcgaaggacttggaagagaaggccgagatgaagaagatgtatggcctcatcgagacctacaagttgaacggccaattcagatggatatcctctcag

SEQ ID NO: 165684 - DNA, 240 bp, Glycine max
gagaaacctagcaaaaatgccggctggtcacggtttgagatcccgcaccagagattccttctctcgtcccttcaggaagaagggtaccatcgccctcaccacatacctcagaacctaccacgtcggcgattatgtcgacgcaaggttaacggcgccgtccacaagggcaatgcctcacaagttctacacatggcccgcaccggtcgcgtctggcatgtcaccaaacgtgctgttgagggt

SEQ ID NO: 165685 - DNA, 238 bp, Glycine max
accaaccttgactggtacaagggaccaactctccttgaggctcttgaccaaatcaatgagcccaagaggccctccgacaagcctctaaggcttccattgcaggatgtctacaagattggtggtattggtactgtgccagtgggacgtgtagagactggggttgtgaagcctggtatggtggtgacttttggtcccactgggctgacaactgaggttaagtctgttgagcatgcaccat

SEQ ID NO: 165686 - DNA, 237 bp, Glycine max
cacgtcccgagttttctgatcgctcatagagagttcgacgcggcggttgcagacgaagactgcaagatgaagttcaacatcgcgagtcccaccactggatgccagaagaagctcgagatcgacgacgatcagaaactacgagcattttgggacaagaggatctcacaggaggtcagcggagatgcacttggtgaggaatttaagggctatgtcttcaaaattactggaggttgtgac

SEQ ID NO: 165687 - DNA, 235 bp, Glycine max
atgaactcccagaagagagtgatttagagcctgtcattgttggaagtgcaactcgccttgaatctcaatttcggctaacttataacacgattctacatctccttcgatccgaggaattaaaggtagaggacatgcttaaaagaagttttgcagaattccatgctcagaaaaaacttccagaaatgcaacagctgttgaagcgaaagctcaatcagcccacaaaggctattgaatg

SEQ ID NO: 165688 - DNA, 250 bp, Glycine max
gggaggaggagatccggctgcgatggacgagagaaagaggaagcggatggagtcgaaccgcgagtccgcacggcgatcgcggatgaagaagcagaagctgctcgaagacctacccgacgtagcgcgtcgccttcaaggcgagtaacgtgcgcttagctgcagagcatcaaacggcgaaggcaggaagcgtacacgttgagatcgatagccgacgaacggacatacctcagagtcacaacgaccatggaac

SEQ ID NO: 165689 - DNA, 236 bp, Glycine max
tgcttgtgttgtgttcggtgaagtgagtagtgaaggtgctgaatcgaatcgaatctccgaagatggccgcgagcgatcgcacagtgttgcctcactcttcatcatctgcttcttcgcagagcttgtccgcgaaggtccaccctctggtcatcttcaacatctgcgattgctacgttcgacgccctgaccaagccgatcgcgtcatcggaaccctactcggctccgtccttcccgat

SEQ ID NO: 165690 - DNA, 234 bp, Glycine max
cgcggacgtcagcgatgtcatggtgatgtgcattgatgacgattattcttctgaaaacgatggcgttttgcatttctcaacgctcaccaacgccgacgctatggaagctcctgccgttaagattaaccctgacgacctcgttgcgtctccgttttcttctggcacgtctgggctccccaagggggttatgttatcgcatgacaacttggttaccacgatatcgcagttagttga

SEQ ID NO: 165691 - DNA, 235 bp, Glycine max
cgcaacaaaaagaaagaatcccaggcgaggagaaagatggaggggaaggagcaggatgtgtcgttgggagcgaacaagttccccgagagacagccaattgggacggcggcgcagagccaagacgacggcaaggactaccaggagccggcgccggcgccgctggttgacccgacggagtttacgtcatggtcgttttacagagcagggatagcagagtttgtggccacttttctgt

SEQ ID NO: 165692 - DNA, 234 bp, Glycine max
gtggtatgatattcttcaagaaagatactgtgcatggggttgatttggagcctgccattaccaatgctgtttttcctggtctacaggggggtcctcataaccacacaattggaggactagcagtttgcttgaagtatgctcagtctccagaatttaaaaattatcaaaatcaggtggttgctaactgtagagctcttgctaagcgattaattgagcatggatataaactggttt

SEQ ID NO: 165693 - DNA, 234 bp, Glycine max
gatattttgtcataacaaggtctcctttcttggggggcctaaaagctatgagagagtctgaagtcctttacaccattgaagccattatagcctaccctgaaaatgaaagctggtggagatatctacgaggactttataaaggtgaaactacttcatgggtaaatgatcctcaagtttcttcagtatgcttaaagattttgagaactaagagcaactacgtgtttgctcttagca

SEQ ID NO: 165694 - DNA, 237 bp, Glycine max
cttggatggacacaggcatcccgtatattctgttgctttcagtcccaacggcgattatctagttagtgggtctcttgacagatccatgcacatatggtcattgagggacggcaagattatcaaaacatacacaggcaatgggggcatttttgaggtctgctggaataaggagggtgacaagattgctgcatgttttgctaataatacagtttgcgttttggattttagaatgtaata

SEQ ID NO: 165695 - DNA, 265 bp, Glycine max
attggatccaccaatctccaaccttcttctccactgttccgtttctctctccaaccgagagtcttttgtcttttgcggcgagtttgttgcacgtttaagaagcaatggcacgcaagaagatcagagagtatgactccaagaggttgttgaaggagcactttaagagaatctctggccaggagttgcccatcaagtctgcacaggttacagaatccaccaatttcagtgagctagcagagaaggaaccctggcttccatcttcaaa

SEQ ID NO: 165696 - DNA, 263 bp, Glycine max
cgctgaaactcgcgaaacaaaaagttttatctggtaacgcgaatgattagaggacttgggaaacacactttctcgacctattctcaaactttaaatggctaagattgcgttctcactttggtgtttggagagtgcaaaagaatttgagtttttagtgggccatttttggtaagcagaactggcgatgcgggatgaaccgatcgtgtcgttaaagagcccgagtggatgctcatgtagaacccataaacggtgttgtcgcatta

SEQ ID NO: 165697 - DNA, 259 bp, Glycine max
gtttatttgacattctttaggaagaaagaaaaactctagacagggagttggcccgtgccaaggtaacagcaaacagagtagctgttgtggttgcaaatgaatggaaagatgccaatgataaagtgatgcctgtcaaacaatggcttgaagaacgccgattcttgcagggagaaatgcagcaacttcgtgacaagcttgctatagttgagcgcgctgcaaaatatgaagcacagttgaaagtaataatctggttcttatc

SEQ ID NO: 165698 - DNA, 259 bp, Glycine max
acattcacccattcatacgtgctgttgttactgctgctcttttctcttttcttttctctttagttctctcttcccctttctttttctttttcttcttcttctgagcttgtttaagcttttcttccattaacatattatcacaatgtgtggtattcttgctgttcttggttgttctgatgactctcgagccaaaagggtccgcgtgcttgagctctctcgcagattgaagcaccgtggccctgactggagtgggctccat

SEQ ID NO: 165699 - DNA, 260 bp, Glycine max
ccgacaccgagtggttcttcctcgtctccatgacgcagtccttcgtcaacggcggacgactgcccggacaggccttcttcaactcgacccccgtttgggtcaccgggagtgaccgtctctctgcctcgccctgcgagagggcgaggcagggacatatgttcggcttgcaaaccttagtttgcataccgtccgcgaacggcgtcgttgaactgggttccaccgagttaattttccagaactcggatctgatgaacaaggtg

SEQ ID NO: 165700 - DNA, 263 bp, Glycine max
aaagaaagaaggtttttttagtatagttaacagcatggagagggaggaagatgttaaggttggagcacagaaattctcggagaggcaagcactgggtacaggagctaagagtgacaaggactacaaggaggcaccaccagcacccttgtttgagccaggggagttaaagtcatggtctttttacagagctgggatcgcagagtttgtggccacattcttgttcctctacatcactgtcttgactgtcatgggtgtcaacaggg

SEQ ID NO: 165701 - DNA, 267 bp, Glycine max
aatggctcccaagggtttaatctttttggctgtgttatgcttctcagcactgtcactgagtcgttgtcttgcggaggataatggacttgttatgaacttctacaaggaatcatgccctcaggctgaagacatcatcaaagaacaagtcaagcttctctacaagcgccacaagaacactgctttctcctggctcagaaacatcttccatgactgtgctgttcagagttgtgatgcttcactgttgctggactccacaagaaggagctt

SEQ ID NO: 165702 - DNA, 263 bp, Glycine max
ggctgcttctgttggtggctccaaagtggtccattttgagaacacactcccttccaaagaggttcttgagctttggagaaatggtgatgctgtgtgctttgatgtggatagcactgtgtgcaacgatgaagggattgatgagcttgctgaattctgtggggctggaaaggcagtggctgaatgcactgctagagcgatgggtggttctgttccgtttgaggaagccttggctgctaggctgtctttgttcactccctctttgt

SEQ ID NO: 165703 - DNA, 264 bp, Glycine max
ggctttgtggcaaatgaggaaaccttatatgatggaaaaagacaaaatgaacaacaacattaagagcaagctaaggaagggattgtggtcacctgaggaagatgaaaaactcctaaggtacatgatcactaagggacaagggtgttggagtgacattgctaggaatgctggccttcaaaggtgcggcaagagttgccggcttcgttggattaactacttgagacctgatctcaaacgtggtgcattttcaccccaagaggaaga

SEQ ID NO: 165704 - DNA, 261 bp, Glycine max
ctttgaaaatcgttcaaaaccaatctatctatctatttggtatacgcatggagctttgttggcaaaaatccatccatggctcttaaagaagcttggaggattttgtgtgagagggttctcacccttcacactccacctcctacagtttgcttatgctttagccattggtttctctaatcaatcaccacaaaagggtatacatggaggaacataattctctgagtggcatgaagcagagaagctatggccacatcttagcaa

SEQ ID NO: 165705 - DNA, 257 bp, Glycine max
aaagaactgtatgaccagtatggtgaagatgcccttaaagaagggatggggggaggaggctcgtttcataatccatttgatatatttgaatcattttttggaggagcaagctttggtggtggtggtagttcccgaggtagaagacagaagcatggtgaagatgtggtgcattctttaaaggtttccttggaggacgtttataatggcacaacaaagaaactatctctttctagaaacatattatgcccaaaatgtaa

SEQ ID NO: 165706 - DNA, 260 bp, Glycine max
aaatggtgtcgctgaaactgcagaagcggctggccgcaagcgtgctcaagtgtggcagaggaaaggtgtggcttgaccccaatgaagtcaacgaaatctccatggccaattctcggcaaaacatcaggaagttggttaaggatgggtttatcatcaggaagccaaccaagattcactcacgctcgcgtgcttctaggatgaaggaggcaaagaagaagggccggcactctggttatggtaagagaaagggtacaagggag

SEQ ID NO: 165707 - DNA, 258 bp, Glycine max
cggctcgagttaattgcaagaatggcacttcgttgcttggtgatgtccctttctgttctcttcactcttggtcttgcgagagaaagccatgccagagacgaagatttttggcatgctgtttggccaaacactcccattccaagttcattgcgagatcttctaaagcctggccctgcaagtgttgaaatcgatgctcaccctatgcaaattgaagaaacacagtacccgaaaaccttcttctataaagaagaccttcat

SEQ ID NO: 165708 - DNA, 268 bp, Glycine max
atccgtcaatacctcctttggattttgctatggatgtgtcaagaatgaggaatgttgcttgctatatgagtcatagttcgactcctaatgtgttggttcagtttgttctctatgatcacaataatttgatgttccctcaccttatgctatttgcgatggagagcatccctccgatgagagagctcagccttgattatggggtagctgatgagtggacaggaaagctctctataggtaactgaacaattttgggagtttcatacacttt

SEQ ID NO: 165709 - DNA, 260 bp, Glycine max
caacaaacaagaggggtttgccttgtgccgtttgtcttgttttcgggacgaagaagaagatggtgtcaggctctggaatctgcgcaaagcgggtggtggtggacgcgcgccaccacatgctgggtcgtctagcctccatcgtggcgaaggagcttctgaacggccagaaagtggtggtcgttcgctgtgaagagatttgcatctcgggcgggctggtgaggcagaagatgaaatacttgaggttccttcgcaaacgcatg

SEQ ID NO: 165710 - DNA, 257 bp, Glycine max
ctttcccccctttctggtttcaacgctgcaactatccatggcaaaccactggctcagacccgaggtgtatccactgttcgctgcggttggtgccgctgttgggatctgtggattccaattggttcgtaatatctgcatcaaccctgaagtcagggtgaacaaggagggaagaaaggcaggagtgttggagaactttgctgagggagagaagtatgctgagcatttcctgaggaagtatgtgcgcaacagaactcctg

SEQ ID NO: 165711 - DNA, 258 bp, Glycine max
cgaaataccaattctgtctcacatagttctataacaccacaaactgtccaattccaatggttgttctctcttgtgttaaaacaatggttgtgcttgtccttgcgtttctaatctctgtgccttctatggttgcttctgctgtcagcttgtaccaagatgttgatgtcacgtggggagatggcagaggtaagattctgaacaatggtcagcttcttactctgtctctcgacagagcctctggctctggctttcagtcca

SEQ ID NO: 165712 - DNA, 266 bp, Glycine max
cgggatcggagtaatgattaacagggacagtcgggggcattcgtatttcatagtcagaggtgaaattcttggatttatgacagacgaacaactgcgaaagcatttgccaaggatgttttcattaatcaagaacgaaagttgggggctcgaagacgatcagataccgtcctagtctcaaccataaacgatgccgaccagggatcagcggatgttgcttttaggactccgctggcaccttatgagaaatcaaagtctttgggttccgg

SEQ ID NO: 165713 - DNA, 264 bp, Glycine max
cgctatttgagtcaatttaatttcttcttcatgatgagttcaaaatgaagaggaaattataagaataataaaaatattgtcaataatggcaattgcttgtgcttttattgcaaccttttctttgatcctattatgtagattaaaggttcttttcaagacaagagccattggtaaataccctttagtattttcaagcactttcctttctttcagtgtgtgatattttcttttaggtaatttaatctcttgtactcaacgtggaaa

SEQ ID NO: 165714 - DNA, 263 bp, Glycine max
cggctcgagatttgggagttaggttctgcacgctctgcttccagcgagtgttctttcttcgtttcaacaccttaatttgcacacgctgcttcttcagcttgagaaatggcacaagaaacctttctattcacatctgaatctgtaaacgagggtcaccccgacaagctgtgcgaccagatctctgatgcagtgctcgatgcgtgccttgaacaggaccctgacagcaaggttgcctgtgagacatgcaccaagaccaacatggt

SEQ ID NO: 165715 - DNA, 260 bp, Glycine max
atggcccctccatcccgccgccgaaaacctcctaccaccgcccagggcgcggcggaggctgctgctgcggctgcctcttcagcctcatcttcaagctcatcttaaccgtgataatcatcgttggcatcgccgggttcgtgttctggctcatagtccgtccgaacgtggtgaaattccacgtgaccgacgccaccctgacgcagttcaactacaccgccaacaacactctccactacgacctcgccctaaacatcacggtc

SEQ ID NO: 165716 - DNA, 260 bp, Glycine max
gaagacaaatgtgattggcacactgaacatgcttggactcgctaagcgagtaggagcaaggattctgcttacatcaacttcagaggtatatggggatcctcttgtgcatccccaacctgaaagttattggggcaatgttaaccctattggagttcgtagttgctatgatgaggggaaacgggtggctgagacattgatgtttgattaccataggcagcatggaattgaaatacgcattgcaagaatctttaacacatatg

SEQ ID NO: 165717 - DNA, 255 bp, Glycine max
ggagcaaggccactccattttcagcctcaagagcatcctttggcatggtggttctgtttgggatgcatggtttagctgtgcttcaaatcaagtggctcaagtgctcttgacactgccatgctccttctctcaacttggcatgctatcaggaatcatttttcaggtgttctatggaattattggaagctggactgcttatctaatcagtgttctctacatagagtaccgcaccagaaaggaaaaggaaaacgtcaa

SEQ ID NO: 165718 - DNA, 255 bp, Glycine max
cttctcttcgccttttgctttgcaattgtcaccaaacaattcttgcttagctctcacaagcaagcattatcaacaatgaagaaaattgtgttaaaggtggacttacatgatgacaggatcaagcgaaaagctatgaagacagcatctggcctttcgggggttcaatcagtttctgttgacattaatgacaagaaaatgaccttattgggggatgttgatccagtgagtgcagtgtcaaagctacgaaagtggtgt

SEQ ID NO: 165719 - DNA, 257 bp, Glycine max
agaaaatcctcaattttctgagcagccaaacactctctctctgtctctcgaaaattctcagtttgcagagaaaatctgaatcatgtcgtggcaagcgtatgtcgacgatcaccttctgtgtgacatcgaaggtaaccacctcactcacgctgctatcatcggccaagacggcagcgtttgggctcagagtaccgacttccctcagttcaaacctgaggagataactgccatcatgaatgactttaatgagcctggat

SEQ ID NO: 165720 - DNA, 257 bp, Glycine max
gagtgagtgagcaagagtgaagagcgaagagaatggctcccaagggtttaatccttttggctgtgttatgcttctcagcactgtcactgagtcgttgtcttgcggaggtcaatggactttatgaacttctacaaggaatcatgccctcaggctgaagacatcatcaaagaacaagtcaagcttctctacaagcgccacaagaacactgctttctcctggctcagaaacatcttccatgactgtgctgttcagagttg

SEQ ID NO: 165721 - DNA, 255 bp, Glycine max
gtcaggatgcacgctgagaaaaccggaaacaatgcctatctcaaccttatcccgctccttgttggcaatgtgggattgattttcaccaaaggtgacctgaaggaggtcagtgaggaggttgccaagtacaaggttggagctcctgctcgtgttggtttggttgccccaattgatgttgttgttcctcctggcaacacagggctcgatccctcccagacctctttcttccaggtgctcaacattcctaccaagatt

SEQ ID NO: 165722 - DNA, 260 bp, Glycine max
gcgtcgctccgcaccagtttcaccgcacgaatatcttgttgtttggagcgatccgagaaaaactctgtaaacatgttggtttaccaggacctccttacaggtgatgagcttctctctgactccttccgttacaaggaaattgagaatggaatgctgtgggaagttgaggggaagtgggttgttaaaggagcagttgatgtagacattggtgcaaacccttctgctgagggtggaggagaagatgagggagttgatgatgc

SEQ ID NO: 165723 - DNA, 258 bp, Glycine max
atcagcattcacataggtcaggccgggatccaggttggcaactcctgctgggaactctactgcctggaacatggcatccagcccgatggcatgatgccaagtgactcctccttcggtgtagcccacgacgccttcaacaccttcttcagcgaaaccggatccggcaagcacgtccctcgcgccgtcttcgtcgatctcgagcccaccgtcatcgacgaatccgttgtggcacttaccgtcaactcttccaccccgaac

SEQ ID NO: 165724 - DNA, 260 bp, Glycine max
ctctttcaaaagggagaagaaaaggaaaggaaacaaaacgcacaaaggattattatagcaatggcagaacaaaaccaaaacccgacaactgaagctggaaggcaccaagaggttggccacaagagccttctccagagtgatgctctttaccagtatattctggagaccagtgtctacccaagagaacctgaatccatgacagaactgagagagttgacagcaaaacacccatggaacatcatgacaacctctgcagacga

SEQ ID NO: 165725 - DNA, 255 bp, Glycine max
gcaactaatcttaacattggaatggacttgtggaatgcatcttctggtggcgctgaagctgcaaaaatgagacataatcaatctggtgccccgggagttgcccttggtgatcaatgggtacaagatgaacgtgagctgaaaagacagaagaggaaacagtcaaaccgagagtcagccaggaggtcaagattacgcaagcaggctgagtgtgaagagttacaaaagagggtggaatcgctgggaggtgagaatcaa

SEQ ID NO: 165726 - DNA, 249 bp, Glycine max
gttgggtagggtgaattgcaatttcaattaattagaattcaacgtttgcaaattgcatattgttcttctcttcctctcttcctctgactccatgtcgtcgataacgggcatccaggggcaacctcttgaggttacggtggtttcgtgctccaagttgaaggacacagaatggatttcaagacaagatccgtacgtttgtgttgagtatggcagcacaaagttccgaaccagaacctgcacagacggcgg

SEQ ID NO: 165727 - DNA, 257 bp, Glycine max
actcgagccgattcggctcgagcatgcttgaaggcgaggctgatgacctcaagagggtattctctggaagggaatccttacctacctggcaattaccatggttgtttctcttcttcattcagtctttgacttcttggctttcaagaatgacatccaattttggaacaaaaataaatctatggaaggactctctgcaaagaccgttgttgtgagctttgcttgtcagcttatcatcttcctttatctacttgacaatg

SEQ ID NO: 165728 - DNA, 255 bp, Glycine max
gtttggttctgtagtaagtgaggtgaggtgccaaaatggtgaagataactcttggtactttcgatgactcttttggtgttgcctctcttaaggcttatttggcagagttccatgcaactctgatttccgtgttcgctggtgttggttcagccatcgcttacaacgagcttacaaaagatgcagccttggatccaacggggctggtggcagtagctgtggcgcatgcatttgcactgtttgtaggtgtctccgtcg

SEQ ID NO: 165729 - DNA, 251 bp, Glycine max
cggctcgagtcgcaatctcagaacagaacacaacagagccctacaactctctctgtcgttgatggcgtcacaagcgagcctccttcttcagaagcagctcaaagatctttgcaaaaaccccgtcgatggcttttctgccggtttggtcgacgaaaccaacatttttgaatggagtgtaactataattggacctcccgatactctttatgaggggggatttttcaatgccattatgagctttccacacaact

SEQ ID NO: 165730 - DNA, 257 bp, Glycine max
gccgttgctctgcttcaaccttgcggaagaagaagacgccgcagccatggtgaagtactccagagaacccgacaatcccaccaagtcctgcaaggccagaggcgctgacctcagagtgcatttcaagaacactagggagactgcctttgccatcaggaagttgcccctggttaaagctaaaagatacctggaggatgttttggcccacaaacaggccatccctttccgacgcttctgtggtggtgttgggaggacag

SEQ ID NO: 165731 - DNA, 259 bp, Glycine max
caagacttggtgagtgtcactgctgaagagagaaccacgcagaactgacgcaatgggaagcacaagtttgcttcatctattacttggtgttgttttggctctgctgagtgtgtctcttgtggaaggagaagatgcatacaaatactacacgtggactgtgacatatggcattctttctccactaggtagtcctcagcaggtggttcttatcgatggtcagtttcctgggcctcaactagacttggtaactaatgaaaat

SEQ ID NO: 165732 - DNA, 257 bp, Glycine max
atcctgcattattgttgacaacatggccacggagcttctccaaattgatccccctcagctcacttttacctttgaattgaagaaacagagttcctgcttggttcatctcatcaacaacaactcttctcaccatgtcgccttcaaggtcaaaaccacgtcgcccaagaaatactgcgtcagaccaactgtcggcatcgtcaagccacacggaacatgtgatttcaccgttactatgcaggctcagcgcacagccccac

SEQ ID NO: 165733 - DNA, 255 bp, Glycine max
gcctgatgaagcagctcacaacttcgctttcatgcagctcaagaagatttttccagatgcttcttcaccgattcagtatcttgtgtctcgttggggatcagatataaattcactaggttcatatagctatgatgcagttgggaaaccccatgaactatatgagaggctacgggtcccagtagataacttgttctttgcaggggaagcaacaagcatgagctatccaggatctgtccatggggcatactccactgg

SEQ ID NO: 165734 - DNA, 256 bp, Glycine max
ggatagactacgtgttcaaggtggtgctgataggggactcggcggtggggaagtcgcagatactagctcggtttgcgaggaacgagttcagcttggactccaagtccaccatcggtgttgaatttcagacgaggactttggttatcgatcacaagaccgttaaggctcagatctgggacactgccggccaagaacgatacagagcagttacgagtgcatattacaggggtgctgtgggggcaatgttggtttatga

SEQ ID NO: 165735 - DNA, 257 bp, Glycine max
gtttgttgttgtaactcgttcttcttcttttgttgttctgtgtttgtgtttgttttttctctcacctgaaaatgtcttgctgcggtggtaactgtggttgcggaagctcctgcaagtgcggcaacggctgcggaggctgcaagatgtacccagacttgagctacactgagtcaaccaccaccgagaccttggtcatgggagtggcacctgttaaggctcaatttgagggtgctgaaatgggtgtgcccgctgagaac

SEQ ID NO: 165736 - DNA, 258 bp, Glycine max
aaagcaacctcccatgccatctcccttgcggttttccaagttctttcagtccaatatgagaattctggttactggaggagctggatttattggctctcacctagttgacaaattgatggaaaatgaaaaaaatgaggtcattgttgctgacaacttcttcactggatctaaagacaaccttaaaaaatggattggccatccaagattcgagctaattcgtcatgatgtcacagagcaattgttgattgaggttgatca

SEQ ID NO: 165737 - DNA, 260 bp, Glycine max
gttggtggttgtgagtggacaatcatcagtgaagcctttggtgaagacagtgaaggggaagaaggtgtgtgacaaagggtgggagtgcaaaggttggtctgcatattgctgcaatgagactatctccgactacttccagacataccagtttgagaacctcttcgcgaagccaattcgccggtggcacatgctgttggtttctgggactaccgttctttcatcaccgctgctgcactgtaccagcctcacggctttggcac

SEQ ID NO: 165738 - DNA, 259 bp, Glycine max
acctgattaaggagagtatggcacagtttagtggcaaaactttggtgcagtggttggtagcaacactgctgattgccttgttgggtggtgcacaagctgttgtgttatgtaacatcgactcaagtcaactaaacttgtgtcgtgctgcagttactggtcaaaaccctccaccaccagatgagaaatgttgtgcagttattcgccaagccaatttaccttgcctctgcagatacaagtctattcttcctttaattggaat

SEQ ID NO: 165739 - DNA, 259 bp, Glycine max
ctcacccttgctcgtgatattgaagtcatggagcccaagtcccctgaggatatatacaaggcacacttgcttgatggccgggctagtgctggtgcaagtgttgattcagctagacagaaccttgctgcaacttttgttaatgcatttgtaaatgctggctttggtcaggataaattaatgactgttccatcagattcttcaagcagtgcttcttctacgaaattggcttttcaaaaataaggaacatgggaagactagt

SEQ ID NO: 165740 - DNA, 254 bp, Glycine max
ctcgagcccttctctctttcttgttgtgtccaaaatggctcctagttctactcacaatagcggccgctatgtgctcctgcgagttgggatagtgattagcactatggttgctacctgtgctggtagcttctaccaagactttgatctaacatggggtggtgaccgtgctaagatattcaatggtggccagcttctatctctttcccttgacaaagtctctggctctggcttcaaatcagagaaagaatacctat

SEQ ID NO: 165741 - DNA, 259 bp, Glycine max
gttctcacttctgctgacgtggcagtggaggggttctgttccagtaggtgcggaacacacggatcctccgtgggggcgcgcgtgaacggaaagagatacaagttggcgtacatttgggtgggtaattcagagacacagtgcccgggtcaatgcgcgtggccgttccaccaacccatttacggtccccagaatccacctttggttgcacccaacaacgatgtaggacttgacggcatgctgatcaatgtggctagtctcc

SEQ ID NO: 165742 - DNA, 265 bp, Glycine max
catcaactgaagcttatatgtgaagtcttgttacagagcttgtcaataccaagcacgagtactggtagtacaattgacaacaacatggccaggctaaggtggatggagcaaagttctcaacataacttatctggaggagctaacataaaccttgctgacgggccaacagcacgtatggaggccccagaggggattaccagaacgctcagtggcaatgcttggagcttcgctatttgaacatctcctacatcagtacaccacggac

SEQ ID NO: 165743 - DNA, 259 bp, Glycine max
ttgcgatcgaagagagatgggggacggaagtgggaaccggtggagcagggcggagtgggtgcagcagtacgatctcttaggcaaaatcggagaaggcacttacggcctcgtcttcctggcccgaaccaaaggcactccctccaaatccatcgccatcaaaaagttcaagcaatccaaggacggcgacggcgtctcccccaccgccatccgcgaaatcatgctgctcagggagattacgcacgagaacgtcgtcaagctc

SEQ ID NO: 165744 - DNA, 258 bp, Glycine max
ttcctagctagtgcttccttcgtcaacacccctattagctgatgacgcaaattctgctccatgggactcttcatgccagtatctatgaagtccataagctcagaattggtggaggcaactttttaaccaagatcgtacaaaacatcgaggagactgttggtattggaaaaggtgtcactaaactatatgcaaccattgatctagagaaggcacgagtggggaggaccagaattattgaaaaagaggttaaaaatccaa

SEQ ID NO: 165745 - DNA, 254 bp, Glycine max
ccgattgctagaatggaatttcgatgctcagtcatctcttttaccattctcttctctcttgctcttgcaggagagagccatgtccatgcatcgctacctgaggaagattattgggaagctgtttggccaaacactcccattcccactgcactgcgagagcttctaaagcctctccctgcaggtgctgaaatcgatgaactccctaagcaaattgatgatacacagtacccaaaaacattcttctataaagaaga

SEQ ID NO: 165746 - DNA, 258 bp, Glycine max
agacagtggtttcagtgagtgatcggtgttcacttgatccttcataagtcgtcatcatcatcatcatcatcaccgttgattgaagaagatgccgatcagaaacatcgccatcgaaaggcctgaagaggctactcaccccgacacgttgaaggcggggttggctgagttcatctccaccttgatcttcgtgttcgccggttcaggttccggcatcgcctacaacaagctcaccgacaacggcgccgccactcccgccgg

SEQ ID NO: 165747 - DNA, 262 bp, Glycine max
gttgtgttgtgtgctgcaacacatccagaaacacaatcggtgtcgtgttgggttgggttttgctgttattaaaagaaaagaaaacgggggatggctcggagagcagaggaagagtacgattatctgttcaaggttgtactgatcggtgattctggtgttggaaaatccaatctcctgtcccgattcactcgcaacgagttttgcctcgaatccaagtccaccattggagtcgaattcgctactcgcactcttcaggtggagg

SEQ ID NO: 165748 - DNA, 262 bp, Glycine max
gatcaattgcaacggttgaattttgactgaagacaaagttagaaaaaaaaaacatgtcttgctccgtcgcggtttccaattcgccggtgttctctccttcttcttccctcttctgctcgaagccctccatcatctcttcttcgccggaatccctctccctctctctgtcgcatctcaaaccttcgaactcttctacgtcgtcgtcttgttcttcgccttctgctgctgctgcttcttcttctccttcttctccgtttcgact

SEQ ID NO: 165749 - DNA, 258 bp, Glycine max
cagagttaaagctgcagctgtatgccacaaagacacatcagaatgggatccaaaccatgtgtttttacaaatgcttaaaaccaagcctggagctgctccagtgtgtcacatcttccctgagggccaccttctctggtttgccaaataggttacttaagtctttatttgttagtgtgtccttaaataagtaggcatttccatattgcatctgatgtactatatcagcctacaatgtatttctctatgtttgaaattgtg

SEQ ID NO: 165750 - DNA, 256 bp, Glycine max
attaataacaagctagctattacttcgattttgtagtaagtgaggtgccaatatggtgaagatagctcttggtactttggatgactcttttagcgctgcctctcttaaggcttatttcgcagagttccacgcaactctgatttccgtgttcgctggtgttggatcagccatcgcttacaacgagcttacaaaagatgcagccttggatccaacggggctggtggcagtagctgtggcacatgcatttgcactgttt

SEQ ID NO: 165751 - DNA, 258 bp, Glycine max
cgcctcagtagaccatggcctcattgggtgggttacaaaatctaagcggcatcaattttactatcacaaaagagggtccaaaagtcaatgcgaagttcgagctgaagccgccaccatatccactgaatggtttggagccggtgatgagccagcagacacttgagtttcattgggggaaacaccacaagacatatgtggaaaatctgaaaaaacaaattgttgggacagagcttgatgggaaatcactagaagagatta

SEQ ID NO: 165752 - DNA, 262 bp, Glycine max
tcggaggccgagaagggctcatattagagaaaccatatcatttgggtgattcactgaatggagtgtctggattagacattaatgcagaagagaaagttgtgcgtgacaaattaagtgagttacaacaactgggggccacagaaaaagaaattaaagaggttatgaaggacttgggcattagcagggcaaagttatatggatggccaaacacatatgtattcaccaaggcaatgggagagatgcttgtggagcaactaaaagg

SEQ ID NO: 165753 - DNA, 262 bp, Glycine max
tttgggagttaggttctgcacgctctgcttccagcgagtgttctttcttcgtttcaacaccttaatttgcacacgctgcttcttcagcttgagaaatggcacaagaaacctttctattcacatctgaatctgtaaacgagggtcaccccgacaagctgtgcgaccagatctctgatgcagtgctcgatgcgtgccttgaacaggaccctgacagcaaggttgcctgtgagacatgcaccaagaccaacatggtcatggtctt

SEQ ID NO: 165754 - DNA, 259 bp, Glycine max
gtgagactcagattactccaacccatgtatctgatgaagaggcaaaccttttcgccatgcaactagccagtgcctcagtactccctatggttctcaaatcagctcttgagcttgatctgttggaaatcatagccaaggctggccctggtgttcacctttccccctccgacattgcttctcggctcccaacacacaaccctgatgcacccgttatgttggaccgtatattgcgcctcttggcttgctacaatatcctctc

SEQ ID NO: 165755 - DNA, 257 bp, Glycine max
cacctatctacaagtaagctcaaattatgaaagcaccattcatgatgaatcatgttctagttttcatcgaggaataaaggcaagctctattttgagccaagtgaaacatctatcttcctgtctaagttctttgaataaaagtctgaatgtgtcatctctatgctacaatgtttatgattcagatcaggttgattctatttgtttgatggccatcttgcacgtcctgatcttattgtgttcaagtgacggacaaatcc

SEQ ID NO: 165756 - DNA, 257 bp, Glycine max
aaaagaaaatcctcacccattttcttcgtagccaaacactctgaaattctcagttatgtcgtggcaagcgtatgtggatgatcacctactgtgtgaaatcgaaggtaaccacctcactcacgccgctatcatcggccaagacggaagcgtttgggctcagagcaccaacttccctcagttcaaacctgaggaaataactgccatcaataatgactttaatgagcctggatcacttgctccaactggattgtatatcg

SEQ ID NO: 165757 - DNA, 256 bp, Glycine max
cttaatttcctcactcacaaggaacaccaatgacaaagccattcactttcctccctttcctcttcctcaacatcttcatccaaacaatttcagcccacgtagcaccggcaccagcgggacccaccaacatcacccaagtgcttgagaaagcaggacaattcacaaccttcatcaaactcctcaaagcctcacaaatagctgatagaatcaattcacagctaaacaactcaaaccaaggcctaaccgtgtttgcacc

SEQ ID NO: 165758 - DNA, 238 bp, Glycine max
ctctctctcaccaaagccttcctagaacgaaaaaaaaaagaagagcaattttccctcaccaaagaagaagaagcaaacaatggccgatcaacttaccgatgaacagatctccgagttcaaggaagccttcagcttgttcgacaaggacggcgatggttgcatcacaaccaaggagcttggaactgttatgcgttcattggggcaaaacccaactgaggcagagctccaggacatgatc

SEQ ID NO: 165759 - DNA, 257 bp, Glycine max
gtttttaagtatagggactaactgggaaaaattttgtaactataggaacccaacgagtaattaaatctttcagaagataagaattttaatatttttatttttccaagtttcccctcgagccgctcacgttgaacgatacttttggaccttggtcaaccagcctaacttcagaaagattctaggtcaggttaagcaaactgaggctgttccacctattccatcggcaaagaagccttcccagtctaaggaatctaagc

SEQ ID NO: 165760 - DNA, 256 bp, Glycine max
gttcactgtcactttacccaatcctaacactttctgctctctgttttccttcttcctcgcatcaatggagtcggacggcgttctcctcggcatgtgcaaccctctcctcgacatctctgccgtcgtcgacgacgctttcttgcaaaaatacggtatcaagttgaacgatgcgattctcgccgaggataaacacaaacctatgtatgaagaattggctaacaatcctaatgtggagtacattgctggaggtgctact

SEQ ID NO: 165761 - DNA, 255 bp, Glycine max
aatggactggtttggccagtagattactgagtaagggtaacgatattctgtgttgcgattatgctagtattgtatgtgtgattaccaagcaagttatgagcaagatggcagaaatgatgaagagtctttgtggtggtgatgaaggattgatgcgtgaaatgacacacctgctgttggcttgttgttcaaggatggcaatttgtaagaaagatcgcttggagagttgaatgtggaatcccttctggatttccgctc

SEQ ID NO: 165762 - DNA, 255 bp, Glycine max
atagcatatttctaaccacactcaaaaggcttcccttcctgacttggatttcattacattgctaaactatattatttttattggtgaattgctacactatattctaaggacaattaaacatagactatatggggttgatggatgtggaccaaactcaattgttgtctaagatggtcatcggagatggacatggtgaagcatcaccatactttgatggatggaaggcttatgatgaaaacccctttcatcccaaag

SEQ ID NO: 165763 - DNA, 256 bp, Glycine max
attcatagcatatttctaaccacactcaaaaggcttcccttcctgacttggatttcattacattgctaaactatattatttttattggtgaattgctacactatattctaaggacaattaaacatagactatatggggttgatggatgtggaccaaactcaattgttgtctaagatggtcatcggagatggacatggtgaagcatcaccatactttgatggatggaaggcttatgatgaaaacccctttcatccca

SEQ ID NO: 165764 - DNA, 255 bp, Glycine max
aatccacacaaactcagggcacggcagagagagagagagagagagagagagagagagagagtgggacggtgggctatcgcggtgcatggtggcgctggtgtcgaccctaatctcccactcgagcgccaagaagaagcgaaacaacttctcacgcgctgtctcaatcttggaatctctgctctaaattctaatcttcccgacatagatgtcgtcgaacttgtggtgagggaattggaaacggatccgctgttcaat

SEQ ID NO: 165765 - DNA, 253 bp, Glycine max
attcagcaagtgcgtttcggaagcagagaccgaaatacttcgagatggcccgtacaaagcaaactgctcgtaagtcaactggaggaaaagctcccaggaagcagcttgcaaccaaggctgcacgtaagtctgctccaacaactggtggtgtgaagaagcctcatcgttatcgccctggaactgttgctcttcgtgagattaggaaataccagaagagcactgagctcctaatcaggaagcttcctttccagag

SEQ ID NO: 165766 - DNA, 250 bp, Glycine max
ctccgcaccagtttcaccgcacgaatatcttgttgtttggagcgatccgagaaaaactctgtaaacatgttggtttaccaggacctccttacaggtgatgagcttctctctgactccttccgttacaaggaaattgagaatggaatgctgtgggaagttgaggggaagtgggttgttaaaggagcagttgatgtagacattggtgcaaacccttctgctgagggtggaggagaagatgagggagttgatg

SEQ ID NO: 165767 - DNA, 255 bp, Glycine max
ctcactcactgcaacgccgccggacatccgtcgctctcctcctccaccaccaccgcgatgggcgccaattccatgctcgccgagttctctcacgatctcgacgaccagatctcccagctcatgcagtgcaagccactctccgagcaacaggtccgaggtttatgtgagaaggctaaggagattttaacggatgaaagtaatgttcagcctgttaaaagccctgtgacaatttgtggcgatattcatgggcagttt

SEQ ID NO: 165768 - DNA, 259 bp, Glycine max
ccgtcttaggagggaggaaatttcagctgtgtggattagctcagtacataaatcttgtcggtgtaactatcggttacacgataacggcttcaattagtatggtggcggtgaagaggtcgaattgttttcacaaacatggtcatcatgttaagtgctatacgtcaaacaaccctttcatgatcctctttgcctgcattcaaatcgtgcttagccagataccaaatttccataagctctggtggctctccattgttgcagc

SEQ ID NO: 165769 - DNA, 258 bp, Glycine max
gtcgactcctgctaggaagaggctgatgagagacttcaagaggctgcaacaagacccgcctgcagggatcagtggtgccccccaggataacaacataatgctgtggaatgctgtcatatttggtcctgatgatactccatgggatggaggcacgttcaagttgacactccaatttactgaggactatccaaataaaccaccgactgtacgatttgtgtctcgcatgtttcatccaaatatttatgctgatggaagtat

SEQ ID NO: 165770 - DNA, 251 bp, Glycine max
attaattgcaagaatggcacttcgttgcttggtgatgtccctttctgttctcttcactcttggtcttgcgagagaaagccatgccagagacgaagctttttggcatgctgtttggccaaacactcccattccaagttcattgcgagatcttctaaagcctggccctgcaagtgttgaaatcgatgatcaccctatgcaaattgaagaaacacagtacccgaaaaccttcttctataaagaagaccttcatc

SEQ ID NO: 165771 - DNA, 253 bp, Glycine max
gttgatccatctcttgtttcttgctttctttcttcaccatgtcacttgctgggaaaatcaccactgaaatcggggttcatgcaaccgctacaaagtggttcaacctcttcgcaacacaactccatcatgttcaaaacctaactgatagagtgcatggaaccaagctgcatcaaggtgaagactggcatcacaacgagacagtcaagcactggacttataccatagatggtaaggttacaacatgtctggagag

SEQ ID NO: 165772 - DNA, 259 bp, Glycine max
cttgctccctcagaagcgaagaataagccacagagaactagtctgctactctcagccgcaagaaaaaaatggcatctcacatcgttggatacccccgtatgggtcccaagagagagctcaagttcgctctcgagtctttctgggatggcaagagcagcgccgaggatttgcagaaggtgtcttctgatctcagggcatccatctggaagcagatggctgatgctgggatcaagtacatccccagcaacactttctctca

SEQ ID NO: 165773 - DNA, 253 bp, Glycine max
ggcgagttgagagagaatgggaaggatcgaaggggtatgttgagttcgaggagtcgccgccggacgatttcgatccggcgcatccgtacaaggacccggtggcgatgctggagatgagggagcacatcgtgagggagaagtggatccaaatcgagaaggccaagatcattagggagaagctccgatggcgctaccgcatcgaaggcgtcaaccacctccagaagtgccgccacctcgtcaaccagtatctcga

SEQ ID NO: 165774 - DNA, 256 bp, Glycine max
ctctcccctccgccatggctgaggataaggagatgtctacctctgtcatcaatgggaatgattccctaactggtcacatcatatctacaactattggaggcaaaaatggggaaccaaacagactattagctacatggcagaacgggttgtaggaactggatcatttggaatcgttttccaggcaaaatgcttggcaactggggaggcagtggcaattaaaaaggttttacaagacagaagatacaagaatcgtgaa

SEQ ID NO: 165775 - DNA, 253 bp, Glycine max
ctctctctctctgctcaactgaataaagcagagaagaataagaacatgggtgtgttcagtacagtgctgctgtgccttatgtccctaatgtggatggtggatgctcgaattccaggcgtatactctggcggcgcttggcaaaatgctcacgctacgttctacggaggatccgatgcttccggcaccatgggtggagcatgtgggtacgggaacctgtacagccaagggtacggagtgaacactgcagcgttga

SEQ ID NO: 165776 - DNA, 249 bp, Glycine max
acaacaactactatgggtatggcagatgcaaagcaaagatatgctgttgtcacaggtgcaatcaaagggataggattggagacagtgaaaggtttagcctctaatggcctcaaggtggtgctcacggccagggatgtgaagaggggttaccaagctgttgaggaattgaagagagaatttggtttctctgaccttgttgtgtttcaccagcttgatgtcactgacccttctagtattgcttctttagtt

SEQ ID NO: 165777 - DNA, 249 bp, Glycine max
gatcagttccccaagtggttccccatcacacgtgaaatctacttggaccgtttgtccttgaggtttgagcgcgaaggggagacaaacgaactagctccagttgatttctttgtgagtacagtggaccctttgaaggaatctctcattataacagccaacactgtcctttcaatcctctctgtggactatcctgttgacaaagtcagctgctatgtctcagatgatggtgcatctatgcctctgtttgat

SEQ ID NO: 165778 - DNA, 248 bp, Glycine max
atcgcaatctctaattttgaagtttattatacccaatctcaatatgcagatcttcgtgaaaaccctacactggcaagacgatcaccttggaggtggagtcctttgacaccatcgacaacgtgaaggccaaaatccaagacaaggagggcattccaccggatcaacagcgtttgatcttcgccggaaaacagctcgaagacggcagaaccctcgccgactacaccttccaaaaggagtccacgctccac

SEQ ID NO: 165779 - DNA, 250 bp, Glycine max
ccactctccaaaatttctctctccattccttgcgcttccatccatcatggccatcgcaacagagactcagcctcaacaacacaaggattcttcggcggtttcgggttcagctgcggagaaagaaggtggacgcttaacgatttcgatatcggaaagcctcttggaaggggaaaattcggtcacgtctatttggccagagagaagactagtaatcatattgttgctttgaaagtactcttcaagagtcaat

SEQ ID NO: 165780 - DNA, 263 bp, Glycine max
tagccattggatcgaattcagtttagattcggtctgatggtttgggagttctaataagtctaaggaacagaaattctgtacatatatatttagaagatcacaggtgcttgatcagtggtgtatcaatatggacaaggtgatgaggttggcctctgaaaagggtgtggtgattttcacaaagagttcttgttgcctctgctatgcagttaacattctgtttcaagaacttggggtgaatcctgtggttcatgagattgatcatg

SEQ ID NO: 165781 - DNA, 254 bp, Glycine max
cttcccttcccatggtctctctctcttcaattaattccatttagctttccccaaatcccaaaccctttttcgcttagatcccaatccaattgggttatggacatggcttccagtccccgcaccgtagaagagatcttcaaggattacagcgccagaagaacctctgttattcgcgctctcactcacgacgttgatgaattttacggcctctgtgatccagataaggataacctgtgcctctatggacatccaaa

SEQ ID NO: 165782 - DNA, 251 bp, Glycine max
gatcctagcactctcttctgcagctttcgccgacagcttcattcaccatggctgagcaaaccgagaaggcttttttgaaacaaccaaaagtgtttctcagctcgaagaaaactgggaagggaaagagacccggaaagggtgggaaccgcttttggaaatccattgggcttggatttaagactcccagggaagccatcgaaggaacctacattgacaagaagtgccccttcactggcaatgtttccatccgt

SEQ ID NO: 165783 - DNA, 248 bp, Glycine max
caaaacttggcaccaggttaattaaggagagggtatagtatggcccagtctagtggcaaaactttggtgcagtggttggtagcagcattgctcattgccttgttggcgcggtgcacaagctgttgcaatatgtaacatagactcaagtcaattaaacttgtgtcgtgctgcagttactggtcaaaaccctccaccaccggatgagaaatgttgtgcagttattcgccaagccaatttgcgttgcctct

SEQ ID NO: 165784 - DNA, 249 bp, Glycine max
tcaaagacttgaggattcagaccaatgtttatggcaatggaagcaccagcattggtagagaggaaagatatggcttatggtttgatcctgctgaggatttccatcagtacagtattctttggacagattctaagatcatattttatgtggatgatgttcctattagggaagttaagagaacagaatctatgggaggagatttcccttcaaagccaatgacattgtatgccaccatatgggatgcttctg

SEQ ID NO: 165785 - DNA, 253 bp, Glycine max
cagtagagaagcactcttcgttcttcgactgtctacgatctgctttctctgaattgtgaaaatgtcgctcggagaaactgcttgttcatacgcagctctcatccttcatgaagatggaattagtgtaactgctgacaagatcagcaccttgttgaaaactgcaaaggttccagtagactcttattggccaaccttgtttgctaaacttgctgagaagaaaaatcttggcgatttgatagcaaatgcggcaggc

SEQ ID NO: 165786 - DNA, 252 bp, Glycine max
ctcttcctcagtagtgcgattttcgattctcttctctgcaactatgcctaaccctaaggtcttcttcgacatgaccatcggcggtcaacctgccggccgcatcgtgatggagctctacgccgacgtgactccgagcaccgccgagaacttccgcgcgctctgcaccggcgagaagggcgccgggcggagcggcaagcccctccactacaaaggctcgtctttccaccgcgtgatcccgaacttcatgtgcca

SEQ ID NO: 165787 - DNA, 253 bp, Glycine max
cttggacgtgcactacgccaccgtaacgttggtcaacgatttgacgatccaacaagcaacggtgaagatgggaagtagattttacacgcaggagcagcttcgagcggcgctgtcggctaaggttggggatgtacgatgatgttggcactttgcggcagcgttgagattataagtgtgtgtttgtgccatgttattagctagctatctctttctaagttgtgtgctgctctggggtattttaagccttcccggt

SEQ ID NO: 165788 - DNA, 246 bp, Glycine max
tgccatttgtgcttaaaccttgttagacgagttcccttcttctcacagatggatgatcaacttctggatgcaatatgtgagcggctggtatcgtctctgagcactcaaggaacctacattgttcgtgagggtgaccccgtgactgaaatgctttttatcattagaggtagactggatagttctactacaaatggtggccgtagtggtttcttcaactcaatcatactgacacctggagatttttgt

SEQ ID NO: 165789 - DNA, 250 bp, Glycine max
cgctcgagccgctcgagccgcaaacccatttccttgatatcttagtctatctaattacctcaattaatccctaccattgcaagcatcatggctgaggagaagcaccaccaccactttcaccaccacaagggcgatgatgtgcctggcgaggttgattatcagaaggaggagaagcaccacaagcatcttgagcaccttggggaacttggtgctgcagctgccggtgcttatgccttgcatgagaagcatg

SEQ ID NO: 165790 - DNA, 248 bp, Glycine max
caacaaccttctttctttttctgtgagcctttctctcaggttcttaacttgatcagtgtgcagtgtccaaatcataagggtagttgcaaattgcaatggctaagcatgatgttgagggtggttccttctctgcaaaggactaccatgatcctcctccagcaccgttgattgatgctgaggaactcacacagtggtccttctacagggctttgattgctgagttcattgccacaatgctcttcctttac

SEQ ID NO: 165791 - DNA, 248 bp, Glycine max
gcaccctttagttgcaagagatggaaatgaagcgcgataaagacatttatggtgaagttttcaagagtcataattccatacaaacattgactctgactatttcgaacttagagatggaattggctgctgctagggtaactcaggaatctctacgaagtggtgctcctatttcagatgatataaggttgagtgaatcttcttcgggtaagagaaagtaccttatggtcgttggtattaacactgcattc

SEQ ID NO: 165792 - DNA, 252 bp, Glycine max
actttcaatgtgttgagtcatgacatagactacaaagctgggggacttaacccacctcacacacaccctcgagccactgagattgtgtttgtgttggatggacaactagatgttggattcatcaccacagccaacaaactcatctcaaagtccattaataagggtgaaatctttgtgttcccaaaaggtttggtgcactatcagaagaacaatgcggataagcctgcttctgtgctttctgccttcaacagc

SEQ ID NO: 165793 - DNA, 233 bp, Glycine max
cgaatgagagcatcaaactcttcttcttcgatttccattgcgaacgttaccttttcttcttctttctcttcattttcttcgctcttcgatcttcgtccggggactgctccgaataccatcaccaccactcgccgatggccacgatcggaggcttacacgactcccaaggctctcaaaacagcgtcgcaaccgaagcccttgctcgattcgccgtagacgaacacaacaagaag

SEQ ID NO: 165794 - DNA, 245 bp, Glycine max
  unsure (1)..(245): unsure at all n locations
taaccctctctcaaactccttcagaatccccctttcccagttcccaacttcatttcaaatcaatatgaagaaaattgtgctaaagttggaaatccatgacgacaaaaccaagaaaaatgtcatgagggnagtatctggtattttaggggtggagatagtctcagtggacatgaaggacctgaaaatgactataattgagaatgttgatgctgtaatagtagttggcaagcttagaaaatgttgtg

SEQ ID NO: 165795 - DNA, 232 bp, Glycine max
gtgaagaaggcaaatcgcgaagactagatctgatctgagagaatggctccccggtctagcagcaaggacgcccaagaccttttccgcgctctttggtctgcttatgctgcaacccccagtaatctccagatcattgatctctatgtcatctatgccgtattcaccgctttcatccagggtgtttacatggctttggttggatcatttccatttaactcctgctgataggggg

SEQ ID NO: 165796 - DNA, 249 bp, Glycine max
aggagaccgaatactatgacgtgctgggtgtcagccctacggcatccgaagccgagattaagaaagcttattacattaaggcacggcaagtgcatccagataaaaacccaaatgaccctcttgctgcacaaaattttcaggttttaggtgaggcttaccaagttctgagtgacccagctcaaagacaagcttatgatgctcatggaaaatcaggaatttcaactgaagcaattattgatcctgcagcaa

SEQ ID NO: 165797 - DNA, 251 bp, Glycine max
cccaatcgtagccgtcgcactttgcgttttctgcgtcatctccgattccccgacaatggccacccaaatgagcaagaagagaaagttcgtagctgatggagtgttcttcgctgaactgaacgaggttctgacaagggagttagccgaggacggatactccggcgtggaagttagggttacgccgatgcgcaccgaaatcatcatcagagccaccagaacccaagccgttctcggtgagaagggaaggagaa

SEQ ID NO: 165798 - DNA, 244 bp, Glycine max
gattgctagaatggaatttcgatgctcagtcatctcttttaccattctcttctctcttgctcttgcaggagagagccatgtccatgcatcgctacctgaggaagattattgggaagctgtttggccaaacactcccattcccactgcactgcgaagcttctaaagcctctccctgcaggtgttgaaatcgatgaactccctaagcaaattgatgatacacagtacccaaaaacattcttctata

SEQ ID NO: 165799 - DNA, 245 bp, Glycine max
cccaccatccccatcaccgccgtctccatattattacaaatcccctccacctccatctccatctccaccacctccttactactatcaaagtcctcctccaccatctcccacttctcatcctccctattactacaaatcccctccaccaccaacgtcatatcctccacctccttaccactacgtgagccctccaccaccttctccatctcctcccccaccataccattacacatcaccacctcctc

SEQ ID NO: 165800 - DNA, 245 bp, Glycine max
ctcgagccgttcagatctctctcccttccttccatcccaaccacaaggccgctgagaagacctaaaaaatggtgaagatttgctgcattggagctggctatgttggtggcccaaccatggctgtaattgccttgaagtgtcctgagatcgaggtggtcgtggtggacattgctgcaccgcgaatcaacgcgtggaacagcgaccacctcccgatatctgagcctggccttgatgatgtggtgaag

SEQ ID NO: 165801 - DNA, 241 bp, Glycine max
ataagcagaagaggagagggaatatgatgatgacgacaatggacgggatgatggacaagggggtgatggattatggtttcagaaggcttcatgctggtactgttcgggaaataggtgaatttgcacgtgagtcatgacatacggagaatagtgcgtcaagacgtggttcgatggccgatctcactgacgccgattcgacctacgtgcccgcatgtagatctgcggtaatatacatggccaa

SEQ ID NO: 165802 - DNA, 253 bp, Glycine max
catatctccatttccatttcctctctctcagtttccaagaatcttaagctatgggaaagtcttacccaaccgtgagcgctgattaccagaaggccgttgagaaggcgaagaagaagctcagaggcttcatcgctgagaagagatgcgctcctctaatgctccgtttggcatggcactctgctggaacttacgacgtgagctcgaagaccggtggtcccttcggaaccataaagcacccctccgaactcgctca

SEQ ID NO: 165803 - DNA, 246 bp, Glycine max
tcatagtcgtggccgtgtcgcagcaaaaccaaaccacatattaacttgtttgctctaagtcatggctctgatcttgcacgcaaaccaaagcaaacaagaatgctttcaagactctgattgcggcagagtacagtggcgtccaagtggaattggcccctaatttcgagatgggtgtctctaatagaactcctgaattccttaaaatgaatcccataggaaaggttcctgtcttggaaacgcccgatg

SEQ ID NO: 165804 - DNA, 245 bp, Glycine max
aaaaaaccctagtaatgccgccgatggggaggaaccgaaaggtagcacccaaatcttctctatccaccgagccacctctcaagcagcaacaaccaaaacccgaaaatccccctcaagaatacgaagaagtcgaagaggaagttgaggaagaagaggtagaggaagaggtcgaagaggaagaagaagaagaagaggaggacgaggaagaagaggaggaggaagaagaagaagaagaagacaacgac

SEQ ID NO: 165805 - DNA, 236 bp, Glycine max
tcgacgaactcgagccgctcctttgaacatagagacaccacccaaatcatctggaaatactgatcagggcttaatgaagaaattgacagagattgatggacttgcaatgtcaattggcaatggccatgctgaaagtgcagagcgtagaggtagaaacaggctctcacagagtgtagatactgaaggttccagtgatgagagtgatggcaacacttcaggggctaatcaatcaagaa

SEQ ID NO: 165806 - DNA, 261 bp, Glycine max
cgaattcggctcggtcgtggggactccgtgggatgtcgatactgagggattaagggaatatatgagcaagtttggtgagctggaagattgcattgtcatgaaggagcggtcaactggacggtctcgtggttttggatatgttacatttgcttcagtggatgatgctaaggcagtactatcaagtgaacatattattggtaataggacgctggaagtcaaagtggcaacaccaaaggaggaaatgagggcaccagtcaaaaa

SEQ ID NO: 165807 - DNA, 260 bp, Glycine max
gctcggaattctgcttcatttgtctagtgctggattcatcggaatgcgtgactcaaatacctcatggtattcatggtgccattacgggcgagctccagataaatgctttgatagtagtgtctgcttctggagccgtccatgctactggcttggtgtgcctcgacatcgaacacgcttcagatccccttggggctgatgcatcagctgacgctcatagtatcaatattctatcaggtcattcagatgcctgtcctccaacg

SEQ ID NO: 165808 - DNA, 261 bp, Glycine max
ctgtaatgtgcaccagtaaagaccaaagtatgattattgttacattatgctatatgattgtacttgtatatacatattttgtcccgcctttgtaaatacaattgggacactactaggattgggaagaagggtctttacatttttagtttggcaaatagatattgcaactacctttgtataaatctatttctgaagaagcaactacaactttcaagggatgatagcattttgtggcataaggattacggaggcataaaggac

SEQ ID NO: 165809 - DNA, 267 bp, Glycine max
ctgacctcacaaggattgagtgttggatctagtcatctagatttacaaaaaaaatgaagatcattgagaaaattcgcgcacttctgctgatccaaacagggtggtgttctcatttgagttcttcccccccaagactgaggatggtgtggacaatctgtttgagaggatggaccgcatggtggctcacaacccctctttttgcgacatcacttggggcgctggagggacaacggctgatcttacattggaaattgccaacaagatgca

SEQ ID NO: 165810 - DNA, 264 bp, Glycine max
ctggaatcacgcaagctgatctccttgtgataaacaagactgaccttgctcctgcaattggggctgatttggcagtgcatgcagcgggatgctctgcggatgagagatggagggccatttgtctttgcacaggtgaagcataagattggagtagaagaaattgggaatcttgtcttgcaggcatgggaagcagccacagggaataagcgtcattaacatttctttgaaaaacggtttcctttgtgttgtatattttcttagcat

SEQ ID NO: 165811 - DNA, 259 bp, Glycine max
attccccttatctttttctcttctctctccccgcccaaaccctaactccctaccctattccgctttcttttatttattatgaaaggaggaaagtccaagaccgaatctaagagagttgatgccaaatttgttgtgaataagaagggtgccgttactaagactaggaaatttgccggaaaggggaaggcagcgaaagatcctaacaagccaaagaggcctccaagtgttttttttgttttcatggaggaattcaggaagg

SEQ ID NO: 165812 - DNA, 261 bp, Glycine max
gtcaagttcttgtgtggagagggctatacagatgaaatgcttcgagttctcactaaagatcatagtagatgcagcaaacatgctaaaaaggaagctgtatatgaccttaatctcccatcattagctctttatgtaaacgtctcatctttcagtcgtattttccatagaacagttacaaatgtgggattggcaacgtctagttataaagccaaagtggtatctccatctttgatagatattcaagtgaaaccaaatgttctg

SEQ ID NO: 165813 - DNA, 263 bp, Glycine max
ggaaatagctttcctcggttataaccttcaaggtggaaagaaaaacccacccactatcccaattccaataaataccttcctctctatattttcgcacaataccctctcacccttcaacgatgagttactacaatcagcagcaaccacccgtcggtgttcctcctccccaaggttacccaccgccggattcttacggaaaggacgcgtaccctccgccagggtacccgccgcaaggaggataccctccgcaggcgtatccagca

SEQ ID NO: 165814 - DNA, 262 bp, Glycine max
cattaagaggggaacatttatagagttccgtagtgggatgctgaatgtgtcacctattggccgaaattgtagccaagaagaaagagatgagtttgagaaatatgacaaggttcacaatatacgcccgaaaatggtttctgtacttcgtgagaagtttgctcatcttaacttgacattctccattggaggacagataagttttgatgttttccctcaaggttgggacaaaacatactgcctgagatatcttgatggtttcaat

SEQ ID NO: 165815 - DNA, 235 bp, Glycine max
cccttttgttctcgtgtcaatttctaaatccaccaccacaccctctcttctattctctattattattatctccacacccttcactctccctcactcttctctcgaatcttccaccgcaatggccacctctgccgagaaactctccgctctcaaatccgccgtcgccggattgaacgaaatcagtgagaatgagaagaacggattcatcagcctcgtcggccgctatctcagtggc

SEQ ID NO: 165816 - DNA, 261 bp, Glycine max
atcttcttcgctcattcctctgcactgccatcatccccaacttcctcacaaggttacaaaggataaagagttgtgccaccatgtcggacgatgaaagggaggagaaagagttggatctctcttctgccgaagttgtcaccaaatacaaaaccgctgctgagatcgttaacaaggccttgaagctagttatttcagaatgtaaaccaaaggcgaagattgtggatatttgtgagaaaggggattcatacattagagagcaaa

SEQ ID NO: 165817 - DNA, 258 bp, Glycine max
gtttcgctttcaatcgaagggaagaacaaacattcaattcatggcagctgcaaagcttcaagctttatggaatcacccagctgggcctaaaaccattcacttctgggcacctacctttaagtggggcatcagcattgccaacattgctgatttctcaaaaccacccgagaaactttcctatcctcagcaaatagcggtcacagctactggaattatctggtctcgttacagcactgtaatcaccccaaaaaattggaa

SEQ ID NO: 165818 - DNA, 274 bp, Glycine max
ggaattcggctcgtactcggtatctgaagcattttataagcctccactttcctgaactaacattaacatacaatctttcaagtaaacctccccagcttccatttaagaatggagatcactagaataggccaatggttaagtcttctgatatgtgtactactattactgcagacagaaggggttcctgtgggaatcacttttgttgaaaatgcagtggcaaaaggggctgtttgtttggatgggagtcctccagcttaccacttccacacaacat

SEQ ID NO: 165819 - DNA, 260 bp, Glycine max
ttttgagtgccctgaggaagagatggagaggcgactacttagtaggaaccagggtagagaagatgacaatattgagacaataaggaagcgatttaaggttttcttggagtctagtcttcccgtgattaattattatgatgcaaagggaaaagttcgcaagattgatgctgcaaggcctatcgaagaggtatttgagacagtcaaaggaatttttggtccaaagaatgagaaggctgattgagcatgttcaccttcactcc

SEQ ID NO: 165820 - DNA, 256 bp, Glycine max
atttgatgcaggtgaagcctttgccatgatgatggcatcttttgttgctcttgtggagtccagtggagctttcattgctgtatataggtatgcaagtgcaacgccattgccaccatctattctcagtcggggtattggttggcagggagttggcattctgttatcaggattgtttggaacagtcaatggatcctctgtgtctgtagaaaatgcaggtcttttggctttgacacgtgttggaagtagaagagtggtg

SEQ ID NO: 165821 - DNA, 246 bp, Glycine max
gtttcgctttcaatcgaagggaagaacaaacattcaattcatggcagctgcaaagcttcaagctttctggaatctcccagctgggcctaaaaccattcacttctcggcacctacctttaagtggggcatcagcattgccaacattgctgatttctcaaaaccacccgagaaactttcctatcctcagcaaatagcggtcacagctactggaattatctggtctcgttacagcactgtaatcacccc

SEQ ID NO: 165822 - DNA, 258 bp, Glycine max
ctcgagccgcattgttgaaaagaaaccctagcaagtggagcaatggcagacgttgaagtcgatgtggcggcagcagcagcagcagggctgccgaagaagagaacgttcaagaagttcagttttcgaggcgtggatctcgatgcacttctcgacatgtccaccgatgaactcgtcaagatgttcagtgcccgcgctcgtagaaggttccagagaggcctcactagaaagcccatggccttgatcaagaagctccgtaaa

SEQ ID NO: 165823 - DNA, 259 bp, Glycine max
ctcgagccggtggttgttgcttattcaggctcttgcatctcgtccaggtggaccacctttcgttcacgtaaccggtgttgatgattcccaatcatttcatgcaaggggtggaggacttcacattgtagggaaacgcctctcagattatgccaaatcttgtggagtgccatttgagttccacagtgctgcaatgtgtggaagtgaggttgaactagaaaaccttgtaattcaaccaggggaagcactagttgtgaacttc

SEQ ID NO: 165824 - DNA, 262 bp, Glycine max
gaagaatcgcagtgagaagaagagggggtcagagtgagacagagaaagagagaattcgtaaaccctaatttcggaaagatcggcgatgactgcctccaaggatcgcgagaacttcgtctacatcgccaaactcgccgagcaggccgagcgttacgaagagatggtggaatcaatgaagaacgttgcgaatctcgacgttgaactgacggtggaggagcggaatttgctttctgttgggtacaagaatgtgattggtgctcgc

SEQ ID NO: 165825 - DNA, 260 bp, Glycine max
cctcgagccgattcggctcgagagaccaattttactgtgattctccacaccaattgtgaaaatcaggcatcagcagtggagaacagcgaggtgatgtaccagaacataagtggcactacaatgagtgctaaggccattaaatttgactgcagtgactcagtcccatgcagcaaactagtccttagcaacgttgacttagagaaacaagatggctctgttgaaacatattgccactcagcacaaggctttccctatggtgt

SEQ ID NO: 165826 - DNA, 257 bp, Glycine max
tcaccccccctccccctttccccattctccaatcaaaaatcatttcttttctgggggagcaaagatgggtgtgtcgaaattgggttttttggggcttctttttgctgattttctctttgcagttggagctgtggagctgggcaggaaccaacccactgaaagaatttcaggtagtgctggtgatgtattggaagatgatccagtgggaaggttgaaggtttttgtttatgaacttccaagtaaatataataagaaaa

SEQ ID NO: 165827 - DNA, 255 bp, Glycine max
ctcgagccgctatgaaactgctcgtggtgtacagaaagtacttcagaactacaagaatcttcaagatatcattgctattttgggaatggatgagctcagtgaagatgataaattgactgttgcccgtgcccgtaagattcagcgattcttaagccagcctttccatgttgcagaagtcttcactggtgccccaggaaaatatgttgagttgaaggagaacatcaccagtttccagggtgtgttggatggcaaata

SEQ ID NO: 165828 - DNA, 255 bp, Glycine max
attagcatcaaaaccagagtggttctagtaatccggtgctgctagaggatgggaactagtgaatggcatatcgagcgaagatctagcttcggcactgaatcccccttagcaagagaggcaggaaatgtgcctgaaactgggtcactctctattgttgtgcttggcgcttctggggatcttgctaagaagaagacatttcctgcacttttccatctataccggcagggattcttaccagcagatgaagttcacatt

SEQ ID NO: 165829 - DNA, 253 bp, Glycine max
ccaagatccaggacaaggaaggaatccccccggaccagcaacgtctcattttcgccggaaagcaacttgaggacggccgtacccttgctgactacaacattcagaaggagagtactcttcacctcgtcctccgtctccgtggtggcatgcagatcttcgttaagacactcaccggcaagacgataaccctagaggttgaaagctccgacaccatcgataacgtcaaggccaagatccaggacaaggagggtat

SEQ ID NO: 165830 - DNA, 254 bp, Glycine max
gggaagagtacactactgaagctaatgacaggtgacttgatgcctagtgatggcatggtccgacgtcataatcatcttcgaattgcacaatatcaccagcatttggccgaaaagctagacatggaaatgtctgctctccagtttatgattaaagaataccctggaaacgaggaagagaagatgagggcggcgattgggaagtttgggctgtcaggtaaagcgcaggtgatgccaatgaagaacttgtcagatgg

SEQ ID NO: 165831 - DNA, 253 bp, Glycine max
ccatctcttgcttcttgcttctattacttgcttctttcttcaccatgtcacttgctgggaaaatcaccactgaaattggggttcatgcaaccgctgcaaagtggttcaacctctttgcaacacaacttcatcatgttcaaaaccttactgatagagtacatggaaccaagctgcatcaaggtgaagactggcatcacaacgagacagtcaaacactggacttataccatagatggtaaggctacaacatgtct

SEQ ID NO: 165832 - DNA, 253 bp, Glycine max
cagccaggttgtcttccgattccttcgtgcgtgcgattcttctgatattccaaggcgacgcaccgacaccggacccatctccggcgacatctcaccgatctccggcgaatccccggtccccactttcttccctcgaaatgaatcccgagtatgattatctgttcaagctccttcttattggagactcttgtgtcggtaaatcatgccttcttctgagatttgctgatgattcgtacatcgagagctacataag

SEQ ID NO: 165833 - DNA, 251 bp, Glycine max
ccatctcttgcttcttgcttctattacttgcttctttcttcaccatgtcacttgctgggaaaatcaccactgaaattggggttcatgcaaccgctgcaaagtggttcaacctctttgcaacacaacttcatcatgttcaaaaccttactgatagagtacatggaaccaagctgcatacaggtgaagactggcatcacaacgagacagtcaaacactggacttataccatagatggtaaggctacaacatgt

SEQ ID NO: 165834 - DNA, 254 bp, Glycine max
attcgcagcagccaaaccaaaccacaccgaaacctccacaaccctagcacgccaccgtccatggcgacgacacgatccggcccgctcctcaagcaactcctcacccgtctgcacccttctcgctccgtcacgtacatgccccgtcccggcgacggcacccctcgcggcgtgacgctgatcccgggcgacggaatcgggcctctagtaaccggcgcggtggagcaggtgatggaggcgatgcacgcgccgctgta

SEQ ID NO: 165835 - DNA, 254 bp, Glycine max
attagttcattctctttgcgcagttccctacctctcctttcaagatgcagatcttcgtcaagaccctcaccggaaagaccatcacccttgaggtggaaagctctgacaccatcgacaacgtcaaggccaagatccaggacaaggaaggaattcccccggatcagcaacgtctcatcttcgccggaaagcagctcgaggacggccgtaccctcgccgactacaacatccagaaggagtcaacccttcaccttgtc

SEQ ID NO: 165836 - DNA, 254 bp, Glycine max
attcaattctgttcatcctttgcttcccaaagaaagagaaaataaaaagcaatgggtagccttgaagcggaaagaacaacagtaggattggcagcaagagacccttcagggattctctccccatacacctacaatctaagaaacacaggccctgatgatgtttacataaaagttcactactgtggaatttgccattctgatctccaccagattaaaaatgatcttggcatgtccaactatcccatggtcccagg

SEQ ID NO: 165837 - DNA, 252 bp, Glycine max
attagaattgaaaataatgtctggttcggaggacgagggaggagaagagtacctcttcaagatcgtcataatcggagactccgcggtggggaaatcgaacctgctgtcccgctacgcccggaacgagttcaacatgcactccaaggccaccataggcgtcgagttccagactcagtgcttggaaatcgactccaaggaagtcaaggctcagatttgggacaccgccggccaagagcgattccgcgccgtcac

SEQ ID NO: 165838 - DNA, 251 bp, Glycine max
ctcgagccgaatcggctcgagcggctcgagccggagcagattaccagctcacgaagcttctacgcctgaggccctccgtgaaccgcctcatgatgtatcagcagggctgcttcgccggcggcaccgtactccgcctcgcgaaggacctcgccgagaacaacaagggtgcgagggtgctcgttgtctgctccgagataaccgccgtgacgttccgcggcccctcggacacgcacctcgactcgctcgtggga

SEQ ID NO: 165839 - DNA, 233 bp, Glycine max
  unsure (1)..(233): unsure at all n locations
ctcaagtttttgaagtatagagatggcagagacattcctatttacctcagagtcagtgaacgagggacaccctgacaagctctgtgacanatctctgatgctgtcctcgacgcttgctcgaacaggaccagacagcaaggtgcctgcgaacatgcacaaaccacttggcatggtctcggagaatcacgacaaggctatgtcgctacgagagatagtgcgtgacactgcagaac

SEQ ID NO: 165840 - DNA, 248 bp, Glycine max
gggaagtgtattaacgcacttgcagagaatagtgcacatgtgccatttcgtgactcaaagcttactagattgctacgtgattcatttggaggtacagcgagaacttcactagtaatcactattgggccatctccacggcataggggagagactgccagtactataatgtttggacagagggctatgaaggtggaaaacatggtaaagctaaaggaggaatttgattacaaaagcttatctaggaggtt

SEQ ID NO: 165841 - DNA, 251 bp, Glycine max
ctgacctcacaaggattgagtgttggatctagtcatctagatttaaaaaaaaaatgaagatcattgagaaaattcgcgcagcttctgctgatccaaacagggtggtgttctcatttgagttcttcccccccaagactgaggatggtgtggacaatctgtttgagaggatggaccgcatggtggctcacaacccctctttttgcgacatcacttggggcgctggagggacaacggctgatcttacattggaa

SEQ ID NO: 165842 - DNA, 246 bp, Glycine max
caactctctctctctgcgtccatggagttttggggtgttgaggtgaaaaatggagaatctctcaaggttgatccaggagatgacaagattatccacctttcaaatgcatgcatgggggatgtcactaaggatataggaggtggaccagtagccctgaatttgagctatcccataactggaaatatggaagtgtcttctttactggatttaaagctcaacctcagtcggagtctgatgatgatgaag

SEQ ID NO: 165843 - DNA, 238 bp, Glycine max
aaccaactgccttgccccacttgccaaggttatcaatgacaggtttggcattgttgagggtttgatgaccactgttcattccatcaccgctacccagaagactgttgatggaccatcagccaaggactggagaggtggaagagctgcttcatttaacatcattcctagcagcactggagctgccaaggctgttgggaaagtcctccctgctttgaatggaaaattgactggtatggca

SEQ ID NO: 165844 - DNA, 239 bp, Glycine max
gggaactttcattttgctcctgggaaaagctttcagcaatctggtgtacatgtacatgacctactggcttttcaaaaggattcttttaatttaagtcaccacatcaacagattagctttcggagagtatttccctggtgttgttaatcctcttgacaacgtgcattggacacaagaaacaccaagtggtatgtatcagtattttattaaggttgtgcctacagtatacactgacgtgag

SEQ ID NO: 165845 - DNA, 240 bp, Glycine max
  unsure (1)..(240): unsure at all n locations
ctcgagccgctcaaagcttgtgaaagctgatatcaatgggaaagacaaggagatatacacagtaaaattacctggaaatcccaaattgggagaagggaagcccgagaatcaaaatcatgcaattatatttacgcgtggaaatgcagtccaaacaattgacatgattncggataactattttgaggaggctttgaagatgaggaaccttcttgaagaatttcattcagatcatgggcttcg

SEQ ID NO: 165846 - DNA, 242 bp, Glycine max
cttcaacctaacgcagcatcgctatactcttcattccatggctttgcccaatcagcaaaccgtggattaccctagtttcaaactcgttatcgtcggtgatggtggcacaggaaagacaatcctttgtgaaaaggcatctcaccggagaattcgagaagaaatatgagccaaccatcggtgtggaggttcacccattggattttttcacaaactgtggaaagattcgattctactgctgggat

SEQ ID NO: 165847 - DNA, 240 bp, Glycine max
ctttgttttgtttccgtgtttttctctctctgattttttgtgaccccaaactaactttaaaagcattacgtgtttgaaattaatatcttgtgtgagcaaggttcttcatcatggcaaagtcttctagtgagaagaatggactgaagaagggtccatggactccagaggaagatcagaaactcatcgattacattcagaaacatggacatgggaaatggagaaccctcccaaaaatgcagg

SEQ ID NO: 165848 - DNA, 239 bp, Glycine max
ctcacaacagcagctgcagcagcaatggctcccaaacgaggtggaaaggctccggctcttgccgctaagaagaagcctgagaaggtcacgaatccgttgttcgagaagcgtccgaagcagttcggaatcggaggggcgttgcctccgaagagagacttgactaggttcgtgaagtggccaaagaatgttcaaattcagaggaagaagaggattctgaagcagaggttgaaggttccccc

SEQ ID NO: 165849 - DNA, 235 bp, Glycine max
gcaagcgaaactacacctattcagatgttgtcagatccgtgttaggaggtaggacatttcagctgtgtggattagctcagtacataaatcttgtcggtgtaactatcggttacacgataacggcttcaattagtatggtggcggtgaagaggtccaactgttttcacaaacatggtcatcatgataagtgctacacgtcaaacaaccctttcatgatcctctttgcctgcattca

SEQ ID NO: 165850 - DNA, 234 bp, Glycine max
gtcactaatagcaaggcagtcagagaggccatgtgctttttaatggaccccaaccttgggaagaagctgtgctatgtccaatttccacaaagatttgatggtccttgatcgccacgatagatatgctaaccgaaacacggtgttctttgatatcaatatgaaagggcttgatgggattcaaggtccagtatatgttggtactggaactgtgttcaacaggcaggtgttgtatgg

SEQ ID NO: 165851 - DNA, 237 bp, Glycine max
gataatttgtgatgatgcactgcgtttggtatttgagacagactgcaccgacatgttcaagatgaatcagttgctagctaaacacattatcccacttggacctacaaaggagtcacaggctaaacgagtgaagctggatgctgaaattaaaattgaaagtgctgaacctgcttcatctactgtggtaatatctgaagcacttgctaaatttttgggcactgagggaagagagatgca

SEQ ID NO: 165852 - DNA, 239 bp, Glycine max
caatggagggaaaagaggaagatgtttccttgggagctaacaaattctcagagaggcaaccgattggaactgcggctcagagccaagacgatggaaaggactacacagagccacccccggctccacttttcgagccctccgaactcacttcttggtccttctaccgagccggaatagccgagtttgtagccacttttctctttctctacataaccatcttaaccgtcatgggtgtcaat

SEQ ID NO: 165853 - DNA, 238 bp, Glycine max
caacttcaacgacatcatccactccatcatcgacatggacgctgatgttatcaccattgagaactctcgctccgatgagaagctcctgtcagtcttccgtgaaggtgtgaagtatggtgctggaattggccctggtgtctatgacatccactccccaagaataccaccaactgaagaaatcgctgacagaatcaataagatgcttgcagtgctcgagaagaacatcttgtgggtcaac

SEQ ID NO: 165854 - DNA, 242 bp, Glycine max
ctccatcgcgtgtgcttcaattccatggctaaaccgaaggctccaagacgaaccctagagtcatactcagtcaaacacataagcaaaaccattagagctggcgattgcatcctcatgcggccctccgatccgtcgaaaccgtcgtacgtagcgaggatcgagcggatcgaagccgacgcgcgctgcgcaaacgtgaagattcacgtgcgctggtactaccggccggaggaatcaatcggcgg

SEQ ID NO: 165855 - DNA, 235 bp, Glycine max
agctaagaggcgcacgtcagcaaaagctcgtggaattgctagcaatggcgaggatcaaggtttacgagctgaggcagaagacgaaggctgatctgctgaatcaactgaaggacctgaaggcggacttgccttgcttcgtgttgctaaggtcaccggtggtgcccctaacaagctttccaagataaaggtggtgaggttgaacattgcccaggttttgacggtgatttctcagaag

SEQ ID NO: 165856 - DNA, 236 bp, Glycine max
caccgcacgaatatcttgttgtttggagcgatccgagaaaaactctgtaaacatgttggtttaccaggacctccttacagcggatgagcttctctctgactcctttcgttacaaggaaattgagaatggaatgctgtgggaagttgaggggaagtgggttgttaaaggagcagttgatgtagacattggtgcaaacccttctgctgagggtggaggagaagatgagggagttgatg

SEQ ID NO: 165857 - DNA, 239 bp, Glycine max
gtttcagtgagtgatcggtgttcacttgatccttcataagtcgtcatcatcatcatcatcatcaccgttgattgaagaagatgccgatcagaaacatcgccatcggaaggcctgaagaggctactcaccccgacacgttgaaggcggggttggctgagttcatctccaccttgatcttcgtgttcgccggttcaggttccggcatcgcctacaacaagctcaccgacaacggcgccgcc

SEQ ID NO: 165858 - DNA, 240 bp, Glycine max
cgatgaactccctaagcaaattgatgatacacagtacccaaaaacattcttctataaagaagaccttcatccaggcaaaacaatgaaagtacaattcaccaagcgtccctatgcacaaccttatggtgtatatacatggttaacggatattaaagacacctctaaagaaggatatagttttgaagagatatgcatcaagaaagaagcgtttgagggagaagagaagttttgtgcaaaatc

SEQ ID NO: 165859 - DNA, 237 bp, Glycine max
gcaaaaagaaagaatcccaggcgaggagaaagatggaggggaaggagcaggatgtgtcgttgggagcgaacaagttccccgagagacagccatttgggacggcggcgcagagccaagacgacggcaaggactaccaggagccggcgccggcgccgctggttgacccgacggagtttacgtcatggtcgttttacagagcagggatagcagagtttgtggccacttttctgtttctct

SEQ ID NO: 165860 - DNA, 237 bp, Glycine max
aaggcgtcttcataaacgccgcccaaaacttctcatacccttttattcattccattcgtttctagggttttcttttctttgccgagaaaatgagagagtacatttcgatccacattggccaggccgctatccaggttggaaacgcctgctgggaactctattgccttgaacacggcattcagcccgatggacagatgccgagtgacaagaccgttggcggaggagacgacgccttca

SEQ ID NO: 165861 - DNA, 235 bp, Glycine max
ccagttgtcactgcaacccagatgttggagtcaatgatcaaatctcccaggccaaccagggccgaagctactgatgttgccaatgcagttctggatggcacagactgtgtgatgcttagtggtgaaaccgctgctggagcctatccagaccttgctgttcaaacaatggctaaaatatgcattgaagcagagagcacccttgactatggtgatgtgttcaaaaggattatggagc

SEQ ID NO: 165862 - DNA, 237 bp, Glycine max
gaaaaatggagggaaaagaggaagatgtttccttgggagctaacaaattctcagagaggcaaccgattggaactgcggctcagagccaagacgatggaaaggactacacagagccacccccggctccacttttcgagccctccgaactcacttcttggtccttctaccgagccggaatagccgagtttgtagccacttttctctttctctacataaccatcttaaccgtcatgggtg

SEQ ID NO: 165863 - DNA, 236 bp, Glycine max
ctcaaacccatttccttgatatcttagttatctaattacctcaattaatcccttaattgcaagcatcatggctgaggagaagcaccaccaccactttcaccaccacaagggcgatgatgtgcctggcgaggttgattataagaaggaggagaagcaccacaagcatcttgagcaccttggggaacttggtgctgcagctgccggtgcttatgccttgcatgagaagcatgaggcca

SEQ ID NO: 165864 - DNA, 231 bp, Glycine max
gttgactctgggaagtccactaccactggccaaccgatctacaagctctggaggcattgacaagcgtgttattgagagaactgagaaggaagctgctgagatgaacaagaggtctttcaagtatgcctgggtgcttgataagcttaaggctgagcgtgacagaggaatcacaattgatattgccttgtggaagtttgaaaccaccaagtactattgcacagtcattgatgc

SEQ ID NO: 165865 - DNA, 237 bp, Glycine max
actcgagccgaatcggctcgaggttgagaggaggcactgtggcaagctgtctaggagtgtactacagagacgcgaaatgaacgacgatcttgtcgtctgacaccatgaatattcccgacggcgtgagcatcaaggttcacgctaaggttatcgaggttgagggccctcgtggaaaactcgtgcgagacttccaccatctgaacttggacttccaacttattgccgacgatggcggta

SEQ ID NO: 165866 - DNA, 236 bp, Glycine max
ttccagagccccttctaaagaggatttcagatctctgcaagaatgctggctcttggcttgttgttgataatacatacgagtattttatgtatgatggcctgaaacactcttgtgttgagggaaatcatattgttaatgttttctcattctcaaaagcatatggaatgatgggatggcgggttggatatatagcgtacccctctgaagtaaaagacttcgctgaacaacttctcaaa

SEQ ID NO: 165867 - DNA, 237 bp, Glycine max
ctcattctccatacctcaacgaagaggttaaagagacggcaacactttgctgtccgccttgaccgagcagagcttcgtcttggccctcgattttgccctaaagtactcccagtcacaacagacaccgtcgtcgttgtcgtcatcatcaatggcaccgaagcagaccaaggctgagaagaagatcgcttacgatgcgaactgtgcgacctaatggaggagtacggccagatcctcgtt

SEQ ID NO: 165868 - DNA, 237 bp, Glycine max
ttacaacgaaaccctcttcatcttgttctatctgtgacgagcatcatggcctcaagagcagtgttattgttggctatgtgtgtgcttccggcgatggttgtggccattcgcccagcaaagaaccctttttgcgtgaagggtcgtgtctactgtgacccttgccgtgctggttttgagacctcagctaccacctacattgctggtgctgagattatgttgcaatgcaagagcagggtt

SEQ ID NO: 165869 - DNA, 240 bp, Glycine max
ctttgatttcgcttccgaagcgacaagcagcacccactctctcacctcggaccttccaaacatggaacgcatcgttggcggcaagtacaagctcgggcgcaagatcggaagtggatccttcggcgaaatctacctcgcgacgcatcttgataccttcgagatcgtcgccgtcaagatcgagaatagtaaaacaaaacatccccaactgctttacgaggcaaagctctacaatattcttca

SEQ ID NO: 165870 - DNA, 235 bp, Glycine max
cagaattctctaaaagagatctttttctgctctttgaagaaagaagggtctttgcctgattttggagatgtctctgctctcagatctcatcaaccttaacctctccgataccaccgagaaggtgatcgcagagtacatatggatcggtggatcaggaatggacctgaggagcaaagcaaggactctcccaggaccagttagcgacccttcagagcttcccaagtggaactatgat

SEQ ID NO: 165871 - DNA, 237 bp, Glycine max
caaaaaatagtcttaattagttagtgtgtcaatttgtgcctcaaattgaaactagctatagatatggccaattcccttaataaccacctgtttgttgtagtatctattctttctctcttagccttttctagcaatgcacaactatctcccaccttctatgccaaaacttgccccaaccttcaaaccattgtgcgcagtgcaatgaggcaagctgttgctaaagaagccaggattggt

SEQ ID NO: 165872 - DNA, 236 bp, Glycine max
tctcattataatccatgaaaagaaaatctcaagcataaatgctattgttaaagtattagagttggctttgaagagacaaaggcctttactgattgtcgctgaggatgtggaaagtgatgcccttgcaactcttattctaaataaacttcgtgctggaatcaaggtatgtgccatcaaagctcctggttttggtgaaaaccgtaaatctggtctccaggatcttgctgttcttacag

SEQ ID NO: 165873 - DNA, 269 bp, Glycine max
gtgagcataataaattgagaagcaaaagcgaaagggtctgtgtcttcactcattcttctattctattccatcatcaatggagaacaccgagggatccggatctgcgacgaacggggtgctggctccgccgcgcaaggtggcattgataaccggaattaccggacaagacggttcgtacctgacggaattcctcctggacaaggggtacgaggtgcacggcctgatccgcgctcgtcgaacttcaacacgcagcgcatcgctcacatata

SEQ ID NO: 165874 - DNA, 268 bp, Glycine max
ctcaccgattgctagaatggaatttcgatgctcagtcatctcttttaccattctcttctctcttgctcttgcaggagagagccatgtccatgcatcgctacctgaggaagattattgggaagctgtttggccaaacactcccattcccactgcactgcgagagcttctaaagcctctccctgcaggagttgaaatcgatgaactccctaagcaaattgatgatacagtacccaaaaacattcttctataaagaagaccttcatccagg

SEQ ID NO: 165875 - DNA, 273 bp, Glycine max
ctcagccgattcggctcgagcttaagcttgctactgagtttccacattgcataccttacgtcttccgaattcgacagttaatttgcaagatgggttatgaaaaggctcagatcaacattgtggtggttggtcatgtggaccctgaggaggcaaccaccattaacgagctgaagaagcctgttgtggagaaagaagctccagggcacgccatatgagggcatgcacgcacggctcggaggggaaccagaaaattatgttaacaaaataatctgg

SEQ ID NO: 165876 - DNA, 268 bp, Glycine max
cgcgaaccagccagtggccgcggcgtatccaggtggtcgagcgtcttccatcgaaacagggactaagctctacatttccaatttggattatggcgtttccaatgatgatattaaggagttgtttcttgaagttggcgacgtgaaacggcatactgttcattatgacaggagtgggagatccaagggtacggcagaagtagtcttctcgcgccgagctgatgctgtagctcagtgaagaggtacaacaatgttcagctggatgggaaac

SEQ ID NO: 165877 - DNA, 271 bp, Glycine max
ctcgagccgcaaagatccaacaagcagatcaatctctctctctgtctcccaatcaaaacagacatgggtttgaaggaggattttgagcagtatgctgagaaagcaaagactttgccaccgactcaatcaaacgaagacttgcttatcctttatggattgtacaagcaggccaccgttggacctgtcaacaccagccgtccgggaatgttcaacatgagggacagagctaatgggatgcatggaaggctgttgaagggaaatccaaggacga

SEQ ID NO: 165878 - DNA, 268 bp, Glycine max
cagaattctctaaaagagatctttttctgctctttgaagaaagaagggtctttgcctgattttggagatgtctctgctctcagatctcatcaaccttaacctctccgataccaccgagaaggcgatcgcagagtacatatggatcggtggatcaggaatggacctgaggagcaaagcaaggactctcccaggaccagttagcgacccttcagagcttcccaagtggactatgatggttccagcacaggtcaagctcctggtgaagaca

SEQ ID NO: 165879 - DNA, 269 bp, Glycine max
ctctctctctgctcaactgaataaagcagagaagaataagaaaatgggtgtgttcagtacagtgctgctgtgccttatgtccctaatgtggatggtggatgctcgaattccaggcgtatactctggcggcgcttggcaaaatgctcacgctacgttctacggaggatccgatgcttccggcaccatgggtggagcatgtgggctagggaacctgtacagccaagggtcggagtgaacactgcagcgttgagcacggcactcttcaacag

SEQ ID NO: 165880 - DNA, 253 bp, Glycine max
ctctgatgatgctggtcttgatgctgacaaatgcaaggtgttggtcaacattgagcagcagagccctgatatcgcccagggtgtgcacggtcacttcaccaagcgcccagaggaggttggtgctggtgaccagggtcacatgtttggctatgccactgatgaaacccctgagtacatgcccctcagccatgtccttgcaaccaaactcggtgctcgcctcaccgagttaggaaaaatggtacctgtgcttggc

SEQ ID NO: 165881 - DNA, 263 bp, Glycine max
atttgcaatagcatttttaatgagatgctcattagatatagctatgaaaaattactgcgccaggctaaagctccaagtatgtttttacaatccttcaaaaattttgtttctttgtgtgtgtatggtgatgataacttaattagtgttcatgaatatgtcaagccttactttagtggttctaaattgaaaagctttctagctggtcataatatcaccattactgtggtattgacaaaactagtgcaactttgcaatttagaaag

SEQ ID NO: 165882 - DNA, 266 bp, Glycine max
  unsure (1)..(266): unsure at all n locations
gaagaagattcctggattgattgtgaagatggctgagtcggacaacgactcgggaggggcgcagaacgcgggaaacagtggaaacttgagcgagttgtcgcctcgggaacaggaccggtttctccccatagcgaacgtgagcnggatcatgaagaaggccttgccggcgaacgcgaagatctcgaaggacgcgaagcnnacggtgcaggaatgcgtgttcggagtcatcagcttcataacgggtgaggcgtcggacaagtgccaga

SEQ ID NO: 165883 - DNA, 263 bp, Glycine max
attgatatagcagattctatcttaagttatggaagtgaattgggagacatggaagacaatgaatggcagatggtgcaaacgaaaggcaaccaatttgtggtgaacgaccaacctttctatgttaatggattcaacacatactggttgccggtatttgctgcggatgagtccacaagagggaaggtcactgaggtgttcaaacatgcatcctctgtgggtatgcagtttgtaggacttgggccttcaatgatggccaatggcgt

SEQ ID NO: 165884 - DNA, 262 bp, Glycine max
tttgccgctgttgttgttgctgcaccaccgaacaacttcccctgtaaatcgcgtttcgtttgtgcaaggttttaaaagatggctgatgctgaggacattcaacctcttgttgttgataatggaactggaatggtcaaggctggttttgcaggtgatgatgctcctagggccgtgttccccagcattattgggagaccacgccatactggtgtaatggttggatgggtcagaaggatgcttacgtgggtgatgaagcccaatc

SEQ ID NO: 165885 - DNA, 259 bp, Glycine max
tggaaaaatcataccgttggatgattctttggattatggtgcaaactatgctcacatgttagggtttgatgatccggaaatgctggagtttatgaggctgtatatttccatccacagtgatcacgaaggtggcaatgttagttcacacacagcccacctagttgctagtccgctatcagatccttatcttgcatttgcagctgccccccctcggttagctggcccctgcatggtttggccaatcaggaggttctacgat

SEQ ID NO: 165886 - DNA, 264 bp, Glycine max
gaagaagattcctggattgattgtgaagatggctgagtcggacaacgacttcgggaggggcgcagaacgcgggaaacagtggaaacttgagcgagttgtcgcctcgggaacaggaccggtttctccccatagcgaacgtgagcaggatcatgaagaaggccttgccggcgaacgcgaagatctcgaaggacgcgaaggagacggtgcaggaatgcgtgtcggatcatcagcttcataacgggtgaggcgtcggacaatgccaga

SEQ ID NO: 165887 - DNA, 268 bp, Glycine max
cccgactactacatcctcaggtggtcaatggtgtgttgctaaccagggagcttcagacactgctctacacgttgctcttgactatgcttgtgggtttggaggtgcagactgctcagcaatacaaccaggagcaagctgttataatccgaacactgtccgcgatcatgcttcttatgcattcaatgactactaccagaagaatccagcacctaccagctgtgtttggaggaacagcatctcttacaagcaatgatccaagtagtgggag

SEQ ID NO: 165888 - DNA, 271 bp, Glycine max
cagaatcatttaagagtagctctaagaagaagaaaaaaaatatgaaggttgtgtacttccttgttgccatcttggctttgacatcctctcttgtctctgcctctgaccctagtcctcttcaagatttttgtgtggcagccaaagaaaaagatggtgtatttgtgaacggaaaattttgcaaagaccctaagcttgtcaaacctgaagatttcttcctacatgtggaccgggaacactgacaacccaaataatgcacaagttactcctgtgt

SEQ ID NO: 165889 - DNA, 259 bp, Glycine max
cgttgcttggtgatgtccctttctgttctcttcactcttggtcttgcgagagaaagccatgccagagacgacgatttttggcatgctgtttggccaaacactcccattccaagttcattgcgagatcttctaaagcctggccctgcaagtgttgaaatcgatgatcaccctatgcaaattgaagaaccacagtacccgacaaccttcttctataaagaagcttcatccaggcaaaacaatgcaagtacaattcagcaag

SEQ ID NO: 165890 - DNA, 245 bp, Glycine max
gtgaaagagaacaatggaaggcataacagagggtgtgaacaacatcaacattaacatctccgattcgtataagcagaatcgcattcaggtctctaacaccaagaagcccctcttcttctacgttaatctcgccaagagatatatgcaacagcatgatgaggtcgagctctcagctctaggaatggctattgccacagtagtaactgttgctgaaatttgaaaaaaacggacttgctgttgaaaag

SEQ ID NO: 165891 - DNA, 260 bp, Glycine max
ccggctcgagaggctcgagcgctcagaagaaaagaaaagcaaccaacaatggttctcacatccatacccacacaaccagatgaccaagaccagagcctaaactatacttttgcttccagatatgtgcgtgaacctattccaaagttcaagatgccggagaaatccataccaaaagatgctgcttatcagataataaacgatgagttgatgttggatgggcaccaaggctcaacttggcctcgtttgtgaccacttggatg

SEQ ID NO: 165892 - DNA, 254 bp, Glycine max
gcgaacgcgtcttcataaacgccgcccaaaacttctcatacccttttattcattccattcgtttctagggttttcttttctttgccgagaaaatgagagagtgcatttcgatccacattggccaggccggtatccaggttggaaacgcctgctgggaactctattgccttgaacacggcattcagcccgatggacagatgccgagtgacaagaccgttgcggaggagacgacgccttcaacacattttcagcga

SEQ ID NO: 165893 - DNA, 288 bp, Glycine max
ttcggctcgagcaaacactcttcttcatattcttcttcttcttcttgttcttgttctatctgtgacgagcatcatggcctcgagagcagtgctattgttggctatgtgtgtgcttccggccatggttgtggccattcgcccagcaaagaaccctttttgcgtgaagggtcgcgtctactgtgacccttgccgtgctggttttgagacctcagcaaccacctacattgccggtgctgagattatgttgcaatgcaagagcagggttagcaacgaggttgtgtacaccaa

SEQ ID NO: 165894 - DNA, 279 bp, Glycine max
gtaaaacctcacaatcacaaacacactcttttttgttctttgctcacttcccttgttcgtttcactctcacaatggactccctctctctcttctgcaccggagcccttcccgccggcggcctctactggttcgtctgtgttctgggccccgccgagcagaagggcaaacgcgccaccgatctatccggcggctccatctccgccgagaaagtccaagacaactacaagcactactggtccttcttccgccgccccaaggagatcgagaccgccgacaaa

SEQ ID NO: 165895 - DNA, 276 bp, Glycine max
ggattctacccgccgctcgatgggaattgcgcttcaaggcgtctcgtagggctaatccgcctcacgagggtcaccaacggcacgtgcctttggggggccgaggccccctactgctggtcggcaaacggacggcgggcgcacgcgtcgcttctagcccggattctgacttagaggcgttcagtcataatccaacgcacggtagcttcgcgccactggctactcaaccaagcgcgatgaccaattgtgcgaatcaacggttcctctcgtactaggttg

SEQ ID NO: 165896 - DNA, 265 bp, Glycine max
ctctgctctttgccttctctgacacatttggtgccttgtagagcgtgttttggcaggaaggtggtatggcgaaggacgttgaggttgctgagcgtggctccttctctgggaaggactaccaggaccctccaccagcaccactcattgatgctgaggagctcacaaagtggtccttttacagggctctcattgctgaattcattgccactttgctcttcctctacattactgtgctcacagtcatagggtacaatcaccagactga

SEQ ID NO: 165897 - DNA, 274 bp, Glycine max
tggacctccgtgaatcgataagcaaccaaaccgacgtggccctgagcatctcaaagctcctgttgtcgaaagaagctcgggacaagaacctcgtgtattcgccgctgtcgttgcacgttgttctgagcatcatcgccgctggctccaagggccccacactcgatcagcttctctccttcctccgctccaaatccaccgatcatctcaactccttcgcctctcagctcttcgccgtcgtgctctccgacgcctctcccgccggcgggcctcgcct

SEQ ID NO: 165898 - DNA, 280 bp, Glycine max
cccaagcaatgtaattttgtggaatggcgaggacataaagttgtttataaaaggtatgctagtctctatttctgcatgtgcattgatcaagatgacaatgaattagaagtccttgaaatgattcatcattttgtggagattcttgaccggtattttggcagtgtctgtgaactggacttaatattcaactttcacaaggcctactatatactagatgaaattctaattgccggtgagcttcaagagtccagcaagaaaacagttgcccgattgatagcag

SEQ ID NO: 165899 - DNA, 279 bp, Glycine max
  unsure (1)..(279): unsure at all n locations
ccttttcatcattctcatatcctcaatcaccccccctcgcactcgctcttcccttcctctggtggcgacaatgtcgactcctgctaggaagaggctgatgacagacttcaagacgctgnaacacgacccgcctgnagggatcagtggtgccccccaggataacaacataatgctgtggaatgctgtcatattttgtcctgatgatactccatgggatggaggcacgttcaagttgacactccaatttactgaggactatccaaataaaccaccgactgt

SEQ ID NO: 165900 - DNA, 278 bp, Glycine max
gaggaggcgagttgaagaattgggtggctacatagaagatggttatctcaatggggttttatcagttactcgagcactgggggactgggacatgaagttacctaagggtgctccctcacctttgattgcagagccggagttccggcaagtggctctaacagatgatgatgaattcctcatcataggatgcgacggcatctgggatgtgatgtcaagtcagcatgctgttagccttgttcgcaaaggcctgaggcggcatgatgacccagagaaatgtg

SEQ ID NO: 165901 - DNA, 281 bp, Glycine max
cctcgagccgattcggctcgagcgaatgcttacaatgatcagttcaacggaacttgtgcaaacagggaaagacattgaaagtacatattgggaacttgtagtgaaggatatccaagatgcttgcagactatttgaaccaatctatgatcaaacagatggtggtgatgggtatgtttctgttgaagtatctcctaggctcgctgatgacactgagggaaccatagaagctgcaaaatggcttcataaagtggttgatcgccccaatgtgtatattaagattc

SEQ ID NO: 165902 - DNA, 277 bp, Glycine max
gttccgtagtgggatgctgaatgtgtcacctattggccgaaattgtagccaagaagaaagagatgagtttgagaaatatgacaaggttcacaatatacgcccgaaaatggtttctgtacttcgtgagaagtttgctcatcttaacttgacattctccattggaggacagataagttttgatgttttccctcaaggttgggacaaaacatactgcctgagatatcttgatggtttcaatgaaattcacttcttcggtgacaaaacttacaagggtgga

SEQ ID NO: 165903 - DNA, 273 bp, Glycine max
gacagtgttcacggacactggaagcatcacgatgtcaccgttaaggacgagaagacccttctcttcggtgacaaggcagtcactgtttttggacacagaaaccctgaagagatcccatgggggtcaactggagctgacatcattgttgagtccaccggagttttcaccgataaggacaaggctgccgcacatttgaagggtggtgccaagaaggttattatttctgcccccagtaaggatgcccccatgtttgttgttggtgttaatgagcac

SEQ ID NO: 165904 - DNA, 279 bp, Glycine max
tcggatttgactggactgcagagaaattcttttggtatctatttttcagtttcttctcattgttgtactttactttctacggcatgatggctgtgggagtgacgccaaaccaccatgttgctgccattgtggctgctgcattttatgcaatttggaatctcttctcaggatttatcgtcgtaagacctaaaatgcccgtgtggtggagatggtactattgggcatgtcctgtggcttggaccttgtatggattgattgcatctcagtttggagatataa

SEQ ID NO: 165905 - DNA, 275 bp, Glycine max
tttctttccctagtcaaggagattcatctctgcagcaggttgttttagaaaagaaaaaatgctgaagatttgctgcattggggctggatatgtggggggtccaacaatggcagtcattgcactgaaatgcccctcaattgaagtggctgttgttgacatctctaaatccaggattgcagcatggaacagtgaccagctccctatctatgagccaggccttgatgatgtggtgaagcaatgtcgtggcaagaaccttttcttcagcactgatgttg

SEQ ID NO: 165906 - DNA, 274 bp, Glycine max
acttgggagataaagaatctgtaaataaaatattttcagagaataaatttgatgccgtgatgcactttgctgccgttgcatacgtgggagagagcacacttgaccctcttaagtattatcacaatattacatcgaataccttgttggtattggagtctatggctaaatatggtgtgaagacattactatattctagtacgtgtgcaacatatggggaacctgaaaagatgcctattatagaaacaacagaacagaaaccaattaatccatacgg

SEQ ID NO: 165907 - DNA, 273 bp, Glycine max
ctcgagccgctggcacgtatataagctggatttatcttagatactggcagaggaaaccagaacactaaacatagaggtgatctgagtgaagattttgctttctccacatttttcccagaatttttaagaccagtcatagaccctatcgcttcaatatttcatcgaatgctctgtggaagatatgatgcttctaatgatggtcaaggcaacagtctggaaagtgagcctttaccaggttcggactcaattgaggcatccaggagacgagaaaga

SEQ ID NO: 165908 - DNA, 277 bp, Glycine max
gatctgcaaggatctcagtagtattggtgacactgttgtcatttcaattactaaggagggtgttaagttttccaccaaaggagacattggaactgccaatatagtttgcaggcagaatacttctgtggacaagcctgaagaagctactgtcattgagatgaatgagcctgtgtccttgacatttgctttgcgatatatgaactcttttacaaaggcaacgccattgtccaacacagttaccattagtctgtcaaatgagctgccagttgtagtcgag

SEQ ID NO: 165909 - DNA, 275 bp, Glycine max
agctgccagacacgatagggtacgagctcaaaaacctgaagaagctatcagtgaactccaacaagctggtgttccttcctcggtcgacctctcacctgactgcactgaggattctggacgcgcgtttgaactgcctaaggtctctcccagaagacctggagaatctgataaacctggaaaccctaaacgtgagccagaacttccagtacctggactccctcccctactcggtgggattcctcttgtccctcgtggaactcgacgttagctacaac

SEQ ID NO: 165910 - DNA, 278 bp, Glycine max
cataaattaagaaatcaaagagccaggaagttgagagagaagtgttcacgtctttgagaaatgggtgcttcggcatcggtcacagaaaaatccatccatgaattcatggtcaaggatgctaagggcagagacgtgaacctcagcacctacaaagggaaggttcttcttgtagttaacgtcgcttcaaaatgtggatttacaaattccaattacacccagttaactgagctttacagcaaatatacagccagaggtcttgagatactggcatttccatg

SEQ ID NO: 165911 - DNA, 275 bp, Glycine max
ttattggtaccttcgttcttgtctacactgtcttctctgccactgaccctaagaggaacgctagggattcccatgttcctgtactggcgccacttcctattggatttgccgtgttcatggttcacttggctacaatcccaattactggtactggcattaaccccgcaaggagtttcggagcagctgtaatctacaacgaagacaaaatctgggatgatcagtggatattctgggttggaccaattgttggagcagcagtggctgcattttaccac

SEQ ID NO: 165912 - DNA, 273 bp, Glycine max
  unsure (1)..(273): unsure at all n locations
cggctcgagctttactctctctctctctctctctctctctctctctcttcgtaaaccgcgtcttacaccaatcagatcacacacncggagacaatctctcacaatactcccagtgctcaagttgtcggcaatgcctttgtggagcaatattatcacattctgcatcaatccccagaattggtgcacagattttatcaggattcaagtttcttaaccagatcagacagcaatggtgtgatgacaactgtgacaactgtacaagaaatccatgaa

SEQ ID NO: 165913 - DNA, 277 bp, Glycine max
gaatgcgtgtgcttagacgcttgcttcgcaaatacagggaatctaagaagattgacaagcacatgtatcatgacatgtacatgaaggtcaagggtaacgttttcaagaacaaaagagttttaatggagagcattcataagtccaaagccgagaaggcaagagagaagaccttgtccgatcaatttgaggccaaacgtgccaagaacaaggccagcagagaaagaaaaattgctcggagggaggagcgattggcccaaggtcctggagaaaaagtatc

SEQ ID NO: 165914 - DNA, 275 bp, Glycine max
gaagaacttggactattcattcatataattaattttctctcttcttcttctttctccttttccttattcacattagatcacactatggatcgcccaacactatcatcattattttcattcctactaacacttcatctatcattatcaggggtaatttcaacaacattcactctagttaacaaatgtgactacaccgtgtggccgggaattctttccaatgcgggtgttcctcctctttcaaccaccggcttggttctccaaaccggcgcctccac

SEQ ID NO: 165915 - DNA, 263 bp, Glycine max
ctctgctctttgccttctctgacacatttggtgccttgtagagcgtgttttggcaggaaggtggtatggcgaaggacgttgaggttgctgagcgtggctccttctctgggaaggactaccaggaccctccaccagcaccactcattgatgctgaggagctcacaaagtggtccttttacagggctctcattgctgaattcattgccactttgctcttcctctacattactgtgctcacagtcatagggtacaatcaccagact

SEQ ID NO: 165916 - DNA, 274 bp, Glycine max
tttttgtttggtgcataatatggttggcgtttgcacagttgtcactaggaggaagagtgaggcattacaagtttgatgtggagtacatgatcagaaagccagattgcttggaacacgttgtgatgggaatcgccggccagtttccaggcccaactattagggctgacgttggtgacatccttgacattgctctcaccaacaagcttttcaccgagggaactgttattcactggcatggaatcagacaggttggaactcttgggcagatggtact

SEQ ID NO: 165917 - DNA, 270 bp, Glycine max
ctcgatttgaaaacgatcgaacaatttcctttataccacctgatgggtcatttgatttgatgacatataggctcagtacacaggttaagcctttaatttgggtggaagcaagtgttgaaaagcattcaaagagtcggattgagattatggtaaaagctaggagtcaatttaaggaacgtaggtagtgagatttcttcttttcttatgtttgtcatgtttcttcccccacccctctagatgatagaagatgagggaaatcaggttttttct

SEQ ID NO: 165918 - DNA, 268 bp, Glycine max
gtcagtagtcatatgcttgtctcaaagattaagccatgcatgtgtaagtatgaactaattcagactgtgaaactgcgaatggctcattaaatcagttatagtttgtttgatggtatctactactcggataaccgtagtaattctagagctaatacgtgcaacaaaccccgacttctggaagggatgcatttattagataaaaggtcaacacaggctctgcctgttgctttgatgattcatgataactcgtcggatcgcacggcctttg

SEQ ID NO: 165919 - DNA, 270 bp, Glycine max
tgggagaagaggtcgagtttcacagcagcaatggtgtacgtcaaggctcagaaatcaaaagcctacttcaagagatatcaagtcaagttcaagagaagaagagagggaaaaaccgattaccgtgccaggattcggttgattaatcaggacaagaacaaatataacactccgaaataccgatttgttgttcgctttagcaacaaggacattgttgcacaaataatatctgctagcattgctggcgatattgttcttgctgcagcatatgca

SEQ ID NO: 165920 - DNA, 267 bp, Glycine max
ataatgttttgcaattttcacattattcttctaattgctcttgcacttttggtacaaatatcatctcagcttggctccaaggtagaagtgcttcctggctttgaaggccctcttccttttgaactggaaacagggtacgttggattaggagaaaaagatgatgacatgcaagtgttttactactttgttaagtcagacaatgatcctcagaaagaccctcttatgctttggctaactggtggtcctggctgctcttcattttcaggt

SEQ ID NO: 165921 - DNA, 267 bp, Glycine max
gaaaaagtgtgtgtgtgagagagagagcaatggctggctcgtgggcacgccgttctctgattgttctggctatcatttccttcggatgtttatttgcaatttccattgctaaggaggacgccacaaaattggggacggtcatcgggattgatcttggaacgacctattcatgtgttggtgtttacaagaacggccatgttgaaatcatagccaatgatcaaggtaaccgtatcaccccatcgtgggttgctttcaccgacagtgaga

SEQ ID NO: 165922 - DNA, 257 bp, Glycine max
cgcacgaatatcttgttgtttacaagcgatccgagaaaaactctgtaaacatgttggtttaccaggacctccttacaggtgatgagcttctctctgactccttccgttacaaggaaattgagaatggaatgctgtgggaagttgaggggaagtgggttgttaaaggagcagttgatgtagacattggtgcaaacccttctgctgagggtggaggagaagatgagggagttgatgatgcagctgttaaggttgttgac

SEQ ID NO: 165923 - DNA, 272 bp, Glycine max
acttgacagcaaggttcttctggattttgatcatgttaaaaatagtttgaaagttgatgatgaagaactacagaaaatgagttcagatccaacctataacataaacatgtcgggtgatataaagcaaatgcttaaggagcttggaactgagaaaggaaaggaaactgcattgcatgggggaggcggtggcaaggcacaaaaagaaagagctgctgcacttgctgccatcttagctgcaaggtcacgtgttgaagaagattccaaatcaaatc

SEQ ID NO: 165924 - DNA, 272 bp, Glycine max
ggaatgagaggtgcttttggaaagccacagggtacttgtgctagagtggctattggacaggtccttctttctgtccgctgcaaggacagcaacagccatcatgctcaggaggctcttcgccgtgccaagttcaagttccctggtcgtcaaaagattatagttagcaggaaatggggcttcaccaagtttagccgttctgattatctcaagttcaagtcagagaacagaattgtgcccgatggtgtgaatgcaaagcttcttgggtgccatgg

SEQ ID NO: 165925 - DNA, 173 bp, Glycine max
tgcccttagatgttctgggcctcacgcgcgctacactgatgtattcaacgagtctatagccttggccgacaggtccgggtaatctttgacatttcatcgtgatggggatagatcattgcaattgttggtcttcaacgaggaattcctagtaagtgcgagtcaccagctcgcgt

SEQ ID NO: 165926 - DNA, 262 bp, Glycine max
cagattttggtcttgcaaagttttcttctgatgtcaatacccatgtatctactcgagtgatggggacttttgggtatttggctccagaatatgcttctagtggaaaactcacagacaaatcagatgttttctcctatggaatcatgctccttgagttaataaccggacgacggccagttgataaaaatcaaacttacatggaggatagtttggtagattgggctaggcctttgctcacacgagctttggaagaggatgattt

SEQ ID NO: 165927 - DNA, 267 bp, Glycine max
atctctcttcgttttgttcttccttgcgctcctcctcgttcgttcgttctccctcgcgtagatcggtcatggcggagaccgagacgtttgctttccaggctgagatcaaccagctcctcagtctcatcatcaacaccttctactccaacaaggatttgattaagaagcattctgagttcattagctacccaatttctctttgggttgagaagactaccgagaaggagatttctgacgatgaggatgaggaagagaagaaggatgagg

SEQ ID NO: 165928 - DNA, 269 bp, Glycine max
gtatttccctacctctcccttcaagatgcagatcttcgtcaagaccctcaccggcaagaccatcacccttgaggttcaaagctctgacaccatcgacaacgtcaaggccaagatccaggacaaggaaggaatccccccggaccagcaacgtctcattttcgccggaaagcaacttgaggacggccgtacccttgctgactacaacattcagaaggagagtactcttcacctcgtcctccgtctccgtggtggcatgcagatcttcgtta

SEQ ID NO: 165929 - DNA, 269 bp, Glycine max
taaccatcaagtttcagttccaaacaaaacccatcacaatctttctccctcagtgatcatatattcattcagttctatacaaaatcctcaaaaactcttcctctctgccatgaccatggaatacagaaccttagaactcaacatcatatccgcaaaggacatcaagaatgttaatctcttctccaagatggacgtatacgccgccgtttcgctctccggtgaccctctccaccctcagggcgccaccacccacgtccacaaagacgccg

SEQ ID NO: 165930 - DNA, 270 bp, Glycine max
gtaaatgttacatgtggtggtggacgtggtggtttacccaccactgcttggattagttctgcagttaacaatcgctcctcagatatcaacaaaaagattcgcacagcacttgggaaaggtaagaaaattgtttttcttactagggttgatccttttccagtagctttactggctgttctttttggcgttaagaatgaaattctgagttctaacgccaccaatcctatgctgacgcgacttcttgagaactgtaaaagtctcaaatatctg

SEQ ID NO: 165931 - DNA, 271 bp, Glycine max
  unsure (1)..(271): unsure at all n locations
attcccttcctgagtgcctacaagcttaaaatatacgatgtcattgagaagggtcaagagcaaccaaatctcaccgttggaattgttgtcgccgttgtggttgtcatcttgtcaattttcttgagngtcatatttggagggaagaagaagccaacaagggtggagaagacaaacccagaacccgcagaaactgcgagtagccaaggcagtggtgagaatgaagataacaaagagaaggaggaatcatctgcccctgcacgtcggaagccaa

SEQ ID NO: 165932 - DNA, 272 bp, Glycine max
  unsure (1)..(272): unsure at all n locations
caagctgatgttataaagataagtgaggatgagattacatttttgactgggggtgatgatccttatgatgataatgttgttttgaagaaactttttcacccaaatctcaagcttttaattgttactgaaggttcacagggttgcagatattacacgaaggcatttaagggcagggttgcaggtgttaaagttaaacctgtagacacaactggagctggcgatgcatttgttagtgggattttatactgcatagcttctgaccanactatttt

SEQ ID NO: 165933 - DNA, 268 bp, Glycine max
gtttggttttgtagtaagtgaggtgaggtgccaaaatggtgaagataactcttggtactttcgatgactcttttggtgttgcctctcttaaggcttatttggcagagttccatgcaactctgattagagaattcgctggtgttggttcagccatcgcttacaacgagcttataaaagatgcagccttggatccaacggggctggtggcagtagctgtggcccatgcatttgcactgtttgtaggtgtctccgtcgcagccaacatctc

SEQ ID NO: 165934 - DNA, 234 bp, Glycine max
tatcaatcacatgcttgttgcagttatatattataaatctattcaatgaatctgagtgatcaatacagtatatgatgtaacaaggcgggaaacctttacaaatctatctgatatatgggctaaagaaattgacttatactcaacaaatcaagattgcatcaagatgcttgttggaaacaaagttgataaggaaagtgaaagggttgtcagctaaaaggaaggaatagactttgc

SEQ ID NO: 165935 - DNA, 235 bp, Glycine max
agggaaagtttgccctagccaatatcctcttggtccttctcttgaacttgagcactttgctcaatgttcttgcttgtccctattgcccttacccttctcccaagcctccaaaaaagcctcccgttgtgaaaccaccggttcacaaaccaccaaaaccatgtccaccacccaagtcatctccaaaaccaccccatgtacaccctccctatgttccaaaacctcctcactaccctaa

SEQ ID NO: 165936 - DNA, 233 bp, Glycine max
cttcttcataaatattgtttgaattgtttctaagcattaggcgtattttgcaaaagaacaagaagaaaataagaccatgagtacagccaggtttatcaagtgtgtaacagttggagatggtgctgtgggaaagacatgcatgcttatatcctataccagcaatacctttcccacggattatgttccaacagtgtttgacaatttcagtgctaatgtaaccgtggatggtagta

SEQ ID NO: 165937 - DNA, 232 bp, Glycine max
agaagtttcttgcttcccaggctcgtatatatgaaggcaacgaaccaattcaatttcattctatccttcaaagtttcattgtttttaagggtgggcttagtgaaggatataagacttacattgcacaaaaggaaattcctgatgatacatacaatgagaatggtgttgcattattctgcatccagggctctggaccagacaatatgcaagccatacaagttgaacccgttgc

SEQ ID NO: 165938 - DNA, 232 bp, Glycine max
  unsure (1)..(232): unsure at all n locations
aaagatgcgcctgcctatgaactattcggngaagatgaagactggggtcctggcaaaagaaagcgacgagaaaaggagtctgatgctgttgattctcttatgactttgcatgaaagtgagaataggcatcccaataatgagcacaacatgacaagtaaagattcttcaagcataaagatcaaaaggcattgttttaggattccacgtgatgcagttgagaggctcgccaagt

SEQ ID NO: 165939 - DNA, 233 bp, Glycine max
cgacctcgcatcgcaccttcaacttaacctattccacttgtaatcgtaaaccctttgctagaagaagagacaaagtgtgtctgtgtgtgtgagagagagagcaatggctggctcgtgggcacgccgttctctgattgttctagccatcatttccttcggatgtctatttgcgatttccattgctaaggaggaagccaccaagttagggacggtcatcggcattgatcttggaa

SEQ ID NO: 165940 - DNA, 235 bp, Glycine max
ctcaattctcttcaccctttgcctctgaaagaaatgggtagtcttgaagcggaaagaacaacagtaggattggcagcaagagacccttcagggattctctccccatacacctacaatctaagaaacacaggccctgatgatgtttacattaaagttcactactgtggaatttgccattctgatctccaccagattaaaaatgatcttggcatgtccaactatcccatggtcccag

SEQ ID NO: 165941 - DNA, 234 bp, Glycine max
gtttcctcaccactccctccactctctttctctagtcctgttatttctcagcgcgtaaagcatggctttgttcctggagaatcccacgagtggtcgcgagtacaaggtcaaggacctttcccaggccgacttcggccgcctcgagatcgagctggccgaggttgagatgcccggcctcatggcctgtcggaccgagttcggcccctcccagcccttcaagggggcccgcatcac

SEQ ID NO: 165942 - DNA, 234 bp, Glycine max
aataaactcacccactaagcactacacaaatcacacagagttgcaagagaaagataaaagaagatggcgactcttgattccgacgtgcctatggttcccgccggcgagccctcgagcagcgccggtccttcttccaagaagcccaagcgcttcgagatcaagaagtggaacgccgtcgctctctgggcttgggacatcgttgtcgataactgtgctatctgccggaaccacatc

SEQ ID NO: 165943 - DNA, 233 bp, Glycine max
  unsure (1)..(233): unsure at all n locations
gcagacacttcaaatggctctggaagctcttcaatcacccagaantgccactccatcgtttagtccctttgaagaaaccaacctcagttacttggagacaccgtggaccaaaggaaagcgttctaagcgtaccgcatggagcagcaactgcaacactcttcatgcaccgaggaagagtacctcgctctctgtctcatcatgctcgctcacggcggcgcngcggtgtccccgcc

SEQ ID NO: 165944 - DNA, 231 bp, Glycine max
ggcgtggcgaggcttccggtctccacttccgccctcatcatcgcaacgcaactcggcttcaccgcgttcttcgcgttccttctcgtgaggcagaagttcacggcgtactccgtaaacgccgtcgttttgctcactgtcggcgccggcgttttggcgcttcacaccagcggagaccgtccccctggcgagtccgttaaggaatatgttatgggctttgtgatgacagtgatc

SEQ ID NO: 165945 - DNA, 233 bp, Glycine max
gtttgaaggtgaggattatgggacctaattatgtccctggggagaaaaaggatttgtatgttaaaagtgtgcaacgaactgtcatttggatgggaaagaggcaagacactgtagaggatgtcccctgtggtaatacagtggctatggttggtcttgaccagttcatcacaaagaatgcaacattgacaaatgagaaggaagtcgatgcccaccctatccgagctatgaagttt

SEQ ID NO: 165946 - DNA, 234 bp, Glycine max
gtctaagtgactttgtctacttgtgtcccccagaagccttaaagctcttctctgctttgaaaatggctgattggggcccggtggtgatcgcagtggtgctgttcgtgctgttaagcccggggcttctgtttcagatgccagccaggggaagggtagcagagtttgggaacatgcaaaccagtggggcctccattttggttcacgccatcatctactttggcctcatcactatct

SEQ ID NO: 165947 - DNA, 236 bp, Glycine max
ccaatggaacgttccatagggccacatttccaagtccctccagcatcactccaaggcctagttggagtcacaatcctctttgctgttccattctatgaccgtgtctttgttccactagcaagaacaatcacaggtaaacccactgggataacagtgctacaaagaattggtgttggactttttttgtcaatccttaacatggttgtgtcagcacttgtggaggacaaaagggttgg

SEQ ID NO: 165948 - DNA, 232 bp, Glycine max
cgagcatggggcgaagaccgcgaggtgttataggcaaattaagaacaaaccataccccaagtcacggttttgccgtggtgttcctgatcccaagatcaggatttacgatgttggtatgaagaagaagggtgttgatgaatttcctttctgtgtccatctggttagttgggagaaggaaaacgtttctagtgaggccctggaagctgctcgtattgcttgcaacaagtacatg

SEQ ID NO: 165949 - DNA, 233 bp, Glycine max
atgttcaccacctctgccgagcgggaaattgttcgtgacatgaaggagaagcttgcttatgttgccttggattatgagcaagaacttgagactgcaaagagcagttcttcagttgagaaaaactacgagcttcctgatgggcaagttatcaccattggagctgagagattccgttgccctgaagttcttttccagccttctatgattggaatggaagctgctggaattcacga

SEQ ID NO: 165950 - DNA, 232 bp, Glycine max
ccgattgctagaatggaatttcgatgctcagtcatctcttttaccattctcttctctcttgctcttgcaggagagagccatgtccatgcatcgctacctgaggaagattattgggaagctgtttggccaaacactcccattcccactgcactgcgagagcttctaaagcctctccctgcaggtgttgaaatcgatgaactccctaagcaaattgatgatacacagtacccaa

SEQ ID NO: 165951 - DNA, 232 bp, Glycine max
ctcgagcgcgcgtcgctccgcaccagtttcaccgcacgaatatcttgttgtttggaccgatccgagaaaaactctgtaaacatgttggtttaccaggacctccttacaggtgatgagcttctctctgactccttccgttacaaggaaattgagaatggaatgctgtgggaagttgaggggaagtgggttgttaaaggagcagttgatgtagacattggtgcaaacccttctg

SEQ ID NO: 165952 - DNA, 234 bp, Glycine max
gtgagagagagagagagagagaggcacttggaatccaaaaatgagagatctcatcagcattcacataggtcaggccgggatccaggttggcaactcctgctgggaactctactgcctggaacatggcatccagcccgatggcatgatgccaagtgactcctccttcggtgtagcccacgacgccttcaacaccttcttcagcgaaaccggatccggcaagcacgtccctcgcgc

SEQ ID NO: 165953 - DNA, 233 bp, Glycine max
caaatacaccatggcagatatcctgagtgaagaacagattgttgattttaaagaggcctttggcttgtttgacaaagatggggatggttgcattactgtggaagaacttgccactgttattcggtcgttggatcagaaccccaccgaagaagagctccaagatatgataagcgaagtggatgcagatggcaatggaaccattgaattcgctgagttcttgagcttgatggcca

SEQ ID NO: 165954 - DNA, 233 bp, Glycine max
gacgattcctcagttttgaagaaaattggatgctgctcaaactagatgcatcatctatggcagttggtttttgtagactgtttcatcttgtaaatgcctacactggaatcgtgatatcatgtagaataaggctagtcttgcatattgttttgaatttacaatttacaagcatcatccatacataggattatgtttccgtgaaacggtcattctaaagacgtgcttgaaacaaa

SEQ ID NO: 165955 - DNA, 232 bp, Glycine max
gcgcgttgttgctcaatcgtcgcaatcgaatcttctgaaacccctagcgtcgtacttatcactacgacgccgttcggtttcgacttcgtcagacccactcacgatagagacctcggtgcccttcacctcccacaactgcgacgcgccgtcacgcgccgtggagacctcctcggcggagctctttgcgttcttccacgacatggcgctgacgcggcggatggagatcgcggcg

SEQ ID NO: 165956 - DNA, 232 bp, Glycine max
taaagatggaaatgctgcaggaaatggatttcttcttcttgattctgagtttaatgtgaagggaaggtgggagaaaccgggtcacagcccactatttgggtatgacttttggtaccaaccacgtcacaataccatgattagcacatcatggggtgctcctagtgcttttacaaaaggttttaacttacagcatctctctgatggattatacgggaggcatctccatgtatat

SEQ ID NO: 165957 - DNA, 229 bp, Glycine max
gctgttcttgcgcgtgaacaagcctcaggtaagccaaaaccatggttcagcataacaatgttatcccaaacggacacttccgtaagcactggcagaactatgtgaagacttggttcaatcagccagcacggaagacaaggagacgattggctcgtcagaagaaagctgtgaagatattccccagacctacggctggacctctcaggcccattgtacatggtcaaacttt

SEQ ID NO: 165958 - DNA, 232 bp, Glycine max
gcaagaatggcacttcgttgcttggtgatgtccctttctgttctcttcactcttggtcttgcgagagaaagccatgccagagacgaagatttttggcatgctgtttggccaaacactcccattccaagttcattgcgagatcttctaaagcctggccctgcaagtcttgaaatcgatgatcaccctatgcaaattgaagaaacacagtacccgaaaaccttcttctataaag

SEQ ID NO: 165959 - DNA, 232 bp, Glycine max
gtgagtcactcttcttgcataacccagatctgcagacaatatgcgaagaactggcttgttacatttgttatgccttgtcattgctttagtaagtgtgcaagcagaagatgcgtataagtattacacatggacggtgacttatggaactatttctccattgggtagtccccagcaggttattcttatcaatggtcagtttcctgggcctagacttgacttggtgactaatgag

SEQ ID NO: 165960 - DNA, 229 bp, Glycine max
ttgccacccagttttgaatatatttttattccttctttgtttcttcactttcttccatacacataaccatgtcttctcagactgttgtcctcaaagttggtatgtcatgtcaagggtgtgctggagcagtgaacagggttttgggaaaaatggaaggtgttgagtcatttgacattgatctgaaggagcagaaggtgacagtgaaaggaaatgtggagccagatgaagt

SEQ ID NO: 165961 - DNA, 231 bp, Glycine max
cagcgagttaggcgcggcgggatcagcacaagattgcaaaatgaagttcaacattgcaaatcccaccactgggtgccagaagaagctggaaatcgatgacgacctgaagcttcgagcattttgggacaagaggatctcccaggaggttcttggtgatgctctgggtgaggagtttaaaggatatgttttcaaaatcaccggtgggtgtgacaaacaaggattccctatgaa

SEQ ID NO: 165962 - DNA, 234 bp, Glycine max
ggcgaggagaaagatggaggggaaggagcaggatgtgtcgttgggagcgaacaagttccccgagagacagccaattgggacggcggcgcagagccaagacgacggcaaggactaccaggagccggcgccggcgccgctggttgacccgacggagtttacgtcatggtcgttttacagagcagggatagcagagtttgtggccacttttctgtttctctacatcactgtcttaac

SEQ ID NO: 165963 - DNA, 235 bp, Glycine max
gggagtgagagtgttcttcgtttgctaccttctctcagaaatggttacgttcaggtttcaccagtaccaggtggtcgggagggctctaccaacggaagcagatcagcatccgaagatctaccgaatgaagctctgggccaccaacgaggttcgcgccaagtctaagttctggtattttttgaggaagctgaagaaggtaaagaagagcaatggtcaagttcttgctatcaacgag

SEQ ID NO: 165964 - DNA, 232 bp, Glycine max
ctcaccgattgctagaatggaatttcgatgctcagtcatctcttttaccattctcttctctcttgctcttgcaggagagagccatgtccatgcatcgctacctgaggaagattattgggaagctgtttggccaaacactcccattcccactgcactgcgagagcttctaaagcctctccctgcagcgtgttgaaatcgatgaactccctaagcaaattgatgatacacagta

SEQ ID NO: 165965 - DNA, 232 bp, Glycine max
ggaaaaggctcagatcaacattgtggtggttggtcatgtggaccctgaggaggcaaccaccattaacgagctgaagaagcctgttgtggagaaagaagctccagggcatgccatatgagggcatgcacgtacggcctcggaggggaaccagaaaattatgttaacaaaataatctggaaccctaatgtatcagtgtcatcatcagtgtgtagtttaagctagctttgctatg

SEQ ID NO: 165966 - DNA, 231 bp, Glycine max
ctcgatcaactcaacacaaaccaaaactcaagctaaaattctcactctctctctcatctcgagatcatagtatcatattcaatatcatttcataccaaacacatggctttggaagctctcaactcaccaacaacaaccgcttccatcttttccctttgacgacccaactattccatgggcgaaacgaaaacgttcaaagcgttctcgcgaccatccttctgaagaagagta

SEQ ID NO: 165967 - DNA, 227 bp, Glycine max
ctcattaattgcaagaatggcacttcgttgcttggtgatgtccctttctgttctcttcactcttggtcttgcgagagaaagccatgccagagacgaagatttttggcatgctgtttggccaaacactcccattccaagttcattgcgagatcttctaaagcctggccctgcaagtgttgaaatcgatgatcaccctatgcaaattgaagaaacacagtacccgaaaa

SEQ ID NO: 165968 - DNA, 230 bp, Glycine max
gataccccaaccacaggaggacgatgctccccttgtcgaggacttgaaggatgatgacaaagacgacgacgatgaagacgacgacgacgacgacgaagatgacaaggaagacgatgctcaaggtggtgctgagggttcaaagcagagcagaagtgagaagaagagccgaaaagcaatgttgaagctgggactgaaacctgttactggtgttagtagggtcacaatcaaga

SEQ ID NO: 165969 - DNA, 231 bp, Glycine max
gttggtgcaaagcatccttcgtttcaatttctctctctcagcgctttctgcaatcgaacctttcatctccaaagggatccacaggccgaaggagaaatggggctgacattcacaaagcttttcagtcggcttttcgcgaagaaggaaatgcgaattctgatggttggtcttgatgctgctggtaagaccactatcctgtacaagctcaagctcggagagatcgttaccaca

SEQ ID NO: 165970 - DNA, 232 bp, Glycine max
gtcacaccaaaaaattcttgcttagctctcacaaacaatctttaacaacaatgaagaaagtagtattaaaggtggacttaaataatgatagaatcaagaaaaaagctatgaagacagcatctggcctttcaggggttgaatcgatttctgttgacgttaaggacatgaaactagtcttattgggtgagattgatccagtgagtgcagtgtcaaagctacgaaagtggtgtca

SEQ ID NO: 165971 - DNA, 234 bp, Glycine max
ttttaatcttgaaaataagctcggagaggcaggttttggacctgtttataagggcacacttaatgatggaagagtcattgctgtgaaacaactatctgtgggatcccatcaaggaaagagccaattcataactgagattgctactatatcagctgtgcaacatcgtaatctggtcaaattatatggatgttgcattgaggggagtaaaagactgcttgtctatgaatatctaga

SEQ ID NO: 165972 - DNA, 281 bp, Glycine max
ctccgcactccgtcttcatcaatcagcatcaccaccgctccaacacaggggaacatgagggagatccttcacgttcagggagggcaatgcgggaaccagatcggttcgaagttctgggaagtggtgtgcgacgagcacggcatagatccgacggggaagtacgtcggaaactcagtcctacaactcgagcgcgtgaacgtgtactacaacgaagcttcctgcggtcggtttgtcccacgcgcagtgctgatggacctggagcccggaaccatggacagcgt

SEQ ID NO: 165973 - DNA, 273 bp, Glycine max
cggctcgaggcactctgtgttttctgcgccgtctccgatctccgacaatggcgacccaaatgagcaagaagagaaagttcgtagctgatggagtgttcttcgctgaactgaacgaggttctgacaagagagttggccgaggacggttactccggcgtggaagttagggttacgccgatgcgcaccgaaatcataattagagccaccagaacccaagctgttctcggtgagaagggaaggagaataagggaacttacctctgtggttcagaaga

SEQ ID NO: 165974 - DNA, 288 bp, Glycine max
cggcattcggctcgagccaactttggaacggctcgaggtgggatgactccattcgactctcgtggtggtggtggtgacccgtgggatactggtcctcgtggtggctctggtggtcgtggaggtggcatgagggatggcagttttcgtggacgtggcagtggctttgggggacgtggtggcggcattagggatggtggttttggtggacgtggcggtggctttggtggtcgtggtggcaccccggatggaggtagtgggcaaggtgggcgaggtgatttctttcctggt

SEQ ID NO: 165975 - DNA, 273 bp, Glycine max
cctcgagccgattcggctcgagtagggaaagatcatcatgagtgtgcctttaattgaggataccttaatatgctcttcatgaccatgcttaattagctgaatggatttgagtggaatgaaatcttgaggaggaaatttgttttgtgattgcaggctttttttggcatatttgatgggcacggtggtgcaaaagctgctgaatttgctgcaaataacttgcaaaagaatgtgttagatgaagttattgtgagagatgaagatgatgttgaggag

SEQ ID NO: 165976 - DNA, 277 bp, Glycine max
cgtttggttgccatgcggtgtgttgcgaatcactgtccaatcccgatcgattgatccagacagtgaatcagaatcagaatcagaatcagaatcagagagaaacgatgagggcagtaagtgcgttaatggtggctcggatgttgacgcgggaccactcgctccctgtccttggcaacgaaagcatacccttcggatcggtgtggtggttcgcctatgccggcgtctcctgtttcctcgtcctcttcgctggcatcatgtccggtctcaccctcggact

SEQ ID NO: 165977 - DNA, 278 bp, Glycine max
ccaatactctattttcttctctcatcgccatcagattccaaaaaggatttccctgctgatgacaaagctggaacagcagagaatctagcatccaaagatgaaacgtcatctaaagattctccagcagcacaaagagctactacagctacttctggacctgcaactggtgttccaggcaacccttttgatttctctgcaatgtctggcctgctcaatgatccaagtactcaggaattggctgaacagatagctcaagatccatcattcaaccagatggc

SEQ ID NO: 165978 - DNA, 281 bp, Glycine max
cagaattagggtcacgagggtttcatcctgcggcatcagacatgggaggaggcaatgggcaaaaggcaaagatggctcgcgagaagaacatcgagaagcagaaggccgcctcaaagggaagccagctggattcaaacaagaaagcaatgtcgatccagtgcaaggtgtgcatgcaaacatttatgtgcaccacatcggaagtgaagtgtagggagcatgctgaagccaaacaccctaaatctgatgtttatgcttgtcttcctcatctcaaaaagtgaaca

SEQ ID NO: 165979 - DNA, 272 bp, Glycine max
ctggtgaggccttgaagcactccatcggtgctactcatccagttcggctgataccttacaagccagactatcttgatgagtctattctttggactgaaagccgtgacttaggagatggccacagagctataaggatggtcaacaatgttcatcttaaggtggatgcttttcatggcgataagaattctggaggtgtgcgtgatggcactacaatagtcctctgggactggaacaaaggtgataaccaacggtggaagatcttaccttactga

SEQ ID NO: 165980 - DNA, 275 bp, Glycine max
ccaatttgacttcttgctggacgatcttgagaccatcaaagcaattggaaaaggcagtcgtggtgtggtacaacttgttcgccataagtcggttggaagattgtttgctttaaaggttattcagatgaatatacaagacgatattcgaaaacagattctccaggaactgaaaataaatcaagcgtcacactgtccacatgttgtagtttgctatcactcattctatcataatccagtaatatctcttgtcttagaatacatcgatcgtggttctc

SEQ ID NO: 165981 - DNA, 274 bp, Glycine max
ctgggagctgttgggcattctcagcaatcggtgcagtggaaggaataaataagatagtgacaggtgaactgatttcgttatcagaacaagaattggtggattgtgatacaggatataacgaaggatgcaatggaggacttatggactatgcatttgagttcattatcaacaatggcggcattgattccgaagaggattacccttaccgtggtgttgatggtagatgtgacacatataggaaaaatgctaaggttgtttccattgatgactacga

SEQ ID NO: 165982 - DNA, 278 bp, Glycine max
tcatttccctccccccactcccaccgccaacgccaaacaaaccctaaatctctctcgtcttcttcttcttcttcctccttcaaccatgagcgacatcctgcacgttcagggaggccaatgcggtaaccaaatcggttccaagttctgggaggtgatatgcgacgagcacggcatcgatcctaccggaaagtacaacgacgaaggcaacaccggcatccaactcgagaggatcaatgtctattacaatgaggcctctggcggaaggtacgttccgagag

SEQ ID NO: 165983 - DNA, 275 bp, Glycine max
cgagggatccagatctgcgacgaacggggtgctgcctctggcgcgcaaggtggcattgattaccggaattaccggccaagacggttcgtacctgacggaattccttctagacaagggttacgacgtgcacggtctgatccgtcgctcctcgaacttcaacacgcagcgcatcgagcacatctatgtgcatccccacaacgcccacaagcgccgcatgaagctccactacgccgatctctccgacgcctcctccctccgccgctggctcgacacca

SEQ ID NO: 165984 - DNA, 276 bp, Glycine max
ccaccattgctttctgtgacactgattcgcctatgaggtatgtggacattggaattcctgccaacaacaagggaaaacacagcattggttgtctcttttggctccttgcaaggatggtattgcagatgacgggtacaattcgccctggcctcaaatgggatgtcatggttgatttgtttttctatagagaaccagaggaggctaagcaacaagaggaggaggaagctccggcaggtgattatgccatcacagatttcaatgcaggtgctattgctg

SEQ ID NO: 165985 - DNA, 278 bp, Glycine max
gggggacctgacaagctctgtgaccagatctccgatgctgtgctcgatgcatgcttggagcaggacccttacagcaatgttgcctgtgaaacctgtagcaagaccaacatggtgatggttttcggagagatcacaaccaatgccaacgtggactatgagaagattgtgcgtgacacatgcaggaacattggttttgtctctgatgatgttggtcttgatgctgacaacttgcaaggtcctcgtcaacattgagccacagagtcctgatattgctcaag

SEQ ID NO: 165986 - DNA, 278 bp, Glycine max
ctcgagccgaaaaaataattaaggtgtttttctttaaatgggttggttgactggttcaatgacaccgatcaagaccacagcaggttcatggggatgcgaggattaagacgctttgttttttaatcttccgatgtcactcttgtttgttagtttgtttttttattttttatttcaatcagtactgtgcaagtaggttagagttgggtagaagggcatgttcatggtgttaattactatgttatgtatgcatgtgagtgctgctatcgatggcaagatgt

SEQ ID NO: 165987 - DNA, 275 bp, Glycine max
cgagaatccatgaatataagcgacaattaatgaacatatttggaattgtttaccgatacaagaagatgaaagaactgagtgcggcagaaagggaagcaaattttgttcctagagtttgtatatttgggggaaaagcatttgctacatatgtgcaagccaagagaattgtgaaatttattacagatgttggggctacagtaaatcatgaccctgtcataggagatctacttaaggttgtctttgtccctgattataatgtcagtgttgccgagatg

SEQ ID NO: 165988 - DNA, 274 bp, Glycine max
ctcgagccggacttaacaacagcacaaagcgggttactgtctgttcaagctaccatctctctctctctttcttagtgcctccttgccagaagttaaaatggcccaagaaactttcctattcacatctgaatcagtgaacgaggggcaccctgacaagctctgtgaccagatctccgatgctgtgctcgatgcatgcttggagcaggaccctgacagcaaggttgcctgtgaaacctgcaccaagaccaacatggtgatggttttcggagagatc

SEQ ID NO: 165989 - DNA, 273 bp, Glycine max
  unsure (1)..(273): unsure at all n locations
ggcagatcggtgaagcggcggagcaaatggttgcagcgattccatacatgactcgacacacgtntagttaggagcagcggtggaaagcctactagaacaagtatctcctggctagacggtagcagaaacggaatcggcatgcgaatggataacgggaagtacgtgcgttacacgcctgagcaggttgaagccctagagaggctctatcacgattgccccaaacctagttccattcgccgactgcaactcattcgcgagtgccccactctctcc

SEQ ID NO: 165990 - DNA, 274 bp, Glycine max
ctcacatcacacacactctcatagctgtagcggcgacactaagatcggagacagaatggcgaaaacgacgtcgttgctgctctttacactgctcctcttcggaaccctagctctcatccaggcgaagaaatcgaaggaggatttgaaggaggtgacccacaaggtttacttcgatgttgagattaatggaaaagaagcaggtcgtattgtaatgggtctttatgggaaggctgttccaaaaactgcagaaaacttccgagcactttgcacaggg

SEQ ID NO: 165991 - DNA, 275 bp, Glycine max
gttctatctgtgacgagcatcatggcctcaagagcagtgttattgttggctatgtgtgtgcttccggcgatggttgtggccattcgcccagcaaagaaccctttttgcgtgaagggtcgtgtctactgtgacccttgccgtgctggttttgagacctcagctaccacctacattgctggtgctgagattatgttgcaatgcaagagcagggttagcaacgacgttgtgtacacgaagaaggggtacaccgactcaaccggagcatacacaatgta

SEQ ID NO: 165992 - DNA, 268 bp, Glycine max
caggaagtctcttcctacttgaagaaggttggttacaacccagacaagattccatttgtgcccatctctggtttcgagggtgacaacatgattgacagctccaccaaccttgactggcacaagggaccaactctccttgaggctcttgaccaaatcaatgagcccaagaggccctcagacaagccactcaggcttccattgcaggatgcctacaaaaatgggtggtatgggtaccgtgccagtgggacgtgttgagactggtgtcgtg

SEQ ID NO: 165993 - DNA, 272 bp, Glycine max
gaatacaagttttttgttttttttcccatgatgttgaagcagatgggagagggtggtgctgcttccaatcctgctttgcaagtgtcggtttcttttggtagatttgagaacgattccttgtcttgggagagatggtcctctttctctccaaacaagtacttggacgaggttgagaagtgtgccacacctggatcagtggcacagaagaaagcctactttgaagcacattacaagaaggttgccgcccggaaagccgaattgctggctcagga

SEQ ID NO: 165994 - DNA, 274 bp, Glycine max
cggacactcgaagcatcacgatgtcaccgttaaggacgagaagacccttctcttcggtgacaaggcagtcactgtttttggacacagaaaccctgaagagatcccatgggggtcaactggagctgacatcattgttgagtccaccggagttttcaccgataaggacaaggctgccgcacatttgaagggtggtgccaagaaggttactatttctccccccagtaaggatgcccccatgtttgttgttggtgttaatgagcacgagtacaagcca

SEQ ID NO: 165995 - DNA, 275 bp, Glycine max
ccttgccgtgctggttttgagacctcagctaccacctacattgctggtgctgagattatgttgcaatgcaagagcagggttagcaacgaggttgtgtacacgaagaaggggtacaccgactcaaccggagcatacacaatgtacgtggatgacgatcacgcagatcagatctgcagtgccaagcttgtaagcagccctcaccctcaatgcaaggaagtcaccccaggccgcgacgaagccgtcgtgattctcacccgctacaacggcattgcctc

SEQ ID NO: 165996 - DNA, 271 bp, Glycine max
ggctaccaacaccacaaaaaggctggtgctgaaaatgcactggtgagggtgtctgcagttctcacaaatgctcccttcattctcaatcttgactgtgatcattatgtgaacaatagcaaggctgtacgggaagcaatgtgttttctgatggatccagtagttggcagagatttgtgttatgtgcagtttccccagagatttgatggtatagatcgtagtgatcgatatgccaatcgaaacacagttttctttgatgttaacatgaaaggac

SEQ ID NO: 165997 - DNA, 277 bp, Glycine max
  unsure (1)..(277): unsure at all n locations
gaacaagataccagtaactcaaggatgcaagtgaaggttgtggccgagacagcaatcaaagaagatgatcctctgttatcttgctatggatgtttaaacaatgatcttttccttcttgattatggatttgtgatgcactcaaacccttatgattgtattgagctcaaatatgatggtgctcttttggatgctgcaagcacggcagctggagtttcttcaccanacttctcagcacctgttccatggcaggaactgatcttatctcagctgaatctag

SEQ ID NO: 165998 - DNA, 233 bp, Glycine max
cgggcatgtctgcattctatggtcctcctaagccagagcccgatatgattgcactcatccaccacgccgtccaaagccgtgtcacttttcttgacacttctgatgtctatggacctcacaccaatgaactccttctgggaaaggctttgaagggagggggtagacagaggttgaattggctaccaagttgggaatcagctatcctgaaagggaatggggagatccgtggtgat

SEQ ID NO: 165999 - DNA, 274 bp, Glycine max
cgcgaaaagagattcgaatccaaggaagggaaaggaaagtaagacaagagaagaatggccgaagagggacaagtgattggtgtccacagcgtggaggagtgggaggaacatctcaagaagggacaagagtccaagaaattgattgtggtggattttactgcttcttggtgcggcccatgccgtttcattgccccaattcttgcggatatggctaaaaagttgccgaatgtcaccttcctcaaggtggatgtggatgaattggcgactgtttcca

SEQ ID NO: 166000 - DNA, 273 bp, Glycine max
cggctcgaggttctagaaagatccactccgaaatggacggtgcgccacaatccgccggtgccggaggtccggcgccgttccttctgaagacctacgacatggtggacgatgcctccaccaacgacatcgtttcgtggagctctaccaacaacagctccgtcgtgtggaaccctcccgagttcgctcgtctccttctctcgacctatttcaagcacgacaacttctccagcttcatccgtcagctcaataccgtaggatttcgaaaaatacatc

SEQ ID NO: 166001 - DNA, 275 bp, Glycine max
gacgccgccgcgaccttccctcttcttctctctccgccttccgatcgttgacgagtggcacaaagacatcatatgtaggtaacaagtgggcaagtttgtcacgaccgttcagttcaaagcctgctggtaatgatgtcattggaattgatctgggtactaccaattcgtgtgtctctgttatggagggaaagaatcctaaagttattgagaattctgaaggagctcgtacaacaccatcagtggttgccttcaaccagaaagcggacttcttgttg

SEQ ID NO: 166002 - DNA, 272 bp, Glycine max
cgattattcctcttcccattctagggttcccaaatggacgctggcggaaagatcaagaagggcgccggaggaagaaagggcggcggccctaagaagaagccggtttcaaggtccgtcaaggccggtctccaattccccgtcggaagaattggccgttatttgaagaaaggaaggtacgcccagcgtgtcggtaccggtgctcccgtttacttggccgcagttctcgagtacctagctgctgaggtgcttgagttggctgggaatgctgcacg

SEQ ID NO: 166003 - DNA, 272 bp, Glycine max
ggcttatggtggatacctaggcacccagagacgaggaagggcgtagtaagcgacgtaatgcttcggggagttgaaaataagcgtagatccggggattcccgatataggtcaacctttcgaactgctgctgaatccacgggcaggcaagagacaacctggtgaactgaaacatcttagtagccagaggaaaagaaagcaaaagcgattcccgtagtagcggcgagcgaaatgggagcagcctaaaccgtgaaaacggggttgtgggagagcta

SEQ ID NO: 166004 - DNA, 273 bp, Glycine max
gtgaatttgggttcagcaggctggtgaaagaggagtcagtttatcttcctaacttccacttcagcactgagccaaagggttcttttacatatacagatcctgaatttcagagaactggagtactgacacctaagtctgacatatactcttttggaatcatcattttgcaactcctcactggtaggactccagttggattagtgggtgaagtacggagagcagtttcttgtggaaaattgtatccaattttggattcttcagctggagaatgga

SEQ ID NO: 166005 - DNA, 274 bp, Glycine max
ccatctcttgtttcttgctttctttcttcaccatgtcacttgctgggaaaatcaccactgaaatcggggttcatgcaaccgctacaaagtggttcaacctcttcgcaacacaactccatcatgttcaaaacctaactgatagagtgcatggaaccaagctgcatcaaggtgaagactggcatcacaacgagacagtcaagcactggacttataccatagatggtaaggttacaacatgtctggagagtattgaatccattgatgcacagagcaa

SEQ ID NO: 166006 - DNA, 269 bp, Glycine max
ctcgagccgcgtagcccagagactcccacgtccccattttggcacccttgccaattgggttcgctgtgttcttggttcacttggcaaccatccccatcaccggaactggtatcaaccctgctcgtagtcttggtgctgctatcatcttcaacaaggaccttggttgggatgaacactggatcttctgggtgggaccattcatcggtgctcctcttgcagcactctaccaccaagtcgtaatcagggccattcccttcaagtccaagtga

SEQ ID NO: 166007 - DNA, 271 bp, Glycine max
cagagagagagacgaagccgaacgaaacataaataaaaccttgctcttttttcacgccctagctcattttcttctccgttctcttctctctgttcctcactcactcgcatttattcaccatgactaagcaacaagctaattggtctccatacgataacaacggaggatcatgtgttgcaattgctggagcagattactgcgtcatcgccgcggatacgaggatgtccaccggttacaatatcctcactcgcgattactccaaaatctccca

SEQ ID NO: 166008 - DNA, 272 bp, Glycine max
cacaattacagtgactccgcttggctcctcttcttcgatcttcggtttgattctgcgtttgttcacatcatggccaccgcttcagtggcatttaagtccagggaggaccaccgcaagcagattgagttggaggaggcgcgtaaagcggggcttgcgccagctgaactcgatgaagatggaaaggaaatcaatcctcacattccccagtatatgtcctctgctccttggtatcttaatgctgagagacctagtttgaaacatcacaggaaatg

SEQ ID NO: 166009 - DNA, 271 bp, Glycine max
attgtatgcaatggaattagctttgtctttggagaagttagtgaatgagaaacttctgaatgtgcacagtgtggcagatcgcaacaatgaccctcaaatggccgacttcattgaaagcgagtttttgtctgaacaggttgaatcaattaagaaaatttcagagtatgtggctcagttgagaagggttggaaagggtcacggtgtttggcactttgatcaaagacttcttgattaggaagatgctgcttaatcttgaatagccttattatta

SEQ ID NO: 166010 - DNA, 254 bp, Glycine max
tacaaaacttagctctgttttttaattattccttgcattctcttgagttcagtggaagcaactaatggccaccaaaatggttcgttttgcttgtccagtactaagggaagtgatccgttaaactggggagcggcggcggaggcgatgaaggggagccacctggacgaggtgaagcgcatggtgtccgagtaccggaagccggtggtccggctcggcggcgatacgctcaccatcgcccaagtggccgccgtggc

SEQ ID NO: 166011 - DNA, 261 bp, Glycine max
ccctagctctgtcgttccgtcgttgacgatggcgtttcgggtgcgaaccctgacctccgctctctctttcttctctctctcttgtccatcgcttccgccaatgtcttcttcgaagagcgtttcgatgacgggtgggaaaatcgatgggttaaatcagattggaaaaaagatgagaacgtggctggggagtggaaccacacctctggtcaatggaatggagacgctaatgacaaaggtattcaaaccagtgaggattacaga

SEQ ID NO: 166012 - DNA, 262 bp, Glycine max
taaaaagcgatcatagtttcacttcggccttatccagtttagggtttcggtctctaccctatctttcacgtatcgaaaccttaaatttacgatcaggtctgagcaatctggttggtagaacctttggtcttagtgagtcaagttttatgtctgaattagacgatcaaattcctactgccttcgatccttttgctgatgcaaatgctgatgactcgggtgctgggtcaaaggagtatgtgcatattcgtgtacagcagcgaaa

SEQ ID NO: 166013 - DNA, 270 bp, Glycine max
gaggggtttttgagtgcggtgcggcgatcctagcactctcttctgcagctttcgccgacagcttcattcaccatggctgagcaaaccgagaaggcttttttgaaacaaccaaaagtgtttctcagctcgaagaaaactgggaagggaaagagacccggaaagggtgggaaccgcttttggaaatccattgggcttggatttaagactcccagggaagccatcgaaggaacctacattgacaagaagtgccccttcactggcaatgtttcc

SEQ ID NO: 166014 - DNA, 262 bp, Glycine max
actttctgtttctcttcactctaatggccatggcagcgtctgcaaagctgcacaccttgtcttcttcccagtggatcgcccacaattccttctctcctcgccgtggatcctcttctcgccgagtctctcttccgatccgcgcttcttcttaccaacacgaactcgtccaaaccgccaaatccattgcatcacccggccgtggaattcttgcaattgatgaatcaaatgccacatgtgggaaacgattagcatccattggatt

SEQ ID NO: 166015 - DNA, 264 bp, Glycine max
gggaattggctgctgctgttcaaattgccgctcaaattttcactttccgtgagcttgcagccgcaacgaaaaacttcatgccccaatcctttttaggggaaggtggttttggaagggtctacaagggcctcctggaaaccaccggtcaggttgtggctgttaaacagttagacagagacggtcttcaaggtaatcgggaattcctcgttgaggttctcatgctcagtcttctacaccaccctaatcttgtcaatctcattggat

SEQ ID NO: 166016 - DNA, 261 bp, Glycine max
tgaccctgattcaatcgattcgctgttgccttcgaatttcgttccttggagattagggagcaatggcaattgcagccccagggcatctgaacgtgaatgaatcacccatttggggatctagaagtgttgattgcttcgagaaattggagcaaattggcgagggcacatatggtcaggtttacatggctaaagagatcaaaactggtgaaattgttgctctgaagaaaatacgaatggacaatgagagagaggggtttccta

SEQ ID NO: 166017 - DNA, 261 bp, Glycine max
ggaatggacctgaggagcaaagcaaggactctcccaggaccagttagcgaccttcagagcttcccaagtggaactatgatggttccagcacaggtcaagctcctggtgaagacagtgaagtgattttatacccacaagccattttcagggatccattcagaaggggtaacaatatcttggttatctgtgatgcctacactcctgctggagaacctattcccactaacaagaggcacgctgctgccaaggttttcagccatc

SEQ ID NO: 166018 - DNA, 260 bp, Glycine max
ggaagagcacgaggtgtacggaggagagatccctgacgagggagagatggaaggagacattgacatgtccgccgccgacgatgaagccgccgtcgacgatgacgccgccgtcaaggagctcgacgagatgaagcgccgattgaaggaaatggaagaggaagccgcagcgcttcgcgagatgcaagccaaggtcgagaaggagattggcagcgttcaagatcctgctaatgcagctgcttctcaggcaaacaaggaggagg

SEQ ID NO: 166019 - DNA, 258 bp, Glycine max
caagaagtcccttcgcttctccttcttctccaaaggcaaaggtctttgagatggaagtcttaaacccaattgaaggcaagacctacaagctcccagttggatacagatttgatccaagtgatgaaattcttgctggttactaccttaggaagaggatcatggcccaaccactccctaatgacctcattcaagactgtgatgtttaccaaacagtgccttgggagctgccaggaggtggtaataagtatttgaattggc

SEQ ID NO: 166020 - DNA, 263 bp, Glycine max
ctcgagccgctttctcgttcgagatccctcaagggatccactaactgaaggagaaatggggttgacattcaccaagcttttcagccggcttttcgccaagaaggaaatgcgaattctgatggtgggtctcgatgcagctggtaagaccaccatcctgtacaagctcaaacttggagagatcgttaccacaattcccaccattgggttcaatgtggagactgtggaatacaagaacattagtttcactgtctgggatgttggtg

SEQ ID NO: 166021 - DNA, 260 bp, Glycine max
gtccgcagtatatgggtacaataactggcataagtgatttggattctttcggtggccaaattctcattggcgctctgtcaaggttggttgggatgaatcaacagctggagagagacaaccacgagtgtctctgtgggaaattgagccattaacaacattcccgatgtatccatcattatttcccctcagactgaaacgtccatggcatcctggcacctcatctttgcatgatgggagagatgaagctactaatgggctaa

SEQ ID NO: 166022 - DNA, 261 bp, Glycine max
tactcgagccgattcggctcgagatccatcgaacctagtaaaacaacgaatggcttctcaacatctccaatatcttgtgcactgccatagccacacttctcacaatctcttcacatgcacaactcactcctgatttttacaacaatgtttgccctcaggcactgcctatcattaagtcagttgttcaacgagcaatatttcgtgaacggcgcattggagcatctttacttcgtttgcacttccatgactgttttgtcaatg

SEQ ID NO: 166023 - DNA, 258 bp, Glycine max
ggaatagttgtccagacacagtttcttgtgctgatattcttgctattgagctgaaatagcttctgttctgggaggaggtccaggatggccagttccattaggaagaagggacagcttaacagcaaaccgaacccttgcaaatcaaaaccttccagcacctttcttcaacctcactcaacttaaagcttcctttgctgttcaaggtctcaacacccttgatttagttacactctcaggtggtcatacgtttggaagagc

SEQ ID NO: 166024 - DNA, 259 bp, Glycine max
gtagacttaacaacagcacaaagcgggttactgtctgttcaagctaccactctctctctctttcttagtgcctccttgccagaagttacaatggcccaagtgactttcctattcacatctgaatcagtgaacgaggggcaccctgataagctctgtgaccagatctccgatgctgtgctcgatgcatgcttggagcaggactctgacagctaggttgtctgtgaaacctgcaccatgaccatcatggtgatgggtatcg

SEQ ID NO: 166025 - DNA, 261 bp, Glycine max
tggagcttcagcaatggtgtacgtcaagggtcagagatcaaaagcctattcaagagatatcaagtcaagttcgagagacgaagagagggcaaaaccgattaccgtgccaggactcgggtgattaatcaggacaagaacaaatataacactccggaataccgatttgtggttcgctttagctacaaggacattgttgcacgaataatatctgctagcattgccggcgatttagttcttgctacagcatatgcacatgagctg

SEQ ID NO: 166026 - DNA, 258 bp, Glycine max
agttcctacatgaaagctgctaagaagttgcatgagattgatcccttgcaaaagccaaaacaagatagatatgcccttagaacttcaccacagtggcttggtcctcttattgaagtgattcgtttctcaaccaagtcaattgagagagagatcaactctgtgaatgacaaccctttgattgatgtttcaaggaacaaggcattgcatggtggcaatttccaaggaacccctattggagtctctatggacaacacacgt

SEQ ID NO: 166027 - DNA, 256 bp, Glycine max
ctcgagccgttttctctctcttgcaaaacctaattttcatttcttcctcaaatttcaaaatgcgtgagatccttcacatccagggtggccaatgcggcaaccagatcggcgccaagttctgggaggtggtttgcgcggagcacgggatcgaccctaccggaaggtacggtggggactcggagttgcagctcgagaggatcaatgtctactacaacgaggccagttgcggtcggttcgtgccgcgcgcggttctcat

SEQ ID NO: 166028 - DNA, 255 bp, Glycine max
gcacaaagcgggttactgtctgttcaagctaccatctctctctctcttcttagtgcctccttgccagaagttaaaatggcccaagaaactttcctattcacatctgaatcagtgaacgaggggcaccctgacaagctctgtgaccagatctccgatgctgtgctcgatgcatgcttggagcaggaccctgacagcaaggttgcctgtgaaacctgcaccaagaccaacatggtgatggttttcggagagatcaca

SEQ ID NO: 166029 - DNA, 259 bp, Glycine max
ggcaactggaagcctagcaagaatgatactatggagaatcgtcttcctggatttggcactacaatgaacattctctatggggatggtgtttgtggacaaggtgatgtggactcgatgaacaatatcgtttcccattaccagtattatcttgaccttctaggtgttggtcgagaacaggctgggccccatgaaatccttacatgcgctgagcaggttcctttcaacccatcttccaaacctgcttcttcatcttaagatt

SEQ ID NO: 166030 - DNA, 257 bp, Glycine max
ctcactcgcaagcagaaagaaagaatcccaggcgaggagaaagatggtggggaaggagcaggatgtgtcgttgggagcgaacaagttccccgagagacagccaattgggacggcggcgcagagccaagacgacggcaaggactaccaggagccggcgccggcgccgctggttgatccgacggagtttacgtcatggtcgttttacagagcagggatagcagagtttgtggccacttttctgtttctctacatcactg

SEQ ID NO: 166031 - DNA, 259 bp, Glycine max
agggtttctctttctctttctctgtctgcttcttcactttctctcgttcaatcgaaaaaaatcatgggcagaaaattcttcgtcggtggcaactggaaatgcaatgggaccactgaggaggtgaagaagattgttactactttaaatgaagctaaagtccctggagaagatgttgtagaagttgttgtgagccctccttttgtgttccttccttttgtaaaaagtttgctgcgccctgatttccatgtctcggcccaaa

SEQ ID NO: 166032 - DNA, 258 bp, Glycine max
ggcattgttgtgtggcggcacgccatggtcgaaggttactatttcaccattttccaccactcccacacccctcgcaccttcttcttccaacgacgccgtttctcagtctctgctgctttctccgaacaacaaccaccgccacccgttcgcgttcgtttcgctccttctcccaccggaaacctccacgtcggcggtgcccgaacggccctcttcaactacttgttcgcaaggtccaaaggtgggaaatttgtgctgaga

SEQ ID NO: 166033 - DNA, 257 bp, Glycine max
aaggattactgttgaagatgcactggcgcacccgtacttgacatcttgcatgacatcagtgatgaaccagtgtgcatgactcccttcaactttgactttgaacaacatgctttgacggaggaacagatgaaagaactgatataccgagaggctctagcatttaaccctgagtatcagcagtagtagtgatagtcttgttgtcattggatttggatcgtgtgatgtttgtgtccatagatcaagggatttcattgtgt

SEQ ID NO: 166034 - DNA, 257 bp, Glycine max
ctcgagccgtgcattttgtataatgaatagatcataccacttctgagtttcttaatcatcagctatttaaagcaatggtcagaaactaacttcccccccactagccttctatagagccctttgaaaatcgttcaaaaccaatctatctatctatttggtataagcatggagctttgttggcaaaaatccatccatggctcttaaagaagcttggaggattttgtgtgagagggttctcacccttcacactccacctc

SEQ ID NO: 166035 - DNA, 254 bp, Glycine max
gtacatgcagttgcatttgttcggccggttagtgtggcctttcaggtggtgaatgggttccatttctacgagaatggagtttacactagtgacatttgcggtagcacttcccaggatgtgaaccatgccgtccttgctgtggggtatggagttgaaaatggcgtcccatattggctcataaaaaattcatggggagaaagttggggtgagaatggctacttcaaaatggaattggggaagaacatgtgtggtgt

SEQ ID NO: 166036 - DNA, 252 bp, Glycine max
tactcgagcgaatcggctcgaggcgaatgccaaactaccagaggcacgtctgaagggaaagctttacattcatttctcagtggaatttcctgataccctgagtcttgatcaggtgaaggctttggagactactctgccactaaagcctacatcggagttgacagacatggagctggatgagtgtgaggagaccacactccatgatgtgaacatggaggaagagataaggaggaggcaacaagctcagcagga

SEQ ID NO: 166037 - DNA, 260 bp, Glycine max
  unsure (1)..(260): unsure at all n locations
cttgtttcacccttccccttctccttacttctcactctctttccaaaacactccctttctctttccccttacccttcttctgtgtgtgatgatgtagatagagaataaaaagagaccagtgtgcagtgagaaagagacgaacacagtccgaggaacaaccacgtgtatgggaaggagttccagtccatgctggaaggactcgacgaagaagggtgcgtggaagangcagggcaccactctgagaagaaacgacgactaaa

SEQ ID NO: 166038 - DNA, 258 bp, Glycine max
tctctctctctctatctctcccgaattattgttcgttcgacccttgtacttagtattccctgtttccggtattcgctcccttttttctgcattctggttttacttagatctctgtcccgcaccagatctggtgcagggtgagagggttgggttcattaattttgtatcaatcttccttctgagcggtaggcgtggggataccagagtcttttcgggaagcaagagagggttctctccgttttcaatagatcctcactg

SEQ ID NO: 166039 - DNA, 260 bp, Glycine max
aagcgggttactgtctgttcaagctaccatctctctctctctttcttagtgcctccttgccagaagttaaaatggcccaagaaactttcctattcacatctgaatcagtgaacgaggggcaccctgacaagctctgtgaccagatctccgatgctgtgctcgatgcatgcttggagcaggaccctgacagcaaggttgcctgtgaaacctgcaccaagaccaacatggtgatggttttcggagagatcacaaccaaggcc

SEQ ID NO: 166040 - DNA, 255 bp, Glycine max
ctcattgttcttctcccaggttatttagaaaagcaaaatggtgagatttgctgcattggtgctggatatgtggggggtcctactatggcagtcattgcacttaagtgcccatccattgaagttgctgttgttgatatctctaaatcccgcattgcagcctggaacagtgaccagcttcctatctatgaacctggccttgatggtgttgtgaagcaatgccgtggcaagaacctcttcttcagcactgatgttgaa

SEQ ID NO: 166041 - DNA, 252 bp, Glycine max
cccaggcgaggagaaagatggaggggaaggagcaggatgtgtcgtgggagcgaacaagttccccgagagacagccaattgggacggcggcgcagagccaagacgacggcaaggactaccaggagccggcgccggcgccgctggttgacccgacggagtttacgtcatggtcgttttacagagcagggatagcagagtttgtggccacttttctgtttctctacatcactgtcttaaccgttatgggagtcgc

SEQ ID NO: 166042 - DNA, 254 bp, Glycine max
ctctcagctcaggagtgtataatctgagcgatgtcagatcttgaggctcccttgcgccctaagaggaagaaggtttgggtggactatttcgttcagtttcgatggatccttgttattattgtggtccttcccatctccttcaccatttatttccttacataccttggggatgtaagatctgagtggaagtcctataagacgcgtcagaaggaacatgatgagaatgtgaagaaggttatcaaacgtctcaaaca

SEQ ID NO: 166043 - DNA, 253 bp, Glycine max
cccagaccttattttttctgtcatttgcttcaaatttcaggagataattatggctcaacccacaacaagaataggccttgctggattggctgttatgggccaaaatctggcactcaatattgctgagaaaggctttcccatttctgtttacaaccgaaccacttccaaggttgatgagacagtagaacgagcataacaagaaggaaatcttccagtttatggctaccatgaccctgaagcttttgttcattcc

SEQ ID NO: 166044 - DNA, 252 bp, Glycine max
gacttcctctttgttttctgatctatggcttccaaggagttcttggtctttgctccttggctccttcactatctgagagcattttgtgcactactgggttgaaaatgtatatgctggagagcaaaggaggtgccatagcatgcatgttcttgtctcttttcttcttggggacatggcctgctcttttgactatgttagagaggcgtggtcgtcttcctcagcatacctaccttgattactcaatcaccaatt

SEQ ID NO: 166045 - DNA, 258 bp, Glycine max
gggaatttggcatctggtggggctgctggggcttcttccctcttatttgtctattctttggattatgcccgtactcgtttagcaaacgatgcaaaggctgcaaagaagggtggcgagaggcagtttaatggcttggttgatgtttacaggaaaaccatcaagtctgatggtgttgctggcctttatcgtgggttcaacatctcatgtgttggaattatagtgtatcgtggtctttactttggaatgtatgattccctg

SEQ ID NO: 166046 - DNA, 256 bp, Glycine max
ggtttctctctctagcttggacgagtgaattagattcatcatcagatgtcgtctctgatagcagaagatgtgaagagcagatcagaggtgtaccacggggacgaaatgtgccaagtgaagtccaaggagcttctcaaggaaatcgccctccccaacggccttcttcccctcaaggacatggaggagtgcggctacgacagacaaaccggcttcgtctggctcaaacaaaagaagagttacacccacaagttcgaca

SEQ ID NO: 166047 - DNA, 252 bp, Glycine max
cttatgatgttgatctcttgggccactgggattgcagaagccccaagactgatcctgagttttggaagtctttgttccctgttgctgttgcacatacaataggacatgtagcggcaacagttagtatgtcaaaagttgcggtatcgtttacacatattatcaagagtggtgaacctgcttttagtgttctggtttcaagatttcttttgggtgagagcttccctgtgcctgtctatctgtctttaattccaa

SEQ ID NO: 166048 - DNA, 254 bp, Glycine max
cgatggtggagtggggaggagaggtggtaaattcccggactaaggccaacacacctttacccaaatgggctctggacacttcgccgaggatggtttcggaaaagcaagctacttccggaaccttcagatcgtagacacggataacagtttgagttctgtgcagagcatctcaaccttggccgaaaacacaaactgttacgacatcaagagctactacagcaacgaatggggcacttacttctactatggtgggc

SEQ ID NO: 166049 - DNA, 244 bp, Glycine max
ccatgacccacctccggcgccgttgatcgacccagatgagctcactaagtggtccttgtacagagccgccatagctgagttcatagcaacactccttttcctttacatcaccgtgttgaccattattggctacaagagacagagtgacaccaaaatccccggtaacaccgagtgcgacggcgttggcattttgggcagcgcttgggccttcggtggcatgatcttcatccttgtttactgcacc

SEQ ID NO: 166050 - DNA, 241 bp, Glycine max
caccaacttccgctacttcctactccaaccactttcttttttcccgcagtcatgggcaaggtcaagatcggaatcaacggatttggaagaattggccgtttggtggccagggtggctctgcagagagacgatgttgaactcgttgccgttaacgatcctttcattaccaccgattacatgacatacatgtttaaatacgacagtgttcacgggcactggaagcatcacgatgtcaccgtta

SEQ ID NO: 166051 - DNA, 237 bp, Glycine max
cggctcgagcactaatatatgtgaaaacatcatatggaaagcatttagtcccaccaccattaacagtggacgtggagctgaatttgaaggtgctgtcattgctctattccatttgttgataactagaacagacaaggttcgtgcccttcgtgaagcattttaccggcaaaaccttcccaatgtgacaaatctgcttgctaccatcttgatcttcctaattgtgatatacttccaagg

SEQ ID NO: 166052 - DNA, 234 bp, Glycine max
tcttcatcggttgttcaagtaaatggccttcgtcaccactgctgaagtgtgtgatgcgaacccccagttaattttgagtggggagcttcgtgcccttcagccagtttttcagatttacggtcgtcgacaggtcttctctggacctatagttaccttgaaggtgtttgaagacaatgttttggttcgtgagttccttgaagagaaaggcaatggaagagtgcttgttgttgatgg

SEQ ID NO: 166053 - DNA, 235 bp, Glycine max
ataatttttgcaaatgaaatgaaggtaccacgacttaagtcactgactgcaaatttgcatcgcatgggtgtatctaacactgtagtgtgtaactatgatggaaaggagcttccaaaggttttaggtgtaaatgctgttgatagagtattattggatgccccttgcagtggaactggggttatttccaaagatgagtctgttaaaacctctaaaagtctggaagatatacagaaat

SEQ ID NO: 166054 - DNA, 236 bp, Glycine max
gttaaatagaaaagaggagtttgagaatggcaacgatcagcgcggttcaggtggagttcctggagtttccagcggtggttacttcaccagcctccggcaagacctatttcctcggcggcgcaggggagagaggattgacgattgaggggaagttcataaagttcacaggcataggagtatacttggaggataaggcggtgccatcactcgccgctaagtggaagggtaaaacttca

SEQ ID NO: 166055 - DNA, 238 bp, Glycine max
ttcaattctgttcatcctttgcttcccaaagaaagagaaaataaaaagcaatgggtagccttgaagcggaaagaacaacagtaggattggcagcaagagacccttcagggattctctccccatacacctacaatctaagaaacacaggccctgatgatgtttacataaaagttcactactgtggaatttgccattctgatctccaccagattaaaaatgatcttggcatgtccaacta

SEQ ID NO: 166056 - DNA, 236 bp, Glycine max
gcacaaagcgggttactgtctgttcaagctaccatctctctctctctttcttagtgcctcgctgccagaagttaaaatggcccaagaaactttcctattcacatctgaaccagtgaacgaggggcaccctgacaagctctgtgaccagatctccgatgctgtgctcgatgcatgcttggagcaggaccctgacagcaaggttgcctgtgaaacctgcaccaagaccaacatggtga

SEQ ID NO: 166057 - DNA, 241 bp, Glycine max
gcttcatccaaactcaatgggtgccgacgaagactacgattacttgttcaagctggtcctcatcggagattcgggtgttggcaagtccaacctcttgtcccgattcacccgaaacgagttcagcttggagaccaaatccaccatcggcgtcgaattcgccacgcgaagctccccgttgatagcaagctcgtcaaggcacaaatctgggacactgcaggccaagaaagatatcgcgctatta

SEQ ID NO: 166058 - DNA, 247 bp, Glycine max
ctcgaccgggcacatagcatcggatctgatattggtctgaagatgggtgtggctgctgagtctgagtcaaatgacaacatcccgctgttactcacccaatctgcttaccctctcaaaaggacagggacggtgtggacagcagtggcacacatagtgacaggggtgataggatccggagtgctgtctctgccatggagcactgcacagcttgggtggcttgcaggccccttctccatccttctcattg

SEQ ID NO: 166059 - DNA, 232 bp, Glycine max
tatctgcagctttgttgtgtctatagcattacaggagattgcatggactggccgaatgcttaaggcctactactctgctggatgcattctttggattttttgtggtgcagtgatccttcttttaaccacaaatatgagttatgtcatgtacatagtatcggtattcattggcatagcaaatgctctcatgatggtaactggagtaagcatgcagaattttctcattggagag

SEQ ID NO: 166060 - DNA, 240 bp, Glycine max
agtcactcttcttgcataacccagatctgcagacaatatgcgaagaactggcttgttacatttgttatgccttgtcattgctttagtaagtgtgcaagcagaagatgcgtataagtattacacatggacggtgacttatggaactatttctccattgggtagtccccagcaggttattcttatcaatggtcagtttcctgggcctagacttgacttggtgactaatgagaatgtaattct

SEQ ID NO: 166061 - DNA, 235 bp, Glycine max
gaggatctagagaaatcatccctcatgtcccagaaaagttttgagaagcgattcgggcagtcaccagtgttcattgcttccaccttgatggaaaatggaggacttcctgaaggcacaaatagccaatcattggttaaggaggccatccatgttataagctgtggctatgaagagaagactgaatggggcaaagagattgggtggatttacggctcggtcacagaagatattttga

SEQ ID NO: 166062 - DNA, 233 bp, Glycine max
attaccatggaattggaagtcaccgccgctacttctccaccttctcgcgttctcctcatctccgccggtgccagccacaccgttgcccttctctctgggaatgttgtgtgctcgtggggtcgcggagaggatggacagttaggccatggtgacaccgatgatagactcttacccactcatctcagtgcattggatgctcaacaaattgattctattgcatgtggagctgatca

SEQ ID NO: 166063 - DNA, 235 bp, Glycine max
tgataactacagccatcgaattccctgcaattaacataagcataacccctttccaacctttctcctcttcagatcggatcagatcagatccaccgccatggatttcatgaaggtcttcgatcaaaccgttcgagaaataaagagagaggtgaatctgaaggtgctcaagattccggaaatcgaacagaaggtgctggatgctactgataatgaaccttggggtcctcatggtact

SEQ ID NO: 166064 - DNA, 236 bp, Glycine max
cagccacacgcctcagtagaccatggcctcattgggtgggttacaaaatctaagcggcatcaattttcttatcaaaaaagagggtccaaaagtcaatgcgaagttcgagctgaagccgccaccatatccactgaatggtttggagccggtgatgagccagcagacacttgagtttcattgggggaaacaccacaagacatatgtggaaaatctgaaaaaacaaattgttgggacag

SEQ ID NO: 166065 - DNA, 239 bp, Glycine max
ctctctccgagcttcactctcttcgcctctgccaaagggagtaaaatggggttctcctcctttctgggtcgtgttctctttgcctcccttttcatcctcactgcatggcagatgtttaatgaatttgatgccaatggtggacccatctcgaaagagttgattcccaaactcactgtggtgaagaaaaatttgtcctctaaattgggggtagcactaccagatattgatgcccggcaatt

SEQ ID NO: 166066 - DNA, 243 bp, Glycine max
gtaacctcctctccgtcgcctacaagaacgtgatcggcgctcgcgcgcctcctggcgcatcatctcctcaatcgagcagaaggaggagagccgcggcaacgaggaccacgtcgccgtcatccgcgactaccgctccaagatcgaggccgagctctccaacatctgcgacggaatcctcaaactcctcgacacgcgcctcgtcccctccgccgcctccggcgactccaaggtcttctacctcaa

SEQ ID NO: 166067 - DNA, 249 bp, Glycine max
agatagatgggtagtagtgaatatcagactctgcacattttcttctttcccttcttggctcatggccacatgataccaaccgtggacatggccaaattatttgccgaaaagggtgtgaaggccactataatcaccacacccctcaacgaacctttcatctacaacgccattggaaaatccaaaactaatggcaacaatatccacatccaaaccatagagtttccttctgcagaggctggtttacttgat

SEQ ID NO: 166068 - DNA, 241 bp, Glycine max
ctttcgtttcctttcattttccctcactttctcgctccccaaacgcccctctctctcctccaatggccgaccagctcaccgacgaccagatcgccgagttcaaggaggccttcagcctcttcgacaaggacggcgatggttgcattactaccaaggaacttgggactgttatgaggtcacttggtcaaaacccaactgaggcagaactgcaggatatgataaacgaggttgatgctgatgg

SEQ ID NO: 166069 - DNA, 235 bp, Glycine max
caagaaatttatgcaagatcctatggaaatttatgttgatgatgaggccaagttgacccttcacgggcttgtgcagcactacatcaaattgaaagaggaagaaaaaaaccggaagttgaatgatcttcttgatgcactggactttaatcaagttgtgatctttgtgaaaagtgttagcagagcagctgagctggacaaactacttgtggagtgcactttccatctatatgcattc

SEQ ID NO: 166070 - DNA, 237 bp, Glycine max
acttcttcggccgcggtagatccgtcatcggcggtggttgatgacgcgccacgcgagtcggaggaggttaatgcgccgcagcagaaccggtgtatgacgtgcaggcggcgcgtggagctcacagggttcaagtgtcggtgcgggatgatgctgtgcgggacccaccgttacccggagcagcacgcgtgcgagttcgacttcaaggggatggggagagagcagatcgcgaaggcgaat

SEQ ID NO: 166071 - DNA, 238 bp, Glycine max
tcgagcatcagcaatagtgtacgacaaggctcagaaatcaacaagcctacttcaagagatatcaagtcaagttcaagagtagaagagagggataaaccgattaccgtgccaggactcggctgcattaatcaggacaagaacaaatataacactctcgaaataccgatttgcggttcgctttagcaacaaggacattgatgcacaaataatatctgctagcattgccggcgatttagtt

SEQ ID NO: 166072 - DNA, 238 bp, Glycine max
gcagaaacgtattgattttctctctttccgcggcctagatctgagcagtttggaaaccctaactgctctcaccaacgacatcaccactctctccgatcaactagctctttcgtcgccctaagtcatggcaggaattgcacccgcagggatcacagtttgatgctcgtcaatatgataccaagatgaatgagctgcttacgtccgatggtcaggatttacttcacatcctacgatgagg

SEQ ID NO: 166073 - DNA, 246 bp, Glycine max
cgcacgaatatcttgttgtttggagcgatccgagaaaaactctgtaaacatgttggtttaccaggacctccttacaggtgatgagcttctctctgactccttccgttacaaggaaattgagaatggaatgctgtgggaagttgaggggaagtgggttgttaaaggagcagttgatgtagacattggtgcaaacccttctgctgagggtggaggagaagatgagggagttgatgatgcagctgttaa

SEQ ID NO: 166074 - DNA, 236 bp, Glycine max
cgaaaagttcctctctctctcacacacacacatcccagccatgagcctcttcggtataggcagaaaccagagaacattccgcccgaaaaaaagtactccttctggaagtaagggagctcaacttcgaaaacatattgatgccacgttaggtagtggaaatctgagggaagcagtaaagctacctcctggggaggatttaaatgagtggctagctgtcaacactgttgatttcttca

SEQ ID NO: 166075 - DNA, 233 bp, Glycine max
gcctcaagagcctcaagtccatggacctctccaacaacatgctctccggcgaggttccggcgagttttgcggactgaagaatcttactctgttgaacctgttccggaacaagctccacggcgcgattcctgagtttgttggagagttaccggccttggaggtgttgcagctttgggagaacaacttcactgggagcattcctcagaatttggggaataatggaagactcactc

SEQ ID NO: 166076 - DNA, 234 bp, Glycine max
tgcatggtcttggacaatgaggctctctatgatatctgtttccgtacattgaagcttgctacaccaacttttggggaccttaaccacctcatttctgctaccatgagtggagttacttgttgtctacgtttccctgggcagctgaactctgatcttaggaagcttgccgtgaatctgatcccattccctcgtctccatttcttcatggttggatttgcaccattgacatctaga

SEQ ID NO: 166077 - DNA, 234 bp, Glycine max
ggtgaggttccggacgccggcgacgctggtgccgcacgtcgcggcggaaaggtttccgttgacggaatcgtacacgataccaaaaggagctatcgtgtttccgtcggcgttcgagtcgtcgtttcaagggttcactgaaccggaccggtttgacccggaccggttctcggaggagagacaggaggaccaaatatttaagagaaactttctcgcgttcggggctgggccccacca

SEQ ID NO: 166078 - DNA, 242 bp, Glycine max
gtaaaaacggtcatcttgacagggcaattgcattgttcaacaaaatgaaagatcagggaattcgaccgaatacattcacattcactatacttcttgatggactatgtaaaggtggaagacttaaggatgcacaagaggtttttcaagatcttttgactaaaggatatcatctcaatatctacacatacaatgttatgatcaatggacattgtaaacagggcctgctcgaggaagcattgacc

SEQ ID NO: 166079 - DNA, 244 bp, Glycine max
cttatgatgttgatctcttgggccactgggattgcagaagcccccaagactgatcctgagttttggaagtctttgttccctgttgctgttgcacatacaataggacatgtagcggcaacagttagtatgtcaaaagttgcggtatcgtttacacatattatcaagagtggtgaacctgcttttagtgttctggtttcaagatttcttttgggtgagagcttccctgtgcctgtctatctgtctt

SEQ ID NO: 166080 - DNA, 232 bp, Glycine max
agtctgctatgtgtgcattggtgcttgtggcactggttgtggttgaagtggggcccatggctgaggctgcggtgacttgcaacccaacacagttgactccttgtcttccggcaattaattcaggttctgcaccttcgagtgcttgttgccagaagctgaaggagacaaagccatgcttctgtggctacctcaaaaaccctagcttgaagcagtatgttaactctcctaatgc

SEQ ID NO: 166081 - DNA, 119 bp, Glycine max
ctcgagcgttcctccagtctctgggggatttgattgatgagaattgcttatggtgggtgtatttccttttccaatgaaatgctacaacatttactgcaaaaaaaaaaaaaaaaggggcg

SEQ ID NO: 166082 - DNA, 234 bp, Glycine max
gttcaagcttggctatgcaaatgcaaaaatatacaagtgtgaagatgaacgatgtccaaggcctatgtgctacaaggcttatggaagtggaaaggaagatagtcctatgtgtgacgtgccagggtttgaaaacagcaagatgaaattgctaaggcatgtttcatttgtggattgtccgggacatgatattcttatggctacaatgcttaatggagcagcaatcatggatggagc

SEQ ID NO: 166083 - DNA, 239 bp, Glycine max
gattttcatgccctgcaatttgttcccagaatacaagaaaccggtgctctgcttctaaaaagattgcgtgaacattcaggtcttattggaccgttggatcgttatcttgttggtccatttgcagaatcaatgaaggagaaaagtgaaagtaatgccaagaaagcatccaagtacctagctttgcatctcagatttgaaattgacatggtagctcattctttatgtgaatttgggggagg

SEQ ID NO: 166084 - DNA, 236 bp, Glycine max
ttttgacagaaatattcaacattgtcaacaagaagaacctagctgctggtgataatcagggaaatggcaacgcagcatctctgtctggcaagcagataattgttcctggtactgcacaagaaatccccaagaggagcatgtgttgtcagtaatcctgactttatttataatttgtttaaatttactagatttccatggttctgtgttcctatcaccaatttttaatgatttggtgc

SEQ ID NO: 166085 - DNA, 234 bp, Glycine max
ccgattgctagaatggaatttcgatgctcagtcatctcttttaccattctcttctctcttgctcttgcaggagagagccatgtccatgcatcgctacctgaggaagattattgggaagctgtttggccaaacactcccattcccactgcactgcgagagcttctaaagcctctccctgcaggtgttgaaatcgatgaactccctaagcaaattgatgatacacagtacccaaaa

SEQ ID NO: 166086 - DNA, 229 bp, Glycine max
gccgccgtggccaccgccgcgatggcgtggcgcgtccgacgccgacgacatcctgatccgtcaagtggtgccagatgttggcgaacgaacgtggaggacaacctgctgaacgccgagcaccacttcgcgagcttcaaggccaagttcgccaagacctacgccaccaaggaggagcacgatcatcgcttcggcgtcttcaagtccaacctccgcagagccaggctgcacg

SEQ ID NO: 166087 - DNA, 232 bp, Glycine max
ggtaaacctagggcaagcacaagggaaggttgtaaggcaatgattcatatcaaatatgataagtctggaaaatgggtgataacaaagtttgtgaaggatcataatcatccattagtagtctctccacgtgaagcacgccaaacaatggatgagaaggataagaaaattcaggaattaacagcagagcttcggcttaaaaaacggttgtgtgcaacatatcaagaacagttga

SEQ ID NO: 166088 - DNA, 233 bp, Glycine max
agccccactcaaccaccacaccactctctctgctcttcttctacctttcaagtttttaaagtattaagatggcagagacattcctatttacctcagagtcagtgaacgagggacaccctgacaagctctgcgaccaaatctccgatgctgtcctcgacgcttgccttgaacaggacccagacagcaaggttgcctgcgaaacatgcaccaagaccaacttggtcatggtcttc

SEQ ID NO: 166089 - DNA, 245 bp, Glycine max
gcaagccccactcaaccaccacacctctcctcgttcacgctacccctttctgctcttcttctacctttcaagttttaaaagtataaagatggcagagacattcctatttacctcagagtcggtgaacgagggacaccctgacaagctctgcgaccaaatctccgatgctgtcctcgacgcttgcctcgagcaggacccagacagcaaagttgcctgcgaaacatgcaccaaaaccaacttggtca

SEQ ID NO: 166090 - DNA, 226 bp, Glycine max
gtggtaccttatcgctgtggttatcatcttctactacctctatcttagatctcttctttctctacgccgcacgccgaaaccatggccggataaggacagggtcctgctatcggaatcgatctcggaaccacctactcttgcgtcggtgtgtggcaacatgaccgcgttgaaatcatcgccaacgaccaggggctcagaaccacaccgtcctacgtcggcattcact

SEQ ID NO: 166091 - DNA, 270 bp, Glycine max
ctgcttcaacttactccctcagaagcgaagaagaagccacagagaactaatctcctactctcacccgcaataaaataatggcatctcacatcgttggatacccccgtataggtcccaagacagagctcaagttcgatctcgagtctttctgggatggcacgagcagcgccgaggatttgcagaaggtgtcttctgatctcagggcatccatctggaaacagatggctgctgctgggatcaagtacatccgcaacaacacttgctctcact

SEQ ID NO: 166092 - DNA, 269 bp, Glycine max
gggtggactcaagcgtattcatgagaagtacacatggcaaatttactcggacaggctcttgacactcactggtgtgtatggcttctggaagcacgtgaccaatcttgaacgccgtgagatgaaacgttacctcgagatgttctatgctctcaagtaccgcaaattggctgagtctgtgccccttgctattgacgagtaaattcatgtttgaagagaacatcaatggcgaaaccggcttttggtcgtttgaagtcttatggagctttcat

SEQ ID NO: 166093 - DNA, 274 bp, Glycine max
tccttccccaagatgtcgagcgccgatcccgagcaccgagaagaggatgaggcacccgccgtcggcgacgacgaggacaccggagcacacgtcgctcccatcgtcaagctcgaggaggttgctgtcaccaccggcgaggtggacgaagatgcaatcctagatctcaaatcgaagctttaccggttcgacaaggatgggaaccagtggaaggagcgaggcgcgggcaccgtgaagttcctaaagcataaggctacgggcaaggttaggcttctca

SEQ ID NO: 166094 - DNA, 233 bp, Glycine max
gttaggttctgcacgctctgcttccagcgagtgttctttcttcgtttcaacaccttaatttgcacacgctgcttcttcagcttgagaaatggcacaagaaacctttctattcacatctgaatctgtaaacgagggtcaccccgacaagctgtgcgaccagatctctgatgcagtgctcgatgcgtgccttgaacaggaccctgacagcaaggttgcctgtgagacatgcacca

SEQ ID NO: 166095 - DNA, 272 bp, Glycine max
aaagaagaagaataagaagaaggttttgatcggatgcgatgagcacacaaggacaagtgattgatgaggcggttctggatgacataatccggcgcctaacggaggtccgattggcccgacccggaaagcaggttcagctctccgagtctgagatcaagcaactttacgtcgcttccagagacatcttcattaaccagcccaatttgcttgaactcgaagcccccatcaagatttgtggtgacattcatgggcagtacagtgatttgttaagg

SEQ ID NO: 166096 - DNA, 270 bp, Glycine max
ttgaattcaaaaacttaagttcattccttgtgttttgctttcttcctcaaaaccaaacatgtcgaacacatgcggcaactgcgactgcgctgacaagactagctgcaccaagggaaacagctatggtgttattgtagagactgagcagagttacatcgagactgttgtcatggatgttccagcagctgagcatgatgggaagtgcaagtgtggcactaactgcacttgcacggactgcacctgtggccattaaggaatatgtatgacaat

SEQ ID NO: 166097 - DNA, 270 bp, Glycine max
agaggtgttgccgtgttcgcatcgttaccatggggagtgcattgtgccgtggttggggataaggaacacttgtcccgtttgtcgctatgagttccccactgatgatgctgattatgagcggaggaaagcgcagagatctgtaatgtgatgatgatgatgatggggttattattagggtcagttttttgactttcagtaatagggtaatggatgaaaacttgagacagtatagattctctattctcgctgccgaagaacttgtacttttga

SEQ ID NO: 166098 - DNA, 278 bp, Glycine max
tcgggtttgacgttgttcacaatcactttctgcgcttcactcactcccttcgtgcggttttctttctttgtcgaactcgtgcgaagatgcgtgagattcttcacatacagggagggcaatgcggaaaccagatcggagcgaagttctgggaggtggtgtgcgcggagcacgggatcgattccacggggaggtaccatgtggacaacgagttgcaactcgagcgagtcaacgtctattacaatgaagcgagttgcggaaggttcgtgccgagggcggtg

SEQ ID NO: 166099 - DNA, 278 bp, Glycine max
tccttctctgcaaaggactaccatgatcctcctccagcaccgttgattgatgctgaggaactcacacagtggtccttctacagggctttgattgctgagttcattgccacaatgctcttcctttacatcacagtgctcactgtgattggttacaagagccagagtgatgtaaaggctgggggtgatgtgtgtggtggagttggcattcttggcattgcttgggcctttggtggcatgatcttcattctggtgtactgcactgctggaatctcaggggg

SEQ ID NO: 166100 - DNA, 272 bp, Glycine max
ggcgtggtatagcacaaatgaggatcaacgaccggtcacttcaggacatgtatatatttggagatcctttgcgtgttcctattattattgtagaatgcttggagaacatgcaccgttctgccagtgtgaagtcatatttccttcctttggaggacaaagctagacatatcctggaaaatggatctagagccataataaagttgcctgggaatagccccccacaaaatgagcacgttttgagagtagttgtttttgttcacgggttccaggga

SEQ ID NO: 166101 - DNA, 275 bp, Glycine max
gaaaccctaaaccccgttttcggtgagatcgagatcgatcgaacatggatgaggagtacgatgtgatcgtgttgggcacgggtctcaaggagtgcattctcagcggtcttctctccgtcgatggcctcaaggttctgcatatggataggaacgactattacggaggagaatccacttcgctcaatcttattcagctttggaagagattcaggggagatgacaagcctcctccacatttgggcgctacagggactacaacatcgatatgaacccca

SEQ ID NO: 166102 - DNA, 272 bp, Glycine max
agaagaaacaccatgcaagaatgtcatgtgatagccccaacaacaacaacggcaacatcatcgtatcgtggagttcgtcagcgaaaatggggcaaatgggtgtccgaaatccgtgagcctggaaagaagagcagaatatggttagggagctatgagtcaccagagatggctgcagcagcatatgacgtggcagcgttacaccttcggggacgagctgcaagactcaatttccccgaattagttgagacgctgccacgtccaacgagttcgaa

SEQ ID NO: 166103 - DNA, 268 bp, Glycine max
aatttatccattcaccacagagtttcttcaatggcccagcctcaaccagagtcccacgccaccaatggctcacacgagccattgctcaaaatcccaaagctccaccaaaacggcgacgtttccgcaaccgctccctttctccgcgtcaagaagctctccgacaaggccgttttgccctctagggcttccactctctccgccggtctagatctctctagcgcggtggcgacgaaggtcccggcgagagggaaggctctggtggccactg

SEQ ID NO: 166104 - DNA, 277 bp, Glycine max
tctcattcttaaaaaaaaccctcattattccatcaaaactagctacaacaacatgtcgaacgtgttagcaggagaagaaagcgaacaagttgttacctatgggtgggcagctagagacacctcgggaattctctccccattccactttatcagaagggcaaatggtgataatgatatcacactcgacgtactctattctgggatttgccacaccgatctccacatggtgaagaacgactttagaatatccatctatccaatggttcctgggcatgag

SEQ ID NO: 166105 - DNA, 233 bp, Glycine max
ggctgtcacctacccggatgaccgtgtggagtatgaattgtggaccaacagcaatgacgagtgtggagttaaatgtgatatggtgatggaatttgtgaaagatgtttaaaggtgcagcacagatattggagagaggtggttatcactcaattcacaccccattatataacttggtactgtcctcaggcattcacaatgaggatacagtgtaagtcccagtgcataaatcatgg

SEQ ID NO: 166106 - DNA, 271 bp, Glycine max
tgattcgttcgttcactttcactttaccaactcctaacaatttctctctgtttccttcttcaccgcatcaatggagttggacggcgttctcctcggcatgtgcaaccctctcctcgacatctctgccgtcgtcgacgacgctttcttgcaaaaatacggtatcaagttgaacgatgcgattctcgctgaggataagcacaaacctatgtatgaagaattggctaacaatcctaatgtggagtacattgctggaggtgctactcagaattca

SEQ ID NO: 166107 - DNA, 213 bp, Glycine max
ctcgagccgaatcggctcgagagctgaacttgtttccgtcgccgcatcacccaccgtagcaaccatgatcattcccgagaagcaccgtaaagagatctgcaaatacctcttccaagagggcgtttactttgcgaagaaggacttcaatctggcaaagcacccagagattgatgtgacgaatctgcacgtgataaagctgatgcagagcttcaa

SEQ ID NO: 166108 - DNA, 269 bp, Glycine max
aaagaaagaaggtttttttagtatagttaacagcatggagagggaggaagatgttaaggttggagcacagaaattctcggagaggcaagcactgggtacaggagctaagagtgacaaggactacaaggaggcaccaccagcacccttgtttgagctaggggagttaaagtcatggtctttttacagagctgggatcgcagagtttgtggccacattcttgttcctctacatcactgtcttgactgtcatgggtgtcaacagggcaccca

SEQ ID NO: 166109 - DNA, 246 bp, Glycine max
gagaaataagggaaaaatggtgtcgctgaaactgcagaagcgcctctccgcaagcgtgctcaagtgcggcagaggaaaggtttggcttgaccccaatgaagtcaacgaaatctccatggccaattctcggcaaaacatcaggaagttggttaaggatgggtttatcatcaggaagccaaccaagattcactcccgctcacgtgctcgtaggatgaaagaggcaaagaggaagggccgccactccgg

SEQ ID NO: 166110 - DNA, 174 bp, Glycine max
gtggttatcatcttcttcttcctctttcttagatctcttctttctctacgccgcacgccgaaaccatggccggaaaaggagagggtcctggtatcggaatcgatctcggaaccacctactcttgcgtcagtgtgtggcaacatgaccgcgttgaaatcatcgccaacgaccagg

SEQ ID NO: 166111 - DNA, 274 bp, Glycine max
gcatctggtgatcttgttcctttgtcctacattgctggtttgctaactggtagaccaaactccaaggctgttggaccctctggtgagattctgaatgccaaagaagcctttgaattggccaacatcggtgctgagttctttgagttgcaacctaaggaaggccttgcccttgtgaatggcactgctgttggctctggcttggcctcaattgttctatttgaagccaacatcattgctgtcttgtctgaagttatttcagcaattttcgctgaag

SEQ ID NO: 166112 - DNA, 278 bp, Glycine max
acactcttctcttaagctctagtagttaagaaacattagttgatgaaaataagaaacattatacctagctattagagtttaagatggcttcaaaaacttgttcctcccttgcccttttcctcacactcaacctcgttttcttctcacttgtctctgcatgcggttatacaccatgccctggtctaaacccaaagccaaggcccaaccccaaccctaaccctaacctcagcccaagtggctcgtgctcccgtgacgcactcatactaggtgtatgtgcc

SEQ ID NO: 166113 - DNA, 276 bp, Glycine max
aaaacttttcctggtagaaaaactctcaaaagcacttacttaaagttttgtatccagacaagttcaagacgacattattttggtcatgtcactagtaaacacgagattttgatcttgtaacaaagttaaggttaactatccctttattgctcatgttctatacaactttgtacatgtactggcttccagtccaaagggtcttacttgtttggtcacttcagcatgtacataaagatggttcctggagattctgctggcacagtcactgctttctat

SEQ ID NO: 166114 - DNA, 274 bp, Glycine max
atttatgccgttttgtttatgtatgctgtatcataatatctattttatgttaattgttgtatactaattcctttgtacttctataccataattttctttggtagcatattgtggctcatggtaaaccacatgaacggactaccattatcagcaagcttactggtcagattgttaagatgagccagcaaaagtttgcttcacatgttattgagaaatgtttggcttttggtagtcctgaagaacgtcagattttggtgaatgaaatgcttggcac

SEQ ID NO: 166115 - DNA, 180 bp, Glycine max
ctctccactctttctttcttcctttccttcttttcactacttgtcacttccctttttctttccagaacaacagaacaacagagcaaaaagctccaccaatggcgggttacagagccgacgacgactacgactacctcttcaaggtggtcctcatcggcgactccggcgtgggcaagtcca

SEQ ID NO: 166116 - DNA, 265 bp, Glycine max
cttctcttttgcattctctctccaaattcatcacaacttctctcgtacctctgcagagacgtaaacatataggagtgagagggagggcgatagaaggaaagcttggtagcgatggggaaggagcaagttcaggtgctgaatgccctggacgtggcaaagacacaatggtatcagttcacagcaatcatcattgctggaatgggcttcttcactgatgcttatgatctgttctgtatatcactagtcacaaagctacttggtcgca

SEQ ID NO: 166117 - DNA, 268 bp, Glycine max
atggctcccaagggtttaacctttctggctgtgttaatatgcgtttcagcactgtcactgagtcctactgatgctggggaagggcaacataatggccttgttatgaacttctacaaggaatcatgccctcaggctgaagacatcatcacagaacaagtcaagcttctctacaagcgccacaagaacactgctttctcctggctcatgaacatcttccatgactgtgctgttcagagttgtgatgcttcactgttgctggactccacaa

SEQ ID NO: 166118 - DNA, 267 bp, Glycine max
agaaaattgagaattccaattcttgggtttgaaaacagaacagctaaactaaatcgaagcaaacaataatgagtgagatcgtgaagaaattagtttggaaatggcagtggcaggttgtcagaagcttctggaactgagcaccaagatcgtcgctgttggcagaaactacgctgctcacgccaaggaattaggcaacgccgttcccaaggagccggtgttgtttctgaaaccgacgtcgtcttacttgaaaaacggcggaaccatcca

SEQ ID NO: 166119 - DNA, 280 bp, Glycine max
tagaaattgaggtattgcaacagcttgggaaacacgataaaggtagcaatcgttgtgtgcaaatacgggactggtttaactatcgtaatcatatctgtattgtgtttgagaaacttggaccaagcttatacgattttcttcggaaaaacagttatcgttcatttcccattgatcttgtccgtgagattggctggcaactgttggaatgtgtagcatttatgcatgatttacgcatgatccatactgacctgaagctttgtttcagactcatgaaaattta

SEQ ID NO: 166120 - DNA, 275 bp, Glycine max
ggaaaatggggaagaagaagaagagaagtagggtttccgaagacgaggaaatcgaatccgataccaacccctgcgataaaaacgaaaactctctctatcaggttcttggtgtggagaaaacagcatctcaacaggaaataaagaaggcatactacaagttggcattgaggctgcatcctgataagaaccctggtgatgaggaagctaaagcaaagtttcagcaattgcaaaacgttattgctattcttggggatgaagaaaaacgggccgtttat

SEQ ID NO: 166121 - DNA, 265 bp, Glycine max
gccttcatgaattcaaccaagaatccgttaggatatatttatccacccaagaccaagttgcagataaagcctgctccagccatggcagctttctcttctagagggcccaacacagtcacaccggagatcctcaagcctgatgtcattgctcctggtgtgaacattattgctgcctactcagaaggggttagcccaacaaatctgggatttgataagcgcagggttccttttatcaccatgtctggaacatccatgtctagtcctc

SEQ ID NO: 166122 - DNA, 245 bp, Glycine max
cgattctctctgcactcacttctagggttttctctgcgctataagcaatcatggcggatgaaacaccagatgagatgaaggaggaggttccagaaattgttccttttgatcctaccaagaagaagaagaagaagcaaattacaattgtagatcctgctgatgaacctgtggagaaattggctgagaagacagaaaacctctcagtttccgagggggttgagactgcatttactggtttgaaaaag

SEQ ID NO: 166123 - DNA, 267 bp, Glycine max
cgaacgagtgaccttcttcgtttctcgcaaagtttaagtacatcatgggtaaggacaatgtacacatcaacattgtcgtcattggacatgtcgactctgggaagtcaactaccactggtcacttgatctacaagcttggaggtattgacaagcgtgtgattgagaggttcgagaaggaggctgccgagatgaacaagaggtcattcaagtatgcctgggtgctcgacaagctcaaagctgagcgtgaaagaggcattaccattgata

SEQ ID NO: 166124 - DNA, 271 bp, Glycine max
ctcagtctcagtctcagtctctacacacacctcagaagaacagaacagaaccaccacataacagtgcttttcaaaggcggtttgagcaatggcgttcttaaataaaattggaaatctgctcaagaattctgctgtcaagcacatcaatcaggatttttcggcgtctaccccttcacttttccaagcaattagatccatgtcatctgcaaagcttttcgtcggaggtatttcttacagcactgatgatatgagtttgcgagagtcttttgct

SEQ ID NO: 166125 - DNA, 268 bp, Glycine max
gccgcagtggacaccgccgcgatggcggtggccgcgtccgacgccgacgacatcctgatccgtcaggtggtgccagatgttggcgaagcgtagaggagacgaacctgctgaacgccgagcaccacttcgcgagcttcaaggccaagttcgccaagacctacgccaccaaggaggagcacgatcatcgcttcggcgtcttcaagtccaacctccgcagagccaggctgcacgccaagctcgacccctccgccgtccacggcgtcaccaa

SEQ ID NO: 166126 - DNA, 260 bp, Glycine max
ctctctctcaccaaagccttcctagaacgaaaaaaaaaagaagagcaattttccctcaccaaagaagaagaagcaaacaatggccgatcaacttaccgatgaacagatctccgagttcaaggaagccttcagcttgttcgacaaggacggcgatggttgcatcacaaccaaggagcttggaactgttatgcgttcattggggcaaaacccaactgaggcagagctccaggacatgatcaatgaagtggcatgctgatggg

SEQ ID NO: 166127 - DNA, 266 bp, Glycine max
caaaagcagcatcaagattcctcacagccagccaaagttcaagaactctttgtctacgagatcaacgaacgcgaccgaggaagtcctgcataccttaggctaagccagaagccagttaactctctaggagacttagtgccattcagcaacaagatatactctggagacttgcaaaagagactagggataactgcaggcttgtgtgtgctcatccagcatgagcctgagaaaaagggtgatagatatgaggccatttacagcttcta

SEQ ID NO: 166128 - DNA, 259 bp, Glycine max
ctcgagccgttgctgcggtggtaactgtggttgcggaagctcctgcaagtgcggcaacggctgcggaggctgcaagatgtacccagacttgagctacactgagtcaaccaccaccgagaccttggtcatgggagtggcacctgttaaggctcaaattgagggtgctgaaatgggtgtgcccgctgagaacgatggctgcaaatgtggaccaaactgctcctgcaacccctgcacttgcaagtgaggtgttgggagagca

SEQ ID NO: 166129 - DNA, 272 bp, Glycine max
gagaagtgcagagagagcgcaggtaacgactcagtcaaacagtcggtaactctttcttttcttttctttctttctccgatcgcatcgctcgcaaccacaatcatgccttcccgaagaagaactctcttgaaggtcatcattctcggtgacagcggggtggggaagacgtctttgatgaaccagtatgtgaataagaagtttagtaatcagtacaaggcaaccattggagcggattttttaaccaaagaagtgcaatttgaagataggctttt

SEQ ID NO: 166130 - DNA, 266 bp, Glycine max
ttgcttcgcaaatacagggaatctaagaagattgacaagcacatgtatcatgacatgtacatgaaggtcaagggtaacgttttcaagaacaaaagagttttaatggagagcattcataagtccaaagccgagaaggcaagagagaagaccttgtccgatcaatttgaggccaaacgtgccaagaacaaggccagcagagaaagaaaaattgctcggagggaggagcgattggcccaaggtcctggagaaaaagtatccgctgcacc

SEQ ID NO: 166131 - DNA, 271 bp, Glycine max
tactcgagccgaatcggctcgaggtcggttcttccttctcaaatatgcttgagatccccattttctccgaagcaaagccatggctaagggtcctggtctctactctgacatcggcaagaaagctagggatctgctgttcaaggactaccacagtgaccagaagttcaccatcaccacctactcaccgactggagtggctattacagcatcaggaaccaggaaaagtgaactgtttctggctgatgtcaacacccagttgaagaacagaaac

SEQ ID NO: 166132 - DNA, 241 bp, Glycine max
gtgaatagggatcagggatgtggaggctgaagatagcagatggaggaaatgatccatacatattcagcacaaacaatttcgttgggaggcagacatgggagtttgatcctgaagcaggcagtccagaggaacgggcccaggttgaagcagctcgtcagcatttctaccacaaccgcttcaaggtcaagccctgcgctgacctcctttggcgttttcaggttctcagagaaaataacttcaa

SEQ ID NO: 166133 - DNA, 267 bp, Glycine max
gcaaaagccatttggatcctctcttctcttctttgatctccgttacccttttcgttttctcaacacagagagagagagagagtctttcggagttcgtttgcgtgtgttgtgtgatcagtcaccgatggcagcaccacctgcgagggcacgtgccgattacgattacctcatcaagcttcttcttattggcgatagcagtgtcggaaagagttgtctgcttttgcgattttctgatggttccttcacaaccagttttatcatcaccat

SEQ ID NO: 166134 - DNA, 263 bp, Glycine max
gcaagctagctaggttgaaaatagtttggttttgtagtaagtgaggtgaggtgccaaaatggtgaagataactcttggtactttcgatgactcttttggtgttgcctctcttaaggcttatttggcagagttccatgcaactctgattttcgtgttcgctggtgttggttcagccatcgcttacaacgagcttacaaaagatgcagccttggatccaacggggctggtggcagtagctgtggtccatgcatttgcactgtttg

SEQ ID NO: 166135 - DNA, 263 bp, Glycine max
gcacggccacctcacaaagaggcctgaggagattggtgctggtgaccaaggtcatatgttcggctatgccactgacgagactcccgagctcatgcccttgagccatgtccttgccacgaagctcggtgccaagctcaccgcggttcggaagaacgggacatgcccttggctgacacctgatggcaagacccaagtcactgttgagtactacaatgacaagggtgccatggttccaatccgcgtccacactgtgctcatctcca

SEQ ID NO: 166136 - DNA, 254 bp, Glycine max
gctattagttcgattttgtagtaagtgaggtgccaatatggtgaagatagctcttggtactttggatgactcttttagcgctgcctctcttaaggcttatttcgcagagttccacgcaactctgattttcgtgttcgctggtgttggatcagccatcgcttacaacgagcttacaaaatatgcagccttggatccaacggggctggtggcaatagctgtggcacatgcatttgcactgtttgtaggtgtctccg

SEQ ID NO: 166137 - DNA, 271 bp, Glycine max
agaaaagcgaaaacaaatggcattttcgaggttattgagagtccagaatcctggtctctgtctactcttcaattattcccaacctctcacctcttcatcttcttcttccttacctttgaccagagacagagcagcactcacattcacaacgaaggtttcctattcatcagacatggtgaaggcaatcagagttcacgaactcggtggccctcaagttctgaagtgggaggatgtggaaattggagatccaatagaaggcgaggtccgtgtg

SEQ ID NO: 166138 - DNA, 279 bp, Glycine max
atcagctcgagctgctcgagcggctcgagccagagagaagaagaaacttaatcgatcatcacttcacttcactaatacatcatggcagacgagacccagaacaagtatgagagctctgaggttgaggtccaggatcgtggtgtttttgactttctcggtaagaaaaaggatgaagaagacaagcctcatcctcaggaggaggtcatcgccaccgagtttcaaaaagtcactgtctcagaccaaggagagaacaagcacagcctcttagaaaagcttcac

SEQ ID NO: 166139 - DNA, 269 bp, Glycine max
gggttgtgaaagcagagaagtgagatacactaagttatcctcataaatacactctaattaggtggcaagataagtgtctaaccttagtaacattgccacatattgtgttcattttggaattgtgccactaaaattctattcaattcatctatggctgcctcttcttatgctatgcaatcaatcctggcaaaccctttgatccgcatttccagcgggtctagggtgaaccaatttggcgttcctgatttgcacatgagaaggcatgttgg

SEQ ID NO: 166140 - DNA, 243 bp, Glycine max
ggacagttcaaagtgagctagacttgtcatatggacaacggtatcaaggagtaaccattcctgaggcttatgaacgcctaattcttgacacaattacaggtgatcagcagcattttgttcgcagagatgagttgaaggcatcctggcagatcttcaccccacttttgcacagaattgatgaaggggaattcaagccactcccctacaaaccatgaagcagaggtcctgcagaagctgatcagt

SEQ ID NO: 166141 - DNA, 262 bp, Glycine max
gccagtagtcatatgcttgtctcaaagattaagccatgcatgtgtaagtatgaactaattcagactgtgaaactgcgaatggctcattaaatcagttatagtttgtttgatggtatctactactcggataaccgtagtaattctagagctaatacgtgcaacaaaccccgacttctggaagggatgcatttattagataaaaggtcaacacaggctctgcctgttgctttgatgattcatgataactcgtcggatcgcacgg

SEQ ID NO: 166142 - DNA, 166 bp, Glycine max
cagagtttgaatgtgtggcggttcctggaagctattaacgggagacctgacataagtgaagggttgagaaaactacattgccgttcacttatttttgttggggatatgtcaccatttcactcggaggctgttcacatgacttcaaagttagacagacgattcagtg

SEQ ID NO: 166143 - DNA, 216 bp, Glycine max
agaaccgttgtcttctcacttcgtcaaaaccaaccaaacccctccccaattctcaagccaaccatgtcttccttcaagagcaagtaccaagatgaactcattgccaatgctgcttacattggcaccccagggaagggtatccttgctgctgatgagtcaactggtacaattggaaagcgattggccagcattaatgtcgagaatgttgaaccaata

SEQ ID NO: 166144 - DNA, 271 bp, Glycine max
acaaagcattgaattcaaaaacttaagttcattccttgtgttttgctttcttcctcaaaaccaaacatgtcgaacacatgcggcaactgcgactgcgctgacaagactagctgcaccaagggaaacagctatggtgttattgtagagactgagaagagttacatcgagactgttgtcatggatgttccagcagctgagcatgatgggaagtgcaagtgtggcactaactgcacttgcacggactgcacctgtggccattaaggaatatgta

SEQ ID NO: 166145 - DNA, 270 bp, Glycine max
ttcgtattctctacgctattccgattaatcaatcatagatagatccattattcatagttaaacataataactgttgtgttacatctcgtgaattgttacaactgcttaaccattttctattgcagatggcttcgtcggttctctccgcagcttcgcactctgtctcaccctcatgttctctgtcaaccacgcacaagggagagcccatgattagagacaacactttgggattccacagaggacacaattccttctctagttcaaggtcta

SEQ ID NO: 166146 - DNA, 267 bp, Glycine max
ggaaaccagaaacaacaaacacaaaccgaaaaggcgaaaggggttttccgagtgagatctagggtttccatcgattcggagagaggatattgatagaacgacctcaacgagcaaggtcaggaggtggagtactagaacatggattcggtgccttcgaatacgcatggaaacctcgatgagcagatttctcagctcatgcagtgcaaacccttgtccgagcaagaggtatgggtcttgtgtgataaggcaagagaacttttgatggaa

SEQ ID NO: 166147 - DNA, 266 bp, Glycine max
caagcaaaaagaaagaatcccaggcgaggagaaagatggaggggaaggagcaggatgtgtcgttgggagcgaacaagttccccgagagacagccaattgggacggcggcgcagagccaagacgacggcaaggactaccaggagccggcgccggcgccgctggttgacccgacggagtttacgtcatggtcgttttacagagcagggatagcagagtttgtggccacttttctgtttctctacatcactgtcttaaccgttatggga

SEQ ID NO: 166148 - DNA, 237 bp, Glycine max
tcggaattcggttcgtggtgtaactatctctctgtctgtctctacagaacttagctctgttttttaattattccttgcattctcttgagttcagatggaagcaactaatggtcaccataatggttcgttttgcttgtccagtactaagggaagtgatccgttaaactggggagcggcggcggaagcgatgaaggggagctccctggacgaggtgaagcgcatggtgtccgagtaccg

SEQ ID NO: 166149 - DNA, 188 bp, Glycine max
ggctcttcggtataggcagaaaccagagaacattccgcccgaaaaaaagtactccttctggaagtaagggagctcaacttagaaaacatattgatgccacgttgggtagtggaaatctgagggaagcagtaaagctacctcctggggaggatttaaatgagtggctagctgtcaacactgttgatttc

SEQ ID NO: 166150 - DNA, 154 bp, Glycine max
gtaatttgggaattattgctcccatcgccattggtttcattgttggcgctaacattttgttgggtggggccttctccggagcagccatgaaccctgctgtgacatttgggcctgctgtcgtgagctggacctggaccaaccactggatctaatg

SEQ ID NO: 166151 - DNA, 259 bp, Glycine max
cgactctctactctggctggtgtggttagcgacttcttctagatttaaggaagatgggtaaggtaaaggttcacatcagtattgtggtcattggccatgtcgactctgggaagtccactaccactggtcacctgatttacaagcttggaggcattgacaagcgtgttattgagaggtctgagaaggaagctgctgagatgaacaagaggtctttcaagtatgcctgggtgctggacaaccttaaggctgagcgtgaaag

SEQ ID NO: 166152 - DNA, 268 bp, Glycine max
ttagaaaaagaatccagaaattgcaataggatagaaaaagagaggtttgagctgatttttcaatcttttatactggataatctagtattcttatgcatgaagataattaattcgatagttgtggtcggactctattatggatttctgaccacattttccatagggccctcttatctcttccttcttcgagctaggcttgtggaagaagggaccgagaagaaaatatcagcaacaactgggtttattacgggacagctcataatgttca

SEQ ID NO: 166153 - DNA, 269 bp, Glycine max
ggcaattcaacgccatcaccgcacaaggaagaacagacccaaaccaagacacaggtatttcaatccataattgtaccataagagcagctgatgatttagctgctagcaacggtgttgcaacgtatttgggaaggccgtggaaggagtattctagaacggtttatatgcaaactgttatggacagtgtgatccacgctaaggggtggcgtgaatgggacggtgattttgcattaagcactttgtattacgcagagtacagcaacagtggg

SEQ ID NO: 166154 - DNA, 269 bp, Glycine max
atccttttcgcctttgtctgcgaatggcgtcgttcgatcaggcacctcccggcgatgtcaaatccggtgacaaaatcttcaggaccaagtgtgctcagtgtcacaccgtcgaaaaaggtgccggtcacaagcaaggacccaatctgaatggattgtttggaaggcaatcaggcactactcccggttattcttactcttcagctaacaagaacatggctgttacttgggaagaaaagacactatacgattacttgcttaaccccaaaaag

SEQ ID NO: 166155 - DNA, 268 bp, Glycine max
ggtaaacatggatttattcaggaagtgcatggagcccgtggagaagtgtttgcgggatgccaagatggataagagtaccgtccatgatgttgttcttgttggtggttctactaggattcccaaggttcaacagttgttgcaggacttcttcaacggaaaggaactttgcaagagtattaacccagatgaagctgttgcttatggtgctgcagtgcaggctgcgattctcagtggcgagggtaatgagaaagtgcaggatcttcttttg

SEQ ID NO: 166156 - DNA, 265 bp, Glycine max
ctctgattttgtaattgagttcgatcaaatagctctcagtactttaattgatttctgaatatcatcacttaatttgaaggaaagatggtgaccgtactgcagatccgccaggcacaaatggcagaaggcccagcaaccatccttgccattggaactgcaaacccaccaaactgtgttgatcagagcacctatcctgactactacttcagaatcaccagcagtgagcacatgaccgagctcaaagagagattccagcgcatgtgtg

SEQ ID NO: 166157 - DNA, 267 bp, Glycine max
ggttgaaggatcaaatgctatgtgcctattggatcagtgtttgttttgaatggcaatggagctgacattgctaagcattgtattccatccgtgtcgtcaaaaagaatttctattacttttagaaagatggacgagagcaagttaccatataagttttcacctgatcctgacttagtgggaatcaagccacttataatttcacctctacacaaaggacaagatgaagttgggcaactagataataaggctgacagtgttgaatctgaa

SEQ ID NO: 166158 - DNA, 263 bp, Glycine max
cgcactcttccatcagattcaccctttcgtttaacgcaaactcataacttgaaggttaatggctgctccaccggcaagggctcgtgccgattacgattatctcataaagcttctcttgatcggtgacagcggtgttgggaaaagttgcctccttctgcgtttctccgatggttctttcaccactagtttcatcacaactataggcattgattttaagataagaaccattgagcttgatggcaaacggatcaagctccaaattt

SEQ ID NO: 166159 - DNA, 282 bp, Glycine max
cttttcatcattctcatatcctcaatcaccccccctcgcactcgctcttcccttcctctggtggcgacaatgtcgactcctgctaggaagaggctgatgacagacttcaagacgctgcaacacgacccgcctgccgggatcagtggcgccccccaggataacaacataatgctgtggaatgctgtcatatgacgacccgatgatactccatgggatggaggcacgttcaagttgacactccaatttactgaggactatccaaatagaccaccgactgtacga

SEQ ID NO: 166160 - DNA, 281 bp, Glycine max
atacaataacatagcatagagtgagaagtgagaagagaaaaatggcaatctccatacccagtagacaacttttcatagatggagagtggaaagtccctcttctcaacaatcggtttccgatcatcaaccccgctactgaagacatcatagggcatattccagccgctactaaggaagatgttgaccttgcggtggatgctgctaaaagagccttttcccataacaaaggcaaagattggtcttcagctcctggctctgttcgtgctcactatcttcgagcc

SEQ ID NO: 166161 - DNA, 283 bp, Glycine max
cttctcttgcggctagggttttagcgcacttcttctagatttaaggaagatgggtaaggaaaaggttcacatcagtattgtggtcattggccatgtcgactctgggaaatccactaccactggtcacctgatttacaagcttggaggcattgacaagcgtgttattgagaggtttgagaaggaagctgctgagatgaacaagaggtctttcaagtatgcctgggtgctggacaaacttaaggctgagcgtgaaagaggaatcaccattgatattgctttgtgg

SEQ ID NO: 166162 - DNA, 280 bp, Glycine max
gccagtagtcatatgcttgtctcaaagattaagccatgcatgtgtaagtatgaactaattcagactgtgaaactgcgaatggctcattaaatcagttatagtttgtttgatggtatctactactcggataaccgtagtaattctagagctaatacgtgcaacaaaccccgacttctggaagggatgcatttattagataaaaggtcaacacaggctctgcctgttgctttgatgattcatgataactcgtcggatcgcacggcctttgtgccggcgacgc

SEQ ID NO: 166163 - DNA, 282 bp, Glycine max
ttcgatttcaaagacgatgcagttagagagttctattcaaacccctggttcgagtactttaaccgaaacccctagttctattcacgcgattccgcagaaccagagcgtgttctccagagaattgaacttctctgagtacgggttcgacccaaagagtgggaacaatcagaatcaccattctctgaagccggaatccggcgagattctcagcttcggcgagagcaggagaacctcctacggcggcgtcaatgggaatactaataccaataccaattccaattc

SEQ ID NO: 166164 - DNA, 270 bp, Glycine max
gacttaacaacagcacaaagcgggttactgtctgttcaagctaccatctctctctctctttcttagtgcctccttgccagaagttaaaatggcccaagaaactttcctattcacatctgaatcagtgaacgaggggcaccctgacaagctctgtgaccagatctccgatgctgtgctcgatgcatgcttggagcaggaccctgacagcaaggttgcctgtgaaacctgcaccaagaccaacatggtgatggttttcggagagatcacaac

SEQ ID NO: 166165 - DNA, 282 bp, Glycine max
gtgtaatttaccacctcttggaagacataggcaatttgataatagagacggcccctgggacttctgaaacccatgttgctgggcaagcagaagtgctgaatatctttgaaatcaaagggagcaagtccaaggggcctgatgttaagatagcgggttgtcgtgttatcgatggttctgtgacaagatcagcaaccctgaggcttcttaggagtggggaagttgtgtttgaaggactttgtacatcgcttaaccgggagaaacaggatgtggattctgtgaaaa

SEQ ID NO: 166166 - DNA, 262 bp, Glycine max
tacacattcaactttgatcagatgcttaatgataaggggaatactgctgtttatttgctgtatgcacatgctaggatctgttccattatcaggaaatctggtaaagacatagaagaagtaaagagaaacgggaaaatagtgttggatcatgaagatgaacgtgcattggggcttcatttgctacaatttcctgaggtttatgaggaggcatgcacctatttgttgcccaatttcttgtgtgaatacctttacaatttggcag

SEQ ID NO: 166167 - DNA, 282 bp, Glycine max
cttcaagcaaacaatgcgccaaggtggtcctaccaaaccaaaagagccccgtattcctaggatgccccagttgcatgatttccagtttttcaacacacaaagattgactgagctgtatgaaaaggaagtacgctatctcatgcaaacacaccagaagaatcagataaaggattcaatagatgttgatgaaccggaagaggtgggagatccattgactgctgaagagttggaagaaaaggagcgcttgctagaagagggattttcttcatggacccggaggat

SEQ ID NO: 166168 - DNA, 285 bp, Glycine max
cggcacgaagaagagcgataatacgaggtactacgaaatcctcggcgtctccaagaacgcttcgcaggatgatctgaagacggcttacaagaaagccgccattaagaatcaccccgacaagggcggtgatcccgagaagtttaaagagctggcgcaagcttatgaggttctgagtgaccctgagaagcgtgagatatatgatcagtatggtgaagatgcgcttaaggaaggaatgggtggtggcggtggccatgatccatttgatatcttttcatctttctttgg

SEQ ID NO: 166169 - DNA, 281 bp, Glycine max
tcggctcgacctcgagccgaatcggctcgagattaattgcaagaatggcacttacttgcttggtgatgtccctttctgttctcttcactcttggtcttgcgagagaaagccatgccagagacgaagatttttggcatgctgtttggccaaacactcccattccaagttcattgcgagatcttctaaagcctggccctgcaagtgttgaaatcgatgatcaccctatgccaattgaagagacacagtacccgaagaccttcttctataaagaagaccttcat

SEQ ID NO: 166170 - DNA, 281 bp, Glycine max
agaaaactctgcaaacatgttggtttatcaggacctccttacaggtgatgagcttctctcggactccttccgttacaatgaaattgagaatggaatgctgtgggaagttgaggggaagtgggttgttaagggagcagttgatgttgacattggtgcaaacccttctgctgagggtggagaagatgagggagtcgatgacgcagctgttaaggttgttgacattgttgatacattcagacttcaggagcaacccgcttttgataagaaacagtttgttacct

SEQ ID NO: 166171 - DNA, 282 bp, Glycine max
gttcttctttagggtatcttattccaaaagggtggaaagtgctacctctatttaggaacatacaccacagtccagacaacttcaaggacccagaaaaatttgatccctcaagatttgaggctgctccaaagcccaacacttttatgccatttggcagtgggatccacatgtgtccagggaatgaattagccaagttggagattttggtcctcctacatcatctgaccacaaagtacaggttggtaaaccttaatcatcagtaacaacagtgtctctcattgc

SEQ ID NO: 166172 - DNA, 279 bp, Glycine max
cttgatttcacagccacatggtgtggaccttgcaaactcatggacccagttatccaagagtttgctggaaattacacagatgttgacttcatcaagattgatgtggaggagttaacggaagtgtctcaagcactccaggtctaccaattgccaccattcatactcgttaagaaaggcaaagttgctgatagagtggtgggggtgaaaaaggaggagctgaaaaggtcgattgagaagcacagacaataaatgaatgatgtaataaaatcagaaaggctc

SEQ ID NO: 166173 - DNA, 276 bp, Glycine max
  unsure (1)..(276): unsure at all n locations
gctctacaggcctggatctgttggatttgtttctaaatctggtgggatgtccaatgaactctacaacactattgcccgtgtaactgatgggatttatgaaggcattgctattggaggagatgttttccctggttccacactttctgaccattcacntacggtttaacaacatgccacaggttaaaatgatggtagtacttggggaacttggtgggcgtgatgagtattccttagtggaggccttaaaacaaggaaaggtatccaaaccggttgttg

SEQ ID NO: 166174 - DNA, 279 bp, Glycine max
cttgaaaaatgagcaagttcaatattgttggtacaaaatcatcactgtcattgttcaaatttgaatgctgaaattgatcataagctaaacgtgcatctgatggatggatgcagttgaccttgtctggattactgaacttcatagacgggttatggtctagttgtggagacgagagaatcatcatattcaccaccaaccacaaggagaggctagacccagcactgttgaggccaggaagaatggacatgcacattcacatgtcctattgctcctaccaag

SEQ ID NO: 166175 - DNA, 283 bp, Glycine max
cacgttgttgctttgcaagtcgcgagtctctctcttcttcctacgacaaccgtttcctctcgccggaaaaccgacattgatctctctctccgccgatccgtccgccatgagttccggcgagctcctccacatacaaccccaggagctgcagtttccctttgaattgaggaagcagatctcatgctctttgcagttgtctaacaagactgacaactatgtggctttcaaggttaagacaacaaatcctaagaaatattgtgttagacctaacactggagttgtg

SEQ ID NO: 166176 - DNA, 285 bp, Glycine max
ggaaaccttagctggataggtcaaacatcatcatgtcggacgaagagcaccatttcgagtccaaggcagacgccggtgcctccaaaacctaccctcagcaagccggtaccattcgcaagaacggctacatcgtcatcaaaggacgcccctgcaaggttgtggaagtttcgacttccaaaactggaaagcacggtcacgccaagtgccactttgttggaattgatattttcactgccaagaaacttgaggatattgtgccctcttctcacaactgtgatgttcctc

SEQ ID NO: 166177 - DNA, 283 bp, Glycine max
tttcactcttcttgtatgatggagaagatccagcacagtgaggtggaagtgtcgggactgaagcttcacgtggcagagattggaagtggctccaaaattgtggtattcttgcatggattcccagagatctggtacacatggaggcaccaaatgatttctgtggcaaacgctggttatagggctattgcctttgatttcagaggctatggactttctcagcaaccagcagagcctgaaaaggaaaccatgtttgatctggttcatgaaattgtaggccttttgg

SEQ ID NO: 166178 - DNA, 275 bp, Glycine max
atttggttttgtgcaggttttcaatgagataaattcacgtgaaatggagaaaataaacgtttttaaaggcatattggataactatgttttcgtgggtgtcatcagtgctactgttttcttccaaatcataatagttgagtacttgggaacctttgcaaacacaacacctctcaccctggcacagtggttcttttgcttgttggttggatttttgggcatgccaattgctgctcgcttaaagaagatccctgtttgaagcacctgaatggataaaa

SEQ ID NO: 166179 - DNA, 279 bp, Glycine max
cctttcttctcttcactctgcccgctgcaacaatggcttcagagaagaaactttcgaacccaatgagggagataaaagtgcagaagctcgtcctcaatatctctgttggcgagagtgcagatcgtctcaccagagcctccaaggtgttggaacaactgagtggccaaaccccagtgttttccaaagcaaggtacactgttcgttcctttgggattagaagaaatgagaagattgcatgctatgtcactgtcagaggtgacaaggcaatgcaacttttgg

SEQ ID NO: 166180 - DNA, 278 bp, Glycine max
gttcagttcgcgatgagagccaagtggaagaagaagcgtatgaggaggttgaagaggaagcgccgaaagatgagacagagatccaagtagtgcgttaatccaagtagttgatttccgcagtacttggatctctgttacctctcagcagcttaggctagggttcagaaacgaaaaacggttcggtgttcagttcgcgatgagagccaagtggaatcagcagcgtatgaggacgttgaacaagaaccgccgctaagatgagacagtcatccaagtagtgc

SEQ ID NO: 166181 - DNA, 270 bp, Glycine max
cctcgagccgctcgagccgctcgagcggtcgaggttaatatgcgactcagcactgtcactgcgtacttcacttgcgggggaagggcaaaataatggccttgttatgaacttctacaaggaatcatgccctcaggctgaagacatcatcacagaacaagtcaagcttctctacaagcgccacaagaacactgctttctcctggctcaggaacatcttccatgactgtactgttcagagttgtgatgcttcactgttgctggactccacaag

SEQ ID NO: 166182 - DNA, 280 bp, Glycine max
cgctccgttaccgttaggatggttcccgcgccgagaggttcggggatcgtggcggctagggttcccaagaaggtgctgcagttcgcggggattgatgatgttttcacctcctccagaggatccaccaagaccctcggcaacttcgttaaggctacttttgattgcttgatgaaaacctatggattcctgacaccagaattctggaaggagactcgcttctccaaatctccattccaagagtacacagatctactggcaaaaccaacaggaaagactctaa

SEQ ID NO: 166183 - DNA, 280 bp, Glycine max
gcggcgggtgccaagggggagaggcggtctcttccaaatgcgacaatcatgattcaccagccttctggtggttatagtggccaggcaaaggatattgcaattcacaccaagcacattgttcgggtttgggattctttaaatgagttgtattccaagcatacgggccagtcggttgaggttattcagacaaatatggacagagataactttatgactccacaggaggccaaagagtttgggctcattgatgaggttattgatcagagacctatggctttgg

SEQ ID NO: 166184 - DNA, 280 bp, Glycine max
cggtaatgagtgattatcattgttgtatctgagtcatgatgtattgatgtatatttgcgattgccattgaatctgaatctgataggaaaaaaaacaaaaaggagcagatgggtagctcaggtttctcatggaaattggcggatcatccaaagcttccaaagggtaagactgtcgctgttgtggtattggatggttggggagaggccacacccaaatgagtacaactgcatccacaaggccgaaacaccctgcatggattcacttaaaaagggtgctcctg

SEQ ID NO: 166185 - DNA, 272 bp, Glycine max
agacaagcgagaacaaatgtcattttcgaggttattgagagtccagaatcctggtctctgtctactcttcaattattcccaacctctcacctcttcatcttcttcttccttacctttgaccagagacagagcagcactcacattcacaacgaaggtttcctattcatcagacatggtgaaggcaatcagagttcacgaactcggtggccctcaagttctgaagtgggaggatgtggaaattggagatccaacagaaggcgaggtccgtgtga

SEQ ID NO: 166186 - DNA, 277 bp, Glycine max
cggaaatactggaattcctgtgaggatgaatggccatgaattcgggagagcgagtgggatggctcctcgtgctaggattgctgtctacaaggcaatttatagactgtttggagggtttattgcagatgtagttgctgcaattgatcaggctgtatatgatggagtggatatactcaacctttcagttggacccgacagtcctccagcagccaccaaaactacatttttgaacccttttgatgccacacttcttggagccgtgaaagctggtgtattt

SEQ ID NO: 166187 - DNA, 276 bp, Glycine max
ctttctctctcccttagtcatagggactcattgttcttctcccaggttattcagaaaagcaaaatggtgaagatttgctgcattggtgctggatatgtggggggtcctactatggcagtcattgcacttaagtgcccatccattgaagttgctgttgttgatatctctaaatcccgcattgcagcctggaacagtgaccagcttcctatctatgaacctggccttgatggtgttgtgaagcaatgccgtggcaagaacgtcttcttcagcactgat

SEQ ID NO: 166188 - DNA, 278 bp, Glycine max
gaagtattgcatcattacatgaaaatatttatgacaactactaaaatctacgttttcgtgtaacttggggtgtggcccatggttgtttaggacgaagtcttgattgctggatttggacgaaaaggtcatgctgtgggagatattcctggtgtcaggtttaaggtcgtgaaggtctctggtgtctctcttttggctctcttcaaggagaagaaggagaagccaaggtcttaaatttgtggagtacttgtgtttgttttcaatagtttctctcaagtatt

SEQ ID NO: 166189 - DNA, 282 bp, Glycine max
ccgattgctagaatggaatttcgatgctcagtcatctcttttaccattctcttctctcttgctcttgcaggagagagccatgtccatgcatcgctacctgaggaagattattgggaagctgtttggccaaacactcccattcccactgcactgcgagagcttctaaagcctctccctgcaggtgttgaaatcgatgaactccctaagcaaattgatgatacacagtacccaaaaacattcttctataaagaagaccttcatccaggcaaaacaatgaaagta

SEQ ID NO: 166190 - DNA, 279 bp, Glycine max
cttctcttgcggctagggttttagcgcacttgcttctagatttaacgaagatgggtaaggaaaaggttcacatcagtattgtggtcattggccatgtcgactctgggaaatccactaccactggtcacctgatttacaagcttggaggcattgacaagcgtgttattgagaggtttgagaaggaagctgctgagatgaccaagaggtctttcaagtatgcctgggtgctggacaaacttaaggctgagcgtgaaagaggaatcaccattgatattgctt

SEQ ID NO: 166191 - DNA, 276 bp, Glycine max
ctctctccgaggtttgagagggtactggcatccaaaaaatgggttctaaaactaatgcttcgggccatagagcacgaaggccgctgtcaatatttgctgtgcttggtctttgctgtttcttttatcttttgggcgcatggcaaagaagtggatctgggaagggagataaccttgcattgaaagttaataacctgatgactgactgcactgttttacccaatttgagttttgaatctcatcacaatgatgtagaaattgtcgaacctgctgagccaa

SEQ ID NO: 166192 - DNA, 272 bp, Glycine max
gtgctcactagggagcttaagaataggcctgtttttgaagctgacgatcaatctgctatggtttatttgttggcaactgggaaggagaaatggggtgacaaggtttaccttgagaatcactactacttgcatggttattgggggattttggtggatcgttatgaggagatgattgagaattatcacccggggcttggtgatcataggtggcctttggtgactcactttgtggggtgcaaccttgtgggaagtttggggattacctgttgaga

SEQ ID NO: 166193 - DNA, 273 bp, Glycine max
ctcttttgggagcatggcagggcttaatgaggagcaaactgaggaactggcttggggtttgggagatagtggaagttatttcatgtgggtgattagagattgtgataagggaaagcttccaaaggagtttgctgacacatcagagaagggtttaatagtctcatggtgtccccaactacaagtcctaacacatgaggctttggggtgttttctcacacactgtggttggaactccacattggaagctttgagcttaggagttccagtgattgc

SEQ ID NO: 166194 - DNA, 275 bp, Glycine max
cacaagttgaaaacacaaaagacaacaaatgggttcttctctgtggacctgtctgattttgttatcacttgcttctgcttccttcgccgccaacccaagagcaccaattgatgtgccatttggcagaaactatgtgcctacctgggcctttgatcacatcaaatacctcaatggtggttctgagattcagcttcatcttgataaatacactggtactggcttccaatcaaaagggtcctacttgtttggtcacttcagcatgtacataaaattgg

SEQ ID NO: 166195 - DNA, 276 bp, Glycine max
caacatcgtcatgggtacccacaacctcagtgtcggcatcgggaaagaggattcagagggaaatggttgaactcaacaacgaccctcctcctgattgctctgctggccccaagggcgataacctctatcactggattgccaccattattggaaccccagaaacaccctaccaaggtggcatctttttccttgacatcaaatttccaattgattatcccttcaagcctcccgaggtagtattcaaaacacgcatttaccactgcaatgtagaccctg

SEQ ID NO: 166196 - DNA, 196 bp, Glycine max
attttgtatgtaaagatgtaaaattatgattattaggtggtgcatgtgttgcgtcatgggccaatgttatcctctgcttttaagttggaagaggcccagctcacgtgtgatgtacggctgtgattgtgtaatttgcaaaatcaaaaataacccccgagtcataaaaaaaaaaaaaaaaaaaaaaaaaaaagggggg

SEQ ID NO: 166197 - DNA, 278 bp, Glycine max
gagagagagagagagagagagagaaatggcttgcaggcaattgtgggcttcaagagctgcctcttacctgaggatctctgtgtttcacagaggcttttctaatgttgttaaagatttgaagtatgctgattctcatgagtgggtgaaagttgatgaaaattctgcaaccgtcggcataactgatcatgcccaagatcatttaggtgatgttgtatatgttgaattgccagaagtgggagcagctgtaacacaaggaggtagttttggtgcagttgaaa

SEQ ID NO: 166198 - DNA, 287 bp, Glycine max
agcctatccaactgatacaaggtaatgaaataaccattgtccactagactatcgacatctcccggagatgagaagacgatttgtatgagctacaaaaagctgcctgcggatgtgaagcccgggatggtcatactctgtgcggatggcaccatatcatttacagttttatcatgtgacaaacaagcaggcttggttcaatgccgatgtgagaactctgccactcttggcgagaggaagaatgttaatttgcctggagtgatagtggatctcccaactgtgacagacaa

SEQ ID NO: 166199 - DNA, 313 bp, Glycine max
gtacgtaagttcggtctacggctcgttcagcatcgacatcctctcacatgaactgtgtgacgaacggagagctctaccgtgtcatctgtgacacaaggggtgcctttgtgcagcctgcagtttatgaggcctttgggtacactgtggttgaggccatgacttgtgggttgccaacgtttgccacatgcaatggtggtcctgctgagatcattgtgcatggaaaatctggttaccacattgatccttaccatggtgaccatgctgctgagatccttgttgagttctttgagaagagcaaggctgatccatctca

SEQ ID NO: 166200 - DNA, 273 bp, Glycine max
gatcgatcttgttattgtaaaatataataacttttttatatcgtgatcaagatgcgccgagggagagccaccgccgccgtcgtggatccgacggcggagcaggcgaaggagacgcggttccgcggcgtcaggaagcggccgtgggggcgattcgcggcggagattcgagatccgtggaagaagcagcgcgtgtggctggggacgttcgattccgccgaggatgccgcgcgggcttacgacaaggctgcccgatccttccgcgggcccaaggcc

SEQ ID NO: 166201 - DNA, 287 bp, Glycine max
ctttcatagtgtttgacaagtccacttctaccctttttgtggcttctgatcaagctggcaaggttcctctctattggggaatcacagctgatggttacgtagcatttgctgatgatgcagatttgcttaaaggttcttgtggaaagtcgcttgcttctttccctcaaggatgtttctactctacagcagttggaggattgagatgctatgaaaatccaaagaataagattactgcagtccctgctgaggaagaggaaatctggggtgcatttttcaaggtggaaggt

SEQ ID NO: 166202 - DNA, 289 bp, Glycine max
  unsure (1)..(289): unsure at all n locations
gtaaaggcgaaagactttaggtttggaattgggaattagggttgttcgcgtcacgaagatgatcgaggtggtgttgaacgatcgattggggaagaaggtgcgcgtgaagtgcaacancgatgacaccatcggcgacctgaagaagctggtggcggctcagacgggcacaagagccgacaagatccgcatccagaagtggtacaccatatacaaggatcacatcactctcaaggattacgagatccacgacggcatgggtctcgaactctactacaactagacacaaggt

SEQ ID NO: 166203 - DNA, 284 bp, Glycine max
caattttctagggtttatacaattatcgatggcttcttcagatgttgagtaccgttgctttgtcggtgggctcgcttggggcactgacgaccaagctctcgagagagccttctctccgtacggcgaaatcgttgaaacgaagattatcaacgatcgtgagactggaagatccaggggttttggatttgtaaccttcgcctcggagcagtccatgaaagacgccatcgaagggatgacaggccaaaaccttgacggccgtaacatcactgttaacgaagctcagt

SEQ ID NO: 166204 - DNA, 283 bp, Glycine max
gaaagaaggtttttttagtatagttaacagcatggagagggaggaagatgttaaggttggagcacagaaattctcggagaggcaagcactgggtacaggagctaagagtgacaaggactacaaggaggcaccaccagcacccttgtttgagccaggggagttaaagtcatggtctttttacagagctgggatcgcagagtttgtggccacattcttgttcctctacatcactgtcttgactgtcatgggtgtcaacagggcacccaacaagtgctcttctgtt

SEQ ID NO: 166205 - DNA, 147 bp, Glycine max
ctcgagccgcttgatgggattcaaggtccagtatatgttggtactggaactgtgttcaacacgcaggcattgtatggctacgatccaccagtatctgagaaaaggccaaagatgacatgtgactgctggccatcatggtgttgctgt

SEQ ID NO: 166206 - DNA, 292 bp, Glycine max
caaattctctgtgttgtgttgtgtacttgtgttaattgtgttgttgttgtaggaaatttaagtgaagagagaatgatgatgaagtctgctatgtgtgcattggtgcttgtggcactggttgtggttgaagtggggcccatggctgaggctgcggtgacttgcaacccaacacagttgactccttgtcttccggcaattaattcaggttctgcaccttcgagtgcttgttgccagaagctgaaggagcaaaagccatgcttctgtggctacctcacaaaccctagcttgaagc

SEQ ID NO: 166207 - DNA, 295 bp, Glycine max
ctcagcacaacacccctcccaaacctctttttctcttaatttctcatcatatcatatctattaatcttacacatatattaagacatagatataatttttttcgttttatttttccctgcatgggctgttaagataagatgtctcgcacgtgctcactgtgcggcaacaacggccacaactcgcggacatgcaccgacggtggcgccgccgcatcctgcggcgggtctcccatggagaacggcatcatgctgttcggcgtaagagttatgaccgaagctaactcctccttccggaa

SEQ ID NO: 166208 - DNA, 268 bp, Glycine max
gagagtagagacatggttctgagtgggaaagtggagactgaagtagagattcaagcacctgcagctaagttctaccacgtctttagaaagcaaattcatcatgttcctaacatgtctacagaaagagtacatggagctaaagtgcatgaaggtgactgggaaaatattggttcagtcaaacactgggactttaccatagaaggtagaaaaacaagtgctaaggagaaaattgaagctatagatgatgataacaagataatatcataca

SEQ ID NO: 166209 - DNA, 283 bp, Glycine max
ctcgagccgttcagttttctcgggaaaatcatggtcaaaggtccaggcctctactctgacattggcaagagagctcgcgatcttctgttcaaggattatcagaatgaccacaagttcaccatcaccacttacacttccaccggagtggaaatcacttcaactggagtcaggaaaggtgagatatatttggccgatgtcagcactaaggtgaagaacaagaacatcacaactgatgtcaaagtggacactagctcaaatctgcgtacaatcattactgtggatg

SEQ ID NO: 166210 - DNA, 287 bp, Glycine max
cgagcatcatggcctcgagagcagtgctattgttggctatgtgtgtgcttccggccatggttgtggccattcgcccagcaaagaaccctttttgcgtgaagggtcgcgtctactgtgacccttgccgtgctggttttgagacctcagcaaccacctacattgccggtgctgagattatgttgcacatgcaagagcagggttagcaacgaggttgtgtacaccaagaaggggtacactgactcaactggagcatacacaatgtacgtggacgaggatcacgcagatca

SEQ ID NO: 166211 - DNA, 286 bp, Glycine max
ctattataaccaaacactcttcttcatattcttcttcttcttcttgttcttgttctatctgtgacgagcatcatggcctcgagagcagtgctattgttggctatgtgtgtgcttccggccatggttgtggccattcgcccagcaaagaaccctttttgcgtgaagggtcgcgtctactgtgacccttgccgtgctggttttgagacctcagcaaccacctacattgccggtgctgagattatgttgcaatgcaagagcagggttagcaacgaggttgtgtacacca

SEQ ID NO: 166212 - DNA, 287 bp, Glycine max
gaaaagaggagtttgagaatggcaacgatcagcgcggttcaggtggagttcctggagtttccagcggtggttacttcaccagcctccggcaagacctatttcctcggcggcgcaggggagagaggattgacgattgaggggaagttcataaagttcacaggcataggagtatacttggaggataaggcggtgccatcactcgccgctaagtggaagggtaaaacttcagaggagttagttcacaccctccacttctacagggatatcatttcagggccgtttgaaaa

SEQ ID NO: 166213 - DNA, 282 bp, Glycine max
aagaaacccataatctctctctctctctcgttcgctttccgtatccatatatatcccaaaccctaccgttaggttccccaattcttcaacaccccgtggaccgctgctctgcttcttagtagttcgtacggtttttccgtcgattgcctccgaaacgatgtcgtatcgcccaagcgggaactccaggaccgacgtccgccggaaccggtacaaggtggcggtggacgcggaggaaggtcggagacggcgagaggacacgatggtggagatccgcaagaaccg

SEQ ID NO: 166214 - DNA, 290 bp, Glycine max
actcgagccgcggctcgagatcagattcaatttgcattagaacgacggattggtgcaatgaactctgccttgtccacaacacaactaccgtatcctagtgagtcatttgaaatgattcactgttcacgatgccgaatagactttcatgaaaacgatgggattttactgaaggagttgaatcgccttcttcgcttcaatgggtactttgtttattcagctccccctgcttatagaaaagacaaagattatcctgtaatttgggataagttgatgaatctgactacagcaat

SEQ ID NO: 166215 - DNA, 286 bp, Glycine max
ggctcctctcacattctccttcttcttcatccttatctcttacatttcttcatcatcagaagcgcgatcaatcggaataaactatggaagaattgcgaacgacctacctacaccggcgaaagtggtggagcttcttaagagtcaggggctgaaccgtgtgaagctctacgacaccgacgccaccgtcttaaccgcgtttgccaactcaggaatgaaggtggtggttgccatgccaaacgagcttctcgccaacgccgccgcggaacagtccttcaccgacgcgtgg

SEQ ID NO: 166216 - DNA, 297 bp, Glycine max
caagtctctcgaagcatctttctttctcttcctgcagaagctatccgtgttacttgttcccaagtctccaacaagcaaagtacatggttgatttggaaatccaggtccccagcgcattcgacccgtttgccgaggcgagagaatcagatgcccccggggcaaaggagtatgtgcacatacgaattcagcagaggaatggaaagaagagtctgacaacagtgcaagggctgaagaaggagttcagctacgagaagatcctcaaggacctcaagaaggacttctgctgcaacgggactg

SEQ ID NO: 166217 - DNA, 283 bp, Glycine max
caacaaatgaatattctcggacaatcattcaacgaatcaaacaacggaagctactcttgttcgtcgccggagactggtagctcctctaacattccaaacacttttcactccgacgaggaagtgcacacactagcttcggcgcgtcctaagaaacgtgcggggcgtcgaatttttaaggagacaagacacccggtgtaccgaggagtacgaaggaggaacaacaacaagtgggtctgcgaggttcgtgttcccaacgacaatccaccaggattggcttggacgt

SEQ ID NO: 166218 - DNA, 284 bp, Glycine max
atcgaacgctcgagcggctcgacggctcgagatccactccccaagaataccaccaactactagaaattactgacagaatcaacaagatgcacgcagtgctcgagaagaacatcttgtgggtgaaccctgactgtgggctcaagacccgtaagtacactgaggtgaagccagccctcacaaacatggttgccgcagcaaaactcatccgcaacgaacttgccaagtgaatggtataagaaagtagaatcttccaagtcatttggttctgctttatattataatac

SEQ ID NO: 166219 - DNA, 285 bp, Glycine max
ctagagtgagaaagaaaaatggagggaaaagaggaagatgtttccttgggagctaacaaattctcagagaggcaaccgattggaactgcggctcagagccaagacgatggaaaggactacacagagccacccccggctccacttttcgagccctccgaactcacttcttggtccttctaccgagccggaatagccgagtttgtagccacttttctctttctctacataaccatcttaaccgtcatgggtgtcaataggtccagctccaagtgtgctactgttggc

SEQ ID NO: 166220 - DNA, 287 bp, Glycine max
gaagaaaaggattataaaactgcttatagttatttctttgaagcttttgaatcattcaatgctcttgatgaccccaaggctgtttttagcctgaaatatatgttgctgtgtaagatcatggtgaatcaagctgatgacgtaggaggaattatttcttctaaagcaggcctgcaatatcttggccctgacttggatgctatgaaagctgttgctgatgcacattctaagcggtcccttaagttgtttgaaattgctttgagggactacaaggcacagttggaggaaga

SEQ ID NO: 166221 - DNA, 282 bp, Glycine max
gtatttctaaggatggacagactcgtgagcatgctcttcttgctttcacccttggtgtgaagcagatgatctgctgctgtaacaagatggatgccactaccccgaagtactctaaggctaggtatgatgaaattgtgaaggaagtctcttcctacttgaagaaggttggttacaacccagacaagattccatttgtgcccatctctggtttcgagggtgacaacatgattgagaggtcaccaaccttgactggtacaagggaccactctccttgaggctctt

SEQ ID NO: 166222 - DNA, 300 bp, Glycine max
atcgagcgaatcggctcgagtggcaccggaatcagaggctccacctaacttctggggcaccaccccggaagaagaatactacacctcccaaggcgttcgcaacaccaagtcccacttcgaaacccccaacggcaaaatcttcacccagtccttcctccctctcaacctccaacaccaccaagtcaaagccaccgtctttatgacccacggctacggctccgacaccggctggctcttccagaaaatctgcatcaacttcgccacctggggctacgccgtcttcgccgccgacctcctcgg

SEQ ID NO: 166223 - DNA, 303 bp, Glycine max
gcaagcaaaaagaaagaatcccaggcgaggagaaagatggaggggaaggagcaggatgtgtcgttgggagcgaacaagttccccgagagacagccgattgggacggcggcgcagagccaagacgacggcaaggactaccaggagccggcgccggcgccgctggttgacccgacggagtttacgtcatggtcgttttacagagcagggatagcagagtttgtggccacttttctgtttctctacatcaccgtcttaaccgttatgggagtcaccggggctaagtctaagtgtagtaccgttggg

SEQ ID NO: 166224 - DNA, 297 bp, Glycine max
cacagaagcagaaggaggagaagcagaaagaggagacgaagcaatggcgccgaagaagcccagaaccacgtcgaggaaccctgatttggtcaggggaattggcaaatattcgaggtcgcagatgtaccacaagaggggcatctgggccatcaaggccaaaaacggcggtgttttgcccctccacgcatcccaagcccaaacccgaggccccggcccagaagccgcccaagttctacccggccgatgacgtgaagaagcccctcgtcaacaagcacaagcccaagcccgcgaaactca

SEQ ID NO: 166225 - DNA, 283 bp, Glycine max
agaggttttgatgcaacgctgtcactgagaaaggatctctatctacgaaggagcggaataaaacccttctctctgtgattaagagaatggactcagatcggaaacttcacacttttgaggaggtggcaaagcacaaccagaccaaggattgctggctcatcttttctggcaaggtgtatgatgtcacccctttcatggaggatcatcccggaggtgatgaggttttgttatctgcaacagggaaagatgcaaccaatgactttgaagatgtggggcacagtga

SEQ ID NO: 166226 - DNA, 285 bp, Glycine max
cggctcgagccaatatattccattctctctgtgtatttccctacctctcccttcaagatgcacatcttcgtcaagaccctcaccggcaagaccatcacccttgaggtggaaagctctgacaccatcgacaacgtcaaggccaagatccaggacaaggaaggaatccccccggaccagcaacgtctcattttcgccggaaagcaacttgaggacggccgtacccttgctgactacaacattcagaaggagagtactcttcacctcgtcctccgtctccgtggtggc

SEQ ID NO: 166227 - DNA, 291 bp, Glycine max
tcggctcgagtgggaatcgtgatgtgacaggaagccagaacagcgttgagatcgatgctctagctcgctttgctgttgaagaacacaacaaaaaacagaatgcccttttggagtttgaaaaggtggtaactgcgaaacagcaagtggtttctggtaccttgtacaccatcactttggaggcaaaagatggtgggcaaaagaaggtttatgaagccaagtttgggagaagtcaggttgaacttcaaggaggtgcaagagttcaagcttgttggagatgacctgcatagtcta

SEQ ID NO: 166228 - DNA, 299 bp, Glycine max
aaaaaagtgtagtgggaaatggcaggtgcgggtgcaggaggagggtatggggacgcgaaccagaggatagactacgtgttcaaggtggtgctgataggggactcggcggtggggaagtcgcagatactagctcggtttgcgaggaacgagttcagcttggactccaagtccaccatcggtgttgaatttcagacgaggactttggttatcgatcacaagaccgttaaggctcagatctgggacactgccggccaagaacgatacagagcagttacgagtgcatattacaggggtgctgt

SEQ ID NO: 166229 - DNA, 301 bp, Glycine max
gacgagacatactcgctggggaagtcactaaccggcaagaacctcgtccagctggcttccaaaggcggacagaggaactccatcaacgttgttctgacatccgctgatgtggcggtcgaaggtttctgtatgagccgatgtgggaccacggctgctccgcttctcatctgaagaagaacagcaagagctacaagttcgcctacatctgggtgggaaactccgaaacgcaatgcccggggcaatgcgcgtggccattccaccaacccatttatgggccccagagcccacccttggttgctcc

SEQ ID NO: 166230 - DNA, 287 bp, Glycine max
  unsure (1)..(287): unsure at all n locations
caacaatggacctccgtgaatcgataagcaaccaaaccgacgtggccctgagcatctcaaagctcctgttgtcgaaagaagctcgggacaagaacctcgtgtattcgccgctgtcgttgcacgttgttctgagcatcatcgccgctggctccaagggccccacactcgatcagcttctctccttcctccgatccaaatccaccgatcatctcaactccttcgcctctcagctcttcgccgtcgtgctctccgacgccactcncgccggcgggcctcgcatctccttc

SEQ ID NO: 166231 - DNA, 280 bp, Glycine max
gcagacacaaaggctgctgttgctgaggatgacgatgatgatgatgtggatttgttcggtgaagagacagaagaagagaagaaggcagcagaggaacgggcagctgcagtgaaggcatctacaaaaaaaaaagagtctgggaaatcatctgttctgttggatgtgaaaccatgggacgatgaaactgacatgaagaagctcgacacagcagtgagatctgttcagatggaagggttgctttggggtgcatccaaacttgtacctgttgggtacggtatca

SEQ ID NO: 166232 - DNA, 281 bp, Glycine max
gcggaaaccctgatccaaatccgcgtggttgggtgcgccgacatagcccggaaggtctcccgcgccatcacgctcgcccccaacgccgccctctgcgccgtggcgagccgctctcacgacaaggcagccgcattcgccgccgccaacggcttccctctctcagccaaagtgtacggctcctacgagtcccttctggaggaccccgacgtggacgccgtctacatgccactccccaccagcctccatcttcactgggccgtgctcgcggcacagaacaagaa

SEQ ID NO: 166233 - DNA, 280 bp, Glycine max
ccgtaatctgcttgacatgaatgcttacttgggaggctttgcagctgcactgattgatgatcctgtgtgggtcatgaacactgtccctgttgaggctgaggtcaatacacttggtgccatatatgaacgtggattgattggaacctatatgaactggtgtgaagccatgtccacttacccgcgaacttatgacttcatgcatggtgactcagtttttagcctctaccagaacaggtgtaaaatggaggacattcttcttgagatggatcgaattttgaga

SEQ ID NO: 166234 - DNA, 283 bp, Glycine max
gagcttgcacctattggtatcttctacaatatcctaaagtgtgtttcttcttcttcatcaccaagtctttactttcagacctcatcaacctcaatctctcagaatccacagaaaagatcattactgagtacatatgggttggtggatctggtatggacctcagaagcaaagccaggactcttcctgggccagtgagtgaccctgcaaaacttccgaagtggaactatgatgggtctagcacagatcaagctccaggggatgacagtgaagtcattctataccc

SEQ ID NO: 166235 - DNA, 283 bp, Glycine max
gaagaaccaacaagaggggtattgagattgagattcaagtaatggggaagagcaaggttcttgtggtggggggaactgggtacatagggaggaggatagtgagggcaagcctggcactgggccatgagacctatgtggttcagaggccagagttgagcctccagatagagaagctgcagaggctcctctccttcaagaagcaaggtgctcatctcattgaggcctctttcaatgatcacaagagccttgttgatgctgtgaacaggttgatgttgtcatcatg

SEQ ID NO: 166236 - DNA, 289 bp, Glycine max
caacatcgtcatgggtacccacaacctcagtgtcggcatcgggaaagaggattcagagggaaatggttgaactcaacaacgaccctcctcctgattgctctgctggccccaagggcgataacctctatcactggattgccaccattattggaaccccagaaacaccctaccaaggtggcatctttttccttgacatcaaatttccaattgattatcccttcaagcctcccgaggtagtattcagaacacgcatttaccactgcaatgtagacctgatggccgtgttagt

SEQ ID NO: 166237 - DNA, 273 bp, Glycine max
ctcgagccgctcgagccgctcgaatggaaaatgaaccctgtcaccccaatttctttcttcacacacttcatcgctacgcttggtttaaagcgccacttgcattcggagtttctgtgtaggtgccaacgtcttcttctctctgtcattgcggattcaagggttatgagttatcttccttctacactggctgctgctataatgatccacattattaaagagattgaaccattgaatgctacggagtaccaaaatcagcttcctggtttacttaaa

SEQ ID NO: 166238 - DNA, 284 bp, Glycine max
gccacagagacacagtctcctactctctctcacccacaagaaaaatggcatatcacatcgttggatacccccgcatgggtcccaagagagagctcaagttcgctctcgagtctttctgggatggcaagagcagcgccgaggatttgcagaaggtggctgctgatctcaggtcatccatctcgaagcagatggctggtgctgggatcaagtacatccccagcaacactttctcgttctatgaccagctgctcgacgccaccgccaccctcggtgccgtccgccca

SEQ ID NO: 166239 - DNA, 261 bp, Glycine max
gcagacagcatggacagggtggaacatgttaaggttggagcacagaaattctcggagaggcaagcactgggtacaggagctaagagtgacaaggactacaaggaggcaccaccagcacccttgtttgagccaggggagttaaagtcatggtctttttacagagctgggatcgcagagtttgtggccacattcttgttcctctacatcactgtcttgactgtcatgggtgtcaacagggcacccaacaagtgctcttctgtt

SEQ ID NO: 166240 - DNA, 281 bp, Glycine max
ggaaaagattagtgaaaggatgaaaattcttcaggatttggtccctggttgtaataaggttattgggaaagcattggtccttgatgagataataaattatattcaatctcttcagcgccaagttgagtttttgtcaatgaagcttgaagcagtgaattcaagacttaactctggtattgaagcgtttcctcctaaagattttggtcagcaagcatttgatcctgctggcataccattcggttcgcaagctccaagagagtatagcagaggttcttcaccag

SEQ ID NO: 166241 - DNA, 281 bp, Glycine max
agttaaaagtggtcttgatgtctgaggcattggaagaggttgttccttcaatcaaaggagggtgtgaagaagaagggttgaacctgaaggctactgagctgaggattgggttgccagggtgtgagtcaccagagagggagggtgtgtttaagagtgtggtggtgtctggggccaagaggggtttctctgatgccattgatggaaactggaatggtggaggatctgaaaaagatgccgctgccttgttttctccaacttcaaggggtgctgttagtgttagt

SEQ ID NO: 166242 - DNA, 291 bp, Glycine max
ggtttctgacagaggcgagtgatatacatcgtgcctcctcattccgttctcccattccaccggagagagagagagagatggagagggagatggtgtctctgaaacttcagaagcggcttgccgcaagcgttctcaagtgtggtagaggcaaggtttggcttgaccctaatgaggtcaatgaaatctccatggccaattctcgactacacataaggaagttggttaaggatgggtttattatcaggaagcaactaagattcactctcgctctcgtgctcgtcgaatgaagga

SEQ ID NO: 166243 - DNA, 300 bp, Glycine max
gatctggcgaattcgccaccgcttcttcgcagacgcggaggtttctgatcgcctgcgccaccgaaaattccgacgacttgattcgccaactcgtttctgatctccactcctcttccatcgactatcagaaacaagccgccatggaaatccggttactcgcgaagaacaagccggagaatcgcatcaaaatcgcgaaagccggcgcaatcaaaccgctaatttctctcattttgtctccggacctccagctccaggaatacggcgtcaccgcgattttgaacctctcgctcatggacgaga

SEQ ID NO: 166244 - DNA, 282 bp, Glycine max
caaggatttcaacaagggtctcgtcaacaacaaggctattgaagatctcaaagctgatgttgagaagttctctgccttgtttgccatgcctggcttcctggtatctgaaatgaagtacaaggattaggttcaaccataccactttctactaattgtgtcactcaagttcgacacaaagtgcagaaatggagaaaaaggaaatatgtgtcttcctttcctgggagtgatagggtttatcgccatggtgtttcaattcaaaagtttgaagtgtctttgtacatt

SEQ ID NO: 166245 - DNA, 287 bp, Glycine max
ctctttgaaaacacttgtcgttgcgcagagttggttctttctttccccaatttgtgagtgttactattgaatcgattggcttgacatggcgagcgcgatggttgaggacgccaacttcgaagatgaccagctcgccaatatgaccacgacgacgtcgtcagagcttctcgtcttctcgacaacgagattcgcatcctcaaagtacaatctttttgttttttcttctgcttctgtaaccctaaccctaatcctatcgattacactatcttttttgctgcttccgtctt

SEQ ID NO: 166246 - DNA, 286 bp, Glycine max
ctcgagccgcaatgaagtaagcactcggcttaaggataagatacaggtggtgaagattgatactgagaagtatcctagcattgctgacaaatacagaattgaggccttgccgactttcatcatgtttaaggatggagaaccttatgacgctttgagggagcattgactgcagatcagctcattgaacgcatagaagccggcctcaaggttaagcaataaccctactataatgaagacacaaagaagcttgtctattggaatgttcgatcacatacatgatatgatt

SEQ ID NO: 166247 - DNA, 283 bp, Glycine max
ctcgagccgaatcggctcgagactcaatatagtgcaacctttgcactggtagtggaagcaaacaaagagcacaacgttacatatagtaactatggcgagagtgggtagaatgacacttggttcagaagggtttgaagtgtctatgcgggacttgggtgcatgggcatgtctgcattctatggtcctcctaagccagagcccgatatgattgcactcatccaccacgccgtccaaagcggtgtcacttttcttgacacttctgatgtctatggccctcacacca

SEQ ID NO: 166248 - DNA, 283 bp, Glycine max
ccagtatgcctttggggagaaggggagagaagctggcagtgggctctgttcaattcctccgaattcagtgctgcatgttaatattgaattggtgtccttcaagcctgtcataaatgttactggtgactccaaggtgattaacaagatttgaaagaaggggagggtgctttcacagccaatgaaggtgcaaatgttactgtgagcttcacagctatgctagaagatggcactgtatttgagaaaagaggaattggtgaaacactacccttggaattcataactg

SEQ ID NO: 166249 - DNA, 282 bp, Glycine max
gagcaacatcatttattactgatgatctttcgcaccgcatacttgacggaccacacccaacgccatccatgcgagctcatccggcattcatcccatttgcagaagacttcaatatgaacaatgtaatcacaactgtaaaaggtgtggggagatcagtgatgcgcacatcatcgctttgccgtctccaatcaacagtctcattggaagacaagtggtcaaagttggaagaagttctggtttgactactgggcctataatggcatatgctctagagtacaatga

SEQ ID NO: 166250 - DNA, 287 bp, Glycine max
caaatacctcactccacagttgaacaacaacaccaacaccaacttctggaatgaacattttcaaatccccactggaccatgatttgaactgtggtggaatattccacgactcagcagaagcatcttattcgtctgacacaaggagcacccctcagacgaagaagtgattctagcgtcagcgcggccaaagaagcgagcgggacgaagagtcttcaaggagacaaggcaccccgtctaccgaggagtgcgtcgcaggaacaagaacaagtgggtctgcgagatgcgag

SEQ ID NO: 166251 - DNA, 262 bp, Glycine max
ttcggctcgagctcgagccgtttggctggggactttccccacgccggagatggcggctcgggcgcacgacgacgcggcaatggccctgaggggccggtatgcctgtctaagctttgctgactcggcctagcggttacctgttcccgccacggccgagcaaaggatatacagatggcagcagctgaagctgcccaggctttcagaccagatcaaaccttaagacatgttaatacaaggcaggagtgtgtggaggcggtgtcgg

SEQ ID NO: 166252 - DNA, 285 bp, Glycine max
ccacgaccgcatcatggggctagatctcccctccggcggccacctcacccacggctactacacctccggcggaaagaagatctccgccacctccatttacttcgagagtctcccttacaaggtaaactccaccaccggctacatcgatacgaccgcttggaagaaaaagccctagacttcaggccaaaactcataatctgcggtggcagcgcgtaccctcgcgcattgggactacaaacgtttcagggaagtcgctgataagtgcggagcattgcttctctgcga

SEQ ID NO: 166253 - DNA, 283 bp, Glycine max
gtttgaggaaccacagatttatcgtattgatcactacttgggaaaggcactagtgcagaacttgttggtacttcgctttgcaaatcggtttttcttgccactttggaaccgcgacaacattgacaacgtacagatagttttcagagggattttggaactgcatggccgtggtggatattttgaccagtatggaattattcgagatattattcaaaaccatctgctgcaggttctttgcttggttgctatggaaaaaccagtttctctcaggcctgagcacatt

SEQ ID NO: 166254 - DNA, 289 bp, Glycine max
ggaaaatataatgtcattcctggacaatgaaggatttattatgccactagacttaggtgcaaaagggagttgtcagattggtggaaatgtttcaactaatgctggtggtttgcgtcttgttcgctatggatcgcttcatggaagtgtattggtgttgaagctgttctggcaaatggtactgtacttgacatgcttaagacattgcgcaaagataatactggctatgatttgacacatctatttataggaagtgaaggttccttgggaattgttactaaggtttcaatac

SEQ ID NO: 166255 - DNA, 287 bp, Glycine max
  unsure (1)..(287): unsure at all n locations
tccaaacctgcgcaacccgacagggaggtctgatcttccaggaattgacgtgtttgtttccacggcagaccctgaatgaagaanctcctcttgtcaccgccaacaccattctctcgatccttggaattgattatccagtggagaagtcgcgtgtcacttgtctgatgatggtggagctttgttgacatttgaagcccttgctgagactgctagctttactagaatttgggttcctttctgtagaaagcaccacatagagccgcgaaaccctgaagcatattttgggg

SEQ ID NO: 166256 - DNA, 282 bp, Glycine max
ctcgagccgctattatgaaatcgacaatacacctacaggcacttgtgctgtttgtgtggtacgtggtgaaaggtcccttgttgccaacttatcagctgcaaattgctacaagtctgagcatttgacgagaccggaaaattgggattagttggccaggccaagtattactacatttctggctttttcctcactgtatctcctgattccatacaattggttgctcaacatgcagctgcaaatcacaagatcttcatgatgaacctttctgctccctttatatgt

SEQ ID NO: 166257 - DNA, 278 bp, Glycine max
gccaccatgagtggagttacttgttgtctacgtttccctgggcaactgaactctgatcttcacaagcttgctgttaatcttatcccattcccccggctccatttcttcatggttgggtttgcacccttgacatcaagaggacccagcagtaccgggctttgactgttcccgaattgactcagctcatgtgggatgctaagaacatgatgtgtgctgctgatcctcgtcatggtcgttatttgactgcttcggccatgttccgtggtaagatgagcaca

SEQ ID NO: 166258 - DNA, 277 bp, Glycine max
ccaaaacaaaatgaagagcctcctcttctctctcttcctcttcctcttcttagcctcctccgccgtcgccaccgtccccgcccacaacatcacccgcatgctggccgcacaccccggcttctccaccttcaaccactaccttccgtcacccacctggccgaagagatcaaccgccgccagaccatcaccgtcctggccctcgacaatgccgccatgtcctccctcctcgacaagcacctctccctccccatcatcaaaaacgtcctctccctccaca

SEQ ID NO: 166259 - DNA, 285 bp, Glycine max
ctcttcctcaccgattgctagattggaatttcgatgctcagtcatctcttttaccattctcttctctcttgctcttgcaggagagagccatgtccatgcatcgctacctgcggaagattattgggaagctgtttggccaaacatcccattcccactgcactgcgagagcttctaaagcctctccctgcaggtgttgaaatcgatcgaatccctaagcaaattgatgatacacagtacccaaaaacattcttctataaagaagaccttcatccaggcaaaacaatg

SEQ ID NO: 166260 - DNA, 280 bp, Glycine max
caagcgcccaatgaagggaatgcttaccggtcctgttaccattctcaactggtcctttgttagaaatgaccaacctagatctgagaccacctaccagattgctttgtctatcaaggacgaactggaagaccttgaaaaggtggcatcactgttatccaaattgatgaagctgctttgagagagggtcttccactgaggaaatcagagcaagctcactacttggactgggctgtccatgccttcagaatcaccaatgttggtgtccaggataccacccaga

SEQ ID NO: 166261 - DNA, 281 bp, Glycine max
cgttcccaaattcattttaatcctaattctgcacttcttgatcattcgattttcctcctcaagatgcagatattcgtaaaaactttgaccggcaagaccatcacccttgaggtggaatcctccgacaccattgacaacgtaaagctaagattcaagacaaggaagggatcccacctgaccagcagagacttatctttgcgggtaaacaacttgaggatggtcgcacccttgccgattacaacatccaaaaggaatcaaccctccatctcgtgcttcgcctc

SEQ ID NO: 166262 - DNA, 274 bp, Glycine max
  unsure (1)..(274): unsure at all n locations
gcgaagaggcgcacgtnagcagtaactcgtggaattgctagcaatggcgaggatcaaggtttacgagctgaggcagaagacgaaggctgatctgttgaatcagctgaaggacctcaaggccgagcttgccttgcttcgtttgctaaggtcaccggcggtgcacctaacaagctctctaagatcaaggtggtgaggttgaacattgcccaggttttgacggtgatttctcagaagcagaaggccgcgttgagggatgcctacaagaacaagaagt

SEQ ID NO: 166263 - DNA, 203 bp, Glycine max
caggaagttcgagcacccaaggcacgggtcactgggatttctccccaggaaacgtgctgctcgtcacaggggaaaagtgaaggcattccccaaggatgacccatccaaggcacccaagctcactgcattcttgggttacaggctggtatgactcacattgttagagaggtcgagaagccaggatcaaagcttcacaagaagga

SEQ ID NO: 166264 - DNA, 272 bp, Glycine max
gtaaagggtgtggagaaggcaatgttgctgatggctctggtcgaagtgtttaattttcctgtgacggtttgttgaggcatagtacgaggaactggacgaccctggctaagcatgtatgctagtcttggtgggttctattcctgacactaccattgggtgtggtttttgccttcaagcttcggtttggacttggtggactccttataggactcctgattggtattgctgcttgcttggttctgttgttaacatttattgtgagaataaattgg

SEQ ID NO: 166265 - DNA, 280 bp, Glycine max
cacagaccttatgatttctgtcatttacatcaaatttcaggagattaattatggctcaacccataacaagaataggccttgctggattggctgttatgggccaaaatctggcactcaatattgctgagaaaggctttcccattctgtttacaaccgaaccacttccaaggttgatgagacagtagaacgagcaaaacaagaaggaaatcttccagtttatggctaccatgaccctgaagcttttgttcattccattcaaaagcctagggtgatactaatg

SEQ ID NO: 166266 - DNA, 277 bp, Glycine max
gttcatcgtcccactttcttctccttttagggtttcctttttgtttctcctttccagatctgcatcttccattttttaggattaagcggtgagattcgtgaatctgagaaatgtcggattcttctcgggaggagaatgttacatggcgaaattggcggagcaggccgagcgttacgaggagatggttgagttcatggagaaggtagcaaagactgtggaggttgaggagttgacggtggaggagagaaatcttctctctgtggcttacaagaacgtg

SEQ ID NO: 166267 - DNA, 275 bp, Glycine max
ctcgctcttcccttcctctggtggcgacaatgtcgactcctgctaggaagaggctgatgagagacttcaagaggctgcaacaagacccgcctgcagggatcagtggtgccccccaggataacaacataatgctgtggatgctgtcatatttggtcctgatgatactccatgcgatggaggcacgttcaagttgacactccaatttactgaggactatccaaataaaccaccgactgtacgatttgtgtctcgcatgtttcatccaaatatttatg

SEQ ID NO: 166268 - DNA, 275 bp, Glycine max
gacaatgcttcagaaaatggctgagcttatggagtactcttacctgttagatatggcggacaagattgccgatccatacatgagactagtatatgcttcatcattctttatatctgtctactatgcctatcaacgaatcggaagccattcaatccaattcttggtgagacttatgacatggttaaccatggtggcattacatttatatcagagcaggtcagtcatcaccctccaatgagtgctgggcatgctgaaactgaacatttcacttatga

SEQ ID NO: 166269 - DNA, 274 bp, Glycine max
ccccaatcgtagccgtcgcactttgcgttttctgcgtcatctccgattccccgacaatggccacccaaatgagcaagaagagaaagttcgtagctgatggagtgttcttcgctgaactgaacgaggttctgacaaggagttagccgaggacggatactccggcgtggaagttagggttacgccgatgcgcaccgaaatcatcatcagagccaccagaacccaagccgttctcggtgagaagggaaggagaatcagggaacttacctcggtggtt

SEQ ID NO: 166270 - DNA, 273 bp, Glycine max
ctcgagccgctcgagcggctcgagcggctcgagggagccgtagcagcagcggaagctctagcgtgggcagcgaatcacaatggcacgaggattgctgaagcatttgaagaggcttaatgccccaaagcattggatgttgacaaactgggtggtgcatttgctcctaagccctcatctggaccacacaaatccagggaatgcctgccactcatactcattttgcgaaaccggctgaagtatgctctgacataccgtgaagtcattgctattctg

SEQ ID NO: 166271 - DNA, 273 bp, Glycine max
ctttgacaatgtccaaaggtggttgcgtgaactgagggagcatgcggattctaatatagttatcatgatggctggaaataaatctgatttgagccatcttagagcagtttcggaggatgatggtcaagcattggcgagagggaaggtctctcgtttcttgagacatctgcactggaagcaaccaacattgagaaggcattccaaaccattttgacagagatttatcatattgttagcaaaaaggcgctcgctgctcaggaagcagctgttggt

SEQ ID NO: 166272 - DNA, 275 bp, Glycine max
cttccatctcgctcattggcccagattttgtcagagaatcgtagcatcataagctatttgccaaagtttcatcctgatgaccatgggccttttggaattacagccacctgccttgaaacatttataaaaagctgtgtggatactctgttataacatatatacttggtatcggagacaggcatttagacaatctcctccttagaaatgatggaggtcttttccatgttgattttggttttatacttggccgagatcctaagccatttccaccacca

SEQ ID NO: 166273 - DNA, 274 bp, Glycine max
cacactctctctgagtcggtcgagttgaatcggtgtgagtcagtgaccgagtcgaaccatgtcggacgaagaacaccatttcgcatccaaggccgatgctggagcctccaagacctatcctcaacaagccggaacatccgcaaaaacggttacatcgtcatccagggtcgtccctgcaaggttgttgaagtttctacttccaagactggtaagcacggtcatgccaagtgtcactttgttgggattgatattttcactgccaagaagcttgaag

SEQ ID NO: 166274 - DNA, 270 bp, Glycine max
gtcgccaaagtcggcaagacatatcagctcttaaactccgacgaccatgccaatttcctccgcaaaaataacaagaatcccggagattacaggcctgacattactcatcagtcccttttatctattttggatagccactaaataaagctgggagattgcggtcggtatacataaggactgaaaaaggtgttcttatagaggttaagccctttgttcgtattccaagaacattcaaacgctttgctggtgtcatgttggaattgcttcaaa

SEQ ID NO: 166275 - DNA, 266 bp, Glycine max
cgctcttgcagattatgttcacggcaagggtcttaagcttggaatttattcagatgctgggtattttacttgtagcaaacagatgcctggttctctctggtcatgagtttcaagatgccaagacttttgcatcaggggtattgattatttgaagtatgataactgtaacaatgatggatcaaaaccaactgatagataccctattatgactcgggctttaatgatggctggtcgtccaatcttcttctcactatgtgaatggggag

SEQ ID NO: 166276 - DNA, 266 bp, Glycine max
gcagccagccatggccaagtccaagaacaatgccaagaagttgtcctacatctcagttccttctcagatcatcaactccatctcatcttcttctcttcaatctctgcttgaatctcccaagacgtgtgcaagaactccaaattcttcacctttgtcaagtgcataaggccaagactcttccttttcactctctttttccttgctttctttgccatgctcaagtttggtctcaatctttacaccccttttcctccattcccatgtgc

SEQ ID NO: 166277 - DNA, 269 bp, Glycine max
caagattctaagagagattttgctgctctttgaagaagggtgtttgcttgattttggtgatgtcgctgctctcagatctcatcaaccttaacctctcagacactactgagaaggtgatcgcagagtacatatgatcggtggatcaggaatggacctgaggagcaaagcaaggactctcccaggaccagttagcgacccttcaaagcttcccaagtggaactatgatggttccagcacaggccaagctcctggagaagacagtgaagtga

SEQ ID NO: 166278 - DNA, 285 bp, Glycine max
ctagaacctctctcacacaatagcaaagaaaggaagactaaaactaaaaccccactctctttttccgagtcttccagtgaaagaaaggcagcgatggaagaagacttcgacatccccggcggcgaggaaatggatctcggcgaagacgaggtcggcgaggagagggagatcggctctggcggcctcaagaagaagctcctcaaggaaggtcaaggctgggaaacccccgaagtcggtgacgaagtccaagttcattacacggtgaatttgctcgacgggattaag

SEQ ID NO: 166279 - DNA, 314 bp, Glycine max
gccattcacaaggaatcatgcatcgtgatgtgaaaccacataatgtaatgattgatcatgagcagcgtaagcttcgccttatagattgggggcttgcagagttctatcatcctgggaaagaatataatgttcgcgtggcatcaagatatttcaaaggtcctgagcttcttgttgatcttcaagactatgattactctctagatttatggagtcttggttgtatgtttgctgggatgatattccgtaaggagccattcttttatggacatgataactatgatcaactggtcaaaatagctaaggtacttgggaca

SEQ ID NO: 166280 - DNA, 315 bp, Glycine max
agggtccttctacagagctggaattgctgagtttgtggccactttcttgttcctctacattaccatcttaactgtcatgggtgtcaacaggtcaccctccaagtgtgcctctgttggcattcaaggcattgcttgggcctttggtggcatgatctttgcccttgtctactgcactgctggaatttcagggggacacatcaacccagctgtgacctttggtctctttttggccaggaagctgtccctcacaagggcgctgttctacattatcatgcagtgtcttggagccatctgtggggctggtgtggtgaaggg

SEQ ID NO: 166281 - DNA, 310 bp, Glycine max
ccactccagaaaaaatggcggtgcctcttctctcgaagaagatcgtgaagaagaggctgaagaagttcaagaggcctcaaagtgacaggaagatttctgtgaagacaaactggcgcagaccaaagggtatcgattcacgtgttaggagaaagttcaagggatgcactttgatgccgaacattggttatgcttcagacaagaagacccgccactatctcccgaatggtttcaagaaatttgttgttcacaatgtgaaggatttggaactgctcatgatgcacaacaggacttactgtgctgagattgccca

SEQ ID NO: 166282 - DNA, 307 bp, Glycine max
gagaatccgaggcgaagagaagagaaaaattaagatggaggggaaggagcaggatgtgtcgctgggagcgaacaagttcccggagagacagccgattgggacggcggcgcagagccaagacgacggcaaggactaccaggagccggcgccggcgccactggttgacccgacggagtttacgtcatggtccttttacagagcagggatagcagagtttgtggccacttttctgtttctatacatcactgtcttaaccgtcatgggagtcgccggggctaagtctaagtgcagtaccgttgggattcag

SEQ ID NO: 166283 - DNA, 300 bp, Glycine max
gctagctaggttgaaaatagtttggttttgtagtaagtgaggtgaggtgccaaaatggtgaagataactcttggtactttcgatgactcttttggtgttgcctctcttaaggcttatttggcagagttccatgcaactctgattttcgtgttcgctggtgttggttcagccatcgcttacaacgagcttacaaaagatgcagccttggatccaacggggctggtggcagtagctgtggcccatgcatttgcactgtttgtaggtgtctccgtcgcagccaacatctcgggtggccatttg

SEQ ID NO: 166284 - DNA, 304 bp, Glycine max
gttttccattacggatcaatcagtttgatcgtggagccatgcagatcagcacacttgaaggcaatggaagtagccaaggaatctgggtgcttgctctcctatgaccccaaccttcgtctacctttgtggccatcggctgaggaagctcgtaagcaaatactgagcatttgggagaaggctgatttgatcaaggtcagtgatgcggagcttgagttcctcacaggaagtgacaagattgatgatgaatctgctttgtcattgtggcaccccaatttgaagttgctccttgtcactcttggggaac

SEQ ID NO: 166285 - DNA, 318 bp, Glycine max
tcaaccccaaccctaaccctaaccccagcccaagtggctcgtgcccccgtgacgcactcaaactaggtgtatgcgccaatgtgctaaacttggtgaacgccactttgggtcaaccaccagttaccccttgttgctcccttctcgatggtctcgttgaccttgaggctgcagtgtgcctttgcactgctctcaaagcaaacattttgggcatcaacctcaaccttccgatctcactcagcttgcttctcaatgtttgctcaaggaaagccccacgtgatttccaatgtgcctactaagcttatactataagtataacat

SEQ ID NO: 166286 - DNA, 315 bp, Glycine max
tcggcgatgactgcctccaaggatcgcgagaacttcgtctacatcgccaaactcgccgagcaggccgagcgttacgaagagatggtggaatcaatgaagaacgttgcgaatctcgacgttgaactgacggtggaggagcggaatttgctttctgttgggtacaagaatgtgattggtgctcgcagagcgtcctggaggatcctgtcttccattgagcagaaggaagaaacaaaagggaacgagttgaatgcgaacggaattaaggagtacagacagaaggtcgaatcggagctatcgaacatctgtaatgatgta

SEQ ID NO: 166287 - DNA, 307 bp, Glycine max
ggcgggcaatcatatcttgggcatgtttgacaagagaatcactgcttttgctgaagacaagtttcgaagagatgggattgatgtgaaaacaggatccatggttgttaaggtatctgagaaagaaatttccactaaagaactgaaaaatggagagattaagacaattccgtatggaatggctgtctggtcaactggtattggcactcgtccatttattaaagattttatggcacaaattggtcaggctagcaggcgtgccctagctacagacgaatggttgagagttgaggggtgcaacaatgtctac

SEQ ID NO: 166288 - DNA, 304 bp, Glycine max
gtataaatggggtgctctactatacacctcaaattcttgagcaggcaggtgttggttatcttctttcaaacctgggcctcggttctacttctgcgtcttttcttatcagcagcgtgacaaccttgttgatgttaccctgtatagctgtggccatgaggctcatggatatatctggcagaagaaccttgctgctgactacaatccccgtcttgatagtatcacttctcatattagtaatagggagtcttgtggaattggacagtactataaatgcttttatctcaacttcgagtgttattgtcta

SEQ ID NO: 166289 - DNA, 305 bp, Glycine max
agtgtcctttagtttgtgaaagaaacaactacaaacaatggccacttcactaaccctattcaaaacaacctttgttttcttcatcatcttcactctcctcacacaccaagccacggctgattgtgaagccgaatccaaaaacagttgcaacaacaaagagaaagccctacctctaaaaatcatagccatatttaccatcttagcctcaagcataattggcataaccctacccttagtgacacgttcagtccctgccctaagcccggaaaacgacctcttcataatcgtgaagtgcttcgccgccg

SEQ ID NO: 166290 - DNA, 301 bp, Glycine max
caatggtgttggtgtaagccatcctctgtaggtacttaagttttccagctgtgtgtctcctgactggaaagttcatcatccccacactaaacaaccttgctagcatttggtttatggctctatttatctccatcattttaactagcgtgctggagctccgatggagtggtgttaccatcgaagccctttggcgtaacgagcaattttgggtcattggaggtgtttctgctcaccttttcgccgtgttccaaggcctcctcaaagttcttggtggagtagacaccaacttcactgtgacagc

SEQ ID NO: 166291 - DNA, 301 bp, Glycine max
attctcctacaccgacaaaaaatggaactttcaccacaagaattcattatccgttccccactccccgatatcgcacatccccacacacctcccattgtactcttactgcttccaaaagttgtcacagttccatgaccgtccatgcctcatcgacggcgacaccagcgaaaccctcacctacgccgacgtcgatctctccgctcgccgcatctccgccggcctccacaaaatcggcatctgccagggtgacgtcatcatgctcgtcctccgcaactgcccgcagttcgcactcgccttcctg

SEQ ID NO: 166292 - DNA, 301 bp, Glycine max
cgcctccttcctcgccccgccgcccgatcccctatctgaaaatcccgtcgccgatcccaatcccattcccaccgacgaagaagaagaagacgtaattgcaggtatccgaaacgatttcgcggagattagtggcaagttcaagaacgggatcttcaaaatctccggtaataagacggtatccgaattcaccaagatcgcttccagtttccttcagcttggatccgaagaggaacacgatctcgacggtgtcctcggagatacagaggatgtggttgccttcgccagaagcgtagctttgcat

SEQ ID NO: 166293 - DNA, 288 bp, Glycine max
gctttggtgaatatgactgaagatgactggaggtggcacatgtatgacactgtcaatggtagtgactggctaggagaccacgatgccatccagtatatgtgtacggaatcacctagagcagtcattgagctagagaattacggattaccattttcccggacagaggatggtaaaatatatcagcgtgcatttggtggtcatagcttgcactatggagaaggtggtcaatcttaccgctgtgcatgtgctgctgatcgaactggacatgctttattgcacactctctat

SEQ ID NO: 166294 - DNA, 308 bp, Glycine max
tgcaacgcttgaattttgactgaagacaaagttagaaaaaaaaaacatgtcttgctccgtcgcggtttccaattcgccggtgttctctccttcttcttccctcttctgctcgaagccctccatcatctcttcttcgccggaatccctctccctctctctgtcgcatctcaaaccttcgaactcttctacgtcgtcgtcttgttcttcgccttctgctgctgctgcttcttcttctccttcttctccgtttcgacttcgccttcccaagcctcccaccgcgttctccgcgtcttctgctgcttctgctt

SEQ ID NO: 166295 - DNA, 308 bp, Glycine max
gttggaaagaaaccctagcaagcggaacaatggcagacgttgaggtcgatgtggcggctgcagcagcagcagggcagccgaagaagagaacgttcaagaagttcagtttcaggggcgtggatctcgatgcgcttctggacatgtccaccgatgaactcgtgaagatgttcagtgctcgcgcacgtagaaggttccagagaggcctcaccagaaagcccatggccttgatcaagaagcttcgcaaagcgaaaagagaagctccaccaggtgagaagccagaacctgtccgcacccacctccgcaacatg

SEQ ID NO: 166296 - DNA, 299 bp, Glycine max
cattgatgtattgaaggatgatatttctatagttaaagagctgcctaaagagttcagctggagcacaagagagtactatggcttggctattcgagaaacccgaatcaaggctgcgcctgtgcaagcatcagcccattggtatctggagaatgttttgcctgttctacagagttatggtattgctgcaatctctccattttctcacagactgagttttgacaacttgcctatggatattcaacacctacgctgtaaggtcaacttccaagctttaacctttgttcctcatatcagagcac

SEQ ID NO: 166297 - DNA, 312 bp, Glycine max
taaaagctcaaatccaaaccctaaaataccaccgccgttctcatctctcttcccagccctcacctcaacgctgcatcttcacgtcgtctcacgaggtgcatatagtagagagggaaaatgagtcgaggaggcgcagtagcagcagcgaagggaaagaagaagggtgctacattcaccattgactgtgcaaagccagtggaagataagatcatggacattgcttctctcgaaaagtttcttcaagagaggatcaaggtatttgaagtacttgacgaagaagtacttgaagaaacacaatgtgcgagactggct

SEQ ID NO: 166298 - DNA, 303 bp, Glycine max
tctggacaaggtttccggctgaaggatctaagattacgccgccgcatcaatcagtggagttccgctggaaggactactgccctatggtttttagacaattgaggaagctatttcaggtggatcctgcggattacatgttagctatatgtgggaatgatgccctcagggagctttcctctccagggaaaagtggaagcttcttctacttgacccaggacgacagatttatgatcaagacggtgaagaaatccgaagttaaggtgcttcttcggatgcttcgaagctactaccaacatgtttcga

SEQ ID NO: 166299 - DNA, 299 bp, Glycine max
cttaattaatattctctagtggtgcttcccaatcaatatcctttaattttgtctcaattcctttctttctcattcaccaatccatacttcattttgttaatttcttaatccaacaccaccaagatgccaactgacacatcatcagtttccggcggcgaaatcgtgtgtgtgaccggtgccggcggtttcatagcctcttggcttgtcaaacatctcttagagaaaggctacactgtgagaggaaccgtgagaaacccagatgatccgaagaatggtcatttgaaagagttggaaggagg

SEQ ID NO: 166300 - DNA, 300 bp, Glycine max
caaccgttcacaaatcttttctaagtgtagtaaaggagaggaaccgcgccaaccctctcttcttcttcttcttcttcaatccttttataacctttatagtttcattcttaatcgttgggaaaaatgttcatcgagaattttaaggtagagagtcctaatgtgaagtacaccgagactgagattcagtccgtgtacaactacgaaaccaccgaacttgttcacgagaacaggaatggcacctatcagtggattgtcaaacccaaatccgtcaactaccaatttagaaccaacacccatgtt

SEQ ID NO: 166301 - DNA, 304 bp, Glycine max
ctcctccactcatgtctggtcacggagaaacggcgtaacggaaggaatcacgtgacgtggatggctttagagcaggaggtgggtcagaataggaacacaaacggcgtggatggtggagacgagggagggaaagcgccgagactgcctcggtggacaagacaagaaattctggttctgatacagggaaagagagacgccgagaacaagttcaggagggggcgcaccgcgggtttggcatttgggtcgggtcaggtcgagccgaaatgggcatcggtatcttcctactgcagaaagcatggagtga

SEQ ID NO: 166302 - DNA, 309 bp, Glycine max
attcttcttcttcttcatctacattagtagttcttgttattcattattcttcatactcacacagcttcttctgggggcaaaaggggtcatttttcagatccgaggttgagctcctctacccatcatgatggagctcggatacctgaatcagggtcagccttctagaggaacaacaccacttgtcactcttccattgttgctttcaacacttgtgttcttctccactttcacacatgccttcttaacttctgtgtttccggaattgaatcctattagacctaggcactcacgtcttctcaggagtgctgt

SEQ ID NO: 166303 - DNA, 304 bp, Glycine max
ccttcttgatggccgttcaatcagggttcccttcatgacgagcaggaagaatcagtttattagggcttttgatggtttcaaagtccttggtcttccctacaagcaaggtgaagataagcgccaattcaccatgtactttttccttccagaaacaaaagatgggctgttagctttggctgagaagttggcttctgaatctgggttcttggaacgcaagcttcctaataacaaattggaagtaggagacttcaggatcccaagattcaaaatttcttttgggtttgaagcctctaatgtgctgaag

SEQ ID NO: 166304 - DNA, 299 bp, Glycine max
cacaaaacttgctatagcagtaagctataactcatttgaggctctgtgagaattgagaaatggctaaagatgttgaggttcaagagcaaggaggagagtactctgccaaagactaccatgaccctcctccagcacctttgttcgacccagaggagctcacacagtggtccttctatagagccctcatcgctgagttcatagcaacccttctcttcctttatgtcactgtgctcaccattattggctacaaaaggcagactgatacaacggtaggtggcacgactgtgatggggttggca

SEQ ID NO: 166305 - DNA, 297 bp, Glycine max
gtgagtttaaaccccaaccgtaggaagggcaggaaggcacgtgctgtgagtctggaccactccatgtggtttcacagacctttacgagctgatgactggatactatttgtgatctttagtcctactgccaataatgcacgtggctatgtcactggccaaatgttcaatcagaagggagagctacttgtatcagtggttcaagaaggtgtaatgagggaagttatttctgcaaagtcagccatcaaatctaatttgtgaaaatctgaatatgcatagaactagtggttttctttttag

SEQ ID NO: 166306 - DNA, 295 bp, Glycine max
cggctcgagggcttttgaaggatggggaactgatgagaacactgtcatagtaattttgggtcatagaactgtgtatcagaggcagcaaatcagaagagtttatgaggaaatttaccaggaggatcttgtgaagcgcctagagtctgagatcaaaggagactttgagaaagccgtgtaccgatggatactggaacctgcagatcgtgatgctgttttggccaatgttgccatcaagagtggcaaaaactacaatgtcattgtggaaattgccactatcctctccccggaagagctt

SEQ ID NO: 166307 - DNA, 285 bp, Glycine max
  unsure (1)..(285): unsure at all n locations
gcagcatcgttctatttggagcttcagatttcatccattagtgaagaactgctgaaaggcaaggtcagtngagttactggagtttgcaagagacttgatgatgaaagtgcagggaaaggcttggagattgaacaaatgatagaaagaatcggtttactggaaaaggaaattagaggactgaaggggcagctatctgcatacactccaacaattacttctttgaaagaggattttgcatctctagagcacacttactttcttttgaccaataaaacttttgccgta

SEQ ID NO: 166308 - DNA, 295 bp, Glycine max
ctaatccaacggtgcatcttgatttccgtggaacagtattgaacgttaagccttcaccagtagtggcagcttttatatccagaaggcccaatatggttaccagacagattctgaaaccggacgttattgggcctggggttaacatcttggccgggtggtccgaagcaattgggccatcagggttatccgatgacactcgtaaaactcagttcaacatcatgtcaggtacatctatgtcttgtccacacataagtcgaatctaagccttgttgaaagctgcacatccgcaatggag

SEQ ID NO: 166309 - DNA, 302 bp, Glycine max
cactttgctgccgtacctaatcggagagctcccgctgactgcgatcggatttcatggctcctaagaaagacaaggctcccccaccttcatccaagcccgccaagtctggtggtgggaagcagaagaagaagaagtggagcaagggaaagcaaaaggagaaggtgaataaccaggtgctgttcgatcaggctacctatgacaagctcctctccgaggcacccaaatacaaactcattactccttccattctctctgaccgtttgaggattaatggatcacttgcaaggaaggctattagggaa

SEQ ID NO: 166310 - DNA, 306 bp, Glycine max
  unsure (1)..(306): unsure at all n locations
aaccactcttcctctcctccaaattanaacacttatcatggatgttaagaaaggtgggtctgtagtacaagcacaagtgaagttgcagaagcataacgaaaaggagatgggcatgagaaaaggtccatgggcggttgaggaggacaccattctggtcaattacatcgccacacacggtgaaggccactggaattccgtggcacgatgtgcaggtctaaggaggagtgggaagagttgcagattaaggtggctaaactacttgcgcccagacgtgcggcgtggaaatatcacactccaagaacaaat

SEQ ID NO: 166311 - DNA, 291 bp, Glycine max
tcttctcttgcggctagggttttagcgcagttcttctagatttaaggaagatgggtaatgaaaaggttcacatcagtattgtggttattggccatgttgactctgggaagtccactaccactggccacatgatctacaagcttggaggcattgacaagcgtgttattgagagatttgagaaggaagctgctgagatgaacaagaggtctttcaagtatgcctgggtgcttgataagcttaaggctgagcgtgaaagaggaatcacaattgatattgccttgtggaagtttg

SEQ ID NO: 166312 - DNA, 290 bp, Glycine max
gaggttgtctctgttgatggcttcggccttgtttcagggcgcttccattggacctctgattgatttggctattgccattgatcctagccttattgttagtgcatttgtggcaacttctttggcttttgcttgcttctctgcggcagctttagttgcaaggcgtagggagtacctctaccttggtggtttgctttcttctgggctgtccattcttatgtggttgcactttgcttcctctctctttgggggctcaattgcactcttcaagtttgaggtaactagcaatgttg

SEQ ID NO: 166313 - DNA, 296 bp, Glycine max
atcattttcttactttcctctcacgctctgccacaaaactccgtctccgcaataacggaataaaaaaacaagtttaattactattatggcgccgagggatcataagacaagcaacgctaaggctaacggtaacggtaacagcggggtgaaggaggtgcattttcgtggagtgagaaagaggccgtgggggagatacgccgcggagatcagagatcccggcaagaagagccgcgtctggctcggaaccttcgacacggcggaggaggcagcgcgtgcctacgacgccgcagcacgag

SEQ ID NO: 166314 - DNA, 294 bp, Glycine max
attctttgttgcaatatcacaaacacctcgtccgtcacaatgcagctagctgtggcggccaacgctgtcgtttcaccgtcgccgttccgacctcatccccttctccggtcatccttctccggcgtctccgttaagctcactccccaatccataacgttttcacgcttgaagcccctcaccgtcttcgccgccaccaagaaggccgtcgctgtcctcaaggggacctccgccgtcgaaggcgtcgccactctcatccaagaagacgatggcccgacgacagtttctgttagcatc

SEQ ID NO: 166315 - DNA, 293 bp, Glycine max
cagcacaaagcgggttactgtctgttcaagctaccatctctctctctctttcttagtgcctccttgccagaagttaaaatggcccaagaaactttcctattcacatctgaatcagtgaacgaggggcaccctgacaagctctgtgaccagatctccgatgctgtgctcgatgcatgcttggagcaggaccctgacagcaaggttgcctgtgaaacctgcaccaagaccaacatggtgatggttttcggagagatcacaaccaaggccaacgtggactatgagaagattgtgcg

SEQ ID NO: 166316 - DNA, 297 bp, Glycine max
tcacacctcaaacccatttccttgatatcttagttatctaattacctcaattaatcccttaattgcaagcatcatggctgaggagaagcaccaccaccactttcaccaccacaagggcgccgatgtgcctggcgaggttgattataagaaggaggagaagcaccacaagcatcttgagcaccttggggaacttggtgctgcagctgccggtgcttatgccttgcatgagaagcatgaggccaagaaagacccagagcatgctcacaggcacaaggtagaagaggagattgcggcacc

SEQ ID NO: 166317 - DNA, 292 bp, Glycine max
ggaactctgcctttgtcgaattccagacgagcttcgaaatatcaaacgttgggaaacatcatagtcaccgtggtcggaactggggttctgggattgcccttcgcttttcggatcgctggatgggtcgctggatcgctcggggttgccatcgtcggcatgtccacctactattgcatgctccttcttgttgtgtgcagagaaaaattggcatcagaagaaccactaggggaatcaagcacttatggagacttgggttataggtcctttggaagcccgggtcggtagtttacag

SEQ ID NO: 166318 - DNA, 280 bp, Glycine max
agaccctgaccatctcgcaggtcgcggcgatcgcggcccacgaccagggggtgaacgtggagctggcggagtcctccagggccggtgttaaggccagcagtgactgggtgatggagagcatgaacaagggcactgacagctacggcgtcaccaccgggttcggtgctacctcccaccggagaaccaaacagggcgctgccttgcagaaggagctaattaggtttttgaatgctggaatatttggcaatggtacagagtccaattgcaccctactccacac

SEQ ID NO: 166319 - DNA, 289 bp, Glycine max
gtgagtactctgaaagagagggttacaagggttctgaatatgcacctacatatgaagacaaagatggtgactggatgctagttggagatgttccatgggacatgtttatgacttcctgcaaaaggctaagagtcatgaaaggctcagaagctagagggttgggttgtggtgtgtgacaaacagttaatttactatggctatgatgaggagattaaatcattctttcatcaattcagttcttggaactaagggattttgaatcaatgcttagctatctgtctatctatca

SEQ ID NO: 166320 - DNA, 281 bp, Glycine max
gtgctttgtttaggtgaactaattcggagaccttgcaagacttcatcaatggctgtcaaagtttatattgtgtactactccatgtatgggcatgttgagaaactagcagaagaaataaagaaaggggcttcctctgtggaaggtgttgaggccaagttatggcaggtacctgagacactgctggatgaggtgcttggtaagatgagtgcaccacccaagagtgacgtaccagtcattacccccaatgaactatccgaggctgatggctttgtattcggctt

SEQ ID NO: 166321 - DNA, 288 bp, Glycine max
atttatcaactcactcatcaatctcgtttgttctcactaactattacttcatcatgtcgtcgagcacagttggtcaagtcatcaaatgcaaagctgcggtttcatgggaggcagggaagccacttgtgattgaagaagtagaggtggcaccaccacaagctggtgaagtgcgtttgaagatcctctacacctctctttgccacactgatgtttacttctgggaagccaagggccaaactccattgtttcctcgtatatttggtcatgaagctggagggattgtggaga

SEQ ID NO: 166322 - DNA, 290 bp, Glycine max
tatcaactcactcatcaatctcgtttgttctcactaactattacttcatcatgtcgtcgagcacagttggtcaagtcatcaaatgcaaagctgcggtttcatgggaggcagggaagccacttgtgattgaagaagtagaggtggcaccaccacaagctggtgaagtgcgtttgaagatcctctacacctctctttgccacactgatgtttacttctgggaagccaagggccaaactccattgtttcctcgtatatttggtcatgaagctggagggattgtggagagcgta

SEQ ID NO: 166323 - DNA, 289 bp, Glycine max
atctcagaattctctaaaagagatctttttctgctctttgaagaaagaagggtctttgcttgattttggagatgtctctgctctcagatctcatcaaccttaacctctccgataccaccgagaaggtgatcgcagagtacatatggatcggtggatcaggaatggacctgaggagcaaagcaaggactctcccaggaccagttagcgacccttcagagcttcccaagtggaactatgatggttccagcacaggttaagctcctggtgaagacagtgaagtgattttata

SEQ ID NO: 166324 - DNA, 299 bp, Glycine max
caatgatgggagacagaaaaagaaacatgaattagggggtatagaagactggagaggtataacagaatagtgggacagtgggagtgaattggtggcattatggcataggcctgggaaggttcttttggaactgtacatcatgcagagtggaatggctcggaggttgctgtgaaaattctgatggaacaagacttcaaaggtgaacgcttcaaggaattcctgagggaggttgcaataatgaaaggcttacggcatccaaacgattgtttacttatgggtgcagtcactaagcctcctaa

SEQ ID NO: 166325 - DNA, 277 bp, Glycine max
cacactcctcccagggtttctccaccaagagggaaatggctcccaaaccgcctagtacgggtctgtttgttggactgaacaagggacatgtcgtcaccaagaaggaattgcccccacgcccctcggatcgtaaggggaaaacaagcaagagggtgcactttgtgaggaacctcataagagaggttgctggttttgcaccctatgaaaagcgtataactgagttgctgaaggttgggaaggataagagggcacttaaggttgcaaagagaaagcttgg

SEQ ID NO: 166326 - DNA, 278 bp, Glycine max
gacagatctcagattctgtacgctaacacagagagagagtgagagagatatggcaacgacgtcgtcttcaagcgaggaagcaccgaacactaagaagaacaagaaggagtgtttaggttggatagaatggttaagaggttggttctatgtggtctacgaaatgctctttcagcgcatcatggcgagtcatttgcacaaccccatgcctctccctcccgtcaacgacctcacctgcattgtcaccggctccaccagcggcattggcctcgaaatcgcaa

SEQ ID NO: 166327 - DNA, 276 bp, Glycine max
gagacagtgaacccaaaagcttaccctttggccgatgcgcaactcgcaataacaatactggatcttgtgcaacaagctgccaactacaagcaactcaaaaagggtgctaatgaagcgaccaagacactgaacagaggcatctctgagttcgttgtgatggccgcggacactgagcctcttgagattcttctccatcttcctctcctagctgaggataagaatgttccctatgtattcgtcccatcaaagcaagcccttgggcgagcatgtggagtc

SEQ ID NO: 166328 - DNA, 279 bp, Glycine max
ctcatggaactgttctctgagtttggtacgataacctcatgcaaggttctgcgagatccaaatggaattagtagaggatctggatttgtttcattttcaattgctgagggagcaactcgggctcttggtgagatgaatggtaaaatggttgctggcaaacctctctatgttgcccttgcacagagaaaagaagatagaagagcaaggttacaggcacaattttcacaatcgaggcctgctgcaataacccctaatgtttcacctcgaatgcctctatac

SEQ ID NO: 166329 - DNA, 268 bp, Glycine max
gcgatggacctcggaacctatgaagtgccagaaggagtggacattctaggaagatacgatgcagagtttgcaaaaatcctcacaaaagacgctttgaaattcgttgctgagctgcaacgtgagttcaggagcgatatcaagcatgcattagagagcagaagagaggcaaagaagaagtacaatgaagggactcttccggggtttgatcctgccaccagtcacattagagaccaggagtggctgtgtgcacctgttccagcagctgctg

SEQ ID NO: 166330 - DNA, 268 bp, Glycine max
gacttaaactgatgtgcgagtctgtactttgcaaagacatctccatagattctgttgcctatattctggctcttgctgatcgttatcgtgctacagaattgaagtctgtctgtctacaattttctgctgaaaaccttgtcgctgtgatgcaatctgatggttttgagtatcttaaggaaaattgtcccttgctgcaatcagaactgctaaagactgtggcaggatgcgaggaggaatttagtggagaaggaaagtgtcgaagtgtgtg

SEQ ID NO: 166331 - DNA, 279 bp, Glycine max
caaaaccaatcggatcgtttcctctgcggagtcagaaatccatggatccctacaagaatcggccatcaagcgccttcaattctcccttctggactactaattccggtgctcccatctggaacaacaactcatcgctgactgttggatctagaggtccaattctgctggaagattaccatctggtggagaagcttgcaaattttgacagggaacggatccccgaacgtgttgtccatgctcgtggagctagcgcaaagggtttctttgaagtcacgcatg

SEQ ID NO: 166332 - DNA, 278 bp, Glycine max
caccaatctccaaccttcttctccactgttccgtttctctctccaacggagagtcttttgtcttttgtggcgagtttgttgcacgtttaagaagcaatggcacgcaagacgatcagagagtatgcctcaaagaggttgttgaaggagcactttaagagaatctctggccaggagttgcccatcaagtctgcacaggttacagaatccaccaatttcagtgagctagcagagaaggaaccctggcttttatcttcaaaattggttgtgaaaccagacat

SEQ ID NO: 166333 - DNA, 281 bp, Glycine max
ctgaagcgcaagatgaccggaaacctctcccgctacgaccacatcgccgttgtcgacgtctacaagctcgagccctgggaccttccccgttagcacacaattatcttcttccttccccttttttgtggtctcaatagataggcttttgagaattttggaactgttttaatttgtttcggtgtttcagctctgtcgaagcttaagacgaaggacttggaatggtacttcttcagcgcgctggaccgcaagtacggaaacgggtcgaggacgaaccgcgccac

SEQ ID NO: 166334 - DNA, 275 bp, Glycine max
cttctttccaaatcccaactactactcacactcactgcagatctcaatccatggctaccatcgttagcatcaaggcccgccagatctttgacagtcgtggcaatccaaccgtcgaggtggatttgacatgctccgatggtacttttgctagagctgctgttccaagtggtgcatccactgggatttatgaggcccttgaattgagagatggaggatctgactaccttggaaagggtgtatcaaaggctgttgacaatgtgaccaccattattgcc

SEQ ID NO: 166335 - DNA, 270 bp, Glycine max
ctgagaatcagcttacttctgatttggttgaagattggatactgaataacccagaggcctccatttgcactccagaaggaataaatgatttcagggcaatagctaactttcaggattatcatggtctacccgagttcagaaatgctgtggctaaattcatgggtagaacaagaggaaacagagtcacgtttgatcctgatcgtattgtcatgagcggtggagcaactggagcacacgaagtcactaccttttgtttggcagaccccggtg

SEQ ID NO: 166336 - DNA, 268 bp, Glycine max
ctcgagccgctcctatgttctatctgagtccagcctctttgtttatgcctacaagatcatcatcaaaacctgtggtactactaagctattgcttgcaatcccacccatattgaagttcgctgaaatgctttcccttaatgttaagtctgtgaattacaccaggggaagtttcattttccccagtgctcagccatatccccatcgcaacttttctgaggaagttgctattcttgatggctactttggcaaacttggtgcaggaagcaat

SEQ ID NO: 166337 - DNA, 252 bp, Glycine max
ccctcgagccgctcgagccggctcgagcacacacacatactaagaagccacaattcttctacaaacgatctccaccttctggaaaagaccctcataggtctcttcctcgctgcggtggtcgccatcgccgtctccaccctccgcggccggaaattcaagctcccaccgggcccactccccgtcccaatcttcggcaactggctccaagtcggcgacgacctcaaccaccgcaacctcaccgatttggccaaa

SEQ ID NO: 166338 - DNA, 273 bp, Glycine max
ccgaactcgaaaaggcgcgtcaatggaaggggttcgaacttataccttccgaaaatttcacgtcgctgtcggtgatgcaagcagttggatcggtgatgacgaataaatacagtgaaggatatcctggtgctagatactatcgaggaaacgaatacattgacatggctgagaccttgtgtcagaagcgtggacttgaagcttttcagctggatccagcaaaatggggagtcaatgtgcaatcattatctggatccccttctaacttccaagttt

SEQ ID NO: 166339 - DNA, 277 bp, Glycine max
cactcattaattgcaagaatggcacttcgttgcttggtgatgtccctttctgttctcttcactcttggtcttgcgagagaaagccatgccagagacgaagccttttggcatgctgtttggccaaacactcccattccaagttcattgcgagatcttctaaagcctggccctgcaagtgttgaaatcgatgatcaccctatgcaaattgaagaaacacagtacccgaaaaccttcttctataaagaagaccttcatccaggcaaaacaatgaaagtac

SEQ ID NO: 166340 - DNA, 279 bp, Glycine max
ctcatggaactgttctctgagtttggtacgataacctcatgcaaggttatgcgagatccaaatggaattagtagaggatctggatttgtttcattttcaattgctgagggagcaactcgggctcttggtgagatgaatggtaaaatggttgctggcaaacctctctatgttgcccttgcacagagaaaagaagatagaagagcaaggttacaggcacaattttcacaatcgaggcctgctgcaataacccctaatgtttcacctcgaatgcctctatac

SEQ ID NO: 166341 - DNA, 277 bp, Glycine max
caaattctctgtgttgtgttgtgtacttgtgttaattgtgttgttgttgtaggaaatttaagtgaagagagaatgatgatgaagtctgctatgtgtgcattggtgcttgtggcactggttgtggttgaagtggggcccatggctgaggctgcggtgacttgcaacccaacacagttgactccttgtcttccggcaattaattcaggttctgcaccttcgagtgcttgttgccagaagctgaaggagcaaaagccatgcttctgtggctacctcaaaa

SEQ ID NO: 166342 - DNA, 278 bp, Glycine max
actcgagccgaatcggctcgaggcaaaaggaggcctggtgaagtgacaccacctcatgaacatgctgtcgttggaagagctgcaaaccatttcttacagaagcacgacagtgacttaatggttattgatgttcgatgtgttccatctgattttcatgcaagatttaaagcgcaagagcgcacatacttctatcggttgctttctgggccagagcctttgtcaaccttcgagaaagatcgagcatggcatgtacctgaggagcttagtcttccagctat

SEQ ID NO: 166343 - DNA, 263 bp, Glycine max
ccccccggcggtgacgattcacctttcgccggaatcgccaacaagctcggctccgccattcgcaaatcgcgaatcgccctcgaacctcctcctccgatacggtggcgcaagggcgagttgatcggttccggcggcttcggtcacgtctacatgggaatgaacttcgactccggggagcttattgccatcaaacaggttttaattgcacctggtagcgtattcaacgagaatacacaggctaatattcgggagctcgaagaaga

SEQ ID NO: 166344 - DNA, 274 bp, Glycine max
tttcattttccctcactttctcgctccccaaacgcccctctctctcctccaatggccgaccagctcaccgacgaccagatcgccgagttcaaggaggccttcagcctcttcgacaaggacggcgatggttgcattactaccaaggaacttgggactgttatgaggtcacttggtcaaaacccaactgaggcagaactgcaggatatgataaacgaggttgatgctgatggcaacggaaccatcgatttcccagagttcctcaacctgatggctc

SEQ ID NO: 166345 - DNA, 278 bp, Glycine max
cgtactatcgtaccaaaatcttccataaataagaccaaccaacctgaagtcatatccgtgctaaatgatatgtgtaatgatcctaaaaatactgtgttcattgtgagtggaaggggaagagattctttaagtaagtggtttacttcatgcaaaatgattggacttgcagccgaacatggatactttctaaggtggagtaaagattctgaatgggaaaccagtcccttgtctcctgatcttgattggatgaagattgtggaacctgtcatgcagttgta

SEQ ID NO: 166346 - DNA, 278 bp, Glycine max
catctttctctcttctctctccacccaaaccctaactcccgaccctgttcccctctcgtatccgtcatgaaaggaggaaagtccaagaccgaatctaagagagccgatcccaaacttgctgtgaataagaagggagccgccaccaaggctaggaaacccgccggcaaggggaaggcagcgaaagatcctaacaagccaaagaggcctccaagtgctttcttcgttttcatggaggagttcaggaaggtattcaacaaagaacatcctgaaaacaaagc

SEQ ID NO: 166347 - DNA, 271 bp, Glycine max
ggcagaaatgataaacagtctttgtggtggtgatgaaaaattgatgcgtgaaaggacacacctgctgttggcttgttgttcaaggatggcaatttgtaagacagatgtttggagagttgaatgtggaatcccttctggatttccgctcacagttatttgcaatagcatttttactgagatgctcattagatatagctatgaaaaattactgcgccaggctaaagccccaagtatgtttttacaatccttcaaaaattttgtttctttgtgt

SEQ ID NO: 166348 - DNA, 273 bp, Glycine max
caaaaccaatcggatcgtttcctctgcggagtcagaaatccatggatccctacaagaatcggccatcaagcgccttcaattctcccttctggactactaattccggtgctcccatctggaacaacaactcatcgctgactgttggatctagaggtccaattctgctggaagattaccatctggtggagaagcttgcaaattttgacagggaacggatccccgaacgtgttgtccatgctcgtggagctagcgcaaagggtttctttgaagtca

SEQ ID NO: 166349 - DNA, 272 bp, Glycine max
ggctgttctaacagcagaagaagctagactctccaatgggctcatgggtactgcaaaattggtggctaaatacaggccaggcatgccaattctttctgtggttgttcccgagcttaagaccgatacctttgactgggcatgcagtgatgaggcccctgcaagacatagccttatattccgcggcttggttcccgtattgagtgcagcttctgctagagcctctcatgctgaaacaactgaagaagcaatagaattcgccatgcaacatgcca

SEQ ID NO: 166350 - DNA, 272 bp, Glycine max
catctttctctcttctctctccacccaaaccctaactcccgaccctgttcccctctcgtatccgtcatgaaaggaggaaagtccaagaccgaatctaagagagccgatcccaaacttgctgtgaataagaagggagccgccaccaaggctaggaaacccgccggcaaggggaaggcagcgaaagaccctaacaagccaaagaggcctccaagtgctttcttcgttttcatggaggagttcaggaaggtattcaacaaagaacatcctgaaaa

SEQ ID NO: 166351 - DNA, 272 bp, Glycine max
cagcttgcacctattggtatcttctacaatatcctaaagtgtttttcttcttcttcatcaccatgtctttactttcagacctcatcaacctcaatctctcagaatccacagaaaagatcattgctgagtacatatgggttggtggatctggtatggacctcagaagcaaagccaggactcttcctgggccagtgagtgaccctgcaaaacttccgaagtggaactatgatgggtctagcacagatcaagctccaggggatgacagtgaagtc

SEQ ID NO: 166352 - DNA, 274 bp, Glycine max
aaaaaaaaggacattcattcatctatggctacccttattgctcccagcaaccactctccccaagaagatgctgaagctctcagaaaggcttttgaaggatggggaactgatgagaacactgtcatagtaattttgggtcatagaactgtgtatcagaggcagcaaatcagaagagtttatgaggaaatttaccaggaggatcttgtgaagcgcctagagtctgagatcaaaggagactttgagaaagccgtgtaccgatggatactggaacctg

SEQ ID NO: 166353 - DNA, 274 bp, Glycine max
attcgctagatccgagcatggtgaagggtaagatagtgatctgtgatagaggaagtagtccgagggttgcaaaggggttagtggtgaagaaagccggcggcgtggggatgattctcgccaacggaatctccaacggtgaaggactcgtcggagacgctcatcttctcccagcatgcgctgttggtgccaacgaaggagacctaatcaagaagtacatctcctcttcaaaaaaccccacagccactcttgatttcaaaggcactatcttaggaat

SEQ ID NO: 166354 - DNA, 276 bp, Glycine max
  unsure (1)..(276): unsure at all n locations
gcaggatctatctcagccaaagtcagaagttagtccaccagaaggattgctgngcagttcctcttttaagacatcancagaattgctttatcatggatggttcaaaaggaaacatcaagtttatattgctcaggaggaattcttgcagatgatcagggacttggaaaaacagtatcaactattgcattaatattaaaggnnagacctccattcacttaatgggtgcaccaatgcccganaaagtgaattggnaactctgaatctggntgtggatga

SEQ ID NO: 166355 - DNA, 274 bp, Glycine max
gtagaactgaacaagggtttctctttctctttctctgtctgcttcttcactttctctcgtttcaatcgaaaaaaatcatgggcagaaaattcttcgtcggtggcaactggaaatgcaatgggaccactgaggaggtgaagaagattgttactactttaaatgaagctaaagcccctggagaagatgttgtagaagttgttgtgagccctccttttgtgttccttccttttgtaaaaagtttgctgcgcgctgatttccatgtctcggcccaaaa

SEQ ID NO: 166356 - DNA, 268 bp, Glycine max
caccacttggttttcataacccattctccatctcagaatggagaatgcgagaataagccagtggttgatccttctggtgtgtgcgctgctgttgctgatatcagaagcttcttatgtgccaatcactattcctcagaacgcggtagcaaaaggagctgtttgtttggatgggagtccaccaccttatcatttcgataggggatttggatcagggattaacaattggttggttgcatttgaggcgaggaggatggtgcaacaatgtcac

SEQ ID NO: 166357 - DNA, 264 bp, Glycine max
ggaactcacacagtggtccttctacagggctttgattgctgagttcattgccacaatgctcttcctttacatcacactgctcactgtgattggttacaagagccagagtgatgtaaaggctgggggtgatgtgtgtggtggagttggcattcttggcattgcttgggcctttggtggcatgatcttcattctggtgtactgcactgctggaatctcacggggtcacataaacccagcagtgacattcgggctcttcttggctcg

SEQ ID NO: 166358 - DNA, 271 bp, Glycine max
cggtgctgggcccatcagggagcggaaaatcgacgctccttcacgcgctcgcagggaggctccatggacccggcctcaccggaacaatcctcgcaaactccagcaaactcaccaaaccggttctccggcgaaccggtttcgtcacacaggacgatattctctaccctcacttgacggttcgcgagacgctcgtgttctgcgcgatgctgaggctcccgcgcgcgatcctgcgctcggagaaggtagcggcggcggaggcggcgatcgcgga

SEQ ID NO: 166359 - DNA, 271 bp, Glycine max
gattttggcttggcaaaagatggtcatctatagagatttcaaagcttcaaacatcttgttagactcggattataatgcaaagctttctgattttggcttggcaaaagatggtcccgaaggagatgacacacacgtttcaactagagtcatgggcacacaaggctatgcggccccagaatacatcatgacaggacacttgacagcaatgagtgatgtgtacagttttggagttgtgctcttggagcttctaacaggaagaaggtcagtggac

SEQ ID NO: 166360 - DNA, 244 bp, Glycine max
ggcctattcccttcacagacagaacccccttctcccaaggctgtttgcagttgtggacgacattttctgtttgtttcaaggtcaccttgagaatgttgccaaccttaagcaacaatatggattgaacataacagcaactgaggtgatcattatcatagaggcatacaggactctaagagatctggtccctatcctgctgctcaggttgtgagagatttccaaggcaaatttgcatttattctgt

SEQ ID NO: 166361 - DNA, 244 bp, Glycine max
tgataactcgtcggatcgcacggcctttgtgccggcgacgcatcattcaaatttctgccctatcaactttcgatggtaggatagtggcctaccatggtggtgacgggtgacggagaattagggttcgattccggagagggagcctgagaaacggctaccacatccaaggaaggcagcaggcgcgcaaattacccaatcctgacacggggaggtagtgacaataaataacaataccgggctcatt

SEQ ID NO: 166362 - DNA, 234 bp, Glycine max
gtggttggaaataccggcaagaagtttgagaaagttctcgattttcttggcttggtggagaaacttttctatctctcgggaaaatatgaaattgagctgactgttggtgatgctgtcatggagaactctttcttacggctacttggccatgttgaattagatcttccagaagcactgagaaagcaccccgtcctccaccaccacctgttgatccttactcaagatatgggccca

SEQ ID NO: 166363 - DNA, 247 bp, Glycine max
gcgtacggcacactgatactggtccagatcgtacggcctttgtgccggcgacgcatcattcaaatttctgccctatcaagtttcgatggtaggatagtggcctaccatggtggtgacgggtgacggagaattagggttcgattccggagagggagcctgagaaaacggctaacacaatccaaggaaggagaaggcgcgcaaattacccaatcctgacacggggaggtagtgacaataaataacaata

SEQ ID NO: 166364 - DNA, 225 bp, Glycine max
acctcactcaaactcgggatcacagaaaccaacaacagttcttgcactgaggtttcacgatgttgctggaacttgcacttggtttgtctgtgttagctttgtttctgcacttgcgtcccacaccaagtgcaaaaccaaaagcacttcgccacctcccaaaccctccaagcccaaagcctcgtcttcccttcattggccaccttcacctcttaaaagataaacttc

SEQ ID NO: 166365 - DNA, 224 bp, Glycine max
gaccgacagttggattgtagtggaaaagatgaaatgagagaattattatgtgtctataataatagttattgaaagttgtgaggaaggaggaggatggtgtccccgatgtcaacggttctggtgacgggaggggcaggcttcatcggatcccacacggtgcttcagttctgaagcagggcttcagggtttccatcatcgacaaccttgacaattccctcatcgaa

SEQ ID NO: 166366 - DNA, 217 bp, Glycine max
ctagaacgaaaaaaaaaaagaagagcaattttccctcaccaaagaagaagaagcaaacaatggccgatcaacttaccgatgaacagatctccgagttcaaggaagccttcagcttgttcgacaaggacggcgatggttgcatcacaaccaaggagcttggaactgttatgcgttcattggggcaaaacccaactgaggcagagctccaggacatgat

SEQ ID NO: 166367 - DNA, 246 bp, Glycine max
ttcggctcgagcgacaattagggtttgtagtgtagcaggaagaagcagcaatggcgccgaagataacacgtaaggttagcagaaaccctgaattgataaggggaatcggaaagtactcgaggtcgcagatgtaccacaagaggggcatttgggctatcaaggccaaaaaccgtggcgttttacctcgccacgaccctaaacccaagcctgaagctcctgctgaaaaaccacccaaattttaccctg

SEQ ID NO: 166368 - DNA, 247 bp, Glycine max
gaggatttgggattgggaaggcgagggattgcgctgcgtctcttcctcttctctttcgattcatccctcattcataattttccaatccaacaacctcagcctcatactcacacatacacacatctgaacgcgtatcgtccctcccatggcttcaaagcgcatcctcaaggagctcaaggacttgcagaaagacccaccaacttcttgcagcgctggtccagtagctgaggacatgttccattggcaa

SEQ ID NO: 166369 - DNA, 242 bp, Glycine max
aaggtggctactgacaattcaagaacaacatgtgaataatggagaccaacaacaacctcaacctcatcttcgctaatcctcaagattcactgtggatgatgaatttgaggactggggaaacaatggattctggatcttatccggagcctccaggggagccagattgctcatattacatcagacacgcctttgtagatttggtgcaacatgtcgatttaatcatcctcctaacaggaggctgg

SEQ ID NO: 166370 - DNA, 241 bp, Glycine max
cactcactcgcaagcaaaaagaaagaatcccaggcgaggagaaagatggaggggaaggagcaggatgtgtcgttgggagcgaacaagttccccgagagacagccaattgggacggcggcgcagagccaagacgacggcaaggactaccaggagccggcgccggcgccgctggttgacccacgagtttacgtcatggtcgttttacagagcagggatagcagagtttgtggccacttttctg

SEQ ID NO: 166371 - DNA, 238 bp, Glycine max
ccaacagcatcggcggcgacagtcactctccgacaacaacacttccgcggcgaaaaatgtctctggtggcgaacgaggatttccagcacattctgcgtgtgctgaacaccaacgtggatgggaagcagaagataatgttcgctatgacctccatcaagggtattggaaggagattcgccaacatcgcttgcaagaaggccgatgttcacatgaacaaaagggctggtgagttgcgtgc

SEQ ID NO: 166372 - DNA, 233 bp, Glycine max
tgataactcgtcggatcgcacggcctttgtgccggcgacgcatcattcaaatttctgccctatcaactttcgatggtaggataagtggcctaccatggtggtgacgggtgacggagaattagggttcgattccggagagggagcctgagaaacggctaccacatccaaggaaggcagcaggcgcgcaaattacccaatcctgacacggggaggtagtgacaataaataacaat

SEQ ID NO: 166373 - DNA, 234 bp, Glycine max
ctaacgtgcaagttccaaggcggagaaaacaataatggccaccaacgaggagagggatatggagaacaagaagagtgaggaagaactgaagcatctcgggtttgtgaagattgcggcaatgaaagccttagtgtgtgtgtcgaatctctacggcttcgcaaagcaaaactcgggattttgagatctgctgttggaaccgtggaagacactgtaaccaccgttctgggtcccgtc

SEQ ID NO: 166374 - DNA, 235 bp, Glycine max
caaaaccaaacatgtcgaacacatgcggcaactgcgactgcgctgacaagactagctgcaccaagggaaacagctatggtgttattgtagagactgagaagagttacatcgagactgttgtcatggatgttccagcagctgagcatgatgggaagtgcaagtgtggcactaactgcacttgcacggactgcacctgtggccattaaggaatatgtatgacaatgtaattgccatg

SEQ ID NO: 166375 - DNA, 231 bp, Glycine max
agcaactccagccaatattgcaagctggctagtgactggaatgatcttcaattactttgtgttccgctacaacaaacgctggtggcagaagtacaattatgtactatcagcagcactggatgcaggcacagcttttatgggtgttttaatattctttgccctgcaaaatgctggccataatctcaaatggtggggaagtgaattggaccattgcccattggccacttgccc

SEQ ID NO: 166376 - DNA, 232 bp, Glycine max
gcagtggtatgcctgagtgtaaacttggattaaatgatagagtattattagaggcacaaggtagaacaaccaagggaaaatcaattgacttggaagacatcaaatttcatcagtgtgtgcgtttggcccgatttgagaatgatcgaacgatttcatttatccctcctgatggtcatttgatttaatgacatataggctcagtacacaggttaagcctttagtttgggtggaa

SEQ ID NO: 166377 - DNA, 238 bp, Glycine max
gttggtgtgggataccattgtctttaaaaaaattcgtgatgctattggaggccgcctccgttatatgctttgtgggggagcccctttatctggagattcacagcactttatcaatgtctgcatgggggctattattgggcaagcatatggcttgactgaaacatttgcaggggctgctctctgaatggtatgaccgcaaggtggggcgtgttggtccacctcttccttgttcctacat

SEQ ID NO: 166378 - DNA, 236 bp, Glycine max
gacagacctctatggttcccaggcagcacccctcctccatggcttgatggcactctacctggagacttcggctttgaccctcttggtcttggatctgacccggagagtctgagatggaatgttcaggcagagctagtgcactgcagatgggcaatgttgggtgctgctggcatttcattccagaattcctaacaaagattggtgtcttgaacactccttcatggtactcagctgga

SEQ ID NO: 166379 - DNA, 231 bp, Glycine max
agtccccatctcaactctctcgttgttgttgctgcatttttcattttctaggcttagtcattagatagaaagagaaggaaaaaaaggctattatggcaggaggaggagctccagctaaagcagatgagccacagccacatccaccaaaggatcagttaccaaatatttcttactgtattactagtcctcctccatggcctgaggccatacttcttggttttcaacattttc

SEQ ID NO: 166380 - DNA, 232 bp, Glycine max
tgggattctagttccaggaggttttggtgacagaggagtggaaggaaaaattcttgctgccaagtatgctcgagaaaataacattccatatctgggcatttgcttggggatgcaaattgctgtcattgagttttcaagatctgttctgggtcttcatgatgctaatagcacagaatttgatcccaaaaccgaaaacccttgtgtcatatttatgccagaaggttcaaagact

SEQ ID NO: 166381 - DNA, 232 bp, Glycine max
tgggattctagttccaggaggttttggtgacagaggagtggaaggaaaaattcttgctgccaagtatgctcgagaaaataacattccatatctgggcatttgcttggggatgcaaattgctgtcattgagttttcaagatctgttctgggtcttcatgatgctaatagcacagatttgatcccaaaaccgaaaacccttgtgtcatatttatgccagaacgttcaaagactc

SEQ ID NO: 166382 - DNA, 231 bp, Glycine max
caagaaagaatcccaggcgaggagaaagatggaggggaaggagcaggatgtgtcgttgggagcgaacaagttccccgagagacagccaattgggacggcggcgcagagccaagacgacggcaaggactaccaggagccggcgccggcgccgctggttgacccgacggagttacgtcatggtcgttttacagagcagggatagcagagtttgtggccacttttctgtttctc

SEQ ID NO: 166383 - DNA, 233 bp, Glycine max
cctgccagtagtcatatgcttgtctcaaagattaagccatgcatgtgtaagtatgaactaattcagactgtgaaactgcgaatggctcattaaatcagttatagtttgtttgatggtatctactactcggataaccgtagtaattctagagctaatacgtgcaacaaacccgacttctggaagggatgcatttattagataaaaggtcaacacaggctctgcctgttgctttg

SEQ ID NO: 166384 - DNA, 232 bp, Glycine max
cacacacactctcatagctgtagcggcgacactaagatcggagaaagaatggcgaaaacgacgtcgttgctgctctttacactgctcctcttcggaaccctagctctcatccaggcgaagaaatcgaaggaggatttgaaggaggtgacccacaaggtttactttgatgtgagattaatggaaaagaagcaggtcgtattgtaatgggtctttatgggaaggctgttccaaa

SEQ ID NO: 166385 - DNA, 226 bp, Glycine max
gcttcggctagggttcagaaacgaaaaagggttcggtgttctgttcgcgatgagagccaagtggaagaagaagcgtatgaggaggttgaagaggaagcgccgaaagatgagacagagatccaagtagtgcgttaaacctagtttgtttctgttgcttttacaattgttatgttgtcgaatgggacacccagttgttagtggcactggtttctcctttttgatgttt

SEQ ID NO: 166386 - DNA, 266 bp, Glycine max
acgaaacgtgctgtgttcaaaatgcaatgggaagggctcaaagtctggggcttcaatgacctgtgctggttgccagggtactggcatgaaggtgtctattaggcaccttggtccttctatgattcagcagatgcagcatccttgcaatgagtgtaagggtactggagagacaatcaatgacagagacaggtgccaacagtgcaaaggcgagaaagttgttcaggagaagaaagtacttgaagttgttgtggagaagggaatgcaga

SEQ ID NO: 166387 - DNA, 258 bp, Glycine max
ccgtaggggacaataataagaagtcttggccaagagatgctagaatgaggcttatgacgcatgatgtcaatcttagaaggactgtcttctgggatatgaagaatcgccttcctcgaagcatcacaacattggagtgggagaacagttttgtatctgctgacagcaaggataatccaaacttgcttttcagcatgtgtggatttcaagtgaggatacgtcctagaattagaatgactcaagaagcattgagtcacacaa

SEQ ID NO: 166388 - DNA, 263 bp, Glycine max
actatgccccctttgcgtctgatctcaaaggccttggtgaactcgatattagctttaagctgggtaccccattcaaaccatttgaccagcttctaggggtctttcctgctgcaagctctcatgcacttcctgagccgtataggagacttatgacggatccaaactcaccaatcattgatttttatccaattgactttgaagtggacatgaatggcaaacgctttgcttggcagggtattgctaagttgccatttattgatgaa

SEQ ID NO: 166389 - DNA, 264 bp, Glycine max
cctcgtgccgaatcggctcgatcctattcttatgcaagtgtattcacacaagtctgtaccagacagtgtcgtctggccaatggctgtgattgccacacttgctgcaatgattgccagctaagcaatgatatctgctacattggcatgcataaagcaatctatggctttgggatgcttcaccaggctcaagatcattcgcacctcttaaatgttcattggccacatgtacatcctcatcatgaactggtttctgatgaccatgtg

SEQ ID NO: 166390 - DNA, 265 bp, Glycine max
caggaattgggaacattcgacaggtagagtttcttcaatggctcctaaagttgataagaagaacgacccaaaggcacaggccttgaagactgctaaggcagttaagtctggtgctacctttaagaagaaggcaaagaagatccgaacttctgtcactttccacagaccgaggacattgaagaaggataggaaccccaagtaccctcgcattagcgcgcctccaagaaataagcttgatcattatcagatcctgaaataccctctg

SEQ ID NO: 166391 - DNA, 269 bp, Glycine max
catccatcttccgtcacatctggtggttggctcgaagatacttcgctggtcgaaaaatacactatttctgaagaagcctataataagcgaccagacactttcagaaaatataaggagaaatttacatcccagaatactgtaactgcggaggcaaagataccagatgactgtatgggagatctctctgctgatatcaaggtaggatccagatgtgaggttgaacctggggcaaaaaggggtgttgtaaaatttgttggccgggcagaatc

SEQ ID NO: 166392 - DNA, 268 bp, Glycine max
gcaaaagccatttggatcctctcttctcttctttgatctccgttacccttttcgttttctcaacacagagagagagacagagtctttcggagttcgtttgcgtgtgttgtgtgatcagtcaccgatggcagcaccacctgcgagggcacgtgccgattacgattacctcatcaagcttcttcttattggcgatagccgtgtcggaaagagttgtctgcttttgcgattttctgatggttccttcacaaccagttttatcaccaccatt

SEQ ID NO: 166393 - DNA, 264 bp, Glycine max
tttcattttccctcactttctcgctccccaaacgcccctctctctcctccaatggccgaccagctcaccgacgaccagatcgccgagttcaaggaggccttcagcctcttcgacaaggacggcgatggttgcattactaccaaggaacttgggactgttatgaggtcacttggtcaaaacccaactgaggcagaactgcaggatatgataaacgaggttgatgctgatggcaacggaaccatcgatttcccagagttcctcaac

SEQ ID NO: 166394 - DNA, 247 bp, Glycine max
ctcactgccaacaggaatgaaattttggcccttctgtcaaggatcgaagccaagggcaagggcatcctgcaacaccaccaggtcattgctgagtttgaggaaatccctgaggagaacagacagaagctcactgatggtgcctttggagaagtcttgagatctacacaggaagccatagttttgccaccatgggttgctctggctgttcgtccaagacctggtgtgtgggagtacctgagagtgaatg

SEQ ID NO: 166395 - DNA, 257 bp, Glycine max
ctcttcttcaattcattctagttctggattccgactcgccgcattgactcggtccgggttggggtcgactcagttcggtttttcattctctcgcgaatctaatctataggaaaagctaagggcacatcacaatgaaggcattgattctggttggggggtttggaacaaggctgaggccactgacactcagttttcctaagcctcttgttgattttgctaacaaacctatgattctgcatcagatagaggcccttaag

SEQ ID NO: 166396 - DNA, 256 bp, Glycine max
  unsure (1)..(256): unsure at all n locations
ctagactcttctttttctctaagtctaagggattcgctgcgatnactttgagcaatggtgaatcctgtggcagttcttggcagcagcgagggtgtcactggaactattttcttcactcaggagggaaatggtccaaccaccgtaactggatctcttgctggtcttaagcctggtctccatggcttccatgtccatgccttgggggacactaccaatggttgcctgtcaactggagcgcatttcaatcctaataaca

SEQ ID NO: 166397 - DNA, 265 bp, Glycine max
ctgacacctatgtggggaagggacaagactcctgaagagagaagaattgcaatttgtatttttgatgatgttgcagagcagtgtcgtgaagctgctattaagtattatgatacctatctcccattcctgttggaggcttgtaatgatgagactcctgatgtcagacaggcagctgtgtatggtctcggtgtttgtgcagagtttggtggatctgtgttcaaacctctggttggagaggctcttttgaggttaaatgctgtgatcc

SEQ ID NO: 166398 - DNA, 258 bp, Glycine max
tgaatgcgtataaaaggaaaataaagaaattagcgccaaaatgttgggtgtgttcagcagctccatagtgtcgcccccggacgagctcgtcgccgccggcagccgtactccgtcgccgaagatgacggcggcggcgctgcggaagcggttcgaggagaagaacccctccgccgtgtcggtggaggtcggagagcatgtccagctcgcttatacccaccacaacgagtcgccgtttcagcccagatcctttgctgtcaa

SEQ ID NO: 166399 - DNA, 253 bp, Glycine max
tcgagcaatcttcaccttcgcccacaacaaatcccattcctgcatctcctccttcagcatcgctgcaaactttactttccatttttgtccttcctccccgagaaaaaaatggcgaacgcagcatctggtatggccgtccatgatgactgcaagctaaagtttttggagctcaaggcgaagaggacgtaccggtttatcgtttttaagattgaggagaagcagaagcaagttattgtggagaagctgggtgagc

SEQ ID NO: 166400 - DNA, 264 bp, Glycine max
caaagatggctttcacggaatcgtctctcctccttccttcggtttcaggaaccaacaagaacaagaacaaggttccagaagacaaatggtatttagcctacattgtgtattttaccctgggtctcggttaccttctcccatggaacgctttcatcaccgccgttgattacttctcctttctctaccctgacgccagcgttgaccgcatcttcgccgtggtttacatgatagtcgggctggtggggatctccctcataatcctct

SEQ ID NO: 166401 - DNA, 260 bp, Glycine max
cttatgatcctcttgttttaagacacgcctttgagcaggcagtcataaaaaggttgatgactgatgtgcctactggtgttctactctctggaggtttggactcttctttggttgcatccatcacttctcgttacttggccaacacaatggctgctgagcagtggggatcaaagttacattcattctgtgtaggccttgagggctcaccagatttgaaggctgcaaaagaggttgctgactatctaggcactgtccaccat

SEQ ID NO: 166402 - DNA, 259 bp, Glycine max
gcttctttacagctcagtggagaatgaggaacacatatgcgtattgaaggaccgcaacaaaccaataatcttcaccatggcaaggcttgaccgtgtgaagaacatcacggggcttgtcgagtggtacgggaagaacgcacgcctccgcgagttggtgaacctggtggtggtggctggagacaggaggaaggagtcgaaggacttggaagagaaggccgagatgaagaagatgtatggcctcatcgagacctacaagttg

SEQ ID NO: 166403 - DNA, 256 bp, Glycine max
agaaaaagaaaaagaaaaaagcgatcatagtttcacttcggccttatccagtttagggtttcggttctctaccctatctttcacgtatcgaaaccttaaatttacgatcaggtctgagcaatctggttggtagaacctttggtcttagtgagtcaagttttatgtctgaattagacgatcaaattcctactgccttcgatccttttgctgatgcaaatgctgatgactcgggtgctgggtcaaaggagtatgtgca

SEQ ID NO: 166404 - DNA, 270 bp, Glycine max
gccaggcaagccccactcaaccaccacacctctcctcgttcacgctacccctttctgctcttcttctacctttcaagttttaaaagtataaagatggcagagacattcctatttacctcagagtcggtgaacgagggacaccctgacaagctctgcgaccaaatctccgatgctgtcctcgacgcttgcctcgagcaggacccagacagcaaagttgcctgcgaaacatgcaccacaaccaacttggtcatggtcttcggagaaatcacg

SEQ ID NO: 166405 - DNA, 269 bp, Glycine max
atccacttctccaactaatgggcgtgttcagcgaagatccgaatcccaacccgaacccgatcgtgatccgagaggtttgggcctccaatctcgaatccgaattcgaactcatccgcgaactcatcgatcgctacccttttatctcaatggacacagaatttcccggtgttattttccgaccacatgtggaccccaccaaacccttcaaccaccgcaaccgtccctccgaccactaccgcctcctcaagtccaacgttgacgctctcaac

SEQ ID NO: 166406 - DNA, 257 bp, Glycine max
cttgggaataaaaaaaagatgtataaaaatgaaatattattcttacataaaaaatagaaaaaatcttgtaatatagattaaggaaataattttcttgaaggaaactaataaaattaaaaaatttagtgaattgaaacatcttagtagctaaagaaaaaaaaattaataaagattttgtaagtagtggtgaacgaatatgaaatagaaaaaaagaaaaatcttttgaatatagtggaattctattagcaaaataaggt

SEQ ID NO: 166407 - DNA, 254 bp, Glycine max
ccgaggagccgtatgacgtgaaaatctcatgtacggttctgtaataaagatggaattgagaaacaaccatcaattataacccccaaagaaccagatttcgtaaacaacatagaggcagaatgaaaggaatatcctatcgagggaatcatatttgcttcggaagatatgctcttcaagcacttgagccagcttggataacatctagacaaatagaagcgggacggcgggcaatgtcacgaaatgttcgccgaggt

SEQ ID NO: 166408 - DNA, 251 bp, Glycine max
cacgagaagcgagaactggctgttcaaggaggacgggcaggagtacgcgcaggtgctccggatgctgggtaacgggcggtgcgacgcgatgtgcatcgacgggacgaagaggctctgccacatccgcgggaagatgcacaagaaggtgtggatcgccgccggagacatcatcctggttggactcagggactaccaggacgacaaggctgacgtcatcctcaagtacatgcccgacgaggccaggctcctca

SEQ ID NO: 166409 - DNA, 250 bp, Glycine max
gtcagagtgagaaagagagagagagagagagaaactgagagaaattcgcaaaccctaatttcggaaagatcggcgatcgctgcctccaaggatcgcgagaacttcgtctacatcgacaagctcgccgaacaggccgagcgatacgaagagatggtggaatcaatgaagaacgttgcgaatctcgacgttgaactgactgtggaggagcggaatttactttctgttgggtacaagaatgtgattggcgctc

SEQ ID NO: 166410 - DNA, 260 bp, Glycine max
caagaccatcgatggtcgtggccagaggatcaaactcagcggaaaaggcttgcggctgaaggaatgcgagcacgtgataatttgcaatctggagttcgaaggaggcagagggcatgatgttgatgccattcagatcaaacctaattccaagcacatatggatcgatcgttgcacgctcagtgattttgatgatgggctcatagatatcacccgagaaagcacagacattactatttcaaggtgccacttctctcagcatg

SEQ ID NO: 166411 - DNA, 271 bp, Glycine max
  unsure (1)..(271): unsure at all n locations
attccttcatttttaaacctagctccatctccctccactcaccataacatcccatcagnagcaactgctgccaacaccaacttctgtgtaaatgttagcaacaatggctacattagtgctaatgaccccttgaactggggtgcggcggcggacgctatggctgggagccacctcgacgaggtcaagcgcatgctagaggagtaccggaggcccgtcgtcaagctcggtggagagaccctgaccatctcgcaggtcgcggcgatcgcggccc

SEQ ID NO: 166412 - DNA, 273 bp, Glycine max
cggctcgagcggctcgaggaaaattctaaaacctaaaaaatttcaatctcaatcaactcaacgtctgtgctcccaatcgatcacatttaataccacccttcaggattaggtagtaattccgttcccttgaataaataacatgagcaccacagtgcaaagaactccaagatccagcaggcattctttatttttccaggatttggcttcacctgtttctgcccgtagaggaaaattttcgagtccaggtcaagcagctgcagtatcttcactatg

SEQ ID NO: 166413 - DNA, 268 bp, Glycine max
ctcacatctctagagcctctgttgttgttttggtagctttcctagtccttcccttacttttctcagacatggctagagcaacaattccagaatcagatgttgatcttttagaatttcctttaaatttagaatacttggaggctgaattctttttgtttgggtctttgggtcatggattggatgtagttgctccaaatctgactgagggaggaccccctcctattggtggaaaattggccaaacttgacaactttgtcaaggatgtcat

SEQ ID NO: 166414 - DNA, 258 bp, Glycine max
atcttctggcgcaccgttcgtggaatgataccacacaagacaaagcgtggggaagctgctcttgctcgtttgaaggtttatgaaggaatccctcctccatatgacaagaccaagagaatggttgttcctgatgctctcaaggtgttgaggcttcagaaaggacacaagtactgtgtattgggcaggttgtcatctgaagttggatggagctactatgataccattagggagctggagaagaagagaaaggggaaggca

SEQ ID NO: 166415 - DNA, 252 bp, Glycine max
cgcattttgtatctgaaagaaaaagagggttctcacttcgcaaccatcggccgcacttactcttgttctaaagggattcgattttctctgcactcacttctagggtttcctccgcgctatcagcaatcatggccgacgaaacaccaaatgagatgaaggaggaggttccagaaattgttccttttgatcctaccaagaagaagaagaagaagaagattacaattgtagatcctgctgatgaccctgtggaga

SEQ ID NO: 166416 - DNA, 250 bp, Glycine max
ctcataacgaagcaggagctgagggagtccctgaggaacatcggaatcttcatggcagacaaagaggtggatgatattgttgtcaagtacgattccaacagtgacggcttgatcgattttgaagagttttgcttgttgacaagtgagtgtgtaggaggggatcatcatgagaaagagggtggtgttatgggaaatgaagaggttgatttgaaggaggcttttgatgtgtttgataaagacaatgatgggc

SEQ ID NO: 166417 - DNA, 249 bp, Glycine max
ggacacaagaagtacgacaaattaagacagggcctaagagaaggtgttgtagagaggatacagcgagagcaaaatgtattctcattgggttcgattgatgcttctcattgcttgcattcttccagctttggttgaatgcagagtgaggcactacaaatttcatgtggtgtctaaacaaactaatagattgtgttcaagcaaatctattgtcaccattaatggcaagttcccgggacccactctttacgc

SEQ ID NO: 166418 - DNA, 251 bp, Glycine max
gggagggagccgtagcagcggaagctctagcttgggtagcgaatcacaatggcgagaggattaaagaagcatctgaagaggcttaatgccccaaagcattggatgcttgacaaactgggtggtgcatttgctcctaagccctcatctggaccacacaaatcgagggaatgcctgccactcatactcattttgcgaaaccggctgaagtatgctctaacataccgtgaagtcattgctattctgatgcagcg

SEQ ID NO: 166419 - DNA, 250 bp, Glycine max
cgcttctcttctctgcagcaactatgcctaaccctaaggtcttcttcgacatgaccatcggcggtcaatctgctggccgcatcgtgatggagctctacgccgacgtcactccccgcaccgccgagaacttccgcgcgctttgcaccggcgagaagggcgtagggcggagcggcaagcccctccactacaagggctcgtccttccaccgcgtgatcccgagtttcatgtgtcagggtggcgacttcaccgc

SEQ ID NO: 166420 - DNA, 250 bp, Glycine max
gtcgcttcttcgtaggtgcagctgcaatggtgaagggacgccaaggagaacgtgtcagatactacgtgaggggtacaatccttggatacaaaaggtccaagtcaaaccagtatccaaatacatccctgatccaaattgagggtgtgaatgccaaagaagaagtagcatggtatgctggcaagaaaatggcctatatctacaaggctaaggtgaagaagaatggaagccattaccgctgcatatggggcaa

SEQ ID NO: 166421 - DNA, 248 bp, Glycine max
tagaaaagaggagtttgagaatggcaacgatcagcgcggttcacgtggagttcctggagtttccagcggtggttacttcaccagcctccggcaagacctattccctcggcggcgcaggggagagaggattgacgatagaggggaagttcataaagttcacaggcataggagtatacttggaggataaggcggtgccatcactcgccgctaagtcgaagggtaaaacttcagaggagttagttcacacc

SEQ ID NO: 166422 - DNA, 276 bp, Glycine max
caaattagttcattctctttgcgcagttccctacctctcctttcaagatgcagatcttcgtcaagaccctcaccggaaagaccatcacccttgaggtggaaagctctgacaccatcgacaacgtcaaggccaagatccaggacaaggaaggaattcccccggatcagcaacgtctcatcttcgccggaaagcagctcgaggacggccgtaccctcgccgactacaacatccagaaggagtcaacccttcaccttgtccttcgtctccgtggcggca

SEQ ID NO: 166423 - DNA, 271 bp, Glycine max
caactgcacaacgggcaatttttgcaaaaactctttctctctcgcaacctcacatcttcctccttcaatctctttcggaatttcccacaatccttagtgggtggaacggatggatctgactcagaagcttcacgaagccttcaaaggcaccgtcgagaggactactggccgccgaaccgtttccgcattcaaagaaaaaggtgttctcagcgtctctgagttcgcaaccgctggcgacaatctcgttgccaaatgccccacctggtcctgg

SEQ ID NO: 166424 - DNA, 255 bp, Glycine max
accaaccaggtcactgctcagcttcgagttgtggcaccgaccagagcaccggcaagtacgagaagaaggtttacgttttgcccaagcaccttgacgagaacgtggctgcacttgacctgggcaaacttccacctaagctgacccagcttagcaagtcccaggctgattacatcagtgtgcctgctgagggtccatacaagcctgctcactacaggtaccccctaaccccgacgatcaactgcaaagcgagtgagg

SEQ ID NO: 166425 - DNA, 295 bp, Glycine max
ttcggctcgagtttggaatcaataggagttcattttccagagagccaaccgatgaggacatactcaagcctatggaacgctgatgattgggccacaaggggtggactcagccagactgactggtcgaaagctcctttcactggatcggagagcaactgcatcgccaatgcttgtgtatggaactctggaaaatcctcatgcatgtgaaattcttaatcttcctctgcagctcgcactagtgcatgagtatgacaagagcgtgagtcgactgctcagcacaggttgcgctgggggc

SEQ ID NO: 166426 - DNA, 288 bp, Glycine max
ctcgagatcccagcgagtgatcggtgttcattgatctcatcataatcgtcagcgtcaattgaagaagacgccgatcagaaacatcgccgtcggaaggcctgcagaggcgactcaccccgacacgttgaaggcggctttggctgagttcatctcaaccttcatcttcgcgttcgccggctcaggctccggcatcgcctacaacaagctcaccgacaacggcgctgccacccctgctggcctcatctccgcatccatcgcccatgcactcgccctcttcgtcgccgtctc

SEQ ID NO: 166427 - DNA, 295 bp, Glycine max
cggctcgagattgaatctcagaactctctaaaagagatctctttctgctctttgaagaaagaagggtctttgcttgattttggagatgtctctgctctcagatctcatcaaccttaacctctccgataccaccgagaaggtgatcgcagagtacatatggatcggtggatcaggaatggacctgaggagcaaagcaaggactctcccaggaccagttagcgacccttcagagcttcccaagtggaactatgatggttccagcacaggtcaagctcctggtgaagacagcgaagtg

SEQ ID NO: 166428 - DNA, 296 bp, Glycine max
gttcggctatgccactcgacgagactcccgagctcatgcccttgagccatgtccttgccacgaagctcggtgccaagctcaccgaggttcggaagaacgggacatgcccttggctgagacctgatggcaagacccaagtcactgttgagtactacaatgacaagggcgccatggttccaatccgcgtccacactgtgctcatctccacacagcatgatgagactgtcacaaatgatgagattgcagctgatcttaaagaacacgtgactaagcctgtgattcctgagaagtacctt

SEQ ID NO: 166429 - DNA, 268 bp, Glycine max
tgcttcttgcaacaaacaaacatagcaacatactggaagacttggcaactctgagacttctctccaaacttgttcccgaacactcttactcccttgatgaagaggatatttgccaaaatgcatttgagttgacttttgcacttgatgaagtcatctctcttgggcacacggacaatgcgactgttgcacaagctaagcaatactgtgagatggaaagtcatgaagagaaactgcacaagctggttatgcagagcaaaatcaatgatac

SEQ ID NO: 166430 - DNA, 287 bp, Glycine max
ggaagagaagcagagagtgataatagtgggagcacggccttcggggatatcggcggcacatgcttcacgaaacagtcgattccgcacataatcctggagagggaagactgttccgcttccctgtggaagaaatattcacacgagcgcctcgacatccacctcagggaacaggactgccagcttccccacaaaccctggccagcagcttttcctccctacgttcccaagaagcagttcttgcagtacctggacgactacgtctcccacttcggaatcacgccgctgca

SEQ ID NO: 166431 - DNA, 281 bp, Glycine max
aaggaagtggcgacactactcgtggcgcgattattctggcgaagctgtctgttatccccgtgaggagggggtactgggggaacaagatcgggaagccccacaccgtcccgtgcaaggttacggggaagtgcggctccgttaccgttaggatggttcccgcgccgagaggttccgggatcgtggcggctacggttctcaagaaggtgctgcagttcgcggggattgatgatgttttcacctcctccagaggatccaccaagaccctcggcaacttcgctaag

SEQ ID NO: 166432 - DNA, 287 bp, Glycine max
gaggaattacgaggttagcgaggagattggtcgcggtcgtttcggcaccatattccgatgcttccacccactctccaaccacccctacgccaccacactcatcgacaaatccctcctccttgactccaccgaccgccactgcctccagaacgaacccaaattcatgtccctcctctctcctcaccccaacatcctccaaatcttccatgtcttcgaggacgaccactatctctccatcgtaatggacctctgccagctccacacgcttttcgaccgcatgctccatg

SEQ ID NO: 166433 - DNA, 292 bp, Glycine max
atcacgtttgacaacagctgtgattacttttcgactggtaaagtgaaagctatgacactgtctctttctgtgttggtagccattgaaatgttcaactctctcaatgccctgtctgaggatggaagccttttgacaacgcccccttgggtcaacccttggcttcttttggcaatgtcagtgccacttggtctgcactttttgatcttgtacgtgccattcttagcacaagcacttggtactgtgcccctgagcttcaacgagtggcttttggttttggttgttgcacttccgg

SEQ ID NO: 166434 - DNA, 171 bp, Glycine max
cacgctcgacgcacccagaaagaatcccacgcgaggacaaagatggaggggaaggagcaggatgtgtcgttgggagcgaacaagttccccgagagacagccaattgggacggcggcgcacagccaagacgacggcaaggactaccaggagccggcgccggcgccgctggtt

SEQ ID NO: 166435 - DNA, 336 bp, Glycine max
ccccccctccacacccatacaacctcccaactcggctcgacgaaaaactctgaccgagtccgagaggcatcatggcgacactggattccgacgtgaccgtgtttccggccggcgaactcccagcagcgccggtccttcttcgtccaccaagaagccgaagcgtttcgagatcaagaagtggaatgcggtttccacctgggcttgggatattgtcgtggacaattgcgctatttgtcggaaccacatcatggatctctgtattgagtgccaggccaaccaggctagcgccactagcgaggaatgcactgtagcttgggctgatggctcaagacccgt

SEQ ID NO: 166436 - DNA, 321 bp, Glycine max
accgcacgcaagctcgcgaacttcggctcgcagagacacggagcaagaagcagcagaagcgcgcaaattgaccaaagatgagtagaaacgattccaagcacttctccaccaccaagaagggtgaaatccctgagctcaaagaagagctcaattcgcagtacaaggataaaagaaaagatgccgtgaaaaaggtgattgcagcaatgactgtcggtaaggatgtctcgtcattgttcacagatgcggtgaattgcatgcaaacagagaatttggagctgaaaaagttggtttacttatatctgatcaattatgcaaagagcc

SEQ ID NO: 166437 - DNA, 276 bp, Glycine max
atcacaggaagttcgagcacacaaggaacgggtcactgggatttctccccaggaagcgcgctgcccaccccaggggaacagtgaaggcattccccaaggatgacccatccaaggcacccaagctcactgcattcttgggttacaacgctggtatgactcacattgttagagaggtcgagaagccacgatcaaagcttcacaagaaggacacatgtgagcctgttacaattattgagacccctccaatggttattgttggtgttgtgggttatgtga

SEQ ID NO: 166438 - DNA, 265 bp, Glycine max
cgctcactggattcaatgcgctttggtactctcagcatctctttgtcaccgtctatggggtttccatcgttcacggttactacttggacctggccaagaaatggcacaagaaaacgacttcgacgtaccttgcaattgctatgatactatacgcatgcgagcgatcacttcgtgcttttaggtctggatacaaaagcgtcaagaccctgaaggttgcagtgtaccctggaaatgtcttggccttgcacatgtctaaaccacaagg

SEQ ID NO: 166439 - DNA, 290 bp, Glycine max
tggatgtggtgcttctcagtgcaaacaggtacggcaaccccactctccgccacccccccactccccccccaacttcacttatggcacttcctcagtggcagctagcctggtccaagacacagtgaccctagccactgatcctgtcccagcctacgcctttgggtgcattcaaaaggtcacagggagctcagtgccaccacaagggctattgggcctgggccgaggcccactatcactcttggcccaaacccaaaagctctaccaatctacatcttctcattgcttaccca

SEQ ID NO: 166440 - DNA, 283 bp, Glycine max
ggctttttcgcttcttctattcactctgttacggtgcaacctagcagcctccaaatccaatggcttcagagaagaaactttcgaacccaatgagggagataaaagtgcagaagctcgtcctcaatatctctgttggcgagagtggagatcgtctcaccagagccgccaaggtgttggaacaacttagtggccaaaccccagtgttttccaaagcaaggtacactgttcgttcctttgggattagaagaaatgagaagattgcaatgctatgtaactgtcagag

SEQ ID NO: 166441 - DNA, 285 bp, Glycine max
cagcgcaagcaccaaagaaacaatcccaggcgaggagaaagatggaggggaaggagcaggatgtgtcgttgggagcgaacaagttccccgagagacagccaattgggacggcggcgcagagccaagacgacggcaaggactaccaggagccggcgccggcgccgctggttgacccgacggagtttacgtcatggtcgttttacagagcagggatagcagagtttgtggccacttttctgtttctctacatcactgtcttaaccgttatgggagtaccggggctaa

SEQ ID NO: 166442 - DNA, 278 bp, Glycine max
aggctcgagtgtgcaatggccgacgaggaacctgctgatcagaagagatatcttgaagagtcttgcaaaccagaatgtgtaaaaccattactagaataccaggcgtgcattaaaaggatacatggtgatgaatctgggcagaaacactgcactggacaacattttgattattggtcttgtactgacaaatgtgttgcaccggagctattcaccaaactgaagtaaatcgggaaggacttgatggctacaattgcattctgttctgttttcattcccaa

SEQ ID NO: 166443 - DNA, 275 bp, Glycine max
cgtgaaggaagtctttactacttgaagaaagtaggatacaaccctgacaagattcctgttgttccgatctctggttttgagggagacaacatgaccgagaggtccacaaacacttgactggtacaagggctcaactctgcttgatgcacttgaccagattagtgagcgcaagaagtcctctgacaagcccctcagggttccccttcaggatgtgtacaagattggaggtactggaactgcgccagctggacgtgttgagaccggcgtcttgaagc

SEQ ID NO: 166444 - DNA, 194 bp, Glycine max
attcaacttcacccattcatacgtggtgttgttactgctgctcttttctcttttcttttctctttagttctctcttcccctttctttttctttttcttcttcttctgagcttgtttaagcttctattccattaacatattatcctcatgtgtggtattcttgctgttcttggttgttctgatgactctcgagcc

SEQ ID NO: 166445 - DNA, 286 bp, Glycine max
agagaaaccgtgtcattgagctcaagaatggcactattgttcatggcaccattacaggtgttgatatcagtacgaacacacatttgaaaacagttaaactaactctgaaagggccaaatccagtcactctagatcatctcagtgtgaggggtaacaacatccgttactatattcttactgacagcttgaatcttgagaccttgctggtggaagagacacccaagatcaaacccaagaagccaactgctggcaaacctctgggacgtggacgaggcaggggccgtgg

SEQ ID NO: 166446 - DNA, 323 bp, Glycine max
cacgcgcacgcaagctcgcgaatctcgcgctcgcagcggccgactctcactcatcgccaacggcaccggacgcgagtcgatctacggcgccaagttcgctgacgacaacttcgcgaagaagcacactggtcccggcatcctctccatggcgaacgccggtaccggaaccaacggatctcagttcttcatctgcacgacgaagacggagtggctcgacggaaagcacgtcgtgttcggacacgtcgtcgacgggatggacgtcgtcaaggagatacagaaggtcggatccagctccggcacgaccgccaagcctgtagtcgtcg

SEQ ID NO: 166447 - DNA, 277 bp, Glycine max
caagcacggaccaacactatcatcactgctagcagaaatgctgttgatggtagcaccaccttccactctgccacagtcgctgtggtgggtgcaaatttcttggcccgggacataacattgcaaaacacagcgggcccatcaaagcaccaagccgtggccctaaaggctggtggggacctctcagcattcttcaattgcgacttcctagcattccaagacacctttatgtgcacaacaatcgccaattcgtcgtcaagtgcctgattactgacacagt

SEQ ID NO: 166448 - DNA, 279 bp, Glycine max
agtgaatattagtgcatcaagatctctgtatctctgcaatcgcaaatgagcaacggaccgggtctcttcaccgatatcggcaaaaaatccaaagatcttttgactaaggactacagctccgatcagaaactcaccgtttcctcctacagcgtctccggagtgaccctcacttcaacatctgtgacgaaaggaggactctcaacaggggatgtggcagcactgtacaagtataagaacactgttattgatgttaaacttgacactgcatcaactatctcc

SEQ ID NO: 166449 - DNA, 276 bp, Glycine max
attactacatctgtctcaaaaaaagaacagacaaagaagaacaattaacattaacatagattgcatgaaagagagggaattgaattgatcgattgattcattccaatatgggtgatcacttggcgagggccgaggattttgagaacaaggcagagaagaagctcagcggttggggcttgtttggctccaaattcgaggacgctgctgatcttttcgacaaatccgccaattcttataagctcgctaaatcatgggacaaagcaggatccacctaca

SEQ ID NO: 166450 - DNA, 290 bp, Glycine max
agctcggactggccgagatcagttcgccgatgagggaatccatggcttcggacactgaacaatcacgttggaagacaggtgtgggagttcgcccccaagcttggatcgccgcaagatctgctcgagattgtgaaagcgcgccagcactttcacgataaccgctttacccagaaacacagccctagtcctacttatgcggatgcagctcgcaagagagaagccaacacgtggagtcttgcctagagtcggagttaaggatattgaggatgtgacccaagagattgtgacaa

SEQ ID NO: 166451 - DNA, 243 bp, Glycine max
cgagtcctacgggcacgaactgcttacacaccagcacacctacaattgttcatcgagatctacagtctccagatcttttggctgataagaactggaatgttaaggtatgtgatttccggctgtcacggttgaagcacaacacttttttgcaatccatgtcaactgctggaacgccggaatcgatggctcctgaagtgctccgcaatgagccctcacatgagaaatgcgatgtgcatagttctg

SEQ ID NO: 166452 - DNA, 269 bp, Glycine max
cgctttcgaggcattattactactgatgccgctgagtcaagctgcaacagcagcgggggtcgtaagagaaaggttctgatggcgctgagaaggttattgttgccgttaaggcatcacaggaaattccaaagactgctcttgtatggtctctcagtcatgttgttcaacctggggattgcactacactactagtggttgcaccttcacaaagttcaggcagaagattatggggttttccgagatttgctggtgattgtgccagtggtatt

SEQ ID NO: 166453 - DNA, 269 bp, Glycine max
cactcagccgaatcggctcgagtgagattgctggtgtggtggtttcatttgaccccaagccacataagggtgattggaatgcagctggtgctcacacaaactacagcaccaagtccatgagagaagatggtggctatgaagtgatcaaagcagcaattgacaagttggggaagaagcacaaggagcacattgctgcttatggagaaggcaacgaacgtcgtttgacaggacgccacgaaaccgctgacatcaacaccttcttatgggga

SEQ ID NO: 166454 - DNA, 221 bp, Glycine max
gcccttttttttttttttttttttttttttttttttttttttttttcacccactccctttttttttttttttttttttttttttttttttttttttttcaattctttttcccaaaaaaacccaaaaccaacaaaacacacatcctgcttttttttccaaacaaaaaaaaacaacaccccccccaaacacaccccacaccccaaaaaacccccccccccccc

SEQ ID NO: 166455 - DNA, 253 bp, Glycine max
ctctgctctttgcattctctgacacatttggtgccttgtagagcgtgttttggcaggaaggtggtatggcgaaggacgttgaggttgctgagcgtggctccttctctgggaaggactaccaggaccctccaccagcaccactcattgatgctgaggagctcacaaagtggtccttttacagggctctcattgctgaattcattgccactttgctcttcctctacattactgcgctcacagtcatagggtacaa

SEQ ID NO: 166456 - DNA, 268 bp, Glycine max
aaaaccgtccctcacactctccaaaccctagcggcactacacactagttctatcgctatctccccaagatgtcgagcgccgatcccgagcacagagaagaggaggaggcacccgccgttggcgacgacgaggacaccggagctcacgtcgctccaatcgtcaagctcgaggaggttgctgtcaccaccggcgaggaggacgaagatgcaatcctggatctcaaatcgaagctttaccggttcgacaaggacgggaaccagtggaagga

SEQ ID NO: 166457 - DNA, 280 bp, Glycine max
cagtagtcatatgcttgtatcaaagattaagccatgcatgtgtaagtatgaactaattcagactgtgaaactgcgaatggctcattaaatcagttatagtttgtttgatggtatctactactcggataaccgcagtaattctagagctaatacgtgcaacaaaccccgacttctggaagggatgcatttattagataaaaggtcaacacaggctctgcctgttgctttgatgattcatgataactcgtcggatcgcacggcctttgtgccggcgacgcat

SEQ ID NO: 166458 - DNA, 286 bp, Glycine max
gttggagatcaaggtctggctgctgttggacagtgttgcaaacaacttgaagatctgaatctgcgtttctgtgaaggcttgaatgatattggtttggttgaattagcattgggtgtgggaaatgcattaaaatctcttggagtagcagcttgtgccaaaataactgacgtttcaatggaagttgtgggatcacactgcagatcccttgagaccttgtcattggactctgagttcatccataataaaggggtgctttctgtgattaaaggatgccctcatttgaaag

SEQ ID NO: 166459 - DNA, 281 bp, Glycine max
ggctttggatcttgtgtaccctgcttatacaacattgctagggcatatacgctctaaagctctagatgattttaagactaagctggaacaatcactaaacaatggagaagggtttgcttcatctgttcgcacttggactcagtctactatgcttgagtttgacaaagcatctgctgatgctgctataagacaagctaattggggtgcttcaaaagtgcgagacaaacttcatcgtgatattgattcacatacttcatctgtgtgcagtgcaaaactattgg

SEQ ID NO: 166460 - DNA, 273 bp, Glycine max
ggaatttcgatgctcagtcatctcttttaccattctcttctctcttgctcttgcaggagagagccatgtccatgcatcgctacctgaggaagattattgggaagctgtttggccaaacactcccattcccactgcactgcgagagcttctaaaccctctccctgcaggtgttgaaatcgatgaactccctaagcaaattgatgatacacagtacccaaaaacattcttctataaagaagaccttcatccaggcaaaacaatgaaagtacaatt

SEQ ID NO: 166461 - DNA, 262 bp, Glycine max
gtttcatgctctcctattagctccctcagaaaatctctcaagcaatttaattcttagttctatttatcttatctgagcaaaaccattttctcgcttcataagatcagaagagataactatggcaaagtcatctgagctggccattgaagagctgaagaagcttctcagagacaaggaggaatttgatgccgtggcggctgcaaaagttgaggagcttatagctgagttgcagggatgtggcccgcgtccatatgagcctgct

SEQ ID NO: 166462 - DNA, 260 bp, Glycine max
tcgggttcctggatttggcactacaatgaacattctctatggggatggtgtttgtggacaaggtgatgtggactcaatgaacaatattgtttcccattacctgtattatcttgaccttcttggtgttggtcgagaacaggctgggccccatgacatccttacatgcgctgagcaggttcctttcaacccatcttccaaacctgcttcatcatcttaagattattatatttattagcatataatattgttgtgccaatccc

SEQ ID NO: 166463 - DNA, 260 bp, Glycine max
ctgtgctgctcttgttgttgcttccatctcttcttttggggtgaatcatgagttgactgctatgttataccctctcattatcagttctgtgggtatccttgtttgtttgctcacaaccttatttgcaactgacttctttgagatcaaggctgtaaaggagattgagcctgcattgaagaaacaactcatcatttccactgccctgatgacttttgggattgcaattgttagttggattgcactcccaacttccttcacta

SEQ ID NO: 166464 - DNA, 281 bp, Glycine max
aaatcatgtacgttacgaggacgagaatagtagatacctttgcattggaagtgtagagaaggtgttatgtttgattgcccgttgggttgaagaccccaactcagaggcatacaaacttcatttagcccgaatccctgattacttttggctggctgaagatggcttgaagattcagagttttgggtgccagatgtgggatgcagcatttgctattcgggcaatacttgcctgtaatgtgagtcaagaatacgggcctacacttcggaaagcacactcttcgt

SEQ ID NO: 166465 - DNA, 279 bp, Glycine max
gtttgttccatttcttgcttcttaatttcttgatcatgtcacttgctggtaaaatcagcattgaaattggggtgcatgcaagcgctgcaaagtggttcaacctctttgcaacgcaactccatcatgttcaaaaccttaccgaaagagtgcatgaaaccaagctacatcatggtgatgactggcatcacaacgaatcgatcaaacactggacttgtaccatagatggtaaggttacaacatatcacgagagtattgaatccgttgatgaacctaacaaaa

SEQ ID NO: 166466 - DNA, 268 bp, Glycine max
tctggattccacctcttcccgtccctcgtgacggtcctcttccttcgaccacttcagggtgatcagggtttgaatcttaaggttcttgttatattctttgagacatgcgatggactttgtttcttgtcaagttgcttccagaattggttgctttcattccaagaagtacttgatcgccggttcttcatccttggagattatcttctggtttcctttgctaattgcacctagttttctgttctactttaatgatcagcacattgtactt

SEQ ID NO: 166467 - DNA, 264 bp, Glycine max
cgaacactggttgccctgttagaaaacatgtggagagggcatctcatgatccaaaagctgtgattaccacatatgaggggaagcacaatcatgatgttccaactgcaaggacatagttgccatgacatggcaggaccagcaagtgcaagtggacagacaagaattaggcccgaagaaagtgataccatcagccttgaccttgggatgggaattagcccagctgctgaaaacacaccaaacagtcaagggagaatgatgctttct

SEQ ID NO: 166468 - DNA, 260 bp, Glycine max
gagctgtctgtgcaaatttgcgttgttcttcgcggcacacctcactcactgaacggtaagtatggcggacaaggctgttacaatccgaacccgaaagttcatgaccaacaggcttctttccaggaagcagtttgtcgttgatgtccttcatccagggagggcaaatgtttccaaggctgaacttaaggagaagctggctaggatgtatgaagtgaaagaccctaatactgtatttgtcttcaaattccgaacacattttg

SEQ ID NO: 166469 - DNA, 257 bp, Glycine max
tagacaactacatacatgctgcttttgtaaatagatagaatacacagatgcttgagctttttggagggcttgtttcttttgttgaggaattggattgatttgtttcattgatgtattgcttggtttgttatgaaaatttatcttaaggggggtctattattctcctaaaaaaaaaaaaaaaaaaaaaaaaaaaaaaaaaaaaaaaaaaaaaaaaaaaaaaaaaaaaaaaaaaaaaaaagggggggccccgttttttt

SEQ ID NO: 166470 - DNA, 256 bp, Glycine max
aaaaccccttttcggatcggtggagcaaggcctcgccggcgagattcccgaggctgttcaatcagcgatcgatcaccggcgaaaagcggcgaagatgaaggttttcgtgaacactctcaagggcacgcacttcgaaattgaagtgaacccttcggacacgctttctgaagtgaagaaaaatattggaactgttcagggtgcagatgtctaacctggtgcacagcaaatgcttattcatccagggaaagttccaaag

SEQ ID NO: 166471 - DNA, 259 bp, Glycine max
cctcgagcgaatcggctcagattttacactcttttcttcttctcgttgttgcttcggtcgttgaatcatggatcagaacagtcgatttcagtgctccgcattccatgggaaccactatcatcggcgttacttacaacggcggtgtcgttctcggagccgactctcgaaccagcactggagtgtatgttgccaaccgagcatcggacaaaatcacacagctcactgataatgtttacgtgtgtcgctctggatcggctgc

SEQ ID NO: 166472 - DNA, 271 bp, Glycine max
actcgagcgattcggctcgagccctaagcaaattgatgatacacagtacccaaaaacatccttctataaagaagacctacatccaggcaaaacaatgaaagtacaattcaccaagcgtccctatgcacaaccttatggtgtatatacatggttaacggatattaaagacacctctaaagaaggatatagttttgaagagatatgcatcaagaaagaagcgtttgacggagaagagaattttgtgcagaatcctgggaacataatggttttg

SEQ ID NO: 166473 - DNA, 271 bp, Glycine max
tgaatatgctccttcaatgagctcaagtgagaaaagtttcttgtatgatattgttgcaaatggccgaaatggaattgatgttgacaagtttgattatcttcttcgtgactgtcgagcttgtggtctaggatgcaactttgaatttcaaaggttattggagacaatgcgggttttggatgacgagatttgttatcgtgctaaggactaccttaccatccacaaaatgtttgccactcgtgctgatctttatagaacagtttatacacatcca

SEQ ID NO: 166474 - DNA, 266 bp, Glycine max
ggaacactcttcattgtgtctttgattgtcttgaggatttatctgggttggagttatgttggtgatagacttctatcagcggtcatcccttatgaagaaagtggatggtacgacggacagatgtgggtcaagccgcccgagatcctagctcgtgatagattgttgggctcttacaaggtactggacatcacaaagtatcacagcattgcttgaattcagaaagattttggatacagactagaagagcaatatgttaaatttgattt

SEQ ID NO: 166475 - DNA, 266 bp, Glycine max
gtggctgtcaaaaggttaaaggactataatgcagccggtggtgagatccaatttcagacagaagttgagaccataagtttggctgtccaccggaatcttctgcggctttcggggttttgcagtactcagcatgaaaggctccttgtttatccctacatgtctaatggcagtgtagcctctagattaaaagatcacattcacggtcggccagctttagattggacgaggcgaaagagaatagctttaggtacagcaagagggttggt

SEQ ID NO: 166476 - DNA, 263 bp, Glycine max
cttgcaacaattttgggaacaaccttctggaaactcttttcctttcttagagatgctggtaatgggggagtttttgttggtaatgttgcttcagcattcacaacttcaagtgtgcttgaggcccaaagtagaaagcccaacagatatgaagtttcccaatacagatatcgcaatgtgccaataaagcgcagagcatgggttgaaggccagatgtcttttgatcagtctgtagtagcaattatgtctaaatgcaaagccagcat

SEQ ID NO: 166477 - DNA, 264 bp, Glycine max
atttctctctgccttgctcatttacacacctctccaacctctcactttcagctttatttgaatccctctctctcctttccaaatggccagcgttgaggttgcacatcaaacaccaacaacagttccagaaaatgaaacaaccgaggtaatcaagacccaggaaacaaccccggaaccagtaccagccactgaggctcctgcaacagaacaagcagcagctgaggttcctgcccaagaagaacaacaagcaactgaggttcctgc

SEQ ID NO: 166478 - DNA, 257 bp, Glycine max
ctcgagcgaatcggctcgagatgggaattgacacccctggcaccgttgcactgcttgacagcacacagtgttggtcgcacccattgtgtgaagttggtgcaccgtttgtacccagagattgatccagctctgaaccctgaccacgtccctcacattctgaagaagtgtcctgatgccattccagaccctaaggcggtgcagtacgtgagaaacgaccgtggcactcccatgattctagacaacaactactacagaaa

SEQ ID NO: 166479 - DNA, 260 bp, Glycine max
cagccactcacgctttcttcggtttcaacggaactgctggcatttggagaatagctgctatcaatgaagctggagggtggaaagacagaacaacagtggaagatatggaccttgctgttcgtgctagtcttaggggatggaaatttttgtaccttggagacctccaggccaaaagtgagcttcctagtactttgagagccttcagattccagcagcacagatggtcttgtggtcctgctaatttgttccgcaaaatggtg

SEQ ID NO: 166480 - DNA, 272 bp, Glycine max
cttgattaattaaagctcagtcagcaaattatggaatcccatgatgaggagcatgctgccaaactacttagagccacaacccacatatggactcacatatttagcttcataaactccatgtcccttaaatgtgtggtcgacttaggcataccagatatcatacacaactatggcccacccatgccactctcaaacctcattgcttcactaccaatccacccatccaaaactccgttcgtccattgcttgatgcgaatcatgatccattctgg

SEQ ID NO: 166481 - DNA, 270 bp, Glycine max
gttcatgaaaccatacgtaggagggagatgaagaagagggtggtgacgataccgatcggtgacgtggatggatctaagagcaaaggagaaaattatccaccgtcggattcatgggcctggaggaagtacggccaaaagcccatcaaaggctccccttacccaaggggatattaccgatgcagcagttcaaaggggtgtcccgcaaggaagcaagttgagcgaaccgtgtggaccccacaaagctaatagtcacctacgcatatgaacaca

SEQ ID NO: 166482 - DNA, 259 bp, Glycine max
gaaagatgagtccaacatgggtttttgtgttaggtattattgcagcaatgttggtggttgtgaatggacaatcatcagtgaagccattggtgaagacagtgaaggggaagaaggtgtgtgacaaagggtgggagtgcaagggttggtctgcttattgctgcaatgagactatctccgattactttcagacataccagtttgagaacctcttcgcgaagccaattcgccggtggcacatgcagtcggattctgggactac

SEQ ID NO: 166483 - DNA, 257 bp, Glycine max
cgaagctcaagttcgccgaagagggaatccatggcttcggacattgaacaatcacgttggaagacaggtgtgggagttcgatcctaagcttggatcgccgcaagatctcctcgagattgagaaagctcgccagaattttcacgataaccgctttacccacaaacacagcgctgatctacttatgcggatgcagttcgcaagacagaacccaacacgtgaagtcttgcccaaagtcggagttacccctcatgaggatg

SEQ ID NO: 166484 - DNA, 256 bp, Glycine max
ttcataacgaagcaggagctgagggagtccctgaggaacatcggaatcttcatggcagacaaagaggtggatgatattgttgtcaagtacgattccaacagtgacggcttgatcgattttgaagagttttgcttgttgacaagtgagtgtgtaggaggggatcatcatgagaaagagggtggtgttatgggaaatgaagaggttgatttgaaggaggcttttgatgtgtttgataaagacaatgatgggcttattt

SEQ ID NO: 166485 - DNA, 263 bp, Glycine max
ttttcgtttattccttctttcatccattctactttcttttcctctcgctagtgtttagtgctaggtgattgattaacttagaaggacttctcgtgtgttacaagaaaacaagggcaagtttcatgtctgaatttgacacgaacatcccaactgcttttgatccctttgctgaggcaaatgctgaggactcaggtgccgggacaaaagagtatgttcatgttcgtgtacaacagcgcaacggcaggaaaagcctaacaactgtt

SEQ ID NO: 166486 - DNA, 265 bp, Glycine max
gtcgcttcttcgtaggtgcagctgcaatggtgaagggacgccaaggagaacgtgtcagactctacgtgaggggtacaatccttggatacaaaaggtccaagtcaaaccagtatccaaatacatccctgatccaaattgagggtgtgaatgccaaagaagaagtagcatggtatgctggcaagaaaatggcctatatctacaaggctaaggtgaagaagaatggaagccattaccgctgcatatggggcaaggttacaaggcctca

SEQ ID NO: 166487 - DNA, 274 bp, Glycine max
gaaaatatcagttcctagcatgttatcaagggaaggatttactgcagattcattctccatgtgttttggacgtgatggcattggaaggataagttttggggacaagggaagttttgatcaagatgagactccatttaatctgaacccatcacaccctacctataatatcacagtcactcaagtccgtgtaggaacaactctaattgatgtggaattcacagcactttttgattctgggacctcttttacatatttggttgatccacctatacga

SEQ ID NO: 166488 - DNA, 274 bp, Glycine max
gtggtgtcttatcgctgtggttatcatcttcttcttcctctttcttagatctcttctttctctacgccgcacgccgaaaccatggccggaaaaggagagggtcctgctatcggaatcgatctcggaaccacctactcttgcgtcggtgtgtggcaacatgaccgcgttgaaatcatcgccaacgaccaggggaacagaaccacgccgtcttacgtcggattcactgacaccgagcgtctcatcggtgatgcggccaagaatcaagtcgccatga

SEQ ID NO: 166489 - DNA, 271 bp, Glycine max
atcaatctctccctttcacctttctccatagcctaccacttttcttctttctctgctttcatctatctactctcacttctcttcacacactgagacacagagagagagagagaacaaaaaaagaaagggagtgatgggtgtgagactcagtgttttctttttataatgaacaaagtactacacatcctcttcttcactgaagaagatggcaattcagcaccacaatgaacaactagagcataatgaaaatgtctcatctgtccttgatgcc

SEQ ID NO: 166490 - DNA, 264 bp, Glycine max
gcgaagtgttgacgatggcggacgtcacggcgaacttgcaagcagcaaccaccgcatccaccccttacgcgctccccaccaatctccctctcctctccgctttcctctccttcgctctcgcacagttcctcaagatcttcacctcctggtataaggaaaagagatgggattctaaaaggctgcttgattcgggtggaatgccttcgtcacattctgcaacagtctcggctctggctgttgctataggtctccaagaaggggcag

SEQ ID NO: 166491 - DNA, 262 bp, Glycine max
ccgctcgagccgctcgagcggctcgagctcatatatcatggctacctccatggtgaagcttgtgcttttcactgctctcatactcttgtccttgcaagcagttgtgtctgtaacaccactgcattttcaacatccactagaccctttaaccaaacaagagataagtcttgtccaaaccatagtccaaaacaagtacccaagctcaagtaacaggttgagcttccactacattggactcgccgaacctgaaaaggatgccatc

SEQ ID NO: 166492 - DNA, 256 bp, Glycine max
ggagcattgatgtttgtcactggcatgtttgtgaacggaccttatgctcttataactactgcagtttcagctgacctgggaacacataaatcattgaagggtaattcacgagctcttgcaactgtcacagcaatcattgacggaaccggttctataggggctgcagttggacctttactaacaggttacatatctgcaaagagctggagtgctgttttcacaatgttgatggcagcagctttaattgcagggctgc

SEQ ID NO: 166493 - DNA, 253 bp, Glycine max
tcgggttcctggatttggcactacaatgaacattctctatggggatggtgtttgtggacaaggtgatgtggactcaatgaacaatattgtttcccattacctgtattatcttgaccttcttggtgttggtcgagaacaggctgggccccatgacatccttacatgcgctgagcaggttcctttcaacccatcttccaaacctgcttcatcatcttaagattattatatttattagcatataatattgttgtgc

SEQ ID NO: 166494 - DNA, 260 bp, Glycine max
cgtcgaacccatgccagtctcagctagtccagcgccactgttaggggatcgactgtgtgaaaatggatttgagtgtgttaaaattctccacgccaccaatgatgcacatggaggagtcattgtggacttaaaggagcctttgcactccgaagtttttgctactttgcttagatcttcacttttacattggaagcaacagggaaaagatggtgtttggatcaagtttcctattgagcttgttaatcttgttgaaactgcag

SEQ ID NO: 166495 - DNA, 275 bp, Glycine max
ttcactcttcttctcttgcggctagggttttagcgcagcttcttctagatttaaggaagatgggtaaggaaaaggttcacatcagtattgtggtcattggccatgtcgactctgggaaatccactaccactggtcacctgatttacaagcttggaggcattgacaagcgtgttattgagaggcttgagaaggaagctgctgagatgaacaagaggtctttcaagtatgcctgggtgctggacaaacttaaggctgagcgtgaaagaggaatcacc

SEQ ID NO: 166496 - DNA, 264 bp, Glycine max
gaaagactaatcgaaccgtctagtagctggttccctccgaagtttccctcaggatagctggagcccgcgggcgagttctatcgggtaaagccaatgattagaggcatcgggggcgcaacgccctcgacctattctcaaactttaaataggtaggacggtgcggctgctctgttgagccgcgccatggaatcgagagctccaagtgggccatttttggtaagcagaactggcgatgcgggatgaaccggaagctgggttacggtg

SEQ ID NO: 166497 - DNA, 267 bp, Glycine max
gttgctattgctgccatctctactgccactctgccacacatcttccccgaactaaaatggtattacataattgtcatctacctaattgctcccaccttagcattttgcaatgcttatggttgtggactaacagattggtcccttgcttccacctatggaaagctagccatctttacaattggagcatgggccggttcatcaaacggtggagttctcgctggcctagcagcctgtggggtgatgatgaacattgtttccacggcctca

SEQ ID NO: 166498 - DNA, 263 bp, Glycine max
caagatggcttcttttcatatccaatattcattccttgtgcttgtgcttgctatggtgatcacattgatgaaccctaccaatgcaaccctctctccccatttctatgataaagtttgccctcaggcattgccagttataaagtcagtggttcaacgagcaattatccgtgagcgacgcatcggagcatctcttctgcgcttgcatttccatgattgtttcgtaaatgggtgtgatggatcaatattgctagatgacacccgaa

SEQ ID NO: 166499 - DNA, 258 bp, Glycine max
gttggaaagaaaccctagcaagcggaacaatggcagacgttgaggtcgatgtggcggctgcagcagcagcagggcagccgaagaagagaacgttcaagaagttcagtttcaggggcgtggatctcgatgcgcttctggacatgtccaccgatgaactcgtgaagatgttcagtgctcgcgcacgtagaaggttccagagaggcctcaccagaaagcccatggccttgatcaagaagcttcgcaaagcgaaaagagaag

SEQ ID NO: 166500 - DNA, 257 bp, Glycine max
cctcgagccgattcggctcgacaagccccactcaaccaccacaactctcctcgttcacgactacccctttctgctcttcacctacctttcaagttttaaaagtataaagatggcagagacattcctatttacctcagagtcggtgaacgagggacaccctgacaagctctgcgaccaaatctccgatgctgtcctcgacgcttgcctcgagcaggacccagacagcaaagttgcctgcgaaacatgcaccaaaacca

SEQ ID NO: 166501 - DNA, 259 bp, Glycine max
aagacaacacagagagaagcgtcttaataaacgctcttctctgaaaaacctgatttcttctcttcttctcttctctttcgtttcgatcttcgatctctgaaaatgagagagtgcatttcaatccacatcggtcaggccggtattcaggtcggaaacgcctgctgggagctctactgcctcgaacacggcattcagcctgatgggcagatgccaagtgataagactgttggtggaggtgatgatgctttcaacaccttct

SEQ ID NO: 166502 - DNA, 264 bp, Glycine max
aagcttctaggatttgtgccagctacatgaaaatgggaagcaacttcaggtttttgagtctttgcctcttggcattgattgcatcaacccatgctcaacttcagcttggtttttatgccaagagttgcccaaacgctgagcaaatcgttttgaaatttgtccatgaccatatccacaatgctccatcactagcagctgcattgataagaatgcacttccatgactgttttgtaaggggatgtgatgcatcagtccttctgaact

SEQ ID NO: 166503 - DNA, 280 bp, Glycine max
tgaaactgacgaggtgtatgcacagatgacccttcaacctgtaaacaaatatgagacagaagcaatactggcatcagacatgggtctcaaacaaaaccgtcaacccactgagttcttttgcaaaactcttacagctagtgacactagcactcatggtggattgtctgtgccacgtagagcagctgagaaaatattcccacctttggattattcaatgcaacctccagctcaggagcttggtgccaaggatttgcacgacaatacatgggcatttagacat

SEQ ID NO: 166504 - DNA, 274 bp, Glycine max
cacggaccaaggagtctgacatgtgtgcgagtcaacgggcgagtaaacccgtaaggcgcaaggaagctgattggtgggatccccctgtgggttgcaccgccgaccgaccctgatcttctgtgaagggttcgagtgagagcatacctgtcgggacccgaaagatggtgaactatgcctgagcggggcgaaccagaggaaactctggtggaggcccgcagcgatactgacgtgcaaatcgttcgtctgacttgggtataggggcgaaagactaatc

SEQ ID NO: 166505 - DNA, 272 bp, Glycine max
gttttcttcttgtgaaaggatgggaatcgctgcagagcatggttattttgtgaggacaaatcgaaatgcagaatgggatacttgtattccagtacctgattttgagtggaaacagattgctgagccggttatgcagttatatatggaaacaactgatggttcaaacatagaggccaaagaaagtgctctagtttggaattacgagtatgcagaccgagactttggttcatgccaagctaaggagctttttgatcatctggaaagtgttcttg

SEQ ID NO: 166506 - DNA, 276 bp, Glycine max
gcggctgtggcagcgagaagcacaggcagcgttggtgttggtgctgtcatcttcatctcagtcgctctcaccacttatttcatctcgaaaaagaagaagaagaaggaatccaggaagaagaagaagggactggtggacgccataggcaacactcctttgattcggatcaacagcctctccgccgccactggttgccaaattctcggcaagtgcgagttcttaaaccccggaggcagcgtcaaagaccgcgttgctgttcaaattattcaagaggct

SEQ ID NO: 166507 - DNA, 266 bp, Glycine max
aagatttccttgttctttttactgcttaaccgttcggctatctcatatatgaacaacaacatgttaggaatgaagagacggagagatgataatgaagggtccttggatttggcaaaatgtcttatgctgttttcttgtccaatagaaagcaacaagacacaacagaaaagttttggttctgtggaatttgagtgcaagacgtgcaaccgcaagtgtctctcctgtcaagcactgggagggcacagggcaagccacaagaggcagaa

SEQ ID NO: 166508 - DNA, 266 bp, Glycine max
caaggggctgtgaggcaacatgtgagcacaactcagctgagtggtgggagtgctagtagtgtggcactgcctggacccgggaagagcgccaccccggttctggctttgcctgctccggatggaactgttcaagctgtagggccgcaggatccgtttgcagcatcactgacggtgccgccgccttcatacgtgcaaatagcagacatggagaggaagcagcatttgcttgtgcaggaacaacagctgtggcagcagtatgggaggga

SEQ ID NO: 166509 - DNA, 287 bp, Glycine max
ccttgtggaagtcatgaaagttctgggaaaacatgctaagaacattatgctcatgtctaaggttgaaaaccaagaaggggttgcaaatgttgatgaaatccttgcaaattcagatgcatttatggtggcacgtggtgaccttggaatggaaattccaatagagaagatatttctcgcacagaaagtgatgatttacaagtgcaacatccaatgaaaaccagttgtcactgcaacccagatgttggagtccatgatcaaatctcccaggccaaccagggccgaagcta

SEQ ID NO: 166510 - DNA, 269 bp, Glycine max
gtgaggtagaacccttccacggtggtgactgcgcgatgggtgcctacaagtatgtttcagagctatggcgcaagaagcagtctgatgtcatgcgcttcttgcagcgggtgaggtgctgggagtataggcagcaaccttccattgttcgcttgacaaggtcgacccgccctgacaaggctcgtcgcttgggcttcaaggctaagcagggctatgtgatataccgtgttcgtgttaggaggggtggccgaaagaggccagttcccaaaggt

SEQ ID NO: 166511 - DNA, 270 bp, Glycine max
gtacctctatattggggaattactgctgatggctacgtagcatttgccgatgatgcagaattgcttaaaggtgcttgtgcgcaagtcacttgcttctttccctcaaggatgtttctactctacagctgttggaggattgatgtgctatgagaatcctaaaaataagattactgcagttcctgctaatgaggaggaaatctggggagcgactttcaaggtggaagggccagcagttgtcgtagccagacaatagattttcctttctgctgg

SEQ ID NO: 166512 - DNA, 268 bp, Glycine max
gaaagctcgaagacaaagagaaccgggctttttctttataggtatagattgctgagatggttctggaactcacggaaagaggcttttaaggggtgcgcccttaacccgattccgggtgagttctggaaacgactaatttggtacaaaaacaggctctatggtttgtttttgatctatcgctatctccaaaaaacagagaaatgaggagatggtgggctcttccaaggatatgtcatttcttccggttttttagcagggttcattggag

SEQ ID NO: 166513 - DNA, 265 bp, Glycine max
ggcacttcgttgcttggtgatgtccctttctgttctcttcactcttggtcttgcgagagaaagccatgccagagacgaagatttttggcatgctgtttggccaaacactcccattccaagttcattgcgagatcttctaaagcctggccttgcaagtgttgaaatcgatgatcaccctatgcaaattgaagaaacacagtacccgaaaaccttcttctataaagaagaccttcatccaggcaaaacaatgaaagtacaattcagc

SEQ ID NO: 166514 - DNA, 267 bp, Glycine max
aaagaaaaaaaaaaacagcgccctagatttgctcttctttgcttcggaagaaagagaaaaacaaataacaatggcgttcgcttctttcctcggcagagttctcttcgcttccgtcttcatactctctgcttaccaagaatttaacgaatttggagttgatgggggacctgcagcaaaagcactcagacctaagtttgatgcctttacacatcgagtgcattctcaagttggctttcaacttcctgagattgatctgaaatttttaat

SEQ ID NO: 166515 - DNA, 272 bp, Glycine max
acgcttaacaccactctccccaatccttttgtgtatgcaaaatgagaccatgcaaatgcaaatgcaatgttctctctgctctcattcttcttgtcacattcctttttgcttccgtccactgtgaagacccatatcggtacctcacttggaaggtcacctatggtgacatttatcctcttggtgttaaacaacaggggatcttaatcaatggacagtttccggggcctcaaatagatgctgttacaaatgacaacttgattatcaatgtctat

SEQ ID NO: 166516 - DNA, 272 bp, Glycine max
ccctttctctctgcttagggttttgatcgcatcggatcttcactctcttctccgatctcaaaatgcccgccgtttatggagctcgcttgaccaccttcgaagactccgagaaggagagtgaatacggttacgttcgcaaggtatcaggaccagtcgtcgttgcagatggcatggctggggctgctatgtatgaactcgtgcgtgttggtcatgataatctcattggtgaaattattcgtctcgaagggaattctgctaccatccaagtttat

SEQ ID NO: 166517 - DNA, 265 bp, Glycine max
ctttttcacctctgaaacccgcttttcttgtttcagtggaaatggccgaaactcgagacgccgccgccgatggggtgcccggaactcccgccataagggaaatgagacccgagaccgcgacccatgcgggaatcgggtcgggtgggattcggagggtgaatttccgagcggagattgatacgtcaccgccgtttgggtcggtgaaagaggccgtgacccgttttggaggtagcgggccttggataccgttttttaacaacattga

SEQ ID NO: 166518 - DNA, 265 bp, Glycine max
cctcgagcgaatcggctcgaggtccagattagtaccacaaaactggagaaatagaatacctgaatatcgtatagctccaaataaagatttaaccaaatgcaattcatatgaaaaaagccaattaattctttacaaagaacaacaagtaaacgcattaaaaaaaaaaattagaaaacaatatagatacgatcttttatcctataattttatcaattatgcagataagaaagactcatatatttatggatatagatccctatttcaa

SEQ ID NO: 166519 - DNA, 269 bp, Glycine max
agatgatgcattcaaaactcatccagtgaatttcttgaacgagagaactctaaagggtaccttccacggaaactacaaaccccgcactgatcttccttctgttgtggagaagtacatgaatggggaattggaactggagaaattcatcactcacacagttccattctcagagattaacaaggcttttgattacatgctgaaaggggagtccatcagatgcatcattcgaatgggggagtaaatctatatcagaccaatgatgacatgac

SEQ ID NO: 166520 - DNA, 271 bp, Glycine max
ccccgcgggagctgggacctcgggtccggttccgggtccggttccaattcggatttcgggttggaaccgaatttcttttataataaggggtttgtgatgtcggcgatagtgagcggagaggggaagtgtagcaagcccgaagtggaggttggggtgcacgcacgtgacttgcacggaggatgctgcggctttcgttgctcttgccgcggccttggatttgagtatcgacgcttgcaagttgttctctcagaaactccgaaaggagttgagg

SEQ ID NO: 166521 - DNA, 265 bp, Glycine max
aaatgcctttacaccatatgacaaattctgccccttctacaagtctgtttggatgatgcgcaacattatccatttctacaatttggcaaatcaggcagtagagaggggagctggttcagatggtcagaacccatcttacacccttatcaagcatcgtatgggagatctgttctaccgattagtgtctcagaaatttgaggatccagcagaaggggaagctgctttggttgcgaaatttcagaagttacatgaggacctgactaat

SEQ ID NO: 166522 - DNA, 268 bp, Glycine max
ctgcaatgacgaatgggggtgtggatcgtgctgttgaatgtactggcagcatccaagccatgatctcggcattcgaatgcgtccacgatggttggggtgttgctgtacttgttggagtgccaaacaaagatgatgcattcaaaactcatccagtgaatttcttgaacgagagaactctaaagggtaccttctacggaaactacaaaccccgcactgatcttccttctgttgtggagaagtacatgaatggggaattggaactggagaa

SEQ ID NO: 166523 - DNA, 267 bp, Glycine max
atgggtcgtggagttagcagtggtggtggtcaaagttccttgggttatctttttggcagtggagaggcccctgccgcaaaaccggcaacaaacaatgccccagcccaacctgaagtgcaggctgtaaataatgcgcctccttcaaaagcatctcctcctactaaaacaatagaccctaacaaggctgctggtataaacagtcattctactgatggccagaacaccggcaacttcatcacggaccgaccctcaaccaaggtccatgct

SEQ ID NO: 166524 - DNA, 256 bp, Glycine max
gcccagtgatgctcctgatgactacatggcattgcatcatttgaaggcaaaacccgcgctcaggcagaagtatggggttaaggatgagtgggtgctgccttttcagattgtgcccatcattgaggttccccagtttggcaatacctgtgccgagacagtttgcttgcagatgaaactcgtaagccagaatgataaggaaaaacttctagaagccaaaaagcaaacgtacttcactggtttcactgtatggacgatg

SEQ ID NO: 166525 - DNA, 258 bp, Glycine max
tcgagcacatacataacataaaatcttcctccgttcaatcttcatctctctctctctattcatctccgttaagcaaaaatcatgggtccgatggtgctgagccaactcgccaccggtcttagcgttctagccggagcggttctggtgaaatcggttatggaccagaagcccatggcaggcccattcactcgctgccccacgtgcaacggaaccggtcgagtcacgtgcctctgctcgcgttggtccgacggcgacgtc

SEQ ID NO: 166526 - DNA, 263 bp, Glycine max
gcgtgaaggacagtgataggtttggtttggaaggaagaagaaaatgaaggccatagtgataacgaggccaggaggtcccgaagtgctccaacttgaggaagtggaagatcccctagtcggagacgacgagcttctcatcggagtccacgccacttcccttaacagagccgatacctttcagaggaaaggctcctaccctccccctaagggcgccagccttacctcggtctcgaatgttccggaactgtcctttccctgggtaa

SEQ ID NO: 166527 - DNA, 268 bp, Glycine max
gccccatcatggcttcagagaagcaagcggctcttgccgtcactccctctgatgctgatgctcctaccatatttgacaagatcatcaataaggagattccttctactgtggtttatgaggatgacaaggtgcttgccttcagggacataactcctcaagctcctacacatattcttatcattcctaaattcaaagacgggttaagtggtctatccaaggctgaggagaggcactttgagattcttggccgccttctgtacactgccaa

SEQ ID NO: 166528 - DNA, 271 bp, Glycine max
cagagatcgtgatcgaaaatggcgacgttgaaggttcctgctcaacttccttctccactggaagacagtgagcaattgcgaaaagcttttcaagggtggggaacgaatgaaggattgataatatcaataccgggtcatagaaatgcagctcagcgtaagttgattcgtgaagcttatagtgcaactcatggagaagatctttttaaagatttagacaaagaactttcaagtgactttgagcgggctgtgttggtttggacattggatcctg

SEQ ID NO: 166529 - DNA, 269 bp, Glycine max
cgaatcgcacctcaccacaacctctctttctcgtctccgtccgtgcaacctgggaagcaatggcatggagaggaaatcttttgaaaaacataaaagaacttcggtttttgatgtgccagtcatcacctgcaagctcacccacaagggcttttgtggaaaggaattataaggaactaaagacattgaacccaaaattgcccatattaatccgtgagtgcagtggagttgaaccccaattatgggcaagatatgatttgggtgttgagaaa

SEQ ID NO: 166530 - DNA, 267 bp, Glycine max
caaattcttatgcaagtgtattctacaagtctgttccagagagtctcttctggccaatgtttgtgcttgccacacttgctgcaatgattgccagccaagcaatgatatctgctacattttcatgcataaagcaatctatggctttgggatgcttccccaggctcaagataattcacacctcaaaaaggttcattggccaaatttacatccccataattaactggtttctgatgatcatgtgcatagttgtggtttccatcttccaaa

SEQ ID NO: 166531 - DNA, 252 bp, Glycine max
gctgcggaggctgctagatgtacccagacttgagctacactgagtcaaccactaccgagaccttggtcatgggagtggcacctgttaaggctcaatttgagggtgctgaaatgggtgtgcccgctgagaacgatggctgcaaatgtggaccaaactgctcctgcaacccctgcacttgaaagtgatgtgttaggagagcaagcttcaagcagagatagcccttaattaggaataatgataaactattaatgg

SEQ ID NO: 166532 - DNA, 261 bp, Glycine max
gtgcatctgacccttatgtgaagctaaagcttactgaggataaattgccatcaaaaaagactactgtgaagcacaataacttaaatcctgaatggaatgaagaattcaatatagttgttaaagatccagactcccaggttttagagattaatgtttatgactgggagcaggttgggaagcgtgacaagatgggtatgaatgtgatccctttaaaagaagtttcccctgaagagcctaaacgttttactcttgacctcctaa

SEQ ID NO: 166533 - DNA, 261 bp, Glycine max
gagtttccacactgcataccttaggtcttccgaattcgaagttaatttgcaagatggctaaggaaaaggctcagatcaacattgtggtggttggtcatgtggaccctgaggaggcaaccaccattaacgagctgaagaagcctgttgtggagaaagaagctccagggcatgccatatgagggcatgcacgtacggcctcggaggggaaccagaaaattatgttaacaaaataatctggaaccctaatgtatcagtgtcatc

SEQ ID NO: 166534 - DNA, 269 bp, Glycine max
aaaaaacccaaaacaattatcatcaaaaggggcaaactttgaaaccaaaatcagattttttctatttattttttatttttttggtgaatctgaatagatcagagggtgatgtcgtgttcgtcgtcatcggggtcggaggaaggtgatgagggattcgactcttaccggaaaggagggtaccacgccgtcagagtcgccgatcagttcgccgccggcaggtaaatagcgcagagaaagttgggttggggtccattttccaccgtgtggct

SEQ ID NO: 166535 - DNA, 268 bp, Glycine max
cttatgatcctcttgttttaagacacgcctttgagcaggcagtcataaaaaggttgatgactgatgtgccttttggtgttctactctctggaggtttggactcttctttggttgcatccatcacttctcgttacttggccaacacaaaggctgctgagcagtggggatcaaagttacattcattctgtgtaggccttgagggctcaccagatttgaaggctgcaaaagaggttgctgactatctaggcactgtccaccatgagtttac

SEQ ID NO: 166536 - DNA, 262 bp, Glycine max
  unsure (1)..(262): unsure at all n locations
cagattatttaagggacggtcaatatcggattgattccatggccacaccaacaatgctaaactccctcatgtataaactttcatattacagatttgtggagacagatggtaaggcttttgacagagtgaggcagacagaaattgggaagaaacatttcaaacttacgcattttgaagaggtgttcacaactcaccattggatggttcggatttacaagttgaaaccaccaaagaacaggattcgaggaaagattanaaaatc

SEQ ID NO: 166537 - DNA, 248 bp, Glycine max
ctaacactcattaattgcaagaatggcacttcgttgcttggcgatgtccctttctgttctcttcactcttggtcttgcgagagaaagccatgccagagacgaagatttttggcatgctgtttggccaaacactcccattccaagttcattgcgagatcttctaaagcctggccctgcaagtgttgaaatcgatgatcaccctatgcaaattgaagaaacacagtacccgaaaaccttcttctataaag

SEQ ID NO: 166538 - DNA, 269 bp, Glycine max
gtttgttccatttcttgcttcttaatttcttgatcatgtcacttgctggtaaaatcagcattgaaattggggtgcatgcaagcgctgcaaagtggttcaacctctttgcaacgcaactccatcatgttcaaaaccttaccgaaagagtgcatgaaaccaagctacatcatggtgatgactggcatcacaacgaatcgatcaaacactggacttgtaccatagatggtaaggttacaacatatcacgagagtattgaatccgttgatgaa

SEQ ID NO: 166539 - DNA, 265 bp, Glycine max
gctcttccaaggagggggatatagttaaatcaaaagatctcgagagcggaagtagttctgcagacaatgtcgaagcaggaactgcagtttttctcgtggagcttgaggaaaaaagagctattaaggtttttgggaagagcactttgattggattggctctaacattctttgctggactttgcttctctatgttctcaccagcattcaacatagcaacaaatgaccaatggaatactttgaaaaaaggggttccccatttgacagt

SEQ ID NO: 166540 - DNA, 251 bp, Glycine max
ggcgtttgggctgcagttgaacatggagcttcagttggccgcgcagtcgttggagaagcgggttttgaggacacagactctgttgtgtgatatgcttcttagggactcgcctactggcattgttactcagagtcctagtataatggacttggtgaagtgtgatggggctgccctttatttccaagggaactattatccgttgggtgtgactccaactgaagctcagattagggatattattgagtgggtgt

SEQ ID NO: 166541 - DNA, 259 bp, Glycine max
caattgcagacctgtttaagccagatcgagtcctcattgggggcagggaaaccccagagggtcaaaaggctattcattctctgaagaatgtttatgcccattgggttcctgaggacagaatcctttgcaccaatttgtggtctgctgaactctcaaagcttgcagccaatgctttcctggcccagaggatctcctcggtgaatgccatgtcggcactttgtgaggcaactggtgctgatgtctcccaggtgtcacattc

SEQ ID NO: 166542 - DNA, 298 bp, Glycine max
ttttcaacttcgcggtgtgagtgagacggagagtgctaagcaatcgtcttctcttctcggagcttggctttgcttatcgattctctctcctctcgtttctctaattccaaggtttgtaaaagatggcagatgccgaggatattcaaccccttgtttgcgacaatggaactggaatggtcaaggcaggatttgctggtgacgatgctcctagggctgtctttcccagtattgttggccgacctcgacatactggtgttatggttgggatgggtcagaaggatgcctatgttggtgatga

SEQ ID NO: 166543 - DNA, 290 bp, Glycine max
tgccagtagtcatatgcttgtctcaaagattaagccatgcatgtgtaagtatgaactaattcagactgtgaaactgcgaatggctcattaaatcagttatagtttgtttgatggtatctactactcggataaccgtagtaattctagagctaatacgtgcaacaaaccccgacttctggaagggatgcatttattagataaaaggtcaacacaggctctgcctgttgctttgatgattcatgataactcgtcggatcgcacggcctttgtgccggcgacgcatcattcaa

SEQ ID NO: 166544 - DNA, 289 bp, Glycine max
cgatatccaacccgaatggaacatgcacgaccagatccccttcagcaccttctccaagctctccttcaccgttcccgaacccgaagaccttctcctctgccgcgctctggaatactacgaccgcacttacgatcgcatcatgcccaatatcgaacgccgcctcgaacgcttcaagaatcgaaacttcttcaaagtcaccaccaccgacgaccccattattcgcagactcgccaacgaggacaaggccaccgttttcgccaccgacacgattctgtccactctcatgtgt

SEQ ID NO: 166545 - DNA, 289 bp, Glycine max
aaaaccctaggtagagagctcttcctccctttctcacagcaatggccgccgcagcacgccctctcgtcaccgtgcaggccctccacggtgacatggcaaccgatgcctcctttaccgtttccatccctgatgtcatgaaggcctctatccgccccgacatcgtcaatttcgtacactcgaacatctccaagaacagccgccagccatacgccgtcagtcgtcgcgctggtcaccagacctccgccgaatcctggggtaccggccgagccgtctcccgtatcccccgtgt

SEQ ID NO: 166546 - DNA, 234 bp, Glycine max
cggggtcagagtgagaaagagaaagagagaattcgtaaaccctaatttcggaaagatcggcgatgactgcctccaaggatcgcgagaacttcgtctacatcgccaaactcgccgagcaggccgagcgttacgaagagatggtggaatcaatgaagaacgttgcgaatctcgacgttgaactgacggtggaggagcggaatttgctttctgttgggtacaagaatgtgattggtg

SEQ ID NO: 166547 - DNA, 283 bp, Glycine max
ctcaaaaacaatttggggcgtctggtacagtcccatttttagttgatggtgcagaagcaggaacgctgaaaagccatggacctctctctttcctcaaggtatacgaggctggtcacatggtccctatggatcaaccaaaagctgcacttgagatgctaagaagctggatgcaagggaaactgacaatgacaaagagtggagataatgtctctcctaaatgatgcactcacagcacaaaaaccagaaccatccctctattgctgcatagatattgatgtcattt

SEQ ID NO: 166548 - DNA, 284 bp, Glycine max
tgaagaaacttaatcgatcatcacttcacttcactaatacatcatggcagacgagacccagaacaagtatgagagctctgaggttgaggtccaggatcgtggtgtttttgactttctcggtaagaaaaaggatgaagaagacaagcctcatcctcaggaggaggtcatcgccaccgagtttcaaaaagtcactgtctcagaccaaggagagaacaagcacagcctcttagaaaagcttcaccgatctgacagcagctctagctcttcaagtgaggaggaaggag

SEQ ID NO: 166549 - DNA, 281 bp, Glycine max
ggaatgccaaactaccagaggcacttcctgaagggaaagctttacattcatttctcagtggaatttcctgataccctgagtcttgatcaggtgaaggctttggaggctgttctgccatcaaagccaacatcacagttgtcagacatggagctggatgagtgtgaggagaccacactccatgatgtgaacatggaggaagagacaaggaggaggcaacaagctcagcaggaggcatatgatgaggatgaggatatgcatggtggtgctcagagagtgcagtg

SEQ ID NO: 166550 - DNA, 282 bp, Glycine max
caaaaaaagacaacccagagagcgcgtcttaataaacgctcttctctgaaaacccccatttcttttcttctttcttcttctctttcgcttcttcgatcttcgatcttcgtcgctgaaaatgagagagtgcatttcaatccacatcggccaggccgggattcaggttggaaacgcctgctgggagctttactgcctcgaacacggcattcagcctgatgggcagatgccaagtgacaagaccgttggtggaggtgatgatgctttcaacaccttcttcagtga

SEQ ID NO: 166551 - DNA, 266 bp, Glycine max
aaattgcaagaatggcacttcgttgcttggtgatgtccctttctgttctcttcactcttggtcttgcgagagaaagccatgccagagacgaagatttttggcatgctgtttggccaaacactcccattccaagttcattgcgagatcttctaaagcctggccctgcaagtgtcgaaatcgatgatcaccctatgcaaattgaagaaacacagtacccgaaaaccttcttctataaagaagaccttcatccaggcaaaacaatgaaa

SEQ ID NO: 166552 - DNA, 245 bp, Glycine max
attgggaagctgtttggccaaacactcccattcccactgcactgcgagagcttctaaagcctctccctgcaggtgttgaaatcgatgaactccctaagcaaattgatgatacacagtacccaaaaacattcttctataaagaagaccttcatccaggcaaaacaatgaaagtacaattcaccaagcgtccctatgcacaaccttatggtgtatatacatggttaacggatattaaagacacctct

SEQ ID NO: 166553 - DNA, 287 bp, Glycine max
ctcgagccgctcgagccgattcggctcgagttgggttgggttatctgaagctttttcagcgcaggaaaactaactgcgcacgtttgggaaccctattttggtgaacatctcaagaatcagagttttttttaccactatcaggtttaggattattatctgaaatggcatcggtgtctactcagcaacagttccgttacacgcagccaccatcaacggtgcttcatttgagaaatttgccgtgggagtgcacagaggacgaactaattgaacttgggaagctatttggg

SEQ ID NO: 166554 - DNA, 279 bp, Glycine max
gatttgtttaagagcctcacaaattctgaatagatggattgaacaagggaatactattcgtgactattgaccataataggcctctttcagatcaaggtccttttgatattgtcttgcataagttatcaggcaaagagtggcgccaggttcttgaggattataggctatcacatccagaagttactgttctggatcctccagatgccatacaacatttacgcaaccgtcagtacatgcttcaggctgttgcggatatgaacctttctgattcctatggca

SEQ ID NO: 166555 - DNA, 219 bp, Glycine max
gcttctctcaccatccccatttcgcgttggtgcaaagcatccttcgtttcaatttctctctctcagcgctttctgcaatcgaacctttcatctccaaagggatccacaggccgaaggagaaatggggctgacattcacaaagcttttcagtcggcttttcgcgaagaaggaaatgcgaattctgatggttggtcttgatgctgctgctaagaccactat

SEQ ID NO: 166556 - DNA, 286 bp, Glycine max
cgaacattgacaatgaggactttgttaacttcgttgtgaagcattttaactgggctgtgtttgaaaatgagttgaagtggtattggactgagccacaacaaggaaatttcaattacaaagatgctgataatctgctaagcttgtgtcagaagcacaagatacaaactcgcggtcattgtatcttctgggaagtggatgacactgttcagcagtggatcaagtcactgaacaaaaacgatttgatgacggctgtccaaaaccgcctaaacggcctgctgactcgcta

SEQ ID NO: 166557 - DNA, 297 bp, Glycine max
  unsure (1)..(297): unsure at all n locations
ctatacttgtcaaccctttgagagttagaatggctgctgctattgaaatccccacaatagtgtttccaaactcctctgcccaacagaggatgccagtggttggaatgggatctgcccctgacttcacatgcaagacagacacaaaggaggctatcattgaggccgtgaaacagggttacagacacttcgacactgctgctgcttatggctctgaacaggctctcggtgaagctctcaaggaagctatccatcttggcctcgtctccccgccagacctctntgtcacttccaagcttt

SEQ ID NO: 166558 - DNA, 292 bp, Glycine max
actttgcttcccaaagaaagagaaaataaaaagcaatgggtagccttgaagcggaaagaacaacagtaggattggcagcaagagacccttcagggattctctccccatacacctacaatctaagaaacacaggccctgatgatgtttacataaaagttcactactgtggaatttgccattctgatctccaccagattacaaatgatcttggcatgtccaactatcccatggtcccaggacatgaagtggttggtgaggtactggaggtggggtcagacgttagcaggttcag

SEQ ID NO: 166559 - DNA, 287 bp, Glycine max
ctcgagccgtcttcttgccggtagatttaagggaaagagggtagtctttttgaagcagcacccttctgggttgcttcttgtgactggtcctttcaagattaatggagttcctttgagacgtgtcaatcagtcgtatgttattggcacatcaaccaaagtagatgtgtctgctgttaatgtagaccagtttgatgacaaatactttgcaaaggaagcccagaagaagaagaagaagggagagggcgagttctttgaggcagaaaaggaggaaaagagtgtgttgcccc

SEQ ID NO: 166560 - DNA, 176 bp, Glycine max
tagaagttgttgatgttcgatttgctacagatgatactgggaagtttaaaggattcccccatgtcgaacttgcaacagcagccgctgctgttgcaaactcaacatgtccttgcgattgaatggacaacaattgtttaatcgtgaactccgacttgatttagctcgggaaaggggtg

SEQ ID NO: 166561 - DNA, 240 bp, Glycine max
ggcacttcgttgcttggtgatgtccctttctgttctcttcactcttggtcttgcgagagaaagccatgccagagacgaagatttttggcatgctgtttggccaaacactcccattccaagttcattgcgagatcttctaaagcctggccttgcaagtgttgaaatcgatgatcaccctatgcaaattgaagaaacacagtacccgaaaaccttcttctataaagaagaccttcatccagg

SEQ ID NO: 166562 - DNA, 277 bp, Glycine max
cccactcttactcctttgccacgtacgccaccgctgatcaattcaggcgatggcgccgcgtctctggtcctgcttccgcagcagcagtagcaagggcagcaccaccggcggcggtgtctccgacgcctccgcctcgacgcgcgtggtgactgcggacctgacatcggaggagcagaagcgcgggggcccggtggtggtggagatgttctcgtcgcaggggtgcgcgacttcgccggcggcggagctggtgctgtcgcggctggggagaggggatttc

SEQ ID NO: 166563 - DNA, 276 bp, Glycine max
cggctcgagctgcactcttcatcaagctccgctccaacacaggggaaaatgagggagctcctccacgtgcagggagggcaatgcgggaaccagatcggttccaagttctgggaagtggtgtgcgacgagcacggcatagatccgacggggaagtacgtcggaaactcagatctgcaactcgagcgcgtgaacgtctactacaatgaagcctcgtgcgggcgcttcgtgccacgcgcggtgctgatggacctggagcccggaactatggacagcgtg

SEQ ID NO: 166564 - DNA, 280 bp, Glycine max
aaccagcaccacttccaatggcttcaaatcatgaagaagtgatacttttgggcaagtgggccagcccatttagcaacagagtagaccttgctctcaagctcaagggagttccctacaaatactccgaggaagatcttgctaacaagagtgctgatcttctcaggtacaaccccgtgcacaagaaggttccggttttggtccacaatgggaacccattacccgagtcacttatcattgttgaatacatcgatgagacatggaaaaataatcccctcttgcc

SEQ ID NO: 166565 - DNA, 276 bp, Glycine max
cataatctcgtcactctccctcctccttcttggactaatacagctcatcgtcatggtgttaaggtgcttcggacttttatcactgaaggggatgagggaacgactgtctgtaatgaactgctttcaacaaaggagtctgcccaaatgtatgcaaaacacttggcagagcttgctgttaatttaggctttgacgggtggctgttgaatatggaggtatcattgaagccggaacagatttctaacttaaaagagtttgtcaatcatctatcattaaca

SEQ ID NO: 166566 - DNA, 292 bp, Glycine max
ccacaatccctctctctctccgacgtacatttccatctttttagggtttcatttcatggactccgattcctggatttccacgcgcctctcttcctcttcacgccgccaccattatcgatctgatctgtacgcggaggagagtgaagggaacgatgatttcagggcggagtttctatgccctttctgcgccgaggattacgacgtcgtttccctctgttgccacattgacgaccaccaccctatccaagccaaaaacggggtgtgtcccatttgtgggaagaaggtgggagtg

SEQ ID NO: 166567 - DNA, 276 bp, Glycine max
gaaagaggttcaagcaagataacatacatcctaaaatcaaatgataagagacaatatgactcaaaaatgccaaatgtccattaggtcatattaacaagaaaacaacaactagaaatctatcaacaagaagaaagttactaatcctcctcaagattgatcgagtcattgaacttcgcatacaaaattttcttgagttcagccatctgagcaagaatagattctttctcctcttcaagttttgctaatttctggcttgtcacctcttttatctgttct

SEQ ID NO: 166568 - DNA, 276 bp, Glycine max
aaagaaattacggatggctttggagaaagttctttgattggagagggatcctatggaagagtatattatggtgttctgaaaagtaggcaggctgcggcaatcaagaaattagatgccagtaaacagcctgatgatgaatttttagcccaggtttcaatggtttcacggctgaagcatgacaattttgttcaattgcttggttattgcattgatggaaactcccgagttcttgcttatgagtttgcatctaatgggtctcttcatgatattttacat

SEQ ID NO: 166569 - DNA, 173 bp, Glycine max
attttgggcagagacccagcagggtatatttgatgcagtattgaagggacttatagattttgactcagatccttggcctctaatatctgacagtgcaaaagatctgattagaaagatgctgtgttctcggccttcagaacggttgactgctcatcaagtgttatgtcatcctt

SEQ ID NO: 166570 - DNA, 282 bp, Glycine max
gtttccaaatcatatcccaaatcctgaggacaaaacagcaatgaaagctataacccaagcagtccttgataacaaagctgatcttggaattatctttgatactgatgtggacagatctgctgctgtggatttcactggccgtgaattcaacaggaatcgtttaattgccttaatggcagctattgttcttgaggaacatcctggaacaactattgtcacagacagtgtgacttctgatgggcttaccacgtttattgagaagacacttggtggaagacacca

SEQ ID NO: 166571 - DNA, 287 bp, Glycine max
ctcgagccggagaatctctacccccttgtggaacagttagagcctgacaatgctgccaaactgacaggcatgcttcttgagatggaccagactgaagttctgcatttgctcgagtcgccagaagccctgaaagcaaaggtggcggaggcaatggacgtcctaagaaatgttgctcagcaacaggctggcggtactgcggatcagctggcttcattatctcttaatgacaaccttgtttcttaaggtttatattttggatttacttagtgacgatgggttgttatttt

SEQ ID NO: 166572 - DNA, 285 bp, Glycine max
gccagtagtcatatgcttgtctcaaagattaagccatgcatgtgtaagtatgaactaattcagactgtgaaactgcgaatggctcattaaatcagttatagtttgtttgatggtatctactactcggataaccgtagtaattctagagctaatacgtgcaacaaaccccgacttctggaagggatgcatttattagataaaaggtcaacacaggctctgcctgttgctttgatgattcatgataactcgtcggatcgcacggcctttgtgccggcgacgcatcat

SEQ ID NO: 166573 - DNA, 221 bp, Glycine max
gagttgtggaaattgattagaattgaaaataatgtctggttcggaggacgagggaggagaagagtacctcttcaagatcgtcataatcggagactccgcggtggggaaatcgaacctgctgtcccgctacgcccggaacgagttcaacatgcactccaaggccaccataggcgtcgagttccagactcagtgcttggaaatcgactccaaggaagtcaagg

SEQ ID NO: 166574 - DNA, 249 bp, Glycine max
cgcaacaaaaagaaagaatcccaggcgaggagaaagatggaggggaaggagcaggatgtgtcgttgggagcgaacaagttccccgagagacagccaattgggacggcggcgcagagccaagacgacggcaaggactaccaggagccggcgccggcgccgctggttgacccgacggagtttacgtcatggtcgttttacagagcagggatagcagagtttgtgcgcacttttctgtttctctacatcact

SEQ ID NO: 166575 - DNA, 279 bp, Glycine max
ctttgttccatttcttgcttcttaatttcttgatcatgtcacttgctggtaaaatcagcattgaaattggggtgcatgcaagcgctgcaaagtggttcaacctctttgcaacgcaactccatcatgttcaaaaccttaccgaaagactgcatgaaaccaagctacatcatggtgatgactggcatcacaacgaatcgatcaaacactggacttgtaccatagatggtgaggttacaacatatcacgagagtattgaatccgttgatgaccctacccccc

SEQ ID NO: 166576 - DNA, 284 bp, Glycine max
tgaaattccaggcaaaattataactccatttttttctctccgtccaaacggcagatccgatccgcgctacaatcccctctcagttttttctctcgaggatccggtgaaacgacatggcgatggtggaccagcctctgtatccgattgccgttttgatcgacgagttgaagaacgaggacattcagctgcgcctgaactcgatccggaggctctccacgatcgcgcgcgcgctcggcgaggaccgcacgcggaaggagctgattccgttcctcagcgagaacaac

SEQ ID NO: 166577 - DNA, 228 bp, Glycine max
ctaatggtgaaatcaagctggcagactttggaatggctaaacatataaattcttcttcctccatgctttctttcaaagggagtccatactggatggcacccgaggttgtaatgaatacaaatggctatagtcttcctgttgatatatggagtttgggatgcacaattcttgaaatggcaacatcaaagcctccttggaatcagtatgaaggggtagctgcaatattta

SEQ ID NO: 166578 - DNA, 279 bp, Glycine max
ctcgttcttcttcgtcgttatcttcttcttttgttgtttgtgtgtttgttttttctctcacctgaaaatgtcttgctgcggtggtaactgtggttgcggaagcgcctgcaagtgcggcaacggctgcggaggctgcaagatgtacccagacttgagctacaccgagtcaaccaccaccgagaccttggtcatgggagtggcaccagttaaggctcaatccgagagtgctgaaatgggtgttcccgctgagaacgatggctgcaaatgtggagctaactg

SEQ ID NO: 166579 - DNA, 281 bp, Glycine max
ctcgagccgaagaaaatcctcacccattttcttcgtagccaaacactctgaaattctcagacatgtcgtggcaagcgtatgtggatgatcacctactgtgtgaaatcgaaggtaaccacctcactcacgccgctatcatcggccaagacggaagcgtttgggctcagagcaccaacttccctcagttcaaacctgaggaaataactgccatcaataatgactttaatgagcctggatcacttgctccaactggattgtatatcggtggcaccaaatacatg

SEQ ID NO: 166580 - DNA, 282 bp, Glycine max
ccttgatatcttagttatctaattacctcaattaatcccttaattgcaagcatcatggctgaggagaagcaccaccaccactttcaccaccacaagggcgatgatgtgcctggcgaggttgattataagaaggaggagaagcaccacaagcatcttgagcaccttggggaacttggtgctgcagctgccggtgcttatgccttgcatgagaagcatgaggccaagaaagacccagagcatgctcacaggcacaaggtagaagaggagattgcggcacagcta

SEQ ID NO: 166581 - DNA, 279 bp, Glycine max
gaaggatcaccaagacaacctgtctttggcgggtgatgggtttgacacagtgatcaaagcaaaggctgcagtagatgccgtccctcagtgcagaaacaaagtctcgtgtgcagatattctggccttggccacccgtgatgttattgcactgtctggtggaccttcttacacggttgaattgggaagatttgatgggctagtttcgagagcttcggatgtgaatgggaggcttccacagccaacgaacaatttgaaccagctgaactcactgtttgcggc

SEQ ID NO: 166582 - DNA, 274 bp, Glycine max
aaaaaaaaaaatcctgattaggaggacatgctaatagcacgggaagaaatatttggccctgtactagcgctgatgaagtttaagaccatggaggaagcaattaaaagtgctaacaataccaagtatggcctagcagcaggaattgtaaccaagaatttggatactgcaaacactatgtcaaggtccattcgtgcaggcattgtttggatcaactgctattttaccgtagggagtgatgttccttttggagggtataagatgagcggatttggaa

SEQ ID NO: 166583 - DNA, 273 bp, Glycine max
gtctgaagcaggcaatgaagagtgggatgatagcttactgaccaaagaggaagtagaggcaagattgcagaggaaggtggaagcaatcatcaaaagagaaagagcaatggcatttgcatattcacatcagctatggaaagccactccgaaatcaactcacaccccgatgacagatacacgatccagtggattcccttggtggtggaactggttggaaagacaaacacctgcagcaactccacaagaaagacaagcttgaagattttcaaatca

SEQ ID NO: 166584 - DNA, 279 bp, Glycine max
gaaagtttagctttccttggggagattggacaacaaacatctttaaggcatgcagttcaactgttatcacctgccagcattgttgcaaaaatgaatggccgagacaacatctgcaaggcggatcttgaggaagtttgtacgctatatttggatgccaaatcatcggccaggttacttcaagagcagcaggagaaatacatttcataatattgttttccaactgttgcgatgactgttggttgggtttgaattacaaccagtttttgctttcgcttctat

SEQ ID NO: 166585 - DNA, 285 bp, Glycine max
cacaaagttcatgataagaaatcaataattactatgtttggagcctccgcaacttatggcactgcggatggaagtacaattgttgcctcatgttcagaagggactgacatcattctttggcatggaaaaactgggaagagtgttgggcatgttgatacaaatcaattgaaaaataacatggctactatatcacccaatggtcgttttattgcagcagcagcatttactgcagacgtgaagatctgggagattgtatatgctaaggatggatctgtgaaggaagtt

SEQ ID NO: 166586 - DNA, 274 bp, Glycine max
gagagagatggggagcgacacgaggcagagaagtcggtgcagaaagagaaggagaagaagaagatgttggccctggctcccattgctaaacctcttgctgggaagaagctttgcaagcgaaccctaaaacttgttcgtagagctgccgaacacaaatgcttgaaaagaggagtgaaggaggtcgttaaaagtataaggagaggtcataaaggattgtgtgtgattgctgggaacatatcaccgattgatgtcatcactcatgttcctattcttt

SEQ ID NO: 166587 - DNA, 262 bp, Glycine max
gcagaggaaaagagtgactttgttgatggccgcatcactgtttcagggtgcctctattggacccttgatagatttggctattcaaatcgatccaagccttatctttagtgcatttgtgggaacatccttggcctttgcatgcttctcaggagcagctttggttgctaggcgtagggagtacctgtaccttggtggcttggtttcttctggattgtccatccttctctggttgcactttgcttcttccatctttggaggttca

SEQ ID NO: 166588 - DNA, 258 bp, Glycine max
gtcagttgcaggaaaaatggtttcgctgaaactgcagaagcggctcgccgcgagcgtgctcaagtgtggcagaggaaaggtttggcttgaccccaatgaagtcaacgaaatctccatggccaattctcgccaaaacataaggaagctggttaaggatgggtttatcatcaggaagcccaccaagattcactctcgctcacgtgctcgtcgaatgaaggaagccaagaggaaaggacgtcactctggatacggtaagcg

SEQ ID NO: 166589 - DNA, 177 bp, Glycine max
gtcataacttcaacaacttctttcttctcgatctcacgatggctcatttggccctgtctcagatggctgtgactgttcctgttggcaacgatttgtctctcagaagatctgcagttaaggcccctaacttgaacttttgggataaatcatgggcaccagtatttactttggacttga

SEQ ID NO: 166590 - DNA, 249 bp, Glycine max
cttcaccattactactccctctacctcctcttcctcctccatagaagaagccactaacactactactaaggagaaaaagaagaagagagccattagtaatattgaagggaagcaccctacgtatagaggagtacgtatgcgtcaatggggcaaatgggtatccgaaattagagagccaaggaagaaatcaagaatttggcttggaacttttcccactcccgatatggcggctcgagcccatgatgtggc

SEQ ID NO: 166591 - DNA, 252 bp, Glycine max
ctcttcttcatattcttcttcttcttcttgttcttgttctatctgtgacgagcatcatggcctcgagagcagtgctattgttggctatgtgtgtgcttccggccatggttgtggccattcgcccagcaaagaaccctttttgcgtgaagggtcgcgtctactgtgacccttgccgtgctggttttgagacctcagcaaccacctacattgccggtgctgagattatgttgcaatgcaagagcagggttagca

SEQ ID NO: 166592 - DNA, 261 bp, Glycine max
cgcaaattctgctccatgggactcttcatgccactatctatgaagtcgataagctcaaaattcgtggaggcaactttttaaccaagatcgtacaaaacatcgaggagactgttggtattggaaaacgtgtcactaaactatatgcaaccattgatctagagaaggcacgagtggggaggaccagaattattgaaaaagagattaaaaatccaagatggtacgagtcctttcatatttattgtgcccatatggcatcaaaca

SEQ ID NO: 166593 - DNA, 262 bp, Glycine max
ctcgagccgttctgcttcaaggaaggagagcttgttattctctatcaacaaggaaaatgtcaggtgaagaggttgttcttgcagctgagccagctgctgccatcccaggcgagcctatggatatcatgactgccttgcaacttgtgctcagaaaatctctggcttatggtggtcttgcacgaggccttcacgaaggggcaaaagtgattgagaagcatgctgcacaactctgtgttctagcagaagactgtgaccagcctga

SEQ ID NO: 166594 - DNA, 262 bp, Glycine max
cgcgaaattagggttgatcgaggaagaagaagaagatgtcgtacctgttgcctcacttgcactctggatgggcggttgatcaagcaatcctggcagaagaggagcgtctggtcgtgatccgtttcgggcacgactgggacgaaacctgcatgcagatggacgaggtgttggcgtcggtggcggagacgataaagaactttgcggtgatatacctggttgacataacggaaggtgcgggatttaaacaccatgtacgaggtct

SEQ ID NO: 166595 - DNA, 263 bp, Glycine max
tcgagctcggctataatttacgtgatctttcagagggagagagaaaaaaatgcagaagcatggttttgcatcacagcgtaacgtgttgccgtatcaaacgccgaggctaagggaccactacgttctggggaagaagctgggacaggggcaattcggtacgacgtacctgtgcacccaaaaggttacagggaagctctgcgcgtgcaaatcgatcccgaaaaggaagcttctatgccaggaggattacgatgacgtgtggaggg

SEQ ID NO: 166596 - DNA, 257 bp, Glycine max
gctgaccacacattcttgtttcttggtgctggagaggcaggaactggaatagcagaactaatagctcttgagatgtcaaagcagacaaagacacctatagaggagactcgcaagaagatatggcttgtagactcaaagggtttgattgttggttcaagaaaggcttcacttcaacacttcaagcagccttgggctcatgagcatgagcctgtaggcagtctcttagaagctgttaaggtaatcaagcctacagtttt

SEQ ID NO: 166597 - DNA, 254 bp, Glycine max
gcgttccttaagctccttagtgctgctccttgcagctctaattctatcccctcaagttcttgcaaactatgagaatcccccagtgtacaagcctcccactgagaaaccaccaatttataagcccccagttgagaagcctcctgtttacaaacctccagttgagaagcctccagtttataagcctccagtagataagccaccagtgtacaagcccccagttgagaaacccccagtttacaagccggcagttgaga

SEQ ID NO: 166598 - DNA, 261 bp, Glycine max
ccgaaccaacgcaatgatggaatggaagggtcttgcgttcttctgcagttctgatagctagccatgttggcatgaagatttaagcgggaaaataataagacaacgtatataacgttttcacaaagtggcttttttttttattatcacaaggagtatgtgttgaatgattattgagttgcagcactgatcagttcttagaacatgaattcagcatccccgcagtttgtttccccgagaagtatgagtgtgtacgatccgatc

SEQ ID NO: 166599 - DNA, 259 bp, Glycine max
ggtggggccgtggccaagagactcccggcgaggacccgacattggccgcaaaatacgccgccagctatgtcaaaggactccaaggcgatggtgccggaaatcgcctcaaggttgctgcttgttgtaaacactacactgcctatgatcttgataattggaatggtgtggacaggtttcatttcaacgccaaggtgagtaaacaggatttggaggacacttatgatgtaccatttaaagcgtgcgtgttggaagggcaagt

SEQ ID NO: 166600 - DNA, 155 bp, Glycine max
gctcttccaaggagggggacatagttcaatcaaaagatctcgagagcggaagtacttctgcagacaatgtcgaagcaggaactgcagtttttctcgtggagcttgaggaaaaaagagctattaaggtttttgggaagagcactttgattggattg

SEQ ID NO: 166601 - DNA, 272 bp, Glycine max
tcgcgctctctattcgcatctgaattctcagtcgcttctcgaaccctacttcttccgcggtgattgcatttgaattcctgtaatggcgattgataatatttttaaacatgaagccagtgaagaaaaaggagagcgggccagaatggcttcttttgttggagccatggctattgctgacttggtgaagacaaccttggggccaaagggaatggataaaattttgcagtcaacaggtagaggacgtgaagttactgtcactaatgatggtgcta

SEQ ID NO: 166602 - DNA, 165 bp, Glycine max
gttagggaccacaatatgtgtgcacaaatttctggacgtttgtctgcactaactgtagcggaatacaccgagagtttacacatcgggtaaaatcagtttcaatggctaaatttagtgcacaggaagttagtgcacttcaagaaggaggaaatcagcgtgcaaagg

SEQ ID NO: 166603 - DNA, 262 bp, Glycine max
gaatggtaggcgttatcttgatgcttttgctggaatagttactatctcctgtggacattgccatcctgaagttttgaatgctataatggagcaaagtaaactcttgcagcatacaacaaccatatatctacaccatgcaatagctgattttgcagaggccttggcatccaaagtgcctggaaaccttaaggttgtttattttgtaaattctggttcagaggcaaatgacttggcgatgctgatggcccgtttatacactggt

SEQ ID NO: 166604 - DNA, 260 bp, Glycine max
cttcagcattcacactaaggtgttccttgctcgccaaaagaccatggagcctgccaaaaccattcacaacaatgtcaaatactcccccatcttcttagccatctttgttctgatcttagcttcagcattgtcttcagcaaatgccaaaattcacgagcacgagtttgttgttgaagcaactccagtgaagaggctgtgcaaaacccacaacagcatcaccgtgaatggacaatacccgggcccaacgttggaaatcaaca

SEQ ID NO: 166605 - DNA, 259 bp, Glycine max
gcgtctttcaaggagagagagaaaatatagcacgccgaaaaacacgctcccacttgtaacttagtataacgacctccaacaactgatacatacaatctcctttccttcgtgttggacaacaacaatggcggcgaaatctagttcgagttcgacaacaaacgtggtgactctgaaggcggcgtgggttctcccgcagcgcacgcagaacatccgtgaggtgtacgaggtggggcggaagttggggcagggtcaattcggg

SEQ ID NO: 166606 - DNA, 181 bp, Glycine max
ctttctgctattgaaacccaggttcggaatttggttgacggcttgaagagctctgatgttgatactcagagagaggcaacagcagaactccgccttcttgctaagcacaatatggataatcgaattgcgattgcaaactgtggagccattaatgtattagttgatttacttcaatcaactg

SEQ ID NO: 166607 - DNA, 283 bp, Glycine max
cggcattcggctcgacattctcaatctcatggcgcgaagatgaaagacactgattcagaggaagagctgaaggaggctttccgtgtgtttgacaaggatcagaatggtttcatctctgcagcagagctccgccacgtaatgaccaatctcggtgagaagctgactgatgaggaagtcgatgagatgattcgtgaggctgacgttgatggtgatgggcagatcaactacgaggagtttgtcaaagtcatgatggccaagtgaggaccaatcaaccataacaaaa

SEQ ID NO: 166608 - DNA, 261 bp, Glycine max
gcaaggcattagaaatagctgcacagcagaccaagtcgtctagggttgctataccagtttctaggcaaaaggatgctctggaatctgataagggatctgcctctgaaagaagtgtgaagtctagggctattcttgcaagacaagctaatggagtagttcctgatccgggtgtccgtgctgcatcagatgttgaaaaaattgtaccatctggaaacactggtggatcaagttggggcatctcatcgatttttggtggaggtg

SEQ ID NO: 166609 - DNA, 241 bp, Glycine max
gtcataacttcaacaacttctttcttctcgatctcacgaacgctcatttggccctgtctcagatggctgtgactgttcctgttggcaacgatttgtctctcagaagatctgcagttaaggcccctaacttgaacttttgggataaatcatgggcaccagtatttactttggacttgaagccaaacaacccaagtttaagaagtcgtcatgtggtatgcatgtccgtgcaacaagcaagtgt

SEQ ID NO: 166610 - DNA, 258 bp, Glycine max
acactttctctctctaactcaatctctctctctctctctctctgaattttctcctctctccgattccttttattaattggagtttactcgctccttttcctttccctgaaaacatttcctcgtcgtattgatgtcggaaaagggccggccacttccaaaatttggtgaatgggatgtcaatgatccaacctcagctgaggggttcacagtgatttttaataaggccagggatgagaaaaagacaggtggtaacccaga

SEQ ID NO: 166611 - DNA, 215 bp, Glycine max
aatatattccattctctctgtgtatttccctacctctcccttcaagatgcagatcttcgtcaagaccctcaccggcaagaccatcacccttgaggtggaaagctctgacaccatcgacaacgtcaaggccaagatccaggacaaggaaggaatccccccggaccagcaacgtctcattttcgccggaaagcaacttgaggacggccgtacccttg

SEQ ID NO: 166612 - DNA, 261 bp, Glycine max
atcaactctttcaaaagggagaagaaaaggaaaggaaacaaaacgcacaaaggattattatagcaatggcagaacaaaaccaaaaccagacaactgaagctggaaggcaccaagaggttggccacaagagccttctccagagtgatgctctttaccagtatattctggagaccagtgtctacccaagagaacctgaatccatgaaagaactgagagagttgacagcaaaacacccatggaacatcatgacaacctctgcag

SEQ ID NO: 166613 - DNA, 259 bp, Glycine max
agaaaatcctcaattttctgagcagccaaacactctctctctgtctctcgaaaattctcagtttgcagagaaaatctgaatcatgtcgtggcaagcgtatgtcgacgatcaccttctgtgtgacatcgaaggtaaccacctcactcacgctgctatcatcggccaagacggcagcgtttgggctcagagtaccgacttccctcagttcaaacctgaggagataactgccatcatgaatgactttaatgagcctggatca

SEQ ID NO: 166614 - DNA, 212 bp, Glycine max
gcagctcttccagtagccttaaaggtgattctgagagagacttctttgttgaactgtgggatgtctcaggacatgaacggtacaaagattgccggtccctgttttattcacagattaatggtgtaatttttgttcatgatctttcacaaagaagaacaaagactagcttgcagaagtgggcagctgagattgctgccactgggacattttca

SEQ ID NO: 166615 - DNA, 269 bp, Glycine max
ccgttcgcaacacgatcactatttctgcgacgatggtggcacattcgagttcttggggcagggcactcgtggccatctcgccctataccttctctgccatcggcatcgccgtcgctatcggcgtctccgttctcggcgccgcctgggggatctacatcaccggtagtagcttgatcggcgctgcaatcagggctcctctaatcacttccaaaaatctcattagtgtaatcttctgtgaagctgttgctatatatggtgttattgtggct

SEQ ID NO: 166616 - DNA, 259 bp, Glycine max
aacgagcacgagtacaatccagagcttgacattatttccaatgctagctgcacaaccaactgccttgccccgctcgccaaggttatcaatgacaggtttggcattgttgagggtttgatgaccactgttcattccatcactgctacccagaagactgttgatgggccatcagccaaagactggagaggtggaagagctgcttcatttaacatcattcctagcagcactggagctgccaaggctgtcggaaaagtcctcc

SEQ ID NO: 166617 - DNA, 256 bp, Glycine max
tgatgatgccgcatcatctgctcgacctgctgaaagtcagcaaaatggggtgaatgttgctgagttaatagttggccgtggctttggaactgtcattagacatcgtgactttgaagagagatctagctattatgatgctcttcttgctgctgaatcacgtgcaatttctggaaggacaggcagccactctgccaaggatcctccagtgatgcatataactgatttggacacggcatcggctaagaaagccagagac

SEQ ID NO: 166618 - DNA, 220 bp, Glycine max
ctcgagccgaagaaaatcctcacccattttcttcgtagccaaacactctgaaattctcagctatgtcgtggcaagcgtatgtggatgatcacctactgtgtgaaatcgaaggtaaccacctcactcacgccgctatcatcggccaagacggaagcgtttgggctcagagcaccaacttccctcagttcaaacctgaggaaataactgccatcaataatga

SEQ ID NO: 166619 - DNA, 257 bp, Glycine max
cacccagagacgaggaagggcgtagtaagcgacgaaatgcttcggggagttgaaaataagcgtagatccggggattcccgatataggtcaacctttcgaactgctgctgaatccacgggcaggcaagagacaacctggtgaactgaaacatcttagtagccagaggaaaagaaagcaaaagcgattcccgtagtagcggcgagcgaaatgggagcagcctaaaccgtgaaaacggggttgtgggagagctatacaag

SEQ ID NO: 166620 - DNA, 265 bp, Glycine max
ccagttcaaaggtaaggtaggttaacactcttcttcatcgtcgtcgcaatgggacgtgtgatccgtgcgcagcgtaagggagcaggctcggtcttcaagtcccacacgcaccaccgcaagggccctgctcgcttccggagcctggacttcggggagcgcaacggctacctcaagggcgtggtcaccgacgtcatccatgaccctggcacgcggcgcccgctcgccaaggtcgccttccgccaccctttcagatacaagaagcaga

SEQ ID NO: 166621 - DNA, 286 bp, Glycine max
cgacgaagaagaagaatccaaaagcaatcccatctgtgtgtttgcacatcggaagggagggctatcaaactctaagagcagtggttgtgttggatgctataaaaggccttcactgagtcccacagtggatgtgccatcaaaagggttggcaacacaaagtaacgtagtgaggaaaccgagttcatcagaggatttttggaccaccagcacgcatgatatggacaacagcgctgttcagtcacaagggagcatctcttcagccagtctaacaaaccaagctgtggtt

SEQ ID NO: 166622 - DNA, 275 bp, Glycine max
actttctctctcctcaaccagagataaagagtcaccttcttatcgttctgaatctcgcggcgttgttctttctgctgctgcggctgtggttccggcggcgatgggacagcaatcgttgatctacagcttcgtcgctcgaggcaccgttatcctcgcggagtacaccgagttcaccggaaacttcaccggcgtggcggcgcagtgcctccagaaactcccttcctccaagaacaagttcacctacaactgcgatggccacaccttcaactacctcg

SEQ ID NO: 166623 - DNA, 274 bp, Glycine max
cttaacaacagcacaaagcgggttactgtctgttcaagctaccatctctctctctctttcttagtgcctccttgccagaagttaaaatggcccaagaaactttcctattcacatctgaatcagtgaacgaggggcaccctgacaagctctgtgaccagatctccgatgctgtgctcgatgcatgcttggagcaggaccctgacagcaaggttgcctgtgaacctgcaccaagaccaacatggtgatggttttcggagagatcacaaccaaggcc

SEQ ID NO: 166624 - DNA, 271 bp, Glycine max
gagagtggtttcagtgagtgatcggtgttcacttgatccttcataagtcgtcatcatcatcatcatcatcaccgttgattgaagaagatgccgatcagacacatcgccatcggaaggcctgaagaggctactcaccccgacacgttgaaggcggggttggctgagttcatctccaccttgatcttcgtgttcgccggttcaggttccggcatcgcctacaacaagctcaccgacaacggcgccgccactcccgccggcctcatctccgctt

SEQ ID NO: 166625 - DNA, 264 bp, Glycine max
gctggtcataatatcaccattactgatggtattgacaaaactagtgcaactttgcaatttagaaagttagcagattgcgattttctcaagagaaactttaagcagatgtctaatgttttgtgggtggctcctgaggacaaggcgagtttatggtcacaatttcattatgtttcgtgtaataatctggaaatgcaagaagcttatcttgtcaatctcgtaaatgtgttacgagaattgtatttgcacagtccagaggaagctcgc

SEQ ID NO: 166626 - DNA, 260 bp, Glycine max
ggcctattcccttcacagacagaacccccttctcccaaggctgtttgcagttgtggacgacattttctgtttgtttcaaggtcaccttgagaatgttgccaaccttaagcaacaatatggattgaacaaaacagcaactgaggtgatcattatcatagaggcatacaggactctaagagatcgtggtccctatcctgctgctcaggttgtgagagatttccaaggcaaatttgcatttattctgtatgacagtggttcta

SEQ ID NO: 166627 - DNA, 258 bp, Glycine max
catcagtgacaatgctggaggtattgctgaaatggctggtatgagtcacagaattagagagagaactgatgcccttgatgctgccggaaacacgactgccgctattgggaagggatttgccattggttctgctgcccttgtatcactggccctctttggtgcctttgtgagccgagctgctattacaactgttgatgtgttgactccaaaggttttcattggtttgattgtgggtgcaatgcttccttactggttttc

SEQ ID NO: 166628 - DNA, 273 bp, Glycine max
cagtactccgctcgaggtttcctaaagcatgtagggaatttagacgctgcaggatcatcacgagattgagtaatgaagtacaacattgcaaatcacagcaatgggtgccagaatcacctggaaatcgatgatgaactgaagcttcgggcattttggagacaaaggattccccatgatgacctatgcgacgtcctaggtgaggagtttaaagggtatgttttcaaaatcactggcgggtataacacgcaaagattcccaatgaagccgggagtg

SEQ ID NO: 166629 - DNA, 266 bp, Glycine max
cgatttcgtataacatctcatttcacttcacttagggtggtgcatttgcaaccctttaatttcctcacaaaaatgcaggcacgtatttgtactcactagtgtttcttgtgcttgctttggctattgtgaacaaagtgcatgggcaagggacgcgtgtagggttctattcgagtacatgcccacgcgctgagtccattgttaagtccacagttacaacccatgttaattctgatagtactttggctgctgggttgcttcggatgcac

SEQ ID NO: 166630 - DNA, 275 bp, Glycine max
ctggagctgatcaaaccatttacttcccccacactgaaaccacccgtacgttgacatccttccaccctgaaatcgaagcactcctttacagctcagtggagaatgaagaacacatatgtgtgctgaaggaccgcagcaagccaattatcttcaccatggcaaggttggatcgagtgaagaacatcacaggacttgtggagtggtacggtaagaacgcgaactgagggagctggtgaaccttgtggttgttgctggagacaggaggaaggagtcaa

SEQ ID NO: 166631 - DNA, 271 bp, Glycine max
gaaaacagcagaaaacaaaatggaagacacagtttctgcgttgaggtctttgatggtttctcactctccgccgctggatgccttagtggtgccctctgaagattatcacctgagcgaatatgtgtctgcacgagacaagcgccgcgaattcgtttccggcttcactggaagtgccggcttggcacttataacaaagaaagaagcactgctgtggacggatggacggtattttttgcaggctgagaaagaacttagtgctgggtggaagcta

SEQ ID NO: 166632 - DNA, 270 bp, Glycine max
gccaaaatggtgaagataactcttggtactttcgatgactcttttggtgttgcctctcttaaggcttatttggcagagttccatgcaactctgattttcgtgttcgctggtgttggttcagccatcgcttacaacgagcttacaaaagatgcagccttggatccaacggggctggtggcagtagctgtggcccatgcatttgcactgtttgtaggtgtctccgtcgcagccaacatctcgggtggccatttgaacccagctgttactttt

SEQ ID NO: 166633 - DNA, 269 bp, Glycine max
cttaatcccctcagatctcactgaatttgtgatgcttcaagggaatggagtaaagggcctctctgaaatgggcctaaagagcctcccaagtcaatatgtccaacctttggaagagagggtgatcaatgttgtacctcaagagtccattcccatcattgacatgtccaattgggatgacccaaaagtacaagatgcaatttgtgatgcagctgagaagtggggcttcttccaaatcatcaaccatggggtgccccttgaagtattggaca

SEQ ID NO: 166634 - DNA, 265 bp, Glycine max
aaaaaacccaaaacaattatcatcaaaaggggcaaactttgaaaccaaaatcagattttttttatttattttttatttttttggtgaatctgaatagatcagagggtgatgtcgtgttcgtcgtcatcggggtcggaggaaggtgatgagggattcgactcttaccggaaaggagggtaccacgccgtcagagtcgccgatcagttcgccgccggcaggtacatagcgcagagaaagttgggttggggtcagttttccaccgtgt

SEQ ID NO: 166635 - DNA, 269 bp, Glycine max
gatcctgccagtagtcatatgcttgtctcaaagattaagccatgcatgtgtaagtatgaactaattcagactgtgaaactgcgaatggctcattaaatcagttatagtttgtttgatggtatctactactcggataaccgtagtaattctagagctaatacgtgcaacaaaccccgacttctggaagggatgcatttattagataaaaggtcaacacaggctctgcctgttgctttgatgattcatgataactcgtcggatcgcacggc

SEQ ID NO: 166636 - DNA, 279 bp, Glycine max
ttcggattgcggcgacgtgagccgttcgctgcccgcgacgttgtgagaagtccactgaaccttatcatctagagaaggagaaggaagaaaaaaagacaaagaagatcaaggaagtgtcacatgaatggtccttggtgaacaagcagaagcctatttggatgaggaagcctgaggagatcacaaaagaggagtattctgcgttctacaagagtcttaccactgactgggaagagcatttggctgtcaacacttctctgttgagggtcagttggagtttaa

SEQ ID NO: 166637 - DNA, 274 bp, Glycine max
gttagatctgtacctgcctagccattgatttggaaaagtccaagcttcaaagatgagtaagcttcagagtgatgctcttagagaagctatctcaggaatcatgactgattccaaggaaaagaacaggaaatttgtggagaccattgaactccaaattgggctgaaaaactatgatccccagaaggaccagcgttttagtggctctgttaagttgcctcacattcctcgccccaagatgacgctttgtatgcttggagatgcccaacacgttgaa

SEQ ID NO: 166638 - DNA, 269 bp, Glycine max
gattgctagaatggaatttcgatgctcagtcatctcttttaccattctcttctctcttgctcttgcaggagagagccatgtccatgcatcgctacctgaggaagattattgggaagctgtttggccaaacactcccattcccactgcactgcgagagcttctaaagcctctccctgccggtgttgaaatcgatgaactccctaagcaaattgatgatacacagtacccaaaaacattcttctataaagaagaccttcatccaggcaaaa

SEQ ID NO: 166639 - DNA, 269 bp, Glycine max
gcgatggacctcggaacctatgaagtgccagaaggagtggacattctaggaagatacgatgcagagtttgcaaaaatcctcacaaaagacgcttccaaattcgtcgctgagctgcaacgtgagttcaggagcgatatcaagcatgcattagagagcagaagagaggcaaagaagaagtacaatgaagggactcttccggggtttgatcctgccaccagtcacattagagaccaggagtggctgtgtgcacctgttccaccagctgctgc

SEQ ID NO: 166640 - DNA, 269 bp, Glycine max
cttcacaaccgaaacagtttccatctctctcacaaaatgacaacaatatcaaattgctcccttctcttcctcttcctcttcctctccaccctccacatagcttccaccctctcaacccccaccaacttcatcaagtcctcctgcagcaccacccagtacccagccctctgcatccagtccctctccgtctacgcctccaccatccagcaagacccccacgagctcgtccagacagccctctccctctccctcaaccacaccgaggccac

SEQ ID NO: 166641 - DNA, 265 bp, Glycine max
cgttctttcatcactgctgcagcactgtatcagcctcttggctttggcaccactggaggaaagaccagtggccagaaggagcttgctgctttctttggccatgttggcagcaagacctcttgtggttatggggtggctacagggggacccttagcctggggcttatgctacaataaggaattgagtcctgataaattctactgcgatgactactacaaattaacctacccttgtactcctggtgcagcatactatggccgtggtg

SEQ ID NO: 166642 - DNA, 269 bp, Glycine max
gaaccaaccaaacgaaggcacaaacaggcaaagagctcatagaaattctcgtcctcttcctacataagtcttctcttatcataaacgcgtgttgctcggataaggttgtgctgcggtgattcactcgtactttgcttaatatggcggttgagaagttgagcattgcaaaagatgtgactgaattaattggcaaaactccattggtatatctcaaccgcatcgtggatggctgtgttgccaaagttgctgcgaagctagaaatgatggaa

SEQ ID NO: 166643 - DNA, 262 bp, Glycine max
cctctcttcactttcactctctctctctctcagccatcatcatgggagcagtgattctcccagatctcggcaccgagattttgattccggtctgcgccatcattggaatagggttcgccctcttccagtgggtcctcgtcttcaaggttaagctctccgctgccagagacgcttcccctaacgccgccggcaaaaatggctacaacgattacctcatcgaagaagaggaaggcctcaacgatcacaacgttgtcctcaaatg

SEQ ID NO: 166644 - DNA, 262 bp, Glycine max
gcagcttggaagcagtcaggaaacatatggaggcaaaaagtcactgtaaagtgcattatggtgatggtgatgatgacgaggaggtagaattagatgaattctatgattatagcagcagttatgtggatgatcaaggcaagcagcttgttgcatcttgtgatgcatctaacaatgtagaacttgttggtgggtctgagctcataatcaccacgaaatctggtgaaagagcatcaaccaaaacactaggttcccgtgaattttt

SEQ ID NO: 166645 - DNA, 264 bp, Glycine max
acctacctctttttcttctctctcaacaacttcaccttcttcctcctcgatcatgtctcacttcaagggcaagtaccatgatgagcttatcgccaatgctgcgtacattggcactcctggacagggtattcttgctgctgatgagtcaacagggacaattggcaagcgtttggccagcatcagtgtagagaacattgaatccaacaggcgagctcttagggagctgcttttcactgctcctggtgttcttcaatatctcagtgg

SEQ ID NO: 166646 - DNA, 269 bp, Glycine max
cttgattgacaggacaaaggcaccgtgtaagagctgtttgaaggatgctaatgtatccatcaaggaagttgatgaggttcttcttgttggagggatgacccgggtgcctaaagtccaggaggtggtttcagcgatctttggaaagagtcctagcaaaggagtaaatcctgatgaggcagttgccatgggagcagctattcagggtggtatcctacgtggagatgttaaagagctactactcctagatgtcactccactttctctgggta

SEQ ID NO: 166647 - DNA, 264 bp, Glycine max
gcgttgcacgcgacgcaccagatcgccgagtcgtggatccacgcgtcgcggaacgttctagagaggatcgcagacgcggtgctctccagaaccttcgagaaggcggctgaggactgctacgccgtggaaaggatctggaagcttctcgcggaggtggaggacctccacctgatgatggatccggacgatttcttgagactgaagaatcagctctcggtgaaatcctccggcggcgaaacggcttcgttctgcttcaggtcgaag

SEQ ID NO: 166648 - DNA, 264 bp, Glycine max
ctcgagccgctcgtaaatgtgttacgagaattgtatttgcacagtccagaggaagctcgacaattgagaaggaaagctctctctcgtattgaatggctgcaaaaagctgatgtgcctaccatagcacagattgaagagttccattcgatgcagaggatgatgaatgctcctgattcaaatgacaatatcgatctactgttgagcattgatttgttgggtttacaaggagcaggtaaagcttttccaaacaagatcgtttttgat

SEQ ID NO: 166649 - DNA, 272 bp, Glycine max
caggtccagacatagtaaggattgacagactgagagctctttcttgattctatgggtggtggtgcatggccgttcttagttggtggagcgatttgtctggttaattccgttaacgaacgagacctcagcctgctaaatagctatgtggaggtaaccctccacggccagcttcttagagggactatggccgcttaggccacggaagtttgaggcaataacaggtctgtgatgcccttagatgttctgggccgcacgcgcgctacactgatgta

SEQ ID NO: 166650 - DNA, 290 bp, Glycine max
ctctgcattcggctcgagagcagccatccacattcatactaagatttcttatcatggcttcgggatcaccttcctcttcctcttcctccaattacgatgtgttcctcagcttcagaggggaagacacacgtcttggttttactggccatctctacaacactcttcagagcaagggaatccacactttcattgatgatgaggagcttccaagaggggaggaaataacaccagcacttatgaaggcaattcaagattccagagttgccatcactgtgctctctgaacactat

SEQ ID NO: 166651 - DNA, 266 bp, Glycine max
caaatttgtttaaattgtctcttgatgatgttgaaactcctaaaggttccatgttggatcttaaaatttctcaatctaaaattgcacttcccaaaaacacagttggaggaactattctgcgtagtgatctattggcaaattttttgacagagggcaattttagagcaagtgttgatttgcagcgcactcatcgtattaaaggcatgattaacatggtggccacagttggtattcctgagaatacaggcatagcattggcctgtgct

SEQ ID NO: 166652 - DNA, 266 bp, Glycine max
ccaaaccctaactcccgaccctgttcccctctcgtatccgtcatgaaaggaggaaagtccaagaccgaatctaagagagccgatcccaaacttgctgtgaataagaagggagccgccaccaaggctaggaaacccgccggcaaggggaaggcagcgaaagaccctaacaagccaaagaggcctccaagtgctttcttcgttttcatggaggagttcaggaaggtattcaacaaagaacatcctgaaaacaaagcagtgtctgctgt

SEQ ID NO: 166653 - DNA, 262 bp, Glycine max
caatcatgtacgttacgaggacgagaatagtagatacctttgcattggaagtgtagagaaggtgttatgtttgattgcgcgttgggttgaagaccccaactcagaggcatacaaacttcatttagcccgaatccctgattacttttggctggctgaagatggcttgaagattcagagttttcgtcgccagatgtgggatgcagcatttgctattcaagcaatacttgcttgtaatgtgagtgaagaatacgggcctacactt

SEQ ID NO: 166654 - DNA, 269 bp, Glycine max
caccaatcttctctccacgcccttcttgggtcaccgtctgaagtgcagcaatggcagatggattgcattcgcagcatccatcggtagttcagaagttatctggacagtcttatcttgtgtccaggcttgctcctaatcactccagaaactgttctaccactggtagttacttcaatggaggtttgcagtcttcaggtttggttccagtcacggcacacgcgccggctgagaaaggggtgtctggatttttgttggatttcctgatgggc

SEQ ID NO: 166655 - DNA, 245 bp, Glycine max
tattgatgtcatttccttgtgtatactgggagggtggaatgtaattctttttcttttttctttttttttcctttctctagtttctcttatccctgaccattgagggatttggaactaatcatctatcattgtcaccaaatcacgcacaactttacacttgtaacctgatttcaatcaaagcaaatttcaattcttgaacaaaaaaaaaaaaaataaaaaaaaaaaaaaaaaaaaggtagataaaa

SEQ ID NO: 166656 - DNA, 276 bp, Glycine max
cgggtatcggctcgagctgtatgtatattttgattatcttgatgaatctcgaattaggtttttggtgcagatgagaaatattacagctctgatatgatcaagtgtgatgatgaatcgaaatccttctccacagaccgtctggatgacaatttctgtgactgccctgatggcactgatgagcctgggacttcggcttgccccaacggaaaattttattgcagaaacctaggtagcaagccgcagtttatagtttcttctcatgttaatgatcatttt

SEQ ID NO: 166657 - DNA, 259 bp, Glycine max
cttcatccttgtttactgcactgctggaatctccgggggtcacataaacccagcagtgacatttgggctcttcttggctcgcaaggtatctttgattagagccataatgtacatggtggctcaatgcttgggagccatatgtggagttgggttggttcaggcattccaaaaggcatactacaacaggtatggtggtggagccaatgaactcagtgaagggtacagcacaggtgttggattgggtgctgagattattgga

SEQ ID NO: 166658 - DNA, 258 bp, Glycine max
gatcctgccagtagtcatatgcttgtctcaaagattaagccatgcatgtgtaagtatgaactaattcagactgtgaaactgcgaatggctcattaaatcagttatagtttgtttgatggtatctactactcggataaccgtagtaattctagagctaatacgtgcaacaaaccccgacttctggaagggatgcatttattagataaaaggtcaacacaggctctgcctgttgctttgatgattcatgataactcgtcg

SEQ ID NO: 166659 - DNA, 262 bp, Glycine max
aaatttctgaacattgaacaactcttcacacaacaaaactttcttctggcattgtagcatcatgactggcagagaaatcctccatatgatgaaggtgaaagcagggtttggaacaccagacacagggaatggaaaaggcaaaatatcaaaacacattacacatggctttcacttgatgaagggcaaatcagcgcatcctatggaagattatttagtttcagaatttaagcgagacaaggacagagaattaggcttgtttgca

SEQ ID NO: 166660 - DNA, 259 bp, Glycine max
atcaacaccattgtctacccatttacctcaatcccattgattgcttactgtacgcttcctgcattctgtcttctcacaaataaatttattattcctgagataagcaactttgccagcatgtggttcattcttctcttcgtctccatttttaccacttcaattcttgagcttaggtggagtggggtcagtatagaagactggtggagaaatgaacaattctgggttatcggtgggacatctgcgcatctttttgctgtgt

SEQ ID NO: 166661 - DNA, 264 bp, Glycine max
ctttaccagttgccacactacaccgagattcccccaaaacccgttagcgttgttgtttgcgaagaaatggcgactaagaggagcgtgggaacgttgaaggagggtgatgcgaaagggaagagggtgttcgtgagggtcgatctgaacgtgcctttggatgacaaccttaacatcaccgatgacactagagtccgtgctgctgttcccaccatcaagtacttaactggtcatggagccaaagtgatcctttctagccacttggga

SEQ ID NO: 166662 - DNA, 255 bp, Glycine max
gtacggaattcgggtcgaggagacttgtttccagatgtctcaatctatggctctggattttctactcatgtgtaagtatgaagtaattcagactgtgaaactgcgaatggcttatatagtcagttatagtttgtttgatggtatagatattcgagatactagtaatgtttctagatgtctaaaaggccagaaaattcggcatgtgcgagggtagcatgtattagatgataggttaatagaggttgtaaatatagg

SEQ ID NO: 166663 - DNA, 256 bp, Glycine max
gtcggatggaccatcctttctgacgtgtgacgcggcatcttcggacagtctctctaatcggattctgtgtattttgcgtgtgttgcatcgttttagagttggattggaagattgtgaactaagagagatggtgaagttgactatgattgcccgtgttactgatggtcttccgctagctgaaggactggatgatggtcgtgatcttaaagatgcagaattttacaaataacaagtcaaggctttgttgaagaatctc

SEQ ID NO: 166664 - DNA, 256 bp, Glycine max
aaagaatgcagtgcggcgcggcgagtggcttacatataagttataacgacaaagggtgtaagcgaaacacccattcaacattttctctgtctatctctcgttgtagcgtacgcagcagttgaatttggaaaacaagatgtctcaccgcaagttcgagcacccgagacacggttcccttggctttctcccaaggaagcgagcttctcgtcatcgcggaaaggtgaaggctttcccaaaagacaatcctagtcaacca

SEQ ID NO: 166665 - DNA, 256 bp, Glycine max
tgctaagcctagtttcgtagtgagagctgacaccaacctcgatggcggtggtgaagccaccgaggatgttccttcggataatgctgaaaaagtttcggaaggcgaacagaacaagtttcggattctgaagctccgaaatcgcctagaaaaccccgagtcaaactcggagacattatggggatattgaatcagagggcaattgaggcatccgagaagcaaagaccaactccagacattaggactggggatattgtcg

SEQ ID NO: 166666 - DNA, 256 bp, Glycine max
ctcggctggaccatccttgccgccgtttgccgcggcatctccggccactctctctcatcgccattcagtgtattttggtttagttgcaaagttttagagttggattggaagattgtgaactaagaaagatggtgaagttgactatgattgcccgtgttactgatggtcttccgctagctgaaggactggatgatggtcgtgatcttttttgatgcagaattttacaaacaacaagtcaaggctttgtttaagaatc

SEQ ID NO: 166667 - DNA, 259 bp, Glycine max
gaaaacgcgtcttcataaacgccgcccaaaacttctcatacccttttattcattccattcgtttctagggttttcttttctttgccgagaaaatgagagagtgcatttcgatccacattggccaggccggtatccaggttggaaacgcctgctgggaactctattgccttgaacacggcattcagcccgatggacagatgccgagtgacaagaccgttggcggaggagacgacgccgtcaacacatttttcagcgagac

SEQ ID NO: 166668 - DNA, 260 bp, Glycine max
  unsure (1)..(260): unsure at all n locations
atttcgtataacatttcatttcacttcacttagggtggtgcatttgcaaccctttaatttcctcacaacaatcaatatccaaaanntgnactcactagtgtttcttgtgcttgctttggctattgtgaacaaagtgcatgggcaacggacgcgtgtagggttctattcgagtacatgcccacgcgctgagtccattgttaagtccacagttacaacccatcttaattctgatagtactttggctgctgggttgcttcgga

SEQ ID NO: 166669 - DNA, 261 bp, Glycine max
ctagaatggaatttcgatgctcagtcatctcttttaccattctcttctctcttgctcttgcaggagagagccatgtccatgcatcgctacctgaggaagattattgggaagctgtttggccaaacactctcattcccactgcactgcgagagcttctaaagcctctccctgcaggtgttgaaatcgatgaactccctaagcaaattgatgatacacagtacccaaaaacattcttctataaagaagaccttcatccaggca

SEQ ID NO: 166670 - DNA, 255 bp, Glycine max
cttcttctcttgcggctaggtttagcgagttcttctagatttaaggaagatgggtaaggaaaaggttcacatcagtattgtggtcattggccatgtcgactctgggaaatctactaccactggtcacgtgatttacaagcttggaggcattgtcaagcgtgttattgagaggtttgagaaggaagctgctgagatgaacaagaggtctttcaagtatgcctgggtgctggacaaacttaaggctgagcgtgaaag

SEQ ID NO: 166671 - DNA, 257 bp, Glycine max
gcagaagccgaagaagaccaagaagaagagcgagtgctagcacggagcgaaagagagagagagacaagcattggttgctaatgatggcggaggggaacgaagagagtaaatttagcgaggaaagcgtgaagctgttcgtgggtcaagtgccgaagcgcatggcggaagatgaagtgcttgcaatgttcaaggagttcgctttggttgacgaggtcaacatcatcagagacaaagctagtcgtgcctcccgaggtagt

SEQ ID NO: 166672 - DNA, 256 bp, Glycine max
ggctgctataaatcctcgtttctccaattatacagttgaccaatttaagcgccttcttggagtctaaccaatgtctaagaaggaacttagaagtacacctgctatatctcacccaaagacgttgatcattgccaaagaattttgatgcgaggccagcttggtcgcagtgtagcactattggaagaattctagatcagggtcactgtggttcttgttgggcatttggtgctgttgaatcattgtcagatcgcttttg

SEQ ID NO: 166673 - DNA, 255 bp, Glycine max
cacacacacaaattctcaaacccaaatcccaagtctcctaaaaccctaattcgcagtgaaaatgagagaactcttgcacatccagggagggcaatgcggtaaccagatcggagcgaagttctgggaggtgatatgcgacgtgcacggcatcgaccacaccggaaagtacagcggcgactccgagctccaattggagcgcatcaatgtttattacaatgaagccagcggcggaaggtacgttccacgcgccgtcct

SEQ ID NO: 166674 - DNA, 258 bp, Glycine max
gtatgctactggtggaactcctaaccccaccatcaacagccagggcaacagatacaatgttcctactaacccttttgccaaggaggtgactaagagagtggaaacagcagaaacccaatggaagggttggaattggaggtcagagggagatttgttactgaatggggcctatttcactccatctggtgctggagcctcagccagccatgctagagcctctagcttaggagcaaaatcttcttccatggttgattccat

SEQ ID NO: 166675 - DNA, 253 bp, Glycine max
gagaaggttcaggatcttctccttcttgatgtcacccctctctctcttgggttggaaactgctggtggggtgatgacagtcttgatccccaggaacactactatcccaacaaagaaagaacaggttttctcaacctattctgacaaccagcctggtgtgttgatccaggtttatgaaggtgagagaacaaggactagagataacaacttgttgggcaaatttgaactttctggcattcctccagctcccaggg

SEQ ID NO: 166676 - DNA, 252 bp, Glycine max
gaaaccaccccgattctcaacatgtcaaccccattagatgtgggaacagatcgtcgcctttttgcaattgtcaacaatgtgatccagtcaatgaaggtgtcagtgtacttcattaacatcacttctttgtcagagttgagaaaagatgcacacacttctgtctacaccatacgccaaggaaaaatgctaactccagaacaacaagctgatcctactacttatgctgattgcattcattggtgcttaccagga

SEQ ID NO: 166677 - DNA, 253 bp, Glycine max
ctcgagccgctttctcctattcgttcttctactttctcttcatcatcagctattgttacattcgctgtgttacttcttcttacaaggacctcttcagctaccctctcaaagaacttctattctaagacatgtccaaacgttttcaacacggtaaaatctgtagtaaaatctgctgtggccaaagaacctcgcattggagcttctattgttcgcctcttcttccatgactgctttgttcaaggttgtgatggat

SEQ ID NO: 166678 - DNA, 255 bp, Glycine max
cttttattggggatgttgggttaagtgtgattagagtgaaacttgaaccgggtgctattaaggcaccatcatacccaatcaaccctacggttcagttgatttacattgctagaggaagtggcaagattgaaattgtggactttagtgggaagtgtgcattagagactcaagttgaggctggtcatttgcttgttgtgccacaattctttgtggttgcacaaattgctggggaagaaggaattgagagttactcta

SEQ ID NO: 166679 - DNA, 255 bp, Glycine max
tgaaatcctgagcttccattgtgctcactcatctcttacaacgaaaccctcttcatcttgttctatctgtgacgagcatcatggcctcaagagcagtgttattgttggctatgtgtgtgcttccggcgatggttgtggccattcgcccagcaaagaaccctttttgcgtgaagggtcgtgtctactgtgacccttgccgtgctggttttgagacctcagctaccacctacattgctggtgctgagattatgttgc

SEQ ID NO: 166680 - DNA, 256 bp, Glycine max
ccagaccagcagaggctgatcttcgccggcaagcagctcgaggacggacgtacccttgctgactacaacatcccgcaggagtcaactctccacttggtgttgcgtcttcgtggtggtatgcagatcttcgtcaagacccttacgggtaagactattaccctcgaggtggagagctccgacaccattgacaatgtgaaggcgaagatccaggacaaggaaggaatcccaccggaccagcagaggcttatttttgctg

SEQ ID NO: 166681 - DNA, 255 bp, Glycine max
gggagctctgccgcctccaacaaaacagagttcgaaacacaaaccctcgaaccgaacgtttttgagggttgatagagcacgatggttcagtacaattttaagaagattaccgtggtgccaaatgggaaggatgtggtcgacattatcctctctcgcacccagcgtcagacaccaaccgttgtgcacaaaggatatgcgatttcacggctgcgccaattctacatgcgcaaagtgaagtatactcagcagaatttt

SEQ ID NO: 166682 - DNA, 256 bp, Glycine max
  unsure (1)..(256): unsure at all n locations
ctttcttccaacctctcaagtccacactacccctttttcttctcccaccaacttcaccgatcacntcntcgatcatgtctcacttcaagggcaagtaccatgatgagcttattgtcaatgctgcttacattggcactcctggaaagggtattcttgctgctgatgagtcaacagggacaattggcaagcgtttggccagcatcagtgtagagaatgttgaatccaacaggcgtgctcttagggagctgcttttcac

SEQ ID NO: 166683 - DNA, 256 bp, Glycine max; identical to SEQ ID NO: 153016

SEQ ID NO: 166684 - DNA, 255 bp, Glycine max
atgcactcaaagagacaagcccttttcttcgaggcggacaagtagttgtcgggcgagttattcgcgggtacaggccatccagctcctatgaccttgttgaaccaatgcaatacctatttgtacgagttgtaagagctcgtttggctgggagcattgatccatatgtggaggtaaaggttggaaatttcaaaggaattaccaaacactatgagaacactcaagatcctgaccccgctcaagtgtttgcctttgcaa

SEQ ID NO: 166685 - DNA, 257 bp, Glycine max
tgggttttagcgcacttcttctagatttaaggaagatgggtaaggaaaaggttcacatcagtattgtggtcattggccatgtcgactctgggaaatccactaccactggtcacctgatttacaagcttggaggcattgacaagcgtgttattgagaggtttgagaaggaagctgctgagatgaacaagaggtctttcaagtatgcctgggtgctggacaaacttaaggctgagcgtgaaagaggaatcaccattgat

SEQ ID NO: 166686 - DNA, 260 bp, Glycine max
ggacattccggtggagacgagcggtgaaaacgtgcccccggctgtgaatacttttgcggagattgacttaggcaacgcgcttaatcagaacattagacgctgcaaatatgtgaagccaacgccggttcagcggcatgccataccgatatcccttgcggggcgggatttgatggcttgtgcgcagactggttctggaaagactgccgcattctgtttcccaatcatcagtgggattatgagaggccaagcccaagtcctcc

SEQ ID NO: 166687 - DNA, 251 bp, Glycine max
ctgccagtagtcatatgcttgtctcaaagattaagccatgcatgtgtaagtatgaactaattcagactgtgaaactgcgaatggctcattaaatcagttatagtttctctgatggtatctactactcggataaccgtagtaattctagagctaatacgtgcaacaaaccccgacttctggaagggatgcatttattagataaaaggtcaacacaggctctgcctgttgctttgatgattcatgataactcg

SEQ ID NO: 166688 - DNA, 252 bp, Glycine max
gtggagaggaagaaaaggattgaagttgttgctgtgagaaagagaaagagtgaaatcggagtttgggaaggaattgcaatcaatggatgtgataaagacgcagcaaatctcatctcgaccaatcgagaaggtggtggttcaccctctcgtgcttctcagcatcgtcgacaactacaacagagtcgccaaagacactcgcaagcgcgtcgtcggcgtcttgctcggctcctccttcaaaggcaccgtcgacgt

SEQ ID NO: 166689 - DNA, 250 bp, Glycine max
gttggagggtgcatggctctgttccgtggcatttcgggtggggaacggaaacgggtcagtatcgggcaggcgatgttggtcaacccgagtttgttgtttgttgatgagcccacctcgggcttggactccaccacggcccaacttattgtgtcggtgctccgcgggctcgccttggcgggtcgaaccgtcgtcaccaccatccaccagccctccagccggttgtataggatgtttgataaggtggtcgtgt

SEQ ID NO: 166690 - DNA, 253 bp, Glycine max
atcagctacaaaattggcacacaagttctatccaattattaaagccacagatgctaaattggcgagtgcaagagctgaagacgcggtgctgtgccagaatgggaccctggatcccaacaaggcgaagggaaagatcgtggtgtgtctccgaggaataaatgcaagagtggacaagggagagcaagcttttctagctggtgctgtgggaatggtccttgctaatgacaagactactgggaatgaaattatagcg

SEQ ID NO: 166691 - DNA, 252 bp, Glycine max
cggctcgaggatgatactatcaaacaatgaagactatggggaagagttagttgctgactcctatctcctccctgcagcagctttgggccagaaatcaagcaatgagttaaagaagtatgttttctcatctcccaatcccacagctaagcttggatttggtggcacccaattaggggttcaaccatccccagtggtggcagctttcagctcaagagggccaaatgtgctcacaccaaaaatactcaaaccaga

SEQ ID NO: 166692 - DNA, 254 bp, Glycine max
caggaagggggagaatctggagttgtggttgctatgctgagaggttatgcacttgcatgttttgcggtacttggtgggacatttgcctggggtatcggctcttcgtcaccagcatcaaaacgacggccaaaggtccttgagattcatttagaatttcttgcaaatgcactagatggaaaaatatctcttcgctgtgattgtgctacttggcgtgcgtatgtgtctggggttatgagcttgatggtgagttgcac

SEQ ID NO: 166693 - DNA, 256 bp, Glycine max
atttaatttcacagcgattaattatttatagttaagtgtggagtgcagtgcaggtcttggcctgagattcggttctttacttgttgggttgttctgatcttctctcatagcaatcatatcacactcccatcttctcatctcgtaaaccctttaccccgttttcagtgacatcgagatcgatcgaacatggatgaggagtacgatgtgatcgtgttgggcacgggtctcaaggagtgcattctcagcggtcttctct

SEQ ID NO: 166694 - DNA, 250 bp, Glycine max
acagactttatcatcaccagcaccttccaagagattgctggaagcaaggacactgttggacagtatgagagtcacactgccttcacccttccaggactttaccctgttgttcacggtattgatccatttgatccaaagttcaacattgtctctcccggtgcagacatgggcatatacctcccatacactgaaactgagcgtaggttaacagaattccactctgacatcgaagagcttctttacagctcag

SEQ ID NO: 166695 - DNA, 250 bp, Glycine max
gcaaacgcagcattgggagatagaaagagagagagaaagagagagagagaaagacccttacccttctctatcgctcgctttcctttgacgcttctgacccttgctttgtctgcgtcttcctactttctttctttctttctctgtgtgtacgaatggctctcccagactcttcttcccgtcgcaactccctgatcccctccttcatctactcctcttcctccaaaacgctccctctccaccacatgctcaa

SEQ ID NO: 166696 - DNA, 248 bp, Glycine max
cctcgagccgaatcggctcgagcgagatcccagatctcaccatctttcacgcactcttccatcacattcaccctttcgtttaaagcaaactcataacttgaaggttaatggctgctccaccggcaagggctcgtgccgattacgattatctcataaagcttctcttgatcggtgacagcggtgttgggaaaagttgcctccttctgcgtttctccgatggttctttcaccactagtttcatcacaact

SEQ ID NO: 166697 - DNA, 247 bp, Glycine max
ctagaatggaatttcgatgctcagtcatctcttttaccattctcttctctcttgctcttgcaggagagagccatgtccatgcatcgctacctgaggaagattatcgggaagctgtttggccaaacactcccattcccactgcactgcgagagcttctaaagcctctccctgcaggtgttgaaatcgatgaactccctaagcaaattgatgatacacagtacccaaaaacattcttctataaagaaga

SEQ ID NO: 166698 - DNA, 252 bp, Glycine max
gattctggtgaatgcgtagaaaaggaaaataaagaaattagcgtgaaaaatgttgggtgtgttcagcagctccatagtgtcgccgccggaggagctcgttgccgccggcagccgtacaccgtcgccgaagatgacggcggcggcgctgcggaagtggttcgaggagaagaacccctccgcagtgtcggtggaggtcggagagcatgtccagctcgcttatacccaccagaacgagtcgccgtttcagcccag

SEQ ID NO: 166699 - DNA, 252 bp, Glycine max
  unsure (1)..(252): unsure at all n locations
ctttacacaacatattattgnaaggctagctagctagccatggctgantcggacaacgagtccggaggtcacacggggaacgcaagcggaagcaacgaattctccggttgcagggagcaagacaggttccttccgatagcgaacgtgagcaggatcatgaagaaggcgttgccggcgaacgcgaagatctcgaaggaggcgaaggagacggtgcaggagtgcgtgtcggagttcatcagcttcataacagga

SEQ ID NO: 166700 - DNA, 250 bp, Glycine max
ccgaaactggcacaaaggtttatcgggtaccattcaatgccacagttcaggttgtgctgcaagatactggaatcattgcacctgagaaccacccagttcatcttcatgggttcaatttctttgttgttggaagaggagtaggaaatttcaaccccaaaattgaccctaagaactttaaccttgttgatcctgttgaaaggaacactattggagtaccagctggagggtggactgcatttagatttagagc

SEQ ID NO: 166701 - DNA, 252 bp, Glycine max
cctcgagccgaatcggctcgagattttacactcttttcttcttctcgctgttgcttcggtgttgaatcatggatcagaaagtcgatttcagtgctccgcattccatgggaaccactatcatcggcgttacttacaacggcggtgtcgttctcggagccgactctcgaaccagcactggagtgtatgttgccaaccgagcatcggacaaaatcacacagctcactgataatgtttacgtgtgtcgctctggat

SEQ ID NO: 166702 - DNA, 252 bp, Glycine max
gaagaagacgaagaagaagaatggagaagtcagggaagagagtgttgcttacctccaacgacgacatttctcaaggcattgccttccatttggtgaagcaagggtgcaggttggttttgctgggagatcagaattccctgcggagcatcgcgaacaaaatcatggattccctctccctcgcagacagaggcaccgtgcaggtcgttggattggacatggaggatcaaagcgaatcgactttccatcattccg

SEQ ID NO: 166703 - DNA, 253 bp, Glycine max
gtaggtttgtcggtggtacagaccaaggatccggaatggttctttttctgtccacaggaccggaagtatccaaatgggcatcgattgaacagagcgacaaataatgggtattggaaggcaacggggaaggatcgtagaatcaagtctgggaaggatttaattggaatgaagaagactttggtgttctacactggtcgtgcacccaaagggaataggaccaattgggttatgcacgagtatcgtcccactttga

SEQ ID NO: 166704 - DNA, 253 bp, Glycine max
atcctggaggggccttcacctgacaaattagctcctcttgttaaccatgccttaccatttatgcttagtgcctcagtgaaggacccaaacaaccatgtgaaagacaccactgcttggactttgggacgaatgttcgaatttcttcacagttcagttgttggtacatcaattattaatgagggaaattgccaacagattattactgttctccttcaaagcatgaaggatgttcccaatgttgctgagaaggcct

SEQ ID NO: 166705 - DNA, 255 bp, Glycine max
ttttctttgaaacgcacagcttcaatcaccgaccacaccacccatcaacgacatgcttcctctttcccttctcaagactgcccaaggccaccctatgttggtggaactgaaaaatggggagacatataacgggcatttggttaattgcgacacatggatgaacatccatctgcgagaagtcatttgtacatctaaagacggagatagattttggaggatgcctgaatgctacatacgaggcaatacaatcaagta

SEQ ID NO: 166706 - DNA, 268 bp, Glycine max
agcccttacaccttgcagaatcatctctacattcccaagggctcctactacgcaataactccaagcccgatctcaaattaatatttcatttactcatcttaatcaatattaaataagaaaagatgggagagatgtcaaacttccaattgggtgtgattggtgcactatttctctctgtggcttcttctgtctccattgtcatctgcaacaaagccttgatgagcaatcttggcttcccttttgccacaacgcttactagttggcattt

SEQ ID NO: 166707 - DNA, 266 bp, Glycine max
gagagtccccagctcaactctctagttgttgttgctgcatttttcattttctaggcttagtcattagatagaaagagaaggaaaaaaaggctattatggcaggaggaggagctccagctaaagcagatgagccacagccacatccaccaaaggatcagttaccacatatttcttactgtattactagtcctcctccatggcctgaggccatacttcttggttttcaacattttcttgtgatgcttggcacaactgtgttgattccc

SEQ ID NO: 166708 - DNA, 266 bp, Glycine max
ttcagttccaaacaaaacccatcacaatctttctccctcagtgatcatatattcattcagttctatacaaaatcctcaaaaactcttcctctctgccatgaccatggaatacagaaccttagaactcaacatcatatccgcaaaggacatcaagaatgttaatctcttctccaagatggacgtatacgccgccgtttcgctctccggtgaccctctccaccctcagggcgccaccacccacgtccacaaagacgccggcagcaacc

SEQ ID NO: 166709 - DNA, 270 bp, Glycine max
tgcactttcactcgaagaaccttgaagcgagtctgggccacagcaaccagcgacaacaactcaatcagctagggttgctttgcttgctatcttgttggaggattttctgttcaagagaagatggtaactagaattgtggatcttcgttcagacacagttacaaagccaactgaagcaatgagagctgctatggcaagtgctgaagttgatgacgatgttctaggctatgatccaactgcttttcgcttagaaacagagatggcaaagaca

SEQ ID NO: 166710 - DNA, 269 bp, Glycine max
  unsure (1)..(269): unsure at all n locations
aaaagctttaaaattagtaggtgatgtgcatgccagtaaatctagtggcagggaaaagtgtaaaaaattctacgagtctgctataagactggaacctggttaccttagagntgcactagctttggctgagctccatgttatcgagggtcgaaatggagatgctgtgtctctgcttgagcgatatcttaaagactgggctgatgattctcttcatgtaaaacttgcacaagtttttgcagccactaacatgctgcaggaggctttgtcac

SEQ ID NO: 166711 - DNA, 259 bp, Glycine max
gaaagcataatgttgagactaacaaggttcaaaacaaagaaagggaaaagttatagttggccaatcaagagaaattccacaaagaggctgacaaaaattactggaaagccattggggagatcattcctcgtgaagttcccaacattgagaagaaaagaagcaaaaaggatcaggagaataagccgtcaatcacagttgtccaaggcccaaagcctgggaaacccacagatctttctaggttgaggcagatattgttgaa

SEQ ID NO: 166712 - DNA, 264 bp, Glycine max
cagactgccaggaagagagagggagattctttgtttgctaccttctctcggaaaaatggttacgttcaggtttcaccagtaccaggtggttgggagggctcttcccacggaagcagatcagcaccccaagatctaccgaatgaagctctgggccaccaacgaagttcgcgccaagtccaagctctggtcttaactgaggaaactgaacaaagtgaagatgagcaatcgccaagtgcttgccagcaacgagatctttcagaagaa

SEQ ID NO: 166713 - DNA, 264 bp, Glycine max
  unsure (1)..(264): unsure at all n locations
atttcgtataacatttcatttcacttcacttagggtggtgcatttgcaaccctttaatttcctcacaacaatggacacacgtagtttgtcntcactagtgtttcttgtgcttgctttggctattgtgaacaaagtgcatgcgcaagggacgcgtgtagggttctattcgagtacatgcccacgcgctgagtccattgttaagtccacagttacaacccatctgtattctgatagtactttggctgctgggttgcttcggatgca

SEQ ID NO: 166714 - DNA, 264 bp, Glycine max
ctcgagccgctgaggtgaatgatgaggatgatgacgaggaaggcagtggcgaggaggaagatgacgattagagaatggactgatgataatagcatttatgtaggttctgatgattttgatcatccgtgtaggtggtctggtcatttccttataaacatatttctctttccaaaaaatatttccctgctcctccttccgtaaattgctcgtctttccaaaacgtgaatagtttaaagaagggagttctctttatttgtatttcta

SEQ ID NO: 166715 - DNA, 268 bp, Glycine max
agtgtctctcaggccatttctgcacaggaggccaatacagcgcaacaacaactggttacctcccccatgggcaatagttgctttggttattctgggatttaatgaatttatgacacttctaagaaatcccttgtatttgggtgtaatctttgttggttttcttctcattaaagccctatgggtgcagcttgatgtttcgggtgaatttcgcaatggagctcttccaggaatcatatccttgtctagcaagtttattccaactatcatg

SEQ ID NO: 166716 - DNA, 271 bp, Glycine max
ctttctctcttctctctctgtccgaagatggcttcacgcaggttcgtatcttctctgattcgatcctcccttcgtagatctcaatcgaaaccctcgatttccgcatccgcatcgagtctcacgtcatccaaccgtgcctctccgcacggttacttgctgaaccgcgtcgccgaatacgctaccgcggcggcggctgctaccgatcctcctgctgctccgcctccgggcaagaaggaggttagcggcggcgggaagatcaccgatgagttca

SEQ ID NO: 166717 - DNA, 284 bp, Glycine max
cggaattcggctgaccaagattgccgcagtcttgcccatgattcaggccttgaagctgaatatattcttgcagggtgtggtgcagatgagcttattgatttgatcatgcgttgtgtgctggatcctggagacaagattgtggactgccctccgaccttcacaatgtatgaatttgatgctgcggttaatggagcacttgttatcaaagttccaaggaggccagatttcagcttgaatgttgaacaaattgctgaagttgttaaacaagagaagcccaaatgcat

SEQ ID NO: 166718 - DNA, 263 bp, Glycine max
ctcgagccgggaagattatgtccacagaattggtcgaactggtcgtgcaggggctaaagagaactgcatacaccttttttacacatgccaatgccaagtttgctagggatctgattaagattttacaagatgctggtcaggttgtgagtcctgctttgtctgcattggttcggtcggctggttctggtcaatttggatcagggggaagttttcgctcaagaggacgaggaggctatggaaatcgaggtttaacgtcaggttcc

SEQ ID NO: 166719 - DNA, 264 bp, Glycine max
cacttaactagtaatatttattagaatttgctagagaattagaagaataaacataataccccagatggcttcaaaaacttgttcctcccttgcccttttcctcacactcaacctcgttttcttctcacttgtctctgcatgcggttatacaccatgccctggtccaaacccaaagccaaggcccaaccccaaccctaaccctaaccccagcccaagtggctcgtgcccccgtgacgcactcaaactaggtgtatgcgccaatgt

SEQ ID NO: 166720 - DNA, 265 bp, Glycine max
ttacaacacatatttctttcccttttccctttttcctaggcaccgcacacgccctctcaactagaaactgagagatgaattctgatcagtttcagaagaacagcatgttcgtagaaacccctgaacatggtggcaaaaacttcgacgatgatggacgagtcagaagaacgggtacatggataactgcgagtgcccatatcataacggcagtgatagggtcaggagtgttgtcacttgcatgggcaattgcacaaatgggttgggt

SEQ ID NO: 166721 - DNA, 262 bp, Glycine max
tgttaatatgcatcagggtattggcaatggtttgccattagcagctgtagttacaactccagaaatagcgagtgtgatggctcaaaagcttcaatttaatacttttggagggaaccctgtatgttctgccgggggacttgctgtgctcagagttcttgacaaggagaagcgtcaatctcattgtgctgatgttggttctcacttgattcagcgtttaagatccctgatgcaaatacatgacatcattggagatgtaagagga

SEQ ID NO: 166722 - DNA, 259 bp, Glycine max
  unsure (1)..(259): unsure at all n locations
cttttgtgtggggaattatggtaattgattttnagggtttgantactcatggattatgatggtatgagaaaaccttccaaaaacttatttcactctcgcttcttcctttttgggttctattgctgggattgggagttcttgaccgctctcctcctttttagttcttccccttaatcttctttcttcacaatttttatttcctcctattagacgtattagatcagattgaacaaaagggtttttcttctttctttcttgg

SEQ ID NO: 166723 - DNA, 261 bp, Glycine max
cgcttctcttctctgcagcaactatgcctaaccctaaggtcttcttcgacatgaccatcggcggtcaatctgctggccgcatcgtgatggagctctacgccgacgtcactccccgcaccgccgagaacttccgtccgctttgcaccggcgagaagggcgtagggcggagcggcaagcccctccactacaagggctcgtccttccaccgcgtgatcccgagtttcatgtgtcagggtggcgacttcaccgccggaaacggaa

SEQ ID NO: 166724 - DNA, 264 bp, Glycine max; identical to SEQ ID NO: 120875

SEQ ID NO: 166725 - DNA, 251 bp, Glycine max
gctccctcagaagcgaagaagaagccacagagaactagtctcctactctcacccgcaagaaaaaaatggcatctcacatcgttggatacccccgtatgggtcccaagagagagctcaagttcgctctcgagtctttctgggatggcaagagcagcgccgaggatttgcagaaggtgtcttctgatctcagggcatccatctggaagcagatggctgatgctgggatcaagtacatccccagcaacactttc

SEQ ID NO: 166726 - DNA, 264 bp, Glycine max
gaacaattggaggaagcaatgtgaagtagtagaacagttaaggctgctgctgagggatgacgaggaagccaggatttttatgggggcaaatgggtttgttgaagcacttttgcagtttttgcaatcagctgtacgtgaaggtagtttgatggctctggaaagtggagcaatggctctcttcaacctggctgtgaataataacagaaataaggaaattatgttatcggctggagtattatcattgttggaggaaatgattcctaa

SEQ ID NO: 166727 - DNA, 266 bp, Glycine max
  unsure (1)..(266): unsure at all n locations
gtacaatttgaggacataatgtgaagtagtagaacagtttaggctgctgctgagggatgacgacagatncaggatttttatgggggctcatgggtttgttgaagcacttttgcagtttttgcaatcagctgtacgtgaaggtagtttgatggctctggaaagtggagcaatggctctcttcaacctggctgtgaataataacagaaataaggaaattatgttatcggctggagtattatcattgttggaggtaatgattcctaaaa

SEQ ID NO: 166728 - DNA, 272 bp, Glycine max
ctctaattacactttctatctcaattccaatctcattttcgttcggttcaaacactctcatggcatcagacacgaagattaggatcggcatcaacggatttggaaggattcgccgtttggtggacagggttgctcttcagaggaatgacgttgaacttgttgctgtcaacgatcctttcatcaccactgattacatgacatacatgttcaagtacgacaccgttcatgggcagtggaagcattttgatgtgaagctgaaggactctaagacc

SEQ ID NO: 166729 - DNA, 260 bp, Glycine max
gcttggaatgggtggttctctagtatagcaaaaaactgccaagacttgtgactgtggttcacctagatcaactctgaagtgctggaaagaggaagatgaagaagagtagttttcttaagtgtctttattatgtccttgcgaaaataagtccggttttccagacagtgattgtttttctttggtgttttttcccttttatgttagaccattgttagggcgtttggaccttttattgttctactattaccatttgaacatcg

SEQ ID NO: 166730 - DNA, 258 bp, Glycine max
gagcgtgacgtacatgcctcgaccgggggacggtgcgccgcggggggtgacgctgataccgggggacggaattgggcctcggtgactcatgcggtggagcaggtgatggaggcgatgcacgcccccatatacttcgagaagtacgatgtgcacggggacatgaggcgtgtgccggaggaggtgctggattcgatacggaagaacaaggtgtgcttgaagggtggtttgaggactccggtgggtgggggtgtgagctcc

SEQ ID NO: 166731 - DNA, 261 bp, Glycine max
gtttttaaaacatgctctttttatctaagttttttccttttaagtgatcaaagtttctccataagaggtgtattggtaatccctgcagttgcctgaaaaattgttcagaagcttggacactgtaactcgtatgttaagattcacagcaccttttccacttcttgcatttcctgtgtaccttgtaagttattctgctttgaccataatttgaacattaattactctttagtcttggtagaagaattgacatggtggctgttg

SEQ ID NO: 166732 - DNA, 257 bp, Glycine max
gacaaatggcaacaagcgaagaagtggttgccgcggcgcggaggagcccgctggaggcagggctgaagcacaaactggagagaaaatggacgttttggtgcgacaaccaatccaaacccaaacagggcgctgcttggggtacctctcttcgcaaggtctacaccttcgacaccgttgaagagttctgtttgtatgatcaggtattcaagcccagcaagttgcaaatcaatgcggattttcacttgttcaagactggg

SEQ ID NO: 166733 - DNA, 262 bp, Glycine max
gaaaaaagcgatcatagtttcacttcggccttatccagtttagggtttcggttctctaccctatctttcacgtatcgaaaccttaaatttacgatcaggtctgagcaatctggttggtagaacctttggtcttagtgagtcaagttttatgtctgaattagacgatcaaattcctactgccttcgatcctcttgctgatgcaaatgctgatgactcgggtgctgggtcaaaggagtatgtgcatattcgtgtacagcagcga

SEQ ID NO: 166734 - DNA, 266 bp, Glycine max
atggaatttcgatgctcagtcatctcttttaccattctcttctctcttgctcttgcaggagagagccatgtccatgcatcgctacctgaggaagattattgggaagctgtttggccaaacactcccattcccactgcactgcgagagcttctaaagcctcaccctgcaggtgttgaaatcgatgaactccctaagcaaattgatgatacacagtacccaaaaacattcttctataaagaagaccttcatccaggcaaaacaatgaa

SEQ ID NO: 166735 - DNA, 265 bp, Glycine max
gttttgggtcatcgtttgttggttgcagagcagcgaggtgtttagtgtgcaattgttgacaaattaatggcggaaattgtagggcctcgcttgtactgctgttgtaattgtagaaaccaagtctcccttcacgatgatataattgctaaaacctttcagggaagatatggccgaggttttctgttctcccatgcaatgaatattgtggtagggccaaaagaagacaggcacctcatgactggcctccacaccgttgctgatgttt

SEQ ID NO: 166736 - DNA, 253 bp, Glycine max
ggagggtatacctacgtgtgagcacaacacttggctccacatcagcgtgcttaccacgtggtgacatgagaaattctaggagttgtgtattgaagtgagcaagctgctgctggtgctggagtttagggatgagggtttattttattggcagggttacatgagtttgtgatgatgtgttactgtgtttctttaggtttgaataaatgatatttactttataacttaaaaaaaaaaaaaaaaaagggcggccgcc

SEQ ID NO: 166737 - DNA, 270 bp, Glycine max
ttaccaaactcactcatcaattctcatctttcttctcactaactattaattcatcatgtcgagcacagctggccaagtcatcaaatgcaaagctgcggtttcatgggaggcaggtcagccacttgtgattgaagaagtagaggttgcgccaccacaagctggtgaagtgcgtttgaagatcctctacacctctctttgccacactgatgtttacttctgggaagctaagggccaaactccattgtttcctcgtatatttggtcatgaagc

SEQ ID NO: 166738 - DNA, 268 bp, Glycine max
atcgaggtagcatgatctcgcaattcttcgttctgtcacagcgtggcgataagatcgtttttcgagattatcgtggtgaagtgcagaagggaagtgcggagatatttttccgcaaagtaaagttttgggaagatgggggactgcaggaggcaccacctgtctttaatgtggatggagtaaattactttcatgtgaaagttgttggcttattgtttgttgcaactacaagggttaatacatcaccttcttttgtcttggagcttgtaca

SEQ ID NO: 166739 - DNA, 261 bp, Glycine max
accattactcagcactgccactcttcaatcacactaatggctgtcaccttctcagatcttcacaccgaagagggcatcaaatccctcgatcaattcctttctgggaaaacctatatctctggggatcaattgacaaaggatgatatcaaagtgtatgcagctgttgtggaaaagccaggagactcttttcctaatgctgctaagtggtacgatgccgtctcttctcaacttgctccaagcttccctgggcacgctcaaggg

SEQ ID NO: 166740 - DNA, 261 bp, Glycine max
acagcatcgaaatttccctatacttgcttccgcaaggcaagaattctacagtactcgccgataaggggttttccaaagcaggagcaatgtcttcctcttatcttcctgccacaactgagtcccttgctctggcaaatgaggccaaagacccatctgaggccatctccattctttatcgggtacttgatgatccttcttcttcaccagatgctttgcgtatgacagagcaagcaatcacaaacctcactaagcttctcactg

SEQ ID NO: 166741 - DNA, 253 bp, Glycine max
aaacttttctcccttgagatccacatttcttgatcttagtactggcagtcattcctatctgcgtgcattttcatctgctccggtgatatcttttgccattgaaagaggttggactgagtcatcaagtgcaaatgtaagaggcctgccagcattgcctctcagactgccacaattggatgaaaggctcagagctggttataagtcaacaactgccgggaaatttaccgaggctcttaaggcattcaccagtatt

SEQ ID NO: 166742 - DNA, 262 bp, Glycine max
tgcaattctaaaagctttcctcagctttatgttctaaaagtttggaagctggaacaattgaaggactgggaagtaaagcaacaagcacttccctctcttagacaactggaaatccgatcatgtctgcgcatgacaaagcttcctgatggactaaagcatgttaacagtctccttgagttgaaattgacaaatatgccagtggaaattaatactgacaagcataacattccgcccaattgtgaagtccacagagatgactccg

SEQ ID NO: 166743 - DNA, 263 bp, Glycine max
ctcgagccgctcttcttcagtggtggaagctactagaacactagtttgttgagcactgcgatgaggaagtggacggttgcttccgctctccttcttctctctctcctctttctctttgcagatcaaggtcgaaagtttcaggcgaatgccgagtcagattccgacgagcttgtagatccacccaaggtggaggacaagatcggtgctgtgcctcatggcctttcaaccgattcagctgtcgtcaagagggaggcggagtcgat

SEQ ID NO: 166744 - DNA, 263 bp, Glycine max
caaaataaaaccaaacctttcttcctactactcccattcccacatttcgacaacaccgacgagcccttcgacatgccgacggcggaggcaatgggcgaggacttcgacttcgccggcgccaccggcggcgacctcgacggcagcagcagcaaccccatcttgaaggtcggcgaggagaaggagattggaaaagagggtttgaagaagaaactacttaaagaaggtgaaggatgggacatcctgaagtcggtgacgaattcaag

SEQ ID NO: 166745 - DNA, 267 bp, Glycine max
  unsure (1)..(267): unsure at all n locations
cagaacatagcttgtgttggtgaggtgagaagatnnagaaagaatgggcatttgcaggaacaaacacagaagtgtatggcctgtgaccaaaacccgtttatctggttgataagttgacccgcggataaccgagttttccacaaagcttgcttcagatgcccatcactgcaaaggaaccctcaagctgagnactacaaccttttgagggagttcttattgtaagccacacttgaccaactgttcaaaagaacagggagccttgacnaa

SEQ ID NO: 166746 - DNA, 275 bp, Glycine max
gggattttgagagatggcatcgactaagaagatcaccctgaagagttcggacggtgaggccttcgaggtggaggaggcggtggcgctggagtcgcagacgatcaagcacatgatcgaggacgactgcgccgacagtggaatccctctccccaatgtcaccagcaagattctggcgaaggttatcgagtactgcaagaagcacgttgaggcgaacagtgctgatgagaagcccagtgaggatgtgctcaaggcttgggacgtggatttcgtcaacg

SEQ ID NO: 166747 - DNA, 275 bp, Glycine max
gaaacaaggagaaagaaagaagatggtaggaaagaaaatcccagatgtgttgctgaattcaggacacaaaatgccagttataggcatgggaacttcagtggagaatcgtccatcaaatgagacccttgcttctatctatgttgaagccattgaggtgggttaccgtcattttgacactgctgcagtgtatggaacagaggaagccataggcctagccgtggccaaagccatagacaaaggccttataaagagtagagatgaagttttcatcactt

SEQ ID NO: 166748 - DNA, 233 bp, Glycine max
caaagattaagccatgcatgtgtaagtatgaactaattcagactgtgaaactgcgaatggctcattacatcagttatagtttgtttgatggtatctactactcggataaccgtagtaattctagagctaatacgtgcaacaaaccccgacttctggaagggatgcatttattagataaaaggtcaacacaggctctgcctgttgctttgatgattcatgataactcgtcggat

SEQ ID NO: 166749 - DNA, 275 bp, Glycine max
attccattctctctgtgtatttccctacctctcccttcaagatgcagatcttcgtcaagaccctcaccggcaagaccatcacccttgaggtggaaagctctgacaccatcgacaacgtcaaggccaagatccaggacaaggaaggaatccccccggaccagcaacgtctcattttcgccggaaagcaacttgaggacggccgtacccttgctgactacaacattcagaaggagagtactcttcacctcgtcctccgtctccgtggtggcatgcag

SEQ ID NO: 166750 - DNA, 276 bp, Glycine max
  unsure (1)..(276): unsure at all n locations
cttgcttggcttggacaacacatcgccaacctttgcatcagcgattcagaactctgtcncaggcattacatttctcatggcagtcatactcaggatagagcaagtcacgctgaacagaaaggatgggatagcgaaggttgcgggatcgatattctgtgtggctggggcgacggtgattacactatacaagggtccaacaatatatagcccaagtctacctctacagagtgagagctcagtagtagttgagtttgggacactctcatcactgggaga

SEQ ID NO: 166751 - DNA, 271 bp, Glycine max
atggaacgctctgcatgctttgagaagcaggatttctgatcccaacaatgtgttgcagagttgggaccttacactggttaatccctgtacttggttccatgttacttgtgactccaacaatcatgtgattcgcttagacttgggcaactctaacgtttctgacaactctgggcccggaacttggccagctacagcatctgcagtacttggagctctacaggaatgagttaacagggaagattcctaaggaacttggtaacttgaaatcact

SEQ ID NO: 166752 - DNA, 273 bp, Glycine max
cgggaacctcttgactctggagaagaaaacccgcgtttccttgggtagtcgaaaggaagcagaatgggatccaaaattcttccaaaatgggcatcgaagccttgcgtaatgggaatcgacgaagctggaagacgccccgttttagggcctatggtctacggttgcttatactgctctcagtcctatctgaagaccctttccacgttgagttttgcagattctaagacactcaaggaagagaagagggaagaattgtttgaacctttaaaactc
